United States Patent Application Publication US 2005/0118625 A1 - sequence listing, part 2

SEQ ID NO: 1444 - DNA, 1396 bp, Homo sapiens
gcgtaattaaaaggcggcggaagaaggtgggagggtcatgacgcagcgagtttcagtcgtgacttttctgggggcatcgcggcgtccccttttttttgcctttaaagtaaaacgtcgccccgacgcaccccccgcgtatttcggggggcggaggcggcgggccacggcgcgaagaggggcggtgctgacgccggccggtcacgtgggcgtgttgtgggggggaggggcgccgccgcgcggtcggttccgggcggttgggagcgcgcgagctagcgagcgagaggcagccgcgcccgccgccgcccctgctctgtatgccgctctctcccggcgcggccgccgccgatcacagcagcaggagccaccgccgccgcggttgatgtggttgggccggggctgaggaggccgccaagatgccgcagtccaagtcccggaagatcgcgatcctgggctaccggtctgtggggaaatcctcattgacgattcaatttgttgaaggccaatttgtggactcctacgatccaaccatagaaaacacttttacaaagttgatcacagtaaatggacaagaatatcatcttcaacttgtagacacagccgggcaagatgaatattctatctttcctcagacatactccatagatattaatggctatattcttgtgtattctgttacatcaatcaaaagttttgaagtgattaaagttatccatggcaaattgttggatatggtggggaaagtacaaatacctattatgttggttgggaataagaaagacctgcatatggaaagggtgatcagttatgaagaagggaaagctttggcagaatcttggaatgcagcttttttggaatcttctgctaaagaaaatcagactgctgtggatgtttttcgaaggataattttggaggcagaaaaaatggacggggcagcttcacaaggcaagtcttcatgctcggtgatgtgattctgctgcaaagcctgaggacactgggaatatattctacctgaagaagcaaactgcccgttctccttgaagataaactatgcttcttttttcttctgttaacctgaaagatatcatttgggtcagagctcccctcccttcagattatgttaactctgagtctgtccaaatgagttcacttccattttcaaattttaagcaatcatattttcaatttatatattgtatttcttaatattatgaccaagaattttatcggcattaatttttcagtgtagtttgttgtttaaaataatgtaatcatcaaaatgatgcatattgttacactactattaactaggcttcagtatatcagtgtttatttcattgtgttaaatgtatacttgtaaataaaatagctgcaaacctcaaaaaaaaaaaaaaaaaaa

SEQ ID NO: 1445 - DNA, 589 bp, Homo sapiens
ctccgccctctcccactctctctttccggtgtggagtctggagacgacgtgcagaaatggcacctcgaaaggggaaggaaaagaaggaagaacaggtcatcagcctcggacctcaggtggctgaaggagagaatgtatttggtgtctgccatatctttgcatccttcaatgacacttttgtccatgtcactgatctttctggcaaggaaaccatctgccgtgtgactggtgggatgaaggtaaaggcagaccgagatgaatcctcaccatatgctgctatgttggctgcccaggatgtggcccagaggtgcaaggagctgggtatcaccgccctacacatcaaactccgggccacaggaggaaataggaccaagacccctggacctggggcccagtcggccctcagagcccttgcccgctcgggtatgaagatcgggcggattgaggatgtcacccccatcccctctgacagcactcgcaggaaggggggtcgccgtggtcgccgtctgtgaacaagattcctcaaaatattttctgttaataaattgccttcatgtaaaaaaaaaaaaaaaaaaaaaaaaaaaaaaaa

SEQ ID NO: 1446 - DNA, 2856 bp, Homo sapiens
gtaaccgctactcccggacaccagaccaccgccttccgtacacaggggcccgcatcccaccctcccggacctaagagcctgggtcccctgtttccggaggtccgcttcccggcccccagattctggcatcccagccctcagtgtccaagacccaggcagcccgggtccccgcctcccggatccaggcgtccgggatctgcgccaccagaacctagcctcctgcagacctccgccatctgggggcactcaacctcctggagccaagggccccacgtcccacccagagaaactctcgtattcccagctcctagggccaaggaacccgggcgctccgaactcccagctttcggacatctggcacacggggcagagcagagaagctcagcgcccagcctggggaatttaaacactccagcttccaagagccaaggaacttcagtgctgtgaactcacaactctaaggagccctccaaagttccagtctccaggtgctgttactcaactcagtcctaggaacgtcgggtcctgggaaggagcccaagcgctcccagccagcttccaggcgctaagaaaccccggtgcttcccatcatggtggccgatcctcctcgagactccaaggggctcgcagcggcggagcccaccgccaacgggggcctggcgctggcctccatcgaggaccaaggcgcggcagcaggcggctactgcggttcccgggaccaggtgcgccgctgccttcgagccaacctgcttgtgctgctgacagtggtggccgtggtggccggcgtggcgctgggactgggggtgtcgggggccgggggtgcgctggcgttgggcccggagcgcttgagcgccttcgtcttcccgggcgagctgctgctgcgtctgctgcggatgatcatcttgccgctggtggtgtgcagcttgatcggcggcgccgccagcctggaccccggcgcgctcggccgtctgggcgcctgggcgctgctctttttcctggtcaccacgctgctggcgtcggcgctcggagtgggcttggcgctggctctgcagccgggcgccgcctccgccgccatcaacgcctccgtgggagccgcgggcagtgccgaaaatgcccccagcaaggaggtgctcgattcgttcctggatcttgcgagaaatatcttcccttccaacctggtgtcagcagcctttcgctcatactctaccacctatgaagagaggaatatcaccggaaccagggtgaaggtgcccgtggggcaggaggtggaggggatgaacatcctgggcttggtagtgtttgccatcgtctttggtgtggcgctgcggaagctggggcctgaaggggagctgcttatccgcttcttcaactccttcaatgaggccaccatggttctggtctcctggatcatgtggtacgcccctgtgggcatcatgttcctggtggctggcaagatcgtggagatggaggatgtgggtttactctttgcccgccttggcaagtacattctgtgctgcctgctgggtcacgccatccatgggctcctggtactgcccctcatctacttcctcttcacccgcaaaaacccctaccgcttcctgtggggcatcgtgacgccgctggccactgcctttgggacctcttccagttccgccacgctgccgctgatgatgaagtgcgtggaggagaataatggcgtggccaagcacatcagccgtttcatcctgcccatcggcgccaccgtcaacatggacggtgccgcgctcttccagtgcgtggccgcagtgttcattgcacagctcagccagcagtccttggacttcgtaaagatcatcaccatcctggtcacggccacagcgtccagcgtgggggcagcgggcatccctgctggaggtgtcctcactctggccatcatcctcgaagcagtcaacctcccggtcgaccatatctccttgatcctggctgtggactggctagtcgaccggtcctgtaccgtcctcaatgtagaaggtgacgctctgggggcaggactcctccaaaattatgtggaccgtacggagtcgagaagcacagagcctgagttgatacaagtgaagagtgagctgcccctggatccgctgccagtccccactgaggaaggaaaccccctcctcaaacactatcgggggcccgcaggggatgccacggtcgcctctgagaaggaatcagtcatgtaaaccccgggagggaccttccctgccctgctgggggtgctctttggacactggattatgaggaatggataaatggatgagctagggctctgggggtctgcctgcacactctggggagccaggggccccagcaccctccaggacaggagatctgggatgcctggctgctggagtacatgtgttcacaagggttactcctcaaaacccccagttctcactcatgtccccaactcaaggctagaaaacagcaagatggagaaataatgttctgctgcgtccccaccgtgacctgcctggcctcccctgtctcagggagcaggtcacaggtcaccatggggaattctagcccccactggggggatgttacaacaccatgctggttattttggcggctgtagttgtggggggatgtgtgtgtgcacgtgtgtgtgtgtgtgtgtgtgtgtgtgtgtgtgtgttctgtgacctcctgtccccatggtacgtcccaccctgtccccagatcccctattccctccacaataacagaaacactcccagggactctggggagaggctgaggacaaatacctgctgtcactccagaggacattttttttagcaataaaattgagtgtcaactatttaaaaaaaaaaaaaaaaa

SEQ ID NO: 1447 - DNA, 3781 bp, Homo sapiens
ggcacgagggggctgaagacaacttggattgcgaggctagggcttggggagtcgtgcatcccgttccgggcctccgcagcccaacatgggccccgggttccaaagtttgcgaagttgggcgccgaggggccggggcgcgcggagcgtccgggggggcccgggcccggattctctgggcgcacaggtcgcctgagccgcctccgcggccgccgaggtcgtgcgtgtggccggggggctccgaggagcaggcgggggcgccggggcttttgctgagttggcggggttggccatggccgctgcccgcccagcgcgggggccggagctcccgctcctggggctgctgctgctgctgctgctgggggacccgggccggggggcggcctcgagcgggaacgcgaccgggcctgggcctcggagcgcgggcgggagcgcgaggaggagcgcggcggtgactggccctccgccgccgctgagccactgcggccgggctgccccctgcgagccgctgcgctacaacgtgtgcctgggctcggtgctgccctacggggccacctccacactgctggccggagactcggactcccaggaggaagcgcacggcaagctcgtgctctggtcgggcctccggaatgccccccgctgctgggcagtgatccagcccctgctgtgtgccgtatacatgcccaagtgtgagaatgaccgggtggagctgcccagccgtaccctctgccaggccacccgaggcccctgtgccatcgtggagagggagcggggctggcctgacttcctgcgctgcactcctgaccgcttccctgaaggctgcacgaatgaggtgcagaacatcaagttcaacagttcaggccagtgcgaagtgcccttggttcggacagacaaccccaagagctggtacgaggacgtggagggctgcggcatccagtgccagaacccgctcttcacagaggctgagcaccaggacatgcacagctacatcgcggccttcggggccgtcacgggcctctgcacgctcttcaccctggccacattcgtggctgactggcggaactcgaatcgctaccctgctgttattctcttctacgtcaatgcgtgcttctttgtgggcagcattggctggctggcccagttcatggatggtgcccgccgagagatcgtctgccgtgcagatggcaccatgaggcttggggagcccacctccaatgagactctgtcctgcgtcatcatctttgtcatcgtgtactacgccctgatggctggtgtggtttggtttgtggtcctcacctatgcctggcacacttccttcaaagccctgggcaccacctaccagcctctctcgggcaagacctcctacttccacctgctcacctggtcactcccctttgtcctcactgtggcaatccttgctgtggcgcaggtggatggggactctgtgagtggcatttgttttgtgggctacaagaactaccgataccgtgcgggcttcgtgctggccccaatcggcctggtgctcatcgtgggaggctacttcctcatccgaggagtcatgactctgttctccatcaagagcaaccaccccgggctgctgagtgagaaggctgccagcaagatcaacgagaccatgctgcgcctgggcatttttggcttcctggcctttggctttgtgctcattaccttcagctgccacttctacgacttcttcaaccaggctgagtgggagcgcagcttccgggactatgtgctatgtcaggccaatgtgaccatcgggctgcccaccaagcagcccatccctgactgtgagatcaagaatcgcccgagccttctggtggagaagatcaacctgtttgccatgtttggaactggcatcgccatgagcacctgggtctggaccaaggccacgctgctcatctggaggcgtacctggtgcaggttgactgggcagagtgacgatgagccaaagcggatcaagaagagcaagatgattgccaaggccttctctaagcggcacgagctcctgcagaacccaggccaggagctgtccttcagcatgcacactgtgtcccacgacgggcccgtggcgggcttggcctttgacctcaatgagccctcagctgatgtctcctctgcctgggcccagcatgtcaccaagatggtggctcggagaggagccatactgccccaggatatttctgtcacccctgtggcaactccagtgcccccagaggaacaagccaacctgtggctggttgaggcagagatctccccagagctgcagaagcgcctgggccggaagaagaagaggaggaagaggaagaaggaggtgtgcccgctggcgccgccccctgagcttcacccccctgcccctgcccccagtaccattcctcgactgcctcagctgccccggcagaaatgcctggtggctgcaggtgcctggggagctggggactcttgccgacagggagcgtggaccctggtctccaacccattctgcccagagcccagtccccctcaggatccatttctgcccagtgcaccggcccccgtggcatgggctcatggccgccgacagggcctggggcctattcactcccgcaccaacctgatggacacagaactcatggatgcagactcggacttctgagcctgcagagcaggacctgggacaggaaagagaggaaccaataccttcaaggctcttcttcctcaccgagcatgcttccctaggatcccgtcttccagagaacctgtgggctgactgccctccgaagagagttctggatgtctggctcaaagcagcaggactgtgggaaagagcctaacatctccatggggaggcctcaccccagggacagggccctggagctcagggtccttgtttctgccctgccagctgcagcctggttggcagcatctgctccatcggggcagggggtatgcagagcttgtggtggggcaggaacggtggaggcagaggtgacagttcccagagtgggctttggtggccagggaggcagcctagcctatgtctggcagatgagggctggctgccgttttctgggctgatgggtgccctttcctggcagtctcagtccaaaagtgttgactgtgtcattagtcctttgtctaagtagggccagggcaccgtattcctctcccaggtgtttgtggggctggaaggacctgctcccacaggggccatgtcctctcttaataggtggcactaccccaaacccatcttttgttctcctatatcctccttctcctgttccatttcagttcagtttcagcggtgccaacctctttgcgtttcctttttgttgatgaggacccagagctgctgcacacactcacctctaaccccctcccctcgctgctgggccccatctccacaggagagactggttcggctctagggcctcagtctggagtgggataggagcagtgagtgacaaagcctctgaaagatgcatcatctcttcctcacacccatttagtgggggatgggtcctctagacttgaggggctaccctgggaagctgccgtagcttcagccaggcaagaaagcttccttcaacctgcatagccggtgggtgaggagattcccaccttccatagcctccaaacatgttcccaaggccccactttcaagaatcagacagcaggaagccatagatgctggctgggttccaggttatggggagaagaaatacagtcaataaaaggtttttgtataaaaaaaaaaaaaaaaaaaaaaaaaaaaaaaaaaaaa

SEQ ID NO: 1448 - DNA, 4163 bp, Homo sapiens
gcaccgcggctgaggagcgggaggccgtccgggcagcgcggccggcggcgagaggggccccgccgctctccggaggcagaagttgtggatcggccggcgggggcgagcgggcccgggggccggggccgcgctgcccgggccgcgaggacgaggcggcgccgccgggctgtggaggcagcagcccagacgcggcacagagagggcctgggagcttgctgcagcttcagacagggagccaggatgggaaccacggactgacctgacctgcgtcctcggggccactgcactgggtgattcacgtgtgcccaggccctgaggtgggccggacctgggagtggcagccacacccactcgcccgggtctatggccacggtcggagagtggtcctgtgtgcgctgcaccttcctgaacccggccggccagcgccagtgctccatctgcgaggctccccggcacaagcccgacctcaaccacatcctgcggctcagcgtggaggagcagaaatggccctgcgcccgctgcaccttccgcaacttcctgggcaaggaggcctgcgaggtgtgcggcttcaccccggagcctgcgcctggggctgccttcctgccagtcctcaacggggtcctccccaagccacccgccatcctgggggagcccaagggcagctgccaggaggaagcaggtccagtgaggactgcggggctggtggccacggagcccgccagggggcagtgcgaggacaaggacgaggaggagaaggaggagcaggaggaggaggagggagcggcggagcccagagggggctgggcgtgtccgcgttgcacgctgcacaacacgcccgtggccagctcctgctccgtctgcgggggcccacgcaggctctcgctgccacggatccctcctgaggccctggtggtcccggaagtggtggccccggccggcttccacgtcgtgcctgccgcgcctccacctggcctccccggggaaggtgccgaggccaaccccccagccaccagccagggcccagctgccgaaccagagccgcccagggtcccgcccttcagccccttctcgtccaccctgcagaacaaccccgtgccgcgcagccgacgcgaggttcccccccagctgcagccaccggtgcctgaggctgcccagccgtcaccctctgccggctgcaggggagccccccagggctcgggctgggctggggcctcccgcctagcagagttgctgtctggcaagcggctgagtgtgctggaggaagaggccacggagggtggcaccagccgcgtagaggccggcagctccacctcgggcagtgacatcattgacctggccggagacaccgtgcgttacacgcccgccagcccctccagccccgacttcaccacctggtcatgtgccaagtgcacgctcagaaaccccacagtggcccccaggtgctcggcctgcggctgctccaaactgcacggcttccaggagcatggcgagccccccacccactgccccgactgtggggccgacaagcccagcccctgcggcagaagctgcggacgggtgtcctcggcccagaaggccgcccgcgtcctgcccgagcgcccgggccagtgggcctgccctgcctgtaccctgctcaacgcactgcgggccaagcactgcgccgcctgccacacgcctcagctcctggtggcccagcggcggggggccgcgcccctgaggcgcagggagagcatgcacgtggagcagcggcggcagacagacgagggcgaggccaaggcactctgggagaacatcgtggccttctgccgggagaacaatgtgagcttcgtggatgacagcttccctcccgggcccgagtctgtcggcttccccgcgggtgacagcgtgcagcagcgtgtgaggcagtggctgcgaccccaggagatcaactgctccgtcttcagggaccacagggccacgtggtctgtgttccacacactgcggccctcagacatcctgcaggggctgctggggaactgctggttcctgagcgccctggcggtgctggcggagcggccggacctggtggagcgggtgatggtcacgcgcagcctgtgtgcagagggcgcctaccaggtgcggctgtgcaaggacggcacgtggaccacggtgctggtggacgacatgctgccctgtgatgaggccggctgcctcctcttctcacaggcgcagcggaagcagctgtgggtggccctcatcgagaaggcgctggccaagctgcacggctcctactttgcgctccaggcgggccgcgccatcgaaggcctggccacgctcaccggcgccccctgtgagagcctggcgctgcagctcagctccactaacccccgcgaggagcccgttgacactgacctcatctgggccaaaatgctgagttctaaggaggctgggttcctcatgggtgcctcctgtggcgggggcaacatgaaggtggacgattcggcctacgagagcctgggcctgcgcccccggcatgcctactccatcctggatgtccgagatgtccagggcaccaggcttctgcggctccgaaacccgtggggccgtttctcctggaacggcagctggtccgacgagtggccacactggccggggcacctgcgtggcgagctcatgccgcacggcagcagtgagggtgtcttctggatggagtacggcgactttgtcaggtacttcgactccgtggacatctgtaaggtgcactcggactggcaggaggcgcgggtgcagggctgctttcccagctcggccagcgcgcccgtgggggtaacagcgctcacggtgctggagcgggcctcgctggagttcgcgctcttccaggagggcagcaggcgctcggacgccgtggacagccacctgctggacctgtgcatcctggtgttccgggccacgttcggcagcggcggccacctcagcctgggccgcctcctggcccacagtaagcgcgcggtcaagaagttcgtcagctgcgacgtcatgctggagcctggcgagtacgctgtggtgtgctgcgccttcaaccactgggggccgcccctgccgggcacccctgccccccaggcctccagcccctcggcaggggtcccgagagcctccccagagccgccgggccacgtgctggctgtgtacagctcgaggctggtcatggtggagcccgtggaagcccagccgaccacgctggccgacgccatcatcctgctcaccgagagccgcggagagcggcacgagggccgtgagggcatgacctgctactacctgacacacggttgggcggggctcatcgtggtggtggagaaccgacaccccaaggcctacctgcacgtgcagtgtgactgcaccgacagcttcaacgtggtgtccacacgcggcagcctgcgtacccaggatagcgtgccacccctgcacaggcaggtcctggtgatcttgtcccagctagagggcaacgccggcttctctatcacccaccgcctggcacatcgcaaggcagcccaggccttcctcagtgactggacagcctccaaggggacccacagccccccactcacgccagaggtcgccggtctgcatgggccccgaccgctgtgaccaccatgcctggggcaggggctgtgcacagacggaccccccacccccacacgcactttatgagggagaccccgacagaggacgcttgagccagaatctcaggaccccgcccagggagctgccagcccagggctcagcttcccatgggccccccgcccccctccttcccctccctgaaccccacagtccgcctggccagacctcctggccgccacgcagaatacctcgaaccaggcgggctgtgaaccagccccgctcacctgccagccccaacacccgacgggggccgaggccaggctgcccctccctgtgggctcagggtctcctgcgggctaggcagccaggagctctgtccgcaaaaccaaatctgggtgtcagaggccaagaccctggggtgggatcagggaccacccctcacggggcataaggtcagttttcccccagagcccgggtccctgtcccccacagggcaggcggggtccctggagccctggtgtggagcggcgagtcccggggcggtgcctgtctcagaagaaggg

SEQ ID NO: 1449 - DNA, 2310 bp, Homo sapiens
acttccgtttttgctgggtaggcgacccggacggagggccggcgaggtgcggggtctggtgatgcgagctgcgcctctcggcaagatttcgcgctgcccatcccgggccctttcatcagtaatcggtagtggatcactctgccaagcggcaggaagaattaaggaaacgacaaggagacgctcggctctctcccgcttggctccttgcggcctcctcttcccttcgctccggcccggtgaaactgaacttataatcgtcactggattgtaagtacccgaggcgaagagagctcgctgagccctgattttttgagtgtctttgttccgggagagtttgtgagttgaaagtatctctgctgggctttctgggccgaaaaccgttccgggggagccgccatttgctttcctgttccctagctagctagctagctctctccgcgttgtccggcagcggcacctagaggttgggacttggcattgcatctgatttaatgaacttaagtctgtgaataagcctttgtgttaacgactggtattcggtcacagcatatttagagaaaagacttggagcttaaataaaaactaaggcaaaatagacgcttagctgctgatctacagagaacttcttgtaattaaaagatttcaattcatagcaaactggtgttttaaactattgcagtagctggaactttttagtgtaaccagcatttattggagaagtgaatcacaaggaaataaagatgagtaaaagcaaagatgatgctcctcacgaactggagagccagtttatcttacgtctgcctccagaatatgcctctactgtgagaagggcagtacagtctggtcatgtcaacctcaaggacagactgacaattgagttacatcctgatgggcgtcatggaatcgtcagagtggaccgtgttccattggcctcaaaattagtagacctgccctgtgttatggaaagcttgaaaaccattgataaaaaaactttttacaagacagctgatatctgtcagatgcttgtatccacagttgatggtgatctctatcctcctgtggaggagccagttgctagcactgatcctaaagcaagcaagaaaaaggataaggacaaagagaaaaagtttatctggaaccacggaattactctgcctctaaagaatgtcaggaagagaaggttccggaagacagcaaagaagaaatatattgaatctccagatgttgaaaaagaagtgaaacgattgctgagtacagatgctgaagctgttagtactcggtgggaaataattgccgaagatgaaacaaaggaggcagaaaatcaaggcctggatatctcttctccaggaatgtctggtcacaggcagggccatgactcattagaacatgatgagcttcgggagatattcaatgacctcagcagcagcagtgaggatgaagatgagacccagcatcaagatgaagaagatataaacatcattgacacggaggaagatctggagagacagctacaggacaagctaaatgaatcagatgaacagcaccaggaaaatgaaggaaccaatcagctggttatgggaattcagaagcagattgacaacatgaaaggcaagctccaagagacccaggacagggcaaaacgacaagaggatctcatcatgaaagtggaaaatctggctctcaagaacagatttcaggctgtactggatgagctcaaacaaaaggaagaccgagaaaaggagcaactcagctctttgcaagaggagctagaatcactcctagagaagtaaaaagaactgatatttaatttcagtcttcagactggtcagcattagaaaattcttggctttattgtactgggtattaagaccttgctcttcctagtccttttaatgctgtgtgttctgttaagttctttcatttgtttgtaattttgtttttcagcaaatttatattgttttgctaggtgttcatcctataagaagcaggattgtataggcagaaaaatgattgtaggaaagttgcaggattagcggaatgtatggttcaaccttaattatagcttcattgcaggactttactgtttctccattttctagaagctgctgttgctgctttgtgatgacgtgagatcaataagaagaacctagtctagagacaatgatgctagtttgcatatgttttcctatgcaataattgttttcccagttattcaaagcagctttctatatgtagagatgcaaattattaagttgtttccaatacaataaataaaagcatctgtttttcactttaaaaaaaaaaaaaaaa

SEQ ID NO: 1450 - DNA, 2435 bp, Homo sapiens
cgccgtcggggcggagcggtgtcgcgaggctgcatcccggccggcggttccggagcctcgcgtctggggaggcgcggcccgggacgctcgagcttagggagatctgccttctggagactgcgccgtcctcccgggagagccagaaagaggacatggctgctgggcagcgggaagcgaggccccaggtgtcactgacgtttgaggatgtggctgtgctgtttacccgagatgagtggagaaagctggccccttctcagagaaacttgtaccgggatgtgatgctggagaactataggaacctggtctcactggggctcccatttaccaaaccaaaagtgatctccctgttgcagcaaggagaagatccctgggaggtggagaaagacggttctggcgtctcctctctaggatcgaagagcagtcataaaaccacaaagtcaacgcaaacacaagactcttcatttcagggactgatactgaaaagatccaacaggaatgtaccttgggatttgaaattagaaaagccttacatatatgaaggcagattagagaaaaagcaggataaaaagggaagttttcagatagtttcagccacccacaaaaaaatccccactatagaaagaagccataaaaatactgaattgagccaaaacttcagcccaaagtcagtgcttattaggcaacagatacttcccagagaaaaaacaccaccaaaatgtgaaatacaaggaaacagcctcaaacagaattcacaattacttaatcaaccaaaaattacagcagataaacgctataaatgtagtctgtgtgaaaaaaccttcattaacacttcatcccttcgtaaacatgagaaaaaccatagtggagagaaactatttaagtgtaaagaatgttcaaaagcctttagccaaagttcagctcttattcaacatcaaataacacatactggagagaaaccctacatatgtaaagaatgtgggaaagcctttactctcagtacatccctttataaacatctaagaacccatactgtggagaaatcctacagatgtaaagaatgtggtaaatccttcagccgaaggtcaggcctttttatacatcaaaaaattcatgctgaagaaaacccttgtaagtataatccgggtaggaaggcatctagttgcagcacatccctttctggatgtcaaagaattcattctagaaagaagtcctacttatgtaatgaatgtggcaacacctttaagtctagctcatcccttcgttatcatcagagaattcacactggagagaagccttttaaatgtagtgaatgtgggagagccttcagccagagtgcctctcttattcaacatgaaagaattcacaccggagaaaagccctatagatgcaatgaatgtgggaaaggctttacttctatttcacgacttaatagacaccgaatcattcatactggagagaagtattataattgtaatgaatgtggtaaagccttaagctcccactcaacacttattattcacgagcgaattcatactggagaaaaaccatgtaaatgtaaagtatgtggaaaagccttcagacagagttcagctctcattcaacatcagagaatgcatactggagaaagaccctataaatgtaacgagtgtgggaaaacattcaggtgtaactcatcacttagtaatcaccagagaattcatactggagagaaaccatatcgatgtgaggaatgtgggatatcttttggccaaagttcagctcttattcagcatcgaaggattcatacaggagaaaaaccctttaaatgtaatacatgtggaaaaacttttagacaaagctcatcacgtattgcacatcagagaattcatactggagagaaaccctatgaatgtaatacatgtgggaaacttttcaaccataggtcatcccttactaatcattataaaattcatatcgaagaggacccctagaaagtagatttgtatgtgtgaaagccttaaaccaaagctcatcgaagaatacatccttgagagagatgtaataaatgtaatggatgtgaaaaaaactgtaataatttagccctcattaggtatttaatcccatggataaacctcagctatataatagatatgaggaaagtgtttgtgcctgtcagacacttaaaaaaataacctgagatgaagaatttacaattgaagacattgactttagccatttgtgaaatgggtttgctttttcccttttcctacagacgtatatgctagatgtcacgtgatcatcagaaacagatatccgagtgggtggggaggtgtgctttagatttctcattagaagaccaccaaactggtaatatttttatagcattttaatagcttgatcaaattgtacctttttagagaaaaggaccaaaataaaagaaaaatgaattatgaact

SEQ ID NO: 1451 - DNA, 2907 bp, Homo sapiens
  misc_feature (1894)..(1894): n is a, c, g, or t
  misc_feature (1990)..(1990): n is a, c, g, or t
  misc_feature (2388)..(2388): n is a, c, g, or t
  misc_feature (2506)..(2506): n is a, c, g, or t
  misc_feature (2509)..(2509): n is a, c, g, or t
ggaattcggcacgagggacggcgggccccgcttccggcccgggcgtcgtgcgtgacccagcggcgtcacagccgaggaagcggcccggccgggagggcggggaggcgcgcggcgatcggacacgatggcgggaggaggcgggagtagcgacggcagcgggcgggcagctggcaggcgggcgtcccgcagtagcgggcgggcccggcgggggcgccacgagccggggctggggggcccggcggagcgcggcgcgggggaggcacggctggaagaggcagtcaatcgctgggtgctcaagttctacttccacgaggcgctgcgggcctttcggggtagccggtacggggacttcagacagatccgggacatcatgcaggctttgcttgtcaggcccttggggaaggagcacaccgtgtcccgattgctgcgggttatgcagtgtctgtcgcggattgaagaaggggaaaatttagactgttcctttgatatggaggctgagctcacaccactggaatcagctatcaatgtgctggagatgattaaaacggaatttacactgacagaagcagtggtcgaatccagtagaaaactggtcaaggaagctgctgtcattatttgtatcaaaaacaaagaatttgaaaaggcttcaaaaattttgaaaaaacatatgtccaaggaccccacaactcagaagctgagaaatgatctcctgaatattattcgagaaaagaacttggcccatcctgttatccagaacttttcatatgagaccttccagcagaagatgctgcgcttcctggagagccacctggatgacgccgagccctacctcctcacgatggccaaaaaggctttgaaatctgagtccgctgcctcaagtacagggaaggaagataaacagccagcaccagggcctgtggaaaagccacccagagaacccgcaaggcagctacggaatcctccaaccaccattggaatgatgactctgaaagcagctttcaagactctgtctggtgcacaggattctgaggcagcctttgcaaaactggaccagaaggatctggttcttcctactcaagctctcccagcatcaccagccctcaaaaacaagagacccagaaaagatgaaaacgaaagttcagccccggctgacggtgagggtggctcggaactgcagcccaagaacaagcgcatgacaataagcagattggtcttggaggaggacagccagagtactgagcccagcgcaggcctcaactcctcccaggaggccgcttcagcgccaccatccaagcccaccgttctcaaccaacccctccctggagagaagaatcccaaagtacccaaaggcaagtggaacagctctaatggggttgaagaaaaggagacttgggtggaagaggatgaactgtttcaagttcaggcagcaccagatgaagacagtacaaccaatataacaaaaaagcagaagtggactgtagaagaaagcgagtgggtcaaggctggagtgcagaaatatggggaaggaaactgggctgccatttctaaaaattacccatttgttaaccgaacagctgtgatgattaaggatcgctggcggaccatgaaaagacttggcatgaactgaaacaggctttcatttccacagaattcacaggagcatggttcctaataatagcccctgatagtctgctctttctttctttttcttttttttttttttttgagacagagtctcgctctgtcacccaggctggagtgcagtggcgtgatctcggctcactgcgacctccgtctcccgggctcacgccattctcctgcctcagcctccgagtagctgggactacaggcgcccgccatcacgcccggctaatgttttgtatttttagtaaanacggggtttcaccgtgttggccaggatggtctcgatctcctgacctcgtgatccacccaactcggcctcccaaagtgctgggattacaggcatganccaccgcgcctggcatctgctgtttctttcagaagctgggctgggatgagaattttgggcaacctccttcgacgtgggggaggtcccatttccacttcatcactgttggagatcatggagctaagaagcagagccaagtccacccatgtccttggcagagatgacggcacacagcttgtgcagtgccagaatatcattagcgtttcccttctttagtggtttgcttaaatttaaatccctggtaatctgtagaaccttctcctaggaaatggtgaagtctattaggagccacttgtgactccatgacctgttaaaaccagcaatgtgagtattatttggagtaaatttgttccacgtcaagttctggccttctgatgcaaatgcaaaggaacttagtntgttatgaacccaggttgatgacagaccagtccttgtggaataagattccctttaaaaactctttagccagtcgtgacatcaaccctagacctgtctgccttggcatttgctgtcaanatntgctgggctatgtaggcaggttaatcctccacttctcatgtggttgaaccagtgtgttttttggtaaaatggtgattgtagataagattagttccctgatcccctgccccctgtcccctgcctcttttcccaattcccttccttatgctggacttttaaagcttaaaaaaaatccgattgaatataaatgcctaatttcattcttttgtgaaatggttgcttcctcctgattccctaattgtgctgtgttcgtgtcttgcactggaattcaacattcccttctccttttgtactgtgttgtgcttgctgtctctcccggacacccttaaagactgtctttttagcaaaaaatttcagtaaagtgttttctgtaatctttttttaaaaaaaaaaaaaaa

SEQ ID NO: 1452 - DNA, 3226 bp, Homo sapiens
cgcgagctaagcaggaggcggaggcggaggcggagggcgaggggcggggagcgccgcctggagcgcggcaggtcatattgaacattccagatacctatcattactcgatgctgttgataacagcaagatggctttgaactcagggtcaccaccagctattggaccttactatgaaaaccatggataccaaccggaaaacccctatcccgcacagcccactgtggtccccactgtctacgaggtgcatccggctcagtactacccgtcccccgtgccccagtacgccccgagggtcctgacgcaggcttccaaccccgtcgtctgcacgcagcccaaatccccatccgggacagtgtgcacctcaaagactaagaaagcactgtgcatcaccttgaccctggggaccttcctcgtgggagctgcgctggccgctggcctactctggaagttcatgggcagcaagtgctccaactctgggatagagtgcgactcctcaggtacctgcatcaacccctctaactggtgtgatggcgtgtcacactgccccggcggggaggacgagaatcggtgtgttcgcctctacggaccaaacttcatccttcagatgtactcatctcagaggaagtcctggcaccctgtgtgccaagacgactggaacgagaactacgggcgggcggcctgcagggacatgggctataagaataatttttactctagccaaggaatagtggatgacagcggatccaccagctttatgaaactgaacacaagtgccggcaatgtcgatatctataaaaaactgtaccacagtgatgcctgttcttcaaaagcagtggtttctttacgctgtatagcctgcggggtcaacttgaactcaagccgccagagcaggatcgtgggcggtgagagcgcgctcccgggggcctggccctggcaggtcagcctgcacgtccagaacgtccacgtgtgcggaggctccatcatcacccccgagtggatcgtgacagccgcccactgcgtggaaaaacctcttaacaatccatggcattggacggcatttgcggggattttgagacaatctttcatgttctatggagccggataccaagtagaaaaagtgatttctcatccaaattatgactccaagaccaagaacaatgacattgcgctgatgaagctgcagaagcctctgactttcaacgacctagtgaaaccagtgtgtctgcccaacccaggcatgatgctgcagccagaacagctctgctggatttccgggtggggggccaccgaggagaaagggaagacctcagaagtgctgaacgctgccaaggtgcttctcattgagacacagagatgcaacagcagatatgtctatgacaacctgatcacaccagccatgatctgtgccggcttcctgcaggggaacgtcgattcttgccagggtgacagtggagggcctctggtcacttcgaagaacaatatctggtggctgataggggatacaagctggggttctggctgtgccaaagcttacagaccaggagtgtacgggaatgtgatggtattcacggactggatttatcgacaaatgagggcagacggctaatccacatggtcttcgtccttgacgtcgttttacaagaaaacaatggggctggttttgcttccccgtgcatgatttactcttagagatgattcagaggtcacttcatttttattaaacagtgaacttgtctggctttggcactctctgccattctgtgcaggctgcagtggctcccctgcccagcctgctctccctaaccccttgtccgcaaggggtgatggccggctggttgtgggcactggcggtcaagtgtggaggagaggggtggaggctgccccattgagatcttcctgctgagtcctttccaggggccaattttggatgagcatggagctgtcacctctcagctgctggatgacttgagatgaaaaaggagagacatggaaagggagacagccaggtggcacctgcagcggctgccctctggggccacttggtagtgtccccagcctacctctccacaaggggattttgctgatgggttcttagagccttagcagccctggatggtggccagaaataaagggaccagcccttcatgggtggtgacgtggtagtcacttgtaaggggaacagaaacatttttgttcttatggggtgagaatatagacagtgcccttggtgcgagggaagcaattgaaaaggaacttgccctgagcactcctggtgcaggtctccacctgcacattgggtggggctcctgggagggagactcagccttcctcctcatcctccctgaccctgctcctagcaccctggagagtgcacatgccccttggtcctggcagggcgccaagtctggcaccatgttggcctcttcaggcctgctagtcactggaaattgaggtccatgggggaaatcaaggatgctcagtttaaggtacactgtttccatgttatgtttctacacattgctacctcagtgctcctggaaacttagcttttgatgtctccaagtagtccaccttcatttaactctttgaaactgtatcacctttgccaagtaagagtggtggcctatttcagctgctttgacaaaatgactggctcctgacttaacgttctataaatgaatgtgctgaagcaaagtgcccatggtggcggcgaagaagagaaagatgtgttttgttttggactctctgtggtcccttccaatgctgtgggtttccaaccaggggaagggtcccttttgcattgccaagtgccataaccatgagcactactctaccatggttctgcctcctggccaagcaggctggtttgcaagaatgaaatgaatgattctacagctaggacttaaccttgaaatggaaagtcttgcaatcccatttgcaggatccgtctgtgcacatgcctctgtagagagcagcattcccagggaccttggaaacagttggcactgtaaggtgcttgctccccaagacacatcctaaaaggtgttgtaatggtgaaaacgtcttccttctttattgccccttcttatttatgtgaacaactgtttgtctttttttgtatcttttttaaactgtaaagttcaattgtgaaaatgaatatcatgcaaataaattatgcgatttttttttcaaagcaaaaaaaaaaaaaaaaaaaaaaaaaaaaaaa

SEQ ID NO: 1453 - DNA, 1156 bp, Homo sapiens
ggcacgaggaagagcggtcggcggggtttcttcgttgcattgcctgagaggagcggagtctgccaggtggtgtccatcatgttctctttcaacatgttcgaccaccctattcccagggtcttccaaaaccgcttctccacacagtaccgctgcttctctgtgtccatgctagcatggcctaatgacaggtcagatgtggagaaaggagggaagataattatgccaccctcggccctggaccaactcagccgacttaacattacctatcccatgctgttcaaactgaccaataagaattcggaccgcatgacgcattgtggcgtgctggaatttgtggctgatgaaggcatctgctacctcccacactggatgatgcagaacttactcttggaagaagacggcctggtccagttggagaccgtcaaccttcaagtggccacctactccaagagtaagttctgctacctcccacactggatgatgcagaacttactcttggaagaaggcggcctggtccaggtggagagcgtcaaccttcaagtggccacctactccaaattccaacctcagagcgctgacttcctggacatcaccaaccccaaagccgtattagaaaacgcacttaggaactttgcctgtctgaccaccggggatgtgattgccattaactacaatgaaaagatctacgaactgcgtgtgatggagaccaaacccgacaaggcagtgtccattcatgagtgtgacatgaacgtggactttgatgctcccctgggctacaaagaacccgaaagacaagtccagcatgaggagtcgacagaaggtgaagccgaccacagtggctatgctggagagcttggcttccgcgctttctctggatctggcaatagactggatggaaagaagaaaggggtagagcccagcccctccccaatcaagcctggagatattaaaagaggaattcccaattatgaatttaaacttggtaagataactttcatcagaaattcacgtccccttgtcaaaaaggttgaagaggatgaagctggaggcagattcgtcgctttctctggagaaggacagtcattgcgtaaaaagggaagaaagccctaagtgaggactgttggctgattggaaaataataaaagtttcatttgca

SEQ ID NO: 1454 - DNA, 1040 bp, Homo sapiens
ggaattcggcacgagattcaaagcaacaccaccaccactgaagtatttttagttatataagattggaactaccaagcatgtggctcctggtcagtgtaattctaatctcacggatatcctctgttgggggagaagcaatgttctgtgattttccaaaaataaaccatggaattctatatgatgaagaaaaatataagccattttcccaagttcctacaggggaagttttctattactcctgtgaatataattttgtgtctccttcaaaatccttttggactcgcataacgtgcgcagaagaaggatggtcaccaacaccaaagtgtctcagactgtgtttctttccttttgtggaaaatggtcattctgaatcttcaggacaaacacatctggaaggtgatactgtacaaattatttgcaacacaggatacagacttcaaaacaatgagaacaacatttcatgtgtagaacggggctggtccactcctcccaaatgcaggtccactatttctgcagaaaaatgtgggccccctccacctattgacaatggagacattacttcattcctgttgtcagtatatgctccaggttcatcagttgagtaccagtgccagaacttgtatcaacttgagggtaacaatcaaataacatgtagaaacggacaatggtcagaaccaccaaaatgcttagatccatgtgtaatatcacaagaaattatggaaaaatataacataaaattaaagtggacaaaccaacaaaagctttattcaagaacaggtgacatagttgaatttgtttgtaaatctggatatcatccaacaaaatctcattcatttcgagcaatgtgtcagaatgggaaactggtatatcccagttgtgaggaaaaatagaatcaatggcattactattagtaaaatgcacacctttttctgaatttactattatatttgttttcaatttcatttttcaagtactgttttactcatttttattcataaataaagttttgtgttgatttgtgaaaatgcaattacaaaaaa

SEQ ID NO: 1455 - DNA, 1162 bp, Homo sapiens
gggactgtcgtaaaaggggcgggacgcgccgcggtcgggatgacgtgagctgggggcgctcgtcgctgcagccggcggctagcgggcgtccgcgccatggagcgctacgcgggcgccttggaggaggtggcggacggtgcccggcagcaggagcgacactaccagctgctgtcggcgttacagagcctggtgaaggagttgcccagctcattccagcagcgcttgtcctacaccacgctgagcgacctggccctggcgcttctcgacggcaccgtgttcgaaatcgtgcaggggctactggagatccagcacctcaccgaaaagagcctgtacaaccagcgcctgcgcctacagaacgagcatcgagtgctcaggcaggcgctgcggcagaagcaccaggaagcccagcaggcctgccggccccataacctgcctgtgcttcaggcggctcagcagcgagaactagaggcggtggagcaccggatccgtgaggagcagcgggcgatggaccagaagatcgtcctggagctggaccggaaggtggctgaccagcagagcacactggagaaggcgggggtggctggcttctacgtgaccaccaacccacaggagctgatgctgcagatgaacctgctggaactcatccggaagctgcagcagaggggctgctgggcagggaaggcagccctggggctaggaggtccctggcagttgcctgctgcccagtgtgaccagaaaggcagccctgtcccaccatagccacaggcagcagaagtctgggcagagttcatcttcttgacctttggccactgccttcccagctgcccgcagggggttccccctgctgaggagagaccaggtggaccccagctgcctgtcacccttcatctgggacttgctgtcaaaccctaggatagtctcataaaggggaggctgggccagcctgctgctgtctgcttcagggccaggcagagagtgaggctgggggttctcacaccttactccaccgggcacatcccaacctgcactggggcccactcgagtgcttgttctggtctcagccgctcccttggcagctgcagcccccatgcagaagaggctcccaggcccaagctctgtgtgacccagagaaataaagatgcctcagtggcccaaaaaaaaa

SEQ ID NO: 1456 - DNA, 3423 bp, Homo sapiens
ggcacgagggtggtcggagcgccgactcccttctcgtcgtcgccattttgagctggtgactgtggccggctgggagtaggcggcagtgagtttccctgggagggcagcgcgcttggcgcttctcccctccccccgatctgcctccagtctcggacttggttgttgcgcgctccggctccggctgagctgggagagttggaggaggtggcggcgggcagaggtgatgtctgggagcccttccttgacagcccgggccgagaagagtccctgcaggaagcatcacccaggctggcagatcatggtagcagcagcgggggtggctgggaagtgaaacggagccagcggctgaggaggggccccagcagcccccgaaggccctatcaggacatggagtatgaaagacgtggtggtcgtggtgacaggactggccgctatggagccactgaccgctcgcaggatgatggtggggagaaccgcagccgagaccacgactaccgggacatggactaccgttcatatcctcgcgagtatggcagccaggagggcaagcatgactatgacgactcatctgaggagcagagtgcggaggattcctacgaggcctccccgggctccgagactcagcgtaggcggcggcggcggcacaggcacagccccaccggcccgccaggcttcccccgagacggcgactatcgggaccaggactatcggaccgagcaaggggaggaggaggaggaggaggaggatgaggaggaggaggagaaggccagtaacatcgtcatgctgaggatgctgccacaggcagccactgaggatgacatccgtggccagctgcagtcgcacggcgtgcaagcacgggaggttcggctgatgcggaacaaatcttcaggtcagagccggggcttcgccttcgtcgagtttagtcacttgcaggacgctacacgatggatggaagccaatcagcactccctcaacatcctgggccagaaggtgtcgatgcactacagtgaccccaagcccaagatcaatgaggactggctgtgcaataagtgtggcgtccagaacttcaaacgccgagagaagtgcttcaaatgtggcgtgcccaagtcagaggcagagcagaagctgcccctcggcacgaggctggatcagcagacactgccactgggtggccgggagctgagccagggcctgcttcccctgccgcagccctaccaggcccagggagtcctggcctcccaagccctgtcacagggctcggagccaagctcagagaacgccaatgacaccatcattttgcgcaacctgaacccacacagcaccatggattccatcctgggggccctggcaccctacgcggtgctgtcctcctccaacgtgcgcgtcataaaggacaagcagacccaactgaaccgcggctttgccttcatccagctctccaccatcgtggaggcagcccagctgctgcagatcctgcaggccctgcacccaccactcactatcgacggcaagaccatcaatgttgagtttgccaagggttctaagagggacatggcctccaatgaaggcagtcgcatcagtgctgcctctgtggccagcactgccattgctgcggcccagtgggccatctcacaggcctcccaaggtggggagggtacctgggccacctccgaggagccgccggtcgactacagctactaccaacaggatgagggctatggcaacagccagggcacagagtcttccctctatgcccatggctacctcaagggcaccaagggccctggcatcactggaaccaaaggggatcccactggagcaggtcccgaggcctccctagagcctggggccgactctgtgtcgatgcaggctttctctcgcgcccagcctggtgctgctcctggcatctaccaacaatcagccgaggcgagcagtagccagggcactgctgccaacagccagtcgtataccatcatgtcacccgctgtgctcaaatctgagctccagagccctacccatcctagttctgctctcccaccggctaccagccccactgcccaggaatcctacagccagtaccctgttcccgacgtctctacctaccagtacgatgagacctccggctactactatgacccccagaccggcctctactatgaccccaactcccagtattactacaatgctcagagccagcagtacctgtactgggatggggagaggcggacctatgttcccgccctggagcagtcggccgacggacataaggagacaggggcaccctcgaaggagggcaaagagaagaaggagaagcacaagaccaagacagctcaacagattgccaaggacatggaacgctgggcccgcagtctcaacaaacaaaaagaaaacttcaaaaatagcttccagcctatcagctccctgcgagatgacgagaggcgggagtcagccactgcagatgctggctatgccatcctcgagaagaagggagcactagccgagagacagcacaccagcatggatctcccgaaattggccagtgacgaccgcccaagccctccgcgaggactggtggcagcctacagcggggagagtgacagtgaggaggagcaggagcgtgggggccctgagcgggaggagaagctcaccgactggcagaagctggcctgtctgctctgccgacgccagttccccagcaaagaggcgctcatccggcaccagcagctctcagggctccacaagcaaaaccttgagattcaccggcgagcccacttgtcagaaaacgagctagaagcactagagaagaatgacatggagcaaatgaagtaccgggaccgtgcagctgaacgcagagaaaagtatggcatccccgagccgccagagcccaagaggaggaagtacggcggcatatccacagcctctgtagacttcgagcagcctactcgggacgggctgggcagtgacaacattggcagtcggatgctgcaggccatgggctggaaagagggcagcggcctgggccgcaagaagcagggcattgtaacgcctatcgaggcccaaacacgggtgcggggctccggcctgggtgcacggggcagctcctacggggtcacctcaaccgagtcctacaaggagacactgcacaagacaatggtgacccgcttcaacgaggcccagtgagcagcttcaagagcaacttctccacatgttgggtgtccatcctggggcagggaaggacagagtgttggatggctgggacggggccttgctcttgtcggccagcccactccccagccagagagggcttgaccaaatcaaattgaggtggtgacttttgttggaaaattgggctgggatcacgtcctgttttgtaataaaagctgaaaagtctgaaaaaaaaaaaaaaaaaaaaaaaaaaaaaaa

SEQ ID NO: 1457 - DNA, 1326 bp, Homo sapiens
cagagtggagcggccgccggagatgcctgacgcatctgtctgaggagcggtcagtgacgcgatggagcgggcaagggatcgcttacacctgagacgaactacagaacagcacgtaccagaggtggaagtccaagtcaaacgcagaaggactgcctcactgagcaaccaagagtgtcagttgtacccgaggcgttctcagcagcagcaagtacctgtggtggatttccaggctgaactgaggcaggcattcttagctgagacaccaagaggtggttaaagccatattggagtagcgaggaatctgattccaagcaaaaaccaggctccatctactctttgaagcttctgcccagcttgcattgtttctaggagaacccgcgtcatacctttatctatagccttcccctaggtcttcagaagcatcaagttttaactgtggacattggatttggtggaacagcaatcatgactgttggcaagagtagcaagatgctgcagcacattgactatagaatgagatgtatcctgcaagatggccgaatcttcattggcacctttaaggcttttgacaagcatatgaatttgatcctctgtgattgtgatgagttcagaaagatcaagccaaagaatgcgaagcaaccagagcgtgaagaaaagcgggttttgggtctggtgttgctgcgtggggagaacttggtatccatgactgtggaggggccaccccccaaagatactggcattgctcgggtaccacttgctggagctgctggaggccctggggttggtagggcagctggtagaggagtaccagctggtgtgccaattccccaggcccctgctggattggcaggccctgtccgaggagttgggggaccatcccagcaggtaatgactccacagggaagaggcactgtagcagctgctgctgttgctgcgactgccagtattgctggagccccaacacagtacccaccaggacggggcactccgcccccacccgtcggcagagcaaccccacctccaggcattatggctcctccacctggtatgagaccacccatgggcccaccaattgggcttccccctgctcgagggacgccaataggcatgccgcctccgggaatgagaccccctccaccaggcattagaggtccacctcccccaggaatgcgtccaccaagaccttagcatactgttgatccatctcagtcactttttcccctgcaatgcgtcttgtgaaattgtgtagagtgtttgtgagctttttgttccctcattctgcattaataatagctaataataaatgcatagagcaattaaactgtg

SEQ ID NO: 1458 - DNA, 3078 bp, Homo sapiens
aggaggctgagtcctggccgcgggccggggccggggcgccgctggcaggagcgcttggggatcctccaaggcgaccatggccttgctgggtaagcgctgtgacgtccccaccaacggctgcggacccgaccgctggaactccgcgttcacccgcaaagacgagatcatcaccagcctcgtgtctgccttagactccatgtgctcagcgctgtccaaactgaacgccgaggtggcctgtgtcgccgtgcacgatgagagcgcctttgtggtgggcacagagaaggggagaatgttcctgaatgcccggaaggagctacagtcagacttcctcaggttctgccgagggcccccgtggaaggatccggaggcagagcaccccaagaaggtgcagcggggcgagggtggaggccgtagcctccctcggtcctccctggaacatggctcagatgtgtaccttctgcggaagatggtagaggaggtgtttgatgttctttatagcgaggccctgggaagggccagtgtggtgccactgccctatgagaggctgctcagggagccagggctgctggccgtgcaggggctgcccgaaggcctggccttccgaaggccagccgagtatgaccccaaggccctcatggccatcctggaacacagccaccgcatccgcttcaagctcaagaggccacttgaggatggcgggcgggactcgaaggccctggtggagctgaacggtgtctccctgattcccaaggggtcacgggactgtggcctgcatggccaggcccccaaggtgccaccccaggacctgcccccaaccgccacctcctcctccatggccagcttcctgtacagcacggcgctccccaaccacgccatccgagagctcaagcaggaagcaccttcctgcccccttgcccccagcgacctgggcctgagtcggcccatgccagagcccaaggccaccggtgcccaagacttctccgactgttgtggacagaagcccactgggcctggtgggcctctcatccagaacgtccatgcctccaagcgcattctcttctccatcgtccatgacaagtcagagaagtgggacgccttcataaaggaaaccgaggacatcaacacgctccgggagtgtgtgcagatcctgtttaacagcagatatgcggaagccctgggcctggaccacatggtccccgtgccctaccggaagattgcctgtgacccggaggctgtggagatcgtgggcatcccggacaagatccccttcaagcgcccctgcacttatggagtccccaagctgaagcggatcctggaggagcgccatagtatccacttcatcattaagaggatgtttgatgagcgaattttcacagggaacaagtttaccaaagacaccacgaagctggagccagccagcccgccagaggacacctctgcagaggtctctagggccaccgtccttgaccttgctgggaatgctcggtcagacaagggcagcatgtctgaagactgtgggccaggaacctccggggagctgggcgggctgaggccgatcaaaattgagccagaggatctggacatcattcaggtcaccgtcccagacccctcgccaacctctgaggaaatgacagactcgatgcctgggcacctgccatcggaggattctggttatgggatggagatgctgacagacaaaggtctgagtgaggacgcgcggcccgaggagaggcccgtggaggacagccacggtgacgtgatccggcccctgcggaagcaggtggagctgctcttcaacacacgatacgccaaggccattggcatctcggagcccgtcaaggtgccgtactccaagtttctgatgcacccggaggagctgtttgtggtgggactgcctgaaggcatctccctccgcaggcccaactgcttcgggatcgccaagctccggaagattctggaggccagcaacagcatccagtttgtcatcaagaggcccgagctgctcactgagggagtcaaagagcccatcgtggatagtcaagagagggattccggggaccctctggtggacgagagcctgaagagacagggctttcaagaaaattatgacgcgaggctctcacggatcgacatcgccaacacactaagggagcaggtccaggaccttttcaataagaaatacggggaagccttgggcatcaagtacccggtccaggtcccctacaagcggatcaagagtaaccccggctccgtgatcatcgaggggctgcccccaggaatcccgttccgaaagccctgtaccttcggctcccagaacctggagaggattcttgctgtggctgacaagatcaagttcacagtcaccaggcctttccaaggactcatcccaaagcctgatgaagatgacgccaacagactcggggagaaggtgatcctgcgggagcaggtgaaggaactcttcaacgagaaatacggtgaggccctgggcctgaaccggccggtgctggtcccttataaactaatccgggacagcccagacgccgtggaggtcacgggtctgcctgatgacatccccttccggaaccccaacacgtacgacatccaccggctggagaagatcctgaaggcccgagagcatgtccgcatggtcatcattaaccagctccaaccctttgcagaaatctgcaatgatgccaaggtgccagccaaagacagcagcattcccaagcgcaagagaaagcgggtctcggaaggaaattccgtctcctcttcctcctcgtcttcctcttcctcgtcctctaacccggattcagtggcatcggccaaccagatctcactcgtgcaatggccaatgtacatggtggactatgccggcctgaacgtgcagctcccgggacctcttaattactagacctcagtactgaatcaggacctcactcagaaagactaaaggaaatgtaatttatgtacaaaatgtatattcggatatgtatcgatgccttttagtttttccaatgatttttacactatattcctgccaccaaggcctttttaaataagtaaaaaaaaaaaaaaaaa

SEQ ID NO: 1459 - DNA, 2197 bp, Homo sapiens
cccagctccctgaaacaacagtaacctacccctgtgggtcatcatcatgccctccgacctggccaagaagaaggcagccaaaaagaaggaggctgccaaagctcgacagcggcccagaaaaggacatgaagaaaatggagatgttgtcacagaaccacaggtggcagagaagaatgaggccaatggcagagagaccacagaagtagatttgctgaccaaggagctagaggactttgagatgaagaaagctgctgctcgagctgtcactggcgtcctggcctctcaccccaacagtactgatgttcacatcatcaacctctcactcacctttcatggtcaagagctgctcagtgacaccaaactggaattaaactcaggccgtcgttatggcctcattggtttaaatggaattggaaagtccatgctgctctctgctattgggaagcgtgaagtgcccatccctgagcacatcgacatctaccatctgactcgagagatgccccctagtgacaagacacccttgcattgtgtgatggaagtcgacacagagcgggccatgctggagaaagaggcagagcggctggctcatgaggatgcggagtgtgagaagctcatggagctctacgagcgcctggaggagctggatgccgacaaggcagagatgagggcctcgcggatcttgcatggactgggtttcacacctgccatgcagcgcaagaagctaaaagacttcagtgggggctggaggatgagggttgcccttgccagagccctctttattcggcccttcatgctgctcctggatgagcctaccaaccacctggacctagatgcttgcgtgtggttggaagaagaactaaaaacttttaagcgcatcttggtcctcgtctcccattcccaggattttctgaatggtgtctgtaccaatatcattcacatgcacaacaagaaactgaagtattatacgggtaattatgatcagtatgtgaagacgcggctagagctggaggagaaccagatgaagaggtttcactgggagcaagatcagattgcacacatgaagaactacattgcgaggtttggtcatggcagtgccaagctggcccggcaggcccagagcaaggagaagacgctacagaaaatgatggcatcaggactgacagagagggtcgtgagcgataagacactgtcattttatttcccaccatgtggcaagatccctccacctgtcattatggtgcaaaatgtgagcttcaagtatacaaaagatgggccttgcatctacaataatctagaatttggaattgaccttgacacacgagtggctctggtagggcccaatggagcagggaagtcaactcttctgaagctgctaactggagagctactacccacagatggcatgatccgaaaacactctcatgtcaagatagggcgttaccatcagcatttacaagagcagctggacttagatctctcacctttggagtacatgatgaagtgctacccagagatcaaggagaaggaagaaatgaggaagatcattgggcgatacggtctcactgggaaacaacaggtgagcccaatccggaacttgtcagacgggcagaagtgccgagtgtgtctggcctggctggcctggcagaacccccacatgctcttcctggatgaacccaccaatcacctggatatcgagaccatcgacgccctggcagatgccatcaatgagtttgagggtggtatgatgctggtcagccatgacttcagactcattcagcaggttgcacaggaaatttgggtctgtgagaagcagacaatcaccaagtggcctggagacatcctggcttacaaggagcacctcaagtccaagctggtggatgaggagccccagctcaccaagaggacccacaacgtgtgcaccctgacattggcatctctgccaaggccatgagcatcatgaactcgtttgtaaacgacgtgtttgagcagctggcgtgtgaggctgcccggctggcccagtactcgggccggaccaccctgacatcccgagaagtccagacggctgtgcgtctgctgctgcctggggagctggccaagcacgctgtgtctgagggcaccaaggctgtcaccaagtacaccagctccaagtgacccagggcctgacaaaaataaagggtgaactgttaaaaaaaaaaaa

SEQ ID NO: 1460 - DNA, 2684 bp, Homo sapiens
cggaagcaggaagtgagtttgcgaacggagcagctgctgcagggcccatggcggacacccagtacatcctgcccaatgacatcggcgtgtctagcctggactgccgtgaggccttccgcctgctgtcacccacagagcgcctctatgcctaccacctgtcccgtgccgcctggtacggaggcctggctgtgctgcttcagacctcccctgaggccccctacatctatgctctgctcagccgcctcttccgcgcccaggaccccgaccagctgcgccaacatgccctggctgaaggccttaccgaggaggagtatcaggcgttcctggtctatgccgcgggtgtttactccaacatgggcaactacaagtcctttggtgacaccaagtttgttcccaacttgcccaaggaaaagctggaacgggtgatcctagggagtgaggctgctcagcagcacccagaagaagtcaggggcctctggcagacctgcggggagcttatgttctctctggagccaaggcttcgacacctcggactggggaaggagggaatcaccacctatttctctgggaattgtaccatggaagatgccaaattggcccaggactttctggactcacagaacctcagtgcctacaacacccggctcttcaaagaggtcgatggagaagggaagccctactacgaggtgcggctggcttctgtgcttggctcagagccttccctggactctgaggtgacttccaagctgaagagctatgaattccggggaagccctttccaggtgacccggggggactacgcgcccatcctccagaaggtggtggagcagctggagaaagccaaggcctatgcagccaacagccaccaggggcagatgctggcccagtatatagagagcttcacccagggctccatcgaggcccacaagaggggctcccgcttctggatccaggacaaaggccccatcgtggagagttacatcgggttcatcgagagctaccgcgacccctttggttcccgaggagaatttgaaggtttcgtagctgtggtgaacaaggccatgagtgccaagtttgagcggctggtggcgagcgcagagcagctgctgaaggagctgccctggcccccaacctttgagaaggacaagttcctcacccctgacttcacctccctggatgttctcaccttcgctggctccggcatccctgccggcatcaacatccccaactacgatgatctgaggcagacggaaggctttaagaacgtgtcgctggggaatgtgctggctgtggcctacgccacgcagcgggagaagcttacctttctggaggaggatgacaaggacctgtacatcctctggaaggggccctccttcgatgtgcaggtgggcctgcacgagctgctgggccatggcagtggcaagctcttcgtacaggacgaaaaaggagcattcaactttgaccaggaaacagtgatcaacccagagacgggcgagcagattcagagctggtatcggagcggggagacctgggatagcaagttcagcaccatcgcctccagctacgaagagtgccgggctgagagcgtgggtctctacctctgtctccacccgcaagtgctggagatctttggctttgagggggctgatgcggaggacgtgatctacgtgaactggctcaacatggttcgggccgggctgctcgctctggagttctacacacctgaggccttcaactggcgacaggcccatatgcaggcccggtttgtgatcctgagagtcttgctggaggctggcgagggactcgttaccatcactcccaccacaggctccgatgggcgcccagatgcccgggtccgcctcgaccgcagcaagatccggtctgtgggcaagcctgctctagagcgcttcctgcggagacttcaggtgctgaagtccacaggggatgtggccggagggcgggccctgtacgaggggtatgcaacggtcactgatgcgccccccgagtgcttcctcaccctcagggacacggtgctgctgcgtaaggaatctcggaagctcattgttcagcccaacactcgccttgaaggctcagacgtgcagcttctggaatacgaggcgtcagctgctggcctcatccgatccttctctgagcgtttcccagaggatggacccgagttggaggagatcctcacacagctggccacagccgatgcccgattctggaagggccccagtgaggccccatctggccaagcttgaggaagatgtgtggccttgcccccaattccatcagaccaaggctgcaagtggccctccattcgtgtgtgtatttaggggctggggagggggaggggcaggagcttggaccttggtactacctcagctgagggtggtgacacaaccccttccatttgtcagcactttccagcctgccaattgcttcccctctgtgatctcatttcatctgcactgccatacgtggagtgagcaagacagggcttaccatcctgtctaccagatgaggaaatggcagttctgagaagtcactggtctagatcccgcaggtggcacgtgacagctagggttcaaaacgttctcaccaaatccaatgctcctcacatattaattttataaccagacaaataaatattagagacaaccaaaaaaaaaaaaaaaaaaaaa

SEQ ID NO: 1461 - DNA, 5637 bp, Homo sapiens
aattccgggcgccagtcccgctccgcgccgcgccgctccgctccggctcgggctccggctcgcctcgggctgggctcgggctccgggggcggcgtccccgccgccgggccccgggacgggcggcgacgctccaaccatggcccgtgcccaggcgctcgtgctggcactcaccttccagctctgcgcgccggagaccgagactccggcagctggctgcaccttcgaggaggcaagtgacccagcagtgccctgcgagtacagccaggcccagtacgatgacttccagtgggagcaagtgcgaatccaccctggcacccgggcacctgcggacctgccccacggctcctacttgatggtcaacacttcccagcatgccccaggccagcgagcccatgtcatcttccagagcctgagcgagaatgatacccactgtgtgcagttcagctacttcctgtacagccgggacgggcacaggccgggcaccctgggcgtctacgtgcgcgttaatgggggccccctgggcagtgctgtgtggaatatgactggatcccacggccgtcagtggcaccaggctgagctggctgtcagcactttctggcccaatgaatatcaggtgctgtttgaggccctcatctccccagaccgcaggggctacatgggcctagatgacatcctgcttctcagctacccctgcgcaaaggccccacacttctcccgcctgggcgacgtggaggtcaacgcgggccagaacgcgtcgttccagtgcatggccgcgggcagagcggccatgcgccaacgcttcctcttgcaacggcagagcggggccctggtgccggcggcgggcgttcggcacatcagccaccggcgcttcctggccactttcccgctggctgccgtgagccgcgccgagcaggacctgtaccgctgtgtgtcccaggccccgcgcggcgcgggcgtctctaacttcgcggagctcatcgtcaaggagcccccaactcccatcgcgcccccacagctgctgcgtgctggccccacctacctcatcatccagctcaacaccaactccatcattggcgacgggccgatcgtgcgcaaggagattgagtaccgcatggcgcgcgggccctgggctgaggtgcacgccgtcagcctgcagacctacaagctgtggcacctcgaccccgacacagagtatgagatcagcgtgctgctcacgcgtcccggagacggcggcactggccgccctgggccacccctcatcagccgcaccaaatgcgcagagcccatgagggcccccaaaggcctggcttttgctgagatccaggcccgtcagctgaccctgcagtgggaaccactgggctacaacgtgacgcgttgccacacctatactgtgtcgctgtgctatcactacaccctgggcagcagccacaaccagaccatccgagagtgtgtgaagacagagcaaggtgtcagccgctacaccatcaagaacctgctgccctatcggaacgttcacgtgaggcttgtcctcactaaccctgaggggcgcaaagagggcaaggaggtcactttccagacggatgaggatgtgcccagtgggattgcagccgagtccctgaccttcactccactggaggacatgatcttcctcaagtgggaggagccccaggagcccaatggtctcatcacccagtatgagatcagctaccagagcatcgagtcatcagacccggcagtgaacgtgccaggcccacgacgtaccatctccaagctccgcaatgagacctaccatgtcttctccaacctgcacccaggcaccacctacctgttctccgtgcgggcccgcacaggcaaaggcttcggccaggcggcactcactgagataaccactaacatctctgctcccagctttgattatgccgacatgccgtcacccctgggcgagtctgagaacaccatcaccgtgctgctgaggccggcacagggccgcggtgcgcccatcagtgtgtaccaggtgattgtggaggaggagcgggcgcggaggctgcggcgggagcgaggtggacaggactgcttcccagtgccattgaccttcgaggcggcgctggcccgaggcctggtgcactacttcggggccgaactggcggccagcagtctacctgaggccatgccctttaccgtgggtgacaaccagacctaccgaggcttctggaacccaccacttgagcctaggaaggcctatctcatctacttccaggcagcaagccacctgaagggggagacccggctgaattgcatccgcattgccaggaaagctgcctgcaaggaaagcaagcggcccctggaggtgtcccagagatcggaggagatggggcttatcctgggcatctgtgcaggggggcttgctgtcctcatccttctcctgggtgccatcattgtcatcatccgcaaagggagagaccactatgcctactcctactacccgaagccggtgaacatgaccaaggccaccgtcaactaccgccaggagaagacacacatgatgagcgccgtggaccgcagcttcacagaccagagcaccctgcaggaggacgagcggctgggcctgtccttcatggacacccatggctacagcacccggggagaccagcgcagcggtggggtcactgaggccagcagcctcctggggggctccccgaggcgtccctgtggccggaagggctccccataccacacggggcagctgcaccctgcggtgcgtgtcgcagaccttctgcagcacatcaaccagatgaagacggccgagggttacggcttcaagcaggagtatgagagcttctttgaaggctgggacgccacaaagaagaaagacaaggtcaagggcagccggcaggagccaatgcctgcctatgatcggcaccgagtgaaactgcacccgatgctgggagaccccaatgccgactacattaatgccaactacatagatggttaccacaggtcaaaccacttcatagccactcaagggccgaagcctgagatggtctatgacttctggcgtatggtgtggcaggagcactgttccagcatcgtcatgatcaccaagctggtcgaggtgggcagggtgaaatgctcacggtactggccggaggactcagacacctacggggacatcaagattatgctggtgaagacagagaccctggctgagtatgtcgtgcgcacttttgccctggagcggagaggctactctgcccggcacgaggtccgccagttccacttcacagcgtggccagagcatggcgtcccctaccatgccacggggctgctggctttcatccggcgcgtgaaggcctccaccccacctgatgccgggcccattgtcatccactgcagcgcgggcaccggccgcacaggttgctatatcgtcctggatgtgatgctggacatggcagagtgtgagggcgtcgtggacatttacaactgtgtgaagactctctgctcccggcgtgtcaacatgatccagactgaggagcagtacatcttcattcatgatgcaatcctggaggcctgcctgtgtggggagaccaccatccctgtcagtgagttcaaggccacctacaaggagatgatccgcattgatcctcagagtaattcctcccagctgcgggaagagttccagacgctgaactcggtcaccccgccgctggacgtggaggagtgcagcatcgccctgttgccccggaaccgcgacaagaaccgcagcatggacgtcctgccgcccgaccgctgcctgcccttcctcatctccactgatggggactccaacaactacattaatgcagccctgactgacagctacacacggagtgcggccttcatcgtgaccctgcacccgctgcagagcaccacgcccgacttctggcggctggtctacgattacgggtgcacctccatcgtcatgctcaaccagctgaaccagtccaactccgcctggccctgcctgcagtactggccagagccaggccggcagcaatatggcctcatggaggtggagtttatgtcgggcacagctgatgaagacttagtggctcgagtcttccgggtgcagaacatctctcggttgcaggaggggcacctgctggtgcggcacttccagttcctgcgctggtctgcataccgggacacacctgactccaagaaggccttcttgcacctgctggctgaggtggacaagtggcaggccgagagtggggatgggcgcaccatcgtgcactgcctaaacgggggaggacgcagcggcaccttctgcgcctgcgccacggtcctggagatgatccgctgccacaacttggtggacgttttctttgctgccaaaaccctccggaactacaaacccaacatggtggagaccatggatcagtaccacttttgctacgatgtggccctggagtacttggaggggctggagtcaagatagcggggccctggcctggggcacccactgcacactcagggccagacccaccatcctggactggcgaggaagatcagtgcctcctgctctgcccaaacacactcccatggggcaagcactggagtggatgctgggctatcttgctcccccttccactgtgggcagggcctttcgcttgtcccatgggcgggtggtgggccaaggaggagcttagcaagtctgcagcccagccccacctccatagggtcctgcaggcctgtgctgagaggcctggtgctgcctggcagagtgacaaaggctcaggacggctggctctgggggactcaggccaagccccttggcaccatcctggcttttggcagggatgagtgaggccctgcagagagcatcccaggccaaggttcccactcagcctgccccctctgcatgtgggtagaggatgtactgggacttggcatttaggattccatctggcccagcccctgaaggtcctggggaagcaggtctcaattctgaatagccagtggggcacactgactgtcctccccaggggaactgcagcgccctcctccccactgccccctgcagcccctgagatattttgctcactatccctccccacttgcttccctgatatgtgctctgagcttccctgaaccaggatctgcctattactgctgtgccccatggggggctccttccctgcctgacccactgttgcagaatgaagtcacctcgcccccctcttcctttaatcttcaggcctcactggcctgtcctgctcagcttgggccagtgacaatctgcaaggctgaacaacagcccctggggttgaggcccctgtggctcctggtcaggctgcccgttgtggggaggggcagtgttagagcagggctggtcataccctctggagttcagaggaagaggtaggaccagtgcttttttgtttcttttgttatttttggttgggtgggtgggaaggtctctttaaaatggggcaggccacacccccattccgtgcctcaatttccccatctgtaaactgtagatatgactactgacctacctcgcagggggctgtggggaggcataagctgatgtttgtaaagcgctttgtaaataaacgtgctctctgaatgccaaaaaaaaaaaaaaaaaaaaaa

SEQ ID NO: 1462 - DNA, 1113 bp, Homo sapiens
gggagaggaacagggccctggagcacctggtttcggggacagtagggttggtgggagttgcgatgatattgccacctacctcttacatcttttagtgcgtatgttctgtccacccagctactggttcatttgagtagatcggagtcagatgagtacatgtttacgggaggcgcttggttacgggatccagataggaatctttatctgagctgcttgtcagtttgttcgtctgtccctaggtctgtctgctatcagctatgccgctgcccgttgcgctgcagacccgcttggccaagagaggcatcctcaaacatctggagcctgaaccagaggaagagatcattgccgaggactatgacgatgatcctgtggactacgaggccaccaggttggagggcctaccaccaagctggtacaaggtgttcgacccttcctgcgggctcccttactactggaatgcagacacagaccttgtatcctggctctccccacatgaccccaactccgtggttaccaaatcggccaagaagctcagaagcagtaatgcagatgctgaagaaaagttggaccggagccatgacaagtcggacaggggccatgacaagtcggaccgcagccatgagaaactagacaggggccacgacaagtcagaccggggccacgacaagtctgacagggatcgagagcgtggctatgacaaggtagacagagagagagagcgagacagggaacgggatcgggaccgcgggtatgacaaggcagaccgggaagagggcaaagaacggcgccaccatcgccgggaggagctggctccctatcccaagagcaagaaggcagtaagccgaaaggatgaagagttagaccccatggaccctagctcatactcagacgccccccggggcacgtggtcaacaggactccccaagcggaatgaggccaagactggcgctgacaccacagcagctgggcccctcttccagcagcggccgtatccatccccaggggctgtgctccgggccaatgcagaggcctcccgaaccaagcagcaggattgaagcttcggcctccctggccctgggttaaaataaaagctttctggtgatcctgcccacc

SEQ ID NO: 1463 - DNA, 1719 bp, Homo sapiens
gaattctttagtaggggcggagtctgctgctgccctgcgctgccacctcggctacactgccctccgcgacgacccctgaccagccggggtcacgtccgggagacgggatcatgaagcgctcggtagccgtctggctcttggtcgggctcagcctcggtgtcccccagttcggcaaaggtgatatttgtgatcccaatccatgtgaaaatggaggtatctgtttgccaggattggctgatggttccttttcctgtgagtgtccagatggcttcacagaccccaactgttctagtgttgtggaggttgcatcagatgaagaagaaccaacttcagcaggtccctgcactcctaatccatgccataatggaggaacctgtgaaataagtgaagcataccgaggggatacattcataggctatgtttgtaaatgtccccgaggatttaatgggattcactgtcagcacaacataaatgaatgcgaagttgagccttgcaaaaatggtggaatatgtacagatcttgttgctaactattcctgtgagtgcccaggcgaatttatgggaagaaattgtcaatacaaatgctcaggcccactgggaattgaaggtggaattatatcaaaccagcaaatcacagcttcctctactcaccgagctctttttggactccaaaaatggtatccctactatgcacgtcttaataagaaggggcttataaatgcgtggacagctgcagaaaatgacagatggccgtggattcagataaatttgcaaaggaaaatgagagttactggtgtgattacccaaggagccaagaggattggaagcccagagtatataaaatcctacaaaattgcctacagtaatgatggaaagacttgggcaatgtacaaagtgaaaggcaccaatgaagacatggtgtttcgtggaaacattgataacaacactccatatgctaactctttcacaccccccataaaagctcagtatgtaagactctatccccaagtttgtcgaagacattgcactttgcgaatggaacttcttggctgtgaactgtcgggttgttctgagcctctgggtatgaaatcaggacatatacaagactatcagatcactgcctccagcatcttcagaacgctcaacatggacatgttcacttgggaaccaaggaaagctcggctggacaagcaaggcaaagtgaatgcctggacctctggccacaatgaccagtcacaatggttacaggtggatcttcttgttccaaccaaagtgactggcatcattacacaaggagctaaagattttggtcatgtacagtttgttggctcctacaaactggcttacagcaatgatggagaacactggactgtataccaggatgaaaagcaaagaaaagataaggttttccagggaaattttgacaatgacactcacagaaaaaatgtcatcgaccctcccatctatgcacgacacataagaatccttccttggtcctggtacgggaggatcacattgcggtcagagctgctgggctgcacagaggaggaatgaggggaggctacatttcacaaccctcttccctatttccctaaaagtatctccatggaatgaactgtgcaaaatctgtaggaaactgaatggtttttttttttttttcatgaaaaagtgctcaaattatggtaggcaactaacggtgtttttaagggggccggaattc

SEQ ID NO: 1464 - DNA, 820 bp, Homo sapiens
cagccagcgcccgcgatgactgccactctccgcccctacctgagtgccgtgcgggccacattgcaggctgccctctgcctggagaacttctcctcccaggttgtggaacgacacaacaagccggaagtggaagtcaggagtagcaaagagctcctgttacaacctgtgaccatcagcaggaatgagaaggaaaaggttctgattgagggctccatcaactctgtccgggtcagcattgctgtgaaacaggctgatgagatcgagaagattttgtgccacaagttcatgcgcttcatgatgatgcgagcagagaacttctttatccttcgaaggaagcctgtggaggggtatgatatcagctttctgatcaccaacttccacacagagcagatgtacaaacacaagttggtggactttgtgatccacttcatggaggagattgacaaggagatcagtgagatgaagctgtcagtcaatgcccgtgcccgcattgtggctgaagagttccttaagaatttttaaaccatctggctggatctcgtggccttccccctcagactacccatgtctccacgaaggcgtcctggagtcactccccgagcagcgcggcggcggcagggagttgggttggggtgggcatttgatgcgggaggtgggtggtgtgcttgctagctgggcaagaaagcagcagtggacctgccccaaggccacacgtgcctggtcaggctggcttctgatgttcagtcccctgggccgggacagattttttttaacgtcttgaaacttaaactctgtgcttgtaaaaaaaaaaaaaaaaaaa

SEQ ID NO: 1465 - DNA, 840 bp, Homo sapiens
gggttgaaacccgggcgccgccaagatgccggcttaccactcttctctcatggatcctgataccaaactcatcggaaacatggcactgttgcctatcagaagtcaattcaaaggacctgcccccagagagacaaaagatacagatattgtggatgaagccatctattacttcaaggccaatgtcttcttcaaaaactatgaaattaagaatgaagctgataggaccttgatatatataactctctacatttctgaatgtctgaagaaactgcaaaagtgcaattccaaaagccaaggtgagaaagaaatgtatacgctgggaatcactaattttcccattcctggagagcctggttttccacttaacgcaatttatgccaaacctgcaaacaaacaggaagatgaagtgatgagagcctatttacaacagctaaggcaagagactggactgagactttgtgagaaagttttcgaccctcagaatgataaacccagcaagtggtggacttgctttgtgaagagacagttcatgaacaagagtctttcaggacctggacagtgaagggagcccgggcagccaccgtctccagagccctgggcagcattttccagcaagatgtacacaatcttttgcctttatttcgtaaagttttatacagaagagagaagagcatgtctttacttgaaaaactcttgatcaagaatttgggtgggagaaaagaaagtgggttatcaagggtgatttgaaattttctgcagcattaaagctggcgcttaataagaataagtaataataaagaaatttctaacaaaaaaaaaaaaaaaaaaaaaaaaaaaaaa

SEQ ID NO: 1466 - DNA, 1428 bp, Homo sapiens
ggcacgagggagcccagagccggttcggcgcgtcgactgcccagagtccgcggccggggcgcgggaggagccaagccgccatggcctaccacagcttcctggtggagcccatcagctgccacgcctggaacaaggaccgcacccagattgccatctgccccaacaaccatgaggtgcatatctatgaaaagagcggtgccaaatggaccaaggtgcacgagctcaaggagcacaacgggcaggtgacaggcatcgactgggcccccgagagtaaccgtattgtgacctgcggcacagaccgcaacgcctacgtgtggacgctgaagggccgcacatggaagcccacgctggtcatcctgcggatcaaccgggctgcccgctgcgtgcgctgggcccccaacgagaacaagtttgctgtgggcagcggctctcgtgtgatctccatctgttatttcgagcaggagaatgactggtgggtttgcaagcacatcaagaagcccatccgctccaccgtcctcagcctggactggcaccccaacaatgtgctgctggctgccggctcctgtgacttcaagtgtcggatcttttcagcctacatcaaggaggtggaggaacggccggcacccaccccgtggggctccaagatgccctttggggaactgatgttcgaatccagcagtagctgcggctgggtacatggcgtctgtttctcagccagcgggagccgcgtggcctgggtaagccacgacagcaccgtctgcctggctgatgccgacaagaagatggccgtcgcgactctggcctctgaaacactaccactgctggcgctgaccttcatcacagacaacagcctggtggcagcgggccacgactgcttcccggtgctgttcacctatgacgccgccgcggggatgctgagcttcggcgggcggctggacgttcctaagcagagctcgcagcgtggcttgacggcccgcgagcgcttccagaacctggacaagaaggcgagctccgagggtggcacggctgcgggcgcgggcctagactcgctgcacaagaacagcgtcagccagatctcggtgctcagcggcggcaaggccaagtgctcgcagttctgcaccactggcatggatggcggcatgagtatctgggatgtgaagagcttggagtcagccttgaaggacctcaagatcaaatgacctgtgaggaatatgttgccttcatcctaactgctggggaagcggggagaggggtcagggaggctaatggttgctttgctgaatgtttctggggtaccaatacgagttcccataggggctgctccctcaaaaagggaggggacagatggggagcttttcttacctattcaaggaatacgtgcctttttcttaaatgctttcatttattgaaaaaaaaaaaaaaaaaaaa

SEQ ID NO: 1467 - DNA, 2704 bp, Homo sapiens
ggcacgaggagaaaacggccgggcggcggtggctgtaggttgtgcggctgcagcggctcttccctgggcggacgatggacagccagggcaggaaggtggtggtgtgcgacaacggcaccgggtttgtgaagtgtggatatgcaggctctaactttccagaacacatcttcccagctttggttggaagacctattatcagatcaaccaccaaagtgggaaacattgaaatcaaggatcttatggttggtgatgaggcaagtgaattacgatcaatgttagaagttaactaccctatggaaaatggcatagtacgaaattgggatgacatgaaacacctgtgggactacacatttggaccagagaaacttaatatagataccagaaattgtaaaatcttactcacagaacctcctatgaacccaaccaaaaacagagagaagattgtagaggtaatgtttgaaacttaccagttttccggtgtatatgtagccatccaggcagttctgactttgtacgctcaaggtttattgactggtgtagtggtagactctggagatggtgtgactcacatttgcccagtatatgaaggcttttctctccctcatcttaccaggagactggatattgctgggagggatataactagatatcttatcaagctacttctgttgcgaggatacgccttcaaccactctgctgattttgaaacggttcgcatgattaaagaaaaactgtgttacgtgggatataatattgagcaagagcagaaactggccttagaaaccacagtattagttgaatcttatacactcccagatggacgtatcatcaaagttgggggagagagatttgaagcaccagaagctttatttcagcctcacttgatcaatgttgaaggagttggtgttgctgaattgctttttaacacaattcaggcagctgacattgataccagatctgaattctacaaacacattgtgctttctggagggtctactatgtatcctggcctgccatcacggttggaacgagaacttaaacagctttacttagaacgagttttgaagggtgatgtggaaaaactttctaaatttaagatccgcattgaagacccaccccgcagaaagcacatggtattcctgggtggtgcagttctagcggatatcatgaaagacaaagacaacttttggatgacccgacaagagtaccaagaaaagggtgtccgtgtgctagagaaacttggtgtgactgttcgataaactccaaagcttgttcccatcatacccgtaatgctttcttttttcctttattgccaatctttgaactcattcaactccaggacatggaagaggcctctctctgccctttgactggaaaggtcaagttttattctggtgtcttggggaagctttgttaaatttttgttaatgtgggtaaatctgagtttaattcaactgcttccctatatagactagagggctaaggattctgtctgctgctttgtttcttctaagtaggcatttagatcattcctgtaggcttcctattttcactttactgctctaatgctgctagtcgtagtctttagcacactaggtggtatgcctttattagcataaaacaaaaaaaactttaacaggagcttttacatattactgggatggggggtggttcgggatgggtgggcagctgctgaaccctttagggcatttcctctgtaatgtggcgctttcaactgtactgctgcagctttaagtaccttaaagcttctcctgtgaacttcttagggaaatgttaggttcagaactaaagtgttttgggtgggttttgttgcgggggggagggtaacaatgggtggtcttctgatttttatttttgaggttttgtcaactggagtacgtagaggaactttatttacagtactttgatttggcaggttttcttctacttgtgctctgcctggagctgtttccatatgatataaaaagcaagtgtagtattccattactatgtggcttagggatttatttgttttttaaaatcaaccatgttagctgggattagactccctacagtccttcaatggaaaagtaacatttaaaaatcctttgggtaattcaaattacagatttaaaagagcttaagatctggtgttttgttaatgcttctgtttattccagaagcattaaggtaacccattgccaagtatcattcttgcaaattattcttttatataactgaccagtgcttaataaaacaagcaggtacttacaaataattactggcagtaggttataattggtggtttaaaaataacattggaatacaggacttgttgccaattgggtaattttcattagttgttttgtttgttttgatttgaaacctggaaatacagtaaaatttgactgtttaaaatgttggccaaaaaaatcaagatttaatttttttatttgtactgaaaaactaatcataactgttaattctcagccatctttgaagcttgaaagaagagtctttggtattttgtaaacgttagcagactttcctgccagtgtcagaaaatcctatttatgaatcctgtcggtattccttggtatctgaaaaaaataccaaatagtaccatacatgagttatttctaagtttgaaaaataaaaagaaattgcatcacactaattacaaaataaaaaaaaaaaaaaaaaa

SEQ ID NO: 1468 - DNA, 1736 bp, Homo sapiens
ggcacgagggctgcgcgacggcgcaggggctgcggggagcgccgcgcaggccgtgcagttcctagcgaggaggcgccgccgccattgccgctctctcggtgagcgcagccccgctctccgggccgggccttcgcgggccaccggcgccatgggccagtgcggcatcacctcctccaagaccgtgctggtctttctcaacctcatcttctggggggcagctggcattttatgctatgtgggagcctatgtcttcatcacttatgatgactatgaccacttctttgaagatgtgtacacgctcatccctgctgtagtgatcatagctgtaggagccctgcttttcatcattgggctaattggctgctgtgccacaatccgggaaagtcgctgtggacttgccacgtttgtcatcatcctgctcttggtttttgtcacagaagttgttgtagtggttttgggatatgtttacagagcaaaggtggaaaatgaggttgatcgcagcattcagaaagtgtataagacctacaatggaaccaaccctgatgctgctagccgggctattgattatgtacagagacagctgcattgttgtggaattcacaactactcagactgggaaaatacagattggttcaaagaaaccaaaaaccagagtgtccctcttagctgctgcagagagactgccagcaattgtaatggcagcctggcccacccttccgacctctatgctgaggggtgtgaggctctagtagtgaagaagctacaagaaatcatgatgcatgtgatctgggccgcactggcatttgcagctattcagctgctgggcatgctgtgtgcttgcatcgtgttgtgcagaaggagtagagatcctgcttacgagctcctcatcactggcggaacctatgcatagttgacaactcaagcctgagctttttggtcttgttctgatttggaaggtgaattgagcaggtctgctgctgttggcctctggagttcatttagttaaagcacatgtacactggtgttggacagagcagcttggcttttcatgtgcccacctacttacctactacctgcgactttctttttccttgttctagctgactcttcatgcccctaagattttaagtacgatggtgaacgttctaatttcagaaccaattgcgagtcatgtagtgtggtagaattaaaggaggacacgagcctgcttctgttacctccaagtggtaacaggactgatgccgaaatgtcaccaggtcctttcagtcttcacagtggagaactcttggccaaaggtttttgcggggaggaggaggaaaccagctttctggttaaggttaacaccagatggtgcccctcattggtgtccttttaaaaaatatttactgtagtccaataagatagcagctgtacaaaatgactaaaatagattgtaggatcatatggcgtatatcttggttcatcttcaaaatcagagactgagctttgaaactagtggtttttaatcaaagttggctttataggaggagtataatgtatgcactactgttttaaaagaattagtgtgagtgtgtttttgtatgaatgagcccattcatggtaagtcttaagcttgttggaaataatgtacccatgtagactagcaaaatagtatgtagatgtgatctcagttgtaaatagaaaaatctaattcaataaactctgtatcagcccccaacaaaaaaaaaaaaaaaaaa

SEQ ID NO: 1469 - DNA, 669 bp, Homo sapiens
atggggcgcttccgcgggggcctgcggtgcatcaagtacctgctgcttggcttcaacctgctcttctggctggctggatcggccgtcattgcttttggactatggtttcggttcggaggtgccataaaggagttatcatcagaggacaagtccccagagtatttctatgtggggctgtatgttctggttggagccggggccctgatgatggccgtggggttcttcgggtgctgcggaccatgctgggagtcgcaatgtgtgcttggatcattttttacctgcctcctggtgatatttgctgctgaagtaaccactggagtatttgcttttataggcaagggggtagctatccgacatgttcagaccatgtatgaagaggcttacaatgattaccttaaagacaggggaaaaggcaatgggacactcatcacctttccacttcaacatttccagtgctgtggaaaagaaagctccgaacaggtccaacctacatgcccaaaggagcttcttagacacaagaattgcatcgatgaaattgagaccataatcagtgttaagctccagctcattggaattgtcggtattggaattgcaggtctgacgatctttggcatgatattcagcatggtcctctgctgtgcgatacgaaactcacgagatgtgatatga

SEQ ID NO: 1470 - DNA, 4833 bp, Homo sapiens
gccatttcctcctcttgttttcactccggattctccatgttggacccaaactgaggagcccggagctgccgctgggggatcggggccgggggcacccgggggagccgctgcccgggccgcccgccctttgtacaggccgcctcccttcccggtccggggaggaaacgagaggggggatgtgaacagctgtggaagtcggagtctcgggagccggagcgggcccccgcccaggccccccagcccagcccagcccgcgcgcccgcccgtcctcccgtccagccagcccgggcccgcgggattgttagatggaacacggctccatcatcacccaggcgcggagggaagacgccctggtgctcaccaagcaaggcctggtctccaagtcctctcctaagaagcctcgtggacgtaacatcttcaaggcccttttctgctgttttcgcgcccagcatgttggccagtcaagttcctccactgagctcgctgcgtataaggaggaagcaaacaccattgctaagtcggatctgctccagtgtctccagtaccagttctaccagatcccagggacctgcctgctcccagaggtgacagaggaagatcaaggaaggatctgtgtggtcattgacctcgatgaaacccttgtgcatagctcctttaagccaatcaacaatgctgacttcatagtgcctatagagattgaggggaccactcaccaggtgtatgtgctcaagaggccttatgtggatgagttcctgagacgcatgggggaactctttgaatgtgttctcttcactgccagcctggccaagtatgccgaccctgtgacagacctgctggaccggtgtggggtgttccgggcccgcctattccgtgagtcttgcgtgttccaccagggctgctacgtcaaggacctcagccgcctggggagggacctgagaaagaccctcatcctggacaactcgcctgcttcttacatattccaccccgagaatgcagtgcctgtgcagtcctggtttgatgacatggcagacactgagttgctgaacctgatcccaatctttgaggagctgagcggagcagaggacgtctacaccagccttggggcagctgcgggccccttagcctgccctgcttccaagcgacggccatcccagtaggggactttcccacactgtgcctttacgatcagcgtgacagagtagaagctggagtgcctcaccacacggcccggaaacagcgggaagtaactggaaagagctttaggacagcttagatgccgagtgggcgaatgccagaccaatgatacccagagctacctgccgccaacttgttgagatgtgtgtttgactgtgagagagtgtgtgtttgtgtgtgtgttttgccatgaactgtggccccagtgtatagtgtttcagtgggggagaagctgaaagaccaagactcttcccaagttagcttgtctcctctcctgtcaccctaagagccactgagttgtgtagggatgaaractattgaagactccattgccaaaccatggcctttcctcagtgttgtaaggcctatgccaaggataaaggaagggtatgcctttgggtactccaggcatacacctttctgaaatccttctccagccagctgctgcagacaaaagatcacatttctgggaagatgagaacttgtttccagaccagcatccagtggccatcaggtcttgtggcccaaaggctatgcttgcctccggctgagtgcctgggataggccttttctatgtctccccaaggctggggtgctgagcctgccttcctcaccacctagccatagtctcaaacctgtggggaaggaggttttctccctgcccgggaagaggacagataactgatttccgttcttttgactgtgttttaaaattctctttctaaacacagagtgttgggcctggtttgtttctgacaaagttacagtcctgggcctgtaatgaatgtcggcggcgctggggttgcagggaaaagacaaatcctcaaagcgtggacgtgtgtccccatggcttgtggatcagctaagctcgggatcatttccataagtctgcttttcagggattctctgctggtgctggtgcaaggacttctgttccaaaggctgggaaaaactaagctgtcccagcccctcccatttcttgggcagggctcttttcctgttgtgtcttcccccagggcctgtcctgtaccgagctctgtctgttccagcctacatccttcctgggtgttgcttttcctcttaagggcctcagaactcttgctcttcctggggtgagggggaatgagtgttcttgacatgtgacagcctaatgcgcatgctttctgcctctggtaacaggagtgagtgagcccctcagacctgcactctgggtgtctcctgcttacaaaggttcttaatagtgaatgctttaaaattaaagtcatcacgaaatggaagttttcccagggtggaaaataagaggaagtgctgctgtaattgggagcacaaggggcctcccaaaaaggagccccacctcagcatcactgccttaatcgtggcctccctggggtgggtggggttctctcctccctccctccctcctcctggggtgggagggcgctcctgttcccatctctgtgttccctggaggcaggtatcacaaagcatttgtgaattgctttaggtgcagggacaccacccactcaggactcttccccatcatcccttccattgccacaccctagatccagcctcaggaactaacaagttktgagaaaagcaggtggtagagcagcagcttcgtgctctcagcggtggctggctggcatttttctctagcgttgtggtgccaccttcccttcttgtcccaaggttataaggccttgtctttctctttggaatcataaagtggaacagagtccccagaactcatgtgghcatttccgacagcatcactccccggtgcctatggggtcccggtgtacctaaagggagaaggaccccatgtgctagccagaaatatactgtctcttgaaggaaagcaggagctcagactcttagagccagctgtggcttcggacccaaggcctgacctaggctgctatcctaatattggaggaggggcctctcttccaagccccaccctaagggttagcccttggacaaatcttgtgccgtctaggcccagccaggcttttctgactaaataagcaataagaggctctaagctgactgagttgcaaggaccctttccgccctcccttggatctccatgtttctccagatggcggaagagcatgtgccaccccctttcctaacagacttgtccaagtgcttggcgtgggacccatgaccaaagcccaggatggcttggtgggagtgtccctgctgcatctgcatgaagcccctgctttttaggcctcactcccatcagaaccctgcctgcccacctgcaactcccccccaacaatgccattcccacttgccccagagaagctactcggccaaacctagccagggtctgttcttgtggaccagagccagcctagtcattatttgctgtcgggtttccagtttcaccgtgtgttagggtgagggatgattgtaaaatttgctcctcaaaggaatcaggccagactcaattttgggagggcaagacagggaggaggccgcttcatcccagactctcttctagggcttcccaccatcagcccctcccacttgagactggtctttgggaggcaataggccaccatgcctggtcagcaccaattcaagccatgccaggaatctgcctacctgccaggttcagttcttttaaggtgcctcttcagggacacagtgtgtctctctgattgggcttctaaatcaaaagcctgatgttcgtgtccctctcatagggggagctttggacacaggaccagtttggaaaagggtcaggtaagggtttccactctgcacattgtagagggaacactctgtaggcccatgggtcccttactagagaggttgagtgaatttgccttcagttaacatgggaccttctgtttagcttcctcttgcttcccaaagattttaagcattttgtaaatgtataaactcacctctggtaacagtggcccagacgctgctttgtgctaaaagcatgggaaatgtaaaggcagtctttctctgggaaatggatgctattctattctgctgcccctacctgttcctgaggcctcatttagaaagaaaatcccctcagaaggctgtctggcacccagtgtcctagccaggccaagtatatgagaaaggtaagtccattttccccttcaggtcctcagtggattacttaaccactgctgtccctcggtccctttttcctaaacgggtttagttctgtcttttttctccttttttctaaatgctggtaaatatttacattcagccagggaagaggaggccagaggtcgggccagctgccccattcttttaacgttgtagggcctgcccatggagcggaccctcctctttgggcctcgtgagcttttttgcttatcatgttccatttcgtgccgctttcccccttcaagatgccatttggagggtaggggatctgcttcccactgtgactgggctatgggattctgactaccttgcttacagattcatggtttgataaatttgttgtattccaaaacttgaaatgcaggacgccattaagtgtctgtttatatttttggaatatttgtattacttacaattaattaataaaagtgggtttaaaaaacctttccaggaaaaaaaaaaaaaaaaaaaaaaaaaaaaaaaaaaaaa

SEQ ID NO: 1471 - DNA, 2828 bp, Homo sapiens
gcgctacggcggacccggctgggcagttccttccccagaaggagagattcctctgccatggagtcctacgatgtgatcgccaaccagcctgtcgtgatcgacaacggatccggtgtgattaaagctggttttgctggtgatcagatccccaaatactgctttccaaactatgtgggccgacccaagcacgttcgtgtcatggcaggagcccttgaaggcgacatcttcattggccccaaagctgaggagcaccgagggctgctttcaatccgctatcccatggagcatggcatcgtcaaggattggaacgacatggaacgcatttggcaatatgtctattctaaggaccagctgcagactttctcagaggagcatcctgtgctcctgactgaggcgcctttaaacccacgaaaaaaccgggaacgagctgccgaagttttcttcgagaccttcaatgtgcccgctcttttcatctccatgcaagctgtactcagcctttacgctacaggcaggaccacaggggtggtgctggattctggggatggagtcacccatgctgtgcccatctatgagggctttgccatgccccactccatcatgcgcatcgacatcgcgggccgggacgtctctcgcttcctgcgcctctacctgcgtaaggagggctacgacttccactcatcctctgagtttgagattgtcaaggccataaaagaaagagcctgttacctatccataaacccccaaaaggatgagacgctagagacagagaaagctcagtactacctgcctgatggcagcaccattgagattggtccttcccgattccgggcccctgagttgctcttcaggccagatttgattggagaggagagtgaaggcatccacgaggtcctggtgttcgccattcagaagtcagacatggacctgcggcgcacgcttttctctaacattgtcctctcaggaggctctaccctgttcaaaggttttggtgacaggctcctgagtgaagtgaagaaactagctccaaaagatgtgaagatcaggatatctgcacctcaggagagactgtattccacgtggattgggggctccatccttgcctccctggacacctttaagaagatgtgggtctccaaaaaggaatatgaggaagacggtgcccgatccatccacagaaaaaccttctaatgtcgggacatcatcttcacctctctctgaagttaactccactttaaaactcgctttcttgagtcggagtgtttgcgaggaactgcctgtgtgtgagtgcgtgtgtggatatgagtgtgtgcgcacatgcgagtgccgtgtggccctgggaccctgggcccagaaaggacgatgaactacccgcagtggtgatgcctgaggcctggggttgaccactaactggctcctgacagggaagagcgctggcagaggctgtgctccctcctcaggtggcctctggctggctgtgggggactccgtttactaccacagggagacagagggaggtaagccatcccccgggagaccttgctgctgaccatcctaggctgggctggcccaccctcacccccacccccagggtgccctgaggccccaggcagctgctgcctccactatcgatgcctcctgactgcacactgaggactgggactggggttgagttctgtctggttttgttgccattttggtttgggaggctggaaaagcaccccaagaagctattacagagactggagtcaggagagagcaggaggccctcatgttcaccagggaacaggaccacaccggccactgaaggagggcaggagcagtcctccctctgaatggctgcagagttaatgttcccagcccagtcccctttcgggggccttgggagagtttaaggcacctgctggttccaggacctcgctttccatctgttcttgttgcaatgccatcttcaaaccgttttatttattgaagtgtttgttcagttaggggctggagagagggagcttgctgcctcctgccttgctacactaatgtttacagcacctaagcttagcctccagggccccacctctcccagctgatggtgagctgacagtgtccacaggttccaggaccatttgagattggaagctacactcaaagacactcccaccaggctctttctcccttttcctcttctcactgccctggaatcaacaggctggttgctggttagattttctgaaacaggaggtaaaatttttctttggcagaggcccctaagcaagggaggggtgttggagagccagtgcccttaagactggagaaagctgcaatttaccaagttgccttttgccactgtagctgaccaggggactaggttgtagaggtgggaaggcccctctgggctgatcttgtgccattcttgaccttggacctgcttggttaaggagggagtgggccagaccagagtgccaggagctaatggagccaggcctgacacctaggagtggtccaaagccttcagcctagatggtgcaaagctggggccagcctgtcttcaccggcaccctcacctgtgacaccaagacccaccccaatccagacttcacacagtattctcccccacgccgtctatgaccaaaggcccctgccaggtgtgggtccacagcagcaggtatgtgtgaaagcaacgtagcgccccgcggactgcagtgcgcttaaccaactcacctcccttctcttagcccaagcctgtccctcgcacagcctcgcacaaaccacattgcctggtggggcccagtgtactgaaataaagtcgttccgatagacacgtcaaaaaaaaaaaa

SEQ ID NO: 1472 - DNA, 3240 bp, Homo sapiens
gtctgagtcttgcgtgggtcctctatatagggtgagaagcgtggcgctcggttcctgcctcggggaagtcctggcgcagatgggccacggggccggcgtggcggcgcctgggaccgactgaggcctaggcgccggagccggccgcgcctgggctggagcggggctcctcggcctggactgggagcccccggccccgggctcctgctggcgccgtccaaccttacatgggttcagggcgccttcgtaggcgggcacggctggtttcgggctaaggcgctctggagacctgacgatggcgtcgggcccgggctcccaggaacgggaagggctcctgatagtgaagctggaggaggactgcgcctggagccaggagctgcccccacctgacccaggaccgagccccgaggcctcccacttgcgcttcagacggttccgcttccaagaggcagctggtccccgggaagccctcagccggctccaagagctttgccatgggtggcttcggcctgagatgcgcacgaaggagcagatcttggagctgctggtgttagagcagttcctgaccatcctgccccaggagatccagagcagggtgcaggagctgcatccggagagcggcgaagaagcggtgacccttgtggagggtatgcagagagagcttgggagactgagacaacaggtcacaaaccatgggcggggaacagaagtgcttttggaggagcctttgcctctggaaacagcacgagagtcaccgagcttcaagctggagccaatggagactgagcgaagccctggccccaggctgcaggagctgctaggccccagcccccaaagggacccccaggctgtaaaggagagggcattatctgctccctggctttctctttttcctcctgaagggaacatggaagacaaggagatgactgggccccagttgcctgagagcttagaggacgtggcaatgtacatctcccaggaggagtgggggcatcaggatcctagtaagagggccctctccagggacacggtgcaggagagttatgagaatgtggactcactggagtctcacattcccagtcaggaggtcccaggcacccaggtgggacaaggaggaaagctatgggatcccagtgtccagagctgcaaggagggcctgagccccagaggcccagctccaggagaagagaaatttgagaacctggaaggtgttccgtctgtatgctctgagaacatccaccctcaggtgctgcttcctgaccaggcccgaggggaggtgccctggagtcctgagctgggaagacctcatgaccggtcgcaaggggattgggcgcctcccccagagggtggaatggagcaggccttggcaggagcctcaagtggcagagaactggggcgaccgaaggaactgcagccaaagaaactccatttatgtcccttgtgtggcaaaaatttctctaacaactcaaacctaattaggcaccagagaatacatgcagctgaaagactgtgtatgggtgtggactgcactgaaatctttggtgggaacccacgtttcctgtcactacacagagcacacctgggagaggaggcccacaagtgccttgaatgtgggaaatgcttcagtcagaacacccatctgactcgccaccaacgcacccacacgggtgagaagccctatcagtgcaacatttgcggaaaatgtttctcctgcaactccaacctccacaggcaccagagaacgcacactggggagaagccctacaagtgccctgagtgtggggagatctttgctcacagttccaacctccttcggcaccagagaattcacactggagagcgaccttataagtgtcccgagtgtgggaaaagtttctctcggagttcacacctcgtcattcacgaaagaactcatgagagagagagactttaccccttctctgagtgtggggaagctgtgagtgacagcaccccctttcttacaaaccatggagcccataaggcagagaagaagctctttgaatgtttgacttgtgggaaaagcttccggcagggcatgcacctcaccagacatcagagaacacacacaggagagaaaccgtataaatgtaccctttgtggggaaaacttctctcatagatccaatttaatcaggcaccagagaatccacacaggagaaaaaccctatacctgtcatgagtgcggagacagcttctctcacagctccaatcggattcgccacctgagaacgcatacgggagagagaccctataaatgttctgaatgtggagaaagcttctctcggagttcccgtcttatgagtcatcagagaactcacacaggttagtaacagtggggtttctctttgccccaggtgaggtggcatattcagaggagcctgttggcaagagctggtattccctgcccagccgaccaaatgacctctgcattcttcaggtaatgggggctcattgtgagggaggtgcagaggcagcagaggattggcataaaactgaaaaggagttctgtctgcatgagaaaggatggcaagtctctgaggtgacctcagggtggaattctctgttaagtccaccctgccccagggtgctcctaccctcttggtctttttaaagccaaggtgcgatttgggcacctgactgtccagtttaccttaacaagtttgggaatccatgtgatgtttttgatacttcttcctcatttgggacattcagtaggagcatttgggcttccggggcccctgagaccaaagaagaggggccaagtaccctgggaaatcagctgaaggtcaacaaaagactggttgtgagttgcagctgtcccgaaggccccagttgggaagccatgggcagtccagatcaagccaccacgtgccctacgatggcctaacaggagtgcccattggcagattacacatgtaaatatgacctcagacaaaaaggaaccagaggcccaagggcaataataaggtggaatttgcaggtcagcccaggaattggcagaggaagtaggtgtctgataaccctttgtggagaatgagattccccccacctgtgtgagaaaaataaacagctctggagtcttgttcctgactccagaggaacgagagcattccaggaaagagagattccctggaaaattgaaaatgtgaatcctagggggaaattggggattgtgtctttccctgttgaaaatgtttggatgggaataaatatcttcaggaaa

SEQ ID NO: 1473 - DNA, 1882 bp, Homo sapiens
gaattcgggcgtgggcgcgggggcgcggcgtgcggcacgctgcagggctgaagcggcggcggcggtggggactgcacgtagcccggcgctcggcatggctctcctggtgctcggtctggtgagctgtaccttctttctggcagtgaatggtctgtattcctctagtgatgatgtgatcgaattaactccatcaaatttcaaccgagaagttattcagagtgatagtttgtggcttgtagaattctatgctccatggtgtggtcactgtcaaagattaacaccagaatggaagaaagcagcaactgcattaaaagatgttgtcaaagttggtgcagttgatgcagataagcatcattccctaggaggtcagtatggtgttcagggatttcctaccattaagatttttggatccaacaaaaacagaccagaagattaccaaggtggcagaactggtgaagccattgtagatgctgcgctgagtgctctgcgccagctcgtgaaggatcgcctcgggggacggagcggaggatacagttctggaaaacaaggcagaagtgatagttcaagtaagaaggatgtgattgagctgacagacgacagctttgataagaatgttctggacagtgaagatgtttggatggttgagttctatgctccttggtgtggacactgcaaaaacctagagccagagtgggctgccgcagcttcagaagtaaaagagcagacgaaaggaaaagtgaaactggcagctgtggatgctacagtcaatcaggttctggcctcccgatacgggattagaggatttcctacaatcaagatatttcagaaaggcgagtctcctgtggattatgacggtgggcggacaagatccgacatcgtgtcccgggcccttgatttgttttctgataacgccccacctcctgagctgcttgagattatcaacgaggacattgccaagaggacgtgtgaggagcaccagctctgtgttgtggctgtgctgccccatatccttgatactggagctgcaggcagaaattcttatctggaagttcttctgaagttggcagacaaatacaaaaagaaaatgtgggggtggctgtggacagaagctggagcccagtctgaacttgagaccgcgttggggattggagggtttgggtaccccgccatggccgccatcaatgcacgcaagatgaaatttgctctgctaaaaggctccttcagtgagcaaggcatcaacgagtttctcagggagctctcttttgggcgtggctccacggcacctgtaggaggcggggctttccctaccatcgttgagagagagccttgggacggcagggatggcgagcttcccgtggaggatgacattgacctcagtgatgtggagcttgatgacttagggaaagatgagttgtgagagccacaacagaggcttcagaccattttcttttcttgggagccagtggatttttccagcagtgaagggacattctctactttcttttcttgggagccagtggatttttccagcagtgaagggacattctctacactcagatgactctaccagtggccttttaaccaagaagtagtacttgattggtcatttgaaaacactgcaacagtgaacttttgcatctcaagaaaacattgaaaaattctatgaattgttgtagccggtgaattgagtcgtattctgtcacataatattttgaagaaaacttggctgtcgaaacatttttctctctgactgctgcttgaatgttcttggaggctgtttcttatgtatgggttttttttaatgtgatcccttcatttgaatattaatggctttttccattaaagaataaattggaaaaaagaaaaaaaaaaaaaggaattc

SEQ ID NO: 1474 - DNA, 810 bp, Homo sapiens
atgatgctccggctgctcagttccctcctccttgtggccgttgcctcaggctatggcccaccttcctctcactcttccagccgcgttgtccatggtgaggatgcggtcccctacagctggccctggcaggtttccctgcagtatgagaaaagtggaagcttctaccacacgtgtggcggtagcctcatcgcccccgattgggttgtgactgccggccactgcatctcgagggatctgacctaccaggtggtgttgggtgagtacaaccttgctgtgaaggagggccccgagcaggtgatccccatcaactctgagctgtttgtgcatccactctggaaccgctcgtgtgtggcctgtggcaatgacatcgccctcatcaagctctcacgcagcgcccagctgggagatgccgtccagctcgcctcactccctcccgctggtgacatccttcccaacaagacaccctgctacatcaccggctggggccgtctctataccaatgggccactcccagacaagctgcagcaggcccggctgcccgtggtggactataagcactgctccaggtggaactggtggggttccaccgtgaagaaaaccatggtgtgtgctggagggtacatccgctccggctgcaacggtgactctggaggacccctcaactgccccacagaggatggtggctggcaggtccacggtgtgaccagctttgtttctggctttggctgcaacttcatctggaagcctacggtgttcactcgagtctccgccttcatcgactggattgaggagaccatagcaagccactag

SEQ ID NO: 1475 - DNA, 673 bp, Homo sapiens
aagatgtagctgtgtagtctccttccatagctgctctaagggggctggcaacatggctcagcaggcttgccccagagccatggcaaagaatggacttgtaatttgcatcctggtgatcaccttactcctggaccagaccaccagccacacatccagattaaaagccaggaagcacagcaaacgtcgagtgagagacaaggatggagatctgaagactcaaattgaaaagctctggacagaagtcaatgccttgaaggaaattcaagccctgcagacagtctgtctgcgaggcactaaagttcacaagaaatgctaccttgcttcagaaggtttgaagcatttccatgaggccaatgaagactgcatttccaaaggaggaatcctggttatccccaggaactccgacgaaatcaacgccctccaagactatggtaaaaggagcctgccaggtgtcaatgacttttggctgggcatcaatgacatggtcacggaaggcaagtttgttgacgtcaacggaatcgctatctccttcctcaactgggaccgtgcacagcctaacggtggcaagcgagaaaactgtgtcctgttctcccaatcagctcagggcaagtggagtgatgaggcctgtcgcagcagcaagagatacatatgcgagttcaccatccctcaatag

SEQ ID NO: 1476 - DNA, 4665 bp, Homo sapiens
agccagcccgaggacgcgagcggcaggtgtgcacagaggttctccactttgttttctgaactcgcggtcaggatggttttctctgtcaggcagtgtggccatgttggcagaactgaagaagttttactgacgttcaagatattccttgtcatcatttgtcttcatgtcgttctggtaacatccctggaagaagatactgataattccagtttgtcaccaccacctgctaaattatctgttgtcagttttgccccctcctccaatgaggttgaaacaacaagcctcaatgatgttactttaagcttactcccttcaaacgaaacagaaaaaactaaaatcactatagtaaaaaccttcaatgcttcaggcgtcaaaccccagagaaatatctgcaatttgtcatctatttgcaatgactcagcattttttagaggtgagatcatgtttcaatatgataaagaaagcactgttccccagaatcaacatataacgaatggcaccttaactggagtcctgtctctaagtgaattaaaacgctcagagctcaacaaaaccctgcaaaccctaagtgagacttactttataatgtgtgctacagcagaggcccaaagcacattaaattgtacattcacaataaaactgaataatacaatgaatgcatgtgctgcaatagccgctttggaaagagtaaagattcgaccaatggaacactgctgctgttctgtcaggataccctgcccttcctccccagaagagttgggaaagcttcagtgtgacctgcaggatcccattgtctgtcttgctgaccatccacgtggcccaccattttcttccagccaatccatcccagtggtgcctcgggccactgtgctttcccaggtccccaaagctacctcttttgctgagcctccagattattcacctgtgacccacaatgttccctctccaataggggagattcaacccctttcaccccagccttcagctcccatagcttccagccctgccattgacatgcccccacagtctgaaacgatctcttcccctatgccccaaacccatgtctccggcaccccacctcctgtgaaagcctcattttcctctcccaccgtgtctgcccctgcgaatgtcaacactaccagcgcacctcctgtccagacagacatcgtcaacaccagcagtatttctgatcttgagaaccaagtgttgcagatggagaaggctctgtccttgggcagcctggagcctaacctcgcaggagaaatgatcaaccaagtcagcagactccttcattccccgcctgacatgctggcccctctggctcaaagattgctgaaagtagtggatgacattggcctacagctgaacttttcaaacacgactataagtctaacctccccttctttggctctggctgtgatcagagtgaatgccagtagtttcaacacaactacctttgtggcccaagaccctgcaaatcttcaggtttctctggaaacccaagctcctgagaacagtattggcacaattactcttccttcatcgctgatgaataatttaccagctcatgacatggagctagcttccagggttcagttcaatttttttgaaacacctgctttgtttcaggatccttccctggagaacctctctctgatcagctacgtcatatcatcgagtgttgcaaacctgaccgtcaggaacttgacaagaaacgtgacagtcacattaaagcacatcaacccgagccaggatgagttaacagtgagatgtgtattttgggacttgggcagaaatggtggcagaggaggctggtcagacaatggctgctctgtcaaagacaggagattgaatgaaaccatctgtacctgtagccatctaacaagcttcggcgttctgctggacctatctaggacatctgtgctgcctgctcaaatgatggctctgacgttcattacatatattggttgtgggctttcatcaatttttctgtcagtgactcttgtaacctacatagcttttgaaaagatccggagggattacccttccaaaatcctcatccagctgtgtgctgctctgcttctgctgaacctggtcttcctcctggactcgtggattgctctgtataagatgcaaggcctctgcatctcagtggctgtatttcttcattattttctcttggtctcattcacatggatgggcctagaagcattccatatgtacctggcccttgtcaaagtatttaatacttacatccgaaaatacatccttaaattctgcattgtcggttggggggtaccagctgtggttgtgaccatcatcctgactatatccccagataactatgggcttggatcctatgggaaattccccaatggttcaccggatgacttctgctggatcaacaacaatgcagtattctacattacggtggtgggatatttctgtgtgatatttttgctgaacgtcagcatgttcattgtggtcctggttcagctctgtcgaattaaaaagaagaagcaactgggagcccagcgaaaaaccagtattcaagacctcaggagtatcgctggccttacatttttactgggaataacttggggctttgccttctttgcctggggaccagttaacgtgaccttcatgtatctgtttgccatctttaataccttacaaggatttttcatattcatcttttactgtgtggccaaagaaaatgtcaggaagcaatggaggcggtatctttgttgtggaaagttacggctggctgaaaattctgactggagtaaaactgctactaatggtttaaagaagcagactgtaaaccaaggagtgtccagctcttcaaattccttacagtcaagcagtaactccactaactccaccacactgctagtgaataatgattgctcagtacacgcaagcgggaatggaaatgcttctacagagaggaatggggtctcttttagtgttcagaatggagatgtgtgccttcacgatttcactggaaaacagcacatgtttaacgagaaggaagattcctgcaatgggaaaggccgtatggctctcagaaggacttcaaagcggggaagcttacactttattgagcaaatgtgattcctttcttctaaaatcaaagcatgatgcttgacagtgtgaaatgtccaattttaccttttacacaatgtgagatgtatgaaaatcaactcattttattctcggcaacatctggagaagcataagctaattaagggcgatgattattattacaagaagaaaccaagacattacaccatggtttttagacatttctgatttggtttcttatctttcattttataagaaggttggttttaaacaatacactaagaatgactcctataaagaaaacaaaaaaaggtagtgaactttcagctaccttttaaagaggctaagttatctttgataacatcatataaagcaactgttgacttcagcctgttggtgagtttagttgtgcatgcctttgttgtatataagctaaattctagtgacccatgtgtcaaaaatcttacttctacatttttttgtatttattttctactgtgtaaatgtattcctttgtagaatcatggttgttttgtctcacgtgataattcagaaaatccttgctcgttccgcaaatcctaaagctccttttggagatgatataggatgtgaaatacagaaacctcagtgaaatcaagaaataatgatcccagccagactgagaaaatgtaagcagacagtgccacagttagctcatacagtgcctttgagcaagttaggaaaagatgcccccactgggcagacacagccctatgggtcatggtttgacaaacagagtgagagaccatattttagccccactcaccctcttgggtgcacgacctgtacagccaaacacagcatccaatatgaatacccatcccctgaccgcatccccagtagtcagattatagaatctgcaccaagatgtttagctttataccttggccacagagagggatgaactgtcatccagaccatgtgtcaggaaaattgtgaacgtagatgaggtacatacactgccgcttctcaaatccccagagcctttaggaacaggagagtagactaggattccttctcttaaaaaggtacatatatatggaaaaaaatcatattgccgttctttaaaaggcaactgcatggtacattgttgattgttatgactggtacactctggcccagccagagctataattgttttttaaatgtgtcttgaagaatgcacagtgacaaggggagtagctattgggaacagggaactgtcctacactgctattgttgctacatgtatcgagccttgattgctcctagttatatacagggtctatcttgcttcctacctacatctgcttgagcagtgcctcaagtacatccttattaggaacatttcaaaccccttttagttaagtctttcactaaggttctcttgcatatatttcaagtgaatgttggatctcagactaaccatagtaataatacacatttctgtgagtgctgacttgtctttgcaatatttcttttctgatttatttaattttcttgtatttatatgttaaaatcaaaaatgttaaaatcaatgaaataaatttgcagttaaga

SEQ ID NO: 1477 - DNA, 2044 bp, Homo sapiens
ctggacgagtccgagcgcgtcacctcctcacgctgcggctgtcgcccgtgtcccgccggcccgttccgtgtcgccccgcagtgctgcggccgccgcggcaccatggctgtgtttgtcgtgctcctggcgttggtggcgggtgttttggggaacgagtttagtatattaaaatcaccagggtctgttgttttccgaaatggaaattggcctataccaggagagcggatcccagacgtggctgcattgtccatgggcttctctgtgaaagaagacctttcttggccaggactcgcagtgggtaacctgtttcatcgtcctcgggctaccgtcatggtgatggtgaagggagtgaacaaactggctctacccccaggcagtgtcatttcgtaccctttggagaatgcagttccttttagtcttgacagtgttgcaaattccattcactccttattttctgaggaaactcctgttgttttgcagttggctcccagtgaggaaagagtgtatatggtagggaaggcaaactcagtgtttgaagacctttcagtcaccttgcgccagctccgtaatcgcctgtttcaagaaaactctgttctcagttcactccccctcaattctctgagtaggaacaatgaagttgacctgctctttctttctgaactgcaagtgctacatgatatttcaagcttgctgtctcgtcataagcatctagccaaggatcattctcctgatttatattcactggagctggcaggtttggatgaaattgggaagcgttatggggaagactctgaacaattcagagatgcttctaagatccttgttgacgctctgcaaaagtttgcagatgacatgtacagtctttatggtgggaatgcagtggtagagttagtcactgtcaagtcatttgacacctccctcattaggaagacaaggactatccttgaggcaaaacaagcgaagaacccagcaagtccctataaccttgcatataagtataattttgaatattccgtggttttcaacatggtactttggataatgatcgccttggccttggctgtgattatcacctcttacaatatttggaacatggatcctggatatgatagcatcatttataggatgacaaaccagaagattcgaatggattgaatgttacctgtgccagaattagaaaagggggttggaaattggctgttttgttaaaatatatcttttagtgtgctttaaagtagatagtatactttacatttataaaaaaaaatcaaattttgttctttattttgtgtgtgcctgtgatgtttttctagagtgaattatagtattgacgtgaatcccactgtggtatagattccataatatgcttgaatattatgatatagccatttaataacattgatttcattctgtttaatgaatttggaaatatgcactgaaagaaatgtaaaacatttagaatagctcgtgttatggaaaaaagtgcactgaatttattagacaaacttacgaatgcttaacttctttacacagcataggtgaaaatcatatttgggctattgtatactatgaacaatttgtaaatgtcttaatttgatgtaaataactctgaaacaagagaaaaggtttttaacttagagtagccctaaaatatggatgtgcttatataatcgcttagttttggaactgtatctgagtaacagaggacagctgttttttaaccctcttctgcaagtttgttgacctacatgggctaatatggatactaaaaatactacattgatctaagaagaaactagccttgtggagtatatagatgcttttcattatacacacaaaaatccctgagggacattttgaggcatgaatataaaacatttttatttcagtaacttttccccctgtgtaagttactatggtttgtggtacaacttcattctatagaatattaagtggaagtgggtgaattctactttttatgttggagtggaccaatgtctatcaagagtgacaaataaagttaatgatgattccaaaaaaaaaa

SEQ ID NO: 1478 - DNA, 2058 bp, Homo sapiens
ggcacgagggttacccctttgctttgttttatcggcattaccttttctacaaggagacctacctcatccacctcttccatacctttacaggcctctcaattgcttattttaactttggaaaccagctctaccactccctgctgtgtattgtgcttcagttcctcatccttcgactaatgggccgcaccatcactgccgtcctcactaccttttgcttccagatggcctaccttctggctggatactattacactgccaccggcaactacgatatcaagtggacaatgccacattgtgttctgactttgaagctgattggtttggctgttgactactttgacggagggaaagatcagaattccttgtcctctgagcaacagaaatatgccatacgtggtgttccttccctgctggaagttgctggtttctcctacttctatggggccttcttggtagggccccagttctcaatgaatcactacatgaagctggtgcagggagagctgattgacataccaggaaagataccaaacagcatcattcctgctctcaagcgcctgagtctgggccttttctacctagtgggctacacactgctcagcccccacatcacagaagactatctcctcactgaagactatgacaaccaccccttctggttccgctgcatgtacatgctgatctggggcaagtttgtgctgtacaaatatgtcacctgttggctggtcacagaaggagtatgcattttgacgggcctgggcttcaatggctttgaagaaaagggcaaggcaaagtgggatgcctgtgccaacatgaaggtgtggctctttgaaacaaacccccgcttcactggcaccattgcctcattcaacatcaacaccaacgcctgggtggcccgctacatcttcaaacgactcaagttccttggaaataaagaactctctcagggtctctcgttgctattcctggccctctggcacggcctgcactcaggatacctggtctgcttccagatgaaattcctcattgttattgtggaaagacaggctgccaggctcattcaagagagccccaccctgagcaagctggccgccattactgtcctccagcccttctactatttggtgcaacagaccatccactggctcttcatgggttactccatgactgccttctgcctcttcacgtgggacaaatggcttaaggtgtataaatccatctatttccttggccacatcttcttcctgagcctactattcatattgccttatattcacaaagcaatggtgccaaggaaagagaagttaaagaagatggaataatccatttccctggtggcctgtgcgggactggtgcagaaactactcgtctcccttttcacagcactcctttgccccagagcagagaatggaaaagccagggaggtggaagatcgatgcttccagctgtgcctctgctgccagccaagtcttcatttggggccaaaggggaaacttttttttggagaaggcgtcttgctttgtcacccacgctggaatgcagtggcgggatctcagctcaccgcaacctccacctcctgggttcaagtgattttcctgcctcagcctcccaagtagctgggaatacaggcacgccaccatgcccagctaatttttgtattttcagtagaaacgggatttcaccacgttggccaggctggtctcgaactcctgaccgcaagtgatccacccgcctccgcctcccaaagtgctgggattacaggcgtgagccaccgtgcccggcccaaaggggaaactcttgtgggaggagcagaggggctcacatctcccctctgattcccccatgcacattgccttatctctccccatctagccaggaatctattgtgtttttcttctgccaatttactatgattgtgtatgtgccgctaccaccaccccccccatgggggggtggagaggggtgcaaggccctgcctgctccactttttctaccttggaactgtattagataaaatcacttctgtttgttcagtttttcaaaaaaaaaaaaaaaaaa

SEQ ID NO: 1479 - DNA, 530 bp, Homo sapiens
gcaacgtccgacagaacgaggggacgtaacggaggcaggttggagccgctgccgtcgccatgacccgcggtaaccagcgtgagctcgcccgccagaagaatatgaaaaagcagagcgactcggttaagggaaagcgccgagatgacgggctttctgctgccgcccgcaagcagagggactcggagatcatgcagcagaagcagaaaaaggcaaacgagaagaaggaggaacccaagtagctttgtggcttcgtgtccaaccctcttgcccttcgcctgtgtgcctggagccagtcccaccacgctcgcgtttcctcctgtagtgctcacaggtcccagcaccgatggcattccctttgccctgagtctgcagcgggtcccttttgtgcttccttcccctcaggtagcctctctccccctgggccactcccgggggtgagggggttaccccttcccagtgttttttattcctgtggggctcaccccaaagtattaaaagtagctttgtaattcaaaaaaaaaaaaaaaaaa

SEQ ID NO: 1480 - DNA, 1398 bp, Homo sapiens
  misc_feature (1120)..(1121): n is a, c, g, or t
  misc_feature (1369)..(1369): n is a, c, g, or t
ctgcgccgcctttctccgctggcaacggcgccgctccccgctcctcctccccagccatggcgttcacgttcgcggccttctgctacatgctggcgctgctgctcactgccgcgctcatcttcttcgccatttggcacattatagcatttgatgagctgaagactgattacaagaatcctatagaccagtgtaataccctgaatccccttgtactcccagagtacctcatccacgctttcttctgtgtcatgtttctttgtgcagcagagtggcttacactgggtctcaatatgcccctcttggcatatcatatttggaggtatatgagtagaccagtgatgagtggcccaggactctatgaccctacaaccatcatgaatgcagatattctagcatattgtcagaaggaaggatggtgcaaattagctttttatcttctagcatttttttactacctatatggcatgatctatgttttggtgagctcttagaacaacacacagaagaattggtccagttaagtgcatgcaaaaagccaccaaatgaagggattctatccagcaagatcctgtccaagagtagcctgtggaatctgatcagttactttaaaaaatgactccttattttttaaatgtttccacatttttgcttgtggaaagactgttttccatatgttatactcagataaagattttaaatggtattacgtataaattaatataaaatgattacctctggtgttgacaggtttgaacttgcacttcttaaggaacagccataatcctctgaatgatgcattaattactgactgtcctagtacattggaagcttttgtttataggaacttgtagggctcattttggtttcattgaaacagtatctaattataaattagctgtagatatcaggtgcttctgatgaagtgaaaatgtatatctgactagtgggaaacttcatgggtttcctcatctgtcatgtcgatgattatatatggatacatttacaaaaataaaaaaaaaagcgggaattttcccttcgcttgaatattatccctgtatattgcatgaatgagagatttcccatatttccatcagagtaataaatatacttgctttaattnnttaagcataagtaaacatgatataaaaatatatgctgaattacttgtgaagaatgcatttaaagctattttaaatgtgtttttatttgtaagacattacttattaagaaattggttattatgcttactgttctaatctggtggtaaaggtattcttaagaatttgcaggtactacagattttcaaaactgaatgagagaaaattgtataaccatcctgctgttcctttagtgcaatacaataaaactntgaaattaagaaaaaaaaaaaaaaaaaaa

SEQ ID NO: 1481 - DNA, 1494 bp, Homo sapiens
ttgcagccgccggcagctactgcaaggcaaaagccggagtggacgtgtcttttgaaactgctgctctttcacttctcaggcgtcaccgagagctcagcacccaggctgaactctgtaccatttggaagaatggaagctgatgcatctgttgacatgttttccaaagtcctggagcatcagctgcttcagactaccaaactggtggaagaacatttggattctgaaattcaaaaactggatcagatggatgaggatgaattggaacgccttaaagaaaagagactccaggcactaaggaaagctcaacagcagaaacaagaatggctttctaaaggacatggggaatacagagaaatccctagtgaaagagacttttttcaagaagtcaaggagagtgaaaatgtggtttgccatttctacagagactccacattcaggtgtaaaatactagacagacatctggcaatattgtccaagaaacacctcgagaccaaatttttgaagctgaatgtggaaaaagcacctttcctttgtgagagactgcatatcaaagtcattcccacactagcactgctaaaagatgggaaaacacaagattatgttgttgggtttactgacctaggaaatacagatgacttcaccacagaaactttagaatggaggctcggttcttctgacattcttaattacagtggaaatttaatggagccaccatttcagaaccaaaagaaatttggaacaaacttcacaaagctggaaaagaaaactatccgaggaaagaaatatgattcagactctgatgatgattagagctcaataattctttgtaaattgtctttttttttctgcttcagatttaaatgtgtttttaaaattctattaatgtctatacattggtcacctaaatactcatattctcgagttttatacagttgtatcacatcgaaaagtgtctttactgttttctgtgtggccatcatgtttaagttgaggaaaactcagttcttaaattatctgggaagggtctggattctctatttttgagattgactttatcacaatatgattcttacatctttataccatttacaattgtgttttagatctacagagttagaaattcgaaaactattccaggactaattcttaatcggcattatttatacaagaggtcaagtaacatttactagcgcaatactgcacttgtaaatgaattataaacgctcttctggaatatatttaaataaccattaaagaactgcttattcattctggacactgcatgttgatgttgaatcaactgatgccagcagaaagctattttgatttgtgaacatactgccttatttaaagggtcctgattgcttgtattttaagacattcattaaaaagaaaccaggaaacacttttgaaataacagcataaggaacttcactgtctctgctcaataaaatacctgtaactggaaaaaaaaaaaaaaaaaaaaaaaaaaaa

SEQ ID NO: 1482 - DNA, 2894 bp, Homo sapiens
  misc_feature (2236)..(2236): n is a, c, g, or t
  misc_feature (2238)..(2238): n is a, c, g, or t
  misc_feature (2738)..(2738): n is a, c, g, or t
gggcggacaggcacagagggagggagcgagcgagcagtgagtaagccagcaagggcggtcgggtcccgaggtcagccgagatttctcaggtccctccggccccctccctggagtccacagcgcctccggtgtccagaggatcggacacggcccggcccggccatggcctcgttgctgaaggtggatcaggaagtgaagctcaaggttgattctttcagggagcggatcacaagtaaggcagaagacttggtggcaaattttttcccaaagaagttattagaacttgatagttttctgaaggaaccaatcttaaacatccatgacctaactcagatccactctgacatgaatctcccagtccctgaccccattcttctcaccaatagccatgatggactggatggtcccacttataagaagcgaaggttggatgagtgtgaagaagccttccaaggaaccaaggtgtttgtgatgcccaatgggatgctgaaaagcaaccagcagctggtggacattattgagaaagtgaaacctgagatccggctgttgattgagaaatgtaacacgccttcaggcaaaggtcctcatatatgttttgacctccaggtcaaaatgtgggtacagctcctgattcccaggatagaagatggaaacaactttggggtgtccattcaggaggaaacagttgcagagctaagaactgttgagagtgaagctgcatcttatctggaccagatttctagatattatattacaagagccaaattggtttctaaaatagctaaatatccccatgtggaggactatcgccgcaccgtgacagagattgatgagaaagaatatatcagccttcggctcatcatatcagagctgaggaatcaatatgtcactctacatgacatgatcctgaaaaatatcgagaagatcaaacggccccggagcagcaatgcagagactctgtactgaggccagggccagggccaggggactctgtgagtctggctcaagaccgacattgccttggtttgttacatgactatcgtgatggggaaactggctggaaatagtaatcacacctctctgtttttagttagagtctaatgaaactctcatctagttctgtgatgtgtttacctcttttttcaggcctcaggaactcttctatttccttccctaataccccacacccaacctgtcgtaatttctggagaactccaggtttgtgtgtgcaggatgttggcacaaaaatacctgtgttttcattctccccctctctccctcctgtgtctggcgctttatgttttcttccgtttgataattagttggttaaaagctgagggaaccggaaggaaagtgctaggtgttttttaggaactagggtggaggggggacgaacttctcttcctcacatgaggttactgtttctttcctctgtggggcattggatcctcccacagttgccctggtgatgacttaggacttcccatctgtgacatcccactttgaatcttgatcgtgacaagaaataccttaggccttcagtcaattccgaagctccttcagttgtttttataatgggcgtttcacatgcacatatgtgtatgcatgtatacgcccatacagacatgcacacacagactcctactccattagctaacataccctccctctccacaacccgtgtcacatacctttcaggaggtgacagttgtcttagttgtcatctacccagacaaacgtcctgggcccgtcctccctcctgatactgtagcctcttggtacccagggtgagttggtggagaacagagagatgagaagcagagggcttggggaaagcctgttcctctctgactcagccctttttggcattattgcaagagcttgactcctggttgccttttcccagccagttttcagttggggtgaaggtttctgcaagtgtgaggtccagatgctgctgctcatgttgggctttccttttgggaactatttctctttatttatagtgtcgggcttccggggaaagcaatcattggtgtgtatgtgtatgtgccatgcacacacgtgcatatatacacatttgtgtatgtggaaatgtgctgggcaagtcaaaactatagaagagttgcctcctgtctctcgaatcttccagagatatcacttaattgttaacagcttttgtgttaatccccttcatcccctagcacttttattctaccacggctggagagttgananctacagtcagcctgccagtgactcttagtgtctgtttctgacttatttttcctgtctctgtcttccaacccccaataatatttcccaccggggatgcatcatttttactcccaatattctgtagagagggagtcaggatgctgtcttcccacgaatagtactcagtaacaaaccaattgcattttagttgggcagtgctcccacccaccctgcagatccctccagctaaaacccttcccccttccctccatgtgtttctcagtttcccgttcgtttgttggactgttccactgcccctcctcctcaccctatcacccatggatcgtaatgtaaaattcttttaccatgtcaagaaattattaaaaatacaggtactttgacctctttctaaagccgcagaccctggtgcaatgctctggtggctagggatgtactcatgctcatatgtgtgcacgcttggacacccacctccatggacacctagccaccctgttgtgtgnccttatgccagttgagctgaatcttttccccagtatagtggaaagactgaggcttctgcctactgagcaaggttgggtgcttcatttgtgttcagtctgaattatgggaaagttagctcttcccagacctaagctgccttctctccctactttcag

SEQ ID NO: 1483 - DNA, 1324 bp, Homo sapiens
cggcacgagcgccgccgaggattcagcagcctcccccttgagccccctcgcttcccgacgttccgttcccccctgcccgccttctcccgccaccgccgccgccgccttccgcaggccgtttccaccgaggaaaaggaatcgtatcgtatgtccgctatccagaacctccactctttcgacccctttgctgatgcaagtaagggtgatgacctgcttcctgctggcactgaggattatatccatataagaattcaacagagaaacggcaggaagacccttactactgtccaagggatcgctgatgattacgataaaaagaaactagtgaaggcgtttaagaaaaagtttgcctgcaatggtactgtaattgagcatccggaatatggagaagtaattcagctacagggtgaccaacgcaagaacatatgccagttcctcgtagagattggactggctaaggacgatcagctgaaggttcatgggttttaagtgcttgtggctcactgaagcttaagtgaggatttccttgcaatgagtagaatttcccttctctcccttgtcacaggtttaaaaacctcacagcttgtataatgtaaccatttggggtccgcttttaacttggactagtgtaactccttcatgcaataaactgaaaagagccatgctgtctagtcttgaagtccctcatttaaacagaggtcaagcaataggcgcctggcagtgtcaagcctgaaaccaagcaataccgtcatgtttcagccaagcccagagccctaagattacaaacaactatggccggaacctcctcagctctccctctgcagagttccctaccctaagagaatgttaccacctgaacagtcctcggtgaatctgagaggagaggatggggtaaggcagaagcaccagctgtactactagaagggagcttttggtggtagatcccctggtgtctccaacctgactaggtggacagagctcaaagaggccctcttaccgctagcgaggtgataggacatctggcttgccacaaaggtctgttcgaccagacatatcctagctaagggatgtccaaacatcagaatgtgaggccaaccttctatcagagttaaacttttgacaagggaacaaatctcaaactgatccatcagtcatgtagctagctgtagagcttgcaacttaatagcagcagctgcccaatgccatgtgaagtaacaaactggtttttggtttttttttccccttcagttttaatgttatgtgtaatgtatttaaacccttatttaaataaaacttgttttcagaaaaaaaaaaaaaaaaaaaa

SEQ ID NO: 1484 - DNA, 5041 bp, Homo sapiens
gcggccgcgactattcggtacctgaaaacaacgatggcatggaaaacacttcccatttacctgttgttgctgctgtctgttttcgtgattcagcaagtttcatctcaagatttatcaagctgtgcagggagatgtggggaagggtattctagagatgccacctgcaactgtgattataactgtcaacactacatggagtgctgccctgatttcaagagagtctgcactgcggagctttcctgtaaaggccgctgctttgagtccttcgagagagggagggagtgtgactgcgacgcccaatgtaagaagtatgacaagtgctgtcccgattatgagagtttctgtgcagaagtgcataatcccacatcaccaccatcttcaaagaaagcacctccaccttcaggagcatctcaaaccatcaaatcaacaaccaaacgttcacccaaaccaccaaacaagaagaagactaagaaagttatagaatcagaggaaataacagaagaacattctgtttctgaaaatcaagagtcctcctcctcctcctcctcttcctcttcttcttcaacaatttggaaaatcaagtcttccaaaaattcagctgctaatagagaattacagaagaaactcaaagtaaaagataacaagaagaacagaactaaaaagaaacctacccccaaaccaccagttgtagatgaagctggaagtggattggacaatggtgacttcaaggtcacaactcctgacacgtctaccacccaacacaataaagtcagcacatctcccaagatcacaacagcaaaaccaataaatcccagacccagtcttccacctaattctgatacatctaaagagacgtctttgacagtgaataaagagacaacagttgaaactaaagaaactactacaacaaataaacagacttcaactgatggaaaagagaagactacttccgctaaagagacacaaagtatagagaaaacatctgctaaagatttagcacccacatctaaagtgctggctaaacctacacccaaagctgaaactacaaccaaaggccctgctctcaccactcccaaggagcccacgcccaccactcccaaggagcctgcatctaccacacccaaagagcccacacctaccaccatcaagtctgcacccaccacccccaaggagcctgcacccaccaccaccaagtctgcacccaccactcccaaggagcctgcacccaccaccaccaaggagcctgcacccaccactcccaaggagcctgcacccaccaccaccaaggagcctgcacccaccaccaccaagtctgcacccaccactcccaaggagcctgcacccaccacccccaagaagcctgccccaactacccccaaggagcctgcacccaccactcccaaggagcctacacccaccactcccaaggagcctgcacccaccaccaaggagcctgcacccaccactcccaaagagcctgcacccactgcccccaagaagcctgccccaactacccccaaggagcctgcacccaccactcccaaggagcctgcacccaccaccaccaaggagccttcacccaccactcccaaggagcctgcacccaccaccaccaagtctgcacccaccactaccaaggagcctgcacccaccactaccaagtctgcacccaccactcccaaggagccttcacccaccaccaccaaggagcctgcacccaccactcccaaggagcctgcacccaccacccccaagaagcctgccccaactacccccaaggagcctgcacccaccactcccaaggaacctgcacccaccaccaccaagaagcctgcacccaccgctcccaaagagcctgccccaactacccccaaggagactgcacccaccacccccaagaagctcacgcccaccacccccgagaagctcgcacccaccacccctgagaagcccgcacccaccacccctgaggagctcgcacccaccacccctgaggagcccacacccaccacccctgaggagcctgctcccaccactcccaaggcagcggctcccaacacccctaaggagcctgctccaactacccctaaggagcctgctccaactacccctaaggagcctgctccaactacccctaaggagactgctccaactacccctaaagggactgctccaactaccctcaaggaacctgcacccactactcccaagaagcctgcccccaaggagcttgcacccaccaccaccaaggagcccacatccaccacctctgacaagcccgctccaactacccctaaggggactgctccaactacccctaaggagcctgctccaactacccctaaggagcctgctccaactacccctaaggggactgctccaactaccctcaaggaacctgcacccactactcccaagaagcctgcccccaaggagcttgcacccaccaccaccaaggggcccacatccaccacctctgacaagcctgctccaactacacctaaggagactgctccaactacccccaaggagcctgcacccactacccccaagaagcctgctccaactactcctgagacacctcctccaaccacttcagaggtctctactccaactaccaccaaggagcctaccactatccacaaaagccctgatgaatcaactcctgagctttctgcagaacccacaccaaaagctcttgaaaacagtcccaaggaacctggtgtacctacaactaagactcctgcagcgactaaacctgaaatgactacaacagctaaagacaagacaacagaaagagacttacgtactacacctgaaactacaactgctgcacctaagatgacaaaagagacagcaactacaacagaaaaaactaccgaatccaaaataacagctacaaccacacaagtaacatctaccacaactcaagataccacaccattcaaaattactactcttaaaacaactactcttgcacccaaagtaactacaacaaaaaagacaattactaccactgagattatgaacaaacctgaagaaacagctaaaccaaaagacagagctactaattctaaagcgacaactcctaaacctcaaaagccaaccaaagcacccaaaaaacccacttctaccaaaaagccaaaaacaatgcctagagtgagaaaaccaaagacgacaccaactccccgcaagatgacatcaacaatgccagaattgaaccctacctcaagaatagcagaagccatgctccaaaccaccaccagacctaaccaaactccaaactccaaactagttgaagtaaatccaaagagtgaagatgcaggtggtgctgaaggagaaacacctcatatgcttctcaggccccatgtgttcatgcctgaagttactcccgacatggattacttaccgagagtacccaatcaaggcattatcatcaatcccatgctttccgatgagaccaatatatgcaatggtaagccagtagatggactgactactttgcgcaatgggacattagttgcattccgaggtcattatttctggatgctaagtccattcagtccaccatctccagctcgcagaattactgaagtttggggtattccttcccccattgatactgtttttactaggtgcaactgtgaaggaaaaactttcttctttaaggattctcagtactggcgttttaccaatgatataaaagatgcagggtaccccaaaccaattttcaaaggatttggaggactaactggacaaatagtggcagcgctttcaacagctaaatataagaactggcctgaatctgtgtattttttcaagagaggtggcagcattcagcagtatatttataaacaggaacctgtacagaagtgccctggaagaaggcctgctctaaattatccagtgtatggagaaatgacacaggttaggagacgtcgctttgaacgtgctataggaccttctcaaacacacaccatcagaattcaatattcacctgccagactggcttatcaagacaaaggtgtccttcataatgaagttaaagtgagtatactgtggagaggacttccaaatgtggttacctcagctatatcactgcccaacatcagaaaacctgacggctatgattactatgccttttctaaagatcaatactataacattgatgtgcctagtagaacagcaagagcaattactactcgttctgggcagaccttatccaaagtctggtacaactgtccttagactgatgagcaaaggaggagtcaactaatgaagaaatgaataataaattttgacactgaaaaacattttattaataaagaatattgacatgagtataccagtttatatataaaaatgtttttaaacttgacaatcattacactaaaacagatttgataatcttattcacagttgttattgtttacagaccatttaattaatatttcctctgtttattcctcctctccctcccattgcatggctcacacctgtaaaagaaaaaagaatcaaattgaatatatcttttaagaattcaaaactagtgtattcacttaccctagttcattataaaaaatatctaggcattgtggatataaaactgttgggtattctacaacttcaatggaaattattacaagcagattaatccctctttttgtgacacaagtacaatctaaaagttatattggaaaacatggaaatattaaaattttacacttttactagctaaaacataatcacaaagctttatcgtgttgtataaaaaaattaacaatataatggcaataggtagagatacaacaaatgaatataacactataacacttcatattttccaaatcttaatttggatttaaggaagaaatcaataaatataaaatataagcacatatttattatatatctaaggtatacaaatctgtctacatgaagtttacagattggtaaatatcacctgctcaacatgtaattatttaataaaactttggaacattaaaaaaataaattggaggcttaaaaaaaaaaaaaaaaa

SEQ ID NO: 1485 - DNA, 937 bp, Homo sapiens
cgcggccccagggctcacttggcgctgagaacgcgggtgcagcgtgtgatcgtccgtgcgtctagcctttgcccacgcagctttcagtcatggcctccggtaacgcgcgcatcggaaagccagcccctgacttcaaggccacagcggtggttgatggcgccttcaaagaggtgaagctgtcggactacaaagggaagtacgtggtcctctttttctaccctctggacttcacttttgtgtgccccaccgagatcatcgcgttcacaaccgtgaagaggacttccgcaaagctgggctgtgaagtgctgggcgtctcggtggactctcagttcacccacctggcttggatcaacaccccccggaaagagggaggcttgggccccttgaacatccccctgcttgctgacgtgaccagacgcttgtctgaggattacggcgtgctgaaaaacgatgagggcattgcttacaggggcctctttatcatcgatggcaagggtgtccttcgccagatcactgttaatgatttgcctgtgggacgctccgtggatgaggctctgcggctggtccaggccttccagtacacagacgagcatggggaagtttgtccggctgcttggaagcctggacgtgacacgattaagccgaacgtggatgacagcaaggaatatttctccaaacacaattaggctggctaacggatagtgagcttgtgcccctgcctaggtgcctgtgctgggtgtccacctgtgcccccacctgggtgccctatgctgacccaggaaaggccagacctgcccctccaaaatccacagtatgggaccctggagggctagcaaggccttctcatgcctccacctagaagctgaatagtgacgccctcccccaagcccacccagccgcacacaggcctagaggtaaccaataaagtattagggcc

SEQ ID NO: 1486 - DNA, 3184 bp, Homo sapiens
ctctgctgtgctgcctcaaacgcggagggctgcgtgcagtgggagcgggctccaggagcccgagcctccagccgtcctcagagcaaggcagcaccgaggcctggccacagcaatatccatctggaagctcttcccttcactcccaactctgaggttgcctaactctttattaaaaattcagaagggggaatgccagcccctagcatggactgtgatgtttccactctggttgcctgtgtggtggatgtcgaggtctttaccaatcaggaggttaaggaaaaatttgggggactgtttcggacttatgatgactgtgtgacgttccagctatttaagagtttcagacgtgtccgtataaacttcagcaatcctaaatctgcagcccgagctaggatagagcttcatgaaacccaattcagagggaaaaaattaaagctctactttgcacaggttcagactccagagacagatggagacaaactgcacttggctccaccccagcctgccaaacagtttctcatctcgcccccttcctccccacctgttagctggcagcccatcaacgatgccacgccagtcctcaactatgacctcctctatgctgtggccaaactaggaccaggagagaagtatgagctccatgcagggactgagtccaccccaagtgtcgtcgtgcacgtgtgcgacagtgacatagaggaagaagaggacccaaagacttccccaaagccaaaaatcatccaaactcggcgtcctggcctgccaccctccgtgtccaactgagctgcctgctccttctcgataatagccgtctcctctttatcatgctttttccccctgttgtttgtcaaaaaaaattgcctttaaattcctgggtgtttggttgtttgagattccttccttgttatcaagcctctcggacaaaagggctaggaaaaggtgatatgtctcctgatcatatcatacccattaagtataacccattatttagaaggttctagggaaaaaagtagtattttcttattaaacaatcagcacagcctatatctttgttctctcatgttgatccaagccagagacatcggtaacaaatagcacctgtgttgtttgtgaggtgtttcagtcccagtcctgatgtgtgtgcgttgttctctcctggccacttaaataggaccatatgtaaacttgactttgactgcatgagatatccctatctggtctcactcagtcctctgcatcccaacattcccaggacatgcatgatcaccagcatttattttcattatttgaggatatcttataactcacagattgtcagcatccagccatgtcctatctagattaggaaaatgatcagaatattccagctcaacaagtctgggtatactcactattgtgagtcaatacaccatagctctgttgaaattcctggaggcaaaattgaccttggccccaaagatattcctcaatagatttcaaacaccactcccctgtagaactctcccagcctcgttggggaggcttgtccagggtgatagagactgatttcagacaaacctatttattacaaaagtttcatggtgtctgaatgattgttttctctctttgtatatttgtacaaatgtttcagctgtgcttttaaaaaatctggatgttttttatttagtgattgttcgacaattagctgcttcaaaacataatgtgcattgcttatgaatgccttcatatactaatacagatactctgataatattacactctaataaggataatgctgaattttgaaaggacacaaaacatctaatgccaatatatacatggttagccaacatctttgctatcaagaccacttgttttaaataaagatgcaagtgtcagttgtagattattgggatgaagctaaatccccagaatgcagcagcagctgagcatgttaaaatggggaaggatgatagctacatgtatgccggtcctactcacgcgacacccgtgtgctcaaaaaagttacttgtttttgttacgtgtgattttcctatttctctagcccaaagtgcattacagaagatacacctatagaaccattaccttctgctatgtgtgccagggctcatctactcctgtacattaatggattactttagatgcaaatgcagattacaatggagtggggaagtactttcattacccaagcctcagaaaaacacacaagaacaataacacagcaaacagattgagggattgttgtggtttttgactaaggtgtatgttagtttcatcagaaacttaaaacatagactgatcactcagaaattaaagtccgttttactgtgaatatagcaatatagtactggacacagtactggtgaaactgaggagagcattgcttgtaaaatcctgagtttccataaggaaaatgaaaactccttttaaaaataaaatctgaggagtgtacaataagcatatgctttgactttcctttgctgtggaggtttttggtttttcattgatgataaacgactacagacttagtagtggagaaatggtgtcctctagtggaagaaatagtagctccgctattcagatgcagagcactgcagcatccagcctttcaaagctgactcttctcaatcatctgtgggtcatttgacttgattttttaagctaccctgaatttccagaatgcaggttctaaagaaatctagatgagagaaagtatttgaaaatgatttttaaatgttttttaaaagacacatctgacatttttaacaacttagtaaaagttgaaatgaccattctgtgtagtcataaaagaaacacaatgaagtgtatggcctctggagttagtcttagtaaaacttattgctctgtgtcaatgttaacctgtctcagatcaagtaattccttcactaggttgggtttggggaggggggaaaagaggggcttttcctaggagaacgataagaaatggaaagactccttgaagtgttgcaagggaacctcctagcactgtgaaagtcagaatcgcctcagcatttccatgacgcacattatgcaaatctctttagcactattttaaggttgaaaactttaacaatgaaggggaaggggaagatttccaccaactgaatcatttgtgcacgtgtatagctcaaagagcttagacttcaaatatatctggtgaatg

SEQ ID NO: 1487 - DNA, 2002 bp, Homo sapiens
tataacgtgagggctgaatgcagcccattctctggagaacttcctcacacaccgcagcaaagagaagactgaaagacaaacctgggtgcagccagagaggtccagatagatgagcttgtggcatccattccccaagttcagcctagggactccacgtaccccagctgggtctcattgttccagaactgcattagttaagattacccagacttggatttcaaaggaatactttcattgttccgtctgtaacacgaagtaattggggccagctggatgtcaggatgcgtgtggttaccattgtaatcttgctctgcttttgcaaagcggctgagctgcgcaaagcaagcccaggcagtgtgagaagccgagtgaatcatggccgggcgggtggaggccggagaggctccaacccggtcaaacgctacgcaccaggcctcccgtgtgacgtgtacacatatctccatgagaaatacttagattgtcaagaaagaaaattagtttatgtgctgcctggttggcctcaggatttgctgcacatgctgctagcaagaaacaagatccgcacattgaagaacaacatgttttccaagtttaaaaagctgaaaagcctggatctgcagcagaatgagatctctaaaattgagagtgaggcgttctttggtttaaacaaactcaccaccctcttactgcagcacaaccagatcaaagtcttgacggaggaagtgttcatttacacacctctcttgagctacctgcgtctttatgacaacccctggcactgtacttgtgagatagaaacgcttatttcaatgttgcagattcccaggaaccggaatttggcgaactacgccaagtgtgaaagtccacaagaacaaaaaaataaaaaactgcggcagataaaatctgaacagttgtgtaatgaagaagaaaaggaacaattggacccgaaaccccaagtgtcagggagacccccagtcatcaagcctgaggtggactcaactttttgccacaattatgtgtttcccatacaaacactggactgcaaaaggaaagagttgaaaaaagtgccaaacaacatccctccagatattgttaaacttgacttgtcatacaataaaatcaaccaacttcgacccaaggaatttgaagatgttcatgagctgaagaaattaaacctcagcagcaatggcattgaattcatcgatcctgggtctttgagatgaaaccctgcaagtagacttacgtgaatgatttttgctgtgccgcttttttagggctcacacatttagaagaattagatttatcaaacaacagtctgcaaaactttgactatggcgtattagaagacttgtattttttgaaactcttgtggctcagagataacccttggagatgtgactacaacattcactacctctactactggttaaagcaccactacaatgtccattttaatggcctggaatgcaaaacgcctgaagaatacaaaggatggtctgtgggaaaatatattagaagttactatgaagaatgccccaaagacaagttaccagcatatcctgagtcatttgaccaagacacagaagatgatgaatgggaaaaaaaacatagagatcacaccgcaaagaagcaaagcgtaataattactatagtaggataaggtagaaattgttctgattgtaattagttttgtattttctatactggtgttagaaaacatatgtttacatttgattaactgtgttgcctatttatgcagggtaatccagctaaaggaagctttctttaattataagtattattgtgactattatagtaatcaagagaatgctatcatcctgcttgcctgtccatttgtggaacagcatctggtgatatgcaattccacactggtaacctgcagcagttgggtcctaatgatggcattagactttcataatgtcctgtataaatgtttttactgcttttagaaaataaagaaaaaaaacttggttcatgttta

SEQ ID NO: 1488 - DNA, 1367 bp, Homo sapiens
gatctcaggctcggctccccgcccgccgcagcccactgttgacccggcccgtactgcggccccgtggccaccatgtccctgcacggcaaacggaaggagatctacaagtatgaagcgccctggacagtctacgcgatgaactggagtgtgcggcccgataagcgctttcgcttggcgctgggcagcttcgtggaggagtacaacaacaaggttcagcttgttggtttagatgaggagagttcagagtttatttgcagaaacacctttgaccacccataccccaccacaaagctcatgtggatccctgacacaaaaggcgtctatccagacctactggcaacaagcggtgactatctccgtgtgtggagggttggtgaaacagagaccaggctggagtgtttgctaaacaataataagaactctgatttctgtgctcccctgacctcctttgactggaatgaggtggatccttatcttttaggtacctcaagcattgatacgacatgcaccatctgggggctggagacagggcaggtgttagggcgagtgaatctcgtgtctggccacgtgaagacccagctgatcgcccatgacaaagaggtctatgatattgcatttagccgggccgggggtggcagggacatgtttgcctctgtgggtgctgatggctcggtgcggatgtttgacctccgccatctagaacacagcaccatcatttacgaagacccacagcatcacccactgcttcgcctctgctggaacaagcaggaccctaactacctggccaccatggccatggatggaatggaggtggtgattctagatgtccgggttccctgcacacctgtcgccaggttaaacaaccatcgagcatgtgtcaatggcattgcttgggccccacattcatcctgccacatctgcactgcagcggatgaccaccaggctctcatctgggacatccagcaaatgccccgagccattgaggaccctatcctggcctacacagctgaaggagagatcaacaatgtgcagtgggcatcaactcagcccgactggatcgccatctgctacaacaactgcctggagatactcagagtgtagtgttggtggcgctgtgcccacgaggcaggggcttttgtatttcctgcctctgccccacccccaaagtaagaagaaacatgtttccagtggccagtatgtctttcattgctttgcacccactgttaccagaagctgctctaggagttcctggccagtcaccccatcgccctctgtggcagactcagtgctgtgtggcgccctcctagcccagggctgagttttaagattttctctcctttcctcttctcctttggttcctcaattaa

SEQ ID NO: 1489 - DNA, 1297 bp, Homo sapiens
cctaagtcgccgcagaactgccacgtggggatgagatttgctgggctggtagcggcggctgctgcggggaggtcccgcccacgtgaagccagcctaactgagctctggactttggggacagctgtcagtggcctaggccgcaggacaccatgaagcaactgccagtcttggaacctggagacaagcccaggaaagcaacatggtacaccttgactgtccctggagacagcccctgtgctcgagttggccacagctgttcatatttacccccagttggtaatgccaagagagggaaggtcttcattgttgggggagcaaatccaaacagaagcttctcagacgtgcacaccatggatctgggaaaacaccagtgggacttagatacctgcaagggcctcttgccccggtatgaacatgctagcttcattccctcctgcacacctgaccgtatttgggtatttggaggtgccaaccaatcaggaaatcgaaattgtctacaagtcctgaatcctgaaaccaggacgtggaccacgccagaagtgaccagccccccaccatccccaagaacattccacacatcatcggcagccattggaaaccagctatatgtctttgggggtggagagagaggtgcccagcccgtgcaggacacgaagctgcatgtgtttgacgcaaacactctgacctggtcacagccagagacacttggaaatcctccatctccccggcatggtcatgtgatggtggcagcagggacaaagctcttcatccacggaggcttggcgggggacagattctatgatgacctccactgcattgatataagtgacatgaaatggcagaagctaaatcccactggggctgctccagcaggctgtgctgcccactcagctgtggccatgggaaaacatgtgtacatctttggtggaatgactcctgcaggagcactggacacaatgtaccagtatcacacagaagagcagcattggaccttgcttaaatttgatactcttctaccccctggacgattggaccattccatgtgtatcattccatggccagtgacgtgtgcttctgagaaagaagattccaactctctcactctgaaccatgaagctgagaaagaggattcagttgacaaagtaatgagccacagtggtgactcacatgaggaaagccagactgctacactgctctgtttggtgtttggtgggatgaatacagaaggggaaatctatgacgattgtattgtgactgtagtggactaataaaacccacatttttattaaaaaaaaaa

SEQ ID NO: 1490 - DNA, 3103 bp, Homo sapiens
ctgtgacactgccagcagcgcgcagagggagggatgggggcgggtatcggcgtaggggccctcggaaagaacggatattgctgtgacaccgcggggacgctctgaagggacgagtgtcggtgtggcaccggtgcacgctgaaggagccggcggaaccgggtggccatggggatgtgggcatcgctggacgctttgtgggagatgccggccgagaagcgtatcttcggggccgtgctgctcttttcctggacagtgtatctttgggagaccttcctagcacagcggcagagaaggatatataaaacaacaactcatgtaccaccggagttaggacagatcatggattctgaaacatttgagaaatctcgactctatcaactggataaaagcactttcagcttctggtcaggactctattcagagactgaaggcactcttattcttctctttggaggaataccttatctctggagactttctggacggttctgtggttatgctggctttggaccagaatatgagatcactcagtccctggtgtttctgctgttggctacacttttcagtgcattgactggtttgccatggagtctttataatacttttgtgatagaagaaaaacatggcttcaatcaacagactttggggttcttcatgaaagatgcaatcaagaaatttgttgtgactcagtgtattttgttgcctgtgtcttcacttctactttacattattaaaattgggggtgactatttttttatttatgcctggctgttcacattagttgtgtctctggttcttgtcacaatctatgctgattatattgcccctttatttgacaaattcacacctctgcctgagggaaagcttaaagaagaaattgaagtaatggcaaagagtattgactttcctttgacgaaggtgtatgttgtggaaggatctaaacgctcttcccacagcaatgcttatttttatggcttcttcaagaacaagcgaatagttttgtttgacactctactagaagagtactctgtactaaacaaagacatccaggaggattctggcatggaaccccgcaatgaggaagaagggaacagtgaagaaataaaagctaaagttaaaaataagaaacaaggatgtaaaaatgaggaggtactcgctgtactaggccatgaactggggcactggaagttgggacatacagtcaaaaatatcattattagccagatgaattctttcctgtgtttttttttatttgctgtattaattggtcgaaaggagctttttgctgcatttggtttttatgatagccaacccactcttattggactattgatcatcttccagtttattttttcaccttacaatgaggttctttctttttgcctaacagtcctaagccgcagatttgagtttcaagctgatgcatttgccaagaaacttgggaaggctaaagacttatattctgctttaatcaaacttaacaaagataacttgggattccctgtttctgactggttgttctcaatgtggcattattctcatcctccactgctagagagacttcaagctttgaaaactatgaagcaacactgagatgtccaggatctgtgactgaagacatttctgattatttctgtcctggcagcatgttccagctcttgatgtttttaaacttttttttagaagaaaaattaagtacagaaaagcccagatttaaatacatttaatatgtcattttaaaaatgattttaataattcatttcttaaaacactgaatgaattttgaagcttaatgtttttaaaggcatagttttatctttgacatctaatttaccatcaagttgtaaaattatttggaaaaatacagaactcgttttatttgtatacttatatggaatctgcatgtgaggtgtttgagggcatatgtttgaaagagggagcatcaccacaggaatcctttctgtgaggtggaaacagtggtcctgaatcattgtgctcacacctaacttgaaatctggtcttactttcatgctgttatgatttcacctggtgaatcagtgttttaaataagaaaggtaatagttggtaaggccaatgttatttaaatgaaagtagttagaaaaatgctctcctattctaccaaatttttaatttctttcttccctttcttgctacacagtgatcaagagtttctcatagtgctttgaagttagaaattatgtataggatattttaaatcattgagttttgtggggtttttttgtttgtttgtttcttttgttttttggaaaatccgtgtctttatctttttttcccacgtggtagatatgatcccattggaggtaaattgtagcttcttctcattcatgcagtaaataatacatcctttcactcagcagagatggccatattaaacacgttttgctatgttaaaagtggcagaacaggaaagacgaattaaaaataacattttttaagcgacataaggatgaaatactgatgaatctctgtgacattacagggaaaaaaatatagttttctatctctttcaagggcagaagagttttcatttttatttttgtaattttatctgtaagtcataaatattacttaatcaggcctgattctacttttgaaaattacagttcttgaaatgcagataatgtttactttgaaaacaaatgtcatgaatgatttccagtttttaaagctatatgtttcactgcttcatatctctgtccactttctgaatgagaacttattttgtgcctagagctctcactcactgataatgcttattaccttctgggcatttattccaaagtgggatcaactgtacgcctttggtatctgaccataaagtcttttgctccgctgacatttgggtgatgtcttcacatggaaatataataaaaataaaaatctagtttaatactgcattatttattttcctaaggctaaagaggagcagtcctatgcttttattcagcatcctttatctgtgacttcatgctctgataactgcctttccttccttctgtgcctttgaatacaaatttcagttctgcaaaagtgaaacattaaacattgccaacgcaaatgt

SEQ ID NO: 1491 - DNA, 2500 bp, Homo sapiens
gttcgccatgcgtcccggggcgccagggccactctggcctctgccctggggggccctggcttgggccgtgggcttcgtgagctccatgggctcggggaaccccgcgcccggtggtgtttgctggctccagcagggccaggaggccacctgcagcctggtgctccagactgatgtcacccgggccgagtgctgtgcctccggcaacattgacaccgcctggtccaacctcacccacccggggaacaagatcaacctcctcggcttcttgggccttgtccactgccttccctgcaaagattcgtgcgacggcgtggagtgcggcccgggcaaggcgtgccgcatgctggggggccgcccgcgctgcgagtgcgcgcccgactgctcggggctcccggcgcggctgcaggtctgcggctcagacggcgccacctaccgcgacgagtgcgagctgcgcgccgcgcgctgccgcggccacccggacctgagcgtcatgtaccggggccgctgccgcaagtcctgtgagcacgtggtgtgcccgcggccacagtcgtgcgtcgtggaccagacgggcagcgcccactgcgtggtgtgtcgagcggcgccctgccctgtgccctccagccccggccaggagctttgcggcaacaacaacgtcacctacatctcctcgtgccacatgcgccaggccacctgcttcctgggccgctccatcggcgtgcgccacgcgggcagctgcgcaggcacccctgaggagccgccaggtggtgagtctgcagaagaggaagagaacttcgtgtgagcctgcaggacaggcctgggcctggtgcccgaggccccccatcatcccctgttatttattgccacagcagagtctaatttatatgccacggacactccttagagcccggattcggaccacttggggatcccagaacctccctgacgatatcctggaaggactgaggaagggaggcctgggggccggctggtgggtgggatagacctgcgttccggacactgagcgcctgatttagggcccttctctaggatgccccagcccctaccctaagacctattgccggggaggattccacacttccgctcctttggggataaacctattaattattgctactatcaagagggctgggcattctctgctggtaattcctgaagaggcatgactgcttttctcagccccaagcctctagtctgggtgtgtacggagggtctagcctgggtgtgtacggagggtctagcctgggtgagtacggagggtctagcctgggtgagtacggagggtctagcctgggtgagtacggagagtctagcctgggtgtgtatggaggatctagcctgggtgagtatggagggtctagcctgggtgagtatggagggtctagcctgggtgtgtatggagggtctagcctgggtgagtatggagggtctagcctgggtgtgtatggagggtctagcctgggtgagtatggagggtctagcctgggtgtgtacggagggtctagtctgagtgcgtgtggggacctcagaacactgtgaccttagcccagcaagccaggcccttcatgaaggccaagaaggctgccaccattccctgccagcccaagaactccagcttccccactgcctctgtgtgcccctttgcgtcctgtgaaggccattgagaaatgcccagtgtgccccctgggaaagggcacggcctgtgctcctgacacgggctgtgcttggccacagaaccacccagcgtctcccctgctgctgtccacgtcagttcatgaggcaacgtcgcgtggtctcagacgtggagcagccagcggcagctcagagcagggcactgtgtccggcggagccaagtccactctgggggagctctggcggggaccacgggccactgctcacccactggccccgaggggggtgtagacgccaagactcacgcatgtgtgacatccggagtcctggagccgggtgtcccagtggcaccactaggtgcctgctgcctccacagtggggttcacacccagggctccttggtcccccacaacctgccccggccaggcctgcagacccagactccagccagacctgcctcacccaccaatgcagccggggctggcgacaccagccaggtgctggtcttgggccagttctcccacgacggctcaccctcccctccatctgcgttgatgctcagaatcgcctacctgtgcctgcgtgtaaaccacagcctcagaccagctatggggagaggacaacacggaggatatccagcttccccggtctggggtgaggagtgtggggagcttgggcatcctcctccagcctcctccagcccccaggcagtgccttacctgtggtgcccagaaaagtgcccctaggttggtgggtctacaggagcctcagccaggcagcccaccccaccctggggccctgcctcaccaaggaaataaagactcaaagaagccttttttttttttttttt

SEQ ID NO: 1492 - DNA, 1226 bp, Homo sapiens
ctgggccgcgaggcgcggagcttgggagcggagcccaggccgtgccgcgcggcgccatgaagggcaaggaggagaaggagggcggcgcacggctgggcgctggcggcggaagccccgagaagagcccgagcgcgcaggagctcaaggagcagggcaatcgtctgttcgtgggccgaaagtacccggaggcggcggcctgctacggccgcgcgatcacccggaacccgctggtggccgtgtattacaccaaccgggccttgtgctacctgaagatgcagcagcacgagcaggccctggccgactgccggcgcgccctggagctggacgggcagtctgtgaaggcgcacttcttcctggggcagtgccagctggagatggagagctatgatgaggccatcgccaatctgcagcgagcttacagcctggccaaggagcagcggctgaacttcggggacgacatccccagcgctcttcgaatcgcgaagaagaagcgctggaacagcattgaggagcggcgcatccaccaggagagcgagctgcactcctacctctccaggctcattgccgcggagcgtgagagggagctggaagagtgccagcgaaaccacgagggtgatgaggacgacagccacgtccgggcccagcaggcctgcattgaggccaagcacgacaagtacatggcggacatggacgagcttttttctcaggtggatgagaagaggaagaagcgagacatccccgactacctgtgtggcaagatcagctttgagctgatgcgggagccgtgcatcacgcccagtggcatcacctacgaccgcaaggacatcgaggagcacctgcagcgtgtgggtcattttgacccggtgaccgggagccccctgacccaggaacagttcatccccaacttggctatgaaggaggttattgacgcattcatctctgagaatggctgggtggaggactactgaggttccctgccctacctggcgtcctggtccaggggagccctgggcagaagcccccggcccctaaacatagtttatgtttttggccaccccgaccgcttcccccaagttctgctgttggactctggactgtttcccctctcagcatcgcttttgctgggccgtgattgtcccctttgtgggctggaaaagcaggtgagggtgggctgggctgaggccattgccgccactatctgtgtaataaaatccgtgagcacgaaa

SEQ ID NO: 1493 - DNA, 2699 bp, Homo sapiens
aagccgaacaccatggccgtctggcttgcccagtggctgggccctctgctcttggtttccctctggggactcttggctccagcctcccttcttaggcgcctgggtgagcacattcagcagtttcaggagagctctgcccagggcctgggcctgagcctggggccaggtgctgcagccctcccaaaagtggggtggctggagcaactgctggaccccttcaacgtgtccgacagacgatccttcctacagcgttactgggtgaatgaccaacattgggttggccaggatggacccatattcctgcatctagggggtgagggcagccttgggcctggctcagtgatgagaggccatcccgcagccttggccccagcctggggcgccctggtgataagcctggaacacagattttatggcctgagtatacctgctggaggcctggaaatggcccagctccgcttcttgtccagccgccttgcgctggctgatgtggtctctgcccgcctggcactttcccgcctctttaacatctcctcctccagcccctggatctgcttcggaggctcctatgccggctccttggccgcctgggcccggctgaagttcccccatctcattttcgcgtcggtcgcctcctccgccccggtgcgggccgtgctggatttctccgagtataatgacgtggtatcccgaagcctaatgagcaccgcgatcggcgggtccctggagtgccgggcggcggtgtccgtcgccttcgctgaagtggagcggcggctgcgctcgggtggggcggctcaagcagcattgcggacggagctgagcgcttgcgggcccctgggccgcgctgaaaaccaggcggagctgttgggggcgctgcaggcactggtgggaggtgtagtgcagtatgatgggcagacgggagcgccgctaagcgtgcgacagctctgcggacttctcctcgggggcgggggcaaccgcagccactccacgccctactgcgggcttcgtcgggcggtgcagattgtcttgcacagcctgggccagaagtgtttaagcttttcccgagcagagacagtggcacagctgaggagcacagaacctcaactgtctggtgtgggtgaccggcagtggttgtatcagacatgtaccgagttcggcttctatgtcacctgtgagaatcccagatgtcctttctcccagctcccagcactgccctcccagctagacctrtgtgagcaggtgtttgggctctcagccttgtcagtagcccaggctgtggctcagacgaactcctactacggtggccagacccctggggctaacaaagtgctgtttgttaatggggacacagacccctggcatgtgctaagtgtaacacaggctttaggatcctcagaatcaactcttcttatccgcactggctcccactgcttggacatggcacctgagaggccctcagactcccccagcctccgcctagggcgccagaacatcttccagcagctacagacctggctcaagctggcaaaggagagccagattaagggtgaagtctgaatctcataccctttccactccctgcatggtcacctcagtcctggacatacttgttcactgaacaaaagaaagcagcttgttttgaaagaagaaactcccaggaattggaattcagcacctgttccgcacgtaattggcatgtgtctgcaaacatccttattcccaacttaaagtgctttattgcagagagttatggaaatataagtggatgattattctcattgtaaatattggtattttgaatgttaaatgtcaaacaaatgtgacttatgctggtgccctcgccctgctgatcagattctggttcaaattctgccactccagctcctgggttaggggctttgctgtaagtttctttttctggactttagatcctgaacctgtccttgcttctcagtttctctcactgtacccctttccctcagtctcttcctctctctttcccctgtcactatttgtctttctaatctccttctgtttctctgaatatcttcatttctatctctgtgtttctgtctatttctctgtttatctttctgtccttcaatctgtgtttttgtttctggctctccgtcagtgtctttttctctcctctctctcttgctctgccatggctatttccactgctctatttctgactctcatttttggtctctgtgtgtctcctagtcactttctttctcactctgtctctgtctctatttctgtctctcctctgctgtgtcctcaatctctctgtctccctgaggctctatttctgtctctcctctgctgtgtcctcaatctctctgtctccctgaggctctatttctgtctctgatgctcttcttctgtgtctctatttctcttcctgtcacttaatcttttccttctctatctctcttatttagtcttccttccacacccttcactcaccatcttttcccacaatcaaatatcactcccctggtacttccagcttccaactctagggattcatgattctggtggagattccttcttccagggcctgggaggatagggctaatcccaagggtgcctgcttaggctatgttagctgtgacaggaacctgccatagatttgcactgttctttcctaaagatcaattattttcagcaataaatacttctcagctttttgt

SEQ ID NO: 1494 - DNA, 606 bp, Homo sapiens
ggggaagaagttggtgtttcgctgggccctggtactgaagacgcggtccgggtcgcccctagctgtttcctactcacccaaagccccgcacccgccttttctctctctcctctggcaggatgaggcgtgcaggcctgggtgaaggagtacctcctggcaactatgggaactatggctatgctaatagtgggtatagtgcctgtgaagaagaaaatgagaggctcactgaaagtctgagaagcaaagtaactgctataaaatctctttccattgaaataggccatgaagttaaaacccagaataaattattagctgaaatggattcacaatttgattccacaactggatttctaggtaaaactatgggcaaactgaagattttatccagagggagccaaacaaagctgctgtgctatatgatgctgttttctttatttgtcttttttatcatttattggattattaaactgaggtgatgcatgtaattgtgaatttggaatttgttccaacttaatggcttgcagtaccactttgataaaaatcagcatcaaaacattcctagtgttcaaatactgtggcattttccattgaaaattgctgaatttt

SEQ ID NO: 1495 - DNA, 1292 bp, Homo sapiens
tgagtttacgcagacgcagaaaacgcaggcaaacctgaggtcctcagaatggcgggcacaggtttggtggctggagaggttgtggtggatgcgctgccgtattttgatcaaggttatgaagcccctggtgtgcgggaagcggctgcagcgctggtggaggaggaaactcgcagataccgacctactaagaactacctgagctacctgacagccccggattattctgcctttgaaactgacataatgagaaatgaatttgaaagactggctgctcgacaaccaattgaattgctcagtatgaaacgatatgagcttccagccccctcctctggtcaaaaaaatgacattactgcatggcaagaatgtgtaaacaattctatggcccagttagagcatcaagcagttagaattgagaatctggaactaatgtcacagcatggatgtaatgcctggaaagtatacaatgaaaatctagttcatatgattgaacacgcacagaaggaacttcagaagttaagaaaacatattcaagatttaaactggcagagaaagaacatgcaactcacagctggatctaaattgagagaaatggagtcaaattgggtatccctggtcagtaagaattatgagattgaacggactattgttcagctagaaaatgaaatctatcaaattaagcagcaacatggagaggcaaacaaagaaaacatccggcaagacttctgaaaagacaatttagcaggtagaagaaaagttgggctttcacaaaaggcatctgaacttttaatgaactgtgaaggacaacagcatcttcccaaaaccattgatgtttaagtgtttagaaatcatagaaggtgtaggctgctgtggtaattctatttgtatatctcaacagaattaaaatgtctagcttggtggtatttttatagccataaaagaaaatctttaggctttcaaaataaggatgactttagaataatattgtgtcatagaattaattttcagccatgtggaccatattttgtatccaaggatccttatttaaagctttcaacatgtacaggaagttggaaatttttggtttatgactttgtctaataaagagatagttctaaacacattcttgatcaccaaacaacttcagaaagacagtgactgtacagttatcattatcatcatcatcgtcatcatcataggtaacagttatatcaagcttaatatgtgctgaacattgttctgaacactttaggtagatgaactagatgtatgtgaataaaaattatttggtcctc

SEQ ID NO: 1496 - DNA, 2013 bp, Homo sapiens
  misc_feature (301)..(301): n is a, c, g, or t
  misc_feature (1707)..(1707): n is a, c, g, or t
  misc_feature (1722)..(1722): n is a, c, g, or t
  misc_feature (1756)..(1756): n is a, c, g, or t
  misc_feature (1880)..(1880): n is a, c, g, or t
  misc_feature (1882)..(1882): n is a, c, g, or t
  misc_feature (1885)..(1885): n is a, c, g, or t
  misc_feature (1887)..(1887): n is a, c, g, or t
gaattccaatcagaacaagctgttctcagacattaatctgaatgatcaggagtggcaagaattaatagatgaattggacaacacggttcctgaggatgacatacaggacctgttcaacgaagactttgaagagaagaaggagccagaattctcgcagacagcaactgagcacccctctctcccaggagagtgcgagcgtgaagagcgacccctctcactctcccttcggacatgtctccatgggatctccccaggcgaggtcttcttcttctggtcctcccttttcttctgtctccacggncactagtttaccttctggtgacagcactcccgcaggtccaaaccctgcaagctcaccagcaaacttgtgcttgtccagtccccttcaaaacttccaaaccaagcccacactccaggccaagctccacctcggcctggaaatggttatctcctgaatccggcagcagtgacagtggccggttcagcgtcagggcctgtggctgtgcccagctctgacatgtctccagcagaacagctcaaacagatggctgcacagcagcaacaaagggccaaactcatgcagcagaaacagcaacagcaacagcagcagcagcagcagcagcagcaacagcactcaaatcagacttcaaattggtctcccttaggacctccctctagtccatatggagcagcttttactgcagaaaaaccaaatagcccaatgatgtacccccaagcctttaacaaccaaaaccctatagtgcctccaatggcaaacaacctgcagaagacaacaatgaataactacctccctcagaatcacatgaatatgatcaatcagcagccaaataacttgggtacaaactccttaaacaaacagcacaatattctgacttatggcaacactaaacccctgacccacttcaatgcagacctgagtcagaggatgacaccaccagtggccaaccccaacaaaaaccccttgatgccgtatatccagcagcagcaacagcagcagcaacagcaacagcagcagcagcagcagcagcagccgccacctccacagctccaggcccccagggcacacctgagcgaagaccagaaacgcctgcttctcatgaagcagaaaggagtgatgaatcagcccatggcttacgctgcacttccatcccacggtcaggtaagtgtgaaagtgacacactcttcgagcagttcttgtggtgcatttcaagactgtcgatgtgtgatgttctacaaagcttccactgtagtggggtctaattgcctgcagaaaacctctttacaacatcctcaggtagtggccaggtttggagtgttctttttccatttctcctaagaaatggaaaagggtggcatgataaactttcgtgtatttcagtgtctaggaatcaaacttcttttattcccaactgcagataagaattacataaaattctcactctgagggagggaggctgcagaggtcactccaccaaacacggcactacctctgtagcttctctcccagcttgcatgatcccaggctctgggtggtgggaagcaggggacattcagggctgtctacaacagttttataaggccctgagcagccttcgagttttttaaattttattttagtgaatacatgcattaaaataaaacaacaacaacaacaacaacaaaaacacaaagaggctagagatttcnccgtttctacccccnaaataacgcttgctatcaagactttggagggggntgggggaaaagaatttaaaagccaaataatttttttttcataaaaagtaaaagctaccataaaacatttttttttctgtcacactgattaaatttcttctgaaaagccgcacatatagacaaancnaancnaaaattcctgaactggacaaacagcaaatactcaacagggttgttaacctaggtaacagttcagtagtttaaagaatcttttagacatctggaagcctttctattcattcctcagtacagtgttcc

SEQ ID NO: 1497 - DNA, 2838 bp, Homo sapiens
ccagtgtggtggaattcgtccgcggtggtggcggtgcaagagagctgagggaggcgcgagggcgcggagttccaggtcgagcagttaggccgcgagcgactgcggcgccgagccgatgagtaacccgaagcccctagaggagtggtcacctgcctgagggcacttctgtcccaccagcatcagaccaggccgcaccgagtccccggcaccatgtttgggaagaggaagaagcgggtggagatctccgcgccgtccaacttcgagcaccgcgtgcacacgggcttcgaccagcacgagcagaagttcacggggctgccccgccagtggcagagcctgatcgaggagtcggctcgccggcccaagcccctcgtcgaccccgcctgcatcacctccatccagcccggggcccccaagaccatcgtgcggggcagcaaaggtgccaaagatggggccctcacgctgctgctggacgagtttgagaacatgtcggtgacacgctccaactccctgcggagagacagcccgccgccgcccgcccgtgcccgccaggaaaatgggatgccagaggagccggccaccacggccagagggggcccagggaaggcaggcagccgaggccggttcgccggtcacagcgaggcgggtggcggcagtggtgacaggcgacgggcggggccagagaagaggcccaagtcttccagggagggctcagggggtccccaggagtcctcccgggacaaacgccccctctccgggcctgatgtcggcaccccccagcctgctggtctggccagtggggcgaaactggcagctggccggccctttaacacctacccgagggctgacacggaccacccatcccggggtgcccagggggagcctcatgacgtggcccctaacgggccatcagcggggggcctggccatcccccagtcctcctcctcctcctcccggcctcccacccgagcccgaggtgcccccagccctggagtgctgggaccccacgcctcagagccccagctggcccctccagcctgcacccccgccgcccctgctgttcctgggccccctggcccccgctcaccacagcgggagccacagcgagtatcccatgagcagttccgggctgccctgcagctggtggtggacccaggcgacccccgctcctacctggacaacttcatcaagattggcgagggctccacgggcatcgtgtgcatcgccaccgtgcgcagctcgggcaagctggtggccgtcaagaagatggacctgcgcaagcagcagaggcgcgagctgctcttcaacgaggtggtaatcatgagggactaccagcacgagaatgtggtggagatgtacaacagctacctggtgggggacgagctctgggtggtcatggagttcctggaaggaggcgccctcaccgacatcgtcacccacaccaggatgaacgaggagcagatcgcggccgtgtgccttgcagtgctgcaggccctgtcggtgctccacgcccagggcgtcatccaccgggacatcaagagcgactcgatcctgctgacccatgatggcagggtgaagctgtcagactttgggttctgcgcccaggtgagcaaggaagtgccccgaaggaagtcgctggtcggcacgccctactggatggccccagagctcatctcccgccttccctacgggccagaggtagacatctggtcgctggggataatggtgattgagatggtggacggagagcccccctacttcaacgagccacccctcaaagccatgaagatgattcgggacaacctgccaccccgactgaagaacctgcacaaggtgtcgccatccctgaagggcttcctggaccgcctgctggtgcgagaccctgcccagcgggccacggcagccgagctgctgaagcacccattcctggccaaggcagggccgcctgccagcatcgtgcccctcatgcgccagaaccgcaccagatgaggcccagcgcccttcccctcaaccaaagagccccccgggtcacccccgccccactgaggccagtagggggccaggcctcccactcctcccagcccgggagatgctccgcgtggcaccaccctccttgctgggggtagatgagaccctactactgaactccagttttgatctcgtgacttttagaaaaacacagggactcgtgggagcaagcgaggctcccaggacccccaccctctgggacaggccctcccccatgttcttctgtctccaggaagggcagcggccctcccatcactggaagtctgcagtgggggtcgctgggggtggagagaacactaagaggtgaacatgtatgagtgtgtgcacgcgtgtgagtgtgcatgtgtgtgtgtgtgcaaaggtccagccaccccgtcctccagcccgcaaggggtgtctggcgccttgcctgacacccagccccctctccccctgagccattgtgggggtcgatcatgaatgtccgaagagtggccttttcccgtagccctgcgccccctttctgtggctggatggggagacaggtcagggccccccaccctctccagcccctgcagcaaatgactactgcacctggacagcctcctcttttctagaagtctatttatattgtcattttataacactctagcccctgcccttattgggggacagatggtccctgtcctgcggggtggccctggcagaaccactgcctgaagaaccaggttcctgcccggtcagcgcagccccagcccgcccacccctgcctcgagttagttttacaattaaaacattgtcttgtttaaaaaaaaaaaaaaaaaaaaaaaaaaa

SEQ ID NO: 1498 - DNA, 6640 bp, Homo sapiens
cgtgtacttccttgtttgtctttgtcgctggccgacttgtcttcattccaggtggccagagcgagtggggccgggcgttgtcacgggtatcatgatattagctggtttgacatcaagtcatttgtgagtcatcagatcttctcctgaaaatgggagacacagtagggcccctcccaggagctcttggctgttgctgatggcagaagccaagcttgtccaaggttcacttgtagcccctcagcgtcagctcagctggtgtcgtcctgaccatggacggcgcgtcggccgagcaagatggcctccaggaggacagatcccacagtggcccctcgtctctccccgaggccccactgaagcccccgggcccactggtgccacctgaccagcaggacaaagtccagtgtgccgaggtaaacagagcatccacggaaggggaaagcccggatggacctggccagggaggcctctgtcagaacgggccaacgccacccttcccagaccctccgtcgtctctcgatcccaccacaagcccagtgggccctgatgcctctccaggtgtggctggtttccatgacaacctaaggaagtctcagggaactagtgctgagggcagtgttagaaaagaagctttgcagtctctcagactcagtcttcctatgcaagaaacgcaactgtgctctacagattctcccctgcccctggagaaggaggagcaggtccgacttcaggctcggaagtggctggaagagcagctcaaacagtacagggtgaagcgccagcaggagaggtccagtcaacctgcaaccaaaacgagactttttagcacgcttgatcctgagctcatgttaaacccagaaaacttaccaagggccagtaccctggctatgacaaaagaatattccttcctgcgcaccagtgtccctcgggggcctaaggtgggcagcctggggcttccggcacatcctagggagaaaaaaacttccaaatcaagcaaaatccggtctctggccgattacagaactgaagattcaaatgcggggaattctgggggaaatgtcccggctcccgattctaccaagggttccctgaagcagaacagaagcagtgcggcgtccgttgtgtctgagatcagcctgtcccccgacactgacgaccgtctggagaacacctccctggctggagacagcgtgtctgaggtggatggaaatgacagcgacagctcatcgtacagcagcgcctccacccgagggacctatggcattctgtcgaagacagtgggcacgcaggacaccccctatatggtcaacggccaggagattcctgcggataccctgggccagttcccctccattaaggacgtcctccaggccgcagccgctgagcaccaagaccaggggcaggaggtcaacggggaggtgcggagtcggagagacagcatctgcagcagcgtgtccttggagagctctgcagcagaaacacaggaggagatgctgcaggtgctcaaagagaaaatgcgactcgaaggacagctggaagccttgtcactggaggcgagtcaggcacttaaagagaaggctgagctgcaggcccagctggccgccctcagcacgaagctgcaggcgcaggtggagtgcagccacagcagccagcagcggcaggattcgctgagctcggaggtggacaccctgaagcagtcgtgctgggacctggagcgagccatgactgacctgcagaacatgctggaggcaaaaaatgccagcctggcgtcgtccaacaacgacttgcaggtggccgaggagcagtaccagaggcttatggccaaggtagaggacatgcagaggagcatgctcagcaaggacaacacagtgcacgacctgcgacagcagatgacagccttgcagagccagcttcagcaggtgcagctggagcggacgacgctgaccagcaagctgaaggcgtcgcaggcggagatctcgtccctacagagtgtccggcagtggtaccagcagcagctcgccctggcacaggaggcccgcgtcaggctgcagggtgagatggcccacatccaggttggacagatgacccaggctggtatcctggagcacctgaaactcgagaatgtgtccctgtcccagcagctgacggaaactcagcacaggtccatgaaggagaaggggcgcatcgcggcacagctgcagggcattgaggctgacatgttggatcaggaagcagccttcatgcagattcaggaggcaaagacgatggtggaggaggaccttcagaggaggctggaagagtttgaaggtgagagggagcggctgcagaggatggcggactcggcggcatccctggagcagcagctggagcaggtgaagttgactttactccagcgagaccagcagcttgaggctttgcagcaggagcacctggacctgatgaaacagctcaccttgactcaggaggctctgcagagcagggagcagtccctcgatgccctgcagacacactacgatgagctgcaggccaggctgggggagctgcagggcgaggccgcctccagggaggacacgatctgcctcctgcagaacgagaagatcatcttggaggcggctttgcaggcggccaagagtggcaaggaggagcttgacagaggagcaagacgcttggaagaaggtaccgaggaaacgtcggaaactttagagaagttaagagaagaattagctatcaaatccggccaggtggaacacctgcagcaggagactgctgctctgaaaaagcaaatgcaaaaaataaaggaacagtttctccaacaaaaggtgatggtggaggcctaccggcgcgacgccacctccaaagaccagctcatcagtgagctgaaagccaccaggaagaggctggactcggagctgaaggagctgcggcaggagctgatgcaagtgcacggggagaagcggactgccgaggcggagctctcgcgcctgcacagagaggtggcccaggtccgtcagcacatggcggaccttgaagggcatctccagtcggcgcagaaggagcgagacgagatggaaacacacttgcagtcgttgcagttcgataaggagcagatggtcgcggtcacagaggccaatgaggcgctgaagaaacaaatcgaagagttgcagcaagaggcccggaaggccatcacggaacagaagcagaagatgaggcggctgggctcagacttgaccagcgcccagaaggagatgaagaccaaacataaggcctacgagaacgccgtgggcatcctcagccgccgcctgcaggaggccctcgcggccaaggaggctgcggacgcggagctgggccagctccgagcccagggtggcagcagtgacagcagcctggctctacatgaaaggatccaggccctggaggcggagctgcaggctgtcagtcatagcaagacgctgctggaaaaggaactgcaggaggtcatagcgctgaccagccaggagctggaggagtcccgggagaaggtgctggagctggaggacgagcttcaagaatccagaggctttaggaagaagataaaacgccttgaggagtcaaacaagaagttggctcttgaattagagcacgagaaagggaagcttacgggcctcggtcagtccaacgcagctctgcgggaacacaacagcatcctagaaacagctttggccaagagggaggcagacctagtccagttgaaccttcaggtgcaggcagttttgcagcgcaaagaagaggaggatcgccagatgaagcatcttgtccaggccctgcaggcctcactagagaaggagaaggagaaggtgaacagcctcaaggagcaggtggctgctgccaaggtggaagccgggcataaccgccgccacttcaaggcggcctccttggagctgagtgaggtgaagaaggagctgcaggccaaggaacacctggtgcagaagctgcaggccgaggccgacgaccttcagattcgggaggggaaacattcccaggagatagcacagttccaagcagagctggccgaggcccgggcacagctccagctcctgcagaagcagctggacgagcagctcagcaaacagcccgtgggaaaccaagagatggaaaatctcaaatgggaggtggatcagaaagaaagagaaatccagtccttgaagcagcagctggacttgacggagcagcagggcaggaaggaactggaagggctacagcagctgctgcagaacgtcaagtctgagttggagatggcccaggaagacctgtccatgacccagaaggataaatttatgctccaggcaaaagtgtcggagctgaagaacaacatgaagaccctgctccagcagaaccagcagctcaagctggacctacgccgcggccaagacgagaaaggagccgaaagcgcaggccagctcttccaaccctgccacgcccatcaagatcccggactgcccagttcccgcctcgctgctggaggagctgctgagaccaccgcccgccgtgagcaaggagcccctcaagaacctgaacagctgcctccagcagctcaagcaggagatggacagcctgcagcgccagatggaggagcacgccctgacggtgcacgagtctctgtcctcgtggacgccgctggagccagccactgccagccctgtgcccccggggggtcacgccggcccacgcggcgacccacagagacacagtcagagcagggcttccaaagaagggccgggagagtgactgctgtggactcgcctccgtgcgccgctgccccagaaggctcttatcaatgttatttatttgattgtgtggtcgatgtttttctaagacatgaaatttaagttttgttttgcctttaacaagaagtaaaatatatagcagaatgagagccaaggactagaaaaacattcgaagatcacaattagcttttcacatggaatgaccaactcttaaaagcctgataggctctcggcgaggagctttgaacgtgtctgaagggttacttgtaggtcgtggcttctgagcggccaccgatgctgctctctgcgggtgacagggagaggctgcgtaactgggagcagctgtgtgacagggtctgcggcacccgcctggccaggccggctgcagtttctcacttccctgttccattcagtaagagctttacttttccgcagaaatgaaattttatctgtacctttggctttttacttgttttttttgatagccatcccaccataggatgtgtacatagatactgaatatcataatccaatctttgtttttttttttttttttttgagacagagtctcgctttgttgcccaggctggagtgcagtggcacactctccgctcactgcaagctccgcctcccaggttcatgcgattctcctgcctcagcctctcgagtagctgggattacaggcgtgcgccactatgccaggctaatgtttgtatttttagtagcaatggggtttcaccatgttggccaggatggtctcgatctcctgacctcaagtgatctgcccatctcagcctcccaaagtgctggaattataggcgtgaaccaccgcccccggctgcagttggatttttaaattgcttttttttattgttgaggtttttttatctccaagggactctcccggcacttctaccttccagagttacttcagtgcataaagtttgaattattttgttcttgtgggcagaagtgggaatgatggaatatcctcacggaaaaggcagtgaagttgggagtactgcttacaaaacagggtcaccagtgcattatgtggcgtgttcatccccacgccgtgtgtcacgggctagggcggcgtgttcatccccacaccgtgtgtcacaacaggctagggcacttcacgatgtcactacttgtttttctgacgttccaaaaacaacgtaacttggttttcatgtgtttttccatggtatatgtgagattgatgctacgggtcttacggactcacacccgttcccactctctgcaatatggatcaggcagtgtttctgataggatgtgaaatggactctcctcgggtgggtccagcaggggccctgcccaccagaacacagtccgtgctgtgctgcgctaaggagctggccctcaactctccttggtgcagggttcccacaaccgagttctagttccctgaggtctttaaaaacaaaaacagaatgttgtacgtgaagattctaggaggggagggaccagcaaatctgagagaaccgtcctggggcctcccttcgaggagccctctgatgtgaggagggacttgagttgagtgacgctgtggtgtgaggtgttctgagctcactgaccggaaggtccaggtgaatctcgtcataagtgatctcaggctctcacaggatccggagggaaatgtgttagagggtctggaaaattcagtgcttttgagttacttgtttttattaaaaatttcctcacaaaagagagtcctcaagttgtggctgttcttgggaaaggggtcaccgtgtctgacaaagtgtaactttaaaaagcacgttcattttttacaaatgtaagtgtgcttgggaattccttaaattttgtgcaataaactattttttggtaaagat

SEQ ID NO: 1499 - DNA, 2354 bp, Homo sapiens
cgcggccgcgtcggacctgtggtcccgggtttctgcagagtctacttcagaagcggaggcactgggagtccggtttgggattgccaggctgtggttgtgagtctgagcttgtgagcggctgtggcgccccaactcttcgccagcatatcatcccggcaggcgataaactacattcagttgagtctgcaagactgggaggaactggggtgataagaaatctattcactgtcaaggtttattgaagtcaaaatgtccaaaaaaatcagtggcggttctgtggtagagatgcaaggagatgaaatgacacgaatcatttgggaattgattaaagagaaactcatttttccctacgtggaattggatctacatagctatgatttaggcatagagaatcgtgatgccaccaacgaccaagtcaccaaggatgctgcagaagctataaagaagcataatgttggcgtcaaatgtgccactatcactcctgatgagaagagggttgaggagttcaagttgaaacaaatgtggaaatcaccaaatggcaccatacgaaatattctgggtggcacggtcttcagagaagccattatctgcaaaaatatcccccggcttgtgagtggatgggtaaaacctatcatcataggtcgtcatgcttatggggatcaatacagagcaactgattttgttgttcctgggcctggaaaagtagagataacctacacaccaagtgacggaacccaaaaggtgacatacctggtacataactttgaagaaggtggtggtgttgccatggggatgtataatcaagataagtcaattgaagattttgcacacagttccttccagatggctctgtctaagggttggcctttgtatctgagcaccaaaaacactattctgaagatatatgatgggcgttttaaagacatctttcaggagatatatgacaagcagtacaagtcccagtttgaagctcaaaagatctggtatgagcataggctcatcgacgacatggtggcccaagctatgaaatcagagggaggcttcatctgggcctgtaaaaactatgatggtgacgtgcagtcggactctgtggcccaagggtatggctctctcggcatgatgaccagcgtgctggtttgtccagatggcaagacagtagaagcagaggctgcccacgggactgtaacccgtcactaccgcatgtaccagaaaggacaggagacgtccaccaacctcattgcttccatttttgcctggaccagagggttagcccacagagcaaagcttgataacaataaagagcttgccttctttgcaaatgctttggaagaagtctctattgagacaattgaggctggcttcatgaccaaggacttggctgcttgcattagaggtttacccaatgtgcaacgttctgactacttgaatacatttgagttcatggataaacttggagaaaacttgaagatcaaactagctcaggccaaactttaagttcatacctgagctaagaaggataattgtcttttggtaactaggtctacaggtttacatttttctgtgttacactcaaggataaaggcaaaatcaattttgtaatttgtttagaagccagagtttatcttttctataagtttacagcctttttcttatatatacagttattgccacctttgtgaacatggcaagggacttttttacaatttttattttattttctagtaccagcctaggaattcggttagtactcatttgtattcactgtcactttttctcatgttctaattataaatgaccaaaatcaagattgctcaaaagggtaaatgatagccacagtattgctccctaaaatatgcataaagtagaaattcactgccttcccctcctgtccatgaccttgggcacagggaagttctggtgtcatagatatcccgttttgtgaggtagagctgtgcattaaacttgcacatgactggaacgaagtatgagtgcaactcaaatgtgttgaagatactgcagtcatttttgtaaagaccttgctgaatgtttccaatagactaaatactgtttaggccgcaggagagtttggaatccggaataaatactacctggagtcttgtcctctccatttttctctttctcctcctggcctggcctgaatattatactactctaaatagcatatttcatccaagtgcaataatgtaagctgaatcttttttggacttctgctggcctgttttatttcttttatataaatgtgatttctcagaaattgatattaaacactatcttatcttctcctgaactgttgattttaattaaaattaagtgctaattaccaaaaaaaaaaa

SEQ ID NO: 1500 - DNA, 4394 bp, Homo sapiens
ggatagcggcagagccggtagcggacggtccttgcattggcctccggcaggcgccccccgggggcgggaagctgcctcacagcatggaaccacaggttactctaaatgtgacttttaaaaatgaaattcaaagctttctggtttctgatccagaaaatacaacttgggctgatatcgaagctatggtaaaagtttcatttgatctgaatactattcaaataaaatacctggatgaggaaaatgaagaggtatccatcaacagtcaaggagaatatgaagaagcgcttaagatggcagttaaacagggaaaccaactgcagatgcaagtccacgaagggcaccatgtcgttgatgaagccccacccccagttgtaggagcaaaacgactagctgccagggcagggaagaagccacttgcacattactcttcactggtgagagtcttgggatcagacatgaagaccccagaggatcctgcagtgcagtcgtttccacttgttccatgtgacacagaccagcctcaagacaagcccccagactggttcacaagctacctggagacgttcagagaacaagtggttaacgaaacggttgagaagcttgaacagaaattacatgaaaagcttgtcctccagaacccatccttgggttcttgtccctcagaagtctcaatgcctacttcagaagaaacattgtttttgccagaaaaccagttcagctggcatattgcttgcaacaactgccaaagaaggattgttggtgtccgctaccagtgtagcctatgcccatcctacaatatctgtgaagattgtgaagcagggccatatggccatgacactaaccacgtcctgctgaagttgcggagacctgttgtgggctcctctgaaccgttctgtcactcaaagtactctactcctcgtcttcctgctgctctggaacaagtcaggctccagaaacaggttgataagaactttcttaaagcagaaaagcaaaggttgcgagctgagaagaaacaacgtaaagcagaggtcaaggaacttaaaaagcagcttaaactccataggaaaattcacctgtggaattcaatccatggactccagagccccaagtctcctttaggccgacctgagagcttgctccagtctaataccctgatgctccctttgcagccctgtacctccgttatgccaatgctcagtgcagcatttgtggatgagaatttgcctgatgggactcaccttcagccaggaaccaagtttatcaaacactggaggatgaaaaatacaggaaatgtaaagtggagtgcagacacaaagctcaagttcatgtggggaaacctgactttggcttccacagaaaagaaggatgttttggttccctgcctcaaggccggccatgtgggagttgtatctgtggagttcattgccccagccttggagggaacgtatacttcccattggcgtctttctcacaaaggccagcaatttgggcctcgggtctggtgcagtatcatagtagatcctttcccctccgaagagagccctgataacattgaaaagggcatgatcagctcaagcaaaactgatgatctcacctgccagcaagaggaaacttttcttctggctaaagaagaaagacagcttggtgaagtgactgagcagacagaagggacagcagcctgcatcccacagaaggcaaaaaatgttgccagtgagagggagctctacatcccatctgtggatcttctgactgcccaggacctgctgtcctttgagctgttggatataaacattgttcaagagttggagagagtgccccacaacacccctgtggatgtgactccctgcatgtctcctctgccacatgacagtcctttaatagagaagccaggcttggggcagatagaggaagagaatgaaggggcaggatttaaagcacttcctgattctatggtgtcagtaaagaggaaggctgagaacattgcttctgtggaggaagcagaagaagacctgagtgggacccagtttgtgtgtgagacagtaatccgatcccttaccttggatgctgccccagaccacaaccctccttgcagacagaagtccttgcagatgacatttgccttgcctgaaggaccacttggaaatgagaaggaggagattatccatatcgctgaggaagaagctgtcatggaggaggaggaggatgaggaggatgaggaggaggaggatgagctcaaagatgaagttcaaagtcagtcctctgcttcctcagaggattacatcatcatcctgcctgagtgctttgataccagccgccccctgggggattctatgtacagctctgcgctctcacagccaggcctggagcgaggtgctgaaggcaagcctggggttgaggctgggcaggaaccagctgaggctggggaaagactccctggaggggagaaccagccacaggagcacagcataagtgacatcctcacgacctcacagactctggaaacagtgcccctaatcccagaggtagtggagcttccaccgtcactgcccaggagctctccttgtgtacatcatcatggttccccaggagtggatttaccagttaccataccagaagtttcttcagtccctgatcagatcagaggagagcccagaggctcatcaggacttgtaaacagcagacagaagagctatgaccactcaaggcaccatcatgggagcagcattgctggaggactggtgaagggggctttgtctgttgctgcctctgcatacaaggccctgtttgctgggccaccagtcactgcacagccaataatttctgaagatcagacagcagccctgatggcccatctctttgaaatgggattctgtgacaggcagctgaacctacggctgctgaagaaacacaattacaatatcctgcaggttgtgacagaacttcttcagttaaacaacaacgactggtacagccaacgctattgaggagtgaccttgtattaaataactgcctgctgctcagagatgatctttattctgtcattggggtatgggatagaagcccttgcttatttttaatctgatgaatctgtatagagcccatcgttgagttaccaagacaatacctgctacagtattttggggagcaaactaaagaccagaacttaaattttcactttagacattggatgaatagtatgaagacagtttttcagttgatttggataaaactattttagtgcattgacaagtgtaacttcaacttcatatagaaccatttttctttctgcttttattgaaactgagtatttttctttggctaatgtggattttttatggggatatctgttaattttcaggttttgaaagacattaacctcggaagttgtttttaagaattattctcataattcttattctcataatttctgtaatccacctcaagcttcatagttatttggcattgaaataacacccagagcatgatagaaatgttgttactcttcctctctcaaggagaaagtaattttcctgcaatacttaataattggcaccgttgctttctaaagactccatggtgcattcaagagtatccaacttcaagggaatctccgcatttcaatgaaaggaggaagagtgtgctgataaacctaccagcacctattgagcaatgtctattatagtaattttgcatacatttttatttaagggaaaaaatataggtattgtgaaatattttgctaatcttatagaaaaggaaaaaatcccgttatttaaagggaaaagtaaatttaacagttgccttttttcttaatgtcagggcagatcttattttacagtacagtgggggaaatagaaaacatgtgaaaggcaaaaggcaggctcctaaattaatgtcagtgaagttcagggtgggcaaatgagtgtgtgtgaggtataggaaatgctgatgacttctttaatgcttgaagtccgttcacaggtatctagccctagaatgcctagaacaggaagaggcagctggtgttctgcaaaacttggacaggggcaaagttgctgaaaaagttttggtttaacccgaagataagtggaaaagagcttgtccatgaacccaggttctcactctgtttacagaagtgtgttgagtacagttggtgaaggaagaggtaacaaaaaatgctaaatattttatccatgaaaatgacttccagaaaaggaagaatatgaaccccagaccgaaggggaaaagatagttaatagtattatctaacctggttggtatttgtaatgaatggtgattttaattagtcattagccataatgatgtttatttacagtataactcctgaatgctacttaaataaaccaggattcaaactgcaaaaaaaaaaaaaa

SEQ ID NO: 1501 - DNA, 3111 bp, Homo sapiens
ggcacgagcggagagccgcgcagggcgcgggccgcgcggggtggggcagccggagcgcaggcccccgatccccggcgggcgcccccgggcccccgcgcgcgccccggcctccgggagactggcgcatgccacggagcgcccctcgggccgccgccgctcctgcccgggcccctgctgctgctgctgtcgcctgcgcctgctgccccaactcggcgcccgacttcttcatggtgtgcggaggtcatgttcgctccttagcaggcaaacgacttttctcctcgcctcctcgccccgcatgttcaggaccaaacgatctgcgctcgtccggcgtctctggaggagccgtgcgcccggcggcgaggacgaggaggagggcgcagggggaggtggaggaggaggcgagctgcggggagaaggggcgacggacagccgagcgcatggggccggtggcggcggcccgggcagggctggatgctgcctgggcaaggcggtgcgaggtgccaaaggtcaccaccatccccacccgccagccgcgggcgccggcgcggccgggggcgccgaggcggatctgaaggcgctcacgcactcggtgctcaagaaactgaaggagcggcagctggagctgctgctccaggccgtggagtcccgcggcgggacgcgcaccgcgtgcctcctgctgcccggccgcctggactgcaggctgggcccgggggcgcccgccggcgcgcagcctgcgcagccgccctcgtcctactcgctccccctcctgctgtgcaaagtgttcaggtggccggatctcaggcattcctcggaagtcaagaggctgtgttgctgtgaatcttacgggaagatcaaccccgagctggtgtgctgcaacccccatcaccttagccgactctgcgaactagagtctcccccccctccttactccagatacccgatggattttctcaaaccaactgcagactgtccagatgctgtgccttcctccgctgaaacagggggaacgaattatctggcccctggggggctttcagattcccaacttcttctggagcctggggatcggtcacactggtgcgtggtggcatactgggaggagaagacgagagtggggaggctctactgtgtccaggagccctctctggatatcttctatgatctacctcaggggaatggcttttgcctcggacagctcaattcggacaacaagagtcagctggtgcagaaggtgcggagcaaaatcggctgcggcatccagctgacgcgggaggtggatggtgtgtgggtgtacaaccgcagcagttaccccatcttcatcaagtccgccacactggacaacccggactccaggacgctgttggtacacaaggtgttccccggtttctccatcaaggctttcgactacgagaaggcgtacagcctgcagcggcccaatgaccacgagtttatgcagcagccgtggacgggctttaccgtgcagatcagctttgtgaagggctggggtcagtgctacacccgccagttcatcagcagctgcccgtgctggctagaggtcatcttcaacagccggtagccgcgtgcggaggggacagagcgtgagctgagcaggccacacttcaaactactttgctgctaatattttcctcctgagtgcttgcttttcatgcaaactctttggtcgttttttttttgtttgttggttggttttcttcttctcgtcctcgtttgtgttctgttttgtttcgctctttgagaaatagcttatgaaaagaattgttgggggtttttttggaagaaggggcaggtatgatcggcaggacaccctgataggaagaggggaagcagaaatccaagcaccaccaaacacagtgtatgaaggggggcggtcatcatttcacttgtcaggagtgtgtgtgagtgtgagtgtgcggctgtgtgtgcacgcgtgtgcaggagcggcagatggggagacaacgtgctctttgttttgtgtctcttatggatgtccccagcagagaggtttgcagtcccaagcggtgtctctcctgccccttggacacgctcagtggggcagaggcagtacctgggcaagctggcggctggggtcccagcagctgccaggagcacggctctgtccccagcctgggaaagcccctgcccctcctctccctcatcaaggacacgggcctgtccacaggcttctgagcagcgagcctgctagtggccgaaccagaaccaattattttcatccttgtcttattcccttcctgccagcccctgccattgtagcgtctttcttttttggccatctgctcctggatctccctgagatgggcttcccaagggctgccggggcagccccctcacagtattgctcacccagtgccctctcccctcagcctctcccctgcctgccctggtgacatcaggtttttcccggacttagaaaaccagctcagcactgcctgctcccatcctgtgtgttaagctctgctattaggccagcaagcggggatgtccctgggagggacatgcttagcagtccccttccctccaagaaggatttggtccgtcataacccaaggtaccatcctaggctgacacctaactcttctttcatttcttctacaactcatacactcgtatgatacttcgacactgttcttagctcaatgagcatgtttagactttaacataagctatttttctaactacaaaggtttaaatgaacaagagaagcattctcattggaaatttagcattgtagtgctttgagagagaaaggactcctgaaaaaaaacctgagatttattaaagaaaaaaatgtattttatgttatatataaatatattattacttgtaaatataaagacgttttataagcatcattatttatgtattgtgcaatgtgtataaacaagaaaaataaagaaaagatgcactttgctttaatataaatgcaaataacaaatgccaaattaaaaaagataaacacaagattggtgttttttcctatgggtgttatcacctagctgaatgtttttctaaaggagtttatgttccattaaacgatttttaaaatgtacacttgaaaaaaaaaaaaaaaaa

SEQ ID NO: 1502 - DNA, 2828 bp, Homo sapiens
ggcacgaggcgcccgcctgctacgagtagaacgctgtccgcagcttgcgcatttcgcagccgctgccgcctcgccgctgctccttcgtaaggccacttccgcacaccgacaccaacatgaacggacagctcaacggcttccacgaggcgttcatcgaggagggcacattccttttcacctcagagtcggtcggggaaggccacccagataagatttgtgaccaaatcagtgatgctgtccttgatgcccaccttcagcaggatcctgatgccaaagtagcttgtgaaactgttgctaaaactggaatgatccttcttgctggggaaattacatccagagctgctgttgactaccagaaagtggttcgtgaagctgttaaacacattggatatgatgattcttccaaaggttttgactacaagacttgtaacgtgctggtagccttggagcaacagtcaccagatattgctcaaggtgttcatcttgacagaaatgaagaagacattggtgctggagaccagggcttaatgtttggctatgccactgatgaaactgaggagtgtatgcctttaaccattgtcttggcacacaagctaaatgccaaactggcagaactacgccgtaatggcactttgccttggttacgccctgattctaaaactcaagttactgtgcagtatatgcaggatcgaggtgctgtgcttcccatcagagtccacacaattgttatatctgttcagcatgatgaagaggtttgtcttgatgaaatgagggatgccctaaaggagaaagtcatcaaagcagttgtgcctgcgaaataccttgatgaggatacaatctaccacctacagccaagtggcagatttgttattggtgggcctcagggtgatgctggtttgactggacgcaaaatcattgtggacacttatggcggttggggtgctcatggaggaggtgccttttcaggaaaggattataccaaggtcgaccgttcagctgcttatgctgctcgttgggtggcaaaatcccttgttaaaggaggtctgtgccggagggttcttgttcaggtctcttatgctattggagtttctcatccattatctatctccattttccattatggtacctctcagaagagtgagagagagctattagagattgtgaagaagaatttcgatctccgccctggggtcattgtcagggatctggatctgaagaagccaatttatcagaggactgcagcctatggccactttggtagggacagcttcccatgggaagtgcccaaaaagcttaaatattgaaagtgttagccttttttccccagacttgttggcgtaggctacagagaagccttcaagctctgagggaaagggccctccttcctaaattttcctgtcctctttcagctcctgaccagttgcagtcactctagtcaatgacatgaattttagcttttgtgggggactgtaagttgggcttgctattctgtccctaggtgttttgttcaccattataatgaatttagtgagcataggtgatccatgtaactgcctagaaacaacactgtagtaaataatgctttgaaattgaacctttgtgccctatcacccaacgctccaaagtcataattgcattgactttccccaccagatgctgaaaatgtccttgtgatgtgcacgtaaagtacttgtagttccacttatagcctctgtctggcaatgccacagccctgtcagcatgaatttgtaatgtcttgagctctattatgaatgtgaagccttccccttatcctccctgtaacttgatccatttctaattatgtagctctttgtcagggagtgttccctatccaatcaatcttgcatgtaacgcaagttcccagttggagctccagcctgacatcaaaaaaggcagttaccattaaaccatctccctggtgcttatgctcttaattgccacctctaacagcaccaaatcaaaatctctccactttcagctgtcttttggaggacgtacgtaataaggttttaatttagtaaaccaatcctatgcatggtttcagcactagccaaacctcaccaactcctagttctagaaaaacaggcacttggcagccttgtgatgtcatacagagaagtcacagggcagtacctgagggtctgtaggttgcacactttggtaccagataacttttttttttctttataagaaagcctgagtactccacactgcacaataactcctcccagggttttaactttgttttattttcaaaaccaggtccaatgagctttctgaacagctggtgtagctacagagaaaccagcttccttcagagagcagtgcttttggcggggaggaggaaatcccttcatacttgaacgttttctaattgcttatttattgtattctggggtatggcgtaagtacagagaagccatcacctcagatggcagcttttaaaagattttttttttttctctcaacaccatgattcctttaacaacatgtttccagcattcccaggtaggccaaggtgtcctacagaaaaaccttgggttagacctacagggggtctggctggtgttaacagaagggagggcagagctggtgcggctggccatggagaaagctgacttggctggtgtggtacagagaagccagcttgtttacatgcttattccatgactgcttgccctaagcagaaagtgcctttcaggatctatttttggaggtttattacgtatgtctggttctcaattccaacagtttaatgaagatctaaataaaatgctaggttctaccttaaaaaaaaaaaaaaaaaa

SEQ ID NO: 1503 - DNA, 1267 bp, Homo sapiens
tgactctctgaggctcattttgcagttgttgaaattgtccccgcagttttcaatcatgtctgaaccaatcagagtccttgtgactggagcagctggtcaaattgcatattcactgctgtacagtattggaaatggatctgtctttggtaaagatcagcctataattcttgtgctgttggatatcacccccatgatgggtgtcctggacggtgtcctaatggaactgcaagactgtgcccttcccctcctgaaagatgtcatcgcaacagataaagaagacgttgccttcaaagacctggatgtggccattcttgtgggctccatgccaagaagggaaggcatggagagaaaagatttactgaaagcaaatgtgaaaatcttcaaatcccagggtgcagccttagataaatacgccaagaagtcagttaaggttattgttgtgggtaatccagccaataccaactgcctgactgcttccaagtcagctccatccatccccaaggagaacttcagttgcttgactcgtttggatcacaaccgagctaaagctcaaattgctcttaaacttggtgtgactgctaatgatgtaaagaatgtcattatctggggaaaccattcctcgactcagtatccagatgtcaaccatgccaaggtgaaattgcaaggaaaggaagttggtgtttatgaagctctgaaagatgacagctggctcaagggagaatttgtcacgactgtgcagcagcgtggcgctgctgtcatcaaggctcgaaaactatccagtgccatgtctgctgcaaaagccatctgtgaccacgtcagggacatctggtttggaaccccagagggagagtttgtgtccatgggtgttatctctgatggcaactcctatggtgttcctgatgatctgctctactcattccctgttgtaatcaagaataagacctggaagtttgttgaaggtctccctattaatgatttctcacgtgagaagatggatcttactgcaaaggaactgacagaagaaaaagaaagtgcttttgaatttctttcctctgcctgactagacaatgatgttactaaatgcttcaaagctgaagaatctaaatgtcgtctttgactcaagtaccaaataataataatgctatacttaaattacttgtgaaaaacaacacattttaaagattacgtgcttcttggtacaggtttgtgaatgacagtttatcgtcatgctgttagtgtgcattctaaataaatatatattcaaatg

SEQ ID NO: 1504 - DNA, 1321 bp, Homo sapiens
ggcgctgggcagtgtggaggtcgttggagtcacttccgcgtcaccagctcctgtgcctgccagtcggtgcccctcccgctccagccatgctctccgccctcgcccggcctgtcagcgctgctctccgccgcagcttcagcacctcagcccagaacaatgctaaagtagctgtgctaggggcctctggaggcatcgggcagccactttcacttctcctgaagaacagccccttggtgagccgcctgaccctctatgatatcgcgcacacacccggagtggccgcagatctgagccacatcgagaccaaagccgctgtgaaaggctacctcggacctgaacagctgcctgactgcctgaaaggttgtgatgtggtagttattccggctggagtccccagaaagccaggcatgacccgggacgacctgttcaacaccaatgccacgattgtggccaccctgaccgctgcctgtgcccagcactgcccggaagccatgatctgcgtcattgccaatccggttaattccaccatccccatcacagcagaagttttcaagaagcatggagtgtacaaccccaacaaaatcttcggcgtgacgaccctggacatcgtcagagccaacacctttgttgcagagctgaagggtttggatccagctcgagtcaacgtccctgtcattggtggccatgctgggaagaccatcatccccctgatctctcagtgcacccccaaggtggactttccccaggaccagctgacagcactcactgggcggatccaggaggccggcacggaggtggtcaaggctaaagccggagcaggctctgccaccctctccatggcgtatgccggcgcccgctttgtcttctcccttgtggatgcaatgaatggaaaggaaggtgttgtggaatgttccttcgttaagtcacaggaaacggaatgtacctacttctccacaccgctgctgcttgggaaaaagggcatcgagaagaacctgggcatcggcaaagtctcctcttttgaggagaagatgatctcggatgccatccccgagctgaaggcctccatcaagaagggggaagatttcgtgaagaccctgaagtgagccgctgtgacgggtggccagtttccttaatttatgaaggcatcatgtcactgcaaagccgttgcagataaactttgtattttaatttgctttggtgatgattactgtattgacatcatcatgccttccaaattgtgggtggctctgtgggcgcatcaataaaagccgtccttgattttatttttcaaggtcccttctgtaaaaaaaaaaaaaaaaaa

SEQ ID NO: 1505 - DNA, 2326 bp, Homo sapiens
caaccctgaatgtcatagttagctactttcaactggaagctacaacatggatttatggaatctgtcttggtttctgttcttggatgctcttctcgtgatttctggcttggcaactccagaaaactttgatgtagatggcggaatggaccaggacatatttgatatcaatgaaggtttgggactggatctttttgagggtgacatcagacttgatagggcacaaattagaaattccatcattggagaaaagtatagatggcctcataccattccatatgttctagaagatagcttggaaatgaatgctaagggagttatcctcaatgcatttgaacgttatcgccttaaaacatgtattgactttaagccttgggctggagaaacaaactatatatcagtgttcaagggcagtggctgctggtcttcagtaggaaataggcgggttgggaagcaagaactttccatcggggcaaactgtgaccgaatagcaacagttcaacacgagttcctccacgctctgggattctggcatgagcagtcgcgttctgaccgggatgactatgtcaggataatgtgggacagaattctgtcaggcagagagcacaattttaacacctatagtgacgatatatcagattccctgaatgttccctatgattacacttcagtaatgcactacagtaaaactgcattccaaaatggaacagagccgacaattgtcacaagaatctcagactttgaggatgtgatcggccaacgaatggatttcagtgactctgatctcctaaagttgaatcaactgtataactgctcctcttccttgagttttatggactcatgcagttttgaactggaaaatgtgtgtggcatgatccaaagttcaggagataatgctgactggcaacgggtttcacaggttcccagggggccagagagtgatcactccaacatgggccagtgccaaggttctggtttcttcatgcatttcgatagcagctctgtaaatgtgggggccacagcagtgctggaaagtagaacgctgtaccctaaaagaggatttcagtgcctgcaattttacttatataacagtggcagtgaaagtgatcaactgaacatctatatcagggagtattctgcagacaatgtggatggcaatttaacccttgtggaagaaataaaagaaatacccactgggagctggcaactttatcatgtaacattgaaagtgaccaagaagtttagagtggtgtttgaaggacgcaaaggctctggtgcatcactgggtggtctgtctattgatgacatcaatctttcggaaacacggtgccctcatcatatctggcatataaggaatttcacacagttcattggcagcccaaatggaactctgtatagccctccattttactcttctaaaggttatgcctttcagatttacttaaatctagcccatgtgactaatgcagggatatatttccacttgatctctggagccaatgatgatcaattacagtggccatgtccttggcaacaagccacaatgacacttttggatcaaaatcctgacattcgacagcgtatgtccaatcagcggagtataactacagacccatttatgaccaccgataatggaaactatttctgggacaggccttctaaagtgggaacagtggctttgttctctaatggaactcagtttagaagaggtgggggctatggaaccagtgcctttataacccacgaaaggctgaaaagcagagattttataaaaggagatgatgtttatatcctactgacagtggaagacatatctcacctcaactctacacaaatccagctaacaccagcccctagtgttcaagacctctgctcaaaaaccacctgtaaaaatgacggtgtctgcactgttcgagatggcaaagctgagtgcaggtgccagtcaggggaagactggtggtacatgggagaaaggtgtgaaaagagaggctccacccgagacaccatagtcattgctgtttcatctactgttgctgtgtttgccttgatgctgatcatcacccttgtcagtgtctattgcaccaggaagaaatatcgtgaaaggatgagctcaaatcgaccaaatttgactctgcaaaatcatgctttttgaagattaactcgacaatatggccagctaatgaaattaaaaaggattcttcatcatggatttcgcctaagtgatattacagccacctcattcttctaaaagtggatatttttctgtaaatagctggaaatattataaatcactattttggtcaaagtcaaaaaaaaaaaaaaaaaaaaa

SEQ ID NO: 1506 - DNA, 1934 bp, Homo sapiens
agaaccccgcggggtctgagcagcccagcgtgcccattccagcgcccgcgtccccgcagcatgccgcgcccccgcctgctggccgcgctgtgcggcgcgctgctctgcgcccccagcctcctcgtcgccctggatatctgttccaaaaacccctgccacaacggtggtttatgcgaggagatttcccaagaagtgcgaggagatgtcttcccctcgtacacctgcacgtgccttaagggctacgcgggcaaccactgtgagacgaaatgtgtcgagccactgggcatggagaatgggaacattgccaactcacagatcgccgcctcatctgtgcgtgtgaccttcttgggtttgcagcattgggtcccggagctggcccgcctgaaccgcgcaggcatggtcaatgcctggacacccagcagcaatgacgataacccctggatccaggtgaacctgctgcggaggatgtgggtaacaggtgtggtgacgcagggtgccagccgcttggccagtcatgagtacctgaaggccttcaaggtggcctacagccttaatggacacgaattcgatttcatccatgatgttaataaaaaacacaaggagtttgtgggtaactggaacaaaaacgcggtgcatgtcaacctgtttgagacccctgtggaggctcagtacgtgagattgtaccccacgagctgccacacggcctgcactctgcgctttgagctactgggctgtgagctgaacggatgcgccaatcccctgggcctgaagaataacagcatccctgacaagcagatcacggcctccagcagctacaagacctggggcttgcatctcttcagctggaacccctcctatgcacggctggacaagcagggcaacttcaacgcctgggttgcggggagctacggtaacgatcagtggctgcaggtggacctgggctcctcgaaggaggtgacaggcatcatcacccagggggcccgtaactttggctctgtccagtttgtggcatcctacaaggttgcctacagtaatgacagtgcgaactggactgagtaccaggaccccaggactggcagcagtaagatcttccctggcaactgggacaaccactcccacaagaagaacttgtttgagacgcccatcctggctcgctatgtgcgcatcctgcctgtagcctggcacaaccgcatcgccctgcgcctggagctgctgggctgttagtggccacctgccacccccaggtcttcctgctttccatgggcccgctgcctcttggcttctcagcccctttaaatcaccatagggctggggactggggaaggggagggtgttcagaggcagcaccaccacacagtcacccctccctccctctttcccaccctccacctctcacgggccctgccccagcccctaagccccgtcccctaacccccagtcctcactgtcctgttttcttaggcactgagggatctgagtaggtctgggatggacaggaaagggcaaagtagggcgtgtggtttccctgcccctgtccggaccgccgatcccaggtgcgtgtgtctctgtctctcctagcccctctctcacacatcacattcccatggtggcctcaagaaaggcccggaagccccaggctggagataacagcctcttgcccgtcggccctgcgtcggccctggggtaccatgtgccacaactgctgtggccccctgtccccaagacacttccccttgtctccctggttgcctctcttgccccttgtcctgaagcccagcgacacagaagggggtggggcgggtctatggggagaaagggagcgaggtcagaggagccggcatgggttggcagggtgggcgtttggggccctcatgctggcttttcaccccagaggacacaggcagcttccaaaatatatttatcttcttcacggg

SEQ ID NO: 1507 - DNA, 2392 bp, Homo sapiens
gcggagcgcgcgctcccagcgaaagcagcagggcagggatctgcgttggaggaagggactgctctggtgctagaatgctgtgcgtcggaaggctgggcggcttgggagccagagcagcagctctgccgccccgccgggcgggccggggaagcctcgaagccgggatccgggcccgaagggtcagcaccagctggtctcccgtgggcgccgccttcaatgtcaagccccagggcagccgcttggacctgttcggcgagcgggcgcgtctttttggagttcctgagctgagtgccccagaaggatttcatattgcacaagaaaaagccttgagaaagacagaattgcttgtggaccgtgcatgttccaccccacctgggccccagaccgtgctgatcttcgatgagctctcggattccttatgcagagtggccgacttggctgattttgtgaaaatcgctcaccctgagccagcattcagagaagctgcggaagaagcttgtagaagtattggcaccatggtagagaagttgaacacaaatgtggatttatatcaaagtttgcaaaaattactagctgataaaaaacttgtggattcccttgatccagaaacaaggcgagtggctgaactgtttatgtttgattttgaaattagtggaatccatctagacaaacaaaagcgtaaaagagcagtggacctcaatgttaaaatcttggatttgagtagtacatttcttatgggaaccaattttcccaacaagattgagaagcatctcttaccagaacacattcgtcgtaactttacatctgctggggatcatatcataattgatggtctccacgcagaatcaccagatgacttggtgcgagaagctgcttataaaatttttctttatcccaatgctggtcaattgaaatgtttagaagaattgctcagcagcagagatcttctggcaaagttggtggggtattccacgttttctcacagggctctccaaggaacgatagctaaaaatccagagactgtcatgcagttccttgaaaaactatctgacaaactttctgaaagaactctgaaagattttgagatgatacgagggatgaaaatgaaactgaatgctcaaaattccgaagtaatgccctgggaccccccttactacagtggtgtgattcgtgcagaaaggtataatattgagcccagcctatattgcccgtttttctctcttggagcatgcatggaaggcctgaatattttgcttaacagactgttggggatttcattatatgcagagcagcctgcaaaaggagaggtgtggagcgaagatgtccgaaaactggctgttgttcatgaatctgaaggattgttggggtacatttactgtgatttttttcagcgagcagacaaaccacatcaggattgccatttcactatccgtggaggcagactaaaggaagatggagactatcaactcccacttgtagttcttatgctgaatcttccccgttcctcaaggagttctccaactttgctaactcctggcatgatggaaaatcttttccatgaaatgggacatgccatgcattcaatgctaggacgtactcgttaccaacacgtcactgggaccaggtgccctactgattttgctgaggttccttctattctgatggagtactttgcaaatgattatcgagtagttaaccaatttgccagacattatcagactggacagccactgccaaaaaatatggtgtctcgtctttgtgaatctaaaaaggtttgtgctgcagctgatatgcaacttcaggtcttttatgccactctggatcaaatctaccatgggaagcatcccctgaggaattcaaccacagacattctcaaggaaacacaagagaaattctatggcctaccatatgttccaaatactgcctggcagctgcgattcagccacctcgtggggtatggtgctagatattactcttacctcatgtccagagcggtcgcctccatggtttggaaggagtgttttctacaggatcctttcaacagggctgccggggagcgctatcgcagggagatgctggcccacggtggaggcagggagcccatgctcatggttgaaggtatgcttcagaagtgtccttctgttgatgacttcgtaagtgccctcgtttccgacttggatctggacttcgaaactttcctcatggattctgaataaaagaaacactctacacctctaatcaaggtcatgtagtaatgactttgttataaatgctacagctgtgagagcttgtttctgattgtttcattgttcgcttctgtaattctgaaaaactttaaactggtagaacttggaataaataatttgttttaattaaaaaaaaaaaaaaaaaa

SEQ ID NO: 1508 - DNA, 2260 bp, Homo sapiens
aagcccagcagccccggggcggatggctccggccgcctggctccgcagcgcggccgcgcgcgccctcctgcccccgatgctgctgctgctgctccagccgccgccgctgctggcccgggctctgccgccggacgtccaccacctccatgccgagaggagggggccacagccctggcatgcagccctgcccagtagcccggcacctgcccctgccacgcaggaagccccccggcctgccagcagcctcaggcctccccgctgtggcgtgcccgacccatctgatgggctgagtgcccgcaaccgacagaagaggttcgtgctttctggcgggcgctgggagaagacggacctcacctacaggatccttcggttcccatggcagttggtgcaggagcaggtgcggcagacgatggcagaggccctaaaggtatggagcgatgtgacgccactcacctttactgaggtgcacgagggccgtgctgacatcatgatcgacttcgccaggtactggcatggggacgacctgccgtttgatgggcctgggggcatcctggcccatgccttcttccccaagactcaccgagaaggggatgtccacttcgactatgatgagacctggactatcggggatgaccagggcacagacctgctgcaggtggcagcccatgaatttggccacgtgctggggctgcagcacacaacagcagccaaggccctgatgtccgccttctacacctttcgctacccactgagtctcagcccagatgactgcaggggcgttcaacacctatatggccagccctggcccactgtcacctccaggaccccagccctgggcccccaggctgggatagacaccaatgagattgcaccgctggagccagacgccccgccagatgcctgtgaggcctcctttgacgcggtctccaccatccgaggcgagctctttttcttcaaagcgggctttgtgtggcgcctccgtgggggccagctgcagcccggctacccagcattggcctctcgccactggcagggactgcccagccctgtggacgctgccttcgaggatgcccagggccacatttggttcttccaaggtgctcagtactgggtgtacgacggtgaaaagccagtcctgggccccgcacccctcaccgagctgggcctggtgaggttcccggtccatgctgccttggtctggggtcccgagaagaacaagatctacttcttccgaggcagggactactggcgtttccaccccagcacccggcgtgtagacagtcccgtgccccgcagggccactgactggagaggggtgccctctgagatcgacgctgccttccaggatgctgatggctatgcctacttcctgcgcggccgcctctactggaagtttgaccctgtgaaggtgaaggctctggaaggcttcccccgtctcgtgggtcctgacttctttggctgtgccgagcctgccaacactttcctctgaccatggcttggatgccctcaggggtgctgacccctgccaggccacgaatatcaggctagagacccatggccatctttgtggctgtgggcaccaggcatgggactgagcccatgtctcctgcagggggatggggtggggtacaaccaccatgacaactgccgggagggccacgcaggtcgtggtcacctgccagcgactgtctcagactgggcagggaggctttggcatgacttaagaggaagggcagtcttgggacccgctatgcaggtcctggcaaacctggctgccctgtctcatccctgtccctcagggtagcaccatggcaggactgggggaactggagtgtccttgctgtatccctgttgtgaggttccttccaggggctggcactgaagcaagggtgctggggccccatggccttcagccctggctgagcaactgggctgtagggcagggccacttcctgaggtcaggtcttggtaggtgcctgcatctgtctgccttctggctgacaatcctggaaatctgttctccagaatccaggccaaaaagttcacagtcaaatggggaggggtattcttcatgcaggagaccccaggccctggaggctgcaacatacctcaatcctgtcccaggccggatcctcctgaagcccttttcgcagcactgctatcctccaaagccattgtaaatgtgtgtacagtgtgtataaaccttcttcttcttttttttttttaaactgaggattgtcattaaacacagttgttttct

SEQ ID NO: 1509 - DNA, 2589 bp, Homo sapiens
ggctccttacccacccggagacttttttttgaaaggaaactagggagggagggagagggagagagggagaaaacgaaggggagctcgtccatccattgaagcacagttcactatgatcttactcacattcagcactggaagacggttggatttcgtgcatcattcgggggtgtttttcttgcaaaccttgctttggattttatgtgctacagtctgcggaacggagcagtatttcaatgtggaggtttggttacaaaagtacggctaccttccaccgactgaccccagaatgtcagtgctgcgctctgcagagaccatgcagtctgccctagctgccatgcagcagttctatggcattaacatgacaggaaaagtggacagaaacacaattgactggatgaagaagccccgatgcggtgtacctgaccagacaagaggtagctccaaatttcatattcgtcgaaagcgatatgcattgacaggacagaaatggcagcacaagcacatcacttacagtataaagaacgtaactccaaaagtaggagaccctgagactcgtaaagctattcgccgtgcctttgatgtgtggcagaatgtaactcctctgacatttgaagaagttccctacagtgaattagaaaatggcaaacgtgatgtggatataaccattatttttgcatctggtttccatggggacagctctccctttgatggagagggaggatttttggcacatgcctacttccctggaccaggaattggaggagatacccattttgactcagatgagccatggacactaggaaatcctaatcatgatggaaatgacttatttcttgtagcagtccatgaactgggacatgctctgggattggagcattccaatgaccccactgccatcatggctccattttaccagtacatggaaacagacaacttcaaactacctaatgatgatttacagggcatccagaagatatatggtccacctgacaagattcctccacctacaagacctctaccgacagtgcccccacaccgctctattcctccggctgacccaaggaaaaatgacaggccaaaacctcctcggcctccaaccggcagaccctcctatcccggagccaaacccaacatctgtgatgggaactttaacactctagctattcttcgtcgtgagatgtttgttttcaaggaccagtggttttggcgagtgagaaacaacagggtgatggatggatacccaatgcaaattacttacttctggcggggcttgcctcctagtatcgatgcagtttatgaaaatagcgacgggaattttgtgttctttaaaggtaacaaatattgggtgttcaaggatacaactcttcaacctggttaccctcatgacttgataacccttggaagtggaattccccctcatggtattgattcagccatttggtgggaggacgtcgggaaaacctatttcttcaagggagacagatattggagatatagtgaagaaatgaaaacaatggaccctggctatcccaagccaatcacagtctggaaagggatccctgaatctcctcagggagcatttgtacacaaagaaaatggctttacgtatttctacaaaggaaaggagtattggaaattcaacaaccagatactcaaggtagaacctggatatccaagatccatcctcaaggattttatgggctgtgatggaccaacagacagagttaaagaaggacacagcccaccagatgatgtagacattgtcatcaaactggacaacacagccagcactgtgaaagccatagctattgtcattccctgcatcttggccttatgcctccttgtattggtttacactgtgttccagttcaagaggaaaggaacaccccgccacatactgtactgtaaacgctctatgcaagagtgggtgtgatgtagggttttttcttctttctttcttttgcaggagtttgtggtaacttgagattcaagacaagagctgttatgctgtttcctagctaggagcaggcttgtggcagcctgattcggggctgacctttcaaaccagagggttgctggtcctgcacatgagtggaaatacactcatggggaagcttccatgatgcacagtatctgctgttcttcagtcctttgtctttctttgtcattcagttctaggcctttcctctgcacgctcaatgcccagtaaaatttcaggattaactaaagaagaggagaaaaagaagaaaagattctttcttaaaagtttctaatgttattttccttctgaagtctgagcccatttctggggggagaaaaaaaaagcaaatcagaaaacccacggtttttctttttttctttttttctttttttcttttttggctttaaaacaaagggaaaaaagagtttaaacaaaaaacccacaattgaacttccaggaaagtgtgaagacccaaaacagctttgtctccaaagaagatagctctctgactgctttggatagtctcctacgcaccattttgtcaggtgggagatttggaatacacatgcaggacgttagactgttgggacagccattttccaaca

SEQ ID NO: 1510 - DNA, 396 bp, Homo sapiens
actccgccttccacgtgcacccactgcctcttcccttctcgcttgggaactctagtctcgcctcgggttgcaatggaccccaactgctcctgtgccgctggtgtctcctgcacctgcgccagctcctgcaagtgcaaagagtgcaaatgcacctcctgcaagaagagctgctgctcctgctgccctgtgggctgtgccaagtgtgcccaaggctgcatctgcaaaggggcatcggagaagtgcagctgctgcgcctgatgtcgggacagccctgctcccaagtacaaatagagtgacccgtaaaatctaggattttttgttttttgctacaatcttgacccctttgctacattcccttttttctgtgaaatatgtgaataataattaaacacttag

SEQ ID NO: 1511 - DNA, 186 bp, Homo sapiens
atggatcccaactgctcctgcgccgccggtgactcctgcacctgcgccggctcctgcaaatgcaaagagtgcaaatgcacctcctgcaagaaaagctgctgctcctgctgccctgtgggctgtgccaagtgtgcccagggctgcatctgcaaaggggcgtcggacaagtgcagctgctgcgcctga

SEQ ID NO: 1512 - DNA, 2643 bp, Homo sapiens
gggactacatttcccagggggcagaggcaggggcgggagggggcgggccccggcgctgctcccgcccctcccccgtgctcgcggggagaggtaaacaaaccacgcgcgggctgcccgcggcacggcgggcgcggctggcgcggctggggcggcaggggcggcggagagcgcgccgagccgcggccgagctggcccgcccgcccgtcgcacatgttccggaacggcgcccggccgtagccgcctgcggcgcctcctgtcggcccgagaagggagtgcggagaggcgccggtcgccacccgcggtgcccatggagcgggtgaagatgatcaacgtgcagcgtctgctggaggctgccgagtttttggagcgccgggagcgagagtgtgaacatggctacgcctcttcattcccgtccatgccgagcccccgactgcagcattcaaagcccccacggaggttgagccgggcacagaaacacagcagcgggagcagcaacaccagcactgccaacagatctacacacaatgagctggaaaagaatcgacgagctcatctgcgcctttgtttagaacgcttaaaagttctgattccactaggaccagactgcacccggcacacaacacttggtttgctcaacaaagccaaagcacacatcaagaaacttgaagaagctgaaagaaaaagccagcaccagctcgagaatttggaacgagaacagagatttttaaagtggcgactggaacagctgcagggtcctcaggagatggaacgaatacgaatggacagcattggatcaactatttcttcagatcgttctgattcagagcgagaggagattgaagtggatgttgaaagcacagagttctcccatggagaagtggacaatataagtaccaccagcatcagtgacattgatgaccacagcagcctgccgagtattgggagtgacgagggttactccagtgccagtgtcaaactttcattcacttcatagaacccagcatgacataacagtgcagggcaaaatattcactgggccaattcaatacaaacaatctcttaaattgggttcatgatgcagtctcctctttaaaacaaaacaaaacaaaacaaaactatacttgaacaaaagggtcagaggacctgtatttaagcaaatacttagcaaaaagtggggcagagcctcccaaggagaacaaatattcagaatattcatattggaaaaatcacaatttttaatggcagcagaaaacttgtgtgaaattttcttgatttgagttgattgagaagaggacattggagatgccatcctctttctcttttctagtttgctcatactacattgagtagacacatttaaggatggggttatgaacccttcctgagctttatggtcctaaaagcaaaataaaaactattcgaatgaaaagacaagaaaatcaggtattaatcttggatagctaataatgagctattaaaactcagcctgggacagtttatcatgaagcctgtggatgatcaatcctttattattattttttttttttgaaaaaagctcatttcatgctctgcaaaaggagagactcccatgaagccttttgaaagggatcatcatgcagctcaactttctgttggattccatgctaagcaagctaaccttatcctgcattgttagcactaggcacccagctgccacctctccatcctgctgcccttaggccacatgggagcagtccatgcatgacagcctctatcctacaaggcctatgagtatggattgggggggccaaaaggaaaaagctccatgtgcctctttgtctgcgtgggtcagaagagttgtgcacgcagattagcaggccaaggtctgagccacagcagcatttttatttcagattttgataactgtttatatgtgttgaaaaccaaaatgacatctttttaaagcttatccataaaaaaaaatagatgtcttttatagtggaaaaacacatggggaaaaaaatcatctattttgatgcagcatttgataatgataaaacacctcacacctcactctttatagtgcacaaaatgaatgaggtctgggctaggtagaaaaagggtcaatgctatttttgtttttagaatcattaccttttaccagcttttaaccatctgatatctatagtagacacactatcatagttaacatagttaagttcagcacttgtctcattttaatgtaaagatttgcttccattttcctacaggcagtctctctcttcctcacagtcccactgtgcaggtgctattgttactcttacgaatattttcagtaatgttattttcttctaagtgaaatttctagcctgcactttgatgtcatgtgttccctttgtctttcaaactccaaggttcccctgtggccctctcccttaccctgggaaggcctcttggagaccttacccctggctgtttggactttgtatactttaaataatttaactacccttaattacttaaaaaaaaaaaaaagctttatgattttcataacttattgctgattttaatggattgttaatttcagtcctgtagttttattttatgtttagatagggctgggcaaggaaaaagaaaataaagacaaccatatttagcagtgca

SEQ ID NO: 1513 - DNA, 481 bp, Homo sapiens
tctccttgccgggtcagccctgacaaaggtcagctagccccttgaggacatcagctttggcctcagggtcctaatggcagcagaaccactgacagagctagaggagtccattgagaccgtggtcaccaccttcttcacctttgcaaggcaggagggccggaaggatagcctcagcgtcaacgagttcaaagagctggttacccagcagttgccccatctgctcaaggatgtgggctctcttgatgagaagatgaagagcttggatgtgaatcaggactcggagctcaagttcaatgagtactggagattgattggggagctggccaaggaaatcaggaagaagaaagacctgaagatcaggaagaagtaaagccgcctggctgagatggggtgggcagggcagagctgatcagggccgagcagaaccgcactcttcccaaataaagcttcctccttgaaaaaaaaaaaaaaaaaaaaaaaa

SEQ ID NO: 1514 - DNA, 1677 bp, Homo sapiens
gcctcgatttaaagagacagaagctgtcggggtcctggaagacggtccccaataccctccccccaagtccttgggaccacttgggtccccagagctggggagatggtttgtggcggctttgcctgctccaagaatgcgctttgcgctctcaacgtggtctacatgctggtgagcttgttgctcattggagtggctgcttggggcaagggcctgggtctggtgtccagcatccacatcatcggcggagtcattgctgtgggagtcttccttctccttattgcagtggctggactggtgggtgctgtcaaccaccaccaagtcctgctgttcttttacatgatcatccttggtttggtcttcatcttccaatttgtaatctcttgctcatgtctggctattaaccgaagcaaacagacagatgtcatcaatgcttcttggtgggtcatgagcaacaagactcgggatgaactggaaagaagttttgattgttgtggcttattcaacctcacaaccctgtatcaacaagattatgatttctgcactgcaatctgcaagagccagagccccacatgccagatgtgtggagaaaagtttcttaagcattcagacgaagccctgaaaatcctagggggtgttggactcttctttagctttacagagatccttggtgtttggctagcaatgagatttcggaatcagaaggatcctagagccaaccccagtgcctttctatgagactttggatccttctgacttttcttctgctctctctaagctttctcttcctcccttagggaatatctagggtctgtaaccgttttggtttgagaaaaaggaaaggccccttgtcacatcctctaaaattgatggaatagcaagactttatgccttgacatattttagtgggagccagactataaggaataaaaggaaaaactttcttcctctctctccaagaggatatgggaagcttctgtgagtgcataggatgggggctggagtcattcttagctgtttcccttcctctgtccatatactggatcacctcaacataccctggtgtggctctaagggtaaatcagggatagggccaaggagaaaacaaccaagaactctttcctgtaataagcaggatccagtttgagaaagtttagcgaatataaaagtaaaagccatttaaaaatctatattctttttttttttttgacacagagtcttgctctgttgcccaggctggagtgcaatggcatgatctcggctcaccgcaacctctgcctcccgggttcaagcgatcctcctgcctcagtctcccaagtagctgggattacaggtgtgcaccaccacgcctgactaattttgtatttttagtagagacagggtttcaccatgttagtcaggctggtctcgaactcctgacctcaggtgatccacccgcgttggcctcccaacgtgctgggattataggcgtgagccaccacgccccgcctaaaatccatattcaaagaagcaatttcagttcctttctaagctttgtcagtcaaggggctccactgacttcctaggccctgtaatttaaccagtctttaaggttttgcaggaaagtcccttcttccaagtggtttttccaaatcgcacaatggcaaagccaaacagaggaagaaacattaaaaaaaaaaa

SEQ ID NO: 1515 - DNA, 1378 bp, Homo sapiens
ggtagcagcatccaccgggcgggaggtcggaggcagcaaggccttaaaggctactgagtgcgccggccgttccgtgtccagaacctcccctactcctccgccttctcttccttggccgcccaccgccaagttccgactccggttttcgcctttgcaaagcctaaggaggaggttaggaacagccgcgcccccctccctgcggccgccgccccctgcctctcggctctgctccctgccgcgtgcgcctgggccgtgcgccccggcaggcgccagccatgtcgatgctgccgtcgtttggctttacgcaggagcaagtggcgtgcgtgtgcgaggttctgcagcaaggcggaaacctggagcgcctgggcaggttcctgtggtcactgcccgcctgcgaccacctgcacaagaacgagagcgtactcaaggccaaggcggtggtcgccttccaccgcggcaacttccgtgagctctacaagatcctggagagccaccagttctcgcctcacaaccaccccaaactgcagcaactgtggctgaaggcgcattacgtggaggccgagaagctgcgcggccgacccctgggcgccgtgggcaaatatcgggtgcgccgaaaatttccactgccgcgcaccatctgggacggcgaggagaccagctactgcttcaaggagaagtcgaggggtgtcctgcgggagtggtacgcgcacaatccctacccatcgccgcgtgagaagcgggagctggccgaggccaccggcctcaccaccacccaggtcagcaactggtttaagaaccggaggcaaagagaccgggccgcggaggccaaggaaagggagaacaccgaaaacaataactcctcctccaacaagcagaaccaactctctcctctggaagggggcaagccgctcatgtccagctcagaagaggaattctcacctccccaaagtccagaccagaactcggtccttctgctgcagggcaatatgggccacgccaggagctcaaactattctctcccgggcttaacagcctcgcagcccagtcacggcctgcagacccaccagcatcagctccaagactctctgctcggccccctcacctccagtctggtggacttggggtcctaagtggggagggactggggcctcgaagggattcctggagcagcaaccactgcagcgactagggacacttgtaaatagaaatcaggaacatttttgcagcttgtttctggagttgtttgcgcataaaggaatggtggactttcacaaatatctttttaaaaatcaaaaccaacagcgatctcaagcttaatctcctcttctctccaactctttccacttttgcattttccttcccaatgcagagatcaggg

SEQ ID NO: 1516 - DNA, 1901 bp, Homo sapiens
atggggcatcggccggtgctcgtgctcagccagaacacaaagcgtgaatccggaagaaaagttcaatctggaaacatcaatgctgccaagactattgcagatatcatccgaacatgtttgggacccaagtccatgatgaagatgcttttggacccaatgggaggcattgtgatgaccaatgatggcaatgccattcttcgagagattcaagtccagcatccagcggccaagtccatgatcgaaattagccggacccaggatgaagaagttggagatgggaccacatcagtaattattcttgcaggggaaatgctgtctgtagctgagcacttcctggagcagcagatgcacccaacagtggtgatcagtgcttaccgcaaggcattggatgatatgatcagcaccctaaagaaaataagtatcccagtcgacatcagtgacagtgatatgatgctgaacatcatcaacagctctattactaccaaagccatcagccggtggtcatctttggcttgcaacattgccctggatgctgtcaagatggtacagtttgaggagaatggtcggaaagagattgacataaaaaaatatgcaagagtggaaaagatacctggaggcatcattgaagactcctgtgtcttgcgtggagtcatgattaacaaggatgtgacccatccacgtatgcggcgctatatcaagaaccctcgcattgtgctgctggattcttctctggaatacaagaaaggaggaagccagactgacattgagattacacgagaggaggacttcacccgaattctccagatggaggaagagtacatccagcagctctgtgaggacattatccaactgaagcccgatgtggtcatcactgaaaagggcatctcagatttagctcagcactaccttatgcgggccaatatcacagccatccgcagagtccggaagacagacaataatcgcattgctagagcctgtggggcccggatagtcagccgaccagaggaactgagagaagatgatgttggaacaggagcaggcctgttggaaatcaagaaaattggagatgaatactttactttcatcactgactgcaaagaccccaaggcctgcaccattctcctccggggggctagcaaagagattctctcggaagtagaacgcaacctccaggatgccatgcaagtgtgtcgcaatgttctcctggaccctcagctggtgccagggggtggggcctccgagatggctgtcgcccatgccttgacagaaaaatccaaggccatgactggtgtggaacaatggccatacagggctgttgcccaggccctagaggtcattcctcgtaccctgatccagaactgtggggccagcaccatccgtctacttacctcccttcgggccaagcacacccaggagaactgtgagacctggggtgtaaatggtgagacgggtactttggtggacatgaaggaactgggcatatgggagccattggctgtgaagctgcagacttataagacagcagtggagacggcagttctgctactgcgaattgatgacatcgtttcaggccacaaaaagaaaggcgatgaccagagccggcaaggcggggctcctgatgctggccaggagtgagtgctaggcaaggctacttcaatgcacagaaccagcagagtctccccttttcctgagccagagtgccaggaacactgtggacgtctttgttcagaagggatcaggttggggggcagcccccagtccctttctgtcccagctcagttttccaaaagacactgacatgtaattcttctctattgtaaggtttccatttagtttgcttccgatgattaaatctaagtcatttgaaaaaaaaaaaaaaaaaaaaaaaaaaaaaaaaaaaa

SEQ ID NO: 1517 - DNA, 911 bp, Homo sapiens
cccacgcgtccggtcagagctggagggccgggcaccgcggccatggagggtcaacgctggctgccgctggaggccaatcccgaggtcaccaaccagtttcttaaacaattaggtctacatcctaactggcaattcgttgatgtatatggaatggatcctgaactccttagcatggtaccaagaccagtctgtgcagtcttacttctctttcctattacagaaaagtatgaagtattcagaacagaagaggaagaaaaaataaaatctcagggacaagatgttacatcatcagtatatttcatgaagcaaacaatcagcaatgcctgtggaacaattggactgattcatgctattgcaaacaataaagacaagatgcactttgaatctggatcaaccttgaaaaaattcctggaggaatctgtgtcaatgagccctgaagaacgagccagatacctggagaactatgatgccatccgagttactcatgagaccagtgcccatgaaggtcagactgaggcaccaagtatagatgagaaagtagatcttcattttattgcattagttcatgtagatgggcatctctatgaattagatgggcggaagccatttccaattaaccatggtgaaactagtgatgaaactttattagaggatgccatagaagtttgcaagaagtttatggagcgcgaccctgatgaactaagatttaatgcgattgctctttctgcagcatagcttgtcaataatggaaacaccaaaaactgtattatttgcaactaaattttctctgccatacactaactcaaaaattttgatattttcattaacttgatgattaaactttatgtgagttaaaaaaaaaaaaaaaaaaaaaaaaaaaaaaaaaaaaaaaaaaaaaaaaaaaaaaaaaa

SEQ ID NO: 1518 - DNA, 515 bp, Homo sapiens
ggggggctcgtgttgaatctagaaccgtagccagacatgggactggaggacgagcaaaagatgcttaccgaatccggagatcctgaggaggaggaagaggaagaggaggaattagtggatcccctaacaacagtgagagagcaatgcgagcagttggagaaatgtgtaaaggcccgggagcggctagagctctgtgatgagcgtgattcctctcgatcacatacagaagaggattgcacggaggagctctttgacttcttgcatgcgagggaccattgcgtggcccacaaactctttaacaacttgaaataaatgtgtggacttaagttgcaccccagtcttcatcatctgggcatcagaatatttccttatggttttggatgtaccatttgtttcttatttgtgtaactgtaagttcacatcaacctcatgggtttggcttgaggctggtagcttctatgtaattcgcaatgattccatctaaataaaagttctatgatctgcaaaaaaaaaaa

SEQ ID NO: 1519 - DNA, 2197 bp, Homo sapiens
caggaagcccacccagccccgccacgcagagcccagaaggaaagaaagcctcatgcctgagccgaggggagcaccatggatctgacaaaaatgggcatgatccagctgcagaaccctagccaccccacggggctactgtgcaaggccaaccagatgcggctggccgggactttgtgcgatgtggtcatcatggtggacagccaggagttccacgcccaccggacggtgctggcctgcaccagcaagatgtttgagatcctcttccaccgcaatagtcaacactatactttggacttcctctcgccaaagaccttccagcagattctggagtatgcatatacagccacgctgcaagccaaggcggaggacctggatgacctgctgtatgcggccgagatcctggagatcgagtacctggaggaacagtgcctgaagatgctggagaccatccaggcctcagacgacaatgacacggaggccaccatggccgatggcggggccgaggaagaagaggaccgcaaggctcggtacctcaagaacatcttcatctcgaagcattccagcgaggagagtgggtatgccagtgtggctggacagagcctccctgggcccatggtggaccagagcccttcagtctccacttcatttggtctttcagccatgagtcccaccaaggctgcagtggacagtttgatgaccataggacagtctctcctgcagggaactcttcagccacctgcagggcccgaggagccaactctggctgggggtgggcggcaccctggggtggctgaggtgaagacggagatgatgcaggtggatgaggtgcccagccaggacagccctggggcagccgagtccagcatctcaggagggatgggggacaaggttgaggaaagaggcaaagaggggcctgggaccccgactcgaagcagcgtcatcaccagtgctagggagctacactatgggcgagaggagagtgccgagcaggtgccacccccagctgaggctggccaggcccccactggccgacctgagcacccagcacccccgcctgagaagcatctgggcatctactccgtgttgcccaaccacaaggctgacgctgtattgagcatgccgtcttccgtgacctctggcctccacgtgcagcctgccctggctgtctccatggacttcagcacctatggggggctgctgccccagggcttcatccagagggagctgttcagcaagctgggggagctggctgtgggcatgaagtcagagagccggaccatcggagagcagtgcagcgtgtgtggggtcgagcttcctgataacgaggctgtggagcagcacaggaagctgcacagtgggatgaagacgtacgggtgcgagctctgcgggaagcggttcctggatagtttgcggctgagaatgcacttactggctcattcagcgggtgccaaagcctttgtctgtgatcagtgcggtgcacagttttcgaaggaggatgccctggagacacacaggcagacccatactggcactgacatggccgtcttctgtctgctgtgtgggaagcgcttccaggcgcagagcgcactgcagcagcacatggaggtccacgcgggcgtgcgcagctacatctgcagtgagtgcaaccgcaccttccccagccacacggctctcaaacgccacctgcgctcacatacaggcgaccacccctacgagtgtgagttctgtggcagctgcttccgggatgagagcacactcaagagccacaaacgcatccacacgggtgagaaaccctacgagtgcaatggctgtgacaagaagttcagcctcaagcatcagctggagacgcactatagggtgcacacaggtgagaagccctttgagtgtaagctctgccaccagcgctcccgggactactcggccatgatcaagcacctgagaacgcacaacggcgcctcgccctaccagtgcaccatctgcacagagtactgccccagcctctcctccatgcagaagcacatgaagggccacaagcccgaggagatcccgcccgactggaggatagagaagacgtacctctacctgtgctatgtgtgaagggaggcccgcggcggtggagccgagcggggagccaggaaagaagagttggagtgagatgaaggaaggactatgacaaataaaaaaaaaaaaggaattc

SEQ ID NO: 1520 - DNA, 2425 bp, Homo sapiens
gcggccgccggtcctccctccacctcctcctcggccccccctcgcttccctcctcccacttcccgagctccggcgtcgtcccggccacgctcgacgctgctgcaggaacaaaggaagaccccgcggcggcggcggcgccacctccgcctgctgctccgacccgctcccggcccgcggcggcggcaccagggcgcccggctcagccttcccggaggcctcggcccggcctcatcgtgccggcttcgcgcgcgaacccggctttcgcatttgggaccctgcaggaaaaatatggctcaggagactaaccagaccccggggcccatgctgtgtagcacaggatgtggcttttatggaaatcctaggacaaatggaatgtgttcagtttgctacaaagaacatcttcagaggcagcaaaatagtggcagaatgagcccaatggggacagctagtggttccaacagtcctacctcagattctgcatctgtacagagagcagacactagcttaaacaactgtgaaggtgctgctggcagcacatctgaaaaatcaagaaatgtgcctgtggctgccttgcctgtaactcagcaaatgacagaaatgagcatttcaagagaggacaaaataactaccccgaaaacagaggtgtcagagccagttgtcactcagcccagtccatcagtttctcagcccagtacttctcagagtgaagaaaaagctcctgaattgcccaaaccaaagaaaaacagatgtttcatgtgcagaaagaaagttggtcttacagggtttgactgccgatgtggaaatttgttttgtggacttcaccgttactctgacaagcacaactgtccgtatgattacaaagcagaagctgcagcaaaaatcagaaaagagaatccagttgttgtggctgaaaaaattcagagaatataaattacttcttgtgaagagactgaaactttgtttttattttaatatatcgtaggaaaacattaaagagcagatgcatggccatttttctttgatgttctccagagttttacattacacttgtctgtcttataattgatattttaggatgtttgggtgtttgttacaggcagaattggatagatacagccctacaaatgtatatgccctcccctgaaaaaaattggatgaaaatctgcacagcaaagtgaaacacacagataataggaacaaaatgtagttcccatgtgccaaacaaaataaatgaaatctctgcatgtttgcagcatatctgccttttgggaatgtaatcaaggtataatctttggctagtgttatgtgcctgtatttttttaaaatggtacaccagaaaaggactggcagtctacttctaccatagttaaacttcaccctctttaatttcacaacatattctttggaagcaggaagaaatgctcataaagaggatcagaccttctttcccgtgaaaccagtatttggcgccatatataagcctggttaaattggtcatctaaagctgtcaaataagacattctgtgaaaggtaaacatcgaaactggttataagtaaaaccatcaagccaacaacagggtcttgagataacctttgaagcttattgtactggcctgcaccagaagatgtctgcattactcattgctaaaaatgtgtagcacagaactgcactaggattaatttgtttacaagaagaaatttaaactctacgtttggttttcacatacagcagctctattgaataacatgcatctgaattttaagttgcaaaggtatctgaataatttttcatgtgcatcttttgtcgaatgttttggttcaagaaagaatgtttaaagctttttaaaagacttcagttcttaatgtaactgtacccttctgcatggaaaatcataaccaacatggctgcagtagacttcttagtggtatccagcgccacttgcagagggctgctttatcatattgtacttgggtgtaggactctagtgttcttgggtgtattgcatgggctgcattatctacagcattgtacaataacaactagaaaaggcagtatacttcactgatgcttgtctggtaataatcacttctgtgttataatggaaggttttttgtgatgtatgaaacttgtgttttttatatataaatgagtatagttagtgttgtggtaatgcctgttttcatctgtaaatagttaagtatgtacacgaggcactacttctgatttattgcaatgttcagtcctagtttttacttttattcttaaagcattcagttttgctttcaattttatgtaccttagttctgagttagacctgcagatgtgtacagatagttcatatttatgtattgcacataatcatgctattcagcattgatgctatattgtattatgtaaataataaaagccatgtacagagggaaa

SEQ ID NO: 1521 - DNA, 1677 bp, Homo sapiens
aggttctcttacatcgaccgcctaagagtcgcgctgtaagaagcaacaacctctcctcttcgtctccgccatcagctcggcagtcgcgaagcagcaaccatgcgtgagtgcatctccatccacgttggccaggctggtgtccagattggcaatgcctgctgggagctctactgcctggaacacggcatccagcccgatggccagatgccaagtgacaagaccattgggggaggagatgattccttcaacaccttcttcagtgagacgggggctggcaagcatgtgccccgggcagtgtttgtagacttggaacccacagtcattgatgaagttcgcactggcacctaccgccagctcttccaccctgagcaacttatcacaggcaaagaagatgctgccaataactatgcccgagggcactacaccattggcaaggagatcattgacctcgtgttggaccgaattcgcaagctggccgaccagtgcacgggtctccagggcttcttggttttccacagctttggtgggggaactggttctgggttcacctcgctgctcatggaacgtctctcagttgattatggcaagaagtccaagctggagttctctatttacccggcgccccaggtttccacagctgtagttgagccctacaactccatcctcaccacccacaccaccctggagcactctgattgtgccttcatggtagacaatgaggccatctatgacatctgtcgtagaaacctcgatattgagcgtccaacctatactaacctgaataggttaataggtcaaattgtgtcctccatcactgcttccctgagatttgatggagccctgaatgttgacctgacagaattccagaccaacctggtgccctatccccgcatccacttccctctggccacatatgcccctgtcatctctgctgagaaagcctaccatgaacagctttctgtagcagagatcaccaatgcttgctttgagccagccaaccagatggtgaaatgtgaccctcgccatggtaaatacatggcttgctgcctgttgtaccgtggtgacgtggttcccaaagatgtcaatgctgccattgccaccatcaagaccaagcgtaccatccagtttgtggattggtgccccactggcttcaaggttggcatcaactaccagcctcccactgtggtgcctggtggagacctggccaaggtacagagagctgtgtgcatgctgagcaacaccacagccattgctgaggcctgggctcgcctggaccacaagtttgacctgatgtatgccaaacgtgcctttgttcactggtacgttggggaggggatggaggaaggtgagttttcagaggcccgtgaggacatggctgcccttgagaaggattatgaggaggttggtgtggattctgttgaaggagagggtgaggaagaaggagaggaatactaaagttaaaacgtcacaaaggtgctgcttttacagggaagcttattctgttttaaacattgaaaagttgtggtctgatcagttaatttgtatgtagcagtgtatgctctcatatacaattactgacctatgctctaaaacatgaatgctttgttacagacccaagctgtccatttctgtgatgggttttgaataaagtattccctgtcttaaaaaaaaaaaaaa

SEQ ID NO: 1522 - DNA, 1044 bp, Homo sapiens
gaccggggcgtgcggagggatgtggcccggaatattggtagggggggcccgggtggcgtcatgcaggtaccccgcgctggggcctcgcctcgccgctcactttccagcgcagcggccgccgcagcggacactccagaacggcctggccctgcagcggtgcctgcacgcgacggcgacccgggctctcccgctcattcccatcgtggtggagcagacgggtcgcggcgagcgcgcctatgacatctactcgcggctgctgcgggagcgcatcgtgtgcgtcatgggcccgatcgatgacagcgttgccagccttgttatcgcacagctcctcttcctgcaatccgagagcaacaagaagcccatccacatgtacatcaacagccctggtggtgtggtgaccgcgggcctggccatctacgacacgatgcagtacatcctcaacccgatctgcacctggtgcgtgggccaggccgccagcatgggctccctgcttctcgccgccggcaccccaggcatgcgccactcgctccccaactcccgtatcatgatccaccagccctcaggaggcgcccggggccaagccacagacattgccatccaggcagaggagatcatgaagctcaagaagcagctctataacatctacgccaagcacaccaaacagagcctgcaggtgatcgagtccgccatggagagggaccgctacatgagccccatggaggcccaggagtttggcatcttagacaaggttctggtccaccctccccaggacggtgaggatgagcccacgctggtgcagaaggagcctgtagaagcagcgccggcagcagaacctgtcccagctagcacctgagagctgggcctcctctccagaatcatgtggaggggccagaggcttgccagacccccagctgggccctgctcaccccttgttgctgggcttggaggggcctcttgaggaacttttaatttgcaggggtgcccgctatggacggggcattccagctgagacactgtgattttaaattaaatctttgtggtctt

SEQ ID NO: 1523 - DNA, 2188 bp, Homo sapiens
ctctttcccttcggtgtgccactgaagatcctggtgtcgccatgggccgccgccccgcccgttgttaccggtattgtaagaacaagccgtacccaaagtctcgcttctgccgaggtgtccctgatgccaagattcgcatttttgacctggggcggaaaaaggcaaaagtggatgagtttccgctttgtggccacatggtgtcagatgaatatgagcagctgtcctctgaagccctggaggctgcccgaatttgtgccaataagtacatggtaaaaagttgtggcaaagatggcttccatatccgggtgcggctccaccccttccacgtcatccgcatcaacaagatgttgtcctgtgctggggctgacaggctccaaacaggcatgcgaggtgcctttggaaagccccagggcactgtggccagggttcacattggccaagttatcatgtccatccgcaccaagctgcagaacaaggagcatgtgattgaggccctgcgcagggccaagttcaagtttcctggccgccagaagatccacatctcaaagaagtggggcttcaccaagttcaatgctgatgaatttgaagacatggtggctgaaaagcggctcatcccagatggctgtggggtcaagtacatccccagtcgtggccctctggacaagtggcgggccctgcactcatgagggcttccaatgtgctgcccccctcttaatactcaccaataaattctacttcctgtccacctatgtctttgtatctacattcttgacggggaaggaacttcctctgggaacctttgggtcattgccctttcacttcagaaacaggttgacaactcagccctgctcatgaggcagcaaaccctgcaaagggctgggactggtggccttatgtcagttgtctactctggagcttgacttggacctccccaggtcctaggcagtaggttgaaaaacactgaagtgcttttcatgaagcacagctgcagcaaagccttgcaatcccaggctggggtcagcctacagttgtgttgcttattacaacacatgcggaccaagaggggcttgtgggctagaggctgaccagcagcgtttatttagcaagggtaggtgtgcatcacattgggcttgttctcacccatctggtttggccattcctccttggtgggaatcatccaggtactgctgaggtcacctgcgatttgccccatttcctatctctagcaacctcctgggccccatgcccccaccccttctagaacctgcattcccagggccttcaccacctgaccaaaggtctaggctaacctttggtcatttgtaacaagacctcggaacagacacgtgtgtggcatggtttggcctggggatcttagatgtctgacctgaactattgtagaacagcgctggcttttgggggagcagcaaaaatgagaggagtgctaggtgggtggcctgagcatctgtatccagggacaggactccaaaggcttttggtcccagagctggggtatgttggccccagcccccagcctgtggctcccaaaaggcctctggttttttgtaatctcagtttacagccatttcttaggtttttaattacctttattttattttgccaaacatacctgggaataccttttattttttttttaccttggggtgatggttccaaaccataaatgtgattatagttaacacatgacccttctagcgtcccagccagtgtttttcctgacctctcttctttggagaggaggatggaagggaggggtccggcatgctgctggcattttgctgtgtcctgcagcccctttccgggacacctgggttcacacagctttttagcttacataactggtgcagattttctgtgtggagatgttgccttgaccagccttggctggactttaccaggcatgcagaagcctgtaccaacacagactacagcacccaggaggtgcgagtgtggctgctcagcggttataacaggcctgactgcattgttcaccggattataatgagccaaaatgtttcccggtgtttgctggtttcagggaaggagtttgatatagcagattaaccaccctccttgtagctattggggcttaatggtttcctggtgattcttaccaatccacaataaacatggcccattggcatatctgcaaaaaaaaaaaaaaaaa

SEQ ID NO: 1524 - DNA, 2427 bp, Homo sapiens
gcggcgccgcaggggattgaggggttgactgagcgttgcgagccttagctttctcccgaacgccagcgctgaggacacgatgtcgcggctctcccgctcactgctttgggccgccacctgcctgggcgtgctctgcgtgctgtccgcggacaagaacacgacccagcacccgaacgtgacgactttagcgcccatctccaacgtaacctcggcgccggtgacgtccctcccgctggtcaccactccggcaccagaaacctgtgaaggtcgaaacagctgcgtttcctgttttaatgttagcgttgttaatactacctgcttttggatagaatgtaaagatgagagctattgttcacataactcaacagttagtgattgtcaagtggggaacacgacagacttctgttccgtttccacggccactccagtgccaacagccaattctacagctaaacccacagttcagccctccccttctacaacttccaagacagttactacatcaggtacaacaaataacactgtgactccaacctcacaacctgtgcgaaagtctacctttgatgcagccagtttcattggaggaattgtcctggtcttggaaataagatgccacacaaggaactacattccagatttaaagaaatgaaaggataccattagtgtgtataacagattattgttcatacttgtaaagcaccttatgtcattgagaatataaagaacagtgccttagaagacagtgaaaggtaagctctagcttaatgtctatgatttgttctttgacattaaggaaggtaaggattggtcagaggatgtaacttgatgtgagcagtagtaaacctgttttagatatcatactgttaatattttattgaaaatttatttcagagcggagaaacttaagctaaagtctgttatacagaattgaaagccttcgtatcttgaacctcccaacatttttcttatggctgttgaaaagtatagagctaaattgatttaattacactttcctttgtactttaaaaaaaagtatgctagcactattgtaccttgaaaggatttccaccagactgtcttgagtagtgacttctttggtgaggcaagaaggatatacattattttagaatcatttactatttaaatgagacaatcatattattttagaatcatttattttaaatgagacaatcattttaagttttaagataacagaagtgaccaatgtaatttcacaacacctaaggattttttggttgatcaggttactgtagatttttactgattgtcctggatgaatagactgtgctttttctttttctctcccttccttcttggtttcccatagtataataagcatgcatactttaacttctatagttttctcctttagagggtcttcttcagttttagaggtttacttctcccttgcctttgactcattggactagtgcagaggctttaagtagtttaaaatgggcttttgcttttctaggtcattaacgttttttatttagtttctttagccaatagtggctgagtttcgcacttgattttcaatattttatagtaagaaatgacaaactgctttggttcatttcataaacaaactctgcatttagataactattaaaggttgttaagatgaagatttactgtttctttgttactcgttggtacagctgtttgttttacttgcacatttgtagatatacttaatgttttcaagtgccttaattgtttaaaatctctggcttcaaagtttcttggggaaaggtcggtttacctcacattttttgtttccattagtaatattctaggtacctcacaaaatgtattatggtgccatggctgttagtttttagtgagtgctgtaggattaattcgaaaataggcagaattccattcctcccaaggtggcaaaaattagctatactgatgtaattgtcatttacctgggtatgaattccctgacacacattcatgtcaacatatgtagcaaattttgtgaaaacacaacaatttgaagcttctgtaattttgagcactgctctaacaacaagcataatataaaattagttagattttgcaagtctacaaatgagctcttgcaacagaactcacagcctttttacttttttcccctaactttagcaatgtagtatcttgagccattaatttttgggtttttttaaaatccagaaggtatatagaaaccttttcagatttttcatctgatttgttcttgcagatgttcttctatcaaataccttattttaccttacagatatttgttgcacaggcagatactgctgtatttagacatttctatttcagttcattaaaaactgcaaaaccaatctgtatcatgtaccaaactgacttaaaataaatctacatgtttattgaattaaaacaaaaaaaaaa

SEQ ID NO: 1525 - DNA, 1725 bp, Homo sapiens
cgcctcttcacggcactgggatccgcatctgcctgggatcatcaagccctagaagctgggtttctttaaattagggctgccgttttctgtttctccctgggctgcggaaagccagaagattttatctagcttatacaaggctgctggtgttccctctttttttccacgagggtgtttttggctgcaattgcatgaaatcccaatggtgtagaccagtggcgatggatctaggagtttaccaactgagacatttttcaatttctttcttgtcatccttgctggggactgaaaacgcttctgtgagacttgataatagctcctctggtgcaagtgtggtagctattgacaacaaaatcgagcaagctatggatctagtgaaaagccatttgatgtatgcggtcagagaagaagtggaggtcctcaaagagcaaatcaaagaactaatagagaaaaattcccagctggagcaggagaacaatctgctgaagacactggccagtcctgagcagcttgcccagtttcaggcccagctgcagactggctccccccctgccaccacccagccacagggcaccacacagccccccgcccagccagcatcgcagggctcaggaccaaccgcatagctgcctatgcccccgcagaactggctgctgcgtgtgaactgaacagacggagaagatgtgctagggagaatctgcctccacagtcacccatttcattgctcgctgcgaaagagacgtgagactgacatatgccattatctcttttccagtattaaacactcatatgcttatggcttggagaaatttcttagttgggtgaattaaaggttaatccgagaattagcatggatataccgggacctcatgcagcttggcagatatctgagaaatggtttaattcatgctcaggagctgtgtgcctttccatcccttccggctccctacccctcacttccaagggttctctctcctgcttgcgcttagtgtcctacatggggttgtgaagcgatggagctcctcactggactcgcctctctcctctcctccccccaggaggaacttgaaaggagggtaaaaagactaaaatgagggggaacagagttcactgtacaaatttgacaactgtcaccaaaattcataaaaaacaatagtactgtgcctctttcttctcaaacaatggatgacacaaaactatgagagtgacaaaatggtgacaggtagctgggacctaggctatcttaccatgaaggttgttttgcttattgtatatttgtgtatgtagtgtaactattttgtacaatagaggactgtaactactatttaggttgtacagattgaaatttagttgtttcattggctgtctgaggaggtgtggacttttatatatagatctacataaaaactgctacatgacaaaaaccacacctaaaccccttttaagaatttggcacagttactcactttgtgtaatctgaaatctagctgctgaatacgctgaagtaaatccttgttcactgaagtctttcaattgagctggttgaatactttgaaaaatgctcagttctaactaatgaaatggatttcccagtaggggtttctgcatatcacctgtatagtagttatatgcatatgtttctgtgcatgttctctacacaattgtaaggtgtcactgtatttaactgttgcacttgtcaactttcaataaagcatataaatgttg

SEQ ID NO: 1526 - DNA, 2817 bp, Homo sapiens
  misc_feature (2552)..(2552): n is a, c, g, or t
  misc_feature (2578)..(2578): n is a, c, g, or t
gcggtagtggcggaagaggttcggcggctgatggcggatcaggatcggaagcctgcgtaactttctcccttgatccgggagtctttccactggattcacaatgacatcctttcaagaagtcccattgcagacttccaactttgcccatgtcatctttcaaaatgtggccaagagttaccttcctaatgcacacctggaatgtcattacaccttaactccatatattcatccacatccaaaagattgggttggtatattcaaggttggatggagtactgctcgtgattattacacgtttttatggtcccctatgcctgaacattatgtggaaggatcaacagtcaattgtgtactagcattccaaggatattaccttccaaatgatgatggagaattttatcagttctgttacgttacccataagggtgaaattcgtggagcaagtacacctttccagtttcgagcttcttctccagttgaagagctgcttactatggaagatgaaggaaattctgacatgttagtggtgaccacaaaagcaggccttcttgagttgaaaattgagaaaaccatgaaagaaaaagaagaactgttaaagttaattgccgttctggaaaaagaaacagcacaacttcgagaacaagttgggagaatggaaagagaacttaaccatgagaaagaaagatgtgaccaactgcaagcagaacaaaagggtcttactgaagtaacacaaagcttaaaaatggaaaatgaagagtttaagaagaggttcagtgatgctacatccaaagcccatcagcttgaggaagatattgtgtcagtaacacataaagcaattgaaaaagaaaccgaattagacagtttaaaggacaaactcaagaaggcacaacatgaaagagaacaacttgaatgtcagttgaagacagagaaggatgaaaaggaactttataaggtacatttgaagaatacagaaatagaaaataccaagcttatgtcagaggtccagactttaaaaaatttagatgggaacaaagaaagcgtgattactcatttcaaagaagagattggcaggctgcagttatgtttggctgaaaaggaaaatctgcaaagaactttcctgcttacaacctcaagtaaagaagatacttgttttttaaaggagcaacttcgtaaagcagaggaacaggttcaggcaactcggcaagaagttgtctttctggctaaagaactcagtgatgctgtcaacgtacgagacagaacgatggcagacctgcatactgcacgcttggaaaacgagaaagtgaaaaagcagttagctgatgcagtggcagaacttaaactaaatgctatgaaaaaagatcaggacaagactgatacactggaacacgaactaagaagagaagttgaagatctgaaactccgtcttcagatggctgcagaccattataaagaaaaatttaaggaatgccaaaggctccaaaaacaaataaacaaactttcagatcaatcagctaataataataatgtcttcacaaagaaaacggggaatcagcagaaagtgaatgatgcttcagtaaacacagacccagccacttctgcctctactgtagatgtaaagccatcaccttctgcagcagaggcagattttgacatagtaacaaaggggcaagtctgtgaaatgaccaaagaaattgctgacaaaacagaaaagtataataaatgtaaacaactcttgcaggatgagaaagcaaaatgcaataaatatgctgatgaacttgcaaaaatggagctgaaatggaaagaacaagtgaaaattgctgaaaatgtaaaacttgaactagctgaagtacaggacaattataaagaacttaaaaggagtctagaaaatccagcagaaaggaaaatggaagatggagcagatggtgctttttacccagatgaaatacaaaggccacctgtcagagtcccctcttggggactggaagacaatgttgtctgcagccagcctgctcgaaactttagtcggcctgatggcttagaggactctgaggatagcaaagaagatgagaatgtgcctactgctcctgatcctccaagtcaacatttacgtgggcatgggacaggcttttgctttgattccagctttgatgttcacaagaagtgtcccctctgtgagttaatgtttcctcctaactatgatcagagcaaatttgaagaacatgttgaaagtcactggaaggtgtgcccgatgtgcagcgagcagttccctcctgactatgaccagcaggtgtttgaaaggcatgtgcagacccattttgatcagaatgttctaaattttgactagttactttttattatgagttaatatagtttagcagtaaaaaaaaaaaaaaaaaaaccacacctaaaatagaccactgaggagaccatagagcggatgctttcatgcaccctttactgcactttctgaccaggagctactttgagtttggtgttactaggatcagggtcagtctttggcttatcaataaattttaatttctgttaatctnacctgctttaaaaaaaaagttcttgngtgttcgtatctttatttattccctagtttgcagaactgtctgaataaaggatacaaggattatttcaatgttactgcactgaaaaacgtgtatgtattagtgtgctagattatttagcagaatattcacaagtttctgttgaccttgttgattgagcatgactactaaatattatgtaataaaaagcatttgtcataacaaaaaaaaaaaaaaaaaaaaaaaaaaaaaaaaaaaaaaa

SEQ ID NO: 1527 - DNA, 2320 bp, Homo sapiens
cttcctgaaaggatctggagacaccagctccacaagtcctggtgtctttaaaaggatcagcttgaggaataaggctcgtctgagagctgtgacattcatctgactctagtgaaagtccaacagccactccctttttggcctccaactgggcaccatgagggcctgcatctccctggtattggccgtgctgtgtggcctggcctgggctgaggaccacaaagagtcagagccattgccacagctggaggaagagacagaagaggccctcgccagcaacttgtactcggcacccacctcctgccagggccgctgctacgaagcctttgacaagcaccaccaatgtcactgcaatgcccgctgccaagagtttgggaactgctgcaaggattttgagagcctgtgtagtgaccacgaggtctcccacagcagtgatgccataacaaaagaggagattcagagcatctctgagaagatctacagggcagacaccaacaaagcccagaaggaagacatcgttctcaatagccaaaactgcatctccccgtcagagaccagaaaccaagtggatcgctgcccaaagccactcttcacttatgtcaatgagaagctgttctccaagcccacctatgcagccttcatcaacctcctcaacaactaccagcgggcaacaggccatggggagcacttcagtgcccaggagctggccgagcaggacgccttcctcagagagatcatgaagacagcagtcatgaaggagctctacagcttcctccatcaccagaatcgctatggctcagagcaagagtttgtcgatgacttgaagaacatgtggtttgggctctattcgagaggcaatgaagagggggactcgagtggctttgaacatgtcttctcaggtgaggtaaaaaaaggcaaggttactggcttccataactggatccgcttctacctggaggagaaggagggtctggttgactattacagtcacatctacgatgggccttgggattcttaccccgatgtgctggcaatgcagttcaactgggacggctactataaggaagtgggctctgctttcatcggcagcagccctgagtttgagtttgcactctactccctgtgcttcatcgccaggccaggcaaagtgtgccagttaagcctgggaggatatcccttagctgtccggacatatacctgggacaagtccacctatgggaatggcaagaagtacatcgccacagcctacatagtgtcttccacctaatagaacttcgagccagaaaggggcatgagggctcttgcgagactgaagtgctatcttctctggactagagagaagagggagaggactggaagggatcaccaaatctcaaagcaatgagaagcattcctaaatcccaaagtgcccacatgggaaagagataaaatgtacaaattagaaaaatgtggataaacagtcaaacctttatcctctagaattttggcaatgttgactaagaaacagagtccaagcagagaaggtaggaaccctccatagctctctgccctgatgtgtgggggaactaggaagaagtcctttgacctcaccaggcctcatgcttccctttaatgtaaagggaaggggtttgcccactttcctctttttggggttggtgagagggcaaaccctgatatttttactgtgaaggtgttttcagttgttcttaggaagaacagctgatagaaattcaagattactataatggctgttattatacacagctctgtaaactaccactcagccctgtgttggggtcctcaaagaagtaaggccacagtaatcaagcaagggcctttggttttttccagagttagatcctctcagaacagagtctgggagaactccaatgctgaatggagaagggtaataggttggttgcagtgaatgggctgggggtggggtggccttctccaggcctgagtgtttttgtgtccagctcagtatctgcaacaagaagtttcccacttgtggatgtttagtgcagccacagacttgtattttgatccccaattttttttgaaagagttctcctcataggaggatgattcagcatcagaagaagaaggaacccatagcttggtgtcattaacataattattttaagccttatccagcagccataatttgaataactctacgagaccagagagactgtagttccctattttaacctcaattatgcatttgtccccaaccccactgagaactaaatgctgtaccacagagccgggtgtgaactatggtttagaaggttcaagtttccaattaaagtcattgaag

SEQ ID NO: 1528 - DNA, 2032 bp, Homo sapiens
gtggccagggcgcgagagtgcaacgtcctcctggccccgagcgcgtcgtcgcgccccgggagcagaccctcgcccagcagttaccgccgtcccgactttccgttccagttgcagctcctgccgggcaacatgtcaagagccgccgccgctacagctgccgccgccacctggggaagagcagcagcagcagcggcggccgcgggcacacgggggcaataaaccgagccacccgggcgtccagcgtgccggggaaccctctctgcgctcactgcccggcgggacccacgccatgtgctgagccatgtccctggccgcgcccgcgggcagcgcatggggcagcgcctgagtggcggcagatcttgcctcgatgtccccggccggctcctaccgcagccgccgccgcccccgccgccggtgaggaggaagctcgcgctgctcttcgccatgctctgcgtctggctctatatgttcctgtactcgtgcgccggctcctgcgccgccgcgccggggctgctgctcctgggctctgggtcccgcgccgcacacgacccgccagccctggccacagctccggacgggacgccccccaggctgccgttccgggcgccgccagccaccccactggcttcaggcaaggagatggccgagggcgctgcgagcccggaggagcagagtcccgaggtgccggactccccaagccccatctccagctttttcagtgggtctgggagcaagcagctgccgcaggccatcatcatcggcgtgaagaagggcggcacgcgggcgctgctggagtttctgcgcgtgcaccccgacgtgcgcgccgtgggcgccgagccccatttcttcgatcgcagctacgacaagggcctcgcttggtaccgggacctgatgcccagaaccctggacgggcagatcaccatggagaagacgcccagttacttcgtcacgcgggaggcccccgcgcgcatctcggccatgtccaaggacaccaagctcatcgtggtggtgcgggacccggtgaccagggccatctcggactacacgcagacgctgtccaagcggcccgacatccccaccttcgagagcttgacgttcaaaaacaggacagcgggcctcatcgacacgtcgtggagcgccatccagatcggcatctacgccaagcacctggagcactggctgcgccacttccccatccgccagatgctcttcgtgagcggcgagcggctcatcagcgacccggccggggagctgggccgcgtgcaagacttcctgggcctcaagaggatcatcacggacaagcacttctacttcaacaagaccaagggcttcccctgcctgaagaaggcggagggcagcagccggccccattgcctgggcaagaccaagggcaggacccatcctgagatcgaccgcgaggtggtgcgcaggctgcgcgagttctaccggcctttcaacctcaagttctaccagatgaccgggcacgactttggctgggattgagcagacccgggctatgtaccttacccacgtggcttatctattgacagagattatatgtatgtaaaatgtacagaaatctattttataataatttatttttaattcataagcaattaattcactaagctgcctagccacactctttagagagttagcttcataatctgttaacattccaaagtgtttaactctagtatttcgttttcttcttcacaattgatggtgcttctattttttcttctcccctacctgttatatttaaaacaaagaaaagcacaacttgagatttttgttgttacgggtattcagccttcagtcaccgtctgagttctccagttgctgcctccttgtcttgtcttgggtctcccattccagcttccctgtctcttcctgcctgtgtacctcgtaggaacgctgagctgcctcaacagggctgtattctgaagggcaggcctcatgcagcagcctccttgcagatgtggtgtcccgtccaatgatgtagcctgaaagccacagccctagggttctg

SEQ ID NO: 1529 - DNA, 2546 bp, Homo sapiens
cagcggcggcccaggaggcagccggtgagcgcctgcgagcagagtggcgggggccgctgacaggtcccgcgcagcccagcccagcccagccacgcggctcacaggtggggtccaagagcagtttggagcaacccggcgctacggagaggggtggacggctctgcacgggcctcctgtctcccgctcgggcagagggactcggggggacctcgctccttggccgagagaacctgaactcgggcggagagaacgcgcccaggcgggcaaggggaccagagaaagccggggctggaagtcactgtcgctcgccactgtctggagcgcacggagcgcagaggcccggcagccgcgcgtgccctcccggggaccgagccagtgatgcaggatcgctgagcggagatccgcgccgagaagtctctcggggccggggctgagacgcacgccttcgacaccgctgccaagaccccgattccggcgactcttgcggggaaccgaggggccaaggctgccccaagctcaggacttgggcgagtctaagacgatggtttcttaagcacggacccgcgttccccttcccgccccctcgactggaggcagggatcctgcgcggggcccccgggattccgtttccccgcggagccccggccgctgcctcccgggacagttcgcacggccacaggggcgcacggcgatgtggcctccgtccagcgcgctggcccgccggggggatgctctggcacctgtcggggtccaggcctagcatggccggcgcgttgcccgacgtcgcctccggctaggatggcccctccgggcccggccagtgccctctccacctcggccgagccgctgtcccgcagcatcttccggaagttcttgctgatgctctgctccctgctcacgtccctttacgtcttctactgcctggccgagcgctgccagaccctgtccggccccgtcgtggggctgtccggcggcggcgaggaggcgggggcccctggtggcggcgtcctggccggaggcccgagggagctggcggtgtggccggcggcggcacagagaaagcgcctcctgcaactgccgcagtggcggaggcgccggccgcccgcgccccgcgacgacggcgaggaggcggcctgggaagaagagtcccctggcctgtcagggggtccgggcggctccggggccggaagcaccgtggccgaggccccgccggggaccctggcgctgctcctggacgaaggcagcaagcagctgccgcaggccatcatcatcggagtgaagaagggcggcacgcgggcgctgctggagttcctgcgcgtgcaccccgacgtgcgcgccgtgggcgccgagccccacttcttcgaccgcagctacgacaagggcctcgcctggtaccgggacctgatgcccagaaccctggacgggcagatcaccatggagaagacgcccagttacttcgtcacgcgggaggcccccgcgcgcatctcggccatgtccaaggacaccaagctcatcgtggtggtgcgggacccggtgaccagggccatctcggactacacgcagacgctgtccaagcggcccgacatccccaccttcgagagcttgacgttcaaaaacaggacagcgggcctcatcgacacgtcgtggagcgccatccagatcggcatctacgccaagcacctggagcactggctgcgccacttccccatccgccagatgctcttcgtgagcggcgagcggctcatcagcgacccggccggggagctgggccgcgtgcaagacttcctgggcctcaagaggatcatcacggacaagcacttctacttcaacaagaccaagggcttcccctgcctgaagaaggcggagggcagcagccggccccattgcctgggcaagaccaagggcaggacccatcctgagatcgaccgcgaggtggtgcgcaggctgcgcgagttctaccggcctttcaacctcaagttctaccagatgaccgggcacgactttggctgggatggataaccatataatttaaaaagaaaaaaaaaatcaaaatataatatatttttttaccaatcggtagagaagagacagtttaatatttgtgctgaaaatatgtttcagtatttttttcaatgaatgttaagagattgttctcactcccgccccatcttaatgtataaccaacaccaaacacgtggatcaacagaaaaggaaaatttcactcgtctaaacactttcaattttcagtttttattttatgttctatatacccagtcataaagtataagcatcagttgtcattaaaagttttcagaaaatcttgaggttaaacatctctctctctttttttaaaatacaaggccctgataaaattgatatctatccttatatttttctccctttttcccgtgccactttttcttaaattatttcccagttagtattatcatatgtttgtacccgtcacagttttcatagtgctttcaaatacacctttttgatcattaaaataaaaaaataaatcttggaaaaaaaaaaaaaaaaaa

SEQ ID NO: 1530 - DNA, 4097 bp, Homo sapiens
aggtggtggctgcgttgggctccgggaagccgttcgggctggggctgtcggccgcggggcggaggcactcgcgcggggggtaattcggggtctgggttctggtgccgcgcagctttccccgtctaaaagttggttttaattggttgcccacaggattgacttggcctctacttcttgttaaggaaattcatctcttgttttatcaggtgtgtgtggtttcagcgcagcatggctgtggtcatccgtttgcaaggtctcccaattgtggcggggaccatggacattcgccacttcttctctggattgaccattcctgatgggggcgtgcatattgtagggggtgaactgggtgaggctttcatcgtttttgccactgatgaagatgcaaggcttggtatgatgcgcacaggtggtacaattaaagggtcaaaagtaacactattgttgagtagtaagacggaaatgcagaatatgattgaactgagtcgtaggcgttttgaaactgccaacttagatataccaccagcaaatgccagtagatcaggaccaccacctagctcaggaatgagtagcagggtaaacttgcccacaacagtatccaactttaataatccatcacccagtgtagttactgccaccacttctgttcatgaaagcaacaaaaacatacagacattttccacagccagcgtaggaacagctcctccaaatatgggggcttcctttgggagcccaacgtttagctcaactgttccaagcacagcctctccaatgaacacagtcccgccgccaccaattcctccaattccagcgatgccatctctgccaccaatgccatccattcccccaattccagttcctcctccagtacctacattgcctcctgtgcctcctgtgcccccgattcccccagttccttctgtgccacccatgaccccactgccacccatgtcgggcatgccgcccttgaatccgccacctgtggcacctctacctgctggaatgaatggctctggagcacctatgaatttgaacaataatctgaatcctatgtttcttggtccgttgaatcctgttaaccctatccagatgaactctcagagcagtgtgaagccactccccatcaaccctgatgatctgtatgtcagtgtgcatggaatgcccttttctgcaatggaaaatgatgtcagagatttttttcatgggctccgtgttgatgcagtgcatttgttgaaagatcatgtaggtcgaaataatgggaatggattggttaagtttctctcccctcaagatacatttgaagctttgaaacgaaacagaatgctgatgattcaacgctatgtggaagttagccctgccacagaaagacagtgggtagctgctggaggccatatcacttttaagcaaaatatgggaccttctggacaaactcatccccctcctcagacacttcccaggtcaaaatcgcccagtgggcagaaaagatcaaggtcaagatcaccacatgaggctggtttttgtgtttacttgaaagggctaccatttgaagcagaaaacaaacatgtcattgatttttttaaaaagctggatattgtggaagatagtatttatatagcttatggacccaatgggaaagcaactggcgaaggctttgtagagttcagaaatgaggctgactataaggctgctctgtgtcgtcataaacagtacatgggcaatcgctttattcaagttcatccaattactaagaaaggtatgctagaaaagatagatatgattcgaaaaagactgcagaacttcagctatgaccagagggaaatgatactaaatccagagggggatgtcaactctgccaaagtctgtgcccacataacaaatattccattcagcattacaaagatggatgttcttcagttcctagaaggaatcccagtggatgaaaatgctgtacatgttcttgttgataacaatgggcaaggtctaggacaggcattggttcagtttaaaaatgaagatgatgcacgtaagtctgaacgcttacaccgtaaaaaacttaatgggagagaagcttttgttcatgtagttaccctagaagatatgagagagattgagaaaaatccccctgcccaaggaaaaaagggattaaagatgcctgtgccaggtaatcctgcagttccaggaatgcccaatgcgggactgcccggtgtgggactgcccagtgcaggacttcccggtgcaggcctgcccagcacaggactgcctggttcagcaataaccagtgcaggactgcctggtgcgggaatgcccagtgcaggaatacctagtgcaggaggtgaagagcatgccttcctgactgtaggatcaaaggaagccaataatgggcctccatttaactttcctggtaattttggtggatcaaatgcctttgggccaccaatccctcctccaggattaggaggcggggcctttggtgatgctaggcctggtatgccttcagttggaaacagtggtttgcctggtctaggactggatgttccgggttttggaggtggaccaaacaatttaagtgggccatcgggatttggagggggccctcagaattttggaaatggccctggtagcttaggcggtcccccggggtttggaagtggccctcctggtcttggaagtgcccctgggcatttgggtgggccaccagcttttgggcctggccccggccccggccccggccctggcccaatccatattggtggtccccctggctttgcatctagttctggaaaaccaggaccgacagtaattaaagtgcaaaacatgccctttactgtgtctattgatgagattttagatttcttttatggctatcaagtaatcccaggctcagtgtgtttaaaatacaatgaaaaaggtatgcccacaggtgaagccatggtggcctttgagtctcgggatgaagccacagctgctgtcattgacttaaatgacaggcctataggttcaagaaaagtaaaacttgtattagggtagccattcacatcattttttatagggtagatcttcatattgctgtgattaatgcatccagattgttttcctagtatttccaggttagaacctgtggattgtttcaattgcatatagcttggtttccataacatagagcattggttgactgtttacagaagactcactcaccaggataaacattgctgtatgttacagtaaagctatctggagagaacacataaatgattttggcataccattagagaaaccatttgtaaaactcaaatgaccacataaagcttatcaaggagtctagattggttttgttttataccatatgggatgaagaaaatagaaatgtcagtagaactcattgagggtgctcttgccagctgctgaaaatagaagttggctactctcagaatttggtttaaagctggacagatttgctttgttatagggtaaagctttgtctaaagtcctcattttcttttaaaattgaataaaatttctgtatacagattcattgtatgtacctttattgcttcttaagggtccttgctgtatagacagtcctgcttcagaaggttgctgctttgtttgtctaattgactcatttgtaaatgagcagaactgttttgttggtttttttccctaaatataaaagtccacacttcgtttgtgctataacctcaaactttgatttctaatgtcacacttaaaactgtgtggaataagacttttgccataaaaataaactatggagtcctttatctaccagagcctttttggtttgaccgccacgatttaggttagtcagtttaaaaattgttcatgttgtttggatggtatcgaaaaccagaaaccacttttaataatgtgtttaagatacttgatttgaagtccttttcatatggactaattgtagtatcaatttcctcctgtcccgattatgtgaaattttggcctttaaacaaagaggggcccattcataagaaagtgttatatctaggtttttaaaactgaagttgaaattatctttgttagcagtagtagtatagaataaaagatccgtatgctggttcgtaaaa

SEQ ID NO: 1531 - DNA, 3252 bp, Homo sapiens
ggggtgaaccgtgacagcgcttcggcccgcactaaggccggctcttgtgccggaaggaggaaggcgtggggcattcgcccctcggagctagggagtgtgtgcgacgccgctgcgaggtcacgtgagccactgccggcagagagggaaaggggcggggcccagaacgaagcggggaggcgccccttgtttccctggggtcacgcgcagccggaagtggcggctgctgcggagaattggagatggggaccgccctggacatcaagattaaaagagcgaataaagtttatcacgccggggaagtgctctctggcgtggtggtcatatcgagtaaggattcagtccaacaccagggagtgtctttgaccatggaaggaactgtaaacctccagctcagtgccaaaagtgtgggtgtgtttgaagctttttataattctgttaagcctatccagattatcaacagcaccatagaaatggtgaagccggggaaatttcccagcggcaaaacagaaatcccttttgaatttcctctgcacttgaagggtaacaaagttctgtatgagacgtatcatggcgtgtttgtcaacattcagtatacactgcgctgtgacatgaagcggtctctgttggccaaggacttgacaaagacctgtgaatttatcgttcactccgctcctcagaaggggaagtttactcccagtcccgtggacttcacgattacacctgaaaccttacagaacgtcaaagagagagctttgcttcccaaatttctccttcgaggacatctcaactcaacaaactgtgtcatcacgcagccactaacgggagagctggtggtggagagctcggaagccgccatcagaagcgtggagctgcagctggtgcgcgtggagacgtgcgggtgtgcagaaggctatgcccgcgacgccacggagattcagaacattcagatcgccgacggggatgtgtgcaggggcctctctgtccccatctacatggtcttccctaggctgttcacctgccctacactggagaccaccaacttcaaagtggaatttgaggttaacatcgtggtgctgcttcaccctgaccacctcatcacggagaacttcccgctgaagctctgcaggatatagcccggaggagggaagcatagagaacgggagtggccatctggaaatccagctggttatccaaatcctaaggggagctacagccagcggcatatacttgtttttgtgattattctgtatcagaaatgaaacagaccctcaaattaactttccttcctcatttcttgaggcttctgcttccaacaggcacctctaatcagaccttttctttgaaattcaacaagatttcttaatgctatttgccaagaccatttcacagaaaacattgactgtggctcttgccttatctgttcctttttaggtacagtaaaacaattgtgacagcagtttgagcttgctggagagtggcatcatggggacaaaaggaaacctctgacttgctaatggatgtagccagggactccccatagcaaagggtctgtggccagttgacatccaggatggctgcaagcgcacttgatggtcaggaagtttgcagatactcgccaaggcagagcgcaaagtgctagccactggaaatgcatgacttccctccacccctactctattctgtagttttttggttttgtttctgagacggagtctcagtctgtcacccaggctggagtgatctcagctcactgcaacctccacctcccaggttcaagcgactctcctgcctcagcctcccgagtagttgggattacaggtgactgccaccgtgcccggctaatgtttgtatttttagtagagacggggcttcaccatcttggccaggctggtcttgaactcctgacctcgtgacccacccgccttggcctcccaaagtgctgggattacaggtgtgagccaccacacccagcctctgtagttctttttacaacatttttcattataactttaaattttttaagcaactggaaaagtgttccttgctctcttggggggatttggctggtgccgaagtgtttctgaagtctcaagaactgccataaaatctcacgctgccatttccctgaacagatacatacatagagagagacagttttccaaactgtgtcacgcaggctgagtgcactggcaggatcacagctcacggcagcctcaacctccctggctcaagcgatccctcccctcagcctcctgagtagctgagactacaggtgagtgccaccacactcagctaattttcaaattttttgtagacagggtctccctatgttgcccaggctggtcttgaactcctagactcaagtgatcctcctgtcttggcctcccaaagtgctgagattacaggtgtgagccactgtgcccagcagtttcccagaatatatttaaatgcaaagttacatgaggggaaaacatgtatgtttgctcctgttgttactgggtaggttctgaacagcagaaacccatgtgcagggtgggctggtgaaggcccctctccgcaaggtggtagcaggaaaaggtccttgacttgatgaatttggtctgcctctgagccactggaggaagctgttttgagccagggttttttggcctaaagccagcatttcctcagtctccctttgtggttcgaaggatatggactattgcaatacatttcttccttcaaatcctgccactgttttgttggcccacaactaataggacctcaaaataagccatgctgctttgcacacacactagccttcttttgtacttttcattctggatgggcttggccaaaacaggctcaggccaaagacctcccaagctgtatgtacttccagtatcctgaaacagtgtttggtgacataatgccaagggtaaacaagcctgatttaggcactgctttatccaggggcttcacccatgaaattaataaaacttatctgagtcacttgaaacttggttcccagaaaacacatttctggtttataatctccttttatgctcacctgacattaattatctatccttgatgatgtgtttaaactgagtagcagaaaacagaggccacactttctgggaaattttaaaggaagaaaccatttttaatgagatgaaaatatttaacgaatttaaaaagctaatgacaattttgagaaaaggtttgggatgtatattgctatgtaatttaataaactgattttatggatat

SEQ ID NO: 1532 - DNA, 4544 bp, Homo sapiens
ccgagaagggcttcaggacgcgggaggcgcacttgcttcaagtcgcgggcgtgggaacggggttgcaaaacggggcctttttatccgggcttgcttccggcgtcatggctcaaagggccttcccgaatccttatgctgattataacaaatccctggccgaaggctactttgatgctgccgggaggctgactcctgagttctcacaacgcttgaccaataagattcgggagcttcttcagcaaatggagagaggcctgaaatcagcagaccctcgggatggcaccggttacactggctgggcaggtattgctgtgctttacttacatctttatgatgtatttggggaccctgcctacctacagttagcacatggctatgtaaagcaaagtctgaactgcttaaccaagcgctccatcaccttcctttgtggggatgcaggccccctggcagtggccgctgtgctatatcacaagatgaacaatgagaagcaggcagaagattgcatcacacggctaattcacctaaataagattgatcctcatgctccaaatgaaatgctctatgggcgaataggctacatctatgctcttctttttgtcaataagaactttggagtggaaaagattcctcaaagccatattcagcagatttgtgaaacaattttaacctctggagaaaacctagctaggaagagaaacttcacggcaaagtctccactgatgtatgaatggtaccaggaatattatgtaggggctgctcatggcctggctggaatttattactacctgatgcagcccagccttcaagtgagccaagggaagttacatagtttggtcaagcccagtgtagactacgtctgccagctgaaattcccttctggcaattaccctccatgtataggtgataatcgagatctgcttgtccattggtgccatggcgcccctggggtaatctacatgctcatccaggcctataaggtattcagagaggaaaagtatctctgtgatgcctatcagtgtgctgatgtgatctggcaatatgggttgctgaagaagggatatgggctgtgccacggttctgcagggaatgcctatgccttcctgacactctacaacctcacacaggacatgaagtacctgtatagggcctgtaagtttgctgaatggtgcttagagtatggagaacatggatgcagaacaccagacacccctttctctctctttgaaggaatggctggaacaatatatttcctggctgacctgctagtccccacaaaagccaggttccctgcatttgaactctgaaaggatagcatgccacctgcaactcactgcatgaccctttctgtatattcaaacccaagctaagtgcttccgttgctttccaaggaaacaaagagtcaaactgtggacttgattttgttagcttttttcagaatttatctttcattcagttcccttccattatcatttacttttacttagaagtatccaaggaagtcttttaactttaatttccatttcttcctaaagggagagtgagtgatatgtacagtgttttgagattgtatacatatattccagaacttggaggaaatcttatttaagtttatgaatataaccatctgttactgttctaaaaatgtttaaaagaaactcaatacagataaagataaatatgtgactattattgggtattacacttcacttctctttaatatttttcctccaactggagggcagacaattttctgacttgcttttctctaggtggttcattttgaaaggggacagaaatataactaaatgcttccaggagaaaaattccaagagttacaatctggacttggtacctaaatatcattttttaaattcttgatgcctatttggactagaggtaaacatactttcagattggcctgtttttgtcggtaaggcatacagccttcagaagccaacatttttaatcaaaaacttataaaacatgatgatcattgtgaaaattctgagttgaaggttagtttaagataagctaacaataacagtctgtgttttctctaaaataatctgagttttttggaactctttatttaaatatgtgtgtttttcagtattcaaataagatcaggaagccaattttctatgtatgaatatgctttaacctaggatttcagtccactctgactgactttctaaactttaacttgggtttttacagtgactatgcattagtgctgactctttggtataagccataaaatattttccttcctatcaatttatctgaactttggtcttttcactaaattgtacagtattctacttctgtttaaaaaggggagatgagaaagggaatactatctaaccaataacttgaacaaaaacactaaactaagcatttaatagaaatgctttttattgaggaggtattatccagagttcatgcttagaacaaatgcatctttgcgtatcctagacttaacaattcatcagtttctgagaccacagaatcaggttttccgtagtagataaagactctctggtgcttcaaattctgttcaagtgttttgactcatcagcttctactctttctattactgcctttgcctggcttgttttgtctctttgcaactgattttgcaaaaaaaaattgtagctttaaaataacagggtctaagtattttaaatgtgcctatttcacagctctcttggtcacaaaaacatgctatttttattggaacttcaaaccaaatccccactgagtgtgtactggttcctgcaggtagcagtctcctattatctcctgtttagcaccaaaagagctaatattattggaaactgaccttttaaaggccactggcagtaggatttaaaaagcagcccactgctcagtttccaggatcagcttcctccttctgtcacttgtgtaagttggcactaccttgtgcctctcagattgctgaagtgctgctggtaagcatgtgcatgctctgcctttcttgtgaaagttttcaatcagcgatatcagcacttacagtaagaagtaaaagtagtgcacagcaaagctaatttgcctttgcctggggtgttcagcttgaaagaataaagctcatttggtttagttaaatgtcttactctactgtgcctatgcttttagctgcgttactaagcaagggaaaaataacagtttctctgagccagagaagacttgatcacagttctccaagcatcgtgatagcaatgcttaaccccaggaagatttcaaggcagggagaagaacatttcaaataagattcttgttaacccatttatgcctagtgttccattattggaatgctaagcttgtgggagtcatttacatcctactgctcaaagtcattgccaaggtctgatttttcacacaaaaaattgcaacccccagcataaatgggttagctactgtcatcagttagcaaattcatccacacaaacacaattagagtttggtttttttttaagcttttcaaaacttactaaactggcacaattttatatgtatgctatttgttgtatttatgcttaagagcaaaaaagttttgatgggattttaaattcagcaaagcctacaacgctgagacaatcccctaacaacatggtagtaactaaagaaacttttatactaggcttcttagttttaaaaggaagtggcatcattgtttcagttctagtttgtatttttctctcagatatttttcttctttaaaaatctttcccagaagttggttcctagaaaactcaataccatcatctcttatctctatacagggactaggtaataaaaccttcaaaggttgtcaaaggtcatcaagcagtgttcatttatcctgtcacatgtttctgtttctatagtaatttagaaattgcaaatagttaacttttcatcatgtaaaaagttaacattatcctatttccatagataccatggacggcggtgtggcctgagttgtcagtctttaatcctgagtcatgtggctctcttttcatctttgatgtcagttccaattatttggcatcaaaaaccttcatggtaggtagagttttaggtaaaagtggatctagggttactttctttattaacatttcctaaataactgaattgagagacatactctgctactatgtcctcaggttaatttttgtctgatcttacgatgccctgccttttactagctactttagaaatagaaaatgtgaagagtgactatttacatgtatactcctttggctgctagaactcatctgtagtcctttattatttacactgaattccaatttcatttctcttccgctaagtaagagcacctcattcctgtgttttctctactattgagctgtagacgaactgtttctctaattataaagcaaactgtttgggatattcagggaaactaccccaatgttatgttgtcatttaatgggaaaggctgggatcatatgtatttctatgttctgtaaagtatttgacttactagttctcaataaaattttattaggactataaaaaaa

SEQ ID NO: 1533 - DNA, 1132 bp, Homo sapiens
agccagaaatgtgaagtgctagctgaaggatgagcagcagctagccaggcaaagggggcaatggcggcttcctgtgttctactgcacactgggcagaagatgcctctgattggtctgggtacctggaagagtgagcctggtcaggtaaaagcagctgttaagtatgcccttagcgtaggctaccgccacattgattgtgctgctatctacggcaatgagcctgagattggggaggccctgaaggaggacgtgggaccaggcaaggcggtgcctcgggaggagctgtttgtgacatccaagctgtggaacaccaagcaccaccccgaggatgtggagcctgccctccggaagactctggctgacctccagctggagtatctggacctgtacctgatgcactggccttatgcctttgagcggggagacaaccccttccccaagaatgctgatgggactatatgctacgactccacccactacaaggagacttggaaggctctggaggcactggtggctaaggggctggtgcaggcgctgggcctgtccaacttcaacagtcggcagattgatgacatactcagtgtggcctccgtgcgtccagctgtcttgcaggtggaatgccacccatacttggctcaaaatgagctaattgcccactgccaagcacgtggcttggaggtaactgcttatagccctttgggctcctctgatcgtgcatggcgtgatcctgatgagcctgtcctgctggaggaaccagtagtcctggcattggctgaaaagtatggccgatctccagctcagatcttgctcaggtggcaggtccagcggaaagtgatctgcatccccaaaagtatcactccttctcgaatccttcagaacatcaaggtgtttgacttcacctttagcccagaagagatgaagcagctaaatgccctgaacaaaaattggagatatattgtgcctatgcttacggtggatgggaagagagtcccaagggatgcagggcatcctctgtacccctttaatgacccgtactgagaccacagcttcttggcctcccttccagctctgcagctaatgaggtcctgccacaacggaaagagggagttaataaagccattggagcatccat

SEQ ID NO: 1534 - DNA, 2387 bp, Homo sapiens
ggggtttcatctctatggctgtcagaggtgggcggctttgaccgagaggctgctggagctcgtgtttggacgcgatgtttcgtctgaactcactttctgctttggcagaactggctgtgggttctcgatggtaccatggaggatcacagcccatccagatccggcgaagactaatgatggtggctttcctgggagcatctgcagtaactgcaagtactggtcttttgtggaagggggcccatgcagaatctccaccatgtgtagacaacctaaaaagtgacatcggtgataaagggaagaataaagatgaaggggatgtttgtaaccatgagaaaaagactgcagatcttgcccctcacccagaagagaaaaagaagaaacgttctggattcagagacagaaaagtgatggaatatgagaataggattcgagcctactccacgccagacaaaatcttccgatattttgccaccttgaaagtcatcagtgagcctggtgaagcagaagtgtttatgacaccagaagattttgtgcgatccataacacccaatgaaaaacaaccagaacacttgggtctggatcaatatataataaaacgctttgatggaaagacagagaaaatttcccaggaacgagaaaaatttgctgatgaaggcagtatattttacacccttggagaatgtgggctcatatccttttcagattacattttcctcacaactgttctttccactcctcagagaaattttgaaattgccttcaagatgtttgatttgaatggagatggagaagtagatatggaagaatttgaacaggttcagagcatcattcgctcccaaaccagtatgggtatgcgccacagagatcgtccaactactggcaacaccctcaagtctggcttgtgttcagccctcacaacctacttttttggagctgatctgaagggaaagctgacaatcaaaaacttcctcgaatttcagcgtaaactgcagcatgatgttctgaagcttgagtttgaacgccatgaccctgtggatgggagaattactgagaggcagtttggtggcatgctacttgcctacagtggggtgcagtccaagaagctgaccgccatgcagaggcagctcaagaagcacttcaaagaaggaaagggtctgacatttcaggaggtggagaacttctttactttcctaaagaacattaatgatgtggacactgcattgagtttttaccatatggctggagcatctcttgataaagtgaccatgcagcaggtggccaggacagtggctaaagtggagctctcagaccacgtgtgtgatgtggtgtttgcactctttgactgtgatggcaatggcgaactgagcaataaggaatttgtttccatcatgaagcaacggctgatgagaggcctggaaaagcccaaagacatgggtttcactcgcctcatgcaggccatgtggaaatgtgcacaggaaactgcctgggacttcgctttacccaaacagtaaccccacactgcaagaggggacccctccacccccagtaccctggaccccctccgcagagtctcggcagagccctttgtgctgctgcttctggaagtagtctcccttcctcccgggatgacctcaggactctgtcggtttcccctctttacccttccccgtccccgtgttctgctgggctctgattctgcccaatgagtatccccataggttctcaaaaacatgaacaagtctgtaaagctcagacatttgtcagcctcaacagcaccacccattcaagcatcctgtggataaagaattcagggaaccatccacacacctgccaaccctgggaagcatccagttctcaaatcgtttttgctatggatttatactaacaagaacattccttgacttccctcctgctggtgttttaaagccacaagtagggaagatatctggcaggcagaaagaagtctgtgatgataaacaatgatgaggatgacctaggcaccctacgctagtgtgagaagcctgcgccccaggaaggatctgtgttagtccctgggatggctccaaggcctgctctaggaaggcagcatgctcagtgggaacacagcaagattcagaatttaaagtagttgcttcatggctctgtgcactcccttttcttcctcgcagcctccctaagatgactccagtgtgaccctgtgcttagtgagcaatagtgattgagctcatgttccctgcaagtgccatttcctctccaggatgggcctctaaagctgaggcctggctcagagcctgtttgccctctgtcttaaacaattgtaaatatcacttaaattataaccatttgcaataaacatccccaaagttaaaaaaaaaaaaaaaaaaaaa

SEQ ID NO: 1535 - DNA, 1596 bp, Homo sapiens
tgtcggggacggtaaccgggacccgtgctctgctcctgtcgccttcgcctcctgaatccctagccatatgcgtgagtgcatctccatccacgttggccaggctggtgtccagattggcaatgcctgctgggagctctactgcctggaacacggcatccagcccgatggccagatgccaagtgacaagaccattgggggaggagatgactccttcaacaccttcttcagtgagacgggcgctggcaagcacgtgccccgggctgtgtttgtagacttggaacccacagtcattgatgaagttcgcactggcacctaccgccagctcttccaccctgagcagctcatcacaggcaaggaagatgctgccaataactatgcccgagggcactacaccattggcaaggagatcattgaccttgtgttggaccgaattcgcaagctggctgaccagtgcacccgtcttcagggcttcttggttttccacagctttggtgggggaactggttctgggttcacctccctgctcatggaacgcctgtcagttgattatggcaagaaatccaagctggagttctccatttacccggcaccccaggtttccacagctgtagttgagccctacaactccatcctcaccacccacaccaccctggagcactctgattgtgccttcatggtagacaatgaggccatctatgacatctgtcgtagaaacctcgatatcgagcgcccaacctacactaaccttaaccgccttattagccagattgtgtcctccatcactgcttccctgagatttgatggagccctgaatgttgacctgacagaattccagaccaacctggtcccctacccccgcatccacttccctctggccacatatgcccctgtcatctctgctgagaaagcctaccatgaacagctttctgtagcagacatcaccaatgcttgctttgagccagccaaccagatggtgaaatgtgaccctggccatggtaaatacatggcttgctgcctgttgtaccgtggtgacgtggttcccaaagatgtcaatgctgccattgccaccatcaaaaccaagcgcacgatccagtttgtggattggtgccccactggcttcaaggttggcatcaactaccagcctcccactgtggtgcctggtggagacctggccaaggtacagagagctgtgtgcatgctgagcaacaccacagccattgctgaggcctgggctcgcctggaccacaagtttgacctgatgtatgccaagcgtgcctttgttcactggtacgtgggtgaggggatggaggaaggcgagttttcagaggcccgtgaagatatggctgcccttgagaaggattatgaggaggttggtgtggattctgttgaaggagagggtgaggaagaaggagaggaatactaattatccattccttttggccctgcagcatgtcatgctcccagaatttcagcttcagcttaactgacagatgttaaagctttctggttagattgttttcacttggtgatcatgtcttttccatgtgtacctgtaatatttttccatcatatctcaaagtaaagtcattaacatca

SEQ ID NO: 1536 - DNA, 1785 bp, Homo sapiens
cacgcaaagcagtgtgggttgattctgaggtgcactgtgggaaagagcttgtcgctgcggtgttgctgttggagactcgattgttggtgacagcgaaagaacgataacaaaatgccggagcgagatagtgagccgttctccaaccctttggcccccgatggccacgatgtggatgatcctcactccttccaccaatcaaaactcaccaatgaagacttcaggaaacttctcatgacccccagggctgcacctacctctgcaccaccttctaagtcacgtcaccatgagatgccaagggagtacaatgaggatgaagacccagctgcacgaaggaggaaaaagaaaagttattatgccaagctacgccaacaagaaattgagagagagagagagctagcagagaagtaccgggatcgtgccaaggaacggagagatggagtgaacaaagattatgaagaaaccgagcttatcagcaccacagctaactatagggctgttggccccactgctgaggcggacaaatcagctgcagagaagagaagacagttgatccaggagtccaaattcttgggtggtgacatggaacacacccatttggtgaaaggcttggattttgctctgcttcaaaaggtacgacttgagattgccagcaaagataaggaggaagaggaactgatggaaaagccccagaaagaaaccaagaaagatgaggatcctgaaaataaaattgaatttaaaacacgtctgggccgcaatgtttaccgaatgctttttaagagcaaagcatatgagcggaatgagttgttcctgccgggccgcatggcctatgtggtagacctggatgatgagtatgctgacacagatatccccaccactcttatccgcagcaaggctgattgccccaccatggaggcccagactacactgaccacaaatgacattgtcattagcaagctgacccagatcctttcatacctgaggcagggaacccgtaacaagaagcttaagaagaaggataaagggaagctggaagagaagaaacctcctgaggctgacatgaatatttttgaagacattggggattacgtaccctccacaaccaagacacctcgggacaaggagcgggagagatatcgggaacgggagcgtgatcgggaaagagacagagaccgtgaccgagagcgagagcgagaacgagatcgggaacgagagcgagagcgggaccgagagagagaagaggaaaagaagagacacagttactttgagaagccaaaagtagatgatgagcccatggacgttgacaaaggacctgggtctaccaaggagttgatcaagtccatcaatgaaaagtttgctgggtctgctggctgggaaggcacagaatcgctgaagaagccagaagacaaaaagcagctgggagatttctttggcatgtccaacagttatgcagagtgctacccagccacgatggatgacatggctgtggatagtgatgaggaggtggattatagcaaaatggaccagggtaacaagaaggggcccttaggccgttgggactttgatacccaggaagaatacagcgagtatatgaacaacaaagaagctttgcccaaggctgcattccagtatggtatcaaaatgtctgaagggcggaaaaccaggcgcttcaaggaaaccaatgacaaagcagagcttgatcgccagtggaagaagattagtgcaatcattgagaagaggaagaagatggaagctgatggggttgaagtcaaaagaccaaaatactaa

SEQ ID NO: 1537 - DNA, 1584 bp, Homo sapiens
gatcagagggcgatcagctggacagcaactcaggatggcatcaggcagggcacgctgcacccgaaaactccggaactgggtggtggagcaagtggagagtgggcagtttcccggagtgtgctgggatgatacagctaagaccatgttccggattccctggaaacatgcaggcaagcaggacttccgggaggaccaggatgctgccttcttcaaggcctgggcaatatttaagggaaagtataaggagggggacacaggaggtccagctgtctggaagactcgcctgcgctgtgcactcaacaagagttctgaatttaaggaggttcctgagaggggccgcatggatgttgctgagccctacaaggtgtatcagttgctgccaccaggaatcgtctctggccagccagggactcagaaagtaccatcaaagcgacagcacagttctgtgtcctctgagaggaaggaggaagaggatgccatgcagaactgcacactcagtccctctgtgctccaggactccctcaataatgaggaggagggggccagtgggggagcagtccattcagacattgggagcagcagcagcagcagcagccctgagccacaggaagttacagacacaactgaggccccctttcaaggggatcagaggtccctggagtttctgcttcctccagagccagactactcactgctgctcaccttcatctacaacgggcgcgtggtgggcgaggcccaggtgcaaagcctggattgccgccttgtggctgagccctcaggctctgagagcagcatggagcaggtgctgttccccaagcctggcccactggagcccacgcagcgcctgctgagccagcttgagaggggcatcctagtggccagcaacccccgaggcctcttcgtgcagcgcctttgccccatccccatctcctggaatgcaccccaggctccacctgggccaggcccgcatctgctgcccagcaacgagtgcgtggagctcttcagaaccgcctacttctgcagagacttggtcaggtactttcagggcctgggccccccaccgaagttccaggtaacactgaatttctgggaagagagccatggctccagccatactccacagaatcttatcacagtgaagatggagcaggcctttgcccgatacttgctggagcagactccagagcagcaggcagccattctgtccctggtgtagagcctgggggacccatcttccacctcacctctttgttcttcctgtctcctttgaagtagactcattcttcacacgattgacctgtcctctttgtgataattctcagtagttgtccgtgataatcgtgtcctgaaaatcctcgcacacactggctggtggagaactcaaggctaattttttatcctttttttttttttatttttgagatatacgccctctttcatctgtaagggactaggaaattccaaatggtgtgaacccagggggcctttccctcttccctgacctcccaactctaaagccaagcactttatatttttctcttagatattcactaaggacttaaaataaaatttttttgaaagagg

SEQ ID NO: 1538 - DNA, 1648 bp, Homo sapiens
atgcgggagatcgtgcacatccaggccggccagtgcggcaaccagatcggggccaagttctgggaagtcatcagtgatgagcatggcatcgaccccagcggcaactacgtgggcgactcggacttgcagctggagcggatcagcgtctactacaacgaggcctcttctcacaagtacgtgcctcgagccattctggtggacctggaacccggaaccatggacagtgtccgctcaggggcctttggacatctcttcaggcctgacaatttcatctttggtcagagtggggccggcaacaactgggccaagggtcactacacggagggggcggagctggtggattcggtcctggatgtggtgcggaaggagtgtgaaaactgcgactgcctgcagggcttccagctgacccactcgctggggggggggacgggctccggcatgggcacgttgctcatcagcaaggtgcgtgaggagtatcccgaccgcatcatgaacaccttcagcgtcgtgccctcacccaaggtgtcagacacggtggtggaaccctacaacgccacgctgtccatccaccagctggtggaaaacacggatgaaacctactgcatcgacaacgaggcgctctacgacatctgcttccgcaccctcaagctggccacgcccacctacggggacctcaaccacctggtatcggccaccatgagcggagtcaccacctccttgcgcttcccgggccagctcaacgctgacctgcgcaagctggccgtcaacatggtgcccttcccgcgcctgcacttcttcatgcccggcttcgcccccctcaccaggcggggcagccagcagtaccgggccctgaccgtgcccgagctcacccagcagatgttcgatgccaagaacatgatggccgcctgcgacccgcgccacggccgctacctgacggtggccaccgtgttccggggccgcatgtccatgaaggaggtggacgagcagatgctggccatccagagcaagaacagcagctacttcgtggagtggatccccaacaacgtgaaggtggccgtgtgtgacatcccgccccgcggcctcaagatgtcctccaccttcatcgggaacagcacggccatccaggagctgttcaagcgcatctccgagcagttcacggccatgttccggcgcaaggccttcctgcactggtacacgggcgagggcatggacgagatggagttcaccgaggccgagagcaacatgaacgacctggtgtccgagtaccagcagtaccaggacgccacggccgaggaagagggcgagatgtacgaagacgacgaggaggagtcggaggcccagggccccaagtgaaactgctcgcagctggagtgagaggcaggtggcggccggggccgaagccagcagtgtctaaacccccggagccatcttgctgccgacaccctgctttccccatcgccctagggctcccttgccgccctcctgcagtatttatggcctcgtcctcccccacctaggccacgtgtgagctgctcctgtctctgtcttattgcagctccaggcctgacgttttacggttttgttttttactggtttgtgtttatattttcggggatacttaataaatctattgctgtcagataccctt

SEQ ID NO: 1539 - DNA, 1335 bp, Homo sapiens
atgcgggagatcgtgcacctgcaggccggccagtgcggcaaccagatcggggccaagttttgggaggttatcagtgacgaacatggcatcgaccccacaggcacataccatggggacagtgacctgcaactggagaggatcaacgtgtactacaacgaggccacaggaggaaattatgtccccagagcggtgctggtggacctggaacccggcaccatggactctgtccgttctggccccttcggtcagatctttcggccggacaacttcgtgtttggccaatccggagccggcaacaactgggcaaaggggcactacacggagggcgcagagctggtggacgctgtcctggacgtagtccggaaggaggccgagagctgcgactgccttcagggcttccagctgacccactcgctggggggtgggacggggtccggaatgggcacgctgctcatcagtaagatgcgcgaggagttcccagaccgcatcatgaacaccttcagcgtggtgccctcgcccaaagtgtcagacacggtggtggagccctacaatgccacgctgtctgtgcaccagctggtggagaatacggatgagacctactgcatcgacaacgaggcactctacgacatctgtttccgcaccctcaagctgaccacccccacctacggggacctcaaccacctggtgtcggccaccatgagcggggtcaccacctgcctgcgcttcccgggccagctgaacgccgacctgcgcaagctggccgtcaacatggtcccctttcctcgcctgcacttcttcatgcccgcgttcgcacccctgaccagccggggcagccagcagtaccggggcctgacggtgcccgagctcacccagcagatgttcgatgccaagaacatgatggcggcgtgcgacccgcgccacggccgctacctgaccgtggccgccgtgttccggggccgcatgtccatgaaggaggtggacgagcagatgctgagcgtgcagagcaagaacagcagctacttcgtggagtggatccccaacaacgtgaagacggccgtgtgcgacatcccgccccgcggcctgaagatggccgtgaccttcatcggcaacagcacggccatccaggagctgttcaagcgcatctccgagcagttcacggccatgttccggcgcaaggccttcttgcactggtacacgggcgagggcatggacgagatggagttcaccgaggccgagagcaacatgaatgacctggtatctgagtaccagcagtaccaggacgccacggccgagcagggcgagttcgaggaggaggcggaggaggaggtggcctag

SEQ ID NO: 1540 - DNA, 4390 bp, Homo sapiens
ctctagctctcagcggctgcgaagtctgtaaacctggtggccaagtgattgtaagtcaggagactttccttcggtttctgcctttgatggcaatttccttcggtttctgcctttgatggcaagaggtggagattgtggcggcgattacagagaacgtctgggaagacaagttgctgtttttatgggaatcgcaggcttggaagagacagaagcaattccagaaataaattggaaattgaagatttaaacaatgttgttttaaaatattctaacttcaaagaatgatgccagaaacttaaaaaggggctgcgcagagtagcaggggccctggagggcgcggcctgaatcctgattgcccttctgctgagaggacacacgcagctgaagatgaatttgggaaaagtagccgcttgctactttaactatggaagagcagggccacagtgagatggaaataatcccatcagagtctcacccccacattcaattactgaaaagcaatcgggaacttctggtcactcacatccgcaatactcagtgtctggtggacaacttgctgaagaatgactacttctcggccgaagatgcggagattgtgtgtgcctgccccacccagcctgacaaggtccgcaaaattctggacctggtacagagcaagggcgaggaggtgtccgagttcttcctctacttgctccagcaactcgcagatgcctacgtggacctcaggccttggctgctggagatcggcttctccccttccctgctcactcagagcaaagtcgtggtcaacactgacccagtgagcaggtatacccagcagctgcgacaccatctgggccgtgactccaagttcgtgctgtgctatgcccagaaggaggagctgctgctggaggagatctacatggacaccatcatggagctggttggcttcagcaatgagagcctgggcagcctgaacagcctggcctgcctcctggaccacaccaccggcatcctcaatgagcagggtgagaccatcttcatcctgggtgatgctggggtgggcaagtccatgctgctacagcggctgcagagcctctgggccacgggccggctagacgcaggggtcaaattcttcttccactttcgctgccgcatgttcagctgcttcaaggaaagtgacaggctgtgtctgcaggacctgctcttcaagcactactgctacccagagcgggaccccgaggaggtgtttgccttcctgctgcgcttcccccacgtggccctcttcaccttcgatggcctggacgagctgcactcggacttggacctgagccgcgtgcctgacagctcctgcccctgggagcctgcccaccccctggtcttgctggccaacctgctcagtgggaagctgctcaagggggctagcaagctgctcacagcccgcacaggcatcgaggtcccgcgccagttcctgcggaagaaggtgcttctccggggcttctcccccagccacctgcgcgcctatgccaggaggatgttccccgagcgggccctgcaggaccgcctgctgagccagctggaggccaaccccaacctctgcagcctgtgctctgtgcccctcttctgctggatcatcttccggtgcttccagcacttccgtgctgcctttgaaggctcaccacagctgcccgactgcacgatgaccctgacagatgtcttcctcctggtcactgaggtccatctgaacaggatgcagcccagcagcctggtgcagcggaacacacgcagcccagtggagaccctccacgccggccgggacactctgtgctcgctggggcaggtggcccaccggggcatggagaagagcctctttgtcttcacccaggaggaggtgcaggcctccgggctgcaggagagagacatgcagctgggcttcctgcgggctttgccggagctgggccccgggggtgaccagcagtcctatgagtttttccacctcaccctccaggccttctttacagccttcttcctcgtgctggacgacagggtgggcactcaggagctgctcaggttcttccaggagtggatgccccctgcgggggcagcgaccacgtcctgctatcctcccttcctcccgttccagtgcctgcagggcagtggtccggcgcgggaagacctcttcaagaacaaggatcacttccagttcaccaacctcttcctgtgcgggctgttgtccaaagccaaacagaaactcctgcggcatctggtgcccgcggcagccctgaggagaaagcgcaaggccctgtgggcacacctgttttccagcctgcggggctacctgaagagcctgccccgcgttcaggtcgaaagcttcaaccaggtgcaggccatgcccacgttcatctggatgctgcgctgcatctacgagacacagagccagaaggtggggcagctggcggccaggggcatctgcgccaactacctcaagctgacctactgcaacgcctgctcggccgactgcagcgccctctccttcgtcctgcatcacttccccaagcggctggccctagacctagacaacaacaatctcaacgactacggcgtgcgggagctgcagccctgcttcagccgcctcactgttctcagactcagcgtaaaccagatcactgacggtggggtaaaggtgctaagcgaagagctgaccaaatacaaaattgtgacctatttgggtttatacaacaaccagatcaccgatgtcggagccaggtacgtcaccaaaatcctggatgaatgcaaaggcctcacgcatcttaaactgggaaaaaacaaaataacaagtgaaggagggaagtatctcgccctggctgtgaagaacagcaaatcaatctctgaggttgggatgtggggcaatcaagttggggatgaaggagcaaaagccttcgcagaggctctgcggaaccaccccagcttgaccaccctgagtcttgcgtccaacggcatctccacagaaggaggaaagagccttgcgagggccctgcagcagaacacgtctctagaaatactgtggctgacccaaaatgaactcaacgatgaagtggcagagagtttggcagaaatgttgaaagtcaaccagacgttaaagcatttatggcttatccagaatcagatcacagctaaggggactgcccagctggcagatgcgttacagagcaacactggcataacagagatttgcctaaatggaaacctgataaaaccagaggaggccaaagtctatgaagatgagaagcggattatctgtttctgagaggatgctttcctgttcatggggtttttgccctggagcctcagcagcaaatgccactctgggcagtcttttgtgtcagtgtcttaaaggggcctgcgcaggcgggactatcaggagtccactgcctccatgatgcaagccagcttcctgtgcagaaggtctggtcggcaaactccctaagtacccgctacaattctgcagaaaaagaatgtgtcttgcgagctgttgtagttacagtaaatacactgtgaagagactttattgcctattataattatttttatctgaagctagaggaataaagctgtgagcaaacagaggaggccagcctcacctcattccaacacctgccatagggaccaacgggagcgagttggtcaccgctcttttcattgaagagttgaggatgtggcacaaagttggtgccaagcttcttgaataaaacgtgtttgatggattagtattatacctgaaatattttcttccttctcagcactttcccatgtattgatactggtcccacttcacagctggagacaccggagtatgtgcagtgtgggatttgactcctccaaggttttgtggaaagttaatgtcaaggaaaggatgcaccacgggcttttaattttaatcctggagtctcactgtctgctggcaaagatagagaatgccctcagctcttagctggtctaagaatgacgatgccttcaaaatgctgcttccactcagggcttctcctctgctaggctaccctcctctagaaggctgagtaccatgggctacagtgtctggccttgggaagaagtgattctgtccctccaaagaaatagggcatggcttgcccctgtggccctggcatccaaatggctgcttttgtctcccttacctcgtgaagaggggaagtctcttcctgcctcccaagcagctgaagggtgactaaacgggcgccaagactcaggggatcggctgggaactgggccagcagagcatgttggacaccccccaccatggtgggcttgtggtggctgctccatgagggtgggggtgatactactagatcacttgtcctcttgcccgctcatttgttaataaaatactgaaaac

SEQ ID NO: 1541 - DNA, 3020 bp, Homo sapiens
tgaagctcgtcagttcaccatccgccctcggcttccgcggggcgctgggccgccagcctcggcaccgtcctttcctttctccctcgcgttaggcaggtgacagcagggacatgtctcgggagatgcaggatgtagacctcgctgaggtgaagcctttggtggagaaaggggagaccatcaccggcctcctgcaagagtttgatgtccaggagcaggacatcgagactttacatggctctgttcacgtcacgctgtgtgggactcccaagggaaaccggcctgtcatcctcacctaccatgacatcggcatgaaccacaaaacctgctacaaccccctcttcaactacgaggacatgcaggagatcacccagcactttgccgtctgccacgtggacgcccctggccagcaggacggcgcagcctccttccccgcagggtacatgtacccctccatggatcagctggctgaaatgcttcctggagtccttcaacagtttgggctgaaaagcattattggcatgggaacaggagcaggcgcctacaccctaactcgatttgctctaaacaaccctgagatggtggagggccttgtccttatcaacgtgaacccttgtgcggaaggctggatggactgggccgcctccaagatctcaggatggacccaagctctgccggacatggtggtgtcccacctttttgggaaggaagaaatgcagagtaacgtggaagtggtccacacctaccgccagcacattgtgaatgacatgaaccccggcaacctgcacctgttcatcaatgcctacaacagccggcgcgacctggagattgagcgaccaatgccgggaacccacacagtcaccctgcagtgccctgctctgttggtggttggggacagctcgcctgcagtggatgccgtggtggagtgcaactcaaaattggacccaacaaagaccactctcctcaagatggcggactgtggcggcctcccgcagatctcccagccggccaagctcgctgaggccttcaagtacttcgtgcagggcatgggatacatgccctcggctagcatgacccgcctgatgcggtcccgcacagcctctggttccagcgtcacttctctggatggcacccgcagccgctcccacaccagcgagggcacccgaagccgctcccacaccagcgagggcacccgcagccgctcgcacaccagcgagggggcccacctggacatcacccccaactcgggtgctgctgggaacagcgccgggcccaagtccatggaggtctcctgctaggcggcctgcccagctgccgcccccggactctgatctctgtagtggccccctcctccccggccccttttcgccccctgcctgccatactgcgcctaactcggtattaatccaaagcttattttgtaagagtgagctctggtggagacaaatgaggtctattacgtgggtgccctctccaaaggcggggtggcggtggaccaaaggaaggaagcaagcatctccgcatcgcatcctcttccattaaccagtggccggttgccactctcctcccctccctcagagacaccaaactgccaaaaacaagacgcgtagcagcacacacttcacaaagccaagcctaggccgccctgagcatcctggttcaaacgggtgcctggtcagaaggccagccgcccacttcccgtttcctctttaactgaggagaagctgatccagctttccggaaacaaaatccttttcttcatttggggaggggggtaatagtgacatgcaggcacctcttttaaacaggcaaaacaggaagggggaaaaggtgggattcatgtcgaggctagaggcatttggaacaacaaatctacgtagttaacttgaagaaaccgatttttaaagttggtgcatctagaaagctttgaatgcagaagcaaacaagcttgatttttctagcatcctcttaatgtgcagcaaaagcaggcaacaaaatctcctggctttacagacaaaaatatttcagcaaacgttgggcatcatggtttttgaaggctttagttctgctttctgcctctcctccacagccccaacctcccacccctgatacatgagccagtgattattcttgttcagggagaagatcatttagatttgttttgcattccttagaatggagggcaacattccacagctgccctggctgtgatgagtgtccttgcaggggccggagtaggagcactggggtgggggcggaattggggttactcgatgtaagggattccttgttgttgtgttgagatccagtgcagttgtgatttctgtggatcccagcttggtccaggaattttgagagattggcttaaatccagttttcaatcttcgacagctgggctggaacgtgaactcagtagctgaacctgtctgacccggtcacgttcttggatcctcagaactctttgctcttgtcggggtgggggtgggaactcacgtggggagcggtggctgagaaaatgtaaggattctggaatacatattccatggactttccttccctctcctgcttcctcttttcctgctccctaacctttcgccgaatggggcagacaaacactgacgtttctgggtggccagtgcggctgccaggttcctgtactactgccttgtacttttcattttggctcaccgtggattttctcataggaagtttggtcagagtgaattgaatattgtaagtcagccactgggacccgaggatttctgggaccccgcagttgggaggaggaagtagtccagccttccaggtgggcgtgagaggcaatgactcgttacctgccgcccatcaccttggaggccttccctggccttgagtagaaaagtcggggatcggggcaagagaggctgagtacggatgggaaactattgtgcacaagtctttccagaggagtttcttaatgagatatttgtatttatttccagaccaataaatttgtaactttgcaaaaaaaaaaaaaaaaaaaa

SEQ ID NO: 1542 - DNA, 1075 bp, Homo sapiens
ctgcaaggcggcggcaggagaggttgtggtgctagtttctctaagccatccagtgccatcctcgtcgctgcagcgacaccgctctcgccgccgccatgactgagcagatgacccttcgtggcaccctcaagggccacaacggctgggtaacccagatcgctactaccccgcagttcccggacatgatcctctccgcctctcgagataagaccatcatcatgtggaaactgaccagggatgagaccaactatggaattccacagcgtgctctgcggggtcactcccactttgttagtgatgtggttatctcctcagatggccagtttgccctctcaggctcctgggatggaaccctgcgcctctgggatctcacaacgggcaccaccacgaggcgatttgtgggccataccaaggatgtgctgagtgtggccttctcctctgacaaccggcagattgtctctggatctcgagataaaaccatcaagctatggaataccctgggtgtgtgcaaatacactgtccaggatgagagccactcagagtgggtgtcttgtgtccgcttctcgcccaacagcagcaaccctatcatcgtctcctgtggctgggacaagctggtcaaggtatggaacctggctaactgcaagctgaagaccaaccacattggccacacaggctatctgaacacggtgactgtctctccagatggatccctctgtgcttctggaggcaaggatggccaggccatgttatgggatctcaacgaaggcaaacacctttacacgctagatggtggggacatcatcaacgccctgtgcttcagccctaaccgctactggctgtgtgctgccacaggccccagcatcaagatctgggatttagagggaaagatcattgtagatgaactgaagcaagaagttatcagtaccagcagcaaggcagaaccaccccagtgcacttccctggcctggtctgctgatggccagactctgtttgctggctacacggacaacctggtgcgagtgtggcaggtgaccattggcacacgctagaagtttatggcagagctttacaaata

SEQ ID NO: 1543 - DNA, 2808 bp, Homo sapiens
ggcggagctgggcgaattaaagcacatggtgatgagtttccgggtgtctgagctccaggtgcttcttggctttgctggccggaacaagagtggacggaagcacgagctcctggccaaggctctgcacctcctgaagtccagctgtgcccctagtgtccagatgaagatcaaagagctttaccgacgacgctttccccggaagaccctggggccctctgatctctcccttctctctttgccccctggcacctctcctgtaggctcccctggtcctctagctcccattcccccaacgctgttggcccctggcaccctgctgggccccaagcgtgaggtggacatgcacccccctctgccccagcctgtgcaccctgatgtcaccatgaaaccattgcccttctatgaagtctatggggagctcatccggcccaccacccttgcatccacttctagccagcggtttgaggaagcgcactttacctttgccctcacaccccagcaagtgcagcagattcttacatccagagaggttctgccaggagccaaatgtgattataccatacaggtgcagctaaggttctgtctctgtgagaccagctgcccccaggaagattattttccccccaacctctttgtcaaggtcaatgggaaactgtgccccctgccgggttaccttcccccaaccaagaatggggccgagcccaagaggcccagccgccccatcaacatcacacccctggctcgactctcagccactgttcccaacaccattgtggtcaattggtcatctgagttcggacggaattactccttgtctgtgtacctggtgaggcagttgactgcaggaacccttctacaaaaactcagagcaaagggtatccggaacccagaccactcgcgggcactgatcaaggagaaattgactgctgaccctgacagtgaggtggccactacaagtctccgggtgtcactcatgtgcccgctagggaagatgcgcctgactgtcccttgtcgtgccctcacctgcgcccacctgcagagcttcgatgctgccctttatctacagatgaatgagaagaagcctacatggacatgtcctgtgtgtgacaagaaggctccctatgaatctcttatcattgatggtttatttatggagattcttagttcctgttcagattgtgatgagatccaattcatggaagatggatcctggtgcccaatgaaacccaagaaggaggcatctgaggtttgccccccgccagggtatgggctggatggcctccagtacagcccagtccaggggggagatccatcagagaataagaagaaggtcgaagttattgacttgacaatagaaagctcatcagatgaggaggatctgccccctaccaagaagcactgttctgtcacctcagctgccatcccggccctacctggaagcaaaggagtcctgacatctggccaccagccatcctcggtgctaaggagccctgctatgggcacgttgggtggggatttcctgtccagtctcccactacatgagtacccacctgccttcccactgggagccgacatccaaggtttagatttattttcatttcttcagacagagagtcagcactatggcccctctgtcatcacctcactagatgaacaggatgcccttggccacttcttccagtaccgagggaccccttctcactttctgggcccactggcccccacgctggggagctcccactgcagcgccactccggcgccccctcctggccgtgtcagcagcattgtggcccctgggggggccttgagggaggggcatggaggacccctgccctcaggtccctctttgactggctgtcggtcagacatcatttccctggactgagttccctggattatggaaacttcgctgtcccccaacactgagcaagtatgctgtggagtcccaaccccagctactctgatccctctgggggctctggccaagggccagacagaccttcacagatgcctacttttggcctcatctctgcctgacaaggccagcacccaaagggttaatatttaacctctttttaaggacactggggtctgtttctggaaatgttctttagatggtggcacattcctttgggtatgttaacctaggcagtgggaggcaaatgggatggtatgtgagctaggagaagggctgaaccctcagccttgactatgtctagagcctcttggggaaggggcacctctcttgaaccccaaatgctctctcttcttattacccaaacccatggctctatttcttcttcacatccattgtctcttcatgtctattccattcccttcggccaaacagacaggtggaaaaactgagacaggcagtttcagagatggacagagaactttattttggattgtggatgtggacttttttgtacataaataagaaaaaccaaaatactccaaagatgacttcccctgcctcctactccagtatgacagaggaggatgtaaggccttagccatgatctgcaggggtctgggagtcaggcccggcctattgcttgggtctctctctatttatatatctaagttcacagtgtttcttattccccctaagcttctagaggctcatggccctgtagttaggcctggctcattctgcacctttccagggaggtggaaggaccctgtgccctccttcccaatcttctttttcaggctcgccaaggcctaggacctatgttgtaattttactttttatttctaaagttgtagtgaagctctcacccataataaaggttgtgaatgttc

SEQ ID NO: 1544 - DNA, 1794 bp, Homo sapiens
  misc_feature (1782)..(1782): n is a, c, g, or t
  misc_feature (1788)..(1788): n is a, c, g, or t
caagaaaaccaactggaaaaaaaaatgaaattccttatcttcgcatttttcggtggtgttcaccttttatccctgtgctctgggaaagctatatgcaagaatggcatctctaagaggacttttgaagaaataaaagaagaaatagccagctgtggagatgttgctaaagcaatcatcaacctagctgtttatggtaaagcccagaacagatcctatgagcgattggcacttctggttgatactgttggacccagactgagtggctccaagaacctagaaaaagccatccaaattatgtaccaaaacctgcagcaagatgggctggagaaagttcacctggagccagtgagaataccccactgggagaggggagaagaatcagctgtgatgctggagccaagaattcataagatagccatcctgggtcttggcagcagcattgggactcctccagaaggcattacagcagaagttctggtggtgacctctttcgatgaactgcagagaagggcctcagaagcaagagggaagattgttgtttataaccaaccttacatcaactactcaaggacggtgcaataccgaacgcagggggcggtggaagctgccaaggtgggggctttggcatctctcattcgatccgtggcctccttctccatctacagtcctcacacaggtattcaggaataccaggatggcgtgcccaagattccaacagcctgtattacggtggaagatgcagaaatgatgtcaagaatggcttctcatgggatcaaaattgtcattcagctaaagatgggggcaaagacctacccagatactgattccttcaacactgtagcagagatcactgggagcaaatatccagaacaggttgtactggtcagtggacatctggacagctgggatgttgggcagggtgccatggatgatggcggtggagcctttatatcatgggaagcactctcacttattaaagatcttgggctgcgtccaaagaggactctgcggctggtgctctggactgcagaagaacaaggtggagttggtgccttccagtattatcagttacacaaggtaaatatttccaactacagtctggtgatggagtctgacgcaggaaccttcttacccactgggctgcaattcactggcagtgaaaaggccagggccatcatggaggaggttatgagcctgctgcagcccctcaatatcactcaggtcctgagccatggagaagggacagacatcaacttttggatccaagctggagtgcctggagccagtctacttgatgacttatacaagtatttcttcttccatcactcccacggagacaccatgactgtcatggatcccagcagatggatgttgctgctgctgtttgggctgttgtttcttatgttgttgcagacatggaagaaatgctgcctaggtcctagaaacagtaagaaagaaacgttttcatgcttctggccagggatcctgggtctgcaactttggaaaactcctcttcacataacaatttcatccaattcatcttcaaagcacaactctatttcatgctttctgttattatctttcttgatactttccaaattctctgattctagaaaaaggaatcattctcccctccctcccaccacatagaatcaacatatggtagggattacagtgggggcatttctttatatcacctcttaaaaacattgtttccactttaaaagtaaacacttaataaatttttggaagatctctgaaaaaaaaaaaaaaaaaaaaaanaaattncctgcg

SEQ ID NO: 1545 - DNA, 584 bp, Homo sapiens
cacctgcaccccgcccgggcatagcaccatgcctgcttgtcgcctaggcccgctagccgccgccctcctcctcagcctgctgctgttcggcttcaccctagtctcaggcacaggagcagagaagactggcgtgtgccccgagctccaggctgaccagaactgcacgcaagagtgcgtctcggacagcgaatgcgccgacaacctcaagtgctgcagcgcgggctgtgccaccttctgccttctctgcccaaatgataaggagggttcctgcccccaggtgaacattaactttccccagctcggcctctgtcgggaccagtgccaggtggacagccagtgtcctggccagatgaaatgctgccgcaatggctgtgggaaggtgtcctgtgtcactcccaatttctgaggtccagccaccaccaggctgagcagtgaggagagaaagtttctgcctggccctgcatctggttccagcccacctgccctcccctttttcgggactctgtattccctcttgggctgaccacagcttctccctttcccaaccaataaagtaaccactttcagcaaaaaaaaaaaaaaaa

SEQ ID NO: 1546 - DNA, 2169 bp, Homo sapiens
ggcacgaggaaaagaggggatctgatgataaaaaaagtagtgtgaagtccggtagtcgagaaaagcagagtgaagacacaaacactgaatcgaaggaaagtgatactaagaatgaggtcaatgggaccagtgaagacattaaatctgaaggtgacactcagtccaattaaaactgatctgataagacctcagatcagacagaggtaagtgtattgtttctcactttgattagggctttttgttactgtttgacagtgcagcgtaagtatgcacagatgaagatggaactaagccgagttagaaaacatacaaaagcctcttctgaaggaaaagacagtgtagtcctgcaaaacattttgaggtacattgttttgtctcagctattttgtagcagactcgtgcccccattagtgtgcctctttggaaattatcgcccacatttgtaatatagtcgccattgaaaagttaattatcctttttttagggattttgatgtcatttctttttttttttttaataaaaaggttgaactgtttttttttttctttttggtattaagtccatcttgtgttggtacattggcagagacatatgctttaaaaacttaaatatttcggaggcacatgttggactactttgttttaattaaactgctagtatttctttgtcaaggatgtttctagttttttgctttattgccttgcattctaatgcagtttgttctgtaactcgagagccagtatcattggattgatggaagtgtagggtttatgaattattgcacctgactaccatacctcacacagcgttggtgttgtgagcggcccatgaaaagccaaattaaaaatcaaggattcagtcaaactaagcaggtactcatgccaggtactcctttctctacccacatccatgtttgaatgctattgcctgtgatctttacgcttaactgttgtgtatcttttttgttctttacaagaagtgcagaggggttttttgtgtattgcgtgaaaacttataaaacaaatgttaacagaatggaattttttttcaactgtatgtagggctgcagtggtggccagaattagatatctttaaagaattttaaatacaataaacacttcatattattcgccttgttacactcaatgcaattctcaagtctataaaaggtatgtgcttaatatttcctactgtgtaggagaatttgcagtcagccataggtatgtaggaatagtcactcactggctgatacatttaaagcagcagtgtgaatagcaaggacagacaccttcaatttgtgaaatcaaagaactgatgcactatatagaacgaatttgggtttttaaagaaatattaaaagttaagtactgtaagtgttcttaaaacctgtaaacttcattctgtgggctaatggtgtgggacaaaatattcctaatgaaaggaagtaccaattagttgatttgttggtggcattccccttttgggaaagcaatgtaaggttatgtctgtgtatgtcattcacacttaggcaagcatacacaggcacatggctttaaaaaccacactgatgccttgataattaaaaagaatacaagcattccatgtacacatgttaattagcagttagtgattgggccaacactttctcataaaaattggccttttacatgttgtctaattatcatttttccccaaattttgcgttgtaggactactgttcgaagatttttggaagaatactgagaacggcataaagtgaagatcgacatttaaaaaatgaggtgaaagaaagctatagtggcatagaaaaagtataaagctcagttagtttttttattattattattattaaaagttaattcaggactgatgtgacctaccagatttcagaacatgtgttaatagtatatatgccactgaaaacttagggtcctgtatcatacttttttctttaagactttttaagaaatattacttaaacatgtggcttgctcagtgtttaattgcaagttttcaatcttggactttgaaaacaggattaaacgttagtattcgtgtgaatcagactaagtgggatttcatttttacaactctgctctacttagcctttggatttagaagtaaaaataaagtatctctgactttctgttaaaaaaaaaaaaaaaaaaa

SEQ ID NO: 1547 - DNA, 1299 bp, Homo sapiens
agtcctcttccgggtgatggcggcgggtgccccggatgtagccctggcgcaagcatctcttcttttttccacctcgccttccgcggattcccagcttgagaaacacctctttgccccgtcatgccaaagaggaaagtgaccttccaaggcgtgggagatgaggaggatgaggatgaaatcattgtccccaagaagaagctggtggaccctgtggctgggtcagggggtcctgggagccgctttaaaggcaaacactctttggatagcgatgaggaggaggatgatgatgatggggggtccagcaaatatgacatcttggcctcagaggatgtagaaggtcaggaggcagccacactccccagcgaggggggtgttcggatcacaccctttaacctgcaggaggagatggaggaaggccactttgatgccgatggcaactacttcctgaaccgggatgctcagatccgagacagctggctggacaacattgactgggtgaagatccgggagcggccacctggccagcgccaggcctcagactcggaggaggaggacagcttgggccagacctcaatgagtgcccaagccctcttggagggacttttggagctcctattgcctagagagacagtggctggggcactgaggcgtctgggggcccgaggaggaggcaaagggagaaaggggcctgggcaacccagttcccctcagcgcctggaccggctctccgggttggccgaccagatggtggcccggggcaaccttggtgtgtaccaggaaacaagggaacggttggctatgcgtctgaagggtttggggtgtcagaccctaggaccccacaatcccacacccccaccctccctggacatgttcgctgaggagttggcggaggaggaactggagaccccaacccctacccagagaggagaagcagagtcgcggggagatggtctggtggatgtgatgtgggaatataagtgggagaacacgggggatgccgagctgtatgggcccttcaccagcgcccagatgcagacctgggtgagtgaaggctacttcccggacggtgtttattgccggaagctggacccccctggtggtcagttctacaactccaaacgcattgactttgacctctacacctgagcctgctgggggcccagtttggtgggcccttctttcctggactttgtggaggaggcaccaagtgtctcaggcagcgaggaaattggaggccatttttcagtcaatttccctttcccaataaaagcctttagttgtgtaaaaaaaaaaaaaaaa

SEQ ID NO: 1548 - DNA, 1584 bp, Homo sapiens
gcgtcccccacaccacagacccgcgccgccgacgacccagcagccgccatgcgtctgctccgaggtgtgtttgtagttgctgctaagcgaacgccctttggagcttacggaggccttctgaaagacttcactgctactgacttgtctgaatttgctgccaaggctgccttgtctgctggcaaagtctcacctgaaacagttgacagtgtgattatgggcaatgtcctgcagagttcttcagatgctatatatttggcaaggcatgttggtttgcgtgtgggaatcccaaaggagaccccagctctcacgattaataggctctgtggttctggttttcagtccattgtgaatggatgtcaggaaatttgtgttaaagaagctgaagttgttttatgtggaggaaccgaaagcatgagccaagctccctactgtgtcagaaatgtgcgttttggaaccaagcttggatcagatatcaagctggaagattctttatgggtatcattaacagatcagcatgtccagctccccatggcaatgactgcagagaatcttactgtaaaacacaaaataagcagagaagaatgtgacaaatatgccctgcagtcacagcagagatggaaagctgctaatgatgctggctactttaatgatgaaatggcaccaattgaagtgaagacaaagaaaggaaaacagacaatgcaggtagacgagcatgctcggccccaaaccaccctggaacagttacagaaacttcctccagtattcaagaaagatggaactgttactgcagggaatgcatcgggtgtagctgatggtgctggagctgttatcatagctagtgaagatgctgttaagaaacataacttcacaccactggcaagaattgtgggctactttgtatctggatgtgatccctctatcatgggtattggtcctgtccctgctatcagtggggcactgaagaaagcaggactgagtcttaaggacatggatttggtagaggtgaatgaagcttttgctccccagtacttggctgttgagaggagtttggatcttgacataagtaaaaccaatgtgaatggaggagccattgctttgggtcacccactgggaggatctggatcaagaattactgcacacctggttcacgaattaaggcgtcgaggtggaaaatatgccgttggatcagcttgcattggaggtggccaaggtattgctgtcatcattcagagcacagcctgaagagaccagtgagctcactgtgacccatccttactctacttggccaggccacagtaaaacaagtgaccttcagagcagctgccacaactggccatgccctgccattgaaacagtgattaagtttgatcaagccatggtgacacaaaaatgcattgatcatgaataggagcccatgctagaagtacattctctcagatttgaaccagtgaaatatgatgtatttctgagctaaaactcaactatagaagacattaaaagaaatcgtattcttgccaagtaaccaccacttctgccttagataatatgattataaggaaatcaaataaatgttgccttaacttc

SEQ ID NO: 1549 - DNA, 1196 bp, Homo sapiens
aggtccggcttaccgtcgtttacgacagtgtcaggatcgcgggcttgctttccggtagcgtgggctgacgcctcgctcaatttctcacagggctgcgcaggtttcccccgtctgcgaatggaccactggaggggttcaaaggttcgcgtcccagtacgggaatgagcctctttgatctcttccggggctttttcggctttcctggacctcggagccacagagatcccttttttggagggatgactcgagatgaagatgatgatgaggaagaagaagaagaagggggctcatggggccgtgggaacccaaggttccatagtcctcagcacccccctgaggaatttggcttcggcttcagcttcagcccaggaggagggatacgtttccacgataacttcggctttgatgacctagtacgagatttcaatagcatcttcagcgatatgggggcctggaccttgccttcccatcctcctgaacttccaggtcctgagtcagagacacctggtgagagactacgggagggacagacacttcgggactcaatgcttaagtatccagatagtcaccagcccaggatctttgggggggtcttggagagtgatgcaagaagtgaatccccccaaccagcaccagactggggctcccagaggccatttcataggtttgatgatgtatggcctatggacccccatcctagaaccagagaggacaatgatcttgattcccaggtttcccaggagggtcttggcccggttctacagccccagcccaaatcctatttcaagagcatctctgtgaccaagatcactaaaccagatgggatagtggaggagcgccggactgtggtggacagtgagggccggacagagactacagtaacccgacacgaagcagatagcagtcctaggggtgatccagaatcaccaagacctccagccctggatgatgccttttccatcctggacttattcctgggacgttggttccggtcccggtagccttgttaaccctcagaggccttcaagtcctttccacctctcacccattgcccaccattaataagcttagcttctcttgccacctcaggggcttggatatgtggaatagtgaactggggccatgtcagtttgtcactcacccaaactgaccaataaaacctttatttatgctaaaaaaaaaaaaaaaaaaaaaaa

SEQ ID NO: 1550 - DNA, 918 bp, Homo sapiens
tttgtcgccagaaggaagatggcggatctggaggagcagttgtctgatgaagagaaggtgcgtatagcagcaaaattcatcattcatgcccctcctggagaatttaatgaggttttcaatgatgttcggttactgcttaataatgacaatcttctcagggaaggagcagcccatgcatttgcacagtataacttggaccagtttactccagtaaaaattgaaggttatgaagatcaggtattgataacagaacatggcgacttgggaaatggaaagtttttggatccaaagaacagaatctgttttaaatttgatcacttaaggaaggaggcaactgatccaagaccctgtgaagtagaaaatgcagttgaatcatggagaacttcagtagaaactgctctgagagcttacgtaaaagaacattacccgaatggagtctgcactgtgtatggcaaaaaaatagatggacagcaaaccattattgcatgcatagaaagccatcagttccaagcaaaaaatttttggaatggtcgttggaggtcagaatggaagtttacaatcactccttcaaccactcaagtggttggcatcttgaaaattcaggttcattattatgaagatggtaatgttcagctagtgagtcataaagatatacaagattccctaacagtgtctaatgaagtgcaaacagcaaaagaatttataaagattgtagaagctgcagaaaatgaataccagactgccatcagtgagaattatcagacaatgtcggacactactttcaaagccttacgtcgacagttgccagttacacgcactaagattgattggaacaagatccttagctacaagattggcaaagagatgcagaatgcataagatgaacattgcatgaccggatcattttagtgtctttgc

SEQ ID NO: 1551 - DNA, 1450 bp, Homo sapiens
ccaggcagcagttagcccgccgcccgcctgtgtgtccccagagccatggagagagccagtctgatccagaaggccaagctggcagagcaggccgaacgctatgaggacatggcagccttcccaggcagcagttagcccgccgcccgcctgtgtgtccccagagccatggagagagccagtctgatccagaaggccaagctggcagagcaggccgaacgctatgaggacatggcagccttcatgaaaggcgccgtggagaagggcgaggagctctcctgcgaagagcgaaacctgctctcagtagcctataagaacgtggtgggcggccagagggctgcctggagggtgctgtccagtattgagcagaaaagcaacgaggagggctcggaggagaaggggcccgaggtgcgtgagtaccgggagaaggtggagactgagctccagggcgtgtgcgacaccgtgctgggcctgctggacagccacctcatcaaggaggccggggacgccgagagccgggtcttctacctgaagatgaagggtgactactaccgctacctggccgaggtggccaccggtgacgacaagaagcgcatcattgactcagcccggtcagcctaccaggaggccatggacatcagcaagaaggagatgccgcccaccaaccccatccgcctgggcctggccctgaacttttccgtcttccactacgagatcgccaacagccccgaggaggccatctctctggccaagaccactttcgacgaggccatggctgatctgcacaccctcagcgaggactcctacaaagacagcaccctcatcatgcagctgctgcgagacaacctgacactgtggacggccgacaacgccggggaagaggggggcgaggctccccaggagccccagagctgagtgttgcccgccaccgccccgccctgccccctccagtccccgccctgccgagaggactagtatggggtgggaggccccacccttctcccctaggcgctgttcttgctccaaagggctccgtggagagggactggcagagctgaggccacctggggctggggatcccactcttcttgcagctgttgagcgcacctaaccactggtcatgcccccacccctgctctccgcacccgcttcctcccgaccccaggaccaggctacttctcccctcctcttgcctccctcctgcccctgctgcctcttgattcgtaggaattgaggagtgtctccgccttgtggctgagaactggacagtggcaggggctggagatgggtgtgtgtgtgtgtgtgtgtgtgtgtgtgtgcgcgcgcgccagtgcaagaccgagactgagggaaagcatgtctgctgggtgtgaccatgtttcctctcaataaagttcccctgtgacactcaaaaaaaaaaaaaaaaaaaaaaaaaaaaaaaaaaaaaaaaaaa

SEQ ID NO: 1552 - DNA, 878 bp, Homo sapiens
cagattttcaggttgattgatgtgggacagcagccacaatgaggaactcctatagatttctggcatcctctctctcagttgtcgtttctctcctgctaattcctgaagatgtctgtgaaaaaattattggaggaaatgaagtaactcctcattcaagaccctacatggtcctacttagtcttgacagaaaaaccatctgtgctggggctttgattgcaaaagactgggtgttgactgcagctcactgtaacttgaacaaaaggtcccaggtcattcttggggctcactcaataaccagggaagagccaacaaaacagataatgcttgttaagaaagagtttccctatccatgctatgacccagccacacgcgaaggtgaccttaaacttttacagctgacggaaaaagcaaaaattaacaaatatgtgactatccttcatctacctaaaaagggggatgatgtgaaaccaggaaccatgtgccaagttgcagggtgggggaggactcacaatagtgcatcttggtccgatactctgagagaagtcaatatcaccatcatagacagaaaagtctgcaatgatcgaaatcactataattttaaccctgtgattggaatgaatatggtttgtgctggaagcctccgaggtggaagagactcgtgcaatggagattctggaagccctttgttgtgcgagggtgttttccgaggggtcacttcctttggccttgaaaataaatgcggagaccctcgtgggcctggtgtctatattcttctctcaaagaaacacctcaactggataattatgactatcaagggagcagtttaaataaccgtttcctttcatttactgtggcttcttaatcttttcacaaataaa

SEQ ID NO: 1553 - DNA, 2233 bp, Homo sapiens
gggacggcgacagcgggtcggcgggccgcaggagggggtcatgggtaaagactactaccagacgttgggcctggcccgcggcgcgtcggacgaggagatcaagcgggcctaccgccgccaggcgctgcgctaccacccggacaagaacaaggagcccggcgccgaggagaagttcaaggagatcgctgaggcctacgacgtgctcagcgacccgcgcaagcgcgagatcttcgaccgctacggggaggaaggcctaaaggggagtggccccagtggcggtagcggcggtggtgccaatggtacctctttcagctacacattccatggagaccctcatgccatgtttgctgagttcttcggtggcagaaatccctttgacaccttttttgggcagcggaacggggaggaaggcatggacattgatgacccattctctggcttccctatgggcatgggtggcttcaccaacgtgaactttggccgctcccgctctgcccaagagcccgcccgaaagaagcaagatcccccagtcacccacgaccttcgagtctcccttgaagagatctacagcggctgtaccaagaagatgaaaatctcccacaagcggctaaaccccgacggaaagagcattcgaaacgaagacaaaatattgaccatcgaagtgaagaaggggtggaaagaaggaaccaaaatcactttccccaaggaaggagaccagacctccaacaacattccagctgatatcgtctttgttttaaaggacaagccccacaatatctttaagagagatggctctgatgtcatttatcctgccaggatcagcctccgggaggctctgtgtggctgcacagtgaacgtccccactctggacggcaggacgatacccgtcgtattcaaagatgttatcaggcctggcatgcggcgaaaagttcctggagaaggcctccccctccccaaaacacccgagaaacgtggggacctcattattgagtttgaagtgatcttccccgaaaggattccccagacatcaagaaccgtacttgagcaggttcttccaatatagctatctgagctccccaaggactgaccagggacctttccagagctcaaggatttctggacctttctaccagttgtggaccatgagagggtgggagggcccagggagggctttcgtactgctgaatgttttccagagcatatattacaatctttcaaagtcgcacactagacttcagtggtttttcgagctatagggcatcaggtggtgggaacagcaggaaaaggcattccagtctgccccactgggtctggcagccctcccgggatgggcccacatccacctccagtccctggccaggggtgagaggcagaccagcagatggacttgatccctctgtgtctttgggcttctggctggtagataatgtcaacctgcagtcttgattcccagaccctgtacactcctccttttctgttgtgtgatcagtttgtgctttattctgtatttgtctcccatgtcttgctcttctcctggagaattctgtcttctctttggccatctcaaattgagaacctaaactattcctgcagaactgcctggttggcgtccacaagcaatacctctcgttccagcaggaccaagggagccagcctccagtgagtgactccagcaagtgcagccacctctcccttgatggtctgggagcctggcctcagcaaggggccttcctgacctctggctccagtgaagctgaatgtcctcactttgtgggtcacactctttacatttctgtaaggcaatcttggcacacgtggggcttaccagtggcccaggtaattttttgtttcatggactatggactctttcaaagggatctgatccttttgaattttgcacagccctagatacaatcccttttgataaaagggtctttgcttctgattacaggagcactgtggaacgtctgtaaatatgtttttataattccatgtatagttggtgtacactcaaaacctgtccccggcagccagtgctctctgtatagggccataatggaattctgaagaaatcttggggagggaaggggagttggaacaaatgtctgttccctggaggccagtccagtgctcagacctttagactcattgtaagttgccactgccaacatgagaccaaagtgtgtgactagtcaatgaagtgcgacagcattaaagactgatgctaaacctc

SEQ ID NO: 1554 - DNA, 3846 bp, Homo sapiens
gcctcccgccagctcgcctcggggaacaggacgcgcgtgagctcaggcgtccccgccccagcttttctcggaaccatgaaccccaactgcgcccggtgcggcaagatcgtgtatcccacggagaaggtgaactgtctggataagttctggcataaagcatgcttccattgcgagacctgcaagatgacactgaacatgaagaactacaagggctacgagaagaagccctactgcaacgcacactaccccaagcagtccttcaccatggtggcggacaccccggaaaaccttcgcctcaagcaacagagtgagctccagagtcaggtgcgctacaaggaggagtttgagaagaacaagggcaaaggtttcagcgtagtggcagacacgcccgagctccagagaatcaagaagacccaggaccagatcagtaatataaaataccatgaggagtttgagaagagccgcatgggccctagcgggggcgagggcatggagccagagcgtcgggattcacaggacggcagcagctaccggcggcccctggagcagcagcagcctcaccacatcccgaccagtgccccggtttaccagcagccccagcagcagccggtggcccagtcctatggtggctacaaggagcctgcagccccagtctccatacagcgcagcgccccaggtggtggcgggaagcggtaccgcgcggtgtatgactacagcgccgccgacgaggacgaggtctccttccaggacggggacaccatcgtcaacgtgcagcagatcgacgacggctggatgtacgggacggtggagcgcaccggcgacacggggatgctgccggccaactacgtggaggccatctgaacccggagcgcccccatctgtcttcagcacattccacggcatcgcatccgtcctgggcgtgagccgtccattcttcagtgtctctgttttttaaaacctgcgacagcttgtgattcctacccctcttccagcttcttttgccaactgaagccttcttctgccacttctgcgggctccctcctctggcaggcttcccccgtgatcgacttcttggttttctctctggatggaacgggtatgggcctctctgggggaggcagggctggaatgggagacctgttggcctgtgggcctcacctgcccctctgttctctcccctcacatcctcctgcccagctcctcacatacccacacattccagggctggggtgagcctgactgccaggaccccaggtcaggggctccctacattccccagagtgggatccacttcttggttcctgggatggcgatggggactctgccgctgtgtagggaccagtgggatgggctctacctctctttctcaaagagggggctctgcccacctggggtctctctccctacctccctcctcaggggcaacaacaggagaatggggttcctgctgtggggcgaattcatcccctccccgcgcgttccttcgcacactgtgattttgccctcctgcccacgcagacctgcagcgggcaaagagctcccgaggaagcacagcttgggtcaggttcttgcctttcttaattttagggacagctaccggaaggaggggaacaaggagttctcttccgcagcccctttccccacgcccacccccagtctccagggacccttgcctgcctcctaggctggaagccatggtcccgaagtgtagggcaagggtgcctcaggaccttttggtcttcagcctccctcagcccccaggatctgggttaggtggccgctcctccctgctcctcatgggaagatgtctcagagccttccatgacctcccctccccagcccaatgccaagtggacttggagctgcacaaagtcagcagggaccactaaatctccaagacctggtgtgcggaggcaggagcatgtatgtctgcaggtgtctgacacgcaagtgtgtgagtgtgagtgtgagagatggggcgggggtgtgtctgtaggtgtctctgggcctgtgtgtgggtggggttatgtgagggtatgaagagctgtcttcccctgagagtttcctcagaacccacagtgagaggggagggctcctggggcagagaagttccttaggttttctttggaatgaaattcctccttccccccatctctgagtggaggaagcccaccaatctgccctttgcagtgtgtcagggtggaaggtaagaggttggtgtggagttggggctgccatagggtctgcagcctgctggggctaagcggtggaggaaggctctgtcactccaggcatatgtttccccatctctgtctggggctacagaatagggtggcagaagtgtcaccctgtgggtgtctccctcgggggctcttcccctagacctccccctcacttacataaagctcccttgaagcaagaaagagggtcccagggctgcaaaactggaagcacagcctcggggatggggagggaaagacggtgctatatccagttcctgctctctgctcatgggtggctgtgacaaccctggcctcacttgattcatctctggttttcttgccaccctctgggagtccccatcccattttcatcctgagcccaaccaggccctgccattggcctcttgtcccttggcacacttgtacccacaggtgaggggcaggacctgaaggtattggcctgttcaacaatcagtcatcatgggtgtttttgtcaactgcttgttaattgatttggggatgtttgccccgaatgagaggttgaggaaaagactgtgggtggggaggccctgcctgacccatcccttttcctttctggccccagcctaggtggaggcaagtggaatatcttatattgggcgatttgggggctcggggaggcagagaatctcttgggagtcttgggtggcgctggtgcattctgtttcctcttgatctcaaagcacaatgtggatttggggaccaaaggtcagggacacatccccttagaggacctgagtttgggagagtggtgagtggaagggaggagcagcaagaagcagcctgttttcactcagcttaattctccttcccagataaggcaagccagtcatggaatcttgctgcaggccctccctctactcttcctgtcctaaaaataggggccgttttcttacacacccccagagagaggagggactgtcacactggtgctgagtgaccgggggctgctgggcgtctgttctttaccaaaaccatccatccctagaagagcacagagccctgaggggctgggctgggctgggctgagcccctggtcttctctacagttcacagaggtctttcagctcatttaatcccaggaaagaggcatcaaagctagaatgtgaatataacttttgtgggccaatactaagaataacaagaagcccagtggtgaggaaagtgcgttctcccagcactgcctcctgttttctccctctcatgtccctccagggaaaatgactttattgcttaatttctgcctttcccccctcacacatgcacttttgggcctttttttatagctggaaaaaacaaaataccaccctacaaacctgtatttaaaaagaaacagaaatgaccacgtgaaatttgcctctgtccaaacatttcatccgtgtgtatgtgtatgtgtgtgagtgtgtgaagccgccagttcatctttttatatggggttgttgtctcattttggtctgttttggtcccctccctcgtgggcttgtgctcgggatcaaacctttctggcctgttatgattctgaacatttgacttgaaccacaagtgaatctttctcctggtgactcaaataaaagtataattttta

SEQ ID NO: 1555 - DNA, 2439 bp, Homo sapiens
gcagccgccaccgccgccgccgccgccaccagagccgccctgtccgcgccgcgcctcggcagccggaacagggccgccgtcggggagccccaacacacggtccacagctcatcatgatggacttggagctgccgccgccgggactcccgtcccagcaggacatggatttgattgacatactttggaggcaagatatagatcttggagtaagtcgagaagtatttgacttcagtcagcgacggaaagagtatgagctggaaaaacagaaaaaacttgaaaaggaaagacaagaacaactccaaaaggagcaagagaaagcctttttcgctcagttacaactagatgaagagacaggtgaatttctcccaattcagccagcccagcacatccagtcagaaaccagtggatctgccaactactcccaggttgcccacattcccaaatcagatgctttgtactttgatgactgcatgcagcttttggcgcagacattcccgtttgtagatgacaatgaggtttcttcggctacgtttcagtcacttgttcctgatattcccggtcacatcgagagcccagtcttcattgctactaatcaggctcagtcacctgaaacttctgttgctcaggtagcccctgttgatttagacggtatgcaacaggacattgagcaagtttgggaggagctattatccattcctgagttacagtgtcttaatattgaaaatgacaagctggttgagactaccatggttccaagtccagaagccaaactgacagaagttgacaattatcatttttactcatctataccctcaatggaaaaagaagtaggtaactgtagtccacattttcttaatgcttttgaggattccttcagcagcatcctctccacagaagaccccaaccagttgacagtgaactcattaaattcagatgccacagtcaacacagattttggtgatgaattttattctgctttcatagctgagcccagtatcagcaacagcatgccctcacctgctactttaagccattcactctctgaacttctaaatgggcccattgatgtttctgatctatcactttgcaaagctttcaaccaaaaccaccctgaaagcacagcagaattcaatgattctgactccggcatttcactaaacacaagtcccagtgtggcatcaccagaacactcagtggaatcttccagctatggagacacactacttggcctcagtgattctgaagtggaagagctagatagtgcccctggaagtgtcaaacagaatggtcctaaaacaccagtacattcttctggggatatggtacaacccttgtcaccatctcaggggcagagcactcacgtgcatgatgcccaatgtgagaacacaccagagaaagaattgcctgtaagtcctggtcatcggaaaaccccattcacaaaagacaaacattcaagccgcttggaggctcatctcacaagagatgaacttagggcaaaagctctccatatcccattccctgtagaaaaaatcattaacctccctgttgttgacttcaacgaaatgatgtccaaagagcagttcaatgaagctcaacttgcattaattcgggatatacgtaggaggggtaagaataaagtggctgctcagaattgcagaaaaagaaaactggaaaatatagtagaactagagcaagatttagatcatttgaaagatgaaaaagaaaaattgctcaaagaaaaaggagaaaatgacaaaagccttcacctactgaaaaaacaactcagcaccttatatctcgaagttttcagcatgctacgtgatgaagatggaaaaccttattctcctagtgaatactccctgcagcaaacaagagatggcaatgttttccttgttcccaaaagtaagaagccagatgttaagaaaaactagatttaggaggatttgaccttttctgagctagtttttttgtactattatactaaaagctcctactgtgatgtgaaatgctcatactttataagtaattctatgcaaaatcatagccaaaactagtatagaaaataatacgaaactttaaaaagcattggagtgtcagtatgttgaatcagtagtttcactttaactgtaaacaatttcttaggacaccatttgggctagtttctgtgtaagtgtaaatactacaaaaacttatttatactgttcttatgtcatttgttatattcatagatttatatgatgatatgacatctggctaaaaagaaattattgcaaaactaaccactatgtacttttttataaatactgtatggacaaaaaatggcattttttatattaaattgtttagctctggcaaaaaaaaaaaattttaagagctggtactaataaaggattattatgactgttaaaaaaaaaaaaaaaaaaaaaaaaaaaaaaaaaa

SEQ ID NO: 1556 - DNA, 3266 bp, Homo sapiens
gcggtgcgggccgggcgggtgcattcaggccaaggcggggccgccgggatgctcagggttccggagccgcggcccggggaggcgaaagcggagggggccgcgccgccgaccccgtccaagccgctcacgtccttcctcatccaggacatcctgcgggacggcgcgcagcggcaaggcggccgcacgagcagccagagacagcgcgacccggagccggagccagagccagagccagagggaggacgcagccgcgccggggcgcagaacgaccagctgagcaccgggccccgcgccgcgccggaggaggccgagacgctggcagagaccgagccagaaaggcacttggggtcttatctgttggactctgaaaacacttcaggcgcccttccaaggcttccccaaacccctaagcagccgcagaagcgctcccgagctgccttctcccacactcaggtgatcgagttggagaggaagttcagccatcagaagtacctgtcagcccctgaacgggcccacctggccaagaacctcaagctcacggagacccaagtgaagatatggttccagaacagacgctataagactaagcgaaagcagctctcctcggagctgggagacttggagaagcactcctctttgccggccctgaaagaggaggccttctcccgggcctccctggtctccgtgtataacagctatccttactacccatacctgtactgcgtgggcagctggagcccagctttttggtaatgccagctcaggtgacaaccattatgatcaaaaactgccttccccagggtgtctcatatgaaaagcacaaggggccaaggtcagggagcaagaggtgtgcacaccaaaactattggagaattgcgtggaaatcttcagattcttcactggtgagacaatgaaacaacagagacagtgaaagttttaatacctaagtcattcccccagtgcatactgtagcgtcaagtttttgcttctggctacctgtttgaaggggagagagggaaaatcaagtggtattttccagcactttgtatgattttggatgagctgtacacccaaggattctgttctgcaactccatcctcctgtgtcactgaatatcaactctgaaagagcaaacctaacaggagaaaggacaaccaggatgaggatgtcaccaactgaattaaacttaagtccagaagcctcctgttggccttggaatatggccaaggctctctctgtccctgtaaaagagaggggcaaatagtctccaaagagaacgccctcatgctcagcacatatttgcatggaagggggagatgggtgggaggagatgaaaatatcagcttttcttattcctttttattccttttaaaatggtatgccaacttaagtatttacagggtggcccaaatagaacaagatgcactcgctgtgattttaagacaagctgtataaacagaactccactgcaagagggagggccgggccaggagaatctccgcttgtccaagacaggggcctaaggagggtctccacactgctgctaggggctgttgcatttttttattagtagaaagtggaaaggcctcttctcaacttttttcccttgggctggagaatttagaatcagaagtttcctggagttttcaggctatcatatatactgtatcctgaaaggcaacataattcttccttccctccttttaaaattttgtgttcctttttgcagcaattactcactaaagggcttcattttagtccagatttttagtctggctgcacctaacttatgcctcgcttatttagcccgagatccggtctttttttttttttttttttccgtctccccaaagctttatctgtcttgactttttaaaaaagtttgggggcagattctgaattggctaaaagacatgcatttttaaaactagcaactcttatttctttcctttaaaaatacatagcattaaatcccaaatcctatttaaagacctgacagcttgagaagggtcactactgcatttataggaccttctggtggttctgctgttacgtttgaagtctgacaatccttgagaatctttgcatgcagaggaggtaagaggtattggattttcacagagggaagaacacagcgcagaatgaaggcgcaggcttactgagctgtccagtggagggctcatgggtgggacatggaaaagaaggcagcctaggccctggggagcccagtccactgagcaagcaagggactgagtgagccttttgcaggaaaaggctaagaaaaaggaaaaccattctaaaacacaacaagaaactgtccaaatgctttgggaactgtgtttattgcctataatggggtccccaaaatgggtaacctagacttcagagagaatgagcagagagcaaaggagaaatctgggctgtccttccattttcattctgttatctcaggtgagctggtagaggggagacattagaaaaaaatgaaacaacaaaacaattactaatgaggtacgctgaggcctgggagtctcttgagctccacgacttcaaaattaaaatgagccatgagtcaaaccactgcaatccagcctgggcaacgagcaagacccagtctctactgttggtggcaaaattgccaacataagttaatagaaagttggccaatttcaccccattttctgtggtttgggctccacattgcaatgttcaatgccacgtgctgctgacaccgaccggagtactagccagcacaaaaggcagggtagcctgaattgctttctgctctttacatttcttttaaaataagcatttagtgctcagtccctactgagtactctttctctcccctcctctgaatttaattctttcaacttgcaatttgcaagggttacacatttcactgtgatgtatattgtgttgcaaaaaaaaaaaagtgtctttgtttaaaattacttggtttgtgaatccatcttgctttccccattggaactagtcattaacccatctctgaactggtagaaaaacatctgaagagctagtctatcagcatctgacaggtgaattggatggttctcagaaccatttcacccagacagcctgtttctatcctgtttaataaattagtttgggttctctacatgcataacaaaccctgctccaatctgtcacataaaagtctgtgacttgaagtttagtcagcacccccaccaaactttatttttctatgtgttttttgcaacatatgagtgttttgaaaataaagt

SEQ ID NO: 1557 - DNA, 952 bp, Homo sapiens
tgaactctggatgctgttagcctgagactcaggaagacaacttctgcagggtcactccctggcttctggaggaaagagaaggagggcagtgctccagtggtacagaagtgagacataatggaatcaggcttcacctccaaggacacctatctaagccattttaaccctcgggattacctagaaaaatattacaagtttggttctaggcactctgcagaaagccagattcttaagcaccttctgaaaaatcttttcaagatattctgcctagacggtgtgaagggagacctgctgattgacatcggctctggccccactatctatcagctcctctctgcttgtgaatcctttaaggagatcgtcgtcactgactactcagaccagaacctgcaggagctggagaagtggctgaagaaagagccagaggcctttgactggtccccagtggtgacctatgtgtgtgatcttgaagggaacagagtcaagggtccagagaaggaggagaagttgagacaggcggtcaagcaggtgctgaagtgtgatgtgactcagagccagccactgggggccgtccccttacccccggctgactgcgtgctcagcacactgtgtctggatgccgcctgcccagacctccccacctactgcagggcgctcaggaacctcggcagcctactgaagccagggggcttcctggtgatcatggatgcgctcaagagcagctactacatgattggtgagcagaagttctccagcctccccctgggccgggaggcagtagaggctgctgtgaaagaggctggctacacaatcgaatggtttgaggtgatctcgcaaagttattcttccaccatggccaacaacgaaggacttttctccctggtggcgaggaagctgagcagacccctgtgatgcctgtgacctcaattaaagcaattcctttgacctgtca

SEQ ID NO: 1558 - DNA, 3707 bp, Homo sapiens
cccccattcgcatctaacaaggaatctgcgccccagagagtcccggacgccgccggtcggtgcccggcgcgccgggccatgcagcgacggccgccgcggagctccgagcagcggtagcgcccccctgtaaagcggttcgctatgccgggaccactgtgaaccctgccgcctgccggaacactcttcgctccggaccagctcagcctctgataagctggactcggcacgcccgcaacaagcaccgaggagttaagagagccgcaagcgcagggaaggcctccccgcacgggtgggggaaagcggccggtgcagcgcggggacaggcactcgggctggcactggctgctagggatgtcgtcctggataaggtggcatggacccgccatggcgcggctctggggcttctgctggctggttgtgggcttctggagggccgctttcgcctgtcccacgtcctgcaaatgcagtgcctctcggatctggtgcagcgacccttctcctggcatcgtggcatttccgagattggagcctaacagtgtagatcctgagaacatcaccgaaattttcatcgcaaaccagaaaaggttagaaatcatcaacgaagatgatgttgaagcttatgtgggactgagaaatctgacaattgtggattctggattaaaatttgtggctcataaagcatttctgaaaaacagcaacctgcagcacatcaattttacccgaaacaaactgacgagtttgtctaggaaacatttccgtcaccttgacttgtctgaactgatcctggtgggcaatccatttacatgctcctgtgacattatgtggatcaagactctccaagaggctaaatccagtccagacactcaggatttgtactgcctgaatgaaagcagcaagaatattcccctggcaaacctgcagatacccaattgtggtttgccatctgcaaatctggccgcacctaacctcactgtggaggaaggaaagtctatcacattatcctgtagtgtggcaggtgatccggttcctaatatgtattgggatgttggtaacctggtttccaaacatatgaatgaaacaagccacacacagggctccttaaggataactaacatttcatccgatgacagtgggaagcagatctcttgtgtggcggaaaatcttgtaggagaagatcaagattctgtcaacctcactgtgcattttgcaccaactatcacatttctcgaatctccaacctcagaccaccactggtgcattccattcactgtgaaaggcaaccccaaaccagcgcttcagtggttctataacggggcaatattgaatgagtccaaatacatctgtactaaaatacatgttaccaatcacacggagtaccacggctgcctccagctggataatcccactcacatgaacaatggggactacactctaatagccaagaatgagtatgggaaggatgagaaacagatttctgctcacttcatgggctggcctggaattgacgatggtgcaaacccaaattatcctgatgtaatttatgaagattatggaactgcagcgaatgacatcggggacaccacgaacagaagtaatgaaatcccttccacagacgtcactgataaaaccggtcgggaacatctctcggtctatgctgtggtggtgattgcgtctgtggtgggattttgccttttggtaatgctgtttctgcttaagttggcaagacactccaagtttggcatgaaaggcccagcctccgttatcagcaatgatgatgactctgccagcccactccatcacatctccaatgggagtaacactccatcttcttcggaaggtggcccagatgctgtcattattggaatgaccaagatccctgtcattgaaaatccccagtactttggcatcaccaacagtcagctcaagccagacacatttgttcagcacatcaagcgacataacattgttctgaaaagggagctaggcgaaggagcctttggaaaagtgttcctagctgaatgctataacctctgtcctgagcaggacaagatcttggtggcagtgaagaccctgaaggatgccagtgacaatgcacgcaaggacttccaccgtgaggccgagctcctgaccaacctccagcatgagcacatcgtcaagttctatggcgtctgcgtggagggcgaccccctcatcatggtctttgagtacatgaagcatggggacctcaacaagttcctcagggcacacggccctgatgccgtgctgatggctgagggcaacccgcccacggaactgacgcagtcgcagatgctgcatatagcccagcagatcgccgcgggcatggtctacctggcgtcccagcacttcgtgcaccgcgatttggccaccaggaactgcctggtcggggagaacttgctggtgaaaatcggggactttgggatgtcccgggacgtgtacagcactgactactacagggtcggtggccacacaatgctgcccattcgctggatgcctccagagagcatcatgtacaggaaattcacgacggaaagcgacgtctggagcctgggggtcgtgttgtgggagattttcacctatggcaaacagccctggtaccagctgtcaaacaatgaggtgatagagtgtatcactcagggccgagtcctgcagcgaccccgcacgtgcccccaggaggtgtatgagctgatgctggggtgctggcagcgagagccccacatgaggaagaacatcaagggcatccataccctccttcagaacttggccaaggcatctccggtctacctggacattctaggctagggcccttttccccagaccgatccttcccaacgtactcctcagacgggctgagaggatgaacatcttttaactgccgctggaggccaccaagctgctctccttcactctgacagtattaacatcaaagactccgagaagctctcgagggaagcagtgtgtacttcttcatccatagacacagtattgacttctttttggcattatctctttctctctttccatctcccttggttgttcctttttctttttttaaattttctttttcttcttttttttcgtcttccctgcttcacgattcttaccctttcttttgaatcaatctggcttctgcattactattaactctgcatagacaaaggccttaacaaacgtaatttgttatatcagcagacactccagtttgcccaccacaactaacaatgccttgttgtattcctgcctttgatgtggatgaaaaaaagggaaaacaaatatttcacttaaactttgtcacttctgctgtacagatatcgagagtttctatggattcacttctatttatttattattattactgttcttattgtttttggatggcttaagcctgtgtataaaaaagaaaacttgtgttcaatctgtgaagcctttatctatgggagattaaaaccagagagaaagaagatttattatgaaccgcaatatgggaggaacaaagacaaccactgggatcagctggtgtcagtccctacttaggaaatactcagcaactgttagctgggaagaatgtattcggcaccttcccctgaggacctttctgaggagtaaaaagactactggcctctgtgccatggatgattcttttcccatcaccagaaatgatagcgtgcagtagagagcaaagatggctt

SEQ ID NO: 1559 - DNA, 2311 bp, Homo sapiens
ggcacgaggggagagaccacactgccatgcctccctctgggccccgaggaaccctccttctgttgccgctgctgctgctgctcctgcttcgcgccgtgctggctgtccccctggagcgaggggcgcccaacaaggaggagacccctgcgactgagagtcccgacacaggcctgtactaccaccggtacctccaggaggtcatcgatgtactggagacggatgggcatttccgagagaagctgcaggctgccaatgcggaggacatcaagagcgggaagctgagccgagagctggactttgtcagccaccacgtccgcaccaagctggatgagctcaagcgacaggaggtgtcacggctgcggatgctgctcaaggccaagatggacgccgagcaggatcccaatgtacaggtggatcatctgaatctcctgaaacagtttgaacacctggaccctcagaaccagcatacattcgaggcccgcgacctggagctgctgatccagacggccacccgggaccttgcccagtacgacgcagcccatcatgaagagttcaagcgctacgagatgcttaaggaacacgagagacggcgttatctggagtcactgggagaggagcagagaaaggaggcggagaggaagctggaagagcaacagcgccggcaccgcgagcaccctaaagtcaacgtgcctggcagccaagcccagttgaaggaggtgtgggaggagctggatggactggaccccaacaggtttaaccccaagaccttcttcatactgcatgatatcaacagtgatggtgtcctggatgagcaggagctggaggcactcttcaccaaggagctggagaaagtgtacgacccaaagaatgaggaggacgacatgcgggagatggaggaggagcgactgcgcatgcgggagcatgtgatgaagaatgtggacaccaaccaggaccgcctcgtgaccctggaggagttcctcgcatccactcagaggaaggagtttggggacaccggggagggctgggagacagtggagatgcaccctgcctacaccgaggaagagctgaggcgctttgaagaggagctggctgcccgggaggcagagctgaatgccaaggcccagcgcctcagccaggagacagaggctctagggcggtcccagggccgcctggaggcccagaagagagagctgcagcaggctgtgctgcacatggagcagcggaagcagcagcagcagcagcagcaaggccacaaggccccggctgcccaccctgaggggcagctcaagttccacccagacacagacgatgtacctgtcccagctccagccggtgaccagaaggaggtggacacttcagaaaagaaacttctcgagcggctccctgaggttgaggtgccccagcatctgtgatcctccgggaccccagccctcaggattcctgatgctccaaggcgactgatgggcgctggatgaagtggcacagtcagcttccctgggggccggtgtcatgttgggctcctggggcgggggcacggcctggcatttcacgcattgctgccaccccaggtccacctgtctccactttcacagcctccaagtctgtggctcttcccttctgtcctccgaggggcttgccttctctcgtgtccagtgaggtgctcagtgatcggcttaacttagagaagcccgccccctccccttctccgtctgtcccaagagggtctgctctgagcctgcgttcctaggtggctcggcctcagctgcctgggttgtggccgccctagcatcctgtatgcccacagctactggaatccccgctgctgctccgggccaagcttctggttgattaatgagggcatggggtggtccctcaagaccttcccctaccttttgtggaaccagtgatgcctcaaagacagtgtcccctccacagctgggtgccaggggcaggggatcctcagtatagccggtgaaccctgataccaggagcctgggcctccctgaacccctggcttccagccatctcatcgccagcctcctcctggacctcttggcccccagccccttccccacacagccccagaagggtcccagagctgaccccactccaggacctaggcccagcccctcagcctcatctggagcccctgaagaccagtcccacccacctttctggcctcatctgacactgctccgcatcctgctgtgtgtcctgttccatgttccggttccatccaaatacactttctggaacaaaaaaaaaaaaaaaaaaaaaaaaaaaaaaaaaaaaaaaaaaaaaaaaaaaaaaa

SEQ ID NO: 1560 - DNA, 1634 bp, Homo sapiens
gacgccgcccgaccctgcgactacgctgcggactcccgcccgctcccgctcgctcccgcggtcctcgctcgcctcgcgccggtagttttgggcctacacctcccctccccccgccagccgccaaagacttgaccacgtaacgagcccaactcccccgaacgccgcccgccgctcgccatggatgccggtgtgactgaaagtggactaaatgtgactctcaccattcggcttcttatgcacggaaaggaagtaggaagcatcattgggaagaaaggggagtcggttaagaggatccgcgaggagagtggcgcgcggatcaacatctcggaggggaattgtccggagagaatcatcactctgaccggccccaccaatgccatctttaaggctttcgctatgatcatcgacaagctggaggaagatatcaacagctccatgaccaacagtaccgcggccagcaggcccccggtcaccctgaggctggtggtgccggccacccagtgcggctccctgattgggaaaggcgggtgtaagatcaaagagatccgcgagagtacgggggcgcaggtccaggtggcgggggatatgctgcccaactccaccgagcgggccatcaccatcgctggcgtgccgcagtctgtcaccgagtgtgtcaagcagatttgcctggtcatgctggagacgctctcccagtctccgcaagggagagtcatgaccattccgtaccagcccatgccggccagctccccagtcatctgcgcgggcggccaagatcggtgcagcgacgctgtgggctacccccatgccacccatgacctggagggaccacctctagatgcctactcgattcaaggacaacacaccatttctccgctcgatctggccaagctgaaccaggtggcaagacaacagtctcactttgccatgatgcacggcgggaccggattcgccggaattgactccagctctccagaggtgaaaggctattgggcaagtttggatgcatctactcaaaccacccatgaactcaccattccaaataacttaattggctgcataatcgggcgccaaggcgccaacattaatgagatccgccagatgtccggggcccagatcaaaattgccaacccagtggaaggctcctctggtaggcaggttactatcactggctctgctgccagtattagtctggcccagtatctaatcaatgccaggctttcctctgagaagggcatggggtgcagctagaacagtgtaggttccctcaataacccctttctgctgttctcccatgatccaactgtgtaatttctggtcagtgattccaggttttaaataatttgtaagtgttcagtttctacacaactttatcatccgctaagaatttaaaaatcacattctctgttcagctgttaatgctgggatccatatttagttttataagcttttccctgtttttagttttgttttgggttttttggctcatgaattttatttctgtttgtcgataagaaatgtaagagtggaatgttaataaatttcagtttagttctgtaatgtcaagaatttaagaattaaaaaacggattggttaaaaaatgcttcatatttgaaaaagctgggaattgctgtctt

SEQ ID NO: 1561 - DNA, 3299 bp, Homo sapiens
cggagggagcgctgggagcgagcaagcgagcgtttggagcccgggccagcagagggggcgcccggtcgctgcctgtaccgctcccgctggtcatctccgccgcgctcgggggccccgggaggagcgagaccgagtcggagagtccgggagccaagccgggcgaaacccaactgcggaggacgcccgccccactcagcctcctcctgcgtccgagccggggagcatcgccgagcgccccacgggccggagagctgggagcacaggtcccggcagccccagggatggtctaggagccggcgtaaggctcgctgctctgctccctgccggggctagccgcctcctgccgatcgcccggggctgcgagctgcggcggcccggggctgctcgccgggcggcgcaggccggagaagttagttgtgcgcgcccttagtgcgcggaaccagccagcgagcgagggagcagcgaggcgccgggaccatgggctgggggagccgctgctgctgcccgggacgtttggacctgctgtgcgtgctggcgctgctcgggggctgcctgctccccgtgtgtcggacgcgcgtctacaccaaccactgggcagtcaaaatcgccgggggcttcccggaggccaaccgtatcgccagcaagtacggattcatcaacataggacagataggggccctgaaggactactaccacttctaccatagcaggacgattaaaaggtcagttatctcgagcagagggacccacagtttcatttcaatggaaccaaaggtggaatggatccaacagcaagtggtaaaaaagcggacaaagagggattatgacttcagtcgtgcccagtctacctatttcaatgatcccaagtggcccagcatgtggtatatgcactgcagtgacaatacacatccctgccagtctgacatgaatatcgaaggagcctggaagagaggctacacgggaaagaacattgtggtcactatcctggatgacggaattgagagaacccatccagatctgatgcaaaactacgatgctctggcaagttgcgacgtgaatgggaatgacttggacccaatgcctcgttatgatgcaagcaacgagaacaagcatgggactcgctgtgctggagaagtggcagccgctgcaaacaattcgcactgcacagtcggaattgctttcaacgccaagatcggaggagtgcgaatgctggacggagatgtcacggacatggttgaagcaaaatcagttagcttcaacccccagcacgtgcacatttacagcgccagctggggcccggatgatgatggcaagactgtggacggaccagcccccctcacccggcaagcctttgaaaacggcgttagaatggggcggagaggcctcggctctgtgtttgtttgggcatctggaaatggtggaaggagcaaagaccactgctcctgtgatggctacaccaacagcatctacaccatctccatcagcagcactgcagaaagcggaaagaaaccttggtacctggaagagtgttcatccacgctggccacaacctacagcagcggggagtcctacgataagaaaatcatcactacagatctgaggcagcgttgcacggacaaccacactgggacgtcagcctcagcccccatggctgcaggcatcattgcgctggccctggaagccaatccgtttctgacctggagagacgtacagcatgttattgtcaggacttcccgtgcgggacatttgaacgctaatgactggaaaaccaatgctgctggttttaaggtgagccatctttatggatttggactgatggacgcagaagccatggtgatggaggcagagaagtggaccaccgttccccggcagcacgtgtgtgtggagagcacagaccgacaaatcaagacaatccgccctaacagtgcagtgcgctccatctacaaagcttcaggctgctcggataaccccaaccgccatgtcaactacctggagcacgtcgttgtgcgcatcaccatcacccaccccaggagaggagacctggccatctacctgacctcgccctctggaactaggtctcagcttttggccaacaggctatttgatcactccatggaaggattcaaaaactgggagttcatgaccattcattgctggggagaaagagctgctggtgactgggtccttgaagtttatgatactccctctcagctaaggaactttaagactccaggtaaattgaaagaatggtctttggtcctctacggcacctccgtgcagccatattcaccaaccaatgaatttccgaaagtggaacggttccgctatagccgagttgaagaccccacagacgactatggcacagaggattatgcaggtccctgcgaccctgagtgcagtgaggttggctgtgacgggccaggaccagaccactgcaatgactgtttgcactactactacaagctgaaaaacaataccaggatctgtgtctccagctgcccccctggccactaccacgccgacaagaagcgctgcaggaagtgtgcccccaactgtgagtcctgctttgggagccatggtgaccaatgcatgtcctgcaaatatggatactttctgaatgaagaaaccaacagctgtgttactcactgccctgatgggtcatatcaggataccaagaaaaatctttgccggaaatgcagtgaaaactgcaagacatgtactgaattccataactgtacagaatgtagggatgggttaagcctgcagggatcccggtgctctgtctcctgtgaagatggacggtatttcaacggccaggactgccagccctgccaccgcttctgcgccacttgtgctggggcaggagctgatgggtgcattaactgcacagagggctacttcatggaggatgggagatgcgtgcagagctgtagtatcagctattactttgaccactcttcagagaatggatacaaatcctgcaaaaaatgtgatatcagttgtttgacgtgcaatggcccaggattcaagaactgtacaagctgccctagtgggtatctcttagacttaggaatgtgtcaaatgggagccatttgcaaggatgcaacggaagagtcctgggcggaaggaggcttctgtatgcttgtgaaaaagaacaatctgtgccaacggaaggttcttcaacaactttgctgcaaaacatgtacatttcaaggctgagcagccatcttagatttctttgttcctgtagacttatagattattccatattattaaaaagaaaaaaaaaagccaaaaag

SEQ ID NO: 1562 - DNA, 1502 bp, Homo sapiens
cctgcgtccccgccccgcgcagccgccgcgctcctgcgctccgaggtccgaggttcccgagatgaaggtctggctgctgcttggtcttctgctggtgcacgaagcgctggaggatgttactggccaacaccttcccaagaacaagcgtccaaaagaaccaggagagaatagaatcaaacctaccaacaagaaggtgaagcccaaaattcctaaaatgaaggacagggactcagccaattcagcaccaaagacgcagtctatcatgatgcaagtgctggataaaggtcgcttccagaaacccgccgctaccctgagtctgctggcggggcaaactgtagagcttcgatgtaaagggagtagaattgggtggagctaccctgcgtatctggacacctttaaggattctcgcctcagcgtcaagcagaatgagcgctacggccagttgactctggtcaactccacctcggcagacacaggtgaattcagctgctgggtgcagctctgcagcggctacatctgcaggaaggacgaggccaaaacgggctccacctacatcttttttacagagaaaggagaactctttgtaccttctcccagctacttcgatgttgtctacttgaacccggacagacaggctgtggttccttgtcgggtgaccgtgctgtcggccaaagtcacgctccacagggaattcccagccaaggagatcccagccaatggaacggacattgtttatgacatgaagcggggctttgtgtatctgcaacctcattccgagcaccagggtgtggtttactgcagggcggaggccgggggcagatctcagatctccgtcaagtaccagctgctctacgtggcggttcccagtggccctccctcaacaaccatcttggcttcttcaaacaaagtgaaaagtggggacgacatcagtgtgctctgcactgtcctgggggagcccgatgtggaggtggagttcacctggatcttcccagggcagaaggatgaaaggcctgtgacgatccaagacacttggaggttgatccacagaggactgggacacaccacgagaatctcccagagtgtcattacagtggaagacttcgagacgattgatgcaggatattacatttgcactgctcagaatcttcaaggacagaccacagtagctaccactgttgagttttcctgacttggaaaaggaaatgtaatgaacttatggaaagcccatttgtgtacacagtcagctttggggttccttttattagtgctttgccagaggctgatgtcaagcaccacaccccaaccccagcgtctcgtgagtccgacccagacatccaaactaaaaggaagtcatccagtctattcacagaagtgttaacttttctaacagaaagcatgattttgattgcttacctacatacgtgttcctagtttttatacatgtgtaaacaattttatataatcaatcatttctattaaatgagcacgtttttgtaaaaaat

SEQ ID NO: 1563 - DNA, 804 bp, Homo sapiens
atggcgcggttcctgacactttgcacttggctgctgttgctcggccccgggctcctggcgaccgtgcgggccgaatgcagccaggattgcgcgacgtgcagctaccgcctagtgcgcccggccgacatcaacttcctggcttgcgtaatggaatgtgaaggtaaactgccttctctgaaaatttgggaaacctgcaaggagctcctgcagctgtccaaaccagagcttcctcaagatggcaccagcaccctcagagaaaatagcaaaccggaagaaagccatttgctagccaaaaggtatgggggcttcatgaaaaggtatggaggcttcatgaagaaaatggatgagctttatcccatggagccagaagaagaggccaatggaagtgagatcctcgccaagcggtatgggggcttcatgaagaaggatgcagaggaggacgactcgctggccaattcctcagacctgctaaaagagcttctggaaacaggggacaaccgagagcgtagccaccaccaggatggcagtgataatgaggaagaagtgagcaagagatatgggggcttcatgagaggcttaaagagaagcccccaactggaagatgaagccaaagagctgcagaagcgatatgggggcttcatgagaagagtaggtcgcccagagtggtggatggactaccagaaacggtatggaggtttcctgaagcgctttgccgaggctctgccctccgacgaagaaggcgaaagttactccaaagaagttcctgaaatggaaaaaagatacggaggatttatgagattttaa

SEQ ID NO: 1564 - DNA, 1284 bp, Homo sapiens
atgcatcttatcgactacctgctcctcctgctggttggactactggccctttctcatggccagctgcacgttgagcatgatggtgagagttgcagtaacagctcccaccagcagattctggagacaggtgagggctcccccagcctcaagatagcccctgccaatgctgactttgccttccgcttctactacctgatcgcttcggagaccccggggaagaacatctttttctccccgctgagcatctcggcggcctacgccatgctttccctgggggcctgctcacacagccgcagccagatccttgagggcctgggcttcaacctcaccgagctgtctgagtccgatgtccataggggcttccagcacctcctgcacactctcaacctccccggccatgggctggaaacacgcgtgggcagtgctctgttcctgagccacaacctgaagttccttgcaaaattcctgaatgacaccatggccgtctatgaggctaaactcttccacaccaacttctacgacactgtgggcacaatccagcttatcaacgaccacgtcaagaaggaaactcgagggaagattgtggatttggtcagtgagctcaagaaggacgtcttgatggtgctggtgaattacatttacttcaaagccctgtgggagaaaccattcatttcctcaaggaccactcccaaagacttctatgttgatgagaacacaacagtccgggtgcccatgatgctgcaggaccaggagcatcactggtatcttcatgacagatacttgccctgctcggtgctacggatggattacaaaggagacgcaaccgtgtttttcattctccctaaccaaggcaaaatgagggagattgaagaggttctgactccagagatgctaatgaggtggaacaacttgttgcggaagaggaatttttacaagaagctagagttgcatcttcccaagttctccatttctggctcctatgtattagatcagattttgcccaggctgggcttcacggatctgttctccaagtgggctgacttatccggcatcaccaaacagcaaaaactggaggcatccaaaagtttccacaaggccaccttggacgtggatgaggctggcaccgaggctgcagcagccaccacgttcgcgatcaaattcttctctgcccagaccaatcgccacatcctgcgattcaaccggcccttccttgtggtgatcttttccaccagcacccagagtgtcctctttctgggcaaggtcgtcgaccccacgaaaccatag

SEQ ID NO: 1565 - DNA, 1310 bp, Homo sapiens
gaataatcagaagtcagtttgggagaagtcaaaatggacacaatcttcttgtggagtcttctattgctgttttttggaagtcaagcctcaagatgctcagctcaaaaaaataccgaatttgcagtggatctttatcaagaggtttccttatctcataaggacaacattatattttcaccccttggaataactttggttcttgagatggtacaactgggagccaaaggaaaagcacagcagcagataagacaaactttaaaacaacaggaaacctcagctggggaagaattttttgtactgaagtcatttttctctgccatctcagagaaaaaacaagaatttacatttaatcttgccaatgccctctaccttcaagaaggattcactgtgaaagaacagtatctccatggcaacaaggaattttttcagagtgctataaaactggtggattttcaagatgcaaaggcttgtgcagagatgataagtacctgggtagaaagaaaaacagatggaaaaattaaagacatgttttcaggggaagaatttggccctctgactcggcttgtcctggtgaatgctatttatttcaaaggagattggaaacagaaattcagaaaagaggacacacagctgataaattttactaagaaaaatggttcaactgtcaaaattccaatgatgaaggctcttctgagaacaaaatatggttatttttctgaatcttccctgaactaccaagttttagaattgtcttacaaaggtgatgaatttagcttaattatcatacttcctgcagaaggtatggatatagaagaagtggaaaaactaattactgctcaacaaatcctaaaatggctctctgagatgcaagaagaggaagtagaaataagcctccctagatttaaagtagaacaaaaagtagacttcaaagacgttttgtattctttgaacataaccgagatatttagtggtggctgcgacctttctggaataacagattcatctgaagtgtatgtttcccaagtgacgcaaaaagttttctttgagataaatgaagatggtagtgaagctgcaacatcaactggcatacacatccctgtgatcatgagtctggctcaaagccaatttatagcaaatcatccatttctgtttattatgaagcataatccaacagaatcaattctgtttatgggaagagtgacaaatcctgacacccaggagataaaaggaagagatttagattcactgtgaatgaaaagcacagcctcagaataaaagatgatttctcaaaaataaaaaaaaaaaaaaaa

SEQ ID NO: 1566 - DNA, 1263 bp, Homo sapiens
atgccattctctgtctcatggggcgtcctcctgctggcaggcctgtgctgcctggtccccagctccctggttgaggatccccagggagatgctgcccaaaagacggatacatcccaccatgatcaaggggactgggaggaccttgcttgccagaagatctcctataacgtcaccgacctcgcctttgatttgtacaagagctggctgatctatcacaaccagcatgtcttagtcaccccaacaagcgtggctatggcctttcgaatgctctccctggggaccaaggctgacactcgcacagagatcctggaaggcctgaatgtcaacctcacagagacgcctgaggccaagatccacgaatgcttccagcaagttctccaagccctcagcaggccagacacccggctccagctgaccaccggcagtagcctgtttgttaacaagagtatgaagctagtggacacgtttttggaggataccaagaagctgtaccactcagaagcctcttccatcaacttcagggacaccgaggaggccaaagagcagatcaacaattatgtggagaaaagaactggaagaaaagtagtggatttggtcaaacacctgaaaaaagacacaagtcttgccctggtggattacatttcctttcacggcaagtggaaagataaattcaaggctgagcgcattatggtagagggcttccatgtggatgataagaccatcatcagagtgcctatgataaaccacctgggtagatttgacatccaccgggacagggagttatccagctgggtgctggcacagcactatgtggggaacgccactgccttcttcatcctgcccgatccaaagaagatgtggcagttggaagaaaaattgacctacagccaccttgaaaatatccagagagcctttgacataaggtctatcaatctacattttcccaaactgtccatttctggaacctacaaactcaagagagtccctaggaatctgggcatcaccaagatcttcagcaacgaggccgacctctctggagtcagtcaggaggcacccctgaagctctccaaggctgtgcatgtggctgtgctcaccattgatgagaaagggaccgaagccaccggagccccccatctggaggagaaggcctggtctaagtatcagacagtcatgttcaaccgacccttcctggtcatcatcaaggagtacatcaccaactttccgctcttcattggaaaagtggtgaatcccacccaaaaataa

SEQ ID NO: 1567 - DNA, 1584 bp, Homo sapiens
cgggatgcggcgcgccgcgcgttgaacctccttggcctgggcgaagctgtgtggaccaagcaagtcaggagtgtggccatgttttctgagcaggctgcccagagggcccacactctactgtccccaccatcagccaacaatgccacctttgcccgggtgccagtggcaacctacaccaactcctcacaacccttccggctaggagagcgcagctttagccggcagtatgcccacatttatgccacccgcctcatccaaatgagacccttcctggagaaccgggcccagcagcactggggcagtggagtgggagtgaagaagctgtgtgaactgcagcctgaggagaagtgctgtgtggtgggcactctgttcaaggccatgccgctgcagccctccatcctgcgggaggtcagcgaggagcacaacctgctcccccagcctcctcggagtaaatacatacacccagatgacgagctggtcttggaagatgaactgcagcgtatcaaactaaaaggcaccattgacgtgtcaaagctggttacggggactgtcctggctgtgtttggctccgtgagagacgacgggaagtttctggtggaggactattgctttgctgaccttgctccccagaagcccgcacccccacttgacacagataggtttgtgctactggtgtccggcctgggcctgggtggcggtggaggcgagagcctgctgggcacccagctgctggtggatgtggtgacggggcagcttggggacgaaggggagcagtgcagcgccgcccacgtctcccgggttatcctcgctggcaacctcctcagccacagcacccagagcagggattctatcaataaggccaaatacctcaccaagaaaacccaggcagccagcgtggaggctgttaagatgctggatgagatcctcctgcagctgagcgcctcagtgcccgtggacgtgatgccaggcgagtttgatcccaccaattacacgctcccccagcagcccctccacccctgcatgttcccgctggccactgcctactccacgctccagctggtcaccaacccctaccaggccaccattgatggagtcagatttttggggacatcaggacagaacgtgagtgacattttccgatacagcagcatggaggatcacttggagatcctggagtggaccctgcgggtccgtcacatcagccccacagccccggacactctaggttgttaccccttctacaaaactgacccgttcatcttcccagagtgcccgcatgtctacttttgtggcaacacccccagctttggctccaaaatcatccgaggtcctgaggaccagacagtgctgttggtgactgtccctgacttcagtgccacgcagaccgcctgccttgtgaacctgcgcagcctggcctgccagcccatcagcttctcgggcttcggggcagaggacgatgacctgggaggcctggggctgggcccctgactcaaaaaagtggttttgaccagagaggcccagatggaggctgttcattccctgcagtgtcggcattgtaaataaagcctggcacttgctgatgcg

SEQ ID NO: 1568 - DNA, 3355 bp, Homo sapiens
ggcacgaggggctaagggtgcgcgagtagccgccacccgttcggcgttggctctggcgtcggggtcgttgtgtcgtgacaaccgctgcggtagccgtttccgaggcagcagttgcggccgctttagccctgagcgggatctgcggctgcctgcgagtctctgctgtgccgacccttctcttcgcggaccccacgccaagcagcgaccctgagccgacagccggagcgcccggcaatggcggcctcgacggcctcgcaccggcccatcaaggggatcttgaagaacaagacctctacgacttcctctatggtggcgtcggccgaacagccccgcgggaatgtcgacgaggagctgagcaaaaaatcccagaagtgggatgaaatgaacatcttggcgacgtatcatccagcagacaaagactatggtttaatgaaaatagatgaaccaagcactccttaccatagtatgatgggggatgatgaagatgcctgtagtgacaccgaggccactgaagccatggcgccagacatcttagccaggaaattagctgcagctgaaggcttggagccaaagtatcggattcaggaacaagaaagcagtggagaggaggatagtgacctctcacctgaagaacgagaaaaaaagcgacaatttgaaatgaaaaggaagcttcactacaatgaaggactcaatatcaaactagccagacaattaatttcaaaagacctacatgatgatgatgaagatgaagaaatgttagagactgcagatggagaaagcatgaatacggaagaatcaaatcaaggatctactccaagtgaccaacagcaaaacaaattacgaagttcatagacgagatttgttcaacactgcaattgtttgttagatgtaaaccctgtgactatagtacgttgcttcttgttcttcacaattcatgacttaagtaccaaaatgcataccagttattatatattgccaagaattaaatgataaacttagagactgattagactgaaaatgcctaatcgatatatatattcttgtgcctagtactttaccacaaatacagtgtaatatcatcagtccaaaactgcattacttttgtaaaaacactggttaatttgtataagatattatagagctttttatgctttagaagttaaacaatatctttgggggggaactaatttattttcatcacttgaaatgtggtagctcttacaaagtttattgatttgatttttttaaaaatcaaaagccaattgaacaacaggatatatagactgataaatatttaggctgaatagtattttaacacttgtcttcaacttgatttgtctgtttaattgaaaagaattataagagttactgttgcattttctgacctactatttttaaaattcctgttgagtttctttgtgtttacaaggaaaggactgaactttttctcatcaaaactagcttttttccccacaaataaattatcaggttaaactttcaccaatgtctgctctgttttttgtttttggggggtttttgtttgtttttgttttttaatgtttttggtacactgggcagacttcagagcagttttttaaaaaaataaatattctaatgtagctatctcgccattccctttaaatacctgtcttaacctcctgcttttctttcctactcctttccacacatacgcacacaatcttctaccttttaaaggatcattaagactgtcaccacattaggagctctttctctcactcttctgtcatttgctgctatgttgaaattcttattttgaccatcaatgcctatgaattcttctaatacgtgaagaaaatagtttgagtagcagcagtgctataggtgggaaatacagtttagctgctgaatttctatacctctctgatttacagattgctaattaaatggctattattagtttggattaattagacttaagaaaacaactaactgagggttttttttgtttgttttttgagggttttctttgcatgagagttgtatgtaaccagtgatatgattattcctgaatgtacagacagaagtaagcctggacattgttaaatagtccctgctttaagggactacgataatgtgtactatgacaaacgtgctttattcttctaacgcagtaagaattaggtggaattttttccttcaaccaagtgcaggaaagccctgtgtgtcttggtttagttatggtttcatttctagccatacaattgatgaattgtgtacaacttttgttagtaccaaaataatctgttatatgaacagacttctaaaataacgtctgtatattttatatatagatacatatatgaaagaaggcttttattgaacagcttatcttccacttgcaggtttatggaaacagcagtatttgaaaataaataaaaagtgggagaattccttgctgttagaagaatgtggccattattttgattttttgaatgagatatataatcaaagtactgctgaactgtgagtgcagtattctaaacatttcagctaggaataccactgatttagaaacaaaactgtttgtctctggtttctgaatttaaaatgttgggattacctgtttaaatctgtcttgggggatgtagagattaagtctgtacatgtgcgtgcacatatattcatgcaccctctgattttggttttcttgtttctgagttcttagaaagtacccacatactcttttttttttttttgtagaagtagctgtcatagagtgaagaaaaggataagactttaaacagttgattctttttgtgttttctacaaactattttttgaaatttaaatcacaaactcattttctggtttttagaaagtagatgatgatttcagaggagtaaggcatgccaagcagcatgctcagtggggttttaggctgtcacatgcagctgagaaaaggtatgttcaagtcataagtaggtaattgatagggtatgaactagtcaaaatatgaaccattatgattcaagttagattttcctctggagagacagatctgaatgttcagttctagccaaggtagattttactttcaactttttaatcagtatcactttctgtgcttaactatttggtgttaccttgtctgttttcatttgtctaaaattctgcagagatgactaaaatttgacataatggtgtaaatggattgttaaggtaactttcagttgaagattaaagcaagatgccattttccccatgactttggttttgtttacatttttccctttcagttagtatacactacacgtactgtaataaaatacaataatatgaaaaaaaaaaaaaaaaaaaaaaaaaaaaaaaaaaa

SEQ ID NO: 1569 - DNA, 3270 bp, Homo sapiens
cgccgcccggtgatattgacaataggagagagaaaggggcattgactgggacccaccgcgggtagcgaaaggtggctctggcagcggcggctccagctcctgcggctcctcctccttattctgtccccttctcttgctgccgctgcagatccagtcttcctccctcccttccccccctccccacgtcgtcgccgccgccgccgggtccggggcaacgagctgaggcgccgcccgccaggaatgtgagcgaggagccaccggcggagccgcaacggggtcggtgccgatttgatgggacgggcccgcgggggaggatcgtgaggccgccgccgccaccggaacgctgaggttcgggtccggccgtgaggcctagaggctccgccgccgcggaaccggagggaccccgtaccggacagccgtcgccccaggctccccgcagctgcccggacctccccctgcacgtcccggtcccgccgcccgcccccgctgcggccacctcgcccgtctcccgcccctccaagccacagatcatcttcggattcttccccagaagcttcaagtagggatatgtcctcagcaccaactactcctccatcagtggataaagtagacggattttctcggaagtccgtcagaaaagccagacagaagaggtcgcaaagttcctcacagtttaggtctcaaggcaagcctattgagttaacacctctgccgctgctaaaagacgttccatcctcagagcagcctgaactgttcctaaagaaacttcagcagtgctgtgtcatttttgacttcatggacacgctatctgatcttaaaatgaaagaatacaagcgctccactcttaatgaactggtggactacattacaataagcagaggctgtttgacagagcagacttaccctgaagtagttagaatggtatcttgcaatatattcagaactctccctcctagtgacagcaatgaatttgatccagaagaagatgaacctacccttgaggcatcgtggccacacttacagcttgtatatgaatttttcatacgatttttggaaagccaagaattccaacccagcattgccaaaaaatatatagatcagaaatttgtattacagcttctggagctatttgacagcgaagaccctcgggaacgggactacttaaaaacagtcttacacagaatttatggcaagtttcttggtcttagagcatttatccgaaaacagattaacaatatttttctaaggtttgtttatgaaacagaacacttcaatggtgtagctgaactgctggaaatattaggaagtattatcaatggctttgctttacctcttaaggcagaacacaaacagtttctggtgaaagtattgatccctttacacactgtcaggagcttatcactcttccatgcacagctggcatattgtatagtacagtttctggagaaagatccttcactcacagaaccagttattagggggttaatgaaattttggcctaaaacatgtagtcaaaaagaggtcatgttccttggggaactggaagaaatattggatgtgattgaaccttcacaatttgttaaaatccaagaacctttgtttaaacaaatcgccaagtgtgtatctagcccccattttcaggtggcagaaagagcactctattattggaataatgaatacatcatgagtttgatagaagaaaactctaacgtcatccttcccatcatgttttccagcctttataggatttcaaaagaacattggaatccggctattgtggcgttggtgtacaatgtgttgaaggcatttatggaaatgaacagcaccatgtttgacgagctgacagccacatacaagtcagatcgtcagcgtgagaaaaagaaagaaaaggagcgtgaagaattgtggaaaaaattggaggatctggagttaaagagaggtcttagacgtgatggaataattccaacttaacaaaaacaatgacaacaacattactaacctgtggagtcacacgtttatgtagtagaagatggagcaacagttttctgtattgtgcaactttacagtagatttcacctttgtttcattattacagcagcactgtatatacctgtctctaagtaaaggaaaaaacaaaataaggacttcaatccaaagtttggacagtagatggacttctcagaactttgcaaacataatcattgttctcaccctcttttaaaaaaaaaaaatcggtcttcaaagatctgttgatgaaattgctatgttaaaattccattatcgggagttccttatttatcactagcagagagtatgatacaattttcaaatgtgaacaatcttaaatttagcttgtctttctgctaagctgttaaatgtatttatagtaaaggaagaaaaaaagactgtcatttccttataagtttgtgtaacatcctcctctggataacttgactgtaatttaacatctttttcttttgcacatcttcctgagttgaatgtccacgtggaatggggtcatgaattataaaagtccctgataaaagttttgtttactggggtgaacatctttccagtaaccaggtagtcctggtactcctttagttttaaaattaggagttaagagagaagaggtgataaacatagtagggaagggaatatcggattcatgcatcagtttatggtgaatccaaatcaatgtcttgaatcctttgaaaacaggcactgggacatcacaggcttcagtacctgaccagtattagttgcatatatcattgaacacacataccagagatgttttagaaatgtgagaaaaacatccttttggaccatttgaaataagaaagacaaacactaaacaatacaaccatgaaattgatcaccgggattgcaaatctaattgggaaaagagttgagcaaacagcttggactgtttggagttgttgccttactttttaatatgtatttataaagtattccagcaaaagaggatgtagcctctgggaaaaaacaaacatgttacagtgttttttgtagattctcgttctatatctcatcacagcgccagccctgtttttagccggaaaggattcaggataaacattattatgcattctgaattggatgcatattcctaactactgtatttgttaccaaaagtggttctacaaatgctactgaaaaaaatctggaaattcctaatgtcctgagtattaataataaagtttaaaaatgcttttatatcaaaggtgcatcgtgaccaaattgttt

SEQ ID NO: 1570 - DNA, 985 bp, Homo sapiens
gcggagctgggtgcgagcgccctaccgctttcgctttcccttcgcggtgcccactccactccttgtgcggcgctaggccccccgtcccggtcatggccatgctcagggtccagcccgaggcccaagccaaggtggatgtgtttcgtgaagacctctgtaccaagacagagaacctgctcgggagctatttccccaagaagatttctgagctggatgcatttttaaaggagccagctctcaatgaagccaacttgagcaatctgaaggccccattggacatcccagtgcctgatccagtcaaggagaaagagaaagaggagcggaagaaacagcaggagaaggaagacaaggatgaaaagaagaagggggaggatgaagacaaaggtcctccctgtggcccagtgaactgcaatgaaaagatcgtggtccttctgcagcgcttgaagcctgagatcaaggatgtcattgagcagctcaacctggtcaccacctggttgcagctgcagatacctcggattgaggatggtaacaattttggagtggctgtccaggagaaggtgtttgagctgatgaccagcctccacaccaagctagaaggcttccacactcaaatctctaagtatttctctgagcgtggtgatgcagtgactaaagcagccaagcagccccatgtgggtgattatcggcagctggtgcacgagctggatgaggcagagtaccgggacatccggctgatggtcatggagatccgcaatgcttatgctgtgttatatgacatcatcctgaagaacttcgagaagctcaagaagcccaggggagaaacaaagggaatgatctattgagagccctctctcccattctgtgatgagtacagcagagaccttcctgctttttactggggactccagattttccccaaacttgcttctgttgagatttttccctcaccttgcctctcaggcacaataaatatagttataccact

SEQ ID NO: 1571 - DNA, 1017 bp, Homo sapiens
ggggggctcccccgcaggcggtagcgaaggcagcagcagcggtggcgacatgagcagcggggcggcgtccgggacagggcgggggcggccccggggcgggggacctgggcccggggaccccccgcccagcgagacacacaagctggtggtcgtgggcggcggcggcgtgggcaagagcgcgctgaccatccagttcatccagtcctacttcgtgtctgactacgaccccactattgaggactcctacacgaagatctgcagtgtggatggcatcccagcccggctggacatcctggacaccgcgggccaggaagagttcggggccatgagagagcagtacatgcgtgctggccacggcttcctgctggtgttcgccattaacgaccggcagagtttcaacgaggtgggcaagctcttcacgcagattctgcgggtcaaggaccgcgacgacttccccgttgtgttggtcgggaacaaggcagatctggagtcacagcgccaggtcccccgatcagaagcctctgccttcggcgcctcccaccacgtggcctactttgaggcctcggccaaactgcgtctcaacgtggacgaggcttttgagcagctggtgcgggctgtccggaaataccaggaacaagagctcccaccgagccctcccagtgcccccaggaagaagggcgggggctgcccctgcgtcctcctgtagcccaggcaagagagaagcaaccaccacaagctctcgggactagctgccttcgcaccttgctgtgtgacctgaggccctcactgagcctcaatttcctcatctgggtctcccaggacacatcacatacccacccttacttcctggcctcttctgggctactgccactgtgtgccttctgccaacgcctcctgtccccacctaagcctggtgggggtgaggggctccgggtcactgctgtatataactcccctcccccagaaaaataaatgtcactgccaacgaaaaaaaaaaaaaaaaaaaaaaaaaaaaaa

SEQ ID NO: 1572 - DNA, 607 bp, Homo sapiens
ggactgttgaagacaggtctccacacacagctccagcagccacatttgcaaccttggccatctgtccagaacctgctcccacctcaggcccaggccaaccgtgcactgctgcaatgggctctgagctggagacggcgatggagaccctcatcaacgtgttccacgcccactcgggcaaagagggggacaagtacaagctgagcaagaaggagctgaaagagctgctgcagacggagctctctggcttcctggatgcccagaaggatgtggatgctgtggacaaggtgatgaaggagctagacgagaatggagacggggaggtggacttccaggagtatgtggtgcttgtggctgctctcacagtggcctgtaacaatttcttctgggagaacagttgagcagacagccacattgggcagcgcccttcctctccaccctcccagacctgcctcttccccctgcttccacctcaccccacttatccctctccataaccccacccttgcccaccccacccccacccccaccaagggcgcaagagtagcggtccaagcctgcaactcatctttcattaaaggcttctctctcaccagcaaaaaaaaaaaaa

SEQ ID NO: 1573 - DNA, 1095 bp, Homo sapiens
tgccgcccaggacccgcagcagagacgacgcctgcagcaaggagaccaggaaggggtgagacaaggaagaggatgtctgagctggagaaggccatggtggccctcatcgacgttttccaccaatattctggaagggagggagacaagcacaagctgaagaaatccgaactcaaggagctcatcaacaatgagctttcccatttcttagaggaaatcaaagagcaggaggttgtggacaaagtcatggaaacactggacaatgatggagacggcgaatgtgacttccaggaattcatggcctttgttgccatggttactactgcctgccacgagttctttgaacatgagtgagattagaaagcagccaaacctttcctgtaacagagacggtcatgcaagaaagcagacagcaagggcttgcagcctagtaggagctgagctttccagccgtgttgtagctaattaggaagcttgatttgctttgtgattgaaaaattgaaaacctctttccaaaggctgttttaacggcctgcatcattctttctgctatattaggcctgtgtgtaagctgactggccccagggactcttgttaacagtaacttaggagtcaggtctcagtgataaagcgtgcaccgtgcagcccgccatggccgtgtagaccctaacccggagggaaccctgactacagaaattaccccggggcacccttaaaacttccactacctttaaaaaacaaagccttatccagcattatttgaaaacactgctgttctttaaatgcgttcctcatccatgcagataacagctggttggccggtgtggccctgcaagggcgtggtggcttcggcctgcttcccgggatgcgcctgatcaccaggtgaacgctcagcgctggcagcgtcctggaaaaagcaactccatcagaactcgcaatccgagccagctctgggggctccagcgtggcctccgtgacccatgcgattcaagtcgcggctgcaggatccttgcctccaacgtgcctccagcacatgcggcttccgagggcactaccgggggctctgagccaccgcgagggcctgcgttcaataaaaag

SEQ ID NO: 1574 - DNA, 2338 bp, Homo sapiens
gtagtgccgccgggactcttggcgggtgaaggtgtgtgtcagcttttgcgtcactcgagccctgggcgctgcttgctaaagagccgagcacgcgggtctgtcatcatgtcgcgttacgggcggtacggaggagaaaccaaggtgtatgttggtaacctgggaactggcgctggcaaaggagagttagaaagggctttcagttattatggtcctttaagaactgtatggattgcgagaaatcctccaggatttgcctttgtggaattcgaagatcctagagatgcagaagatgcagtacgaggactggatggaaaggtgatttgtggctcccgagtgagggttgaactatcgacaggcatgcctcggagatcacgttttgatagaccacctgcccgacgtccctttgatccaaatgatagatgctatgagtgtggcgaaaagggacattatgcttatgattgtcatcgttacagccggcgaagaagaagcaggtcacggtctagatcacattctcgatccagaggaaggcgatactctcgctcacgcagcaggagcaggggacgaaggtcaaggtcagcatctcctcgacgatcaagatctatctctcttcgtagatcaagatcagcttcactcagaagatctaggtctggttctataaaaggatcgaggtatttccaatccccgtcgaggtcaagatcaagatccaggtctatttcacgaccaagaagcagccgatcaaagtccagatctccatctccaaaaagaagtcgttccccatcaggaagtcctcgcagaagtgcaagtcctgaaagaatggactgaagctctcaagttcaccctttagggaaaagttattttgtttacattattataagggatttgtgatgtctgtaaagtgtaacctaggaaagataattcaaccatctaatcaaaatggatctggattactatgtaaattcacagcagtaaggataatataaattttgttgaatgtatgaacatcatatggtctgaaaatgtgggtttttatttggcacatttaaataacatgtttctaactagatttttgatttgtgttcaatattaacacttcttaatttgatatatttgagagtcagacattataattgttaatccttattcatacatacctacattcagaattgaaaggtgttggttaagtcttgaacatcactattctatgcataaaacttggccaggatcttaagggactttgaaaattccatcttacccttgtagctctgggtaagatgacctgagtcccttatgatacagcctgaatgcatcatgacagatccttagttagctaatccgtttgaagttggtgttagtaggtattgtatgatcagtggtgaagcaagtaggaccactgatgtgtctaaatgagcatgacaggaactaaacgaaactgattaaatgtatgagaaatagaaactgatttctggatgatctttatactaattgcagctttcaggctactaggtggcatagtgttaattaggactccccaagatatggggagttctactctcaatggtcttgtttctttgctttctacattagttaaccagttttataccaaaaaatgcatgtttgaggaattgtctgaaattgggacaaaacaccttcatgtaaaccagctttgcaaaattttccagcccagatactcttcatctattcaaatggattgtcttattctgagcaaagacctgttgttaatcttcaagctaggttttgcagttcccaaccacaacattcttctattttgccaggctggtgcaaagtaattaaagatgtcaatcagaaatgtcaatgagactaaagtggttttgtaaatctcagctatatttagcaacactccatgtagctaatattttttggtagcatctggtagaccttagaatgttacatagccagtaggttctttattcaaattttaagtatcttaagaatagtagggcagtaacagttacttttgagagttttctggtcaagcttttaccaggcattctctagccttggtacaaaaaaaaaaaaaacctgctggttgcgcagatacctaggcttgtccattttatgcatttcagcaaagtcattggagactattgcaacttgggaatactggtctgcatcaagtttaattcggtagtttgaccgctagtatgttggaagttatttggattgtttttggaattttgactggctgaattatggttggtataaagttatgtgtataactggcaggcttatttatctgttgcacttggttagctttaattgttctgtattatttaaagataagtttactcaacaataa

SEQ ID NO: 1575 - DNA, 1766 bp, Homo sapiens
cggtcaggtccagcacttgggagctgactgtgctggaggtgacaggctttgcggggtccgcctgtgtgcaggagtcgcaaggtcgctgagcaggacccaaaggtggcccgaggcagccgggatgacagctctccccaggaatcctgctgcctgctgagaaacatggtcagcaagtcccgctggaagctcctggccatgttggctctggtcctggtcgtcatggtgtggtattccatctcccgggaagacagtttttattttcccatcccagagaagaaggagccgtgcctccagggtgaggcagagagcaaggcctctaagctctttggcaactactcccgggatcagcccatcttcctgcggcttgaggattatttctgggtcaagacgccatctgcttacgagctgccctatgggaccaaggggagtgaggatctgctcctccgggtgctagccatcaccagctcctccatccccaagaacatccagagcctcaggtgccgccgctgtgtggtcgtggggaacgggcaccggctgcggaacagctcactgggagatgccatcaacaagtacgatgtggtcatcagattgaacaatgccccagtggctggctatgagggtgacgtgggctccaagaccaccatgcgtctcttctaccctgaatctgcccacttcgaccccaaagtagaaaacaacccagacacactcctcgtcctggtagctttcaaggcaatggacttccactggattgagaccatcctgagtgataagaagcgggtgcgaaagggtttctggaaacagcctcccctcatctgggatgtcaatcctaaacagattcggattctcaaccccttcttcatggagattgcagctgacaaactgctgagcctgccaatgcaacagccacggaagattaagcagaagcccaccacgggcctgttggccatcacgctggccctccacctctgtgacttggtgcacattgccggctttggctacccagacgcctacaacaagaagcagaccattcactactatgagcagatcacgctcaagtccatggcggggtcaggccataatgtctcccaagaggccctggccattaagcggatgctggagatgggagctatcaagaacctcacgtccttctgacctgggcaagagctgtagcctgtcggttgcctactctgctgtctgggtgacccccatgcgtggctgtgggggtggctggtgccagtatgacccacttggactcaccccctcttggggagggagttctgggcctggccaggtctgagatgaggccatgcccctggctgctcttatggagccgagatccagtcagggtgggggcgctggagccgtgggagcccggccagggcagggggctcgtcgctgtggcaccccctctctgccagcaccaagagattatttaatgggctatttaattaaggggtaggaaggtgctgtgggctggtcccacacatccaggaaagaggccagtagagaattctgcccactttttataaaaacttacagcgatggccccaccaaggcctagacacggcactggcctcccaggagggcaggggcattgggaatgggtgggtgccctccagagaggggctgctacctcccagcaggcatgggaagagcactggtgtgggggttccaccgagaaggggacctcatctagaaaagaggttacaaacctaccattaaactatttttcctaaaacggaaaaaaaaaaaaaaaaaaaaaaaaa

SEQ ID NO: 1576 - DNA, 7758 bp, Homo sapiens
cagaggtctagcagccgggcgccgcgggccgggggcctgaggaggccacaggacgggcgtcttcccggctagtggagcccggcgcggggcccgctgcggccgcaccgtgaggggaggaggccgaggaggacgcggcgccggctgccggcgggaggaagcgctccaccagggcccccgacggcactcgtttaaccacatccgcgcctctgctggaaacgcttgctggcgcctgtcaccggttccctccattttgaaagggaaaaaggctctccccacccattcccctgcccctaggagctggagccggaggagccgcgctcatggcgttcagcccgtggcagatcctgtcccccgtgcagtgggcgaaatggacgtggtctgcggtacgcggcggggccgccggcgaggacgaggctggcgggcccgagggcgaccccgaggaggaggattcgcaagccgagaccaaatccttgagtttcagctcggattctgaaggtaattttgagactcctgaagctgaaaccccgatccgatcacctttcaaggagtcctgtgatccatcactcggattggcaggacctggggccaaaagccaagaatcacaagaagctgatgaacagcttgtagcagaagtggttgaaaaatgttcatctaagacttgttctaaaccttcagaaaatgaagtgccacagcaggccattgactctcactcagtcaagaatttcagagaagaacctgaacatgattttagcaaaatttccatcgtgaggccattttcaatagaaacgaaggattccacggatatctcggcagtcctcggaacaaaagcagctcatggctgtgtaactgcagtctcaggcaaggctctgccttccagcccgccagacgccctccaggacgaggcgatgacagaaggcagcatgggggtcaccctcgaggcctccgcagaagctgatctaaaagctggcaactcctgtccagagcttgtgcccagcagaagaagcaagctgagaaagcccaagcctgtccccctgaggaagaaagcaattggaggagagttctcagacaccaacgctgctgtggagggcacacctctccccaaggcatcctatcacttcagtcctgaagagttggatgagaacacaagtcctttgctaggagatgccaggttccagaagtctccccctgacattaaagaaactcccggcactctcagtagtgacaccaacgactcaggggttgagctgggggaggagtcgaggagctcacctctcaagcttgagtttgatttcacagaagatacaggaaacatagaggccaggaaagcccttccaaggaagcttggcaggaaactgggtagcacactgactcccaagatacaaaaagatggcatcagtaagtcagcaggtttagaacagcctacagacccagtggcacgagacgggcctctctcccaaacatcttccaagccagatcctagtcagtgggagagccccagcttcaacccctttgggagccactctgttctgcagaactccccacccctctcttctgagggctcctaccactttgacccagataactttgacgaatccatggatccctttaaaccaactacgaccttaacaagcagtgacttttgttctcccactggtaatcacgttaatgaaatcttagaatcacccaagaaggcaaagtcgcgtttaataacgagtggctgtaaggtgaagaagcatgaaactcagtctctcgccctggatgcatgttctcgggatgaaggggcagtgatctcccagatttcagacatttctaatagggatggccatgctactgatgaggagaaactggcatccacgtcatgtggtcagaaatcagctggtgccgaggtgaaaggtgagccagaggaagacctggagtactttgaatgttccaatgttcctgtgtctaccataaatcatgcgttttcatcctcagaagcaggcatagagaaggagacgtgccagaagatggaagaagacgggtccactgtgcttgggctgctggagtcctctgcagagaaggcccctgtgtcggtgtcctgtggaggtgagagccccctggatgggatctgcctcagcgaatcagacaagacagccgtgctcaccttaataagagaagagataattactaaagagattgaagcaaatgaatggaagaagaaatacgaagagacccggcaagaagttttggagatgaggaaaattgtagctgaatatgaaaagactattgctcaaatgattgaagatgaacaaaggacaagtatgacctctcagaagagcttccagcaactgaccatggagaaggaacaggccctggctgaccttaactctgtggaaaggtccctttctgatctcttcaggagatatgagaacctgaaaggtgttctggaagggttcaagaagaatgaagaagccttgaagaaatgtgctcaggattacttagccagagttaaacaagaggagcagcgataccaggccctgaaaatccacgcagaagagaaactggacaaagccaatgaagagattgctcaggttcgaacaaaagcaaaggctgagagtgcagctctccatgctggactccgcaaagagcagatgaaggtggagtccctggaaagggccctgcagcagaagaaccaagaaattgaagaactgacaaaaatctgtgatgagctgattgcaaagctgggaaagactgactgagacactccccctgttagctcaacagatctgcatttggctgcttctcttgtgaccacaattatcttgccttatccaggaataattgcccctttgcagagaaaaaaaaaaaacttaaaaaaagcacatgcctactgctgcctgtcccgctttgctgccaatgcaacagccctggaagaaaccctagagggttgcatagtctagaaaggagtgtgacctgacagtgctggagcctcctagtttccccctatgaaggttcccttaggctgctgagtttgggtttgtgatttatctttagtttgttttaaagtcatctttactttcccaaatgtgttaaatttgtaactcctctttggggtcttctccaccacctgtctgatttttttgtgatctgtttaatcttttaattttttagtatcagtggttttatttaaggagacagtttggcctattgttacttccaatttataatcaagaaggggctctggatccccttttaaattacacacactctcacacacatacatgtatgtttatagatgctgctgctcttttccctgaagcatagtcaagtaagaactgctctacagaaggacatatttccttggatgtgagaccctattttgaaatagagtcctgactcagaacaccaacttaagaatttgggggattaaagatgtgaagaccacagtcttgggttttcatatctggagaagactatttgccatgacgttttgttgccctggtatttggacactcctcagctttaatgggtgtggcccctttagggttagtcctcagactaatgatagtgtctgctttctgcatgaacggcaatatgggactccctccaagctagggtttggcaagtctgccctagagtcatttactctcctctgcctccatttgttaatacagaatcaacatttagtcttcattatctttttttttttttttgagacagagtttcgatctattttaagtatgtgaagaaaatctacttgtaaaaggctcagatcttaattaaaaggtaattgtagcacattaccaattataaggtgaagaaatgttttttcccaagtgtgatgcattgttcttcagatgttgaaaagaaagcaaaaaataccttctaacttaagacagaatttttaacaaaatgagcagtaaaagtcacatgaaccactccaaaaatcagtgcattttgcatatttttaaacaaagacagcttgttgaatactgagaagaggagtgcaaggagaaggtctgtactaacaaagccaaattcctcaagctcttactggactcagttcagagtggtgggccattaaccccaacatggaatttttccatataaatctcaatgaattccctttcatttgaataggcaaacccaaatccatgcaagtgttttaaagcactgtcctgtcttaatcttacatgctgaaagtcttcatggtgatatgcactatattcagtatacgtatgttttcctacttctcttgtaaaactgttgcatgatccaacttcagcaatgaattgtgcctagtggagaacctctatagatcttaaaaaatgaattattctttagcagtgtattactcacatgggtgcaatctttagccccagggaggtcaataatgtcttttaaagccagaagtcacattttaccaatatgcatttatcataattggtgcttaggctgtatattcaagcctgttgtcttaacattttgtataaaaaagaacaacagaaattatctgtcatttgagaagtggcttgacaatcatttgagctttgaaagcagtcactgtggtgtaatatgaatgctgtcctagtggtcatagtaccaagggcacgtgtctccccttggtataactgatttcctttttagtcctctactgctaaataagttaattttgcattttgcagaaagaaacattgattgctaaatctttttgctgctgtgttttggtgttttcatgtttacttgttttatattgatctgttttaagtatgagaggcttatagtgccctccattgtaaatccatagtcatctttttaagcttattgtgtttaagaaagtagctatgtgttaaacagaggtgatggcagcccttccctagcacactggtggaagagaccccttaagaacctgaccccagtgaatgaagctgatgcacagggacgaccaaaggaccttcgttaagtgataattgtcctggcctctcagccatgaccgttatgaggaaatatcccccattcgaacttaacagatgcctcctctccaaagagaattaaaatcgtagcttgtacagatcaagagaatatactgggcagaatgaagtatgtttgtttatttttctttaaaaataaaggattttggaactctggagagtaagaatatagtatagagtttgcctcaacacatgtgagggccaaataacctgctagctaggcagtaataaactctgttacagaagagaaaaagggccgggcacagtggcttattcctgtaatcccaacactgtggaaggccgaggcaggaggatcacttgagtccaggagtttgaaacctacctaggcaacatggtgaaaccttgtctctaccaaaataaaaattagctgggcatggtggcacgtgcctgtggtcccagctacttgggaggctgaggtgggagcctgggaggtcaaggctgcagtgagccatgatcatgccactgcactccatcctgggtgacagcaagatcttgtctcaaaaaaaaaaaaaaaaaccaggagtgaaaaaggaaagtagaaggcagctgctggcctagatgttggtttgggaatattaggtgatcctgttgagattctggatccagagcaatttctttagcttttgactttgccaaagtgtagatagcctttatccagcagtattttaagtggggaatgcaacgtgaggccaactgaacaattccccccgtggctgcccagatagtcacagtcaaggttggagagtctccttccagccagtgacctacccaaaccttttgttctgtaaaactgctctggaaataccgggaagcccagttttctcacgtggtttctagcttcttcagactcagcccaaattaggaagtgcagaagcacatgatggtgaaaaacctaggatttggcagccttccagaatggtatggaatctgagggaagatttatgtttcgttttggaggatagctcaagttgaattttctttccagccagttaccctttcaacctacccatactttgtacaactcttacacaaatacttagatatttattagatagccctgaattcactctaattataaacagggagtgtaaactgcccccagatgttcctgggctgggtaaaagcagctggagtgaagcactcattttccataaaggtaacaaagggcagctcagtggttactcaagctcaaaagggtttttttaagagcaagcattggttaagtctgtgtatactgagttggaagtgatttcagcacattcttttttagtgggagtgaaagttctgaagcccccttttaacttcctcttggtttttcattataattggtagccatctcatgaactgtctctgactgttgtctctttgtggtcatgtgattgtgagcttgctttctgacttgcatttctgactttatcctgttgttaggaagatagaaactaggttttgaaagattacatgattcaagcgagggattttaaagtaaagatgtatttattctgaagaatctaaaagataacagattatttgcttatgaaagaacaatatagtctgggaatcccagaatgtcaagccaaaggtctaagaagtcatctccttcaaatactttaataaagaagtatttcgaggagatatctgtccaaaaaggtttgactggcctccagattccagttatttttaaaaagcaacttaccactaaatccttgagtctccatagagtaacagtaaagaaactgatgtaacagactctcctctcaaaggatctcctctggaagagactatcagcggcagatctctccagggaagacccatcccctagtgccagagcttgcatcctggagactaaagattgcacttttttgtagttttttgtccaaatgcaatcccatttctgtgcctcttagcatgcagttagatttggacaaacaagattcctaaggaatgactttattaactataatatggttacagctattatataaatatatattctggttatagttctaatatggagatgttgtgtgcaatgctggcctgtggtggtctgtgtaatgctttaacttgtatggaggaggccaggctcagagctgagatgtggcctgaaccttccctgtatcgatcctttaatttagaactgtcaagatgtcactttctccccctctgccttttagtggtatctgacatatactcaaaacagtaatttcctggtcacatcattaactgctaattctgtatttataaagaattttcagatggacatgtacaaatttgaactcaaaccatccccagtccagatacagggcagcgtgtaggtgaccacaccagagcctcagcctcggtccttctcagccgtcgggataggatccaggcatttcttttaaatctcagaggtagcagtaaacttttcagtattgctgttagcaagtgtgtgtttgccaatagatacccattatactaatgtgccaagtaaatgttcattgcacatctgcttccactgtgttcccacgggtgccatgaagtgtgtgaggagcccctcatctggagggatgagtgctgcgttgactactgctatcaggattgtgttgtgtggaatattcatctacataaattttatatgcacagtaatttccctttttatatgtcaagtaactatttgtaaaagttatactcacaaattattataatgattactaatatattttttccatgtttcattgcctgaataaaaactgtttaccactgttaaaaaaaaaaaaaaaaaaaaaaa

SEQ ID NO: 1577 - DNA, 915 bp, Homo sapiens
atgatttacacaatgaagaaagtacatgcactttgggcttctgtatgcctgctgcttaatcttgcccctgcccctcttaatgctgattctgaggaagatgaagaacacacaattatcacagatacggagttgccaccactgaaacttatgcattcattttgtgcattcaaggcggatgatggcccatgtaaagcaatcatgaaaagatttttcttcaatattttcactcgacagtgcgaagaatttatatatgggggatgtgaaggaaatcagaatcgatttgaaagtctggaagagtgcaaaaaaatgtgtacaagagataatgcaaacaggattataaagacaacattgcaacaagaaaagccagatttctgctttttggaagaagatcctggaatatgtcgaggttatattaccaggtatttttataacaatcagacaaaacagtgtgaacgtttcaagtatggtggatgcctgggcaatatgaacaattttgagacactggaagaatgcaagaacatttgtgaagatggtccgaatggtttccaggtggataattatggaacccagctcaatgctgtgaataactccctgactccgcaatcaaccaaggttcccagcctttttgaatttcacggtccctcatggtgtctcactccagcagacagaggattgtgtcgtgccaatgagaacagattctactacaattcagtcattgggaaatgccgcccatttaagtacagtggatgtgggggaaatgaaaacaattttacttccaaacaagaatgtctgagggcatgtaaaaaaggtttcatccaaagaatatcaaaaggaggcctaattaaaaccaaaagaaaaagaaagaagcagagagtgaaaatagcatatgaagaaatttttgttaaaaatatgtga

SEQ ID NO: 1578 - DNA, 1221 bp, Homo sapiens
ccgaacgcccgcagcagggtcagaagggaggtggccggtctccgtcgtgacctctgacggtttctgagcgttggcctttggcacgcgctacacccttttgctttggttctgccatgccgatgtaccaggtaaagccctatcacgggggcggcgcgcctctccgtgtggagcttcccacctgcatgtaccggctccccaacgtgcacggcaggagctacggcccagcgccgggcgctggccacgtgcaggaagagtctaacctgtctctgcaagctcttgagtcccgccaagatgatattttaaaacgtctgtatgagttgaaagctgcagttgatggcctctccaagatgattcaaacaccagatgcagacttggatgtaaccaacataatccaagcggatgagcccacgactttaaccaccaatgcgctggacttgaattcagtgcttgggaaggattacggggcgctgaaagacatcgtgatcaacgcaaacccggcctcccctcccctctccctgcttgtgctgcacaggctgctctgtgagcacttcagggtcctgtccacggtgcacacgcactcctcggtcaagagcgtgcctgaaaaccttctcaagtgctttggagaacagaataaaaaacagccccgccaagactatcagctgggattcactttaatttggaagaatgtgccgaagacgcagatgaaattcagcatccagacgatgtgccccatcgaaggcgaagggaacattgcacgtttcttgttctctctgtttggccagaagcataatgctgtcaacgcaacccttatagatagctgggtagatattgcgatttttcagttaaaagagggaagcagtaaagaaaaagccgctgttttccgctccatgaactctgctcttgggaagagcccttggctcgctgggaatgaactcaccgtagcagacgtggtgctgtggtctgtactccagcagatcggaggctgcagtgtgacagtgccagccaatgtgcagaggtggatgaggtcttgtgaaaacctggctccttttaacacggccctcaagctccttaagtgaattgccgtaactgattttaaagggtttagattttaagaatggtgctctttcatgcctattatcagtaaggggacttgtattagagtcagagtctttttatttaggccagttgtcaagtgtcaataaaagcgcatcatgtaattta

SEQ ID NO: 1579 - DNA, 4177 bp, Homo sapiens
tctctcccccgccccccaggctcccccggtcgctctcctccggcggtcgcccgcgctcggtggatgtggctggcagctgccgccccctccctcgctcgccgcctgctcttcctcggccctccgcctcctcccctcctccttctcgtcttcagccgctcctctcgccgccgcctccacagcctgggcctcgccgcgatgccggagaagaggcccttcgagcggctgcctgccgatgtctcccccatcaactacagcctttgcctcaagcccgacttgctggacttcaccttcgagggcaagctggaggccgccgcccaggtgaggcaggcgactaatcagattgtgatgaattgtgctgatattgatattattacagcttcatatgcaccagaaggagatgaagaaatacatgctacaggatttaactatcagaatgaagatgaaaaagtcaccttgtctttccctagtactctgcaaacaggtacgggaaccttaaagatagattttgttggagagctgaatgacaaaatgaaaggtttctatagaagtaaatatactaccccttctggagaggtgcgctatgctgctgtaacacagtttgaggctactgatgcccgaagggcttttccttgctgggatgagcctgctatcaaagcaacttttgatatctcattggttgttcctaaagacagagtagctttatcaaacatgaatgtaattgaccggaaaccataccctgatgatgaaaatttagtggaagtgaagtttgcccgcacacctgttatgtctacatatctggtggcatttgttgtgggtgaatatgactttgtagaaacaaggtcaaaagatggtgtgtgtgtccgtgtttacactcctgttggcaaagcagagcaaggaaaatttgcgttagaggttgctgctaaaaccttgcctttttataaggactacttcaatgttccttatcctctacctaaaattgatctcattgctattgcagactttgcagctggtgccatggagaactggggccttgttacttatagggagactgcattgcttattgatccaaaaaattcctgttcttcatcccgccagtgggttgctctggttgtgggacatgaactcgcccatcaatggtttggaaatcttgttactatggaatggtggactcatctttggttaaatgaaggttttgcatcctggattgaatatctgtgtgtagaccactgcttcccagagtatgatatttggactcagtttgtttctgctgattacacccgtgcccaggagcttgacgccttagataacagccatcctattgaagtcagtgtgggccatccatctgaggttgatgagatatttgatgctatatcatatagcaaaggtgcatctgtcatccgaatgctgcatgactacattggggataaggactttaagaaaggaatgaacatgtatttaaccaagttccaacaaaagaatgctgccacagaggatctctgggaaagtttagaaaatgctagtggtaaacctatagcagctgtgatgaatacctggaccaaacaaatgggatttcccctcatttatgtggaagctgaacaggtagaagatgacagattattgaggttgtcccaaaagaagttctgtgctggtgggtcatatgttggtgaagattgtccccagtggatggtccctatcacaatctctactagtgaagaccccaaccaggccaaactaaaaattctaatggacaagccagagatgaatgtggttttgaaaaatgtcaaaccagaccaatgggtgaagttaaacttaggaacagttgggttttatcggacccagtacagctctgccatgctggaaagtttattaccaggcattcgtgacctttctctgccccctgtggatcgacttggattacagaatgacctcttctccttggctcgagctggaatcattagcactgtagaggttctaaaagtcatggaggcttttgtgaatgagcccaattatactgtatggagcgacctgagctgtaacctggggattctctcaactctcttgtcccacacagacttctatgaggaaatccaggagtttgtgaaagatgtcttttcacctataggggagagactgggctgggaccccaaacctggagaaggtcatctcgatgcactcctgaggggcttggttctgggaaaactaggaaaagcaggacataaggcaacgttagaagaagcccgtcgtcggtttaaggaccacgtggaaggaaaacagattctctccgctgatctgaggagtcctgtctatctgactgttttgaagcatggtgatggcactactttagatattatgttaaaacttcataaacaagcagatatgcaagaagagaaaaaccgaatcgaaagagtccttggcgctactcttttgcctgacctgattcaaaaagtcctcacgtttgcactttcagaagaggtacgtccacaggacactgtatcggtaattggtggagtagctggaggcagcaagcatggtaggaaagctgcttggaaattcataaaggacaactgggaagaactttataaccgataccagggaggattcttaatatccagactaataaagctatcagttgagggatttgcagttgataaaatggctggagaggttaaggctttcttcgagagtcacccagctccttcagctgagcgtaccatccagcagtgttgtgaaaatattctgctgaatgctgcctggctaaagcgagatgctgagagcatccaccagtacctccttcagcggaaggcctcaccacccacagtgtgaatcctgaggtgccgccattggcggttctgctgcttcgctgcagggataaggtggagctaccgaacagctgattcatatgccaagaatttggagtcttctttcaaaccagtgggggttggacaatgaatgtagttaactggttcctgctcacactccagaattaaattctattgaaaaaggaaaatcagcaattcagcaaaaaaataaataaaaaataaaaatgtaaatatgatagtaataaaatagagcataacgaaactgtgaaactttctgaagccttgtcagtggttaaaagtatttaacactctactgttaatgacagatgttctgtttttataacctaccaaaaggaaactagaggcttcttggtgaagagcatttttgtgaagtgggttctgcaaggagcctataaagccaagggtggtgtccatttctgggaatggttaaacacaaaaggctgatagctggtatcacatagttggagtcagtgcataattccaagtggctttttttttttttggcacggggactgatcaggaagatatattcctgcataactcaatctgaaccaaggattgtagtttagttttcctccttgccttcccttctgtgtgaccgaccccttggccaaaaaaaaaacaaaaagcaaaaaacaaaaacctaccctgttctggtttttttcctccctttagttccacccccaacccccattccctggtgtccttcttagagatgaagaaataataaggaaacatctttcatagccacattaaataagagaaactgatatacattatttttttctttttaaagatgacttataagaaccctgaaatttatataggtgagacaatagaaataaaaagatcttcagccaggcctttctgaaggagttattctgctaaaaatggtcttagttgtctgaaaagccagctcttgaacctcttcacaacagtatcaacactggcttctcccggttcattttatgcgtgcgagaagtcagtggtaactgctgcagggcttaatacattagtggtaactggtttaaaaaacaaagactgtaagcctgtgtgtgccactgtttgcttcaacagtatatcctactaataagcctcacctatttaatccaatgagttttaaatctaaatctcattcccttcttctttccctaccttttttttctttttttcttaaaaaaatattttgtgttattaacagaaattcatatttggtgtggcttaacggtatttcagaaggtcatcagattgtgagactgcttccttgaaacatttttgtgctattgttttaaaaaaataattaaaaaacagttggcgttaataaaaatgtcaatgtg

SEQ ID NO: 1580 - DNA, 7940 bp, Homo sapiens
ccaagatggcggccaaggtggcgaagcagcagccgcggcggcggcggcggctggagtgagcgtccgactcgccgcgccgaacgaggtcccggtgtagggccgcgcgccgtggccgcgtcccactcctcaggccggggcgcacgtcggctcccacgcttagccagctcccggtggtttcctagaaacatgattgtttattggcattgatctcacagtctggtgaggacttctttactgataatgtcaagttcaggttatcctcccaaccaaggagcattcagcacagaacaaagtcgttatcctcctcactctgtccagtatacatttcccaacacccgccaccagcaggagttcgcagtccctgattatcgttcctctcatcttgaagtgagtcaggcatcacagcttttgcagcaacagcagcagcaacagcttcgaaggcgaccttccttgctttcagaatttcacccaggttctgacaggcctcaagaaaggagaactagttatgaaccgtttcatccaggcccatccccagtggatcatgattcactggaatcgaagcgaccacgtctggaacaggtttctgattctcattttcagcgtgtcagtgctgcggttttgcctttagtgcacccgctgccagaagggctgagggcttctgcagatgctaagaaggatccagcattcggaggcaaacatgaagctccatcctctccaatttcggggcaaccatgtggagatgatcaaaatgcttcaccttcaaaactctcaaaggaagagttaatacagagtatggatcgtgtagatcgagaaattgcaaaagtagaacagcagatccttaaactgaaaaagaaacaacaacagcttgaagaagaggcagctaaacctcctgagcctgagaagcccgtgtcccctcctcctgtggagcagaaacaccgcagtattgtccaaattatttatgatgagaatcggaaaaaagcagaagaagctcataaaatttttgaaggtcttggcccaaaagttgaactgccactgtataaccagccatcagataccaaggtgtaccatgagaacatcaagacaaaccaggtgatgaggaaaaaactcattttattttttaaaagaagaaatcatgcaagaaaacaaagggaacaaaaaatctgccagcgttatgatcagctcatggaggcatgggagaaaaaagtggacagaatagaaaataatcctcggaggaaagctaaagaaagcaaaacaagggaatactatgaaaagcagtttccagaaattcgaaaacaaagagaacagcaagaaagatttcagcgagttgggcagaggggagctggtctttcagccaccattgctaggagtgagcatgagatttctgaaattattgatgggctctctgagcaggagaataatgagaaacaaatgcggcagctctctgtgattccacctatgatgtttgatgcagaacaaagacgagtcaagttcattaacatgaatgggcttatggaggaccctatgaaagtgtataaagataggcagtttatgaatgtttggactgaccatgaaaaggagatctttaaggacaagtttatccagcatccaaaaaactttggactaattgcatcatacttggagaggaagagtgttcctgattgtgttttgtattactatttaaccaagaaaaatgagaattataaagccctcgtcagaaggaattatgggaaacgcagaggcagaaaccagcaaattgctcgaccctcgcaagaagaaaaagtagaagaaaaagaagaggataaagcagaaaaaacagaaaaaaaagaagaagaaaagaaagatgaagaggaaaaagatgaaaaagaagactccaaagaaaataccaaggaaaaggacaagatagatggtacagcagaagaaactgaggaaagagagcaagccacaccccgggggcgaaagactgccaacagtcagggccgccgtaagggccggatcaccaggtccatgacaaacgaagctgcagctgccagtgctgcagccgcagcggctactgaagagcccccaccacctctgccaccgccaccagaacccatttctacagagcctgtggagacctctcgatggacagaagaagaaatggaagttgctaaaaaaggtctagtagaacatggtcgtaactgggcagcaattgctaaaatggtgggaacgaaaagtgaagctcaatgtaaaaacttctattttaactataaaaggcgacacaatcttgacaacctcttacagcagcataaacagaaaacttcacgaaaacctcgtgaagagcgagatgtgtctcaatgtgaaagtgtcgcttccactgtttctgctcaggaggatgaagatattgaagcctccaatgaagaagaaaatccagaagacagcgaagttgaagctgtcaagcccagcgaggacagtcctgaaaatgctacttctcgaggaaacacagaacctgcggttgagcttgagcccaccacggaaactgcacccagtacatctccctccttagcagttccaagtacaaaaccagctgaagatgaaagtgtggagacccaggtgaatgacagcatcagtgctgagacagcagagcagatggatgtagatcagcaggagcacagtgctgaagagggttctgtttgtgatcccccacccgctaccaaagctgactctgtggacgttgaagtgagggtgccagaaaaccatgcatctaaagttgaaggtgataataccaaagaaagagacttggatagagccagtgagaaggtggaacctagagatgaagatttggtggtagctcagcaaataaatgcccaaaggcccgagccccagtcagacaatgattccagtgccacgtgcagcgctgatgaggatgtggatggagagccagagaggcagagaatgtttcctatggactcaaagccttcactgttaaaccccactggatctatactcgtctcatctccgttaaaaccaaatccactggatctgccacagcttcagcatcgagctgctgttatcccaccaatggtatcctgcaccccatgtaacataccaattggaaccccagtgagcggctatgctctctaccagcgacacattaaagcaatgcatgagtcagcactcctggaggagcagcggcagagacaagaacagatagatttggaatgtagaagttctacaagtccatgtggcacatccaagagtccaaacagagagtgggaagtccttcagcctgctccacatcaattgataactaatctccctgaaggcgttcggcttccgacaactcgaccaaccaggccaccgccccctctcatcccgtcatccaaaaccacagtggcttcagaaaaaccatcttttataatgggaggctccatctcacagggaacaccaggcacttatttgacttctcataatcaggcttcctacactcaagaaacacccaagccgtcagtaggatctatctctcttggactgccacggcaacaggaatctgccaaatcagctactttgccctacatcaagcaggaagaattttctccccgaagccaaaactcacaacctgagggtctgttggtcagggcccaacatgaaggtgtagtcagaggtaccgcaggagccatacaagaaggaagtataactcggggaactccaaccagcaaaatttcagtggagagcattccatccctacggggctctatcactcagggcaccccggctctgccccagactggcataccaacagaggctttggtgaaggggtccatttcgagaatgcccattgaagacagcagtcctgagaaaggcagagaggaagctgcatccaaaggccatgttatttatgaaggcaaaagtggacatatcttgtcatatgataatattaagaatgcccgagaagggactaggagtccaagaacagctcatgaaatcagtttaaagagaagctatgaatcagtggaaggaaatataaagcaagggatgtcaatgagggagtctcctgtatcagcaccgttagaggggctgatatgccgagcattacccagggggagtcctcattctgacctcaaagaaaggactgtattgtctggctccataatgcaggggacaccaagagcaacaactgaaagctttgaagatggccttaaatatcccaaacaaattaaaagggaaagtcctcccatacgagcatttgaaggtgccattaccaaaggaaaaccatatgatggcatcaccaccatcaaagaaatggggcgttccattcatgagattccaaggcaagatattttaactcaggaaagtcggaaaactccagaagtggtccagagcacacggccgataattgagggttccatttcccagggcacaccaataaagtttgacaacaactcaggtcaatctgccatcaaacacaatgtcaaatccttaatcacggggcctagcaaactatcccgtggaatgcctccgctggaaattgtgccagagaacataaaagtggtagaacggggaaaatatgaggatgtgaaagcaggcgagaccgtgcgttcccggcacacgtcagtggtaagctctggcccctccgttcttaggtccacactgcatgaagctcccaaagcacaactgagccctgggatttatgatgacaccagtgcacggaggacccctgtgagttatcaaaacaccatgtccagaggctcacccatgatgaacagaacttctgatgttacaattcctcctaacaagtctaccaatcatgaaaggaaatcgacactgacccctacccagagggaaagtatcccagcgaagtctccagtgcctggggtggaccctgtcgtgagccacagtccgtttgatccccatcacagaggcagcactgcaggcgaggtttattggagccacctgcccacgcaattggatccagccatgccttttcacagggctttggatcctgcagcggctgcttacctgtttcagagacagctttcaccaactccaggttacccaagtcagtatcagctttacgcaatggagaacacaagacagacaatcttaaatgattacattacctcacaacagatgcaagtgaacttgcgtccagatgtggccagaggactctccccaagagagcagccactgggtctcccatacccagcaacgagaggaatcattgacctgaccaatatgcctccaacaattttagtgcctcatccagggggaacaagcactcctcccatggacagaatcacttatattcctggtacacagattactttccctcccaggccgtacaactctgcttccatgtctccaggacacccaacacaccttgcagctgctgcaagtgctgagagggaacgggaacgggagcgggagaaggagcgggagcgggaacggattgctgcagcttcctccgacctctacctgcggccaggctcagaacagcctggccgacctggcagtcatggatatgttcgctccccttccccttcagtaagaactcaggagaccatgttgcaacagagacccagtgttttccaaggaaccaatggaaccagtgtaatcacacctttggatccaactgctcagctacgaatcatgccactgcctgctgggggcccttcaataagccaaggcctgccagcctcccgttacaacactgctgcggatgccctggctgctcttgtggatgctgcagcttctgcaccccagatggatgtgtccaaaacaaaagagagtaagcatgaagctgccaggttagaagaaaatttgagaagcaggtcagcagcagttagtgaacagcagcagctagagcagaaaaccctggaggtggagaagagatctgttcagtgtttatacacttcttcagcctttccaagtggcaagccccagcctcattcttcagtagtttattctgaggctgggaaagataaagggcctcctccaaaatccagatatgaggaagagctaaggaccagagggaagactaccattactgcagctaacttcatagacgtgatcatcacccggcaaattgcctcggacaaggatgcgagggaacgtggctctcaaagttcagactcttctagtagcttatcttctcacaggtatgaaacacctagcgatgctattgaggtgataagtcctgccagctcacctgcgccaccccaggagaaactgcagacctatcagccagaggttgttaaggcaaatcaagcggaaaatgatcctaccagacaatatgaaggaccattacatcactatcgaccacagcaggaatcaccatctccccaacaacagctgcccccttcttcacaggcagagggaatggggcaagtgcccaggacccatcggctgatcacacttgctgatcacatctgtcaaattatcacacaagattttgctagaaatcaagtttcctcgcagactccccagcagcctcctacttctacattccagaactcaccttctgctttggtatctacacctgtgaggactaaaacatcaaaccgttacagcccagaatcccaggctcagtctgtccatcatcaaagaccaggttcaagggtctctccagaaaatcttgtggacaaatccaggggaagtaggcctggaaaatccccagagaggagtcacgtctcttccgagccctacgagcccatctccccaccccaggttccggttgtgcatgagaaacaggacagcttgctgctcttgtctcagaggggcgcagagcctgcagagcagaggaatgatgcccgctcaccagggagtataagctacttgccttcattcttcaccaagcttgaaaatacatcacccatggttaaatcaaagaagcaggagatttttcgtaagttgaactcctctggtggaggtgactctgatatggcagctgctcagccaggaactgagatctttaatctgccagcagttactacgtcaggctcagttagctctagaggccattcttttgctgatcctgccagtaatcttgggctggaagacattatcaggaaggctctcatgggaagctttgatgacaaagttgaggatcatggagttgtcatgtcccagcctatgggagtagtgcctggtactgccaacacctcagttgtgaccagtggtgagacacgaagagaggaaggggacccatcacctcattcaggaggagtttgcaaaccaaagctgatcagcaagtcaaacagcaggaaatctaagtctcctatacctgggcaaggctacttaggaacggaacggccctcttcagtctcctctgtacattcagaaggggattaccataggcagacgccagggtgggcctgggaagacaggccctcttcaacaggctcaactcagtttccttataaccctctgactatgcggatgctcagcagtactccaccaacaccgattgcatgtgctccctctgcggtgaaccaagcagctcctcaccaacagaacaggatctgggagcgagagcctgccccactgctctcagcacagtacgagaccctgtcggatagtgatgactgaactgcacaaagtgaggggaacagggtgcaggagagggatctctagtttttgtggtttaatttttagtagcaggtcaaaaacctgccctcctgtgacttattccctgagacttttcaggagagccagcccacagatgatgaagaaatgatggaagttcatttggagagtcaaatgggaaaaaaacaaacaaaaaactgcctttgatacaggcaattcagtggactataataatagtggagggttgagatgtagagtttttaaaaagtgaacagttgctgttcttacatctgtaaagaaaaccataatgtctttaaatcactcttctgtaaatagatgacctttttgcagtgtaaaaaaaaaaaaaaaaaaaaaaaaaa

SEQ ID NO: 1581 - DNA, 4611 bp, Homo sapiens
tggaagaagatggcggaaggcggagcggcggatctggacacccagcggtctgacatcgcgacgctgctcaaaacctcgctccggaaaggggacacctggtacctagtcgatagtcgctggttcaaacagtggaaaaaatatgttggctttgacagttgggacaaataccagatgggagatcaaaatgtgtatcctggacccattgataactctggacttctcaaagatggtgatgcccagtcacttaaggaacatcttattgatgaattggattacatactgttgccaactgaaggttggaataaacttgtcagctggtacacattgatggaaggtcaagagccaatagcacgaaaggtggttgaacagggtatgtttgtaaagcactgcaaagtagaagtatatctcacagaattgaagctatgtgaaaatggaaacatgaataatgttgtaactcgaagatttagcaaagctgacacaatagatacaattgaaaaggaaataagaaaaatcttcagtattccagatgaaaaggagaccagattgtggaacaaatacatgagtaacacatttgaaccactgaataaaccagacagcaccattcaggatgctggtttataccaaggacaggtattagtgatagaacagaaaaatgaagatggaacatggccaaggggtccttctactcctaatgtgaaaaactcaaattactgtcttccatcatataccgcttataagaactatgattattcggaacctggaagaaacaatgaacagccaggcctctgtggcctaagtaacttgggaaatacgtgtttcatgaactcagctattcagtgtttgagcaacacacctccacttactgagtatttcctcaatgataagtatcaagaagaactgaattttgacaatcccttaggaatgagaggtgaaatagctaaatcttatgccgaactgatcaagcaaatgtggtctggaaagtttagctacgtcaccccaagagcctttaagacacaggtaggacgttttgcacctcagttctctggatatcagcagcaagactgtcaagaactgttagctttcctattagatggattacatgaggatttgaatagaattaggaaaaaaccatatatacaattaaaagatgcagatggaaggccagataaggtggttgccgaagaagcctgggaaaaccatttaaaacgaaatgattctatcatagtagatatatttcatggccttttcaaatcaactttagtttgtcctgagtgtgctaagatttcagtaacatttgatcctttttgttacttgacacttccattgcccatgaaaaaagaacgcaccttggaagtttacttagttagaatggatccgcttaccaaacctatgcagtacaaagtggttgtccccaaaattggaaacatattagatctttgtacagcattgtctgctttgtcaggaatacctgcagataagatgatagttactgatatatacaatcatagatttcacagaatattcgctatggatgaaaaccttagtagtattatggaacgggatgatatttatgtgtttgaaattaacatcaataggacagaagatacagagcacgtgattattcctgtttgcctaagagaaaaattcagacactcgagttatacccaccatactggttcttcactttttggtcagccctttcttatggctgtaccacgaaacaatactgaagacaaactttataatctcctgctcttgagaatgtgccgatatgtcaaaatatctactgaaactgaagaaactgaaggatccctacactgctgtaaggaccaaaatattaatgggaatggcccaaatggcatacatgaagaaggctcaccaagtgaaatggaaacagatgagccagatgatgaatccagccaggatcaagaacttccctcagagaatgaaaacagtcagtctgaagattcagttggaggagataatgattctgaaaatggattatgtactgaggatacttgcaaaggtcaactcacgggacacaaaaaacgattgtttacattccagttcaacaacttaggcaatactgatatcaactacatcaaagatgataccaggcatataagatttgatgataggcagcttaggctagatgaaagatcttttcttgctttggattgggatcctgatttgaaaaaaagatattttgatgaaaatgctgctgaggactttgaaaaacatgaaagtgtggagtataaacctcctaaaaaaccctttgtgaaattaaaagattgcattgaactttttacaacaaaagaaaagctaggtgctgaagatccctggtattgtccgaattgtaaagaacatcagcaagccacaaagaaattggatttatggtccctgcctccagtacttgtagtacatctcaagcgattttcttacagtcgatacatgagagacaagttggataccttagttgattttcctatcaatgacttggatatgtcggaattcttaattaatccaaatgcaggtccttgccgctataatctgattgctgtttccaaccactatggagggatgggaggaggacactatactgcttttgcaaaaaataaagatgatggaaaatggtactattttgatgacagtagtgtctccactgcatctgaagaccaaattgtgtccaaagcagcatatgtactcttctaccagagacaagacactttcagtggaactggcttttttcctcttgaccgagaaactaaaggtgcttcagctgccactggcatcccattagaaagtgatgaagatagcaatgataatgacaatgatatagaaaatgaaaactgtatgcacactaactaatgaaagtcctagaagccataaaagagacactttcctgctggtggtatctatggaaatgatgaagttacccaccacattaaaacaaaagtctgagatggggagtttcagataaccgaatgtaaatcctttatcagattttaacttgtgcagtacttgaagtgaaacacaatgaaaactttaacagaaattgtctcttaatacatttacagtcttgtatttacaagctaaatatatataggaaatcacaaataaatcccttttaagtttgctgctgttttgattaattatgtttcctttaattttttggatgtgagttgatgacaaatgttaaatttgtggatgttggtcatttattttgctctaataatactgcaagaaaactatggctgaacttagtttttggataatctagttcatgtgcattaggctgccgtatatactactatgatatttagctgcagtatcaatgtggcataaatactgcggcagcattcttcgaaaaccgcattttcaaatttatccccgtaatcaatgtgggcctattaaaaaaccaaatcatgatacaagaaacaaccttggaaaagttatttccctttgtaatacctttaaaaatccagagtattatattcattttactgccactgtggaaacaggttctagatttcatactccatctaaagtcatttttcagttacatgtaagtattatttactgctattgggatctattcttcagatattcaaaaacattttttgctttaaaatgcatatctttaattgggtgttggtccaaaattaaaatttttgctgtctgtttttctctaccccattttgtggtaatttggcaacttgagctctcccaattattgtaatataaggacagacataatagtattctgtacccatagtaataattgcatcaagcttagatgagaaatttttttcatatactggcctttaaatcattaatggacaattggctataaaggtaggtctgttaactttctttgtgtgttcctgatggaattcaccatagccttacagcttttctcagaaggtaacttgttataagagaaatggcatttgcatgttccagagtcagaacctgtacagtatataaagcataaacaccttgaatttgattttagttcaccacattcaaggatccaggatgccaaaaatatgtgtgaacatttgaaacatttttatttgctgctttttccctttgatatagttgaaagaatgtattgtaaattggcatacaatactgcctttaatagaaaacctaaatgctggggcacatttcacatatcgactacctgagaaattgctttgtgtcccactgttattaaagcaaaaagtataatgttcttcacttgaactaatcaaatacaatagattataaattgtgtattgtaaataaaagttcactctgtgagtgcacattttggtaaattatttatttatgttagcatttaaaagtttaaaaaaaatgcatttgaccaggataaatgaggtatgttgatcatggctttgctttatatcttgatattaaagctggtttatcatcctggtattttaaaagctgctttggggttttttttttcttttttttttttttaatgtaaactaacctcctgcatgacagaggttaaaattttgtctgcacttgagttcacttgagtttacatttgaaatgtgcatgtttatttatatagatttcaataaagctattcaaggcctt

SEQ ID NO: 1582 - DNA, 1874 bp, Homo sapiens
ccggtgatggcggctggtgatggggacgtgaagctaggcaccctggggagtggcagcgagagcagcaacgacggcggcagcgagagtccaggcgacgcgggagcggcagcggaagggggaggctgggcggcggcggcgttggcgcttctgacggggggcggggaaatgctgctgaacgtggcgctggtggctctggtgctgctgggggcctaccggctgtgggtgcgctgggggcggcggggtctgggggccggggccggggcgggcgaggagagccccgccacctctctgcctcgcatgaagaagcgggacttcagcttggagcagctgcgccagtacgacggctcccgcaacccgcgcatcctgctcgcggtcaatgggaaagtcttcgacgtgaccaaaggcagcaagttctacggcccggcgggtccatatggaatatttgctggtagggatgcctccagaggactggccacattttgcctagataaagatgcacttagagatgaatatgatgatctctcagatttgaatgcagtacaaatggagagtgttcgagaatgggaaatgcagtttaaagaaaaatatgattatgtaggcagactcctaaaaccaggagaagaaccatcagaatatacagatgaagaagataccaaggatcacaataaacaggattgaactttgtaaacaaccaaagtcaggggccttcagaactgcaattcttactccctttcacagactgtccggagtctttgggtttgattcacctgctgcgaaaaacattcaacaaattgtgtacaagataaattaatctcactatgaagatttgaataactagacattatttatgctgccaaactcatttgttgcagttgtttgtaatgtctagtggggcttcatcatcctgaaaagaaggagacagggatttttttaaagagcaagaaagtcacaatattacttctttccttccttttttccttctttcctttcttctttctctttctttctttttaaaatatattgaagacaaccagatatgtatttgctactcaagtgtacagatctcctcaagaaacatcaagggactcctgtgtcacatactgtgtttttattttaacatgggtgagggaggcgacctgatcaggggaggtgggggtacacatcaatttgagttgttcaggctactgaaacattaaaatgtgaattcccaaacttttctttttggctttgtcagggaaaagaaaaatatctttataaagaaatctttggaaattaggagaaggaatttcaggtgggtttaagtcagagctagttccccaacagaaagatcatttgaaaccagtttttatcccttctctttccttccctttccctaaatcaaatcaatattaattgtgccttatttcacttaacatagacttgaattatttttagggaaagcccctataatgaattcagaaatcactacaagcagcattaagactgaagttggaatattctgttgaccataaaaccttgatatcattctgtgtatatagaatgtaaaaggaatattacagtgttaactgccatatatgtaatatacacaaactcaattagcattgtaatggccaaatgcattcccccatgcttttctgttttcaaaaaaattgaaaaacaaatcaactcttatccccaacagctgcctaattttaggagtctgaccctccacatctcactggtgtgggtgcatggggctgtggagtgggtgtcagtatggatgtgtctgaatgtgtgaggccttggaagggactctttctgcagatactgtaaatacaagtaccattttaataaagcatgtacaataaaccaaaaaaaaaaaaaaaaaaaaaaaa

SEQ ID NO: 1583 - DNA, 1656 bp, Homo sapiens
cgcccctgctctcgcgccggcgtcggctgcgtctccggcgtttgaattgcgcttccgccatctttccagcctcagtcggacgggcgcggaggcgcttctggaaggaacgccgcgatggctgcgcagggagagccccaggtccagttcaaacttgtattggttggtgatggtggtactggaaaaacgaccttcgtgaaacgtcatttgactggtgaatttgagaagaagtatgtagccaccttgggtgttgaggttcatcccctagtgttccacaccaacagaggacctattaagttcaatgtatgggacacagccggccaggagaaattcggtggactgagagatggctattatatccaagcccagtgtgccatcataatgtttgatgtaacatcgagagttacttacaagaatgtgcctaactggcatagagatctggtacgagtgtgtgaaaacatccccattgtgttgtgtggcaacaaagtggatattaaggacaggaaagtgaaggcgaaatccattgtcttccaccgaaagaagaatcttcagtactacgacatttctgccaaaagtaactacaactttgaaaagcccttcctctggcttgctaggaagctcattggagaccctaacttggaatttgttgccatgcctgctctcgccccaccagaagttgtcatggacccagctttggcagcacagtatgagcacgacttagaggttgctcagacaactgctctcccggatgaggatgatgacctgtgagaatgaagctggagcccagcgtcagaagtctagttttataggcagctgtcctgtgatgtcagcggtgcagcgtgtgtgccacctcattattatctagctaagcggaacatgtgctttatctgtgggatgctgaaggagatgagtgggcttcggagtgaatgtggcagtttaaaaaataacttcattgtttggacctgcatatttagctgtttggacgcagttgattccttgagtttcatatataagactgctgcagtcacatcacaatattcagtggtgaaatcttgtttgttactgtcattcccattccttttctttagaatcagaataaagttgtatttcaaatatctaagcaagtgaactcatcccttgtttataaatagcatttggaaaccactaaagtagggaagttttatgccatgttaatatttgaattgccttgcttttatcacttaatttgaaatctattgggttaatttctccctatgtttatttttgtacatttgagccatgtcacacaaactgatgatgacaggtcagcagtattctatttggttagaagggttacatggtgtaaatattagtgcagttaagctaaagcagtgtttgctccaccttcatattggctaggtagggtcacctagggaagcacttgctcaaaatctgtgacctgtcagaataaaaatgtggtttgtacatatcaaatagatattttaagggtaatattttcttttatggcaaaagtaatcatgttttaatgtagaacctcaaacaggatggaacatcagtggatggcaggaggttgggaattcttgctgttaaaaataattacaaattttgcactttttgtttgaatgttagatgcttagtgtgaagttgatacgcaagccg

SEQ ID NO: 1584 - DNA, 1056 bp, Homo sapiens
cgcgaggcccgggttgagcgggaggcgcgatcggtccggtcggtggctccccgcggcggggccgggcccgatctcgggcgggaaccgagcgcagagccggtagcgggaaggatgaccacgctcacacgacaagacctcaactttggccaagtggtggccgctgtgctctgcgagttcctggaggtggctgtgcatctcatcctctacgtgcgcgaggtctaccccgtgggcatcttccagaaacgcaagaagtacaacgtgccggtccagatgtcctgccacccggagctgaatcagtatatccaggacacgctgcactgcgtcaagccactcctggagaagaatgatgtggagaaagtggtggtggtgattttggataaagagcaccgcccagtggagaaattcgtctttgagatcacccagcctccactgctgtccatcagctcagactcgctgttgtctcatgtggagcagctgctccgggccttcatcctgaagatcagcgtgtgcgatgccgtcctggaccacaaccccccaggctgtaccttcacagtcctggtgcacacgagagaagccgccactcgcaacatggagaagatccaggtcatcaaggatttcccctggatcctggcggatgagcaggatgtccacatgcatgacccccggctgataccactaaaaaccatgacgtcggacattttaaagatgcagctttacgtggaagagcgcgctcataaaggcagctgagggggcacctgccaccccactgatgcccaaactgtcagactttgggggatccccgcctagggcagtgctgcatggctgccctgattccaagtgctcttatcgcctctgtgtgtggatcgcccgccccagcccggggccgctcaggtctgcttggaggatgcctcccccaggagggcagtgagggatgccgcaacctcgacttctcagcctcctggggttccgccggccaacactgtctgtctcaaatactgtgctgtgagttgtttcaataaaggggcccaagggctgggctgaaaaaaaaaaaaaaaa

SEQ ID NO: 1585 - DNA, 3250 bp, Homo sapiens
gcagcttgtggcggcgaagccatcggtgttcgctgatgtccagtctatggagtcagttggtaccggtggcggcgcggaggcagaaggcggtgtccgagtaggggcctctgccccaccaggatgttaccgggcttggccgccgccgcggcccacagatgtagctggtcctccctgtgccggctccgtctgcgatgcagggcggcggcctgtaatcccagcgaccgccaggagtggcagaatttagtgacatttggaagcttttcaaacgtggttccctgtagtcatccatatattggtaccctgagtcaagtaaagttgtactccacaaatgttcagaaagaaggacagggatcacaaacactcagagtggaaaaagtaccatcatttgaaacagcagaaggtataggcgcagaactcaaagctccacttaagcaagaacctctccaagtaagagttaaagcagtccttaagaaaagggagtatggatcaaagtacactcagaataatttcatcactggagtcagagcgataaatgagttctgcctcaaatccagtgatctagaacaacttcgaaaaatcagacgacgaagtccccatgaagatactgagtcttttactgtatacttgagatcagatgtggaagcaaaatctttggaagtttggggaagccctgaagctcttgccagagagaaaaaattgcgtaaggaagcagaaatagaatacagagaaaggctatttagaaaccaaaaaatattaagagaatacagagatttcttgggaaataccaagccacgctccagaacagcatcagtgttttttaagggaccaggaaaagtggtgatggttgcaatttgcatcaatggattaaactgcttctttaaatttcttgcctggatttataccggttcagcaagtatgttctcagaagctatacactcattatctgatacttgtaatcagggtttactagcattgggcatcagtaagtctgttcaaacaccagatccttctcatccgtacggattttcaaatatgcgctatatttcttcgctaattagtggtgttggtattttcatgatgggtgcaggactatcttggtaccatggagtcatgggattgcttcatcctcaaccaatagaatcccttctatgggcatattgtattttagcaggatcattagtatctgaaggagcaacacttcttgttgctgtaaatgaacttcgtaggaatgctcgggctaaaggaatgtcattttacaagtatgtaatggaaagtcgtgatcctagtacaaatgtgatattattggaggatactgctgcagtcttgggagttataatagcagccacttgcatgggccttacttctataacaggcaatccactgtatgacagcctaggttctttgggtgtgggcaccttattaggcatggtctcagcattcctcatctacactaacacagaagcactcttagggcggtccatccagccagaacaagtacaacggctcactgaactcctggagaatgacccatcagtaagggcaattcatgatgttaaagccacagatctgggattaggtaaagtaagatttaaggcagaagtagattttgatgggcgagttgttacaagatcatatttggaaaaacaagattttgaccaaatgttacaagaaattcaagaagtgaaaactcctgaagaactagagacctttatgcttaaacatggagaaaatattattgatactttaggagctgaagtagatagacttgagaaggaactgaaaaaacgaaatcctgaagttcgacatgtagatttggagatactgtgagtttgatggaatgaatcacctgggtggggaccttggaaacaagtttgtccgtccactctacaaagtttcctcctctcctacactgaaagactcagtgccatgcagaagccttttttttaagatgaaggaaatattttatgtaaagagcaactcagcaggacacagaactaaaactactacttacatctaacagacacactacaagttgaatcaatttgaaaatcatgtttttatgcttccatagggaacattttggttatttaaattgttcataatgtcccatatttcacctgttcagtgtatactgtactttgcaatcatctttccttttttcacattggtaaaaataagtggcatccataggatcatgatttttaatttgttgcctctgaagatttcactccatcaagatctgccaatcttcaatattctggctaaatcttggtatgtggtttttaaacagtcactccgtttcaaagtctgtctttccttatagaatgtggaaattatttctccataccttgtgattttgacctgagtgctaagagaatcactctccttacctagttatctacaaatgttcattccagaaatgtttagttactgaattgaatgaagacatctcagtacactcttttaggtcatagtagttgccattttgtaaaatttcttttttcttctttgcttttttccccttatttggtttaatttttctaatgttaggagatatagtcctagatatttccatgggccagtgtgatgacttttttttaaatgaggttcagtaccataatgtttatttactggaagataatgcatttataagcattttaaaattctgtaaagtgggttagaaatatttataattttacaggcaggacagcatttgacttttatttaaaaggcggcactacttatgtaaatctgagctgtgggatatttcttgctttaagagagagacagaatctctcactgaaactcatggtcatgattttgtataatatagttcatactgtgtctgtgagtatattcaattacaaatgggcatttagtatagttatattgactataacatgtaagtaaatagctttctactgaccctaagtcatcaaggtggaaaaaaaacatgcaattcagtaattgaaaatgtggtgaaaagctgcagctgtcatcatcaaaacaactcataacatactttaaaatgttcaggtagcagtgagcattgttcatatgagaatggcggctgggtgatctctttgctgaattaatgagttcttaacatgtggacccaactgcctgtgtgagatctgtgtcttaaaacttactggaatggaaatctatgaattattgcaaattgtaatgctggaaacaaaaaataaatccttggttaaagggaaaaaaaaaaaaaaaaaaaaaaaaaaaa

SEQ ID NO: 1586 - DNA, 1386 bp, Homo sapiens
gctcctcgccccgcgcctgcccccaggatggtccgcgcgaggcaccagccgggtgggctttgcctcctgctgctgctgctctgccagttcatggaggaccgcagtgcccaggctgggaactgctggctccgtcaagcgaagaacggccgctgccaggtcctgtacaagaccgaactgagcaaggaggagtgctgcagcaccggccggctgagcacctcgtggaccgaggaggacgtgaatgacaacacactcttcaagtggatgattttcaacgggggcgcccccaactgcatcccctgtaaagaaacgtgtgagaacgtggactgtggacctgggaaaaaatgccgaatgaacaagaagaacaaaccccgctgcgtctgcgccccggattgttccaacatcacctggaagggtccagtctgcgggctggatgggaaaacctaccgcaatgaatgtgcactcctaaaggcaagatgtaaagagcagccagaactggaagtccagtaccaaggcagatgtaaaaagacttgtcgggatgttttctgtccaggcagctccacatgtgtggtggaccagaccaataatgcctactgtgtgacctgtaatcggatttgcccagagcctgcttcctctgagcaatatctctgtgggaatgatggagtcacctactccagtgcctgccacctgagaaaggctacctgcctgctgggcagatctattggattagcctatgagggaaagtgtatcaaagcaaagtcctgtgaagatatccagtgcactggtgggaaaaaatgtttatgggatttcaaggttgggagaggccggtgttccctctgtgatgagctgtgccctgacagtaagtcggatgagcctgtctgtgccagtgacaatgccacttatgccagcgagtgtgccatgaaggaagctgcctgctcctcaggtgtgctactggaagtaaagcactccggatcttgcaactgaatctgcccgtaaaacctgagccattgattcttcagaactttctgcagtttttgacttcatagattatgctttaaaaaattttttttaacttattgcataacagcagatgccaaaaacaaaaaaagcatctcactgcaagtcacataaaaatgcaacgctgtaatatggctgtatcagagggctttgaaaacatacactgagctgcttctgcgctgttgttgtccgtatttaaacaacagctcccctgtattcccccatctagccatttcggaagacaccgaggaagaggaggaagatgaagaccaggactacagctttcctatatcttctattctagagtggtaaactctctataagtgttcagtgttcacatagcctttgtgcaaaaaaaaaaaaaaaaaaaaa

SEQ ID NO: 1587 - DNA, 4246 bp, Homo sapiens
tttaaactgtgctttctaagcacagtcaggtagcaaaagtaataaaaaggatggttgaacaagttttcttgtatgttccaggatatgtttgggacttttctttgtttattatatgagttgttccctttgaaattaaagctattttgtaggttttgtgggacataatttgataagtagagttaattaaatttcttctggaagagatctaaattcttattcttagtgagagactgtagttaaaaggaaggcttttagaacttgggttcaaggaagatggagatgcgtcggaagctctttggcgggggtgaggaagttcagaaagtgtgcattttccttctggcatttaggtcttgtccgtgtgatttggtggtgcttgggtcataagcctgattaaaattcagggacatgtaccacggcggccaaagcggaattaatttttttatatggggactggagcgctgaaaagttgttcctgaccaggctctaatgagaaattcctctctccccaggttatgaagacagtatggagtttccagaccatagtagacatttgctacagtgtctgagcgagcagagacaccagggttttctttgtgactgcactgttctggtgggagatgcccagttccgagcgcaccgagctgtactggcttcatgcagcatgtatttccacctcttttacaaggaccagctggacaaaagagacattgttcatctgaacagcgacattgttacagcccccgctttcgctctcctgcttgaattcatgtatgaagggaaactccagttcaaagacttgcccattgaagacgtgctagcagctgccagttatctccacatgtatgacattgtcaaagtctgcaaaaagaagctgaaagagaaagccaccacggaggcagacagcaccaaaaaggaagaagatgcttcaagttgttcggacaaagtcgagagtctctccgatggcagcagccacatagcaggcgatttgcccagtgatgaagatgaaggagaagatgaaaaattgaacatcctgcccagcaaaagggacttggcggccgagcctgggaacatgtggatgcgattgccctcagactcagcaggcatcccccaggctggcggagaggcagagccacacgccacagcagctggaaaaacagtagccagcccctgcagctcaacagagtctttgtcccagaggtctgtcacctccgtgagggattcggcagatgttgactgtgtgctggacctgtctgtcaagtccagcctttcaggagttgaaaatctgaacagctcttatttctcttcacaggacgtgctgagaagcaacctggtgcaggtgaaggtggagaaagaggcttcctgtgatgagagtgatgttggcactaatgactatgacatggaacatagcactgtgaaagaaagtgtgagcactaataacagggtacagtatgagccggcccatctggctcccctgagggaggactcggtcttgagggagctggaccgggaggacaaagccagtgatgatgagatgatgaccccagagagcgagcgtgtccaggtggagggaggcatggagagcagtctgctcccctacgtctccaacatcctgagccccgcgggccagatcttcatgtgccccctgtgcaacaaggtcttccccagcccccacatcctgcagatccacctgagcacgcacttccgcgagcaggacggcatccgcagcaagcccgccgccgatgtcaacgtgcccacgtgctcgctgtgtgggaagactttctcttgcatgtacaccctcaagcgccacgagaggactcactcgggggagaagccctacacatgcacccagtgcggcaagagcttccagtactcgcacaacctgagccgccatgccgtggtgcacacccgcgagaagccgcacgcctgcaagtggtgcgagcgcaggttcacgcagtccggggacctgtacagacacattcgcaagttccactgtgagttggtgaactccttgtcggtcaaaagcgaagcactgagcttgcctactgtcagagactggaccttagaagatagctctcaagaactttggaaataattttatatatatataaataatatatatatatatacatatatataaatagatctctatatagttgtggtacggtctaaaagcagtcttgtttcctggaaataaaaagttgggatattaacttgtttttgcactttagaatagcatgagaatctcactaatttagcattctgataaaagaaactttagagcaagtcagaatagagaggtgtttttcctttgaggggataggggaagtaagccaataagaaccttttaaacaaatcgtcctgtcacaaaatgctttcatatggcttaattttgtcaacactgcattgtcttttgagctcttttttcccccccaacaaagtttttttgttttttgtttttttttttaagtagaaattccctccagttttattagcctctttatatgtctcaaattgcatgaattttttctggctgttggaaacctgaatgcttttagacccaaatggaaaatttctgaaatgctggattatctatttttaaacaagcagttgacttaaaactttctgtggcaacttctggttttctgacagttcccagtgagagaaatgctgaaagtacactgggatcactgggacactgtcttatgaaggtttgcttgggatgaaaaaggatattgcagcttcagcagtgttgaactgtgtgtttaaaaatgtgaattactgttattgtatactgtaattgattacatgggctgggggggtgtcaaagaacttgacaggttgtgttgatgctcttagttgagtcttgaaaagtaaatattaacgctacagaaatgcatgagttttcaatatattttttgtctttgtttgcattgtataactttaacgagtgagtttaaaattatttaatttccttagaaaaatagcaccatttggaaaaaaaaactggtgttatgaagaacgtaaatgcactgtttttatttttattttatataatttaaattgactttcccactgtctttaagttgaaactgttaagctgaataaaaacttaagctgcaaattgataacttcgctacataacaaggaaaatataaatgtttacaaacagcttaaagatttgcatgtgcagtgtgcatttataacaaacttctaattgcacaaaacccatgccagctcagagtttaggtgtacacatttacccagttgagcgttcttagaataactactgcacaagttgacaataggtcgttctctctttttttttgtttgctccctttttctttttctccccttcctccttaccctccctcccttactctccccccccaccaccaccctccacccccaactcatgaaaagattctatggactgaaaaagccccaggctgaaaggactggactgccttgattgacatggggaagggggttagtagactatgtggattgcggcagcagaggctgcagcctaacgtgtggttttaatgaccagcacgcaaggcaaaagcattttgcacagtgtttgttttcctgtcttgcacttacaaataaggtctatgggagtagcatggaaaacgtttgctgtttttcccttttttttttaattgcttttgtttaaaatttgatcgccttaactactgtaaacatagcctatttttgtgcttaagatactgaatggaaaactccattgtgtgttgctggactgttttggaaatatttggttaaatgtgtgttaatttggctgtaatggcatttaaagcaaacaaacaaacaaaaaaagctgtgaaaatggccttggagcattatctttagttacttgaagagtttctagtttttttaaaatacagtttatgttaaaataatttttattaatttagagaagacaatcaatgtctgtgagaaaacggactttcttttggattttctttttgtggtcattgtgagtgattgctttttccttttcttagtttcacattcttcctttgttctaaaacttagactgacatctagctttgacaatcatagtatgttttattttcctgagggggaataacttataatgctgtttagttttgtactattggtgtgttggtgaatttttaaactgtgtgctaactgcaataaattatatgaactgagaaaaaaaaaaaaaaaaaaaaaaaaaaaaaaaaaaaaaaaaaaaaaaaaa

SEQ ID NO: 1588 - DNA, 2614 bp, Homo sapiens
attgcggagagcggctgatcgcagtccggaggtgaggcggaactctgagcaggtggtccattatggctgacatgcaaaatctggtagaaagattggagagggcagtgggccgcctggaggcagtatctcatacctctgacatgcaccgtgggtatgcagacagtccttcaaaagcaggagcagctccatatgtgcaggcatttgactcgctgcttgctggtcctgtggcagagtacttgaagatcagtaaagagattgggggagacgtgcagaaacatgcggagatggtccacacaggtttgaagttggagcgagctctgttggttacagcttctcagtgtcaacagccagcagaaaataagctttccgatttgttggcacccatctcagagcagatcaaagaagtgataacctttcgggagaagaaccgaggcagcaagttgtttaatcacctgtcagctgtcagcgaaagtatccaggccctgggctgggtggctatggctcccaagcctggcccttatgtgaaagaaatgaatgatgccgccatgttttatacaaaccgagtcctcaaagagtacaaagatgtggataagaagcatgtagactgggtcaaagcttatttaagtatatggacagagctgcaggcttacattaaggagttccataccaccggactggcctggagcaaaacggggcctgtggcaaaagaactgagcggactgccatctggaccctctgccggatcaggtcctcctccccctccaccaggcccccctcctcccccagtctctaccagttcaggctcagatgagtctgcttcccgctcagcactgttcgcgcagattaatcagggggagagcattacacatgccctgaaacatgtatctgatgacatgaagactcacaagaaccctgccctgaaggctcagagtggtccagtacgcagtggccccaaaccattctctgcacctaaaccccaaaccagcccatcccccaaacgagccacaaagaaggagccagctgtacttgaactggagggcaagaagtggagagtggaaaatcaggaaaatgtttccaacctggtgattgaggacacagagctgaaacaggtggcttacatatacaagtgtgtcaacacgacattgcaaatcaagggcaaaattaactccattacagtagataactgtaagaaacttggcctggtattcgatgacgtggtgggcattgtggagataatcaacagtaaggatgtcaaagttcaggtaatgggtaaagtgccaaccatatccatcaacaaaacagatggctgccatgcttacctgagcaagaattccctggattgtgaaatagtcagtgccaaatcttccgagatgaatgtcctcattcctacagaaggcggtgactttaatgaattcccagttcctgagcagttcaagaccctatggaacgggcagaagttggtcaccacagtgacagaaattgctggataagcgaagtgccactgggttctttgccctcccttcacaccatgggataaatctgtatcaagacggttcttttctagatttcctctacctttttgctcttaaaactgcttctctgctctgagaagcacagctacctgccttcactgaaatatacctcaggctgagatttggggtgggatagcaggtcagttgatcttctgcaggaaggtgcagcttttccatatcagctcaaccacgccgccagtccattcttaaggaactgccgactaggactgatgatgcattttagctttgagcttttgggggttattctaccaacaaacagtccattggaaagaaaacagtccctggaattaacagatcagaatgttcacactggttaatctttttttaacaatgagcatgaaggtagcagaagctggtgtgtttccagatggttcttctaaccaaactaatttttcactgttgacaagcgaggcaagggttgcactggaccaaaggctgaggcttggccatctagcattccatacaaaattgtttcctataagcattccttttattctctattctatcctgggtctgcctcaaccgtgagataggagagtctctggtactagctgctgtagcagtgcccttcatccagggcagttaatggagtcttggaccctttctttctctgggatccctgcccagcaccttcctatagagatgactttaaaaggaaaaaaaaaaaaaaacccacatgatttcaaggagtctggcattcctgaatccttcttccctgccaggtgcctgtcacctgtcttcactgcctccttttccctgtcatgctcatcagcttatggcttctgtctaagcacctgaacagaggactgaaacctccactgcaggctggttttaggtcttgaattatgtaagaatcttgcacagcactgctaatgtaaatttcagttgtttttccctctaggacaaacacttaccaaaatatgcaacttttttttggtgggaagagagattgtcctgtgatttctacccatttcctgaggcctgtggaaataaacctttatgtacttaaagttatacagaaaatagaataaagttaataccaaacttgaaaaagcggccgc

SEQ ID NO: 1589 - DNA, 2165 bp, Homo sapiens
atgagtgctggcttctggcaaccagggcctggtggcccaccctgccgcctctgtggagaggcctcccgaggccgggccccatcccgagatgaagggtccctcttattgggctcacgtcggccccgccgggatgctgctgagcgatgtgctgcagccctgatggccagccggcgtaagagtgaagccaagcagatgcccagagctgcacctgccactcgggtaacacgccggagcacacaggagagcctgacagcaggcggaacagaccttaagagggagctgcaccccccagccacctcccatgaggctcctggcaccaagcggtcaccttctgctccagcagccacctcctctgcctcttcttctacatcctcatacaaacgggcaccagctagctcagccccacagcctaagcccctaaagcgtttcaagcgagctgcagggaagaagggtgctcgcacccgtcaggggcctggtgcagagtctgaagacctgtatgacttcgtttttattgtggctggcgagaaggaggatggcgaagagatggagattggggaagtggcttgtggagctttggatggatcagatcccagctgcctggggcttccagcactggaagcttcacaaagattccgcagcatctccaccttggagctattcacagttccactctccacagaggcagccctgacactatgccacctgctgagctcctgggtgtcactggagagcctcacactctcctacaatggcctgggctctaacatcttccgcctgctagacagcctgcgggccctgtcaggccaggctggatgtcgcctccgtgccctgcatctcagtgacctgttctcaccactgcccatcctggagctgacacgtgctatcgtgcgagcactgcccctgctacgggtcctctctattcgtgttgaccacccaagccagcgggacaaccctggtgtgccagggaatgcagggccccctagccacataataggcgatgaggagataccagaaaactgcctggagcagttggagatgggatttccacggggagcccagccagccccactgctgtgctccgttctgaaggcctcgggttctctgcagcagctgtccctggatagtgccacctttgcctctccccaggattttgggcttgttttgcaaacactcaaagagtacaacctagccctgaaaagactgagcttccatgacatgaatctcgctgactgtcagagcgaggtgctctttttgctacagaatctgactctgcaagagattaccttctccttctgccgtctgtttgagaagcgcccagcccaatttctgcctgagatggttgctgctatgaagggcaactccacactgaagggcctccggctgccagggaaccgcctggggaatgctggcctgctggccttggcagatgttttctcagaggattcatcctcctctctctgtcagctggacatcagttccaactgcatcaagccagatgggcttctggagttcgccaagcggctggagcgctggggccgtggagcctttggtcacctgcgcctcttccaaaactggctggaccaggatgcagtcacagccagggaagccatccggcggctccgggctacctgccatgtggttagcgactcatggactcatcccaggccttcgcagattatgttagcaccatgtgatggggcccgtacctcacagtctcatgctcggtaccatcagcttgcaggggctgaagcatgggctgcccagaaccccaaccaccagttctatctttctctttctgtcaccttttttctcttttttccttcttcccttgcactgaggtcctggaggccttgatgaggcccagcaaacaggcattctcacagctgggtttatagtctttgggccccttactcagtatcctgggaaccctgggccaggaggttacagtggtcatcataattgctgaagagatcccctcccctgcccctgggttcctgccttccctcctcaagcaggcacccaggctttagagaagtatagggggcttcttccctgctgggcttaccacactgctctcaggcctcaaaccctttcatacctttattcttttttttaaccaaaaaagtttttcttataaaataaattttgggcaaacatcaaaaaaa

SEQ ID NO: 1590 - DNA, 2307 bp, Homo sapiens
  misc_feature (2179)..(2179): n is a, c, g, or t
  misc_feature (2195)..(2195): n is a, c, g, or t
ggcacgaggcgatggagccggggcgccggggggccgcggcgctgctagcgctgctgtgcgtggcctgcgcgctgcgcgccgggcgcgcccaatacgaacgctacagcttccgcagcttcccacgggacgagctgatgccgctcgagtcggcctaccggcacgcgctggacaagtacagcggcgagcactgggccgagagcgtgggctacctggagatcagcctgcggctgcaccgcttgctgcgcgacagcgaggccttctgccaccgcaactgcagcgccgcgccgcagcccgagcccgccgccggcctcgccagctatcccgagctgcgcctcttcgggggcctgctgcgccgcgcgcactgcctcaagcgctgcaagcagggcctgccagccttccgccagtcccagcccagccgcgaggtgctggcggacttccagcgccgcgagccctacaagttcctgcagttcgcttacttcaaggcaaataatctccccaaagccatcgccgctgctcacacctttctactgaagcatcctgatgacgaaatgatgaagaggaacatggcatattataagagcctgcctggtgccgaggactacattaaagacctggaaaccaagtcatatgaaagcctgttcatccgagcagtgcgggcatacaacggtgagaactggagaacatccatcacagacatggagctggcccttcccgacttcttcaaagccttttacgagtgtctcgcagcctgcgagggttccagggagatcaaggacttcaaggatttctacctttccatagcagatcattatgtagaagttctggaatgcaaaatacagtgtgaagagaacctcaccccagttataggaggctatccggttgagaaatttgtggctaccatgtatcattacttgcagtttgcctattataagttgaacgacctgaagaatgcagccccctgtgcagtcagctatctgctctttgatcagaatgacaaggtcatgcagcagaacctggtgtattaccagtaccacagggacacttggggcctctcggatgagcacttccagcccagacctgaagcagttcagttctttaatgtgaccacactccagaaggagctgtatgactttgctaaggaaaatataatggatgatgatgagggagaagttgtggaatatgtggatgacctcttggaactggaggagaccagctagcccacagcaaccaaagagacttcctcttggcgttcaggaaacacagattctttgtccttttcccaacagcccaggctgttgatacctcagagccttctctttactctccaaagtgaaagggaagcccccgtctctctaactgcatgtcatcaggggtgagcctgcctttcctatcttcacacctgccacctcatgttcacacctatctttctcaccttttttttgagatggagtctcgctctcttgcccaggctggagtgcaatggcacgttctcagctcactgcaacctccgcctcttgggttcaagcaattctgctgcatcagcctcccgagtacctgggattacaggcatgtgccaccacgcccggctaattttgtatttttaagtaagagacggggttttgccatgttggccaggctggtctcgaactcttgacttcagatgatccatctgccttgggcctcccacagtgctgggattacaggcgtgagccaccatgcccggcctctttctcacctttacacctgtcttcttatcctcacatctgttttcacaccttcatccctgtcttcctcatgttcacacttgtcttccccatgttcatagctgcctttcttaccattttggtttgaagggcagtcttctctggcttgtttttttgtttttcccagaaaatcagtattattttttaaataagaaaaacattcctagaagatgataattgtgaaaacctcctttggcttatttgcttttccagattttagtctcctttctccccatccgggaaagatkgtggaagacataggctaaatttctccagcctcacaatggtcttcacttggtctgacttgtaccaattctagcacccactgaaaaacaagttgagtagagagtgtagagtgcagaaatgtggcttttgccccactttgcatctccaaaattacaacggttggccgatcnaaattgaggacaatgnttagttataagtctccgagttggaaaaggaagaaagccagagctgtctagtttcattcattctttcagtaaatatttattgagtaaaaaaaaaaaaaaaaaaaaaaaaaaaa

SEQ ID NO: 1591 - DNA, 1975 bp, Homo sapiens
caccgagcgcccctggtgtccctcgtagtggactgacgccgcagggcgagctagccggctccgcgcctctccgcggatccagacgcctcctggggctgctggcggagggtctgaggcggcgcggccatggctcacctccggggatttgcaaaccagcactctcgagtggaccctgaggagctcttcaccaagctcgaccgcattggcaagggctcgtttggggaggtctacaagggcatcgataaccacacaaaggaggtggtggccatcaagatcatcgacctggaggaggccgaggatgagatcgaggacatccagcaggagatcactgtcctcagtcagtgcgacagcccctacatcacccgctactttggctcctacctaaagagcaccaagctatggatcatcatggagtacctgggcggcggctcagcactggacttgcttaaaccaggtcccctggaggagacatacattgccacgatcctgcgggagattctgaagggcctggattatctgcactccgaacgcaagatccaccgagacatcaaagctgccaacgtgctactctcggagcagggtgacgtgaagctggcggactttggggtagcagggcagctcacagacacgcagattaagaggaacacattcgtgggcacccccttctggatggcacctgaggtcatcaagcagtcggcctacgacttcaaggctgacatctggtccctgggcatcacagccatcgagctggccaagggggagcctccaaactctgacctccaccccatgcgcgtcctgttcctgattcccaagaacagcccacccacactggagggccagcacagcaagcccttcaaggagttcgtggaggcctgcctcaacaaagacccccgattccggcccacggccaaggagctcctgaagcacaagttcatcacacgctacaccaagaagacctccttcctcacggagctcatcgaccgctataagcgctggaagtcagaggggcatggcgaggagtccagctctgaggactctgacattgatggcgaggcggaggacggggagcagggccccatctggacgttcccccctaccatccggccgagtccacacagcaagcttcacaaggggacggccctgcacagttcacagaagcctgcggacgccgtcaagaggcagccgaggtcccagtgcctgtccacgctggtccggcccgtcttcggagagctcaaagagaagcacaagcagagcggcgggagcgtgggtgcgctggaggagctggagaacgccttcagcctggccgaggagtcctgccccggcatctcagacaagctgatggtgcacctggtggagcgagtgcagaggttttcacacaacagaaaccacctgacatccacccgctgaagcgcactgctgttcagataggggacggaaggtcgtttgtttttgttctgagctccataagaactgtgctgacttggaaggtgccctgtgctatgtcgtgcctgcagggacacgtcggatcccgtgggcctcacatgccaggtcaccaggtcaccgtctccttccacccctgcagtgtgctgttgtgcacgtcaggacgctgttctctatgccactgcctcctccctctcctggcccagcagtattgctcacgggggctccagccgccggcgtggccctcatgagctacgcctgggtcttctgcagactcatgcagccctatggccgctcagaccaaggcgcagagcaactatcagggcatgctctgcctcctcctcccattgaggtggggagaggcaacagggcagcccccagaggagtgtcctggccgctgtctcccgggcccatgatggccatagatttgccttgtggtgttccatcaggtactgtgtctgctcataagtacttgtgtcatccagaatgttttgttttttaagaaaattgaattacttgtttcctgaaaaaaaaa

SEQ ID NO: 1592 - DNA, 5177 bp, Homo sapiens
ggactgcgaaaggagcagggttgcggagctagggctccagcctgcggccgcgcattcttgcgtctggccagccgcgagctctaagggtcggccccgcccggtccgcccccgcggctccctgccaggctctcgcgggcgcgctcggggtggggcctcgcggctggcggagatgcggccggggctgcgcggtggtgatgcgagcctgctgggcggcgcgccggggcagccggagccgcgcgccgcggcgctgtaatcggacaccaagagcgctcgcccccggcctccggccactttccattcactccgaggtgcttgattgagcgacgcggagaagagctccgggtgccgcggcactgcagcgctgagattcctttacaaagaaactcagaggaccgggaagaaagaatttcacctttgcgacgtgctagaaaataaggtcgtctgggaaaaggactggagacacaagcgcatccaaccccggtagcaaactgatgacttttccgtgctgatttctttcaacctcggtattttcccttggatattaacttgcatatctgaagaaatggcattccggacaatttgcgtgttggttggagtatttatttgttctatctgtgtgaaaggatcttcccagccccaagcaagagtttatttaacatttgatgaacttcgagaaaccaagacctctgaatacttcagcctttcccaccatcctttagactacaggattttattaatggatgaagatcaggaccggatatatgtgggaagcaaagatcacattctttccctgaatattaacaatataagtcaagaagctttgagtgttttctggccagcatctacaatcaaagttgaagaatgcaaaatggctggcaaagatcccacacacggctgtgggaactttgtccgtgtaattcagactttcaatcgcacacatttgtatgtctgtgggagtggcgctttcagtcctgtctgtacttacttgaacagagggaggagatcagaggaccaagttttcatgattgactccaagtgtgaatctggaaaaggacgctgctctttcaaccccaacgtgaacacggtgtctgttatgatcaatgaggagcttttctctggaatgtatatagatttcatggggacagatgctgctatttttcgaagtttaaccaagaggaatgcggtcagaactgatcaacataattccaaatggctaagtgaacctatgtttgtagatgcacatgtcatcccagatggtactgatccaaatgatgctaaggtgtacttcttcttcaaagaaaaactgactgacaataacaggagcacgaaacagattcattccatgattgctcgaatatgtcctaatgacactggtggactgcgtagccttgtcaacaagtggaccactttcttaaaggcgaggctggtgtgctcggtaacagatgaagacggcccagaaacacactttgatgaattagaggatgtgtttctgctggaaactgataacccgaggacaacactagtgtatggcatttttacaacatcaagctcagttttcaaaggatcagccgtgtgtgtgtatcatttatctgatatacagactgtgtttaatgggccttttgcccacaaagaagggcccaatcatcagctgatttcctatcagggcagaattccatatcctcgccctggaacttgtccaggaggagcatttacacccaatatgcgaaccaccaaggagttcccagatgatgttgtcacttttattcggaaccatcctctcatgtacaattccatctacccaatccacaaaaggcctttgattgttcgtattggcactgactacaagtacacaaagatagctgtggatcgagtgaacgctgctgatgggagataccatgtcctgtttctcggaacagatcggggtactgtgcaaaaagtggttgttcttcctactaacaactctgtcagtggcgagctcattctggaggagctggaagtctttaagaatcatgctcctataacaacaatgaaaatttcatctaaaaagcaacagttgtatgtgagttccaatgaaggggtttcccaagtatctctgcaccgctgccacatctatggtacagcctgtgctgactgctgcctggcgcgggacccttattgcgcctgggatggccattcctgttccagattctacccaactgggaaacggaggagccgaagacaagatgtgagacatggaaacccactgactcaatgcagaggatttaatctaaaagcatacagaaatgcagctgaaattgtgcagtatggagtaaaaaataacaccacttttctggagtgtgcccccaagtctccgcaggcatctatcaagtggctgttacagaaagacaaagacaggaggaaagaggttaagctgaatgaacgaataatagccacttcacagggactcctgatccgctctgttcagggttctgaccaaggactttatcactgcattgctacagaaaatagtttcaagcagaccatagccaagatcaacttcaaagttttagattcagaaatggtggctgttgtgacggacaaatggtccccgtggacctgggccagctctgtgagggctttacccttccacccgaaggacatcatgggggcattcagccactcagaaatgcagatgattaaccaatactgcaaagacactcggcagcaacatcagcagggagatgaatcacagaaaatgagaggggactatggcaagttaaaggccctcatcaatagtcggaaaagtagaaacaggaggaatcagttgccagagtcataatattttcttatgtgggtcttatgcttccattaacaaatgctctgtcttcaatgatcaaattttgagcaaagaaacttgtgctttaccaaggggaattactgaaaaaggtgattactcctgaagtgagttttacacgaactgaaatgagcatgcattttcttgtatgatagtgactagcactagacatgtcatggtcctcatggtgcatataaatatatttaacttaacccagattttatttatatctttattcaccttttcttcaaaatcgatatggtggctgcaaaactagaattgttgcatccctcaattgaatgagggccatatccctgtggtattcctttcctgctttggggctttagaattctaattgtcagtgattttgtatatgaaaacaagttccaaatccacagcttttacgtagtaaaagtcataaatgcatatgacagaatggctatcaaaagaaatagaaaaggaagacggcatttaaagttgtataaaaacacgagttattcataaagagaaaatgatgagtttttatggttccaatgaaatatcttcccctttttttaagattgtaaaaataatcagttactggtatctgtcactgacctttgtttccttattcaggaagataaaaatcagtaacctaccccatgaagatatttggtgggagttatatcagtgaagcagtttggtttatattcttatgttatcaccttccaaacaaaagcacttactttttttggaagttatttaatttattttagactcaaagaatataatcttgcactactcagttattactgtttgttctcttattccctagtctgtgtggcaaattaaacaatataagaaggaaaaatttgaagtattagacttctaaataaggggtgaaatcatcagaaagaaaaatcaaagtagaaactactaattttttaagaggaatttataacaaatatggctagttttcaacttcagtactcaaattcaatgattcttccttttattaaaaccagtctcagatatcatactgatttttaagtcaacactatatattttatgatcttttcagtgtgatggcaaggtgcttgttatgtctagaaagtaagaaaacaatatgaggagacattctgtctttcaaaaggtaatggtacatacgttcactggtctctaagtgtaaaagtagtaaattttgtgatgaataaaataattatctcctaattgtatgttagaataattttattagaataatttcatactgaaattattttctccaaataaaaattagatggaaaaatgtgaaaaaaattattcatgctctcatatatattttaaaaacactacttttgcttttttatttaccttttaagacattttcatgcttccaggtaaaaacagatattgtaccatgtacctaatccaaatatcatataaacattttatttatagttaataatctatgatgaaggtaattaaagtagattatggcctttttaagtattgcagtctaaaacttcaaaaactaaaatcattgtcaaaattaatatgattattaatcagaatatcagatatgattcactatttaaactatgataaattatgataatatatgaggaggcctcgctatagcaaaaatagttaaaatgctgacataacaccaaacttcattttttaaaaaatctgttgttccaaatgtgtataattttaaagtaatttctaaagcagtttattataatggtttgcctgcttaaaaggtataattaaacttcttttctcttctacattgacacacagaaatgtgtcaatgtaaagccaaaaccatcttctgtgtttatggccaatctattctcaaagttaaaagtaaaattgtttcagagtcacagttccctttatttcacataagcccaaactgatagacagtaacggtgtttagttttatactatatttgtgctatttaattctttctattttcacaattattaaattgtgtacactttcattacttttaaaaatgtagaaattcttcatgaacataactctgctgaatgtaaaagaaaattttttttcaaaaatgctgttaatgtatactactggtggttgattggttttattttatgtagcttgacaattcagtgacttaatatctattccatttgtattgtacataaaattttctagaaatacacttttttccaaagtgtaagtttgtgaatagattttagcatgatgaaactgtcataatggtgaatgttcaatctgtgtaagaaaacaaactaaatgtagttgtcacactaaaatttaattggatattgatgaaatcattggcctggcaaaataaaacatgttgaattcccc

SEQ ID NO: 1593 - DNA, 8034 bp, Homo sapiens
cttgagtgttagagctgagtagttttcccagaatctctaagtcctttttatgctcttttatgaatgaatagaattagtaaaagataaataaattttttcttttggatttcttaaccagtggaaaaaatgttgactttaaaagttcataaaatcaaattttgcttaagaatatgttatttccacttgtgaggccagcctggtagacctctgggatccttttctgttcactcacacaccactgagataaggagtgaagtgtgggctaaatagggctgaggcttgggcaagggcatttctgccagagcaccagagacgtcagcatctcaagggcactgtggtatggaaaaggacgccacatgagtaaattttaaaaatataaatattttaaagggtaaaaatgagggtccctgtatttgaggatataaaagatgaaactgaagaagaaaagataggggaagaagaaaatgaagaagaccaggtcttctataagcctgttattgaagacttaagcatggaattggccagaaaatgcacggaactcattagcgatatccgttataaagaagagtttaaaaagtccaaggataagtgtacatttgtgactgacagtcctatgctaaaccatgtaaaaaatatcggtgcttttatttctgaggcaaaatacaaaggcaccattaaagctgacctttctaattctctttataagcggatgccagccacaattgacagtgtttttgcaggagaagttacacagctccagagtgaggtggcctacaagcagaaacatgatgctgccaaaggattctcagattatgcccacatgaaggagccccctgaggttaaacatgccatggaggtcaataaacaccagagtaatatttcttataggaaagacgtgcaggacacccacacgtacagtgcagaacttgaccgaccagacatcaagatggcaacccagatctctaagatcataagcaatgcagaatacaagaaaggacaaggaataatgaataaagagcccgctgtaattggaagaccagattttgaacatgccgtggaagcttctaaactttctagtcaaattaaatacaaagaaaaattcgataatgaaatgaaggataagaaacatcattacaatcctcttgaaagtgcttcttttaggcagaatcagcttgctgctacactggcgagcaatgtgaagtacaagaaagacattcaaaatatgcatgatccagtttcagatctcccaaatttgttgtttttagaccatgttttgaaagccagcaaaatgctcagcggccgagaatataaaaagctctttgaggaaaacaaaggaatgtatcattttgatgcagatgctgtggaacatctgcaccataaaggcaatgccgtcctccaaagtcaggtgaaatataaagaagaatatgagaaaaataagggaaagccaatgcttgaatttgttgagacaccatcatatcaagcttcaaaggaggctcaaaagatgcaaagtgaaaaagtttacaaagaggattttgagaaggagattaaaggaaggtcatcactggatttagacaagactccagaatttttacatgtaaagtacatcaccaaccttctgagggagaaagaatataaaaaagatttggaaaatgagataaaagggaaaggaatggaacttaattcagaagttcttgatatccaaagagcaaagcgggcctctgaaatggcaagtgagaaagaatacaagaaagacctggagtcaataattaaagggaaaggaatgcaagctggcactgacacccttgaaatgcagcatgccaagaaggctgcagagatagcgagtgagaaagactataaaagagatctggagactgaaattaaagggaaagggatgcaggtgagcacagacactcttgatgtccagagagctaagaaagcatccgagatggccagccagaaacaatacaagaaggacttagaaaatgaaattaaagggaaaggaatgcaagtgagcatggatatcccagatatccttcgagccaagaggacatctgaaatctatagccagagaaagtataaagatgaagcagagaagatgctttctaactattctaccatagcagatactcctgaaattcagagaattaagacaactcaacaaaacattagtgcggtattttataagaaagaagtgggagctggcactgcagtgaaagatagcccagagatcgaacgagtgaagaaaaatcagcagaatattagttcagtgaaatacaaagaagagattaaacatgcaacagccatttctgatcctccagaactaaagagagttaaagaaaaccagaagaacatcagcaatctccagtataaagagcaaaactacaaggccactccggtaagcatgaccccggagatagagagagtgaggcgaaaccaggagcagctgagtgcggtaaaatataagggagaacttcaacggggaactgcaatttctgatccaccagagctgaagagggcaaaagaaaaccagaaaaacatcagcaatgtttattacagaggtcagctgggaagagctaccactttaagtgtaactcctgaaatggaaagagtgaagaagaatcaagaaaatattagctcggtaaaatatacccaggaccataaacagatgaaaggtagaccaagtctgattttagatacacctgctatgagacatgttaaagaagcacaaaatcatatttcaatggtaaaataccatgaagattttgaaaaaacaaaggggagaggctttactcccgtcgtggacgatcctgtgacagagagagtgaggaagaacacccaggtggtcagcgatgctgcctataaaggggtccaccctcacatcgtggagatggacaggagacctggaatcattgttgacctcaaagtttggcgcacagatcctggctccatcttcgaccttgatcccctggaagacaatattcagtctagaagtctccatatgctctctgaaaaggcgagtcactataggcgacactggtctcgatcccattccagcagtactttcggtacaggtctcggagacgacaggtcagaaatctccgagatttaccctagcttttcatgctgcagtgaggtaacaagaccgtctgatgaaggagcacctgttcttcccggagcctatcagcaaagccattcccaaggctatggctacatgcaccagaccagtgtgtcatccatgagatcaatgcagcattcaccaaatctaaggacctaccgagccatgtacgattacagtgcccaggatgaagacgaggtctcctttagagacggcgactacatcgtcaacgtgcagcctattgacgatggctggatgtacggcacagtgcagagaacagggagaacaggaatgctcccagcgaattacattgagtttgttaattaattatttctccctgccctttgagctttattctaatgtatcccaaacctaatctttttaaaagatagaagatacttttaagacaacttggccattattttacaatgatgtatccttcctttgacaattagacacacaggtaccaggaagaaggaatgacctctgggctgaaaacagcagcattttcagtaattcctacaaacaaaaatctttgtgtctggacgcctggtgctgctaattgtgttcatggtttcctttgattggctattgaacccttctgggaaatgtatttttgtagactttaatagagaagttgattgtcccttaaatgtagcgtgtgtttgaaacttcttagctgtcactttggaatcaccccaagccaattctcttaactctgtaatgcagccaataatacaaacccgttttgcttttgagtcatgaggcaatttccaatattagtgaaaattgcccaatataataagtgtaaacagtggcagaaggacagtctggttaaaattatattgactggtggccttagggatctagaaacttctactaaacagagaaatttccttgttccctaggctgactggtatctatttatttctcatttgtaccaaggcatctcctactctccatttatattctatggacccaagtctatgctcagttccacagaatgtcaggaccaaataacttcacagctactctgcaaagggcaaattataatgtcattgatataatttccctagtagcatttaccctgttgcatgtcatgtagattcaagcttctgtaacataggcagctgcactgcgcgttcctattattgaagcaaaaagggtgactgatacctaaaagccctttcttcctctagtcgccagctcatcagaaaaacatactttgaaaagatgcttgagattttcctgctgcatcgcactctagtttggaaggatttacatcttaggaaataacatgtatactctagtaaataagcgatttaggtgttccattgaacagctttgattaacttaatgccaccattgatttcaaagtgaagaaaatgtaacagaagccagtgaagcaatggaagctggagtgtgactggaaaaatactcagcaaacaaagttaccaattccatacagagatgatctggtgtcttcttttggaaaatggtattcaaattctggaatggaaatctagccaccaaaacgggttaatcaaaagacgtccttttccgttttttttgcttttattttctaaatcatttttaagggaatgaaacaggaatgtcatcagagattttttagtacaggcccaagagcctgtactctaagaaagaaatttttgccatgtatgaattttcgaataagtgactttgcaggcttttgctagcccttgctggtgggtctggaaattacatccagagtctgcagtccaggtcaccaagccagcggcacccgtcggcaaccctgtgtttaacggattgtgccgtttactgtgacctgcaacggggtggcattcacttagggtctgacttcacagctatgacaaaaccgaaaaagcaaaactgcgaggaagtgctaagatgtacgggtcttggggatatctgccttatatgttatattcaaggaaattaacgaaacatcctgtgaaacatcgtttaaggaaacgtttactagtccaaaggccaaagctaatttatttccactttagaaaagttagcacatgcttttgaaaatctgtgatttcattttattaggctaaaagggtaaataggctttattacactgaagctgcatctatatgtcactgacataaagttgaaaaaataaatgcaggcaaataactagagacttcttttaagggggtttggctggtttctctcactgaaatggccagtcgtgattaaagtgataaaaccccatatctgttttggtatattgtacacaaacctacaaaaataaactgaacttgcaatatttttgcaataaaatctgtcgttaaaactgaggataaaatacctgctcaattttattttactaagtatatatttacatttcacccaggcaggccattttcttttgtgattataagaaagagtagttgttgattaaattttcagactaaatataggacaggtacaattttggataaatagcagatttataagaaccgcaatgaaaactgacttgaaataatgcttgtaatcaggaaagtaatttcatccaccgatttcaaaaccagattcactgagcataaaagtcaatacatatttgaggaataagtctcctaaaattttaagcttcacgtaataatgtttgcatagcaaaatatttctgcttcaagcctttaggaattaagatctgatcagaatttaactaaagggtagttgttttacaatgaagactaaaactgaacaagatgttgcatgcgcttaggccataatttggtagtgttggcagttgttaataaagcttgtcaggatgttaagcatctcaggagaaatattggaaaattatatgtataaaaccaaagtgctgtttttaaaagcatcatttaaaaaaaaatgacatgcctgaacaacttttccactttccacgtgcttccctcccacctttggtttggcaacaggtatctcgtgcatgaagctgacagctaaagaagattttaaaaattgagttaaagatgactgtgtaaatgtccaagcacagagagcatgcacctgactttctaaagtttgatgtgttctcaagcctgacagaagcacaaggaacagtttgatacacttttaaaaggttctgaaaacaaagctgtatagggatcctctctctcttgagcaaagtatagcaacagaatatattgcttttgttgtaagcttttgtagtacatgtttttactaataattcttgttctctagaaagctttctatttctaacctatggcaaaatgaatccttcatgtcttcttgttattgtttacacacttgcagtgtagcccagtttgaaatatttatttggttatcaactgcccatggaggaggctcttgatgatcccaggtctcctcgacctccatacaccacacaggcatttgtaagcacagtttccacaagcaccttgtaggaatatggataagattagaccagcccctctctgtccactgggtttatttcttgaagaagatgcagatctggtttttccaatgtgccacagtctttccttatcctctccatgctgagcttgacaacactctgggaatgaggaacaagactttttctaaaaagatagtggaagttcaagggatgtacctcgttttcaggttcatccatctccagtggaatgttttcaataaaagatgaagaaaatgtgtgtgatctttaataacacatccctatagaaagtggataaaagatataccaaaactgtaatacagatatatacaaatataggtgcctttttgattactcttgtttgtctagtatgctcttggaaagaaaaccaagcaagcaagttgctgcctattctatagtaatattttattacacatgattgatatttttgtggtagggaagtgggatgctcctcagatattaaaggtgttagctgattgtattttatctctaaagatttagaactttagaaaatgccgacttcttccatctatttctgaaaggttctttgtggatttatatagagttgagctatataaacattaactttagatttgggatttaaaatgcctattgtaagatagaataattgtgaggctggattcactacacaagatgaacttcacttcataaattaattataccttagcgatttgcttctgataatctaaaagtggctagattgtggttgttttggttaaggtgatatggaggtgggagagcttttagttaagtaagaagctatgtaaactgacaaggatgctaaaataaaagtctctgaagtattccatgccttttggaccctttcctcgcaactaactgtcaactgttgatcaaaaaagtcaaggcattgtatgttgcttctgtggttattattctgtgatgcttagactacttgaacccataaacttggaagaatctttgagcaaattttctcagttgtctgtatgacttcagtatattcctgggaatgccataggattttttgtgcttgatacatggtatccagtttgcatagtatcacttctttgtaatccagttgctgttaagaatgatgtactttaaaggaaaagagaaaactgcatcacagtcccattctccagtgtccatgcaatgaattgctgagcatttaggaagcagcaccaagtctattacaggcatggtgtgaaacttgatgtttgacctgtgatcaaaattgaaccattgtacagtttggcttctgtttgcttcaaaatatgtagaattgtggttgatgattaatttgcgagactaactttgagagtgtaacagttttgaagaaaacattgaatgttttacaaatgaaggggcttcacggaatgttacaatgttactaatataatttggcttttgttatgcaaattgttaacaccagctattaaaatatattttagtagaaaaaaaaaaa

SEQ ID NO: 1594 - DNA, 2569 bp, Homo sapiens
  misc_feature (1351)..(1351): n is a, c, g, or t
  misc_feature (1387)..(1387): n is a, c, g, or t
  misc_feature (1402)..(1402): n is a, c, g, or t
  misc_feature (1641)..(1641): n is a, c, g, or t
  misc_feature (2009)..(2010): n is a, c, g, or t
aattcccagaccacaggaatacctaatgccttttttctcttcctgtctttgtccctcacactacagcggcccctcccttccctcttcaacctcatcctccctccccacaggcccagagaaccagttgggctttgttctcctgcaggctatggttcatcatgcaaatagctcctgtgtcagaaatgctttttggcttcaaataacagaaaagctaacaccagctttatcaataataatatcggtggtttacttaaggtgtccagagatggtggagaacaggattggtttcctcctcaatgtcaaggactcaaagactctttctgtggtagggccacatcctaaaccctgtatcctgtgattatttacccgacaggcaaaagagattttgcagatgcaattaaggttaaggaccttgacgtgggaagattgtgattatttacctgacagggcaaaagagattttgcagatgcaattaaggttaaggaccttgacgtgggaagattatcctggattatctaggtgggcgcaatttgatcacatgggtccccagaagtggagaacctttcccacctgtagaaagccagagagctggcacctgagaaggacagaactgtcattgcaggatttgaagatgaaggggcccatgagccaaggaatgccagtgacctatagaggctaaaaaacagcaaggaaatggactctccccagagcctccagaggaatgcagccctgttgatcacatgatcaccagatggctgccccagagccaaatgtcgcttcctgagcaccatactcaaaggcaggggaagtggatggagggcaggagctccattcttgtttgccactctccttttgtcaattgggaaaaaattccagaaactctgggagccctccccttacatttcctgggtcatggggccagccctagctgctggagggactgagaacagctgttgagcagtttacctgacggcatctgccatggcttggcaggaactctggctttgggagagagcagcagcaaggtattcaagcaccacctccacccagcccctcccacatttcactcaggactgagtaaaggagacactcagatgctactcagatgctggcttcagctaagtattttgcaaagcctctcgtgtcttacaagtttgtggctatcatgacaaaatggagcagcctactatatctacatatacaactatgggggacctagttttatctcatttaccacaatgttttcaatcattttttggatgacataatttttagcctcttctctaaatgcttcctcaagctttccttgccttccagccactgcaaatgacttgcagtttcccctacatgncacctgacccttgtgcctccctccctctgcccatgnccagaaagccctttnctgtgccctctggcttcctgataaactcctatcatcttcaagagccagttcccatgccagctctccccaagtgctccactgaggcttccgtaacacctctgttcccacatcgggttgactgtctttgttttgtcattgcttgctctggctgtgtctccctcattagactgggatgccttcaaggtagggaccctatctgggtcagcttggcaccccaaagcgtaccacagcacctgatnctgaggaggctctcagtagatatctgttgagtaaccagaatgtagggtggtcctgatggtttctgacattgaatagaaaacagctccctatttgatcttaaaataatcactataacctggacatactgtactagatgctgtttttgtctgacttctactctgtcaatctctttgcacctccatttgttcatctgtgaaatgaagaaaatgctcatggagttcagtgaagattaaatgaatgaatataggtagactgcctaatctggcacttgccacgcagctgacttcaatatagtagctctaatattatggtccttgaggatcttactgtcttatggcccagaactgcatttgattaaagaaggctnncctaaaaaaagagtcatacatattccatttgtcctttcagaaggccgtgaagcatttacactctttaagacaaattcccatccaaaaatagttaagatttctaaaatattttgatgctgaaagaggtgtgcttcagttgggtggcaaatttgcttctatggaagatttttaatacaggttgtttctattttactttttctggctgaaaggattttacatttattcaaagtcaaaagggaaaagaaatccaagaactacagaagagcagttgaagtgatttatgcttgatttctaaatgcaacttatgtttatacataatttaaaactcaaagaaagcatgcttatacaatcatgtgcaactttaaactttaagaactctggatgaatacatggtggcaacagtccatgacacctgaaaacatcatttgtggagtggcgtagagttcagtgttcgcagtcgcatattacaaccatgtttcacacagccctgctcggtttgattttctccacgtggttgataattgtcttcagttgctgctaagtgattttgcaaatttcg

SEQ ID NO: 1595 - DNA, 1761 bp, Homo sapiens
gagggagacttcctgctcatctgccgctccctttgccgccgccttagcccgggacccgaacccagcctctcccctacccgaacaccggccccggctccaccgaggcccgggtcccccagcccgtctcgccgccgccatggcggaccctaaatacgccgaccttcccggcattgccaggaatgagccagatgtttatgaaactagcgacctacctgaggatgatcaagcggagttcgatgcgtttgcacaagagctggaggagctgacaagcacaagtgtggaacacatcattgtcaatcctaatgctgcctatgacaagttcaaggacaagagagtggggacaaagggacttgatttctcagatcgtattggaaaaaccaagaggacaggatatgaatctggagaatatgagatgcttggagagggtctgggagtgaaggagacaccccagcaaaagtaccagcgcctactgcatgaggtccaagagctgacaactgaagttgaaaaaatcaagacgacagtgaaggagtcagccacagaggagaagctgacccctgtgttgctggctaaacagctggcagccctgaagcagcagctggttgcttcccacctggagaagctgctgggaccagatgctgcaatcaaccttaccgaccccgatggcgccctggctaagcgcctactactgcagctggaagcaacaaagaacagcaaagggggatcagggggaaaaaccactgggacccccccagatagcagccttgtcacttatgaactacattctcggcctgagcaggacaagttctctcaagctgccaaagtcgcagaacttgaaaagcgcctgacagagctggagacagctgtacgttgtgatcaggatgctcagaatcccctttctgcaggtctacagggagcctgtctcatggagactgtagagctgttgcaagcaaaggtgagcgccctagaccttgcagttttggatcaagtggaggctcggctacagagtgtcctgggaaaggtgaacgagattgccaagcataaagcctctgtagaagatgcagatacacaaagcaaggtgcaccagctatatgaaactatacagcgctggagccccattgcctccaccctccctgagctggtgcagagacttgtcaccatcaagcagctgcacgagcaagccatgcagtttggtcagctcctgacacacttggataccacccagcagatgattgctaattccttgaaggacaataccaccctcttgacccaggtgcagacaaccatgcgtgaaaacctggccacagttgaggggaactttgccagcattgatgaacggatgaagaagctgggaaagtgagcacatttgggagctggagaacaggggttatccctacccctgtgaactctgttaacagcttacatagggtttcccctttactataactctagcatccccatcccatttgacactgggggcaagggttcttcttgcatgtggggtttatacccctcccctgatgaatacagagtggtagctaggggttggttatcatcagaaggtggtctcccctcaggcctgggggataaggacgtgggcccagccacatgccaactcatgtccaatactgctttgcctggtgtggggaaggattgggtcttgtcccccaacacagcttctgtggctgactgtaatactgtacaactgtttctgaccattaaatgctgttgtactctgaaaaaaaaaaaaaaaaaaaaaaaaaa

SEQ ID NO: 1596 - DNA, 1284 bp, Homo sapiens
caggtccggagcctcaacttcaggatgttgacaacattgctgccgatactgctgctgtctggctgggccttttgtagccaagacgcctcagatggcctccaaagacttcatatgctccagatctcctacttccgcgacccctatcacgtgtggtaccagggcaacgcgtcgctggggggacacctaacgcacgtgctggaaggcccagacaccaacaccacgatcattcagctgcagcccttgcaggagcccgagagctgggcgcgcacgcagagtggcctgcagtcctacctgctccagttccacggcctcgtgcgcctggtgcaccaggagcggaccttggcctttcctctgaccatccgctgcttcctgggctgtgagctgcctcccgagggctctagagcccatgtcttcttcgaagtggctgtgaatgggagctcctttgtgagtttccggccggagagagccttgtggcaggcagacacccaggtcacctccggagtggtcaccttcaccctgcagcagctcaatgcctacaaccgcactcggtatgaactgcgggaattcctggaggacacctgtgtgcagtatgtgcagaaacatatttccgcggaaaacacgaaagggagccaaacaagccgctcctacacttcgctggtcctgggcgtcctggtgggcggtttcatcattgctggtgtggctgtaggcatcttcctgtgcacaggtggacggcgatgttaattactctccagccccgtcagaaggggctggattgatggaggctggcaagggaaagtttcagctcactgtgaagccagactccccaactgaaacaccagaaggtttggagtgacagctcctttcttctcccacatctgcccactgaagatttgagggaggggagatggagaggagaggtggacaaagtacttggtttgctaagaacctaagaacgtgtatgctttgctgaattagtctgataagtgaatgtttatctatctttgtggaaaacagataatggagttggggcaggaagcctatgcgccatcctccaaagacagacagaatcacctgaggcgttcaaaagatataaccaaataaacaagtcatccacaatcaaaatacaacattcaatacttccaggtgtgtcagacttgggatgggacgctgatataatagggtagaaagaagtaacacgaagaagtggtggaaatgtaaaatccaagtcatatggcagtgatcaattattaatcaattaataatattaataaatttcttatattt

SEQ ID NO: 1597 - DNA, 921 bp, Homo sapiens
gcggcgctcgcgccaagggacgtgtttctgcgctcgcgtggtcatggaggcgctgccgctgctagccgcgacaactccggaccacggccgccaccgaaggctgcttctgctgccgctactgctgttcctgctgccggctggagctgtgcagggctgggagacagaggagaggccccggactcgcgaagaggagtgccacttctacgcgggtggacaagtgtacccgggagaggcatcccgggtatcggtcgccgaccactccctgcacctaagcaaagcgaagatttccaagccagcgccctactgggaaggaacagctgtgatcgatggagaatttaaggagctgaagttaactgattatcgtgggaaatacttggttttcttcttctacccacttgatttcacatttgtgtgtccaactgaaattatcgcttttggcgacagacttgaagaattcagatctataaatactgaagtggtagcatgctctgttgattcacagtttacccatttggcctggattaatacccctcgaagacaaggaggacttgggccaataaggattccacttctttcagatttgacccatcagatctcaaaggactatggtgtatacctagaggactcaggccacactcttagaggtctcttcattattgatgacaaaggaatcctaagacaaattactctgaatgatcttcctgtgggtagatcagtggatgagacactacgtttggttcaagcattccagtacactgacaaacacggagaagtctgccctgctggctggaaacctggtagtgaaacaataatcccagatccagctggaaagctgaagtatttcgataaactgaattgagaaatacttcttcaagttatgatgcttgaaagttctcaataaagttcacggtttcattacca

SEQ ID NO: 1598 - DNA, 2088 bp, Homo sapiens
cgctgtcaactctccaactcagctcagctgatcggttgccgccgccgccgccgccagattctggaggcgaagaacgcaaagctgagaacatggacgttaatatcgccccactccgcgcctgggacgatttcttcccgggttccgatcgctttgcccggccggacttcagggacatttccaaatggaacaaccgcgtagtgagcaacctgctctattaccagaccaactacctggtggtggctgccatgatgatttccattgtggggtttctgagtcccttcaacatgatcctgggaggaatcgtggtggtgctggtgttcacagggtttgtgtgggcagcccacaataaagacgtccttcgccggatgaagaagcgctaccccacgacgttcgttatggtggtcatgttggcgagctatttccttatctccatgtttggaggagtcatggtctttgtgtttggcattacttttcctttgctgttgatgtttatccatgcatcgttgagacttcggaacctcaagaacaaactggagaataaaatggaaggaataggtttgaagaggacaccgatgggcattgtcctggatgccctagaacagcaggaagaaggcatcaacagactcactgactatatcagcaaagtgaaggaataaacataacttacctgagctagggttgcagcagaaattgagttgcagcttgcccttgtccagacctatgttctgcttgcgtttttgaaacaggaggtgcacgtaccacccaattatctatggcagcatgcatgtataggccgaactattatcagctctgatgtttcagagagaagacctcagaaaccgaaagaaaaccaccaccctcctattgtgtctgaagtttcacgtgtgtttatgaaatctaatgggaaatggatcacacgatttctttaagggaattaaaaaaaataaaagaattacggcttttacagcaacaatacgattatcttataggaaaaaaaaaaatcattgtaaagtatcaagacaatacgagtaaatgaaaaggctgttaaagtagatgacatcatgtgttagcctgttcctaaatccctagaattgtaatgtgtgggatataaattagtttttattattctcttaaaaatcaaagatgatctctatcactttgccacctgtttgatgtgcagtggaaactggttaagccagttgttcatacttcctttacaaatataaagatagctgtttaggatattttgttacatttttgtaaatttttgaaatgctagtaatgtgttttcaccagcaagtatttgttgcaaacttaatgtcattttccttaagatggttacagctatgtaacctgtattattctggacggacttattaaaatacaaacagacaaaaaataaaacaaaacttgagttctatttaccttgcacattttttgttgttacagtgaaaaaaatggtccaagaaaatgtttgccatttttgcattgtttcgtttttaactggaacatttagaaagaaggaaatgaatgtgcattttattaattccttaggggcacaaggaggacaataatagctgatcttttgaaatttgaaaaacgtctttagatgaccaagcaaaaagactttaaaaaatggtaatgaaaatggaatgcagctactgcagctaataaaaaattttagatagcaattgttacaaccatatgcctttatagctagacattagaattatgatagcatgagtttatacattctattatttttcctccctttctcatgtttttataaataggtaataaaaaatgttttgcctgccaattgaatgatttcgtagctgaagtagaaacatttaggtttctgtagcattaaattgtgaagacaactggagtggtacttactgaagaaactctctgtatgtcctagaataagaagcaatgatgtgctgcttctgatttttcttgcattttaaattctcagccaacctacagccatgatctttagcacagtgatatcaccatgacttcacagacatggtctagaatctgtacccttacccacatatgaagaataaaattgattaaaggtta

SEQ ID NO: 1599 - DNA, 1447 bp, Homo sapiens
ggcacgaggggatgctctgatggccgggcctgcggcgctgagcgcggcggcggcggctgctctggcggccgccctgctcctgctgcgtcgtgaggacccggggccgggggctggccccagcatggccgaaacagaagccctgtcgaagcttcgggaagacttcaggatgcagaataaatccgtctttattttgggcgccagcggagaaaccggcagagtgctcttaaaggaaatcctggagcagggcctgttttccaaagtcacgctcattggccggaggaagctcaccttcgacgaggaagcttataaaaatgtgaatcaagaagtggtggactttgaaaagttggatgactacgcctctgcctttcaaggtcatgatgttggattctgttgcctgggtaccaccagagggaaagctggggcggagggatttgttcgtgttgaccgagattatgtgctgaagtctgcagagctggcaaaagctggagggtgcaaacatttcaacttgctatcctctaaaggagctgataaatcaagcaattttttatatctacaagttaagggagaagtagaagccaaggttgaagaattaaaatttgatcgttactctgtatttaggcctggagttctgttatgtgataggcaagaatctcgcccaggtgaatggctggttagaaagttctttggctccttaccagactcttgggccagggggcattctgtgcctgtggtgaccgtggttagagcaatgctgaacaatgtggtgagaccaagagacaagcagatggaactgctggagaacaaggccatccatgacctggggaaagcgcatggctctctcaagccatgaccacactggagaaatggtttttattgtcaaccttaacacccatcaccaaatcggtaatttcagggtctaaaaaaagtcagcatgttttaactttgttgttttactatcctcaggcatccattccaatcaagaaatgatggtgctctgcatcagtggttcagagcctggttatacatatagatcactcagggagctttggaaaaataaagatttgtcagccctatctcaaacttgaatcaaaatttctggggtgtgggcacaataatctgtaattttctttgtttatacttcccctgatgccactggttccgatgccactggctggggggcctgctttgaaatgcttgtctgcagagtcacagcagccatgaaaaccttatgaccgtgcaaatgagctctgctctaaaattgttgacattcatgtctctgagttacaaaagtgctaattcactacatgtaattgtgtaagtaaacattgtgcctttactacttctttatgtaatagaagttatatacctaagcttatataatacatggggaggattaaataaaggaataaagatgaatggacaactccaaaaaaaaaaaaaaaaaaaa

SEQ ID NO: 1600 - DNA, 2242 bp, Homo sapiens
ggaagtcagcaggcgttggggaggggtggcgggggaatagcggcggcagcagccccagccctcagagagacagcagaaagggagggagggagggtgctggggggacagccccccaccattcctaccgctatgggcccaacctcccactcccacctcccctccatcggccggggctaggacacccccaaatcccgtcgcccccttggcaccgacaccccgacagagacagagacacagccatccgccaccaccgctgccgcagcctggctggggagggggccagccccccaggccccctacccctctgaggtggccagaatggatttgtggccaggggcatggatgctgctgctgctgctcttcctgctgctgctcttcctgctgcccaccctgtggttctgcagccccagtgccaagtacttcttcaagatggccttctacaatggctggatcctcttcctggctgtgctcgccatccctgtgtgtgccgtgcgaggacgcaacgtcgagaacatgaagatcttgcgtctaatgctgctccacatcaaatacctgtacgggatccgagtggaggtgcgaggggctcaccacttccctccctcgcagccctatgttgttgtctccaaccaccagagctctctcgatctgcttgggatgatggaggtactgccaggccgctgtgtgcccattgccaagcgcgagctactgtgggctggctctgccgggctggcctgctggctggcaggagtcatcttcatcgaccggaagcgcacgggggatgccatcagtgtcatgtctgaggtcgcccagaccctgctcacccaggacgtgagggtctgggtgtttcctgagggaacgagaaaccacaatggctccatgctgcccttcaaacgtggcgccttccatcttgcagtgcaggcccaggttcccattgtccccatagtcatgtcctcctaccaagacttctactgcaagaaggagcgtcgcttcacctcgggacaatgtcaggtgcgggtgctgcccccagtgcccacggaagggctgacaccagatgacgtcccagctctggctgacagagtccggcactccatgctcactgttttccgggaaatctccactgatggccggggtggtggtgactatctgaagaagcctgggggcggtgggtgaaccctggctctgagctctcctcccatctgtccccatcttcctccccacacctacccacccagtgggccctgaagcagggccaaaccctcttccttgtctcccctctccccacttattctcctctttggaatcttcaacttctgaagtgaatgtggatacagcgccactcctgccccctcttggccccatccatggactcttgcctcggtgcagtttccactcttgacccccacctcctactgtcttgtctgtgggacagttgcctccccctcatctccagtgactcagcctacacaagggaggggaacattccatccccagtggagtctcttcctatgtggtcttctctacccctctacccccacattggccagtggactcatccattctttggaacaaatccccccccactccaaagtccatggattcaatggactcatccatttgtgaggaggacttctcgccctctggctggaagctgatacctgaagcactcccaggctcatcctgggagctttcctcagcaccttcaccttccctcccagtgtagcctcctgtcagtgggggctggacccttctaattcagaggtctcatgcctgcccttgcccagatgcccagggtcgtgcactctctgggataccagttcagtctccacatttctggttttctgtccccatagtacagttcttcagtggacatgaccccacccagccccctgcagccctgctgaccatctcaccagacacaaggggaagaagcagacatcaggtgctgcactcacttctgccccctggggagttggggaaaggaacgaaccctggctggaggggataggagggcttttaatttatttctttttctgttgaggcttccccctctctgagccagttttcatttcttcctggtggcattagccactccctgcctctcactccagacctgttcccacaactggggaggtaggctgggagcaaaaggagagggtgggacccagttttgcgtggttggtttttattaattatctggataacagcaaaaaaactgaaaataaagagagagagaaaaaaaaaa

SEQ ID NO: 1601 - DNA, 2643 bp, Homo sapiens
acacacacaaacgccttcttcccggagtattgaatagttgggaattggaacccctccagggggaaccaaacattgtcgttcagaagaagacaaagagagattgaaatgaagctgttgatttcaacacacaaattctggtggtagatgaaagcaaagcaagtaagtttctccgaatccctagtcaactggaggtagagacggactgcgcaggttaactacagctcccagcatgcctgaggggcgggctcagcggctgcgcagactggcgcgcgcggacggtcatgggacttcagcatggcggtgtttgcagatttggacctgcgagcgggttctgacctgaaggctctgcgcggacttgtggagacagccgctcaccttggctattcagttgttgctatcaatcatatcgttgactttaaggaaaagaaacaggaaattgaaaaaccagtagctgtttctgaactcttcacaactttgccaattgtacagggaaaatcaagaccaattaaaattttaactagattaacaattattgtctcggatccatctcactgcaatgttttgagagcaacttcttcaagggcccggctctatgatgttgttgcagtttttccaaagacagaaaagctttttcatattgcttgcacacatttagatgtggatttagtctgcataactgtaacagagaaactaccattttacttcaaaagacctcctattaatgtggcgattgaccgaggcctggcttttgaacttgtctatagccctgctatcaaagactccacaatgagaaggtatacaatttccagtgccctcaatttgatgcaaatctgcaaaggaaagaatgtaattatatctagtgctgcagaaaggcctttagaaataagagggccatatgacgtggcaaatctaggcttgctgtttgggctctctgaaagtgacgccaaggctgcggtgtccaccaactgccgagcagcgcttctccatggagaaactagaaaaactgcttttggaattatctctacagtgaagaaacctcggccatcagaaggagatgaagattgtcttccagcttccaagaaagccaagtgtgagggctgaaaagaatgccccagtctctgtcagcactcccttcttcccttttatagttcatcagccacaacaaaaataaaacctttgtgtgatttactgttttcatttggagctagaaatcaatagtctataaaaacagttttacttgcaatccattaaaacaacaaacgaaacctagtgaagcatctttttaaaaggctgccagcttaatgaatttagatgtactttaagagagaaagactggttatttctcctttgtgtaagtgataaacaacagcaaatatacttgaataaaatgtttcaggtatttttgtttcattttgtttttgagatagggtctttgttgctcaggctggagtacagtggcataatcacagctcactgcaacctcaatcctgggctcaagtgatcctcccgcttcagcctctcaagcagcgggaactacaggtgtgcactaccacacctggctattttttttttttttttttttttcccttgtagagacatggtctcactatgttgctgaggctggtctcaaactcctaggatcaagccatcctcccgctttggcctcctaaagtgctgggattacatgagccaccacatgcagccagatgtttgaatattttaagagcttctttcgaaagtttcttgttcatactcaaatagtagttattttgaagatattcaaacttatattgaagaagtgactttagttcctcttgttttaagcttctttcatgtattcaaatcagcatttttttctaagaaattgctatagaatttgtggaaggagagaggatacacatgtaaaattacatctggtctcttccttcactgcttcatgcctacgtaaggtctttgaaataggattccttacttttagttagaaacccctaaaacgctaatattgattttcctgatagctgtattaaaaatagcaaagcatcggactgaaccaactttggaaataatttatttttataatgggatcatgttaagtagaagtagctttttatgcaaatacatgcatttatgcaatattaatgtaagggctctaaaacaatggagtagagccagaggtataactgaataagaaatttttttaagcaagagaaagacaactgttctgcgggttggagaaaatacaattttttttttttttttttttgagacagtctcgctctgtcccccaggctggagtgcagtggctcgatctctgctcactgcaagctccgcctcctgggttcatgccattctcctgcctcagcctcctgagtagctgggactacaggcgctcgccatgtatttagcagagacggggtttcaccgtgttagccaggatggtctcaatctcctgacctcatattccacccgcctcggcctcccaaagtgctgggattacaggcgttagccactgcgcccggcccgagaaaatacagttttaaaaagagaaagctttataacctcaccaatgaatacaaatgtttaaataaaatattgattaaaaaaacattaaaagcgaaaaaaaaaaaaaaaaaaaaaaaaaaa

SEQ ID NO: 1602 - DNA, 991 bp, Homo sapiens
aacggattcgccatcgtgagttccaggattttcaaaatggctgcagctcctcaagcaccggggcggggatctctccgtaagacgagacctctggttgtgaagacgtcgttgaacaacccatacatcatccgctggagcgctctggagagcgaggatatgcacttcatcctacagacgcttgaggacaggcttaaagctattggacttcagaagattgaagataagaagaaaaagaacaaaacaccttttctgaaaaaagaaagcagagagaaatgcagcattgctgttgatattagtgataatctgaaggagaagaaaacagatgctaagcagcaagtgtcagggtggacgcctgcacacgtcaggaagcagcttgtcattggcgttaacgaagttaccagagccctggaaaggagggaactgctgttagttctggtgtgtaaatcagtcaagcctgccatgatcacctcacacttgattcagttaagcctaagcagaagtgtccctgcctgtcaggtcccccggctcagtgagagaatcgcccccgtcattggcttaaaatgtgttctagccttggcgttcaaaaagaacaccactgactttgtggacgaagtaagagccatcatccccagagtccccagtttaagtgtaccatggcttcaagacagaattgaagattctggggaaaatttagagactgaacctctggaaagccaagacagagagcttttggacacttcatttgaagatctgtcaaaacctaagagaaagcttgctgacggtcggcaggcttctgtaacattacaaccccttaaaataaagaaactgattccaaaccctaataagataaggaaaccacccaaaagtaaaaaagctactccaaagtaatcttgcataaacttgtcatgtcatacagtttgtgaaaggacaccttgtaaagaagccttgaaactaataaaatgagttatacttacataaaaaaaaaaaaaaa

SEQ ID NO: 1603 - DNA, 1935 bp, Homo sapiens
ctggtcccgagcacgagctgtgaggggattcacttgtgtgcggaactcctcggaaccatggcgtccctttcccttgcacctgttaacatctttaaggcaggagctgatgaagagagagcagagacagctcgtctgacttcttttattggtgccatcgccattggagacttggtaaagagcaccttgggacccaaaggcatggacaaaattcttctaagcagtggacgagatgcctctcttatggtaaccaatgatggtgccactattctaaaaaacattggtgttgacaatccagcagctaaagttttagttgatatgtcaagggttcaagatgatgaagttggtgatggcactacctctgttaccgttttagcagcagaattattaagggaagcagaatctttaattgcaaaaaagattcatccacagaccatcatagcgggttggagagaagccacgaaggctgcaagagaggcgctgttgagttctgcagttgatcatggttccgatgaagttaaattccgtcaagatttaatgaatattgcgggcacaacattatcctcaaaacttcttactcatcacaaagaccactttacaaagttagctgtagaagcagttctcagactgaaaggctctggcaacctggaggcaattcatattatcaagaagctaggaggaagtttggcagattcctatttagatgaaggcttcctgttggataaaaaaattggagtaaatcaaccaaaacgaattgaaaatgctaaaattcttattgcaaatactggtatggatacagacaaaataaagatatttggttcccgggtaagagttgactctacagcaaaggttgcagaaatagaacatgcggaaaaggaaaaaatgaaggagaaagttgaacgtattcttaagcatggaataaattgctttattaacaggcaattaatttataattatcctgaacagctctttggtgctgctggtgtcatggctattgagcatgcagattttgcaggtgtggaacgcctagctcttgtcacaggtggtgaaattgcctctacctttgatcacccagaactggtgaagcttggaagttgcaaacttatcgaggaagtcatgattggagaagacaaactcattcacttttctggggttgcccttggtgaggcttgtaccattgttttgcgtggtgccactcaacaaattttagatgaagcagaaagatcattgcatgatgctctttgtgttcttgcgcaaactgtaaaggactctagaacagtttatggaggaggctgttctgagatgttgatggctcatgctgtgacacagcttgccaatagaacaccaggcaaagaagctgttgcaatggagtcttatgctaaagcactgagaatgttgccaaccatcatagctgacaatgcaggctatgacagtgcagacctggtggcacagctcagggctgctcacagtgaaggcaataccactgctggattggatatgagggaaggcaccattggagatatggctatcctgggtataacagaaagttttcaagtgaagcgacaggttcttctgagtgcagctgaagcagcagaggtgattctgcgtgtggacaacatcatcaaagcggcacccaggaaacgtgtccctgatcaccacccctgttaagcattcccacgtgctgtcgatctttggaccagtttctagcaaagttgtgtttgaaagatactctattaaagaagactgtggaatctgtttatcggtgcccattatatccttaagtttggatatttagctgaccttcgctttaacataggtctaatttatttgccgtgtcattttccatacaaatcagttgatttaaaggagttcatttcgcatactgggcattaaaataaaaatttgaacaatgaaaggaaaaaaaggagaaaaaaaaaa

SEQ ID NO: 1604 - DNA, 929 bp, Homo sapiens
ggcacgaggacaggtcgcctgactgggctcctccccgggcccgccccgacaggtttgtcttgtgaccgcgggcggccgctgcttctttcccgagcttggaacttcgttatccgcgatgcgtttcctggcagctacattcctgctcctggcgctcagcaccgctgcccaggccgaaccggtgcagttcaaggactgcggttctgtggatggagttataaaggaagtgaatgtgagcccatgccccacccaaccctgccagctgagcaaaggacagtcttacagcgtcaatgtcaccttcaccagcaatattcagtctaaaagcagcaaggccgtggtgcatggcatcctgatgggcgtcccagttccctttcccattcctgagcctgatggttgtaagagtggaattaactgccctatccaaaaagacaagacctatagctacctgaataaactaccagtgaaaagcgaatatccctctataaaactggtggtggagtggcaacttcaggatgacaaaaaccaaagtctcttctgctgggaaatcccagtacagatcgtttctcatctctaagtgcctcattgagttcggtgcatctggccaatgagtctgctgagactcttgacagcacctccagctctgctgcttcaacaacagtgacttgctctccaatggtatccagtgattcgttgaagaggaggtgctctgtagcagaaactgagctccgggtggctggttctcagtggttgtctcatgtctctttttctgtcttaggtggtttcattaaatgcagcacttggttagcagatgtttaattttttttttaacaacattaacttgtggcctctttctacacctggaaatttactcttgaataaataaaaactcgtttgtcttgtcaaaaaaaaaaaaaaaaaaaaaaaaaaaaaaa

SEQ ID NO: 1605 - DNA, 905 bp, Homo sapiens
caacacaggggcagtctccaggacctccacaccattaacaagatgagccttgtgctcccttgggctctagagaggaagcccctctgagccctcagcccctctttcctccctctcctaaagtaatttgatcctcaggaatttgttctgccctcatctggccctggccagctctgcatttgacaaatgccaggaagaggaaactgttgagaaaacggaactactggggaaagggagggctcactgagaaccatcccggtaacccgaccgccgctggtcaccatgaaccacattgtgcaaaccttctctcctgtcaacagcggccagcctcccaactacgagatgctcaaggaggagcaggaagtggctatgctgggggggccccacaaccctgctcccccgacgtccaccgtgatccacatccgcagcgagacctccgtgcctgaccatgtcgtctggtccctgttcaacaccctcttcatgaacacctgctgcctgggcttcatagcattcgcctactccgtgaagtctagggacaggaagatggttggcgacgtgaccggggcccaggcctatgcctccaccgccaagtgcctgaacatctgggccctgattttgggcatcttcatgaccattctgctcgtcatcatcccagtgttggtcgtccaggcccagcgatagatcaggaggcatcattgaggccaggagctctgcccgtgacctgtatcccacgtactctatcttccattcctcgccctgcccccagaggccaggagctctgcccttgacctgtattccacttactccaccttccattcctcgccctgtccccacagccgagtcctgcatcagccctttatcctcacacgcttttctacaatggcattcaataaagtgtatatgtttct

SEQ ID NO: 1606 - DNA, 857 bp, Homo sapiens
gcgtgggcgtgagatggcggcggcagcggtgagcagcgccaagcggagcctgcggggagagctgaagcagcgtctgcgggcgatgagtgccgaggagcggctacgccagtcccgcgtactgagccagaaggtgattgcccacagtgagtatcaaaagtccaaaagaatttccatctttctgagcatgcaagatgaaattgagacagaagagatcatcaaggacattttccaacgaggcaaaatctgcttcatccctcggtaccggttccagagcaatcacatggatatggtgagaatagaatcaccagaggaaatttctttacttcccaaaacatcctggaatatccctcagcctggtgagggtgatgttcgggaggaggccttgtccacagggggacttgatctcatcttcatgccaggccttgggtttgacaaacatggcaaccgactggggaggggcaagggctactatgatgcctatctgaagcgctgtttgcagcatcaggaagtgaagccctacaccctggcgttggctttcaaagaacagatttgcctccaggtcccagtgaatgaaaacgacatgaaggtagatgaagtcctttacgaagactcgtcaacagcttaaatctggattactacagccaaataatcagtgttttatatgagagtaaagcaaagtatgtgtatttttcccttgtcaaaaattagttgaaattgttcattaatgtgaatacagactgcattttaaaattgtaattatgaaataccttatataaaaccatctttaaaaaccaatagaagtgtgaatagtagaatattaattaaaatggaggctatcagcctgtgattttcagctt

SEQ ID NO: 1607 - DNA, 988 bp, Homo sapiens
gggcgggagcggcggtccagactggggagggacgcgcaccggccaggaggcttcaagaggagggcactagggccctgcgagcggcgtcttaaccggcggcgctaggactccgcgggaaacggcgggggcggagcgggcggcaccaggacccaggggaaccgcgacgggcgggcggcgagcaggcccgggagccgggaggctgcgggcggcggcgctggacccgacgcggcgagagaggccccgagatgccgagcaagaagaagaagtacaacgcgcggttcccgccggcgcggatcaagaagatcatgcagacggacgaagagattgggaaggtggcggcggcggtgcctgtcatcatctcccgggcgctcgagctcttcctagagtcgctgttgaagaaggcctgccaggtgacccagtcgcggaacgcgaagaccatgaccacatcccacctgaagcagtgcatcgagctggagcagcagtttgacttcttgaaggacctggtggcatctgttcccgacatgcagggggacggggaagacaaccacatggatggggacaagggcgcccgcaggggccggaagccaggcagcggcggccggaagaacggtgggatgggaacgaaaagcaaggacaagaagctgtccgggacagactcggagcaggaggatgaatctgaggacacagatactgatggggaagaggagacatcacaacccccaccccaggccagccacccctctgcccactttcagagccccccgacacccttcctgcccttcgcctctactctgcctttgcccccagcgcccccgggcccctcagcacctgatgaagaggacgaagaagattacgactcctagcgccttctgccccccagaccatagccccttttagttggttttagttgctctggggggaggagagaaggtagagctgttcttaaatttattaaaaaaaaaaataaaagggaatctcagtgtctgtt

SEQ ID NO: 1608 - DNA, 2830 bp, Homo sapiens
cggacgcgtgggcggacgcgtgggtcgcccacgcgtccgacttgttgcagttgctgtaggattctaaatccaggtgattgtttcaaactgagcatcaacaacaaaaacatttgtatgatatctatatttcaatcatggaccaaaatcaacatttgaataaaacagcagaggcacaaccttcagagaataagaaaacaagatactgcaatggattgaagatgttcttggcagctctgtcactcagctttattgctaagacactaggtgcaattattatgaaaagttccatcattcatatagaacggagatttgagatatcctcttctcttgttggttttattgacggaagctttgaaattggaaatttgcttgtgattgtatttgtgagttactttggatccaaactacatagaccaaagttaattggaatcggttgtttcattatgggaattggaggtgttttgactgctttgccacatttcttcatgggatattacaggtattctaaagaaactaatatcgattcatcagaaaattcaacatcgaccttatccacttgtttaattaatcaaattttatcactcaatagagcatcacctgagatagtgggaaaaggttgtttaaaggaatctgggtcatacatgtggatatatgtgttcatgggtaatatgcttcgtggaataggggagactcccatagtaccattggggctttcttacattgatgatttcgctaaagaaggacattcttctttgtatttaggtatattgaatgcaatagcaatgattggtccaatcattggctttaccctgggatctctgttttctaaaatgtacgtggatattggatatgtagatctaagcactatcaggataactcctactgattctcgatgggttggagcttggtggcttaatttccttgtgtctggactattctccattatttcttccataccattctttttcttgccccaaactccaaataaaccacaaaaagaaagaaaagcttcactgtctttgcatgtgctggaaacaaatgatgaaaaggatcaaacagctaatttgaccaatcaaggaaaaaatattaccaaaaatgtgactggttttttccagtcttttaaaagcatccttactaatcccctgtatgttatgtttgtgcttttgacgttgttacaagtaagcagctatattggtgcttttacttatgtcttcaaatacgtagagcaacagtatggtcagccttcatctaaggctaacatcttattgggagtcataaccatacctatttttgcaagtggaatgtttttaggaggatatatcattaaaaaattcaaactgaacaccgttggaattgccaaattctcatgttttactgctgtgatgtcattgtccttttacctattatattttttcatactctgtgaaaacaaatcagttgccggactaaccatgacctatgatggaaataatccagtgacatctcatagagatgtaccactttcttattgcaactcagactgcaattgtgatgaaagtcaatgggaaccagtctgtggaaacaatggaataacttacatctcaccctgtctagcaggttgcaaatcttcaagtggcaataaaaagcctatagtgttttacaactgcagttgtttggaagtaactggtctccagaacagaaattactcagcccatttgggtgaatgcccaagagatgatgcttgtacaaggaaattttacttttttgttgcaatacaagtcttgaatttatttttctctgcacttggaggcacctcacatgtcatgctgattgttaaaattgttcaacctgaattgaaatcacttgcactgggtttccactcaatggttatacgagcactaggaggaattctagctccaatatattttggggctctgattgatacaacgtgtataaagtggtccaccaacaactgtggcacacgtgggtcatgtaggacatataattccacatcattttcaagggtctacttgggcttgtcttcaatgttaagagtctcatcacttgttttatatattatattaatttatgccatgaagaaaaaatatcaagagaaagatatcaatgcatcagaaaatggaagtgtcatggatgaagcaaacttagaatccttaaataaaaataaacattttgtcccttctgctggggcagatagtgaaacacattgttaaggggagaaaaaaagccacttctgcttctgtgtttccaaacagcattgcattgattcagtaagatgttatttttgaggagttcctggtcctttcactaagaatttccacatcttttatggtggaagtataaataagcctatgaacttataataaaacaaactgtaggtagaaaaaatgagagtactcattgttacattatagctacatatttgtggttaaggttagactatatgatccatacaaattaaagtgagagacatggttactgtgtaataaaagaaaaaatacttgttcaggtaattctaattcttaataaaacaaatgagtatcatacaggtagaggttaaaaaggaggagctagattcatatcctaagtaaagagaaatgcctagtgtctattttattaaacaaacaaacacagagtttgaactataatactaaggcctgaagtctagcttggatatatgctacaataatatctgttactcacataaaattatatatttcacagactttatcaatgtataattaacaattatcttgtttaagtaaatttagaatacatttaagtattgtggaagaaataaagacattccaatatttgcaaaaaaaaaaaaaaa

SEQ ID NO: 1609 - DNA, 2903 bp, Homo sapiens
ctcaattcgtcaccaggaggaagacggagctggctgcccagcccaaaggcccatgaggggatgcagttatgggctctgtcgccgtggattgttattttgtgtcagtaagtaatccataaagtgccaacatgggaaagaaacggacaaagggaaaaactgttccaatcgatgattcctctgaaactttagaacctgtgtgcagacacattagaaaaggattggaacaaggtaatttgaaaaaggctttagtgaatgtggaatggaatatctgccaagactgtaagactgacaataaagtgaaagataaagctgaagaagaaacagaagaaaagccttcagtttggctgtgtcttaaatgtggccatcagggctgtggcagaaattctcaggagcagcatgccttgaagcactatctgacgccaagatctgaacctcactgtctggttcttagtttggacaactggagtgtatggtgttacgtatgtgataatgaggtccagtattgtagttcaaaccagttgggtcaagtggttgattatgtcagaaaacaagccagcattacaactccaaagccagcagagaaagataatggaaatattgaacttgaaaataaaaaattagaaaaagagagtaagaatgaacaagagagagaaaagaaggaaaacatggctaaagagaatcctcccatgaattctccttgccaaataaccgtgaaaggactcagtaatttgggaaacacatgtttcttcaatgcagttatgcagaacttgtcacaaacaccagtgcttagagaactactaaaagaagtgaaaatgtctggaacaattgtaaaaattgaaccacctgatttggcattaacagaaccattagaaataaaccttgagcctccaggccctcttactttagccatgagccagtttcttaatgagatgcaagagaccaaaaagggggttgtgacaccgaaagaactcttttctcaggtctgtaaaaaagcagtgcggtttaaaggctatcagcagcaagacagccaggagctgcttcgctacttattggatgggatgagagcagaagaacaccaaagagtgagtaaaggaatacttaaagcatttggtaattctactgaaaagttggatgaagaactaaaaaataaagttaaagattatgagaagaaaaaatcaatgccaagttttgttgaccgcatctttggtggtgaactaactagtatgatcatgtgtgatcaatgcagaactgtctccttggttcatgaatctttccttgatttgtccctcccagttttagatgatcagagtggtaagaaaagtgtaaatgataaaaatctgaaaaagacagtggaggatgaagatcaagatagtgaggaagaaaaagataacgacagttacataaaagagagaagtgatattccttctggaacaagtaagcacttacagaaaaaagcaaagaaacaagccaaaaagcaagccaagaaccaacgaagacaacaaaaaattcaaggaaaagttcttcatttaaatgatatttgtactattgaccatcctgaagacagtgaatatgaagctgaaatgtcacttcaaggagaagtaaatattaaatccaaccatatttcacaagagggtgttatgcataaagaatattgtgtcaaccagaaagatttgaatggccaagcaaaaatgatcgaaagtgtaactgacaatcaaaaatccacagaggaagtagatatgaaaaatatcaacatggataatgatctggaggttttaacatcttctcccactaggaatttaaatggtgcctacctaacggaagggagcaatggagaagtggacatttccaatggtttcaaaaacctaaatttgaatgctgctcttcatcctgatgaaataaatatagagattctgaatgatagtcatactcctggaacaaaggtgtatgaggttgtaaatgaagatccagaaactgctttctgtactcttgcaaacagggaagttttcaatactgatgagtgttcaatccaacattgtttatatcagttcacccgtaatgagaaacttcgagatgcgaataaactgctttgtgaagtatgcacacggagacagtgtaatggaccaaaggcaaatataaaaggtgaaaggaagcatgtttacaccaatgccaaaaagcagatgctaatttctcttgctcctcctgttcttactcttcatttaaagagatttcagcaggctggttttaacctacgcaaagttaacaaacacataaagtttccggaaatcttagatttggctcctttttgcacccttaaatgtaagaatgttgcagaagaaaatacaagggtactctattccttatatggagttgttgaacacagtggtactatgaggtcggggcattacactgcctatgccaaggcaagaaccgcaaatagtcatctctctaatcttgttcttcacggtgatattccacaagattttgaaatggaatcaaaagggcagtggtttcacatcagcgacacacatgtgcaagctgtgcctacaactaaagtactaaactcacaagcgtacctcctattttatgagagaatactgtaataatatcaaaagcactttttctggaaacacatttatggcttttataatggctgaaataacgataaaaaaagactaattaaaatcatgttcacttaacattaaatacatgccagaagaaatcatgtttatttaaatattgaagggaaaaatacctaaaaatgtacaaaggttttatattgtcatagtggtttttattcctgctttgtttctggaaaggaaatcctgaattacttaagtactttgtgtttaatatatctgggtgatggatcacaacacatcaataaactgacttaccctaaaatc

SEQ ID NO: 1610 - DNA, 2618 bp, Homo sapiens
gggagtgtggcgttctgtgaagagttcggtgctaacctccctcacgcggcggtggctgccgggaccctagcaggtttcagctggagcggcggcggcggcaacatggcagagaccgcggccggagtgggccgcttcaagaccaactatgctgtggagcgcaaaattgagcctttctacaagggcggaaaagcacagctggaccagactggccagcacctcttctgcgtctgtggcaccagagtcaacattctggaagtggcctcgggggccgtgctgcggagtctggagcaggaggaccaggaggacatcactgcctttgacctcagccctgacaacgaggtgctggtgacagccagtcgggcattgctgctggctcagtgggcctggcaagagggcagcgttacccgcctgtggaaggcgatacacacggcccccgtggccaccatggccttcgaccccacctccactctgctagccacaggtggctgtgatggggccgtgcgcgtctgggacatcgtgcggcactacgggacacaccacttccgaggctcgcccggtgtcgtgcacctagtggccttccacccggaccctacacgcctgctgctcttctcctcggccacggatgccgccatccgcgtgtggtcactgcaggaccggtcatgcctggctgtgctgactgcccactacagcgccgtcacctcactggccttcagcgccgacggccacaccatgctcagctccggccgtgacaagatatgtatcatctgggaccttcagagctgccaggccacgaggaccgtgcctgtgtttgagagcgtggaggctgctgtgctgttgccagaggagccagtgtcccagctgggtgtgaagtccccagggctgtactttctgacagctggcgaccaaggcactctgcgcgtgtgggaggcagcttctgggcagtgtgtgtacacgcaggcccagccgccgggccctgggcaggagctgacccactgcaccctggcacacaccgccggcgtggtcctcaccgccaccgccgaccacaacctgttgctctacgaggctcgctccctgcggctgcagaaacagttcgctggctacagtgaggaggttttggatgtccggtttcttgggcccgaggactcccacgttgtcgtggcctccaatagcccctgcctaaaagtgtttgagctgcagacgtcagcctgccagatcctccacggccacacggatatcgtcctggccctggatgtgttccggaaggggtggctctttgccagctgtgccaaggatcagagcgtccgtatctggagaatgaacaaggctggccaggtgatgtgcgtggctcagggttccggtcacacacacagtgtgggcaccgtctgctgctctaggctgaaggagtccttcctggtgacaggcagccaggactgcactgtgaagctgtggcctcttcccaaagccttgctgtccaagaacacagccccagacaacggccctatcctcctgcaggcccagaccactcagcgctgccatgataaggacatcaacagcgtggctattgcccccaacgacaagctgctggccacaggctcacaggaccgcacggccaagctctgggccctgccacagtgccagctgctgggtgtcttctcaggccaccggcgtggcctctggtgcgtccagttctctcccatggaccaggtgctggccacggcctcagctgatggcaccatcaagctctgggcactccaggacttcagctgtctcaagacatttgaggggcacgatgcttctgtgctgaaggtggcctttgtgagccgtggcacgcagctgctgtccagcggttcggatggcctcgtgaagctctggaccatcaagaacaacgagtgtgtgcggacgctggatgcccacgaggacaaggtctgggggctgcactgcagccggctggacgaccacgccctcactggggccagtgactcccgagtcatcctctggaaggatgtgaccgaggcggagcaggcagaggagcaggccaggcaagaggagcaggtggtcaggcagcaagagctggacaacctgctgcatgagaagcggtacctgcgggcgctgggcctggccatctccctggatcggccccacaccgtgctgactgtcatccaggccatccggagggaccctgaggcctgcgagaagctggaagccaccatgctccgactgcggcgcgaccagaaagaggccctgctgcgcttctgcgtcacgtggaacaccaactcgcggcactgccacgaggcccaggccgtgctgggtgtgctcttgaggcgagaggcccccgaggagctgctggcctacgaaggcgtgcgggcagcgcttgaggccctgctgccctacactgagcggcactttcagcggctcagcaggaccctccaggccgccgctttcttggacttcctgtggcacaacatgaagctccctgtgccggccgccgcccccaccccctgggaaacccataaaggcgcactgccctagccggtccggcctctctccagtccatcctgaacccctggaaaacccataaaggccgctctcctggcaaaaaaaaaaaaaaaaaaaaaaaa

SEQ ID NO: 1611 - DNA, 2347 bp, Homo sapiens
gcgcggcgggcatggctcgggtggcgtgggggctgctgtggttgctgctgggcagcgccggggcgcagtacgagaagtacagcttccggggcttcccgcccgaggacctgatgccgctggccgcggcgtacgggcacgctctggagcagtacgagggagagagctggcgcgagagcgcgcgctacctggaggcggcgctgcggctgcaccggctcctgcgcgacagcgaggccttctgccacgccaactgcagcggccccgcgcccgcggccaagcccgatcccgacggcggccgcgcagacgagtgggcctgcgagctgcggctcttcggccgcgtcctggagcgagccgcctgcctgcggcgctgcaagcggacgctgcccgccttccaggtgccctacccgccgcggcagctgctgcgtgacttccagagccgcctgccctaccagtacctgcactacgcgctgttcaaggctaaccggctggagaaggcggtggcggcggcctacaccttcctccagaggaacccgaagcacgagctgaccgccaagtatctcaactactatcaggggatgctggacgtcgccgacgagtccctcacggacctagaggcccagccctacgaggccgtgttcctccgggctgtgaagctctacaacagcggggatttccgcagcagcacggaggacatggagcgggccttgtcagagtacctggcagtctttgcccggtgcctggccggctgtgaaggggcccatgagcaggtggacttcaaggacttctacccggccatagcagatctctttgcagagtccctgcagtgcaaggtggactgtgaggccaatttgacccccaatgtgggtggctacttcgtggacaagttcgtggccaccatgtaccactacctgcagtttgcctactataagttgaatgatgtgcgccaggctgcccgcagcgccgccagctacatgctcttcgaccccaaggacagcgtcatgcagcagaacctggtgtattaccggttccaccgggctcgctggggcctggaagaggaggacttccagccccgggaggaggccatgctctaccacaaccagaccgccgagctgcgggagctgctggagttcacccacatgtacctgcagtcagatgatgagatggagctggaggagacagaaccgcccctggagcctgaggatgccctatctgacgccgagtttgagggggagggtgactacgaggagggcatgtatgctgactggtggcaggagccggatgccaagggtgacgaggccgaggctgagccagagcctgaactcgcatgagaaggggacaccccacaccgctcaagcttgggaagcctggtgccgatggccccaccctcaccagcctgggcagcagcaagaactatttattaaaaacttaagatgggccaggtgcggtggctcacacctgtaatcccagcattttgggaggccaaggtgggtggatcacttgaggccaggagttcaagaccagcctggccaacatgatgagacctccgtctctactaaaatacataaattagccgggtgtggtggcaggcgcctgaaatcccagctactcaagaggctgaggcaggagaatcgcttgaacctgggaggcaaaggttgcggtgaactgagattgcgccaccgcactccagcctgggcgacagagcgagactccatctttaaaaaaaaacaagacgggccggcacggtggctcacgcctgtaatcccagcactgagaggccgatcacttgaggtcaggagttcaagacctgcctggccaacatggtgaaaccccatctctactaaaaaatacaaaaattagccaggcatggtggcacacacctgtaatcgtagctgaggcaggagaatcgcctgaacccaggaggcggagcttgcagtgagccgagatcgtgccactgcactccagcctgggcgacagagtgagactccatctcaaaaaaaaaaaaaaaaaacttaagatggacacagctgactggacccccatcctgcctcacccatgggtgctgcaccccagacccatcctgccacttctatgtctctggaccacaggatggtggtggcattgcaggttggcaagtgggctgatggggtccgccctcctcactgctgagctcctcacctggacagtctcctggacaaggagtttccagctgctggctggagtctcaggccaaattgcagagggtcctccagggtcctgaagagcactggactaagagtctagtggttccagggccctgaccagtaggtgctcaataaatgtttgttgttgaatgaaaaaaaaaaaaaaaaaa

SEQ ID NO: 1612 - DNA, 1453 bp, Homo sapiens
ggctgttggcggcggttggctcggcgcgggagtcggctgcacgtgcgggcgggggcgatgcgtcactgatcggaggaacgagaatgaatatgactcaagcccgggttctggtggctgcagtggtggggttggtggctgtcctgctctacgcctccatccacaagattgaggagggccatctggctgtgtactacaggggaggagctttactaactagccccagtggaccaggctatcatatcatgttgcctttcattactacgttcagatctgtgcagacaacactacaaactgatgaagttaaaaatgtgccttgtggaacaagtggtggggtcatgatctatattgaccgaatagaagtggttaatatgttggctccttatgcagtgtttgatatcgtgaggaactatactgcagattatgacaagaccttaatcttcaataaaatccaccatgagctgaaccagttctgcagtgcccacacacttcaggaagtttacattgaattgtttgatcaaatagatgaaaacctgaagcaagctctgcagaaagacttaaacctcatggccccaggtctcactatacaggctgtgcgtgttacaaaacccaaaatcccagaagccataagaagaaattttgagttaatggaggctgagaagacaaaactccttatagctgcacagaaacaaaaggttgtggaaaaagaagctgagacagagaggaaaaaggcagttatagaagcagagaagattgcacaagtggcaaaaattcggtttcagcagaaagtgatggaaaaagaaactgaaaagcgcatttctgaaatcgaagatgctgcattcctggcccgagagaaagcgaaagcagatgctgaatattatgctgcacacaaatatgccacctcaaacaagcacaagttgaccccggaatatctggagctcaaaaagtaccaggccattgcttctaacagtaagatctattttggcagcaacatccctaacatgttcgtggactcctcatgtgctttgaaatattcagatattaggactggaagagaaagctcactcccctctaaggaggctcttgaaccctctggagagaacgtcatccaaaacaaagagagcacaggttgatgcaagaggtggaaatgttctccatatcaagatgtggcccaaggggttaagtgggaacaatcattatacggactcttcagatttacagagaacttacacttcatctgttccacctctcctgcgatagtcctgggtgctccactgattggaggatagagccagctgtctgacacacaaatggtcttttcagccacagtcttatcaagtatcctatatgtattcctttctaaactgctactcatgaatgaggaaagtctgatgctaagatactgcctgcactggaatgttaaacactaaatatataacaagctgtgttttcgtaa

SEQ ID NO: 1613 - DNA, 2216 bp, Homo sapiens
agaggggccccgcgcgcggatctcgcgagagcattagagggcggaagcgctatccgagcaggatgcggttcgtggttgccttggtcctcctgaacgtcgcagcggcgggagccgtgccgctcttggccaccgaaagcgtcaagcaagaagaagctggagtacggccttctgcaggaaacgtctccacccaccccagcttgagccaacggcctggaggctctaccaagtcgcatccggagccgcagactccaaaagacagccctagcaagtcgagtgcggaggcgcagaccccagaagacacccccaacaagtcgggtggggaggcaaagaccctaaaagacagctccaacaagtcgggtgcggaggcacagacccccaaaggcagcactagcaagtcgggttcggaggcgcagaccacaaaagacagcactagtaagtcgcatccggagctgcagactccaaaagacagcactggcaaatcgggtgcggaggcgcagaccccagaagacagccccaacaggtcgggtgcggagccaaagacccaaaaagacagccctagcaagtcaggttcggaggcgcagaccacaaaagatgtccctaataagtcgggtgcggacggccagaccccaaaagacggctccagcaagtcgggtgcggaggatcagaccccaaaagacgtccctaacaagtcgggtgcggagaagcagactccaaaagacggctctaacaagtccggtgcagaggagcagggcccaatagacgggcccagcaagtcgggtgcggaggagcagacctcaaaagacagccctaacaaggtggttccagagcagccttcccggaaagaccattccaagcccatctccaacccttctgataacaaggagctccccaaggctgacacaaaccagcttgctgacaaagggaagctttctcctcatgctttcaaaaccgaatctggggaggaaactgacctcatttctcccccgcaggaggaagttaagtcttcagagcctactgaggatgtggggcccaaagaggctgaagatgatgatacaggacccgaggagggctcaccgcccaaagaagagaaagaaaagatgtccggttctgcctccagtgagaaccgtgaagggacactttcggattccacgggtagcgagaaggatgacctttatccgaacggttctggaaatggcagcgcggagagcagccacttctttgcatatctggtgactgcagccattcttgtggctgtcctctatatcgctcatcacaacaagcggaagatcattgcttttgtcctggaaggaaaaagatctaaagtcacccggcggccaaaggccagtgactaccaacgtttggaccagaagtcctaacagaatggtatattcctctggaaaaagatgaacgtcaccaatggattgtgctgctctcgtttcagctttgatttttttgtccttgagaaccttgtcctccctgctgatttgtttctaaatcaaaagaaatgaagaaaaaagtactgtgacctgagagacaccctcctctagaatttagtggcgggtctgggctggcagaggtagggggctgctttgggctttgcacctgcactttggtgacattgttcttctgtgttccctttatttatgctggtggcttccatccgttctcctctggggtgagtggaggggtatatggaaacacggctatgaccaaagggagatcccagcctgggcagcctgcgctgctgaccaccctccctggggcccgggctctgtaggaaagttggtccttgactgtggcattgcactctgcactgtttctctctgcagacctaggggaaaactgcaggtggaagtgcttttctactaaggcctcttactttgggggggatgtgccctacagaagacatagaagatggggaaatgccaatgggcaaagagctactttgaatacataattctcttcaaagacttcagcagcaaacctaaacagcaggttaaaaaaaaagatgcttttttgggtgcaagtctaacctgtctagcatgagatcttcttgattttctgattattttatgtagcttgagacaaagtgaatcaacttccacttagttgtaccgagcataaaacagaacttgggcttcctggcagtgaggccactgtcccatcacagatttttaaaataaatatgatttgaagtagtgtgatctttcacacaa

SEQ ID NO: 1614 - DNA, 1605 bp, Homo sapiens
atgactcaagcagaaattaagctctgttctttgttgctgcaagagcattttggagagattgtagaaaaaattggagtccatctgataagaaccggcagccagccactaagagtaattgcccatgacacaggaacatcactggatcaggtgaagaaagccctgtgtgtcctcgtccaacataacctggtgagttatcaagtgcacaaacgtggtgtggtggagtatgaagcccagtgcagccgggtattgcgaatgcttagatatccccggtacatctatactaccaaaactctgtacagtgacactggagagctgattgttgaggagcttctgttgaacggcaaactgacaatgtcagctgttgtgaagaaagtggcagaccggctcacagagaccatggaggatggcaagaccatggactatgctgaagtatcaaacacatttgtgcgactggcagacacacactttgtacaacgctgcccttcggtacctaccactgagaattcagaccctgggccaccaccacctgcccccacacttgtcattaatgaaaaggacatgtacctggttcctaaactcagcttgatagggaaaggtaaaaggaggagatcatctgatgaagatgctgctggggagcccaaggccaagagaccaaaatatactacagataacaaggagcccattccagatgatgggatttattggcaggccaaccttgacagattccaccaacacttccgtgaccaagccattgtgagcgcagttgctaacaggatggaccagacaagcagcgagattgtgcgaaccatgctccgaatgagtgagattaccacttcctctagtgctcccttcacccagccattgtcttccaatgagatcttcagatccctacctgttggctataacatctctaagcaagttcttgatcagtatctcactctgctggcagatgatccactagagtttgttggaaagtctggcgacagtggtggaggaatgtatgtcatcaacctccataaggcattagcatccctagccacagccactctggagtccgtcgtacaggagagatttgggtctcgctgtgctagaatattccgtctagttttgcagaagaaacacatagagcagaagcaagtggaagactttgcaatgattcctgcaaaggaggcaaaggatatgctatataagatgctctcagaaaatttcatgtcactccaggaaattcccaaaacaccagaccatgccccatccaggaccttctatttatatactgtgaacatcctgtcagctgcccgaatgttgttgcacaggtgctacaagagcatagccaacttgatagaaaggaggcaatttgaaaccaaagagaataagcgtctactagaaaaatctcagagggtagaagccatcattgcatctatgcaggctactggtgcagaggaagcacagttacaagaaatagaggagatgatcacagctcctgaacgtcagcagctagagaccctgaaacgtaatgtcaacaagttggatgccagtgagatccaggtggaggaaaccatcttcctgctggagtcttacattgagtgcaccatgaagagacagtga

SEQ ID NO: 1615 - DNA, 944 bp, Homo sapiens
gcggccagcgcgtggtttttagcggctctctgggtagcagggtggtgtgatagcggccgagggctcggaagggtgctcggattctcgtagctgtgccgggacttaaccaccaccatgtcgagcaaaagaacaaagaccaagaccaagaagcgccctcagcgtgcaacatccaatgtgtttgctatgtttgaccagtcacagattcaggagttcaaagaggccttcaacatgattgatcagaacagagatggtttcatcgacaaggaagatttgcatgatatgcttgcttcattggggaagaatccaactgatgagtatctagatgccatgatgaatgaggctccaggccccatcaatttcaccatgttcctcaccatgtttggtgagaagttaaatggcacagatcctgaagatgtcatcagaaatgcctttgcttgctttgatgaagaagcaactggcaccatacaggaagattacttgagagagctgctgacaaccatgggggatcggtttacagatgaggaagtggatgagctgtacagagaagcacctattgataaaaaggggaatttcaattacatcgagttcacacgcatcctgaaacatggagccaaagacaaagatgactgaaataacttcaaattccagccaacgtccttgttgcactttgggtattctgagattttctcttgccattcccttaggctttagcagctttgcatttcctgttgtatttattctcagccattttgggcatatgtatctttataatcagactggaaacgggactttctattaatatcattttcagaataaaaaataggataatttaacctaccagcccttctcccccaataactgtgggtctatacagagtcaatatattttttcagagaaagttagttcggctcgattttttctgaatcataattaaactttattgc

SEQ ID NO: 1616 - DNA, 2704 bp, Homo sapiens
gcttagtgtaaccagcggcgtatattttttaggcgccttttcgaaaacctagtagttaatattcatttgtttaaatcttattttatttttaagctcaaactgcttaagaataccttaattccttaaagtgaaataattttttgcaaaggggtttcctcgatttggagctttttttttcttccaccgtcatttctaactcttaaaaccaactcagttccatcatggtgatgttcaagaagatcaagtcttttgaggtggtctttaacgaccctgaaaaggtgtacggcagtggcgagagggtggctggccgggtgatagtggaggtgtgtgaagttactcgtgtcaaagccgttaggatcctggcttgcggagtggctaaagtgctttggatgcagggatcccagcagtgcaaacagacttcggagtacctgcgctatgaagacacgcttcttctggaagaccagccaacaggtgagaatgagatggtgatcatgagacctggaaacaaatatgagtacaagttcggctttgagcttcctcaggggcctctgggaacatccttcaaaggaaaatatgggtgtgtagactactgggtgaaggcttttcttgaccgcccgagccagccaactcaagagacaaagaaaaactttgaagtagtggatctggtggatgtcaatacccctgatttaatggcacctgtgtctgctaaaaaagaaaagaaagtttcctgcatgttcattcctgatgggcgggtgtctgtctctgctcgaattgacagaaaaggattctgtgaaggtgatgagatttccatccatgctgactttgagaatacatgttcccgaattgtggtccccaaagctgccattgtggcccgccacacttaccttgccaatggccagaccaaggtgctgactcagaagttgtcatcagtcagaggcaatcatattatctcagggacatgcgcatcatggcgtggcaagagccttcgggttcagaagatcaggccttctatcctgggctgcaacatccttcgagttgaatattccttactgatctatgttagcgttcctggatccaagaaggtcatccttgacctgcccctggtaattggcagcagatcaggtctaagcagcagaacatccagcatggccagccgaaccagctctgagatgagttgggtagatctgaacatccctgataccccagaagctcctccctgctatatggatgtcattcctgaagatcaccgattggagagcccaacaactcctctgctagatgacatggatggctctcaagacagccctatctttatgtatgcccctgagttcaagttcatgccaccaccgacttatactgaggtggatccctgcatcctcaacaacaatgtgcagtgagcatgtggaagaaaagaagcagctttacctacttgtttctttttgtctctcttcctggacactcactttttcagagactcaacagtctcgtcaatggagtgtgggtccaccttagcctctgacttcctaatgtaggaggtggtcagcaggcaatctcctgggccttaaaggatgcggactcatcctcagccagcgcccatgttgtgatacaggggtgtttgttggatgggtttaaaaataactagaaaaactcaggcccatccattttctcagatctccttgaaaattgaggccttttcgatagtttcgggtcaggtaaaaatggcctcctggcgtaagcttttcaaggttttttggaggctttttgtaaattgtgataggaactttggaccttgaacttacgtatcatgtggagaagagccaatttaacaaactaggaagatgaaaagggaaattgtggccaaaactttgggaaaaggaggttcttaaaatcagtgtttcccctttgtgcacttgtagaaaaaaaagaaaaaccttctagagctgatttgatggacaatggagagagctttccctgtgattataaaaaaggaagctagctgctctacggtcatctttgcttagagtatactttaacctggcttttaaagcagtagtaactgccccaccaaaggtcttaaaagccatttttggagcctattgcactgtgttctcctactgcaaatattttcatatgggaggatggttttctcttcatgtaagtccttggaattgattctaaggtgatgttcttagcactttaattcctgtcaaattttttgttctccccttctgccatcttaaatgtaagctgaaactggtctactgtgtctctagggttaagccaaaagacaaaaaaaattttactacttttgagattgccccaatgtacagaattatataattctaacgcttaaatcatgtgaaagggttgctgctgtcagccttgcccactgtgacttcaaacccaaggaggaactcttgatcaagatgcccaaccctgtgatcagaacctccaaatactgccatgagaaactagagggcaggtgttcataaaagccctttgaacccccttcctgccctgtgttaggagatagggatattggcccctcactgcagctgccagcacttggtcagtcactctcagccatagcactttgttcactgtcctgtgtcagagcactgagctccacccttttctgagagttattacagccagaaagtgtgggctgaagatggttggtttcatgtgggggtattatgtaccc

SEQ ID NO: 1617 - DNA, 1081 bp, Homo sapiens
gataaatgctgactccgctcggaaagttctcaactgcaaagtttgctgtccggctgcctagggtctgggaagctcgggcaccctccctctccggggctcctgctcccacccctccggcccccccaccgtcgcgctcctccaggctgggcctgtggccgcggtgctttttaattttcccccagctcagaatcttgctgctcggcccccaggagagcaacaactcaacgggaacgatgtggaaggtgtcagctctgctcttcgttttgggaagcgcgtcgctctgggtcctggcagaaggagccagcacaggccagccagaagatgacactgagactacaggtttggaaggcggcgttgccatgccaggtgccgaagatgatgtggtgactccaggaaccagcgaagaccgctataagtctggcttgacaactctggtggcaacaagtgtcaacagtgtaacaggcattcgcatcgaggatctgccaacttcagaaagcacagtccacgcgcaagaacaaagtccaagcgccacagcctcaaacgtggccaccagtcactccacggagaaagtggatggagacacacagacaacagttgagaaagatggtttgtcaacagtgaccctggttggaatcatagttggggtcttactagccatcggcttcattggtggaatcatcgttgtggttatgcgaaaaatgtcgggaaggtactcgccctaaagagctgaagggttacgccctgctgccaacgtgcttaaaaaaagaccgtttctgactctgtgccctgtccctgagctcgtgggagaagatgacccgtggaacacttgcctggcccactcagaatccacggtgacctctccgcttgccaaaataaccgaaggaaagaccgttcaccagacttggctcctctaaacatttgctgttcaaacatgtttttgaatatacattctataaaagattatttgaaagacaaaattcatagaaaatggagcaaaactgtataaactgatttgtaactaacactggaccattggatcgatattatatgctgtaaccatgaaaaaaaaaaaaaaaaaaaa

SEQ ID NO: 1618 - DNA, 3213 bp, Homo sapiens
agagactcaagatgattccctttttacccatgttttctctactattgctgcttattgttaaccctataaacgccaacaatcattatgacaagatcttggctcatagtcgtatcaggggtcgggaccaaggcccaaatgtctgtgcccttcaacagattttgggcaccaaaaagaaatacttcagcacttgtaagaactggtataaaaagtccatctgtggacagaaaacgactgttttatatgaatgttgccctggttatatgagaatggaaggaatgaaaggctgcccagcagttttgcccattgaccatgtttatggcactctgggcatcgtgggagccaccacaacgcagcgctattctgacgcctcaaaactgagggaggagatcgagggaaagggatccttcacttactttgcaccgagtaatgaggcttgggacaacttggattctgatatccgtagaggtttggagagcaacgtgaatgttgaattactgaatgctttacatagtcacatgattaataagagaatgttgaccaaggacttaaaaaatggcatgattattccttcaatgtataacaatttggggcttttcattaaccattatcctaatggggttgtcactgttaattgtgctcgaatcatccatgggaaccagattgcaacaaatggtgttgtccatgtcattgaccgtgtgcttacacaaattggtacctcaattcaagacttcattgaagcagaagatgacctttcatcttttagagcagctgccatcacatcggacatattggaggcccttggaagagacggtcacttcacactctttgctcccaccaatgaggcttttgagaaacttccacgaggtgtcctagaaaggttcatgggagacaaagtggcttccgaagctcttatgaagtaccacatcttaaatactctccagtgttctgagtctattatgggaggagcagtctttgagacgctggaaggaaatacaattgagataggatgtgacggtgacagtataacagtaaatggaatcaaaatggtgaacaaaaaggatattgtgacaaataatggtgtgatccatttgattgatcaggtcctaattcctgattctgccaaacaagttattgagctggctggaaaacagcaaaccaccttcacggatcttgtggcccaattaggcttggcatctgctctgaggccagatggagaatacactttgctggcacctgtgaataatgcattttctgatgatactctcagcatggttcagcgcctccttaaattaattctgcagaatcacatattgaaagtaaaagttggccttaatgagctttacaacgggcaaatactggaaaccatcggaggcaaacagctcagagtcttcgtatatcgtacagctgtctgcattgaaaattcatgcatggagaaagggagtaagcaagggagaaacggtgcgattcacatattccgcgagatcatcaagccagcagagaaatccctccatgaaaagttaaaacaagataagcgctttagcaccttcctcagcctacttgaagctgcagacttgaaagagctcctgacacaacctggagactggacattatttgtgccaaccaatgatgcttttaagggaatgactagtgaagaaaaagaaattctgatacgggacaaaaatgctcttcaaaacatcattctttatcacctgacaccaggagttttcattggaaaaggatttgaacctggtgttactaacattttaaagaccacacaaggaagcaaaatctttctgaaagaagtaaatgatacacttctggtgaatgaattgaaatcaaaagaatctgacatcatgacaacaaatggtgtaattcatgttgtagataaactcctctatccagcagacacacctgttggaaatgatcaactgctggaaatacttaataaattaatcaaatacatccaaattaagtttgttcgtggtagcaccttcaaagaaatccccgtgactgtctatacaactaaaattataaccaaagttgtggaaccaaaaattaaagtgattgaaggcagtcttcagcctattatcaaaactgaaggacccacactaacaaaagtcaaaattgaaggtgaacctgaattcagactgattaaagaaggtgaaacaataactgaagtgatccatggagagccaattattaaaaaatacaccaaaatcattgatggagtgcctgtggaaataactgaaaaagagacacgagaagaacgaatcattacaggtcctgaaataaaatacactaggatttctactggaggtggagaaacagaagaaactctgaagaaattgttacaagaagaggtcaccaaggtcaccaaattcattgaaggtggtgatggtcatttatttgaagatgaagaaattaaaagactgcttcagggagacacacccgtgaggaagttgcaagccaacaaaaaagttcaaggttctagaagacgattaagggaaggtcgttctcagtgaaaatccaaaaaccagaaaaaaatgtttatacaaccctaagtcaataacctgaccttagaaaattgtgagagccaagttgacttcaggaactgaaacatcagcacaaagaagcaatcatcaaataattctgaacacaaatttaatatttttttttctgaatgagaaacatgagggaaattgtggagttagcctcctgtggtaaaggaattgaagaaaatataacaccttacaccctttttcatcttgacattaaaagttctggctaactttggaatccattagagaaaaatccttgtcaccagattcattacaattcaaatcgaagagttgtgaactgttatcccattgaaaagaccgagccttgtatgtatgttatggatacataaaatgcacgcaagccattatctctccatgggaagctaagttataaaaataggtgcttggtgtacaaaactttttatatcaaaaggctttgcacatttctatatgagtgggtttactggtaaattatgttattttttacaactaattttgtactctcagaatgtttgtcatatgcttcttgcaatgcatattttttaatctcaaacgtttcaataaaaccatttttcagatataaagagaattacttcaaattgagtaattcagaaaaactcaagatttaagttaaaaagtggtttggacttgggaa

SEQ ID NO: 1619 - DNA, 3143 bp, Homo sapiens
tgtgagtgagtccgggcccgtgtcccctctcccgccgccgccatgggctgcacgttgagcgccgaagacaaggcggcagtggagcgaagcaagatgatcgaccgcaacttacgggaggacggggaaaaagcggccaaagaagtgaagctgctgctactcggtgctggagaatctggtaaaagcaccattgtgaaacagatgaaaatcattcatgaggatggctattcagaggatgaatgtaaacaatataaagtagttgtctacagcaatactatacagtccatcattgcaatcataagagccatgggacggctaaagattgactttggggaagctgccagggcagatgatgcccggcaattatttgttttagctggcagtgctgaagaaggagtcatgactccagaactagcaggagtgattaaacggttatggcgagatggtggggtacaagcttgcttcagcagatccagggaatatcagctcaatgattctgcttcatattatctaaatgatctggatagaatatcccagtctaactacattccaactcagcaagatgttcttcggacgagagtgaagaccacaggcattgtagaaacacatttcaccttcaaagacctatacttcaagatgtttgatgtaggtggccaaagatcagaacgaaaaaagtggattcactgttttgagggagtgacagcaattatcttctgtgtggccctcagtgattatgaccttgttctggctgaggacgaggagatgaaccgaatgcatgaaagcatgaaactgtttgacagcatttgtaataacaaatggtttacagaaacttcaatcattctcttccttaacaagaaagacctttttgaggaaaaaataaagaggagtccgttaactatctgttatccagaatacacaggttccaatacatatgaagaggcagctgcctatattcaatgccagtttgaagatctgaacagaagaaaagataccaaggagatctatactcacttcacctgtgccacagacacgaagaatgtgcagtttgtttttgatgctgttacagatgtcatcattaaaaacaacttaaaggaatgtggactttattgagaagcatggatgttagtgaaagttactacagtgtggagtgttgagaccagacaccttttgctgtctcatggggcagctacaagcatgaacgggaccagggaatggcagcagcatgcagaatcttagcactctttagcacaatattttgtattagggaacttttaattgacatcgagatgctaaagtcagacattggaattggaagaactactaaagtgtgattcgatcgtcaagacatcacttggatttcttaatcttaaatgcttatggaagatgtgaagttgaggtgctgcattctagaacttcaatatgtagcttactctttttttccccccttcttaaaccaccagtggttcatttttaaggttttttcatcaagagaagaataactttactaaattttatttctttatttgcaaaagaatctttattaaaacaaacaatcttaactatgcacatgatgtgaccagatcatcttgaaaatattcctctttagtaggaactctttgtttttaactcttggtatggtcagaatataatacttccataattacttataattctttccggttactggggctataaatacaactttttaaatgaaatttatgttattatcctgctcaaagtaccattatggtttccatatggtaattacattggaaagttctgcaataagattctagttctctcttttctttaagcttatggttgaaggttaaccttgtttgtgcagattaccaaattactgctgatgtagtatgataaagtcagcttcttggatacagacacacccagggcagctgccaatcagaaatgcaaattgctaaattccaaacagaaccagtgactttgctgctacatatttactaaattgaccactttgattcttgcttgtttgtctcagttatagggagttttgtacatggtgcctcttgttttccatcttcatggccttttctgttgagaaacatctaaagtgtattaacagtgcatgcttttactttgtaaatgtggtgccaaatccctgtttgccatcgtttttactgtaccgatgttaactgtagtaatccttagccagtatgttcttttgctgaaactgttgcattttgggacttttttccactttgtcatgtgtacatttttaatctgttatagttggcggcagtattaaaatggtgagtaaagagcccaggtttgctcctgtttgtaactagtcttttctggaaatactgtcttctgtttccttttgcctttgcagaatgtgctttagcctttgtctgagaatgggtttaggtagaagggtttcctgaaagtctagtcttttggtgtaatagtattgttgaaccttaggttttatgttatatctgcatatgagtgatatgtgatcatgattcattttgcagatttacattttgcttgtgtggaaagttacgttcacttcaacctacagacccttttgtataatgtacagcaaatgtcattaaatattgaatgctctattgggggaagacaaatgaagagaatgcattttgagcatttcaaatcagtagtttgggcagtgccttttggggtccaatctttttggattggattctatttcatcttttgatgtgacttttcacctagtttacaaaaaaaaggttggtggtcaacaaaaaaagcaagtcatagcagttcagtgcctttgttggtagtttttaactttttttgtgattctttttggaaaatcatagcttacagatggtataactgtattatataatggaattttctttaggtgtgggaaaaacttgatctgaaagaaaattatcagcttcaattggcgattgattcagtgcccacaatgtaaacagggttggtagttgttactcattttgaatataccttttccttattgtattctgtaatataggatcctggaaatgagacctggtggaatattattttcaactgtagtctttctatactgtggactaatgaaatggtgttgttgataaatctaaaataaccaataatccaaaaaagttcatttt

SEQ ID NO: 1620 - DNA, 1942 bp, Homo sapiens
gcagtgcggcggtcacaggctgagtgctgcggcgcgatccttgcttccctgagcgttggcccgggaggaaagaagatggtgctggatctggatttgtttcgggtggataaaggaggggacccagccctcatccgagagacgcaggagaagcgcttcaaggacccgggactagtggaccagctggtgaaggcagacagcgagtggcgacgatgtagatttcgggcagacaacttgaacaagctgaagaacctatgcagcaagacaatcggagagaaaatgaagaaaaaagagccagtgggagatgatgagtctgtcccagagaatgtgctgagtttcgatgaccttactgcagacgctttagctaacctgaaagtctcacaaatcaaaaaagtccgactcctcattgatgaagccatcctgaagtgtgacgcggagcggataaagttggaagcagagcggtttgagaacctccgagagattgggaaccttctgcacccttctgtacccatcagtaacgatgaggatgtggacaacaaagtagagaggatttggggtgattgtacagtcaggaagaagtactctcatgtggacctggtggtgatggtagatggctttgaaggcgaaaagggggccgtggtggctgggagtcgagggtacttcttgaagggggtcctggtgttcctggaacaggctctcatccagtatgcccttcgcaccttgggaagtcggggctacattcccatttataccccctttttcatgaggaaggaggtcatgcaggaggtggcacagctcagccagtttgatgaagaactttataaggtgattggcaaaggcagtgaaaagtctgatgacaactcctatgatgagaagtacctgattgccacctcagagcagcccattgctgccctgcaccgggatgagtggctccggccggaggacctgcccatcaagtatgctggcctgtctacctgcttccgtcaggaggtgggctcccatggccgtgacacccgtggcatcttccgagtccatcagtttgagaagattgaacagtttgtgtactcatcaccccatgacaacaagtcatgggagatgtttgaagagatgattaccaccgcagaggagttctaccagtccctggggattccttaccacattgtgaatattgtctcaggttctttgaatcatgctgccagtaagaagcttgacctggaggcctggtttccgggctcaggagccttccgtgagttggtctcctgttctaattgcacggattaccaggctcgccggcttcgaatccgatatgggcaaaccaagaagatgatggacaaggtggagtttgtccatatgctcaatgctaccatgtgcgccactacccgtaccatctgcgccatcctggagaactaccagacagagaagggcatcactgtgcctgagaaattgaaggagttcatgccgccaggactgcaagaactgatcccctttgtgaagcctgcgcccattgagcaggagccatcaaagaagcagaagaagcaacatgagggcagcaaaaagaaagcagcagcaagagacgtcaccctagaaaacaggctgcagaacatggaggtcaccgatgcttgaacattcctgcctccctatttgccaggctttcatttctgtctgctgagatctcagagcctgcccaacagcagggaagccaagcacccattcatccccctgcccccatctgactgcgtagctgagaggggaacagtgccatgtaccacacagatgttcctgtctcctcgcatgggcatagggacccatcattgatgactgatgaaaccatgtaataaagcatctctggggagggcttaggactcttcctcagtcttcttccccgggcttgaaccccgaaaaaaaaaaaaaaaaaaaaaaaaaaaaaaaaaaaaaaaaaaaaaaa

SEQ ID NO: 1621 - DNA, 2856 bp, Homo sapiens
tagtcgcgggtccccgagtgagcacgccagggagcaggagaccaaacgacgggggtcggagtcagagtcgcagtgggagtccccggaccggagcacgagcctgagcgggagagcgccgctcgcacgcccgtcgccacccgcgtacccggcgcagccagagccaccagcgcagcgctgccatggagcccagcagcaagaagctgacgggtcgcctcatgctggctgtgggaggagcagtgcttggctccctgcagtttggctacaacactggagtcatcaatgccccccagaaggtgatcgaggagttctacaaccagacatgggtccaccgctatggggagagcatcctgcccaccacgctcaccacgctctggtccctctcagtggccatcttttctgttgggggcatgattggctccttctctgtgggccttttcgttaaccgctttggccggcggaattcaatgctgatgatgaacctgctggccttcgtgtccgccgtgctcatgggcttctcgaaactgggcaagtcctttgagatgctgatcctgggccgcttcatcatcggtgtgtactgcggcctgaccacaggcttcgtgcccatgtatgtgggtgaagtgtcacccacagcctttcgtggggccctgggcaccctgcaccagctgggcatcgtcgtcggcatcctcatcgcccaggtgttcggcctggactccatcatgggcaacaaggacctgtggcccctgctgctgagcatcatcttcatcccggccctgctgcagtgcatcgtgctgcccttctgccccgagagtccccgcttcctgctcatcaaccgcaacgaggagaaccgggccaagagtgtgctaaagaagctgcgcgggacagctgacgtgacccatgacctgcaggagatgaaggaagagagtcggcagatgatgcgggagaagaaggtcaccatcctggagctgttccgctcccccgcctaccgccagcccatcctcatcgctgtggtgctgcagctgtcccagcagctgtctggcatcaacgctgtcttctattactccacgagcatcttcgagaaggcgggggtgcagcagcctgtgtatgccaccattggctccggtatcgtcaacacggccttcactgtcgtgtcgctgtttgtggtggagcgagcaggccggcggaccctgcacctcataggcctcgctggcatggcgggttgtgccatactcatgaccatcgcgctagcactgctggagcagctaccctggatgtcctatctgagcatcgtggccatctttggctttgtggccttctttgaagtgggtcctggccccatcccatggttcatcgtggctgaactcttcagccagggtccacgtccagctgccattgccgttgcaggcttctccaactggacctcaaatttcattgtgggcatgtgcttccagtatgtggagcaactgtgtggtccctacgtcttcatcatcttcactgtgctcctggttctgttcttcatcttcacctacttcaaagttcctgagactaaaggccggaccttcgatgagatcgcttccggcttccggcaggggggagccagccaaagtgataagacacccgaggagctgttccatcccctgggggctgattcccaagtgtgagtcgccccagatcaccagcccggcctgctcccagcagccctaaggatctctcaggagcacaggcagctggatgagacttccaaacctgacagatgtcagccgagccgggcctggggctcctttctccagccagcaatgatgtccagaagaatattcaggacttaacggctccaggattttaacaaaagcaagactgttgctcaaatctattcagacaagcaacaggttttataatttttttattactgattttgttatttttatatcagcctgagtctcctgtgcccacatcccaggcttcaccctgaatggttccatgcctgagggtggagactaagccctgtcgagacacttgccttcttcacccagctaatctgtagggctggacctatgtcctaaggacacactaatcgaactatgaactacaaagcttctatcccaggaggtggctatggccacccgttctgctggcctggatctccccactctaggggtcaggctccattaggatttgccccttcccatctcttcctacccaaccactcaaattaatctttctttacctgagaccagttgggagcactggagtgcagggaggagaggggaagggccagtctgggctgccgggttctagtctcctttgcactgagggccacactattaccatgagaagagggcctgtgggagcctgcaaactcactgctcaagaagacatggagactcctgccctgttgtgtatagatgcaagatatttatatatatttttggttgtcaatattaaatacagacactaagttatagtatatctggacaagccaacttgtaaatacaccacctcactcctgttacttacctaaacagatataaatggctggtttttagaaacatggttttgaaatgcttgtggattgagggtaggaggtttggatgggagtgagacagaagtaagtggggttgcaaccactgcaacggcttagacttcgactcaggatccagtcccttacacgtacctctcatcagtgtcctcttgctcaaaaatctgtttgatccctgttacccagagaatatatacattctttatcttgacattcaaggcatttctatcacatatttgatagttggtgttcaaaaaaacactagttttgtgccagccgtgatgctcaggcttgaaatcgcattattttgaatgtgaagggaa

SEQ ID NO: 1622 - DNA, 713 bp, Homo sapiens
atggaagactaccaggctgcggaggagactgcttttgttgttgatgaagtgagcaacattgtaaaagaggctatagaaagcgcaattggtggtaacgcttatcaacacagcaaagtgaaccagtggaccacaaatgtagtagaacaaactttaagccaactcaccaagctgggaaaaccatttaaatacatcgtgacctgtgtaattatgcagaagaatggagctggattacacacagcaagttcctgcttctgggacagctctactgacgggagctgcactgtgcgatgggagaataagaccatgtactgcatcgtcagtgccttcggactgtctatttgacctgcagtccagcctatggcctttctccttttgtctctagttcatcctctaaccaccagccatgaattcagtgaactcttttctcattctctttgttttgtggcactttcacaatgtagaggaaaaaaccaaatgaccgcactgtgatgtgaatggcaccgaagtcagatgagtatccctgtaggtcacctgcagcctgcgttgccacttgtcttaactctgaatatttcatttcaaaggtgctaaaatctgaaatctgctagtgtgaaacttgctctactctctgaaatgattcaaatacactaattttccatactttatacttttgttagaataaattattcaaatctaaaaaaaaaaaaaaaaaaact

SEQ ID NO: 1623 - DNA, 3266 bp, Homo sapiens
ctaaagggcggtcgtccggggttaggttgagggggggcgtcggtccgttctgggcgggggatgactcacagcccatcccatctccccgacgccgcccgcccgcgcagtgctagctccatggcttagcggaggaggcggcagtggcgagctggggggaggggggactcttattttgttagggggaccgggccgaggcccgaccggcctggcagggctcgcccggggccgggcgtcatgtctcatgcggccgaaccagctcgggatggcgtagaggccagcgcggagggccctcgagccgtgttcgtgctgttggaggagcgcaggccggccgactcggctcagctgctcagcctgaactctttgcttccggaatccgggattgttgctgacatagaattagaaaacgtccttgatcctgacagcttctacgagctcaaaagccaacccttaccccttcgctcaagcctcccaatatcactgcaggccacaccagccaccccagctacactctctgcatcgtcttctgcagggggctccaggacccctgccatgtcgtcatcttcttcatcgagggtcttgctgcggcagcagctaatgcgggcccaggcgcaggagcaggagaggcgtgagcgtcgggaacaggccgccgcggctcccttccccagtcctgcacctgcctctcctgccatctctgtggttggcgtctctgctgggggccacacattgagccgtccaccccctgctcaggtgcccagggaggtgctcaaggtgcagacccatctggagaacccaacgcgctaccacctgcagcaggcgcgccggcagcaggtgaaacagtacctgtccaccacactcgggcccaagctggcttcccaggccctcaccccaccgccggggcccgcaagtgcccagccactgcctgcccctgaggctgcccacactaccggccccacaggcagtgcgcccaacagccccatggcgctgctcaccatcgggtccagctcagagaaggagattgatgatgtcattgatgagatcatcagcctggagtccagttacaatgatgaaatgctcagctatctgcccggaggcaccacaggactgcagctccccagcacgctgcctgtgtcagggaatctgcttgatgtgtacagtagtcaaggcgtggccacaccagccatcactgtcagcaactcctgcccagctgagctgcccaacatcaaacgggagatctctgagaccgaggcaaaggcccttttgaaggaacggcagaagaaagacaatcacaacctaattgagcgtcgcaggcgattcaacattaacgacaggatcaaggaactgggcactctcatccctaagtccagtgacccggagatgcgctggaacaagggcaccatcctgaaggcctctgtggattatatccgcaagctgcagaaggagcagcagcgctccaaagacctggagagccggcagcgatccctggagcaggccaaccgcagcctgcagctccgaattcaggaactagaactgcaggcccagatccatggcctgccagtacctcccactccagggctgctttccttggccacgacttcggcttctgacagcctcaagccagagcagctggacattgaggaggagggcaggccaggcgcagcaacgttccatgtaggggggggacctgcccagaatgctccccatcagcagccccctgcaccgccctcagatgcccttctggacctgcactttcccagcgaccacctgggggacctgggagaccccttccacctggggctggaggacattctgatggaggaggaggagggggtggtgggaggactgtcggggggtgccctgtccccactgcgggctgcctccgatcccctgctctcttcagtgtcccctgctgtctccaaggccagcagccgccgcagcagcttcagcatggaagaggagtcctgatcaggcctcacccctcccctgggactttcccacccaggaaaggaggaccagtcaggatgaggccccgccttttcccccaccctcccatgagactgccctgcccaggtatcctgggggaagaggagatgtgatcaggccccacccctgtaatcaggcaaggaggaggagtcagatgaggccctgcaccttccccaaaggaaccgcccagtgcaggtatttcagaaggagaaggctggagaaggacatgagatcagggcctgccccctggggatcacagcctcacccctgcccctgtgggactcatccttgcccaggtgagggaaggagacaggatgaggtctcgaccctgtcccctagggactgtcctagccaggtctcctgggaaagggagatgtcaggatgttgctccatcctttgtcttggaaccaccagtctagtccgtcctggcacagaagaggagtcaagtaatggaggtcccagccctgggggtttaagctctgccccttccccatgaaccctgccctgctctgcccaggcaaggaacagaagtgaggatgagacccagccccttcccctgggaactctcctggcttctaggaatggaggagcccaggccccacccccttccctataggaacagcccagcacaggtatttcaggtgtgaaagaatcagtaggaccaggccaccgctaagtgcttgtggagatcacagccccacccttgtccctcagcaacatcccatctaagcattccacactgcagggaggagtggtacttaagctcccctgccttaacctgggaccaacctgacctaacctaggagggctctgagccaaccttgctcttggggaaggggacagattatgaaatttcatggatgaattttccatacctatatctggagtgagaggccccccaccccttgggcagagtcctgccttcttccttgaggggcagtttgggaaggtgatgggtattagtgggggactgagttcaggttaccagaaccagtacctcagtattctttttcaacatgtagggcaagaggatgaaggaaggggctatcctggacctccccagcccaggaaaaactggaagccttcccccagcaaggcagaagcttggaggagggttgtaaaagcatattgtaccccctcatttgtttatctgatttttttattgctccgcatactgagaatctaggccaccccaacctctgttccccacccagttcttcatttggaggaatcaccccatttcagagttatcaagagacactcccccctccattcccacccctcat

SEQ ID NO: 1624 - DNA, 1872 bp, Homo sapiens
atgcctccaaaggtgacttcagagctgcttcggcagctgagacaagccatgaggaactctgagtatgtgaccgaaccgatccaggcctacatcatcccatcgggagatgctcatcagagtgagtatattgctccatgtgactgtcggcgggcttttgtctctggattcgatggctctgcgggcacagccatcatcacagaagagcatgcagccatgtggactgacgggcgctactttctccaggctgccaagcaaatggacagcaactggacacttatgaagatgggtctgaaggacacaccaactcaggaagactggctggtgagtgtgcttcctgaaggatccagggttggtgtggaccccttgatcattcctacagattattggaagaaaatggccaaagttctgagaagtgccggccatcacctcattcctgtcaaggagaacctcgttgacaaaatctggacagaccgtcctgagcgcccttgcaagcctctcctcacactgggcctggattacacaggcatctcctggaaggacaaggttgcagaccttcggttgaaaatggctgagaggaacgtcatgtggtttgtggtcactgccttggatgagattgcgtggctatttaatctccgaggatcagatgtggagcacaatccagtatttttctcctacgcaatcataggactagagacgatcatgctcttcattgatggtgaccgcatagacgcccccagtgtgaaggagcacctgcttcttgacttgggtctggaagccgaatacaggatccaggtgcatccctacaagtccatcctgagcgagctcaaggccctgtgtgctgacctctccccaagggagaaggtgtgggtcagtgacaaggccagctatgctgtgagcgagaccatccccaaggaccaccgctgctgtatgccttacacccccatctgcatcgccaaagctgtgaagaattcagctgagtcagaaggcatgaggccggctcacattaaagatgctgttgctctctgtgaactctttaactggctggagaaagaggttcccaaaggtggtgtgacagagatctcagctgctgacaaagctgaggagtttcgcaggcaacaggcagactttgtggacctgagcttcccaacaatttccagtacgggacccaacggcgccatcattcactacgcgccagtccctgagacgaataggaccttgtccctggatgaggtgtaccttattgactcgggtgctcaatacaaggatggcaccacagatgtgacgcggacaatgcattttgggacccctacagcctacgagaaggaatgcttcacatatgtcctcaagggccacatagctgtgagtgcagccgttttcccgactggaaccaaaggtcaccttcttgactcctttgcccgttcagctttatgggattcaggcctagattacttgcacgggactggacatggtgttgggtcttttttgaatgtccatgagggtccttgcggcatcagttacaaaacattctctgatgagcccttggaggcaggcatgattgtcactgatgagcccgggtactatgaagatggggcttttggaattcgcattgagaatgttgtccttgtggttcctgtgaagaccaagtataattttaataaccggggaagcctgacctttgaacctctaacattggttccaattcagaccaaaatgatagatgtggattctcttacagacaaagagtgcgactggctcaacaattaccacctgacctgcagggatgtgattgggaaggaattgcagaaacagggccgccaggaagctctcgagtggctcatcagagagacgcaacccatctccaaacagcattaa

SEQ ID NO: 1625 - DNA, 1142 bp, Homo sapiens
gccgccagcggctttctcggacgccttgcccagcgggccgcccgaccccctgcaccatggaccccgctcgccccctggggctgtcgattctgctgcttttcctgacggaggctgcactgggcgatgctgctcaggagccaacaggaaataacgcggagatctgtctcctgcccctagactacggaccctgccgggccctacttctccgttactactacgacaggtacacgcagagctgccgccagttcctgtacgggggctgcgagggcaacgccaacaatttctacacctgggaggcttgcgacgatgcttgctggaggatagaaaaagttcccaaagtttgccggctgcaagtgagtgtggacgaccagtgtgaggggtccacagaaaagtatttctttaatctaagttccatgacatgtgaaaaattcttttccggtgggtgtcaccggaaccggattgagaacaggtttccagatgaagctacttgtatgggcttctgcgcaccaaagaaaattccatcattttgctacagtccaaaagatgagggactgtgctctgccaatgtgactcgctattattttaatccaagatacagaacctgtgatgctttcacctatactggctgtggagggaatgacaataactttgttagcagggaggattgcaaacgtgcatgtgcaaaagctttgaaaaagaaaaagaagatgccaaagcttcgctttgccagtagaatccggaaaattcggaagaagcaattttaaacattcttaatatgtcatcttgtttgtctttatggcttatttgcctttatggttgtatctgaagaataatatgacagcatgaggaaacaaatcattggtgatttattcaccagtttttattaatacaagtcactttttcaaaaatttggatttttttatatataactagctgctattcaaatgtgagtctaccatttttaatttatggttcaactgtttgtgagacgaattcttgcaatgcataagatataaaagcaaatatgactcactcatttcttggggtcgtattcctgatttcagaagaggatcataactgaaacaacataagacaatataatcatgtgcttttaacatatttgagaataaaaaggactagcc

SEQ ID NO: 1626 - DNA, 538 bp, Homo sapiens
agggagagagggaggggaggaaattggagaccccagcacccccttgctcactctcttgctcacagtccacgatggcccggtccctggtgtgccttggtgtcatcatcttgctgtctgccttctccggacctggtgtcaggggtggtcctatgcccaagctggctgaccggaagctgtgtgcggaccaggagtgcagccaccctatctccatggctgtggcccttcaggactacatggcccccgactgccgattcctgaccattcaccggggccaagtggtgtatgtcttctccaagctgaagggccgtgggcggctcttctggggaggcagcgttcagggagattactatggagatctggctgctcgcctgggctatttccccagtagcattgtccgagaggaccagaccctgaaacctggcaaagtcgatgtgaagacagacaaatgggatttctactgccagtgagctcagcctaccgctggccctgccgtttcccctccttgggtttatgcaaatacaatcagcccagtgcaaac

SEQ ID NO: 1627 - DNA, 2309 bp, Homo sapiens
ggggcggacaccagacggagcctccggagttcctccgcccccacctcgccgggtcctggagccgcagtcctcccagctgccctcctcgtggccatggagtgtccacacctgagctccagcgtctgcattgctccggactcagccaagttccccaacggctccccgtcgtcctggtgctgcagcgtgtgccggtccaacaaaagcccttgggtctgtttgacttgttcaagtgtccactgtggaaggtatgtgaatggccatgcaaaaaaacattatgaagatgcacaagtacctttaaccaaccataagaaatcagaaaagcaagataaagttcagcacacagtatgtatggattgcagtagctacagtacatactgttatcgctgtgatgattttgtggttaatgacaccaagctgggactggtacagaaagtcagagaacacttacagaacttggaaaactcagctttcacagctgacaggcataagaaaagaaaacttttggaaaactcaacactaaacagcaagttattaaaagtaaatggaagcaccactgccatttgtgccacaggccttcggaatttggggaacacatgtttcatgaatgccatccttcagtcactcagtaacattgagcagttttgctgttatttcaaagaactgcccgccgtggagttaaggaatgggaaaacagcaggaaggcggacataccacaccaggagccaaggggataacaatgtgtctttggtagaagagtttagaaagacactctgtgctttatggcaaggcagccagactgcatttagcccagagtccttattttatgttgtttggaagattatgccaaactttaggggctatcaacagcaggacgcccatgaattcaatgcgctaccttttggaccacctacacttgggaacttcagggcggtttcaacggtgtttcccgctcagcaattctgcaggagaattctactctgtctgcaagtaaacaagtgttgcataaatggagcatctactgttgtcacggctatattcggaggcattctccaaaatgaggttaactgcctcatatgtgggacagaatctagaaagtttgatccattcctagacctttcattagatattccaagtcagttcagaagtaagcgctctaagaatcaagaaaatggaccagtttgttcgttacgagattgtcttcgcagttttaccgacttagaagaacttgatgagacagagttatatatgtgccataaatgcaaaaagaaacaaaagtccacaaaaaagttttggattcaaaaactacccaaggtgctatgcttacatttgaaaagatttcattggacagcatatttaagaaataaagttgatacatacgtagaatttccactgagaggcctagacatgaaatggtacttactagagcctgagaacagtggcccggagagctgcctgtatgacctcgccgctgtggtggtgcaccatggttccggggttggttctggacattacacagcatacgcaactcacgaaggccgctggttccacttcaatgacagtactgtaacactgactgacgaggagactgtggtgaaggcgaaggcctacatccttttctacgtggaacaccaggccaaagctggatcggataaactttaatacctcctccaaatcatcattcaccaaccataccagagaaacatttccagttttccacaaatacttgatacaagatttaatttcattatgcacttttcaatttcctattttggatttagttttgtcaatggtagtgacttactgaacatggggcaccaactaattttgttgttgttctaccagaaaacctcagcagatgttttgatttgctgctttagttgtaataattcaatttttataggtagttgtaagaacttagtcttatttgacttttttattttatgttaatgttttcagttctcactttgaggcacatttacatcaatgcttttgttcctctcacatgctgaaagcaagatgtgttccttattgtgaagagcgacacaactgcctgctgcctttccacagctataatggacatcaggttgactctaaatcaaggatcatgtgtgcacaatacttgtggcccacaaaatttcacaatgactgctgaggaatcattctttttgcctgtaaaatataacaaagggcatcattaagtagaccaggtaattactgcttgtctctcaaggctgctgtctttatcagcactaactaaataaatttgttggttcagttgtacttgtcctgcaaataaaaaaaaaaaaaaa

SEQ ID NO: 1628 - DNA, 1942 bp, Homo sapiens
gagcatggaggcgggggcggctgaggcagctgtagcggccgtggaggaggtcggctcagccgggcagtttgaggagctgctgcgcctcaaagccaagtccctccttgtggtccatttctgggcaccatgggctccacagtgtgcacagatgaacgaagttatggcagagttagctaaagaactccctcaagtttcatttgtgaagttggaagctgaaggtgttcctgaagtatctgaaaaatatgaaattagctctgttcccacttttctgtttttcaagaattctcagaaaatcgaccgattagatggtgcacatgccccagagttgaccaaaaaagttcagcgacatgcatctagtggctccttcctacccagcgctaatgaacatcttaaagaagatctcaaccttcgcttgaagaaattgactcatgctgccccctgcatgctgtttatgaaaggaactcctcaagaaccacgctgtggtttcagcaagcagatggtggaaattcttcacaaacataatattcagtttagcagttttgatatcttctcagatgaagaggttcgacagggactcaaagcctattccagttggcctacctatcctcagctctatgtttctggagagctcataggaggacttgatataattaaggagctagaagcatctgaagaactagatacaatttgtcccaaagctcccaaattagaggaaaggctcaaagtgctgacaaataaagcttctgtgatgctctttatgaaaggaaacaaacaggaagcaaaatgtggattcagcaaacaaattctggaaatactaaatagtactggtgttgaatatgaaacattcgatatattggaggatgaagaagttcggcaaggattaaaagcttactcaaattggccaacataccctcagctgtatgtgaaaggggagctggtgggaggattggatattgtgaaggaactgaaagaaaatggtgaattgctgcctatactgagaggagaaaattaataaatcttaaacttggtgcccaactattacggggtctggctctgtcacccaggctggagtgcagtggcacgattatggctcattgcagcctcgacttctcggggccaagcgatcctcctgcctcagccttctgagtagctgggaccacaggcgtgcaccaccatgcccacctaattttttatttcttgtagagatgaggtctcctgcctcagcctcccaaagtgctggaatttacaggagtgtcggctgtgccccttgtgatggatgaggaaaggtatccacctttctgaatcagacacaagctgcagtagcttcctgatgcctcattcaccaggatgggtaactttaaagacaagttttataactggcatcccatctggtttcagagtcttgggggcttttttcatacagctttgtctgatatttagagacattcagattcagaagccatgagttcagttagctcatgggccgggcacgtgcactgactcactggctgcagcagaacacattgagggagtcttggtgcacttaggtcactgtaaggttctagggctgggagctgggatttgaaccaggatctgtcagcgcagccccagtgctgtgcttgaagcctcgtgccacactggctttgaggtagcacgctgcaagttagtgagtggagttgcccaagtctggggcttctgaaatgacctggtatttttatgttcctgttagaaatggtgtggctttcacaaattaagtgccaggctgggcacaatggctcgtgcttgtaatcccagcactttgggaggcggaggcaggcgggttgcttgagctccggagcttgagaccagcctgagcaacatggcgaaacctcatatctacaaaaaataaaaaattaactggtcaaaaaaaaaaaaaaaaaaaaaaaaaaaaaaaaaaaaaaaa

SEQ ID NO: 1629 - DNA, 3780 bp, Homo sapiens
tgtgtctgagcctgtggagcgattaaaccgtgcgcggagctgcttctttggcggcagcggcggcggcggtggccggtgcggacgcgcggagctcgccggagacgccgggtggccggagccgtggagcggcggcggagcgggcgccgcggggggtgtggcgcggagaatgattacggacctgaagccaaagaacaagatgcgctagtggacagattgctgaccaggggcttgagagctgggttctattttccctcctcaaactgactttgcagccacggagaggcaggggaaatggaaggtgatgcagtcgaagccattgtggaggagtccgaaacttttattaaaggaaaggagagaaagacttaccagagacgccgggaagggggccaggaagaagatgcctgccacttaccccagaaccagacggatgggggtgaggtggtccaggatgtcaacagcagtgtacagatggtgatgatggaacagctggaccccacccttcttcagatgaagactgaagtaatggagggcacagtggctccagaagcagaggctgctgtggacgatacccagattataactttacaggttgtaaatatggaggaacagcccataaacataggagaacttcagcttgttcaagtacctgttcctgtgactgtacctgttgctaccacttcagtagaagaacttcagggggcttatgaaaatgaagtgtctaaagagggccttgcggaaagtgaacccatgatatgccacaccctacctttgcctgaagggtttcaggtggttaaagtgggggccaatggagaggtggagacactagaacaaggggaacttccaccccaggaagatcctagttggcaaaaagacccagactatcagccaccagccaaaaaaacaaagaaaaccaaaaagagcaaactgcgttatacagaggagggcaaagatgtagatgtgtctgtctacgattttgaggaagaacagcaggagggtctgctatcagaggttaatgcggagaaagtggttggtaatatgaagcctccaaagccaacaaaaattaaaaagaaaggtgtaaagaagacattccagtgtgagctttgcagttacacgtgtccacggcgttcaaatttggatcgtcacatgaaaagccacactgatgagagaccacacaagtgccatctctgtggcagggcattcagaacagtcaccctcctgaggaatcaccttaacacacacacaggtactcgtcctcacaagtgcccagactgcgacatggcctttgtgaccagtggagaattggttcggcatcgtcgttacaaacacacccacgagaagccattcaagtgttccatgtgcgattacgccagtgtagaagtcagcaaattaaaacgtcacattcgctctcatactggagagcgtccgtttcagtgcagtttgtgcagttatgccagcagggacacatacaagctgaaaaggcacatgagaacccattcaggggaaaagccttatgaatgttatatttgtcatgctcggtttacccaaagtggtaccatgaagatgcacattttacagaagcacacagaaaatgtggccaaatttcactgtccccactgtgacacagtcatagcccgaaaaagtgatttgggtgtccacttgcgaaagcagcattcctatattgagcaaggcaagaaatgccgttactgtgatgctgtgtttcatgagcgctatgccctcatccagcatcagaagtcacacaagaatgagaagcgctttaagtgtgaccagtgtgattacgcttgtagacaggagaggcacatgatcatgcacaagcgcacccacaccggggagaagccttacgcctgcagccactgcgataagaccttccgccagaagcagcttctcgacatgcacttcaagcgctatcacgaccccaacttcgtccctgcggcttttgtctgttctaagtgtgggaaaacatttacacgtcggaataccatggcaagacatgctgataattgtgctggcccagatggcgtagagggggaaaatggaggagaaacgaagaagagtaaacgtggaagaaaaagaaagatgcgctctaagaaagaagattcctctgacagtgaaaatgctgaaccagatctggacgacaatgaggatgaggaggagcctgccgtagaaattgaacctgagccagagcctcagcctgtgaccccagccccaccacccgccaagaagcggagaggacgaccccctggcagaaccaaccagcccaaacagaaccagccaacagctatcattcaggttgaagaccagaatacaggtgcaattgagaacattatagttgaagtaaaaaaagagccagatgctgagcccgcagagggagaggaagaggaggcccagccagctgccacagatgcccccaacggagacctcacgcccgagatgatcctcagcatgatggaccggtgatggcggagccttgtgcgtcgccaggacttctctgggctgtgtttaaacggcccgcatcttaatttttctcccttctttctttttttggctttgggaaaagcatcattttaccaaacataccgagaacgaaaacttcaaggatgatgttagaaaaaaatgtgatttaactagaacttgctgtctgatgttagcaaatcatggaatgttctgagtccctgagggtttactgtgaagtgctgaggacagtgttgacaactaactcgttttcctagatggaaacggagacattgacccctccctccatgtggtaaaccactccagaatggccaccaggcttcccagagttctatggtcttcttcccaagagagtttttaattgtaaatgcatacttgggaaggacttagagttttaaactgttttttgcttttgcttttccctgactccctttgcttggagtcagctgcacaccagtagtatggcatgctacgatcaggttctgtcctgaaagctttgcctctttcttggcaaagtttctggtatggtcaagcttgtaaataactttttttacattttaatcttttccattaattaagaggttgaaaagaagtgcagtgtaagaaaacccagcattttaattacttgcaaattaagttaccacagactctgtagtgtgtaaatgttgacaaggaattggatcacaatcatgtagcagaatggcacccagaccactgcccaccagtgacggacatgcacgtggcagatcatgatttccagcccacggagccagcatttgaaccttgtataattaactttcagttatgatttcccatcgacattttctttgccctgtttgtagctgattgttgtgttttataaatcttctgttaaggcagaagggtgattatgagtggttcacagcagcccttataagctgggccagaaaatttcactaggtcagtaatttaaaccttggatcttcaaaaaataaaataatgtgaagcaaaaccaactaaaaagtgattcttgcacatgaactgtcacatgtttaaaaatgtgttttttagagagcctcagtcttactgatttcaaacacttttttcttctgtgtattgcttttaagagagccatcagttagctatcagactctaggttgatgcattttgtacttagctgtactgtgtgatatttttcattattttaggacgccaacatgagacctgtaataaaatatgtaatggggttgaaagctggggaggaggatctactgctgtacagctaataaatcataacggattaacaagtga

SEQ ID NO: 1630 - DNA, 4933 bp, Homo sapiens
aaatcatccgtagtgcctccccgggggacacgtagaggagagaaaagcgaccaagataaaagtggacagaagaataagcgagactttttatccatgaaacagtctcctgccctcgctccggaagagcgctaccgcagagccgggtccccaaagccggtcttgagagctgatgacaataacatgggcaatggctgctctcagaagctggcgactgctaacctcctccggttcctattgctggtcctgattccatgtatctgtgctctcgttctcttgctggtgatcctgctttcctatgttggaacattacaaaaggtctattttaaatcaaatgggagtgaacctttggtcactgatggtgaaatccaagggtccgatgttattcttacaaatacaatttataaccagagcactgtggtgtctactgcacatcccgaccaacacgttccagcctggactacggatgcttctctcccaggggaccaaagtcacaggaatacaagtgcctgtatgaacatcacccacagccagtgtcagatgctgccctaccacgccacgctgacacctctcctctcagttgtcagaaacatggaaatggaaaagttcctcaagtttttcacatatctccatcgcctcagttgctatcaacatatcatgctgtttggctgtaccctcgccttccctgagtgcatcattgatggcgatgacagtcatggactcctgccctgtaggtccttctgtgaggctgcaaaagaaggctgtgaatcagtcctggggatggtgaattactcctggccggatttcctcagatgctcccagtttagaaaccaaactgaaagcagcaatgtcagcagaatttgcttctcacctcagcaggaaaacggaaagcaattgctctgtggaaggggtgagaactttctgtgtgccagtggaatctgcatccccgggaaactgcaatgtaatggctacaacgactgtgacgactggagtgacgaggctcattgcaactgcagcgagaatctgtttcactgtcacacaggcaagtgccttaattacagccttgtgtgtgatggatatgatgactgtggggatttgagtgatgagcaaaactgtgattgcaatcccacaacagagcatcgctgcggggacgggcgctgcatcgccatggagtgggtgtgtgatggtgaccacgactgtgtggataagtccgacgaggtcaactgctcctgtcacagccagggtctggtggaatgcagaaatggacaatgtatccccagcacgtttcaatgtgatggtgacgaggactgcaaggatgggagtgatgaggagaactgcagcgtcattcagacttcatgtcaagaaggagaccaaagatgcctctacaatccctgccttgattcatgtggtggtagctctctctgtgacccgaacaacagtctgaataactgtagtcaatgtgaaccaattacattggaactctgcatgaatttgccctacaacagtacaagttatccaaattattttggccacaggactcaaaaggaagcatccatcagctgggagtcttctcttttccctgcacttgttcaaaccaactgttataaatacctcatgttcttttcttgcaccattttggtaccaaaatgtgatgtgaatacaggcgagcgtatccctccttgcagggcattgtgtgaacactctaaagaacgctgtgagtctgttcttgggattgtgggcctacagtggcctgaagacacagattgcagtcaatttccagaggaaaattcagacaatcaaacctgcctgatgcctgatgaatatgtggaagaatgctcacctagtcatttcaagtgccgctcaggacagtgtgttctggcttccagaagatgtgatggccaggccgactgtgacgatgacagtgatgaggaaaactgtggttgtaaagagagagatctttgggaatgtccatccaataaacaatgtttgaagcacacagtgatctgcgatgggttcccagactgccctgattacatggacgagaaaaactgctcattttgccaagatgatgagctggaatgtgcaaaccatgcgtgtgtgtcacgtgacctgtggtgtgatggtgaagccgactgctcagacagttcagatgaatgggactgtgtgaccctctctataaatgtgaactcctcttcctttctgatggttcacagagctgccacagaacaccatgtgtgtgcagatggctggcaggagatattgagtcagctggcctgcaagcagatgggtttaggagaaccatctgtgaccaaattgatacaggaacaggagaaagagccgcggtggctgacattacactccaactgggagagcctcaatgggaccactttacatgaacttctagtaaatgggcagtcttgtgagagcagaagtaaaatttctcttctgtgtactaaacaagactgtgggcgccgccctgctgcccgaatgaacaaaaggatccttggaggtcggacgagtcgccctggaaggtggccatggcagtgttctctgcagagtgaacccagtggacatatctgtggctgtgtcctcattgccaagaagtgggttctgacagttgcccactgcttcgaggggagagagaatgctgcagtttggaaagtggtgcttggcatcaacaatctagaccatccatcagtgttcatgcagacacgctttgtgaagaccatcatcctgcatccccgctacagtcgagcagtggtggactatgacatcagcatcgttgagctgagtgaagacatcagtgagactggctacgtccggcctgtctgcttgcccaacccggagcagtggctagagcctgacacgtactgctatatcacaggctggggccacatgggcaataaaatgccatttaagctgcaagagggagaggtccgcattatttctctggaacattgtcagtcctactttgacatgaagaccatcaccactcggatgatatgtgctggctatgagtctggcacagttgattcatgcatgggtgacagcggtgggcctcttgtttgtgagaagcctggaggacggtggacattatttggattaacttcatggggctccgtctgcttttccaaagtcctggggcctggcgtttatagtaatgtgtcatatttcgtcgaatggattaaaagacagatttacatccagacctttctcctaaactaattataaggatgatcagagacttttgccagctacactaaaagaaaatggccttcttgactgtgaagagctgcctgcagagagctgtacagaagcacttttcatggacagaaatgctcaatcgtgcactgcaaatttgcatgtttgttttggactaatttttttcaatttattttttcaccttcatttttctcttatttcaagttcaatgaaagactttacaaaagcaaacaaagcagactttgtccttttgccaggcctaaccatgactgcagcacaaaattatcgactctggcgagatttaaaatcaggtgctacagtaacaggttatggaatggtctcttttatcctatcacaaaaaaagacatagatatttaggctgattaattatctctaccagtttttgtttctcaagctcagtgcatagtggtaaatttcagtgttaacattggagacttgcttttctttttctttttttataccccacaattcttttttattacacttcgaattttagggtacacgagcacaacgtgcaggttagttacatatgtatacatgtgccatgttggtgtgctgaacccagtaactcgtcatttgatttattaaaagccaagataatttacatgtttaaagtatttactattacccccttctaatgtttgcataattctgagaactgataaaagacagcaataaaagaccagtgtcatccatttaggtagcaagacatattgaatgcaaagttctttagatatcaatattaacacttgacattattggaccccccattctggatgtatatcaagatcataattttatagaagagtctctatagaactgtcctcatagctgggtttgttcaggatatatgagttggctgattgagactgcaacaactacatctatatttatgggcaatattttgttttacttatgtggcaaagaactggatattaaactttgcaaaagagaatttagatgagagatgcaattttttaaaaagaaaattaatttgcatccctcgtttaattaaatttatttttcagttttcttgcgttcatccataccaacaaagtcataaagagcatattttagagcacagtaagactttgcatggagtaaaacattttgtaattttcctcaaaagatgtttaatatctggtttcttctcattggtaattaaaattttagaaatgatttttagctctaggccactttacgcaactcaatttctgaagcaattagtggtaaaaagtatttttccccactaaaaaactttaaaacacaaatcttcatatatacttaatttaattagtcaggcatccattttgccttttaaacaactaggattccctactaacctccaccagcaacctggactgcctcagcattccaaatagatactacctgcaattttatacatgtatttttgtatcttttctgtgtgtaaacatagttgaaattcaaaaagttgtagcaatttctatactattcatctcctgtccttcagtttgtataaacctaaggagagtgtgaaatccagcaactgaattgtggtcacgattgtatgaaagttcaagaacatatgtcagttttgttacagttgtagctacatactcaatgtatcaacttttagcctgctcaacttaggctcagtgaaatatatatattatacttattttaaataattcttaatacaaataaaatggta

SEQ ID NO: 1631 - DNA, 2143 bp, Homo sapiens
gcgctgcagctcactttctccctgtttgctggccagcagggtttgtggccgcctctgctgtgacgccacagcctggtgaggagggggctgcagttcctcaggaaactgccagtggacaaagtcataaacaagagttccagttccctggaacctgagtcgggaggcctgcaactcactttctccctgtttgctggcccagacaggcctgtgctagagggctggatagtgtggtagtgtggtggatagagtgctgcctctatccacaacgcagccatatgctgactgaagataactttgtgtctggaagagccctctgatttcttacactaatggccttacacgagatggaggattttacatttgatggaacaaagcgcttaagtgtcaactacgtgaagggaattcttcaaccgacagacacctgtgacatctgggataagatctggaacttccaagccaagcctgatgacctgcttatttctacctatcctaaagcaggaacaacatggactcaggagatagtggaattaatacaaaatgaaggtgatgtggagaaaagtaaacgggcaccgactcatcaacgatttcctttcctcgaaatgaaaatcccatccttaggatctggtttggaacaagctcatgcaatgccctcaccacggatcctgaaaacacatcttccctttcacttgctgccaccatccttgctagagaaaaactgtaagataatctatgtagcaagaaatcccaaggacaacatggtgtcctattaccatttccaaagaatgaataaagctcttcctgctccaggaacatgggaagagtattttgagacttttctggctgggaaagtgtgctggggctcctggcatgaacatgtgaaaggatggtgggaagccaaagacaaacaccgtattctctatctcttctatgaggacatgaagaagaacccaaagcatgaaattcagaagctggcagaatttattgggaagaaattagatgacaaagttctagataaaattgtccattacacttcgtttgatgtcatgaaacagaatccaatggcaaactattcatcgattcctgctgaaatcatggaccactccatttctccattcatgagaaaaggggcagtgggagactggaagaaacacttcaccgtggctcagaatgagagatttgatgaagattacaagaagaaaatgactgataccagactaactttccacttccagttctagtaaggaagaaaaactgaaaatgttttagtttattacccagtatatttgggtaataatgaaagtttaattctcataacaaatgatatcagattccagttatcagaatagtttactgtgtttgctcttattcactctactaaaaaattattttaaaaggctggaggcaaggtggtgacaggcagcagggtggcgacatggagagagggaagctcaataaatcactaggtacaatcctggtatcattgccaattatcatcatatttacattttctacaatcatgtgcttattaacatattggaaatgcttcagtcctcacatgataatacactaacattttcagattaagttttggttcaagttaatttttttttttttttttttgagacggagtctcgctctgtcgcccaggctggagtgcagtggcacgatctcggctcactgcaagctctgcttcctgggttcacgccattcccctgcctcagcctcccgagtagctgggactatgggcgcccaccaccactcccggctaatttttttttttgtattcttagtagagacgaggtttcaccgtgttagccaggatgttctcgatctcctgaccccatgatccacccgcctcagcctagacctgctgatccagggtgtgtgtgagttgagggtgggtggaggggtttgcagtgtgggaatgtggccctgcagttgacctgagctgcttcacatggttgtccattctggggcttaaagaactgggaccagaccaagtagaggccttggtgctggttggggtggggcctgcagagtcttagttactgatttcattttcaataaatgtaggtttgttacatgagtttcccaattaaaaaaaaaatgacttcttgtccagtgcaaaaaaaaaaaaaaaaaa

SEQ ID NO: 1632 - DNA, 2741 bp, Homo sapiens
ggcacgagggagagagaactagtctcgagtttttttttttttttttgtgcaggtaggaaatgtctttattattggccttgagtcatcatgtagtgtctgacataggttacgtgtccagaggatctgcctggcacacgctagctacccctgcccactggagcagcccctctggccgacgccaggcctttgtccatcatgccagggaagccaaccccaccatcccacaagttcatgctaggggtgctgaggaacaaggctgtcctaggattggaccctccatcctggacaggggtcctggggaggatgaggctgaggcctggatgatcagtctctttttggtttcatgatcatttaaaaaacagaaaagacaaacatttcacagtctttaaaaaatagaagtctgaggagagaagccagagtcctgggccccgggaggcccctcgaggcctcagcattccctgtcccttgaggtctgtctgcaggcctggccacagcacacgtggcccgttattggagccaggcctacaccccagcaaccatgtccaagggacctgcagttggtattgatcttggcaccacctactcttgtgtgggtgttttccagcacggaaaagtcgagataattgccaatgatcagggaaaccgaaccactccaagctatgtcgcctttacggacactgaacggttgatcggtgatgccgcaaagaatcaagttgcaatgaaccccaccaacacagtttttgatgccaaacgtctgattggacgcagatttgatgatgctgttgtccagtctgatatgaaacattggccctttatggtggtgaatgatgctggcaggcccaaggtccaagtagaatacaagggagagaccaaaagcttctatccagaggaggtgtcttctatggttctgacaaagatgaaggaaattgcagaagcctaccttgggaagactgttaccaatgctgtggtcacagtgccagcttactttaatgactctcagcgtcaggctaccaaagatgctggaactattgctggtctcaatgtacttagaattattaatgagccaactgctgctgctattgcttacggcttagacaaaaaggttggagcagaaagaaacgtgctcatctttgacctgggaggtggcacttttgatgtgtcaatcctcactattgaggatggaatctttgaggtcaagtctacagctggagacacccacttgggtggagaagattttgacaaccgaatggtcaaccattttattgctgagtttaagcgcaagcataagaaggacatcagtgagaacaagagagctgtaagacgcctccgtactgcttgtgaacgtgctaagcgtaccctctcttccagcacccaggccagtattgagatcgattctctctatgaaggaatcgacttctatacctccattacccgtgcccgatttgaagaactgaatgctgacctgttccgtggcaccctggacccagtagagaaagcccttcgagatgccaaactagacaagtcacagattcatgatattgtcctggttggtggttctactcgtatccccaagattcagaagcttctccaagacttcttcaatggaaaagaactgaataagagcatcaaccctgatgaagctgttgcttatggtgcagctgtccaggcagccatcttgtctggagacaagtctgagaatgttcaagatttgctgctcttggatgtcactcctctttcccttggtattgaaactgctggtggagtcatgactgtcctcatcaagcgtaataccaccattcctaccaagcagacacagaccttcactacctattctgacaaccagcctggtgtgcttattcaggtttatgaaggcgagcgtgccatgacaaaggataacaacctgcttggcaagtttgaactcacaggcatacctcctgcaccccgaggtgttcctcagattgaagtcacttttgacattgatgccaatggtatactcaatgtctctgctgtggacaagagtacgggaaaagagaacaagattactatcactaatgacaagggccgtttgagcaaggaagacattgaacgtatggtccaggaagctgagaagtacaaagctgaagatgagaagcagagggacaaggtgtcatccaagaattcacttgagtcctatgccttcaacatgaaagcaactgttgaagatgagaaacttcaaggcaagattaacgatgaggacaaacagaagattctggacaagtgtaatgaaattatcaactggcttgataagaatcagactgctgagaaggaagaatttgaacatcaacagaaagagctggagaaagtttgcaaccccatcatcaccaagctgtaccagagtgcaggaggcatgccaggaggaatgcctgggggatttcctggtggtggagctcctccctctggtggtgcttcctcagggcccaccattgaagaggttgattaagccaaccaagtgtagatgtagcattgttccacacatttaaaacatttgaaggacctaaattcgtagcaaattctgtggcagttttaaaaagttaagctgctatagtaagttactgggcattctcaatacttgaatatggaacatatgcacaggggaaggaaataacattgcactttataaacactgtattgtaagtggaaaatgcaatgtcttaaataaaactatttaaaattggcaccataaaaaaaaaaaaaaaaaaaaa

SEQ ID NO: 1633 - DNA, 1333 bp, Homo sapiens
tagagtcgttgggcccggcgcgacccgcaggagcgtagagagcgcgggactagagtgcagagctccgggacgtggatcggagccggcgcgatgggcggagagcaggaggaggagcggttcgacggcatgttgctggccatggctcagcagcacgagggcggcgtgcaggagcttgtgaacaccttcttcagcttccttcgacgcaaaacagactttttcattggaggagaagaagggatggcagagaagcttatcacacagactttcagccaccacaatcagctggcacagaagacccggcgggagaagagagcccggcaggaggccgagcggcgggagaaggcggagcgggcggccagactggccaaggaagccaagtcagagacctcagggccccagatcaaggagctaactgatgaagaggcagagaggctgcagctagagattgaccagaaaaaggatgcagagaatcatgaggcccagctcaagaacggcagccttgactccccagggaagcaggatactgaggaagatgaggaggaagatgagaaggacaaaggaaaactgaagcccaacctaggcaacggggcagacctgcccaattaccgctggacccagaccctgtcggagctggacctggcggtccctttctgtgtgaacttccggctgaaagggaaggacatggtggtggacatccagcggcggcacctccgggtggggctcaaggggcagccagcgatcattgatggggagctctacaatgaagtgaaggtggaggagagctcgtggctcattgaggacggcaaggtggtgactgtgcatctggagaagatcaataagatggagtggtggagccgcttggtgtccagtgaccctgagatcaacaccaagaagattaaccctgagaattccaagctgtcagacctggacagtgagactcgcagcatggtggaaaagatgatgtatgaccagcgacagaagtccatggggctgccaacttcagacgaacagaagaaacaggagattctgaagaagttcatggatcaacatccggagatggatttttccaaggctaaattcaactagcccctgttttttcctccctgaactcttggggctgagctgcaaccacccaactttctttcccactcttctctgggacttgtgggcctcagggcttggggcaggcatgggactggcccaggcacacaggtcccggggcatcaggagaaaggctgggtcttgggaccttgtcctccccagttggcctactgttacacattaaaacgatttgcccagctaaaaaaaaaaaaaaaaaaaaaaaaaaaaaaaa

SEQ ID NO: 1634 - DNA, 2455 bp, Homo sapiens
gctggacgggcacaccatgaggctgctgaccctcctgggccttctgtgtggctcggtggccacccccttaggcccgaagtggcctgaacctgtgttcgggcgcctggcatcccccggctttccaggggagtatgccaatgaccaggagcggcgctggaccctgactgcaccccccggctaccgcctgcgcctctacttcacccacttcgacctggagctctcccacctctgcgagtacgacttcgtcaagctgagctcgggggccaaggtgctggccacgctgtgcgggcaggagagcacagacacggagcgggcccctggcaaggacactttctactcgctgggctccagcctggacattaccttccgctccgactactccaacgagaagccgttcacggggttcgaggccttctatgcagccgaggacattgacgagtgccaggtggccccgggagaggcgcccacctgcgaccaccactgccacaaccacctgggcggtttctactgctcctgccgcgcaggctacgtcctgcaccgtaacaagcgcacctgctcagccctgtgctccggccaggtcttcacccagaggtctggggagctcagcagccctgaatacccacggccgtatcccaaactctccagttgcacttacagcatcagcctggaggaggggttcagtgtcattctggactttgtggagtccttcgatgtggagacacaccctgaaaccctgtgtccctacgactttctcaagattcaaacagacagagaagaacatggcccattctgtgggaagacattgccccacaggattgaaacaaaaagcaacacggtgaccatcacctttgtcacagatgaatcaggagaccacacaggctggaagatccactacacgagcacagcgcacgcttgcccttatccgatggcgccacctaatggccacgtttcacctgtgcaagccaaatacatcctgaaagacagcttctccatcttttgcgagactggctatgagcttctgcaaggtcacttgcccctgaaatcctttactgcagtttgtcagaaagatggatcttgggaccggccaatgcccgcgtgcagcattgttgactgtggccctcctgatgatctacccagtggccgagtggagtacatcacaggtcctggagtgaccacctacaaagctgtgattcagtacagctgtgaagagaccttctacacaatgaaagtgaatgatggtaaatatgtgtgtgaggctgatggattctggacgagctccaaaggagaaaaatcactcccagtctgtgagcctgtttgtggactatcagcccgcacaacaggagggcgtatatatggagggcaaaaggcaaaacctggtgattttccttggcaagtcctgatattaggtggaaccacagcagcaggtgcacttttatatgacaactgggtcctaacagctgctcatgccgtctatgagcaaaaacatgatgcatccgccctggacattcgaatgggcaccctgaaaagactatcacctcattatacacaagcctggtctgaagctgtttttatacatgaaggttatactcatgatgctggctttgacaatgacatagcactgattaaattgaataacaaagttgtaatcaatagcaacatcacgcctatttgtctgccaagaaaagaagctgaatcctttatgaggacagatgacattggaactgcatctggatggggattaacccaaaggggttttcttgctagaaatctaatgtatgtcgacataccgattgttgaccatcaaaaatgtactgctgcatatgaaaagccaccctatccaaggggaagtgtaactgctaacatgctttgtgctggcttagaaagtgggggcaaggacagctgcagaggtgacagcggaggggcactggtgtttctagatagtgaaacagagaggtggtttgtgggaggaatagtgtcctggggttccatgaattgtggggaagcaggtcagtatggagtctacacaaaagttattaactatattccctggatcgagaacataattagtgatttttaacttgcgtgtctgcagtcaaggattcttcatttttagaaatgcctgtgaagaccttggcagcgacgtggctcgagaagcattcatcattactgtggacatggcagttgttgctccacccaaaaaaacagactccaggtgaggctgctgtcatttctccacttgccagtttaattccagccttacccattgactcaaggggacataaaccacgagagtgacagtcatctttgcccacccagtgtaatgtcactgctcaaattacatttcattaccttaaaaagccagtctcttttcatactggctgttggcatttctgtaaactgcctgtccatgctctttgtttttaaacttgttcttattgaaaaaaaaaaaaaaaaa

SEQ ID NO: 1635 - DNA, 2352 bp, Homo sapiens
actcagcccagtggccctctgagctgttccttcttgaccggcacacacagctcgcttcttcactttcttttccatccactgccggacccaagccagccttccagggagcagccatgccttacctctaccgggccccagggcctcaggcacacccggttcccaaggacgcccggatcacccactcctcaggccagagctttgagcaaatgaggcaggagtgcctgcagagaggcaccctgtttgaggatgcagacttcccagccagcaattcctccctgttctacagtgagaggccgcagatcccctttgtgtggaaacgaccaggggaaatcgtgaaaaacccagaattcattcttggaggggccaccaggactgatatctgccagggagagctgggagactgctggctattagccgccatcgcctcccttacgcttaatcaaaaagcactggccagagtcatcccccaggaccaaagctttggccctggttatgccgggatattccatttccagttctggcagcacagtgagtggctggacgtggtgatcgatgaccgcctgcccaccttcagggaccgcttggttttcctccactctgccgaccacaatgagttctggagcgccttgctggaaaaagcctacgccaagctaaatgggagctatgaagctctgaagggaggcagcgccatcgaggccatggaagacttcaccgggggtgtggcagagaccttccaaactaaagaggcccccgagaacttctatgagattctagagaaggctttgaagagaggctccctgctgggctgcttcattgataccagaagtgctgcagaatctgaggcccggacgccgtttggtcttattaagggtcatgcctacagtgtaacgggaattgaccaggtaagcttccgaggccagagaatcgagctcatccgaatccggaacccttggggccaggttgagtggaacgggtcgtggagcgacagttctccggagtggcgttctgttggtccagctgagcagaagcgtctgtgtcacactgctctggatgatggggaattctggatggcatttaaggacttcaaggcccactttgataaagtggagatctgcaacctcactcccgatgccctggaggaagacgcgatccacaaatgggaggtgacggtccatcagggaagctgggttcgcggctccacggctgggggctgccgcaatttcctggataccttttggaccaatccacaaataaaattgtctctgactgagaaagatgaggggcaggaggagtgtagtttccttgtagccctgatgcagaaagatagaaggaaactcaagagatttggtgccaatgtgctgacaatcggctatgccatttatgagtgccctgacaaagacgaacacctgaacaaagacttcttcagataccacgcttctcgggccagaagcaagacgttcatcaacctgagagaagtctccgaccggttcaagctgccccctggggagtacatcctgattcccagcacttttgagccccaccaggaagctgatttctgtctgagaatcttttcagagaaaaaagccattacccgggatatggatggaaatgtagacattgaccttcctgagcctccaaagccaactccacctgaccaggagacagaggaggagcagcggtttcgggctctgtttgaacaagtcgctggtgaggacatggaggtgacagcagaggaacttgagtatgttttaaatgctgtgctgcaaaagaaaaaggacatcaaattcaagaagctaagcctgatctcctgtaaaaacatcatttccctgatggacaccagcggcaatgggaagctggagtttgatgaattcaaagtgttctgggacaagctgaagcagtggattaaccttttccttcggtttgatgctgacaagtccggcaccatgtctacctatgaactacggactgcactgaaagctgcaggctttcagctgagcagccacctcctgcagctgattgtgctcaggtatgcggatgaggagctccagctggacttcgatgacttcctcaactgcctggtccggctggagaatgcgagccgggtgttccaggctctcagtacaaagaacaaggagttcattcatctcaatataaatgagttcatccatttgacaatgaacatctgaggctgccttgtagagatgcagcctgcccagctgaatcttggcttctggaccttgaccttcagaacttctcttggtgtggaaccattacgcccagggttcactcccctctcatcgtccggccttctcccttcatcttgatctgggaagaatgaaatgaactcagcta

SEQ ID NO: 1636 - DNA, 2516 bp, Homo sapiens
tgattctgaggcattgccgtcgcgcggtgcatagctaaagacgtcgcgcttgcgcaggcgctcggcgcagaggcctgcgggaagccaagatggcgcataggggttctccaggctgcagttggcgccttatcagtatctaagcggagtgttttggaaggagttaaggggctgtggcaaacgccctctccgccgtcatggcccggcatcggaatgttcgaggctataactacgatgaagattttgaagatgatgatctctacggccagtctgtagaggatgattattgtatttcgccgtcaacagctgctcagtttatttattcacggcgtgacaaaccttccgttgagcctgtggaagaatatgattatgaagatctgaaagaatcttccaattctgtttcaaaccatcagctcagtggatttgatcaagctcgtctttattcatgccttgatcacatgagagaggtacttggagatgctgtgccagatgaaatattaattgaagcagttctgaagaacaagtttgatgtgcagaaggctttgtcaggggttctggaacaagatagagtgcagagtttgaaggacaagaatgaggcaacagtatctacaggaaagatagcaaaaggaaaaccagtagattcccagacatcgcgaagtgaatctgaaattgtgccaaaagttgctaaaatgactgtatctggaaagaagcaaactatgggatttgaagtgcctggagtatcttctgaagaaaatggtcatagtttccacacacctcaaaaaggaccgcccattgaagatgccattgcttcttccgatgttcttgagactgcttctaaatctgctaatccaccccacacgattcaagcatcagaagagcagagttcaaccccagcaccggtgaaaaagtctggcaagctgaggcagcaaatagatgtgaaggcggaactggagaagcggcaaggagggaagcagctactcaacttagtggtcattggtcatgttgatgctgggaaaagtactctgatgggccatatgctttatcttctgggtaatataaacaaaagaactatgcataagtatgaacaggagtctaaaaaggctggcaaagcttcgtttgcatatgcatgggtcttggatgaaactggcgaagaaagggaaaggggagtaaccatggatgttggtatgacaaagtttgaaaccacaaccaaagttattacattaatggatgctccaggccataaggacttcattccaaatatgattacaggagcagcccaggcggatgtagctgttttagttgtagatgccagcaggggagagtttgaagctggatttgagactggaggacaaacacgagagcatggactcttggtccgttctctgggagtgacgcagcttgcagttgcagttaataaaatggatcaggttaattggcaacaagaaaggtttcaagagattactggaaaacttgggcactttcttaagcaagcaggttttaaggagagtgatgtaggttttattcctacaagtggtctcagtggtgaaaatctaatcacaagatctcagtcaagtgaactcacaaaatggtataaaggactatgtttattagaacaaattgattcctttaagcctccccagcgatctattgacaaaccttttagattatgtgtgtccgatgttttcaaagatcaaggatctggattttgcataactggtaaaatagaagctggttatatccaaactggtgaccgactactggcaatgcctcctaatgaaacttgtaccgtgaaaggaatcactctgcatgatgaacctgtcgactgggcggcagcaggcgatcatgttagtcttactttggttgggatggatatcatcaaaatcaatgttggctgcatattttgtggccccaaagtacccattaaagcttgcactcgtttcagagcccgaatcctcatctttaatattgaaattcctatcactaaaggatttcctgtgctgttacactaccaaactgtcagtgaacccgccgttattaaacgattgattagtgtcttaaacaaaagcacgggtgaagtcacaaagaaaaagcctaagtttttgactaaaggccagaatgcattggtagagctacagacacaaagaccaatagctcttgagctatataaagactttaaagagctggggaggttcatgctacgttacggtggttctacaatagctgctggtgttgtcactgagataaaagaatgatgggtcagaatttctaccacgtttctggatacagtgaaatagctaacctctgtttcaagaatgcagttattaagtcaaaggaacaatgtgcaattgatatgtttttagatgagagagaaaaattaaagctaaaattagctgcaaagaagtattaataatcacctctgcaaaaattctaagttgccaactggcaaagaaagtctaatgttaaaaacaactttgcctttgaaacgttaataaatggatttactttgctaagaaaaaaaa

SEQ ID NO: 1637 - DNA, 2846 bp, Homo sapiens
ggcggaagtggctccgggactgcggagaacatattgtgatgttcgtgcctcagagctaaaactatgagtgaatttcggattcaccatgacgtcaatgaactgcttagcctgctgcgtgtccacggaggagatggggctgaggtctacattgacctgcttcaaaagaacaggaccccgtacgtcactaccactgtctctgctcacagtgccaaggttaaaattgcagagttttctcgtactccagaagactttctaaagaaatatgatgaactgaaatctaaaaatacaaggaaccttgacccgctggtgtacctgttgtcaaagctcacggaagacaaagagactctgcagtacttacaacagaatgcaaaagaaagagctgagcttgcagccgctgctgtgggcagcagtaccaccagcatcaacgtccctgccgcggcctccaagatctccatgcaggagcttgaggaactgaggaagcagcttggcagcgtggccacaggctccacgctgcagcagtctctggaacttaaaagaaagatgcttcgagacaagcagaacaaaaaaaattcaggccagcacctccccatcttcccagcatgggtgtatgagagacctgccctgatcggggatttcctgattggtgctggcatcagcacagacaccgctttgccgataggcacgttgcccctggcctcgcaggagtcggccgtggtggaggacctgctgtacgtgctggtgggcgtggacgggaggtacgtcagtgctcagcccctggctgggaggcagagccggaccttcctcgtggaccccaacctggacctgtccatcagggagctggtgcacaggatcctcccagtggccgccagctactccgctgtgaccaggttcattgaagagaagtcttccttcgagtacgggcaggtgaaccacgccctggcggccgccatgcgcaccctggtgaaggagcacctgattctggtgtcacagctggagcagctgcacaggcagggcctcctttcgctgcagaagctctggttctacatccagccagccatgcgcaccatggacatcctggcctccctcgccacctcggtggacaaaggcgaatgtcttggggggtccacgctgagcctgctccacgacaggagcttcagctacacaggggacagccaggcgcaggagctatgcctgtacctaaccaaggcggccagtgctccctacttcgaggttctggagaagtggatctacaggggcatcatccacgacccatacagtgagtttatggtcgaggagcacgagctgcggaaggagaggatccaggaggattacaacgacaagtactgggaccagcggtacaccatcgtccagcagcagatcccgtccttcctgcagaaaatggcggacaagatcctcagcacaggaaaatatctaaatgtggtcagagagtgtggccatgacgtcacctgcccggtggctaaagagatcatctacacgttaaaagagcgggcgtatgtggagcagatcgagaaggcgtttaactacgccagcaaggtgctgctggacttcctgatggaggagaaggagctggtggctcacctcaggtccatcaagcgctacttcctcatggaccagggcgacttcttcgtgcacttcatggacctcgcggaggaggagctccggaagccggtggaggacatcacgccccctcgcctggaagcgctcctggagctggcgctgcgcatgagcacggccaacactgaccccttcaaggacgacctcaagatcgacctgatgccccatgacctcatcactcagctcttgcgcgtcctggccatcgagaccaagcaggagaaggcgatggcgcacgccgaccccacggagctggcgctgagcggcctggaggccttctctttcgactacatcgtcaagtggcccctttcgctcatcatcaacaggaaagccctcactcgctaccagatgctcttcaggcacatgttctattgcaagcacgtggagcggcagctctgcagcgtctggatcagcaacaaaaccgccaagcagcactcgctgcactccgcccagtggtttgctggggctttcactctgcggcagcgaatgctcaacttcgtccagaatattcaatactacatgatgttcgaagtgatggaaccgacctggcacatcctggagaaaaacctgaaatccgcctccaacattgacgacgtccttggccaccacacaggcttcctggacacctgcctgaaggactgcatgctcaccaaccccgagctgctgaaggtcttctccaagctcatgtctgtgtgcgtcatgttcaccaactgcatgcagaaatttacacagagcatgaaattagatggcgagctgggcgggcagacgctggagcacagcaccgtcctggggctgcccgcaggggccgaggagcgggcccggaaggagctcgccaggaagcacctggctgagcacgcagacactgtgcagctggtgtccggcttcgaggccaccatcaacaagtttgacaagaacttctcagcccacctgctggacctcctggcccggctgagcatctatagcaccagtgactgtgagcacggcatggccagcgtcatctccaggcttgacttcaatggtttctacacggagcgcctggagcgcctgtctgcagagaggagccagaaggccaccccccaagtgcctgtcctgcgggggcccccggctcctgcacccagggtcgcagtcaccgcacagtgagccctggctgtgacaggaaggaagggtgtggggtcagcagggactggtgcaaatgggtccagaattttcaaatc

SEQ ID NO: 1638 - DNA, 2351 bp, Homo sapiens
tgcgggcaggattcacgccgctgtgacccggaggtcctcagggggcgaagccccggcctaggcctcgcggagatgcccagctgcggtgcttgtacttgcggcgcggcggccgtccggctcatcacctcctcactcgcctccgcgcagagaggtatttctggtggtcgcattcatatgtcagttttaggaaggcttgggacatttgaaactcagattctgcaaagagctcctcttagatcctttacagaaacaccagcatactttgcctcaaaagatgggataagtaaagatggttctggagatggaaataagaaatcagcaagtgagggaagtagtaagaaatcaggctctgggaattctgggaaaggtggaaaccagctgcgctgtcctaaatgtggcgacttgtgcacacatgtagagacctttgtatcatccacccgttttgtcaagtgtgaaaagtgtcatcatttttttgttgtgctatctgaagcagactcaaagaaaagcataattaaagaacctgaatcagcagcagaagctgtaaaattggcattccaacagaaaccaccacctccccctaagaagatttataactacctcgacaagtatgttgttggccagtcatttgctaagaaggtgctttcagttgctgtgtacaatcattataagagaatatataataatatcccagctaatctgagacagcaagcagaggttgagaagcagacatcattaacaccaagagagttagaaataagaagacgggaggatgagtacagatttacaaaattgcttcagattgctggaattagcccacatggtaatgctttaggagcatcaatgcagcaacaggtaaatcaacaaatacctcaggaaaaacgaggaggtgaagtattggattcttctcatgatgacataaaacttgaaaaaagtaatattttgctgcttggaccaactgggtcaggtaaaactctgctggcacaaaccctagctaaatgccttgatgtcccttttgctatctgtgactgtacaactttgactcaggctggatatgtaggcgaagatattgaatctgtgattgcaaaactactccaagatgccaattataatgtggaaaaagcacaacaaggaattgtctttctggatgaagtagataagattggcagtgtgccaggcattcatcaattacgggatgtaggtggagaaggcgttcagcaaggcttattaaaactactagaaggcacaatagtcaatgttccagaaaagaattcccgaaagctccgtggagaaacagttcaagttgatacaacaaacatcctgtttgtggcatctggtgctttcaatggtttagacagaatcatcagcaggaggaaaaatgaaaagtatcttggatttggaacaccatctaatctgggaaaaggcagaagggctgcagctgctgcagaccttgctaatcgaagtggggaatcgaatactcaccaagacattgaagaaaaagatcggttattgcgtcatgtggaagccagagatctgattgagtttggcatgattcctgagtttgtgggacggttgcctgtggtggttccattgcatagcctagatgagaaaacacttgtacaaatattaactgagccacgaaatgctgttattcctcagtaccaggccttattcagcatggataagtgtgaactgaatgttactgaggatgctttgaaagctatagccagattggcactagaacgaaaaacaggtgcacgaggccttcggtccataatggaaaagctgttactagaaccaatgtttgaagtccctaattctgatatcgtatgtgtggaggttgacaaagaagtagtagaaggaaaaaaggaaccaggatacatccgggctccaacaaaagaatcctctgaagaggagtatgactctggagttgaagaagaaggatggccccgccaagcagatgctgcaaacagctaaactgtcatattgctgtcttgtatatacagcttttccttcttttgtttaggatcataattgtctctacagtctgatattaaaggcattggatctatcttggatatcatacatggtcagagaagcctttaggagaagaatcagatcatgtatataattgtaacatcacattgattttacggaagatgttatatggactttaatgacacaatgtttagagataaaatgtacattattttggttcagttttttaaaaaaaatatgctttaacaaaattcttaggaattcttttaagcaatgcaggtattgcgataactgtagattttacaataatgttactctacaaatgggaaaataaattctttaaaattgaatattga

SEQ ID NO: 1639 - DNA, 1488 bp, Homo sapiens
gttggtgagcatcatggcaaccgttacagccacaaccaaagtcccggagatccgtgatgtaacaaggattgagcgaatcggtgcccactcccacatccggggactggggctggacgatgccttggagcctcggcaggcttcgcaaggcatggtgggtcagctggcggcacggcgggcggctggcgtggtgctggagatgatccgggaagggaagattgccggtcgggcagtccttattgctggccagccgggcacggggaagacggccatcgccatgggcatggcgcaggccctgggccctgacacgccattcacagccatcgccggcagtgaaatcttctccctggagatgagcaagaccgaggcgctgacgcaggccttccggcggtccatcggcgttcgcatcaaggaggagacggagatcatcgaaggggaggtggtggagatccagattgatcgaccagcaacagggacgggctccaaggtgggcaaactgaccctcaagaccacagagatggagaccatctacgacctgggcaccaagatgattgagtccctgaccaaggacaaggtccaggccggggacgtgatcaccatcgacaaggcgacgggcaagatctccaagctgggccgctccttcacacgcgcccgcgactacgacgctatgggctcccagaccaagttcgtgcagtgcccagatggggagctccagaaacgcaaggaggtggtgcacaccgtgtccctgcacgagatcgacgtcatcaactctcgcacccagggcttcctggcgctcttctcaggtgacacaggggagatcaagtcagaagtccgtgagcagatcaatgccaaggtggctgagtggcgcgaggagggcaaggcggagatcatccctggagtgctgttcatcgacgaggtccacatgctggacatcgagagcttctccttcctcaaccgggccctggagagtgacatggcgcctgtcctgatcatggccaccaaccgtggcatcacgcgaatccggggcaccagctaccagagccctcacggcatccccatagacctgctggaccggctgcttatcgtctccaccaccccctacagcgagaaagacacgaagcagatcctccgcatccggtgcgaggaagaagatgtggagatgagtgaggacgcctacacggtgctgacccgcatcgggctggagacgtcactgcgctacgccatccagctcatcacagctgccagcttggtgtgccggaaacgcaagggtacagaagtgcaggtggatgacatcaagcgggtctactcactcttcctggacgagtcccgctccacgcagtacatgaaggagtaccaggacgccttcctcttcaacgaactcaaaggcgagaccatggacacctcctgagttggatgtcatcccccgaccccaccctgttttccaccagagttctgacactgtgactctgtataaaatggttgggaagctgc

SEQ ID NO: 1640 - DNA, 1890 bp, Homo sapiens
gacccacgcgtccggggaggagaaagtggcgagttccggatccctgcctagcgcggcccaacctttactccagagatcatggctgccgaggatgtggtggcgactggcgccgacccaagcgatctggagagcggcgggctgctgcatgagattttcacgtcgccgctcaacctgctgctgcttggcctctgcatcttcctgctctacaagatcgtgcgcggggaccagccggcggccagcggcgacagcgacgacgacgagccgccccctctgccccgcctcaagcggcgcgacttcacccccgccgagctgcggcgcttcgacggcgtccaggacccgcgcatactcatggccatcaacggcaaggtgttcgatgtgaccaaaggccgcaaattctacgggcccgaggggccgtatggggtctttgctggaagagatgcatccaggggccttgccacattttgcctggataaggaagcactgaaggatgagtacgatgacctttctgacctcactgctgcccagcaggagactctgagtgactgggagtctcagttcactttcaagtatcatcacgtgggcaaactgctgaaggagggggaggagcccactgtgtactcagatgaggaagaaccaaaagatgagagtgcccggaaaaatgattaaagcattcagtggaagtatatctatttttgtattttgcaaaatcatttgtaacagtccactctgtctttaaaacatagtgattacaatatttagaaagttttgagcacttgctataagttttttaattaacatcactagtgacactaataaaattaacttcttagaatgcatgatgtgtttgtgtgtcacaaatccagaaagtgaactgcagtgctgtaatacacatgttaatactgtttttcttctatctgtagttagtacaggatgaatttaaatgtgtttttcctgagagacaaggaagacttgggtatttcccaaaacaggtaaaaatcttaaatgtgcaccaagagcaaaggatcaacttttagtcatgatgttctgtaaagacaacaaatccctttttttttctcaattgacttaactgcatgatttctgttttatctacctctaaagcaaatctgcagtgttccaaagactttggtatggattaagcgctgtccagtaacaaaatgaaatctcaaaacagagctcagctgcaaaaaagcatattttctgtgtttctggactgcactgttgtccttgccctcacatagacactcagacaccctcacaaacacagtagtctatagttaggattaaaataggatctgaacattcaaaagaaagctttggaaaaaaagagctggctggcctaaaaacctaaatatatgatgaagattgtaggactgtcttcccaagccccatgttcatggtggggcaatggttatttggttattttactcaattggttactctcatttgaaatgagggagggacatacagaataggaacaggtgtttgctctcctaagagccttcatgcacacccctgaaccacgaggaaacagtacagtcgctagtcaagtggtttttaaagtaaagtatattcataaggtaacagttattctgttgttataaaactatacccactgcaaaagtagtagtcaagtgtctaggtctttgatattgctcttttggttaacactaagcttaagtagactatacagttgtatgaatttgtaaaagtatatgaacacctagtgagatttcaaacttgtaattgtggttaaatagtcattgtattttcttgtgaactgtgttttatgattttacctcaaatcagaaaacaaaatgatgtgctttggtcagttaataaaaatggttttacccactaaaaaaaaaaaaa

SEQ ID NO: 1641 - DNA, 4252 bp, Homo sapiens
gcaggctccttgccagaggcctccactcactccagacccctatagcccgtcgctgtcagctgtcaacaaaggatgcgaatgctggccgcttcctgtgggcttcgtgtcacccagaggtgagcccaggccaggatgggggactccagggacctttgccctcaccttgactccataggagaggtgaccaaagaggacttgctgctcaaatctaagggaacctgtcagtcgtgtggggtcaccggaccaaacctatgggcctgtctgcaggttgcctgcccctatgttggctgcggagaatccttcgctgaccacagcaccattcatgcacaggcaaaaaagcacaacttgaccgtgaacctgaccacgttccgactgtggtgttacgcctgtgagaaggaggtattcctggagcagcggctggcagcccctctgctgggctcctcttccaagttctctgaacaggactccccgccaccctcccaccctctgaaagctgttcctattgctgtggctgatgaaggagagtctgagtcagaggatgatgacctgaaacctcgaggcctcacgggcatgaagaacctcgggaactcctgctacatgaacgccgccctgcaggccctgtccaattgcccgccgctgactcagttcttcttggagtgtggcggcctggtgcgcacagataagaagccagccctgtgcaagagctaccagaagctggtctctgaggtctggcataagaaacggccaagctacgtggtccccaccagtctgtctcatgggatcaagttggtcaacccaatgttccgaggctatgcccagcaggacacccaagagttccttcgctgcctgatggaccagctgcacgaggagctcaaggagccggtggtggccacggtggcgctgacggaggctcgggactcagattcgagtgacacggatgagaaacgggagggtgaccggagcccatcagaagatgagttcttgtcctgtgactcgagcagtgaccggggtgagggtgacgggcaggggcgtggcgggggcagctcgcaggccgagacggagctgctgatcccagatgaggcgggccgagtcatctctgagaaggagcggatgaaggaccgcaagttctcctggggccagcagcgtacaaactcggagcaagtggacgaggacgctgatgtggacactgccatggctgcccttgaccagcccgcggaggcccagcccccgtcaccacggtcctccagcccctgccggacgccagagccggacaatgatgctcacctacgcagctcctctcgcccctgcagccccgtccaccaccacgagggccatgccaagctgtctagcagcccccctcgtgcaagccccgtgaggatggcaccgtcgtacgtgctcaagaaagcccaggtattgagtgctggcagccggaggcggaaggagcagcgctaccgcagcgtcatctcagacatctttgacggctccattctcagcctcgtgcagtgtctcacctgtgaccgggtatccaccacagtggaaacgttccaggacttatcactgcccattcctggaaaggaggacctggccaagctccattcagccatctaccagaatgtgccggccaagccaggcgcctgtggggacagctatgccgcccagggctggctggccttcattgtggagtacatccgacggtttgtggtatcctgtacccccagctggttttgggggcctgtcgtcaccctggaagactgccttgctgccttctttgccgctgatgagttaaagggtgacaacatgtacagctgtgagcggtgtaagaagctgcggaacggagtgaagtactgcaaagtcctgcggttgcccgagatcctgtgcattcacctaaagcgctttcggcacgaggtgatgtactcattcaagatcaacagccacgtctccttccccctcgaggggctcgacctgcgccccttccttgccaaggagtgcacatcccagatcaccacctacgacctcctctcggtcatctgccaccacggcacggcaggcagtgggcactacatcgcctactgccagaacgtgattaatgggcagtggtacgagtttgatgaccagtacgtcacagaagtccacgagacggtggtgcagaacgccgagggctacgtactcttctacaggaagagcagcgaggaggccatgcgggagcgacagcaggtggtgtccctggccgccatgcgggagcccagcctgctgcggttctacgtgtcccgcgagtggctcaacaagttcaacaccttcgcagagccaggccccatcaccaaccagaccttcctctgctcccacggaggcatcccgccccacaaataccactacatcgacgacctggtggtcatcctgccccagaacgtctgggagcacctgtacaacagattcgggggtggccccgccgtgaaccacctgtacgtgtgctccatctgccaggtggagatcgaggcactggccaagcgcaggaggatcgagatcgacaccttcatcaagttgaacaaggccttccaggccgaggagtcgccgggcgtcatctactgcatcagcatgcagtggttccgggagtgggaggcgttcgtcaaggggaaggacaacgagccccccgggcccattgacaacagcaggattgcacaggtcaaaggaagcggccatgtccagctgaagcagggagctgactacgggcagatttcggaggagacctggacctacctgaacagcctgtatggaggtggccccgagattgccatccgccagagtgtggcgcagccgctgggcccagagaacctgcacggggagcagaagatcgaagccgagacgcgggccgtgtgatctgctgggctagtctccccatgtgccccaccccgcggaaggcgtgtttgtgcccagaagagaggccgggctgctgcagaaccccgccgtgtaaagaggcagaaaagttggtttggtttgcagtaacgctgcaactagaaaatatatgcacttcaggcttgttgaaacgaccaagactctgtgacgttaatttgggtctttgtcctggcagtgcctctgccagtcactgtcatcgttgtgtcccccacaactgtcctcttgctagctcggcccagctttgtccctggagcccgatgctacccctgtcagacagaggctgcggcctgggccagagtcagggagtagctgctgcttcacggcgtctccactgtgcgattggcccggagccccgaagactcggagggagctgctcagggccggtgagcgcagccagaagccctggccagtgaggagctcacaggtcctccctggtggtcccgccgcacctctgcatctcctgggcgtcaccaggaaggctctgaagtcccgggctgctctcagcacttctcctgcagactgaagactctggactcattgctgattggaacaccaggaggaggttggatttctgccagtgggggatgtttctggaggcagctggtcccccacaccgcgtcctgctgagcctgccccctggattggctgtaatttgcctcgaagttcagcagttcatcttcatgggaaatttgctgagcccccaccagggaaccggatgatgaaacagggatacctcacagcttggccatttgaggcaaaggcagcttcccgagctgatgctaaagaagacagactttcccttcctcccagcagcagcagtgcagagcccgcctggagggatgtgggggctgtgcagggtgcagcgctcaggtggatcctgggaagcagcctctggatgctgagtggagggagccactgagcacagcaaggcaccaaagcccctggagaaaccgccagggcgaggtgcgaccatcatcaggatcaaagcagacggggcgtgggtggggaaggggctctgggaccagaccccccacactactgcgtctttgtttctatcagtctttgtagaagcaggtggtggtggaaattccagcaggtgggtcccgcagaggccctgaggcctcacttttcggatcttctgtcccagatcctgctccctccctgctgagcctggggttcccctggcattggccccagccttctgaaagccggcgctgcagccagaggccgcacgctgcactgtcgcgacgcagagaggcttctgtgcaggctgggatcgggccccatgtctgtgctgtctagtttgtgttcaaaatgtcagaataaacacagaataaatgtt

SEQ ID NO: 1642 - DNA, 1315 bp, Homo sapiens
ggaattcgggcacgagtgaaagatttcaaaccccaaacagtgcaactgaaacttttgcattactatactactgagaatatctaacatgttgttactaatcaatgtcattctgaccttgtgggtttcctgtgctaatggacaagaagtgaaaccttgtgattttccagaaattcaacatggaggtctatattataagagtttgcgtagactatactttccagcagctgcaggacaatcttattcctattactgtgatcaaaattttgtgactccttcaggaagttactgggattacattcactgcacacaagatgggtggttgccaacagtcccatgcctcagaacatgctcaaaatcagatatagaaattgaaaatggattcatttctgaatcttcctctatttatattttaaataaagaaatacaatataaatgtaaaccaggatatgcaacagcagatggaaattcttcaggttcaattacatgtttgcaaaatggatggtcagcacaaccaatttgcattaaattttgtgatatgcctgtttttgagaattccagagccaagagtaatggcatgcggtttaagctccatgacacattggactacgaatgctacgatggatatgaaatcagttatggaaacaccacaggttccatagtgtgtggtgaagatgggtggtcccattttccaacatgttataattcttcagaaaagtgtgggcctcctccacctattagcaatggtgataccacctcctttctactaaaagtgtatgtgccacagtcaagagtcgagtaccaatgccagtcctactatgaacttcagggttctaattatgtaacatgtagtaatggagagtggtcggaaccaccaagatgcatacatccatgtataataactgaagaaaacatgaataaaaataacatacagttaaaaggaaaaagtgacataaaatattatgcaaaaacaggggataccattgaatttatgtgtaaattgggatataatgcgaatacatcagttctatcatttcaagcagtgtgtagggaaggcatagtggaataccccagatgcgaataaggcagcattgttaccctaaatgtatgtcaacttcacttctcactcttatggtctcaaagcttcgaaagatagcttctgatattgttgtaatttctactttatttcaaagaaaattaatataatagtttcaatttgcaacttaatatgttctcaaaaatatgttaaaacaaactaaattattgcttatgcttgtactaaaataataaaaactacccttatattggaaaaaaaaaa

SEQ ID NO: 1643 - DNA, 2623 bp, Homo sapiens
gggatgccgaggagccggggcggccgcgccgcgccggggccgccgccgccgccgccgccgccgggccaggccccgcgctggagccgctggcgggtccctgggcggctgctgctgctgctgctgcccgcgctctgctgcctcccgggcgccgcgcgggcggcggcggcggcggcgggggcagggaaccgggcagcggtggcggtggcggtggcgcgggcggacgaggcggaggcgcccttcgccgggcagaactggttaaagtcctatggctatctgcttccctatgactcacgggcatctgcgctgcactcagcgaaggccttgcagtcggcagtctccactatgcagcagttttacgggatcccggtcaccggtgtgttggatcagacaacgatcgagtggatgaagaaaccccgatgtggtgtccctgatcacccccacttaagccgtaggcggagaaacaagcgctatgccctgactggacagaagtggaggcaaaaacacatcacctacagcattcacaactataccccaaaagtgggtgagctagacacgcggaaagctattcgccaggctttcgatgtgtggcagaaggtgaccccactgacctttgaagaggtgccataccatgagatcaaaagtgaccggaaggaggcagacatcatgatcttttttgcttctggtttccatggcgacagctccccatttgatggagaagggggattcctggcccatgcctacttccctggcccagggattggaggagacacccactttgactccgatgagccatggacgctaggaaacgccaaccatgacgggaacgacctcttcctggtggctgtgcatgagctgggccacgcgctgggactggagcactccagcgaccccagcgccatcatggcgcccttctaccagtacatggagacgcacaacttcaagctgccccaggacgatctccagggcatccagaagatctatggacccccagccgagcctctggagcccacaaggccactccctacactccccgtccgcaggatccactcaccatcggagaggaaacacgagcgccagcccaggccccctcggccgcccctcggggaccggccatccacaccaggcaccaaacccaacatctgtgacggcaacttcaacacagtggccctcttccggggcgagatgtttgtctttaaggatcgctggttctggcgtctgcgcaataaccgagtgcaggagggctaccccatgcagatcgagcagttctggaagggcctgcctgcccgcatcgacgcagcctatgaaagggccgatgggagatttgtcttcttcaaaggtgacaagtattgggtgtttaaggaggtgacggtggagcctgggtacccccacagcctgggggagctgggcagctgtttgccccgtgaaggcattgacacagctctgcgctgggaacctgtgggcaagacctactttttcaaaggcgagcggtactggcgctacagcgaggagcggcgggccacggaccctggctaccctaagcccatcaccgtgtggaagggcatcccacaggctccccaaggagccttcatcagcaaggaaggatattacacctatttctacaagggccgggactactggaagtttgacaaccagaaactgagcgtggagccaggctacccgcgcaacatcctgcgtgactggatgggctgcaaccagaaggaggtggagcggcggaaggagcggcggctgccccaggacgacgtggacatcatggtgaccatcaacgatgtgccgggctccgtgaacgccgtggccgtggtcatcccctgcatcctgtccctctgcatcctggtgctggtctacaccatcttccagttcaagaacaagacaggccctcagcctgtcacctactataagcggccagtccaggaatgggtgtgagcagcccagagccctctctatccacttggtctggccagccaggcccttcctcaccagggtctgaggggcagctctggccagtgctcaccagggccagcagggccctaggctggggtcgtacagctgaagttgtgggtgcattggcctaggctgagcgtggggcagggaattatgggggctgtgcccagggtgggtgtctggcacccagctgccagccttctgtcctgggcaaactactccctacttaagggaataggccaggctccatccggaggcagggaccatgccaggaggagcccctgtggtcacggcatcctgtggtgtccatgaggtaccacagctccactcctggctggaacccggcaccctctgtgggaagccagcactagctctcatcccccatccgggagataccaccagtcctggtccccttttgccaacacctgctggtcagatgtccccctacccccaccccactgtcctccaaggctacaggacccctgcttctgacacagtgagcaacaagcctgggtttccctgctggcagacggcagatccctcaggaaacctgctccacttgtcagggtctcttcggagacccaggatttagggtcacatgctgcaggcagggctgtggcccagctgggtctgacaaggacccgtgtcacatcgtgaatattta

SEQ ID NO: 1644 - DNA, 1040 bp, Homo sapiens
gcgaggcgccaccgacgcggaagactataagccccagcgggcgacgaccgaacgcccccgggaacaccgggccccgagctcggtcccgcgcccgaggatcctccacggggctagatggctgcgtcgggggcgggagcggaggtgagcgggcgctagggccgcgagcccccgccggcccttcctccagcgccctgcggaccccgcagaaggcgctcgcctccctagcccgcaaaaacatatcgatttttctcgctgtggcaacggggacgtcctgatagatcctctgctccaataggcaactccggccttccctgccctgacctggaacctctgggagggctgcagagtaagtgccgcctctgcgctccgacggaggcacgaggcctgtggagtaggtccctctgttccgacaggtgcgacacttggcgctccatgcttgcgggtgccgggaggcctggcctcccccagggccgccacctctgctggttgctctgtgctttcaccttaaagctctgccaagcagaggctcccgtgcaggaagagaagctgtcagcaagcacctcaaatttgccatgctggctggtggaagagtttgtggtagcagaagagtgctctccatgctctaatttccgggctaaaactacccctgagtgtggtcccacaggatatgtagagaaaatcacatgcagctcatctaagagaaatgagttcaaaagctgccgctcagctttgatggaacaacgcttattttggaagttcgaaggggctgtcgtgtgtgtggccctgatcttcgcttgtcttgtcatcattcgtcagcgacaattggacagaaaggctctggaaaaggtccggaagcaaatcgagtccatatagctacattccacccttgtatcctgggtcttagagaccctatctcagacagtgaaagtgaaatggactgatttgcactcttggttctttggagccttgtggtggaatccccttttccccatcttcttctttcagatcattaatgagcagaataaaaagagtaaaatggt

SEQ ID NO: 1645 - DNA, 1637 bp, Homo sapiens
ctggggtttggctgtccggacggtgcagcggcgaggccggccgcgaagatgccagtggcggtgatggcggaaagcgcctttagtttcaaaaagttgctggatcagtgcgagaaccaggagctcgaggcccctggaggaattgctacacccccagtgtatggtcagcttctagctttatatttgctccataatgacatgaataatgcaagatatctttggaaaagaataccacctgctataaaatctgcaaattctgaacttgggggaatttggtcagtaggacaaagaatctggcagagagatttccctgggatctatacaaccatcaacgctcaccagtggtctgagacggtccagccaattatggaagcacttagagatgcaacaaggagacgcgcctttgccctggtctctcaagcgtatacttcaatcatcgccgatgattttgcagcctttgttggacttcctgtagaagaggctgtgaaaggcatattagaacaaggatggcaagctgattccaccacaagaatggttctgcccagaaagccagttgcaggggccctggatgtttcctttaacaagtttattcccttatcagagcctgctccagttcccccaatacccaatgaacagcagttagccagactgacggattatgtggctttccttgaaaactgatttatcactctgagttcaagattcatcttcagaatcctgtatactgacaaacgtagaaatgtaaagtttgtattttcaatttattggatggcttaagcacctcagcattccttactatgtgataaaatacatatagaatataagatatactatatacattttgtccataaacgttatgctgaatagttgttgaaacagttctcattttgtagtatttaataatctggatggagcctgtcagtattacagttagttttctagtgactcataaaataagatttcctgtttcatgtagaatagtgtttgtcaactgtcttttctctgtcccagcacatgccgtactcttatatgtaccattggttgataattataatgattcatttggacttgaagaaagattgtccccaggcacagtatctgaatcactggggattatgattcaccctctttggagaacatgctctcttttcaccccccacctcctgagagccactaatgtaagatacagaaacatagctgaggaacaaatagaccatttccatactaaaccagtttgttaactttagattttttccaatagtgtgagtatatccattgctggcagtggagggcttgccatgaaaatgcaacttatttaagacatttatgagacatattaacttgtgctgtcgccttttagaaggagaaacttaagtgtggaatgcattatatgggcaaagaagctatgaagatacatgatacactttgtacaactatcctgcagcccattggttgcttatatttatcgcttggctcaagttctgccctttggagaaatactgagcaagtctttcattctctgtgtgacagccctctgaatatttgaagttgtttgttgtaacttaaggttataacagcccttagttcatttactctgcatttgttcaataaatatttaactgaaaaaaaaaaaaaaaaaa

SEQ ID NO: 1646 - DNA, 2661 bp, Homo sapiens
cttgaacgcctgacctcgtatccacccgcctcagcctcccaaagtgctgggattacaggcatgagccaccacgcccagcccataatttattgattttttaaaatttgtccagccttctattaccacgtcgaatccattagctacagccatcccatgagaagctgagtggattcagccccacctcctgctcacagaccctgtccgagcacctcatttgtcccaacagcattactgcaggacccccaggacgttggactgccagctccctgggtctcctcctctctggggcagatcctcagtcctcccttgacttcacgactgtggccagatcatgtgtggactgtccctctctttgggtctccagagcgcttgcatcaaacacccctaactcagaagtgtgcagccacactgggactcagaacccaacaacagggacagaagactcacgcccttggggtgcccggtctcgtggcatcaggcatgacttccagctcctgcgccttccccagcaactgctgactggggacccagaccgggagctgagcgacgggcctggcgagcgaagctcggggtctcactcaggcaccagcccctccttgccccaggcttgagtgactcacagccctattcaggcaggagctgctcttctggggtatcgcgatccacttaaggatgaggcagacttggtgacaagctggtctgagcagcgcttccagagccagaactgagcccagtgagagcgcaccctggagcagcctggattcctggggtgtccccggcagccacacacagccatgcactacccaactgcactcctcttcctcatcctggccaatggggcccaggcctttcgcatctgcgccttcaatgcccagcggctgacactggccaaggtggccagggagcaggtgatggacaccttagttcggatactggctcgctgtgacatcatggtgctgcaggaggtggtagactcttccggcagcgccatccccctcctgcttcgagaactcaatcgatttgatggctctgggccctacagcaccctgagcagcccccagctggggcgcagcacctacatggagacgtatgtgtacttctatcggtcacacaaaacacaggtcctgagttcctacgtgtacaacgatgaggatgacgtctttgcccgggagccatttgtggcccagttctctttgcccagcaatgtccttcccagcctggtgttggtcccgctgcacaccactcctaaggccgtagagaaggagctgaacgccctctacgatgtgtttctggaggtctcccagcactggcagagcaaggacgtgatcctgcttggggacttcaatgctgactgcgcttcactgaccaaaaagcgcctggacaagctggagctgcggactgagccaggcttccactgggtgattgccgatggggaggacaccacagtgcgggccagcacccactgcacctatgaccgcgtcgtgctgcacggggagcgctgccggagtctgctgcacactgcggctgcctttgacttccccacgagcttccagctcaccgaggaggaggccctcaacatcagtgaccactaccccgtggaggtggagctgaagctgagccaggcgcacagcgtccagcctctcagcctcactgttctgttgctgctatcactcctgtcccctcagctgtgccctgctgcctgagcgtccccctacccccccagggcctgctgccttttgggacttaaaccccagcctcccccgtccatccagccctggggctggggggcttcaactatagttgccctgtgactgtagtccacccctgcctgccttgtttgatttggctcttgttctttggttgggcttgtgcctagattaggagaggaagccaggggccctgcactcatgccacctgccaggtagtgtagtatcaggagtggagacaaagtgggctctgggttggggtaggggaagggagggttcagaaagaggaatgaagatgttgtatgacaagaaggaaagttactgagaacaaaaacccagattggtgagataggacacttgtgcagcagatatgccaatgggccatgtttattgtggatgggtaagaatcaccaggaaaccattaagccccaatagctacaaggagggtggttaatctgctatatcaaactccttccctgaaaccagcaaacaccgggaaacattttggctcattataatccggtgaacaatgcagtcaggcctgttataaccgctgagcagccacactcgcacctcctgggtgctgtagtctgtgttggtacaggcttctgcatgcctggtaaagtccagccaaggctggtcaaggcaacatctccacacagaaaatctgcaccagttatgtaagctaaaaagctgtgtgaacccaggtgtcccggaaaggggctgcaggacacagcaaaatgccagcagcgtgccggacccctcccttccatcctcctctccaaagaacagaggtcaggaaaaacactggctgggacgctagaagggtcatgtgttaactataatcacatttatggtttggaaccatcaccccaaggtaaaaaaaaaaataaaaggtatgtttggcaaaataaaataaaggtaattaaaaacctaaaaaaaaaaaaaaaaaaaa

SEQ ID NO: 1647 - DNA, 1556 bp, Homo sapiens
ccaaattattgtatctcacagtgtggggaaaaggaagagagatcagattgttactgtgtctgtgtagaaagaagtagacataggagactccattttgttatgtactaagaaaaattcttctgccttgagattctgttaatctataaccttaccccccaaccccgtgctctctgaaacatgtgctgtgtcctctcagaattgcctgttttttgtgctcctccgagctcgctgttcgtccgggttttttacgttttaatttccaggacttgaactgccatgtcctctgaagaaggaaagctcttcgtgggagggctcaactttaacaccgacgagcaggcactggaagaccacttcagcagtttcggacctatctctgaggtggtcgttgtcaaggaccgggagactcagcggtccaggggttttggtttcatcaccttcaccaacccagagcatgcttcagttgccatgagagccatgaacggagagtctctggatggtcgtcagatccgtgtggatcatgcaggcaagtctgctcggggaaccagaggaggtggctttggggcccatgggcgtggtcgcagctactctagaggtggtggggaccagggctatgggagtggcaggtattatgacagtcgacctggagggtatggatatggatatggacgttccagagactataatggcagaaaccagggtggttatgaccgctactcaggaggaaattacagagacaattatgacaactgaaatgagacatgcacataatatagatacacaaggaataatttctgatccaggatcgtccttccaaatggctgtatttataaaggtttttggagctgcactgaagcatcttattttatagtatatcaaccttttgtttttaaattgacctgccaaggtagctgaagaccttttagacagttcccatctttttttttaaattttttctgcctatttaaagacaaattatgggacgtttgtagaacctgagtatttttctttttaccagttttttagtttgagctcttaggtttattggagctagcaataattggttctggcaagtttggccagactgacttcaaaaaattaatgtgtatccagggacattttaaaacctgtacacagtgtttattgtggttaggaagcaatttcccaatgtacctataagaaatgtgcatcaagccagcctgaccaacatggtgaaaccccatctgtactaaacataaaaaaattagcctggcatggtggtgtacgcctgtaatcccagtgacttgggaggctgaggcaggagaatcgcttgaacccgggaggcggaggttgcagtgagctaagatcgcgccactgtactccagcctggacaacagcgagagctccatctcaaaaaaaaaaggaaatgtgtatcaagaacatgattatccagcggtattttctaattcagatcatcaaactgattatatagaagagttggctttaaaatgtttgcaaatgtcgatgttgagaatggtatttcttcagttttattttaggatttctatagtttgatgatc

SEQ ID NO: 1648 - DNA, 919 bp, Homo sapiens
cgctcgcctccctcgctccacgcgcgcccggacgcggcggccaggcttgcgcgtggttcccctcccggtgggcggattcctgggcaagatgaagtgggtgtgggcgctcttgctgttggcggcgtgggcagcggccgagcgcgactgccgagtgagcagcttccgagtcaaggagaacttcgacaaggctcgcttctctgggacctggtacgccatggccaagaaggaccccgagggcctctttctgcaggacaacatcgtcgcggagttctcggtggacgagaccggccagatgagcgccacagccaagggccgagtccgtcttttgaataactgggacgtgtgcgcagacatggtgggcaccttcacagacaccgaggaccctgccaagttcaagatgaagtactggggcgtagcctcctttctgcagaaaggaaatgatgaccactggatcgtcgacacagactacgacacgtatgccgtacagtactcctgccgcctcctgaacctcgatggcacctgtgctgacagctactccttcgtgttttcccgggaccccaacggcctgcccccagaagcgcagaagattgtaaggcagcggcaggaggagctgtgcctggccaggcagtacaggctgatcgtccacaacggttactgcgatggcagatcagaaagaaaccttttgtagcaatatcaagaatctagtttcatctgagaacttctgattagctctcagtcttcagctctatttatcttaggagtttaatttgcccttctctccccatcttccctcagttcccataaaaccttcattacacataaagatacacgtgggggtcagtgaatctgcttgcctttcctgaaagtttctggggcttaagattccagactctgattcattaaactatagtcacccgtg

SEQ ID NO: 1649 - DNA, 2665 bp, Homo sapiens
ggctctgggcatcaccagcggccccagggaaaaagaaagaaatgggaaacagcatgaaatccacccctgcgcctgccgagaggcccctgcccaacccggagggactggatagcgacttccttgccgtgctaagtgactacccgtctcctgacatcagccccccgatattccgccgaggggagaaactgcgtgtgatttctgatgaagggggctggtggaaagctatttctcttagcactggtcgagagagttacatccctggaatatgtgtggccagagtttaccatggctggctgtttgagggcctgggcagagacaaggccgaggagctgctgcagctgccagacacaaaggtcggctccttcatgatcagagagagtgagaccaagaaagggttttactcactgtcggtgagacacaggcaggtaaagcattaccgcattttccgtctgccgaacaactggtactacatttccccgaggctcaccttccagtgcctggaggacctggtgaaccactattctgaggtggctgatggcctgtgctgtgtgctcaccacgccctgcctgacacaaagcacggctgccccagcagtgagggcctccagctcacctgtcaccttgcgtcagaagactgtggactggaggagagtgtccagactgcaggaggaccccgagggaacagagaacccgcttggggtagacgagtcccttttcagctatggccttcgagagagcattgcctcttacctgtccctgaccagtgaggacaacacctcctttgatcgaaagaagaaaagcatctccctgatgtatggtggcagcaagagaaagagctcattcttctcatcaccaccttactttgaggactagccaagaacagacacaatggttcatgcccaaaaggaacagaagttccaactattgcctgggatcttgcgaaaagcgaggttccctgatccctgggagcctcacgtattttagaagccaagagaagccacatggagactcaaattcgcatcttctctatccacatcatgaccaaaggaacccctccctggtgtctgatcagggctgtggcatcacaaaacattggatcatgacatgtcgggcgatgcttggaaaagcccagcatgtatgtatgcacacattgtgtgtgtgggaaggacaaagccactctcacaagaaagggcaccaggactgctctccaaggaactggacctgtccagacagttacactccaaggtcattggagagaacttctgtatgggcaagcctgagagggagaggaaacaaaagctgtgtcctggcagaaggtctgggtttgcagatgggtgccctgaatggaactactttaactaatccatagggacttctggtatgctttcctctctttttaaaggaacttcgtgacactaaacattagcccaaaggacttcttagccttcaattgggagatacctttggtctgctcctgcaccaaagccatatgggtggaagtcagttggcctccctggttctgcagagggccagaagaatgagagagaggaagactgctggcagggaaatcgaggaggcgagactagaactgcaccagcttccctgatgtctgcagccatggctttgcagcgcaaacagaacttctctgggatgctgggattcttgcctgtatgaatgcatcaagtattcatttattgcccgaataggcattgcattaagtcctctgttaggtgtcaggcaagccaaaaaaaaaaaaaagatgctaagtcctaacccccaacagaagtgttcacagtgtagacgggaaaaaatgtataaacaaatgtgtaaaaagagaaatcagctcatggcttaggatggaattagagacaggtgagggacactcaggagctcattttccagctgctcttcagagtggaagggctggctggatcgggtaggtaagaatagctggattttttagaaaagaaatggatacagtctaaagaattaactcacccggtactttattctaagaagggtctggcatccatatgaggaaaaatgctcagctccaggaaagatggggagtccaagtggattaatgatgtcatgcataattttaagagacaagggagaaaacacaatgtatagccagagaaggagaagctcccatccaaatcctactaggaagagagtgggctgcagatgaatctgtgactcatgtttccctgtttcaaagggatcctggggaaggaggggaacatgcttgcagtatctctccctgtctgtctgctcacataagcattccgtccatctaagctcatcgtgctactggtatgtgtatgtgcagttacacagtttcctgtatcataaatcctagtgtgtttatacaaggagacatctgtggtttccccaaccgttccaaaaggctatttcaaaggaaccagcccacgtatgagaaatgaatgtaacactgtggacattgacttcccgcataaggcagggtgaccccctgaactccagatgtttgcacagtatcttatgtgttgttttccgttgtgacgaatgtgattggaacatttggggagcacccagagggatttttcagtgggaagcattacactttgctaaatcatgtatttattcctgattaaaacaaacctaataaatatttaacccttggc

SEQ ID NO: 1650 - DNA, 2130 bp, Homo sapiens
tgaaccgaggcaagggggcgcggcgcacgcagtatggcgcccaacatctacttggttcgccagcggatcagtcgactcggccagaggatgtccggcttccagatcaacctcaacccgctcaaggagccactcggcttcatcaaggtcctcgagtggattgcttctatctttgcttttgccacctgtggaggttttaagggccaaacagaaattcaagtgaattgtcctcctgcagttactgagaataaaactgttacagctacttttggttatccattcaggttgaatgaggcatcatttcagccacctccaggtgtaaacatatgtgatgtaaattggaaagattacgtcctcataggcgattactcttcttctgcacaattctatgttacctttgcagtctttgtgttcctgtactgcattgctgcccttctgctttatgttggctacacgagtctgtatctggatagtcgtaaacttcctatgatagactttgttgttacacttgttgccacttttttgtggttggtgagcacttcagcctgggctaaagctctgacagatattaaaatagctactggtcacaatattattgatgaacttccgccttgtaagaagaaagcagtactgtgttactttggctctgtgaccagtatgggatccctaaatgtatctgtgatatttggctttctaaatatgatactctggggaggaaatgcttggtttgtgtacaaggagaccagcctacacagtccatcaaatacatctgcccctcatagccaaggaggtattccacctcctaccggaatataattaaagggagaaatacactgtatgaagtatatgttgatactatgacatgttgccaacaccttgagaagcattatttgtttctaataaaagtaatggctttgtcaatatattggtgggtttaaaactttgctgcttttttacataaagcctgtgcctttcctagaaagttaagatgtaaatgtattctcacatgtaaatttgaaagttcaggggtctattatgaaatggattacacattttaaatgaacccataatttttttcactaaagctgtttgccctccaaagtgtttacacctaagcctaacatgtatcgctcattcagaaaactgttatattgtcataccatagtaggaagaaaaacctttatttggaatatacactactgtaagtttgtacagatcatatacctaccacctgtctttgcttaaagagccttgattacataaatatgtaggaaaaaacatattgagttcaaaatttatatctaacattgtttatgttatgattttttttaattgcaaagactaggtgtatatttttttctgtttttctaaatgacccgtggtacttaataggtgtactaaaattgtgttgggagcagggatttggaaatttctgagagatgtgtagttaattagtaattctgtttcatgagatatgatctgttatgctagtggtttaataggcttgctatgtaagtagaacgtggctcaactagatatcttatatgtatgggcattacctcttagtgatatttgtttcctgtcctttgttgctcatgctgtttaagtgcaggctgagacccagcctctttgtaagtacagtaaaataatccaccgttttttacagaccctagtcaaagggttaaaaaaattaagattgctttccatgtttgaaatttaccattgagagtcaatgaagttgctattttgagtttagcattgatattgtgaaaataagtgcaatttggatttcatgtttcttaatattcattcttgtttcacaaatgaatgattaaggaattatgcatcataaaggaacctaagtgaggtatatgatgagtgtattgtctttgcacacacatataggtatattctgaatacaagcttattcattttgcttcctaatctttttgttgtacagggattcaggtttcttattcttacaacatgattgtttatatgtgaagcacatcttgctgttgccttatttttgatgcttttattcatgacaagaattgtcaatataagaatgtatatctttgccgcaaccaatttaataaaggagttgaaagaaaaaaaaaaaaaaaaaaaaaa

SEQ ID NO: 1651 - DNA, 2563 bp, Homo sapiens
gggggttgctgcgcgccgggggtcgctcctgctgtgtcttccgctccagcttcgcccacttccccttgccagcggggtgggcgcggagaagacctgccggagccatggaggacgaagtggtccgctttgccaagaagatggacaagatggtgcagaagaagaacgcggctggagcattggatttgctaaaggagcttaagaatattcctatgaccctggaattactgcagtccacaagaatcggaatgtcagttaatgctattcgcaagcagagtacagatgaggaagttacatctttggcaaagtctctcatcaaatcctggaaaaaattattagatgggccatcaactgagaaagaccttgacgaaaagaagaaagaacctgcaattacatcgcagaacagccctgaggcaagagaagaaagtacttccagcggcaatgtaagcaacagaaaggatgagacaaatgctcgagatacttatgtttcatcctttcctcgggcaccaagcacttctgattctgtgcggttgaagtgtagggagatgcttgctgcagctcttcgaacaggggatgactacattgcaattggagctgatgaggaagaattaggatctcaaattgaagaagctatatatcaagaaataaggaatacagacatgaaatacaaaaatagagtacgaagtaggatatcaaatcttaaagatgcaaaaaatccaaatttaaggaaaaatgtcctctgtgggaatattcctcctgacttatttgctagaatgacagcagaggaaatggctagtgatgagctgaaagagatgcggaaaaacttgaccaaagaagccatcagagagcatcagatggccaagactggtgggacccagactgacttgttcacatgtggcaaatgtaaaaagaagaattgcacttacacacaggtacaaacccgtagtgctgatgaaccaatgacaacatttgttgtctgtaatgaatgtggaaatcgatggaagttctgttgagttggaagaattggcaaaatatctggaccattaagaaaacggattttgtaactagctttaaactaggccaagcaactagttttcctgcaaatcaaatttttaaagcaacttgggttagactttgtttttgacctaacatcccttccttaaatgccttctgtagtttcagatcagtagggagaccatataataattttatggtacctgtttcaaaacatattttttctgtttttataagtaagttgatattaattaaactcttggcaatatttcttctttcttaaaggaaaatataccttaactttttttcttttacactgtgaaacatacacagtagaaattctgttactctctgttattaatacataaatgaaaatacatttttttccatattggcatgtagctacaaatattaaaggaggagaaaaggtaatataattttaggtttaccaaatatggtgtgtattcaaataatacttgaccagcttatctaaaatgtacataattttgaggtagcttatgaatttgattttaattattatgttcacaagcttggaatattagatattattttgcatctgtaactaaccgtgatcatcatttcttgtaatttcttgtacatgtatattacttgttcttaatagatttttggaaacaagactttattgagatcagtttggttttcctgttaatttacctgtttgactttataatgtgttttagttttgcagaagaacactgttgtagtttagaaggcttttcataaatcccctcataggcaaagatgaaaacttcccactatttttttcccctcttaggaagacatactggaaagaaaatgtttagcatcttagtgtagtatagctattgtaaacagttcatgactagattttgattcggaaatctatactgaccaaggattaatcttaaggattgtataattcattaaagctgtggtctttccatgtggagactgatagaaaataattttgtcccaagtcttatttgctgactttttctgtcatgagtgagattgttgaacaaactgaatatatgggctatagcaagtagctttacagtacagatcttacaattaagttttgcttttgttaaagtgtgtaccattttttctgtttggagtaagacaaaaattgttttgacataggttccctagggtacacttgctctagcatactttaaaggccactgttgcaaagtctacattttatgctgaatctgcattctgtcaggcacccgtagaaagacctcagtacatgctttgcactctcctttgctccctttttccaatttcttattgcatatcattttgttgtaatacagaaagcagcatttttaaatgtccgtgttaagaattggcccactggtaccaactcacctctattttgtcagttcatagttgaagatttgttttatttcaaaaacaaagtacatttttgaaataatgtttcagaataaaataatctcacttttaagtgatccattttaaaatttgtaattcaataaagttttttttgttgttaaacataaaaaaa

SEQ ID NO: 1652 - DNA, 1000 bp, Homo sapiens
cccaccttcaccatgtctgacgaggaagttgaacaggtggaggagcagtacgaagaagaagaggaagcccaggaggaagaggaagttcaagaagacaccgcagaggaggacgcggaagaggagaaaccgagacccaaactcactgctcctaagatcccagaaggggagaaagtggacttcgatgacatccagaagaagcgtcagaacaaagacctaatggagctccaggccctcatcgacagccactttgaagcccggaagaaggaggaggaggagctggtcgctctcaaagagagaatcgagaagcgccgtgcagagagagcggagcagcagaggattcgtgcagagaaggagagggagcgccagaacagactggcggaggaaaaggccagaagggaggaggaggatgccaagaggagggcagaggacgacctgaagaagaagaaagcgctgtcctccatgggcgccaactacagcagctacctggccaaggctgaccagaagagaggcaagaagcagacagcccgagagatgaagaagaagattctggctgagagacgcaagccgctcaacatcgatcaccttggtgaagacaaactgagggacaaggccaaggagctctgggagaccctgcaccagctggagattgacaagttcgagtttggggagaagctgaaacgccagaaatatgacatcaccacgctcaggagccgcattgaccaggcccagaagcacagcaagaaggctgggaccccagccaagggcaaagtcggcgggcgctggaagtagagaggccagaaaggccctcgaggcagagaccctccgccctcttgcacaccagggccgctcgtgggactccacatcctccagcccccacaatcctgtcaggggtctccctgacgtcctgggggtggagaggccatcccggggcgtcccccgcgtctgtgtccttgctgccttcatcccctggggcctgtgaataaagctgcagaaccccctt

SEQ ID NO: 1653 - DNA, 1832 bp, Homo sapiens
aggagaggaagagagacctgccctgtagcgtgactcctctagaaaaaaaaaaaaaaagccggagtattttactaagcccctaaaatgtcgagatttgtacaagatcttagcaaagcaatgtctcaagatggtgcttctcagttccaagaagtcattcggcaagagctagaattatctgtgaagaaggaactagaaaaaatactcaccacagcatcatcacatgaatttgagcacaccaaaaaagacctggatggatttcggaagctatttcatagatttttgcaagaaaaggggccttctgtggattggggaaaaatccagagaccccctgaagattcgattcaaccctatgaaaagataaaggccaggggcctgcctgataatatatcttccgtgttgaacaaactagtggtggtgaaactcaatggtggtttgggaaccagcatgggctgcaaaggccctaaaagtctgattggtgtgaggaatgagaatacctttctggatctgactgttcagcaaattgaacatttgaacaaaacctacaatacagatgtccctcttgttttaatgaactcttttaacacggatgaagataccaaaaaaatactacagaagtacaatcattgtcgtgtgaaaatctacactttcaatcaaagcaggtacccgaggattaataaagaatctttacggcctgtagcaaaggacgtgtcttactcaggggaaaatacagaagcttggtaccctccaggtcatggtgatatttacgccagtttctacaactctggattgcttgatacctttataggagaaggcaaagagtatatttttgtgtctaacatagataatctgggtgccacagtggatctgtatattcttaatcatctaatcaacccacccaatggaaaacgctgtgaatttgtcatggaagtcacaaataaaacacgtgcagatgtaaagggcgggacactcactcaatatgaaggcaaactgagactggtggaaattgctcaagtgccaaaagcacatgttgacgagttcaagtctgtatcaaagttcaaaatatttaatacaaacaacctatggatttctcttgcagcagttaaaagactgcaggagcaaaatgccattgacatggaaatcattgtgaatgcaaagactttggatggaggcctgaatgtcattcaattagaaactgcagtaggggctgccatcaaaagctttgagaattctctaggtattaatgtgccaaggagccgttttctgcctgtcaaaaccacatcagatctcttgctggtgatgtcaaacctctatagtcttaatgcaggatctctgacaatgagtgaaaagcgggaatttcctacagtgcccttggttaaattaggcagttcttttacgaaggttcaagattatctaagaagatttgaaagtataccagatatgcttgaattggatcacctcacagtttcaggagatgtgacatttggaaaaaatgtttcattaaagggaacggttatcatcattgcaaatcatggtgacagaattgatatcccacctggagcagtattagagaacaagatagtgtctggaaaccttcgcatcttggaccactgaaatgaaaaatactgtggacacttaaataatgggctagtttcttacaatgaaatgttctctaggatttaggcactaaaaggtactttactatgttactgtaccctgcagtgttgatttttaaaatagagttttctgcagtatgcttttagtctaagaaaagcacagatggtgcaatactttccttctttgaagagatcccaaagttagttactcttaagtgc

SEQ ID NO: 1654 - DNA, 1726 bp, Homo sapiens
gagtcggagacactatccgcttccatccgtcgcgcagaccctgccggagccgctgccgctatggatgatcgagaggatctggtgtaccaggcgaagctggccgagcaggctgagcgatacgacgaaatggtggagtcaatgaagaaagtagcagggatggatgtggagctgacagttgaagaaagaaacctcctatctgttgcatataagaatgtgattggagctagaagagcctcctggagaataatcagcagcattgaacagaaagaagaaaacaagggaggagaagacaagctaaaaatgattcgggaatatcggcaaatggttgagactgagctaaagttaatctgttgtgacattctggatgtactggacaaacacctcattccagcagctaacactggcgagtccaaggttttctattataaaatgaaaggggactaccacaggtatctggcagaatttgccacaggaaacgacaggaaggaggctgcggagaacagcctagtggcttataaagctgctagtgatattgcaatgacagaacttccaccaacgcatcctattcgcttaggtcttgctctcaatttttccgtattctactacgaaattcttaattcccctgaccgtgcctgcaggttggcaaaagcagcttttgatgatgcaattgcagaactggatacgctgagtgaagaaagctataaggactctacacttatcatgcagttgttacgtgataatctgacactatggacttcagacatgcagggtgacggtgaagagcagaataaagaagcgctgcaggacgtggaagacgaaaatcagtgagacataagccaacaagagaaaccatctctgaccaccccctcctccccatcccaccctttggaaactccccattgtcactgagaaccaccaaatctgacttttacatttggtctcagaatttaggttcctgccctgttggttttttttttttttttttttaaacagttttcaaaagttcttaaaggcaagagtgaatttctgtggattttactggtcccagcttttaggttctttaagacactaacaggactacatagaggctttttcagcattactgtgtcgtctccgtgccagatgtggcaagatcaccattagcaaatggaaattacatttgaaagccattagacttataggtgatgcaagcatctaagagagaggttaatcacactatagaggcataagtggtatcagttttcatttttctaattgtttaaactgtgttttataccagtgtttgcaagtaattgggtgttagcttgagatggttaaaggtggtttggggagggacttcgttgtaatggttttgctgtaaaaaatgtttccaactccgctgaaatgttgctgaaaagcatggtgctggtaacagttcaacaatccgtggctgctcattcttgcctactttactctcccactgaagcaggttagcgttgaaggtggtatggaaaagcctgcatgcctgttcaattcttttgtttcttctccttccccctccccctacctccttcccctcactcctcccctccttcgctcgctcaacctcttttgttcagtatgtgtaacttgaagctaatttgtactactggatatctgactggagccacagatacagaatctgtattgttcttactgaaacacagcatggaattaacattaaacttaaataaaacaaacctaaatt

SEQ ID NO: 1655 - DNA, 1521 bp, Homo sapiens
  misc_feature (798)..(798): n is a, c, g, or t
cggccgcggcccgggtccctcgcaaagccgctgccatcccggagggcccagccagcgggctcccggaggctggccgggcaggcgtggtgcgcggtaggagctgggcgcgcacggctaccgcgcgtggaggagacactgccctgccgcgatgggggcccggggcgctccttcacgccgtaggcaagcggggcggcggctgcggtacctgcccaccgggagctttcccttccttctcctgctgctgctgctctgcatccagctcgggggaggacagaagaaaaaggagaatcttttagctgaaaaagtagagcagctgatggaatggagttccagacgctcaatcttccgaatgaatggtgataaattccgaaaatttataaaggcaccacctcgaaactattccatgattgttatgttcactgctcttcagcctcagcggcagtgttctgtgtgcaggcaagctaatgaagaatatcaaatactggcgaactcctggcgctattcatctgctttttgtaacaagctcttcttcagtatggtggactatgatgaggggacagacgtttttcagcagctcaacatgaactctgctcctacattcaygcatttwcctccaaaaggcagacctaagagagctgatacttttgacctccaaagaattggatttgcagctgagcaactagcaaagtggattgctgacagaacggatgttcatattcgggttttcagaccacccaactactctggtaccattgctttggccctgttagtgtcgcttgttggaggtttgctttattngagaaggaacaacttggagttcatctataacaagactggttgggccatggtgtctctgtgtatagtctttgctatgacttctggccagatgtggaaccatatccgtggacctccatatgctcataagaacccacacaatggacaagtgagctacattcatgggagcagccaggctcagtttgtggcagaatcacacattattctggtactgaatgccgctatcaccatggggatggttcttctaaatgaagcagcaacttcgaaaggcgatgttggaaaaagacggataatttgcctagtgggattgggcctggtggtcttcttcttcagttttctactttcaatatttcgttccaagtaccacggctatccttatagtgatctggactttgagtgagaagatgtgatttggaccatggcacttaaaaactctataacctcagctttttaattaaatgaagccaagtgggatttgcataaagtgaatgtttaccatgaagataaactgttcctgactttatactattttgaattcattcatttcattgtgatcagctagcttattcttgtgtactttttttaaactgtgggttttcctagtaaatttaatttacagaaatcaatggtagcatttagtaatctacaaaggaaatatcaaagtgtttttcaagcctgttatatycagtgtgtkccacaggattgcaataaatgacaatgtaatta

SEQ ID NO: 1656 - DNA, 2753 bp, Homo sapiens
taagtaacgtcagcctgagaactgagtagctgtactgtgtggcgccttattctaggcacttgttgggcagaatgtcacacctgccgatgaaactcctgcgtaagaagatcgagaagcggaacctcaaattgcggcagcggaacctaaagtttcagggggcctcaaatctgaccctatcggaaactcaaaatggagatgtatctgaagaaacaatgggaagtagaaaggttaaaaaatcaaaacaaaagcccatgaatgtgggcttatcagaaactcaaaatggaggcatgtctcaagaagcagtgggaaatataaaagttacaaagtctccccagaaatccactgtattaaccaatggagaagcagcaatgcagtcttccaattcagaatcaaaaaagaaaaagaagaaaaagagaaaaatggtgaatgatgctgagcctgatacgaaaaaagcaaaaactgaaaacaaagggaaatctgaagaagaaagtgccgagactactaaagaaacagaaaataatgtggagaagccagataatgatgaagatgagagtgaggtgcccagtctgcccctgggactgacaggagcttttgaggatacttcgtttgcttctctatgtaatcttgtcaatgaaaacactctgaaggcaataaaagaaatgggttttacaaacatgactgaaattcagcataaaagtatcagaccacttctggaaggcagggatcttctagcagctgcaaaaacaggcagtggtaaaaccctggcttttctcatccctgcagttgaactcattgttaagttaaggttcatgaccaggaatggaacaggagtccttattctctcacctactagagaactagccatgcaaacctttggtgttcttaaggagctgatgactcaccacgtgcatacctatggcttgataatgggtggcagtaacagatctgctgaagcacagaaacttggtaatgggatcaacatcattgtggccacaccaggccgtctgctggaccatatgcagaataccccaggatttatgtataaaaacctgcagtgtctggttattgatgaagctgatcgtatcttggatgtggggtttgaagaggaattaaagcaaattattaaacttttgccaacacgtagacagactatgctcttttctgccacccaaactcgaaaagttgaagacctggcaaggatttctctgaaaaaggagccattgtatgttggcgttgatgatgataaagcgaatgcaacagtggatggtcttgaacagggatatgttgtttgtccttctgaaaagagattccttctgctctttacattccttaagaagaaccgaaagaagaagcttatggtcttcttttcatcttgtatgtctgtgaaataccactatgagttgctgaactacattgatttgcccgtcttggccattcatggaaagcaaaagcaaaataagcgtacaaccacattcttccagttctgcaatgcagattcgggaacactattgtgtacggatgtggcagcgagaggactagacattcctgaagtcgactggattgttcagtatgaccctccggatgaccctaaggaatatattcatcgtgtgggtagaacagccagaggcctaaatgggagagggcatgccttgctcattttgcgcccagaagaattgggttttcttcgttacttgaaacaatccaaggttccattaagtgaatttgacttttcctggtctaaaatttctgacattcagtctcagcttgagaaattgattgaaaagaattactttcttcataagtcagcccaggaagcatataagtcatacatacgagcctatgattcccattctctgaaacagatctttaatgttaataacctaaatttgcctcaggttgctctgtcatttggtttcaaggtgcctcccttcgttgatctgaacgtcaacagtaatgaaggcaagcagaaaaagcgaggaggtggtggtggatttggctaccagaaaaccaagaaagttgagaaatccaaaatctttaaacacattagcaagaaatcatctgacagcaggcagttctctcactgaacacatgccttcctttcatcttgaataactttgtcctaaaatgaattttttttccccttgatttaacaggatttttgtagactttagaatttggacttacctaacaagagtataaattgacttgggttgcaagcactgagcactgttacttctatcacgtctctcttttatttctgggatataaaacaggctttaagtttcttggttgcccaagggcagagcaaggaatatctggtgtttcttgtgatgataatattttaattttaaatatccctccctcatacaagtgtatgttaccattttaatataattctttttgtacctttccttcttgttttgtgaggatttttgtggcatggattgctgtgctcactgctgtaaaaggtgacctagtgtactgggcagctggtggcggtgcagaaaagagtctcaggttattttttgtttttagttatttcttggaccttgacagtatctaatgactcctcctgaaaatgctgcagtataaaagagcaaagagctttgggaaatacctaagaagcaccttaagattagggtggcattgcttttatagattcttgattttaaagcaacaggcctttctcaggtgttgcattttttggagcaaaaactatgggttgtaatttgaataaagtgtcactaagcagt

SEQ ID NO: 1657 - DNA, 1982 bp, Homo sapiens
tagagaaggcagacgcatcccgaactcgctggaggacaaggctcagctcttgccaggccaaattgagacatgtctgacacaagcgagagtggtgcaggtctaactcgcttccaggctgaagcctcagaaaaggacagtagctcgatgatgcagactctgttgacagtgacccagaatgtggaggtcccagagacaccgaaggcctcaaaggcactggaggtctcagaggatgtgaaggtctcaaaagcctctggggtctcaaaggccacagaggtctcaaagaccccagaggctcgggaggcacctgccacccaggcctcatctactactcagctgactgatacccaggttctggcagctgaaaacaagagtctagcagctgacaccaagaaacagaatgctgacccgcaggctgtgacaatgcctgccactgagaccaaaaaggtcagccatgtggctgatacaaaggtcaatacaaaggctcaggagactgaggctgcaccctctcaggccccagcagatgaacctgagcctgagagtgcagctgcccagtctcaggagaatcaggatactcggcccaaggtcaaagccaagaaagcccgaaaggtgaagcatctggatggggaagaggatggcagcagtgatcagagtcaggcttctggaaccacaggtggccgaagggtctcaaaggccctaatggcctcaatggcccgcagggcttcaaggggtcccatagccttttgggcccgcagggcatcaaggactcggttggctgcttgggcccggagagccttgctctccctgagatcacctaaagcccgtaggggcaaggctcgccgtagagctgccaagctccagtcatcccaagagcctgaagcaccaccacctcgggatgtggcccttttgcaagggagggcaaatgatttggtgaagtaccttttggctaaagaccagacgaagattcccatcaagcgctcggacatgctgaaggacatcatcaaagaatacactgatgtgtaccccgaaatcattgaacgagcaggctattccttggagaaggtatttgggattcaattgaaggaaattgataagaatgaccacttgtacattcttctcagcaccttagagcccactgatgcaggcatactgggaacgactaaggactcacccaagctgggtctgctcatggtgcttcttagcatcatcttcatgaatggaaatcggtccagtgaggctgtcatctgggaggtgctgcgcaagttggggctgcgccctgggatacatcattcactctttggggacgtgaagaagctcatcactgatgagtttgtgaagcagaagtacctggactatgccagagtccccaatagcaatccccctgaatatgagttcttctggggcctgcgctcttactatgagaccagcaagatgaaagtcctcaagtttgcctgcaaggtacaaaagaaggatcccaaggaatgggcagctcagtaccgagaggcgatggaagcggatttgaaggctgcagctgaggctgcagctgaagccaaggctagggccgagattagagctcgaatgggcattgggctcggctcggagaatgctgccgggccctgcaactgggacgaagctgatatcggaccctgggccaaagcccggatccaggcgggagcagaagctaaagccaaagcccaagagagtggcagtgccagcactggtgccagtaccagtaccaataacagtgccagtgccagtgccagcaccagtggtggcttcagtgctggtgccagcctgaccgccactctcacatttgggctcttcgctggccttggtggagctggtgccagcaccagtggcagctctggtgcctgtggtttctcctacaagtgagattttagatattgttaatcctgccagtctttctcttcaagccagggtgcatcctcagaaacctatccaacacagcactctaggcagccact

SEQ ID NO: 1658 - DNA, 1164 bp, Homo sapiens
gaattccggcggcctctctcctctccctcagtgactcctgagccacagcccctccatggcccagaaggaagaggctgctgtggccactgaggctgcctcccagaatggggaggatctggagaacctggacgaccctgagaagctgaaagagctgattgagctgccgccctttgagattgtcacaggagaacggctgcctgccaacttctttaaattccagttccggaatgtggagtacagttccgggaggaacaagaccttcctctgctatgtggttgaagcacagggcaaggggggccaagtgcaggcatctcggggatacctagaggatgagcatgcggctgcccatgcagaggaagctttcttcaacaccatcctgccagccttcgacccagccctgcggtacaatgtcacctggtatgtgtcctccagcccctgtgcagcgtgtgctgaccgcattatcaaaacccttagcaagaccaagaacctgcgtctgctcattctggtgggtcgactcttcatgtgggaggagccggagatccaggctgctctgaagaagctgaaggaggctggctgtaaactgcgcatcatgaagccccaggacttcgaatatgtctggcagaattttgtggagcaagaagagggtgaatccaaggcctttcagccctgggaggacattcaggagaacttcctatactacgaggagaagttggcagacatcctgaagtagggcaactgggctttgcctcacgtattcctgctgccaccaagagacagcaatgacatgtacagccatctgggacatgcctgtcttcctaataccatttggagctggacaacatttgacaccaaccaatcatactggacaaggcccttagaggacttgaaatatacttctcatgctgtagtttatttaggctgtgactctctctctaatgctgctctcgggaaggacgaaagtgacctgcaaggagagaaatgcaaccatacatgggctccagtcaactatgggactgaaggtcctaattgctcacccaagggggctgcttaacacaaacagcctcagacccgaggtttagatttctgaaatatgcattttatgttaagttgggtatttttttaaaaaaagaaaaacagcaacattaataaaagaagtggtgtggc

SEQ ID NO: 1659 - DNA, 1766 bp, Homo sapiens
ggcaaatccggcccaggatgtagagctggcagtgcctgacggcgcgtctgacgcggagttgggtggggtagagagtagggggcggtagtcgggggtggtgggagaaggaggaggcggcgaatcacttataaatggcgccgaagcaggacccgaagcctaaattccaggagggtgagcgagtgctgtgctttcatgggcctcttctttatgaagcaaagtgtgtaaaggttgccataaaggacaaacaagtgaaatacttcatacattacagtggttggaataaaaattgggatgaatgggttccggagagcagagtactcaaatacgtggacaccaatttgcagaaacagcgagaacttcaaaaagccaatcaggagcagtatgcagaggggaagatgagaggggctgccccaggaaagaagacatctggtctgcaacagaaaaatgttgaagtgaaaacgaaaaagaacaaacagaaaacacctggaaatggagatggtggcagtaccagtgagacccctcagcctcctcggaagaaaagggcccgggtagatcctactgttgaaaatgaggaaacattcatgaacagagttgaagttaaagtaaagattcctgaagagctaaaaccgtggcttgttgatgactgggacttaattaccaggcaaaaacagctcttttatcttcctgccaagaagaatgtggattccattcttgaggattatgcaaattacaagaaatctcgtggaaacacagataataaggagtatgcggttaatgaagttgtggcagggataaaagaatacttcaacgtaatgttgggtacccagctactctataaatttgagagaccacagtatgctgaaattcttgcagatcatcccgatgcacccatgtcccaggtgtatggagcgccacatctcctgagattatttgtacgaattggagcaatgttggcttatacacctctggatgagaagagccttgctttattactcaattatcttcacgatttcctaaagtacctggcaaagaattctgcaactttgttcagtgccagcgattatgaagtggctcctcctgagtaccatcggaaagctgtgtgagaggcactctcactcacttatgtttggatctccgtaaacacatttttgttcttagtctatctcttgtacaaacgatgtgctttgaagatgttagtgtataacaattgatgtttgttttctgtttgattttaaacagagaaaaaataaaagggggtaatagctccttttttcttctttctttttttttttcatttcaaaattgctgccagtgttttcaatgatggacaacagagggatatgctgtagagtgttttattgcctagttgacaaagctgcttttgaatgctggtggttctattcctttgacactacgcacttttataatacatgttaatgctatatgacaaaatgctctgattcctagtgccaaaggttcaattcagtgtatataactgaacacactcatccatttgtgcttttgtttttttttatggtgcttaaagtaaagagcccatcctttgcaagtcatccatgttgttacttaggcattttatcttggctcaaattgttgaagaatggtggcttgtttcatggtttttgtatttgtgtctaatgcacgttttaacatgatagacgcaatgcattgtgtagctagttttctggaaaagtcaatcttttaggaattgtttttcagatcttcaataaattttttctttaaatttc

SEQ ID NO: 1660 - DNA, 2963 bp, Homo sapiens
cgcttcgctgcctggcggcctttccccgagccgagcccgcttcccgaggccgccagtcgtcgcctgcccgcgcctgcgcagcgtcccgggccgagagggccacggcggcggccatggcgcaccgctgtttgcggctgtggggccggggcggctgctggccccgcggcctacagcagctcctcgtgcctggcggcgtgggcccgggcgagcagccctgcctccggacgctttaccgatttgttacaactcaagcaagggccagcagaaattctcttttgacagatataattgctgcttatcaaagattctgttctcgacccccaaaaggatttggaaaatactttcctaatggaaaaaatggaaaaaaagctagtgaacctaaagaagttatgggagagaaaaaagaatcaaagccagctgctaccacacgctcttctggaggaggaggtggtggcggtggaaaacgaggtggcaagaaagatgattctcactggtggtccaggtttcagaagggtgacattccatgggacgacaaggatttcaggatgttcttcctctggactgctctgttctggggtggagtcatgttttacttgctgctcaagagatccgggagagaaatcacttggaaggactttgtcaataactatctttcaaaaggagtagtagacagattggaagtcgtcaacaagcgttttgttcgagtgacctttacaccaggaaaaactcctgttgatgggcaatacgtttggtttaatattggcagtgtggacacctttgaacggaatctggaaactttacagcaggaattgggcatagaaggagaaaatcgggtgcctgttgtctacattgctgaaagtgatggctcttttctgctgagcatgctgcctacggtgctcatcatcgccttcttgctctacaccatcagaagagggcctgctggcattggccggacaggccgagggatgggcggactcttcagtgtcggagaaaccactgccaaggtcttaaaggatgaaattgatgtgaagttcaaagatgtggctggctgtgaggaggccaagctagagatcatggaatttgtgaatttcttgaaaaacccaaagcagtatcaagacctaggagcaaaaatcccaaagggtgccattctcactggtcctccaggcactgggaagacgctgctagctaaggccacagccggagaagccaatgtccccttcatcaccgttagtggatctgagtttttggagatgttcgttggtgtgggccctgctagagtccgagacttatttgcccttgctcggaagaatgccccttgcatcctcttcatcgatgaaatcgatgcggtgggaaggaagagaggaagaggcaactttggagggcagagtgagcaggagaacacactcaaccagctgctggtggagatggatggttttaatacaacaacaaatgtcgtcattttggccggcaccaatcgaccagatatcctggaccccgcgctacttaggccggggcgtttcgacaggcagatctttattggaccaccagacataaaaggaagagcttctattttcaaagttcatctccgaccgctaaaactggacagtaccctggagaaggataaattggcaagaaaactggcatctttaactccagggttttcaggtgctgatgttgctaatgtctgtaatgaagctgcgttgattgctgcaaggcatctgtcagattccataaatcagaaacactttgaacaggcaattgagcgagtgattggtggcttagagaagaaaacgcaggttctgcagcctgaggagaagaagactgtggcataccacgaagcaggccatgcggttgccggctggtatctggagcacgcagacccgcttttaaaggtatccatcatcccacgtggcaaaggactaggttatgctcagtatttaccaaaagaacaatacctctataccaaagagcagctcttggataggatgtgtatgactttaggtggtcgagcctctgaagaaatcttctttggaagaattacaactggtgctcaagatgacttgagaaaagtaactcagagtgcatatgcccaaattgttcagtttggcatgaatgaaaaggttgggcaaatctcctttgacctcccacgtcagggggacatggtattggagaaaccttacagtgaagccactgcaagattgatagatgatgaagtacgaatacttattaatgatgcttataaaagaacagtagctcttctcacagaaaagaaagctgacgtggagaaggttgctcttctgttgttagaaaaagaagtattagataagaatgatatggttgaacttttgggccccagaccatttgcggaaaaatctacctatgaagaatttgtggaaggcactggcagcttggatgaggacacctcacttccagaaggccttaaggactggaacaaggagcgggaaaaggagaaagaggagcccccgggtgagaaagttgccaactagaggcccagagggaggccatctcagtctctccactgtggtttcagctggtgcattatttcagctgtggctttcagaagaatgggaatgctgcgctgattttagccagccactggcccagctgaaatgatggggaaaggagtccttagtcctttcagcctcagaggtcacagtgggtggcaggtgactttccggaggccttgagggaaatgcacactgtcccatagcctcattgggctcccagacgtgctggaaaggttgagcccagagtggccgaggctggaccctgtggcaccaagtggggtcggctgaccgtgtggcagggatcgttgcactggactcttggcgtgtgggaagggatgctttctctttgtcgcccactcttcattcctgtttctcctcagttcccctgtgcagatgggctgtgaaattaaattggagtcttgataagaacatttt

SEQ ID NO: 1661 - DNA, 1077 bp, Homo sapiens
gccgcgggagaggaggccatgggcgcgcgcggggcgctgctgctggcgctgctgctggctcgggctggactcaggaagccggagtcgcaggaggcggcgccgttatcaggaccatgcggccgacgggtcatcacgtcgcgcatcgtgggtggagaggacgccgaactcgggcgttggccgtggcaggggagcctgcgcctgtgggattcccacgtatgcggagtgagcctgctcagccaccgctgggcactcacggcggcgcactgctttgaaacctatagtgaccttagtgatccctccgggtggatggtccagtttggccagctgacttccatgccatccttctggagcctgcaggcctactacacccgttacttcgtatcgaatatctatctgagccctcgctacctggggaattcaccctatgacattgccttggtgaagctgtctgcacctgtcacctacactaaacacatccagcccatctgtctccaggcctccacatttgagtttgagaaccggacagactgctgggtgactggctgggggtacatcaaagaggatgaggcactgccatctccccacaccctccaggaagttcaggtcgccatcataaacaactctatgtgcaaccacctcttcctcaagtacagtttccgcaaggacatctttggagacatggtttgtgctggcaatgcccaaggcgggaaggatgcctgcttcggtgactcaggtggacccttggcctgtaacaagaatggactgtggtatcagattggagtcgtgagctggggagtgggctgtggtcggcccaatcggcccggtgtctacaccaatatcagccaccactttgagtggatccagaagctgatggcccagagtggcatgtcccagccagacccctcctggccgctactctttttccctcttctctgggctctcccactcctggggccggtctgagcctacctgagcccatgcagcctggggccactgccaagtcaggccctggttctcttctgtcttgtttggtaataaacacattccagttgatgccttgcagggcattcttcaaaa

SEQ ID NO: 1662 - DNA, 1086 bp, Homo sapiens
ctaaaggtcccctccccggagcggagcgcacctagggtccctcttccgtccccccagcccagctacccgttcagaccagcagcctcggggggcaccccccgccagcctgcctccctcccgctcagccctgccagggttccccagccatgaatctcttccgattcctgggagacctctcccacctcctcgccatcatcttgctactgctcaaaatctggaagtcccgctcgtgcgccggaatttcagggaagagccaggtcctgtttgctgtggtgttcactgcccgatatctggacctcttcaccaactacatctcactctacaacacgtgtatgaaggtggtctacatagcctgctccttcaccacggtctggttgatttatagcaagttcaaagctacttacgatgggaaccatgacacgttcagagtggagttcctggtcgttcccacagccattctggcgttcctggtcaatcatgacttcacccctctggagatcctctggaccttctccatctacctggagtcagtggccatcttgccgcagctgttcatggtgagcaagaccggcgaggcggagaccatcaccagccactacttgtttgcgctaggcgtttaccgcacgctctatctcttcaactggatctggcgctaccatttcgagggcttcttcgacctcatcgccattgtggcaggcctggtccagacagtcctctactgcgatttcttctacctctatatcaccaaagtcctaaaggggaagaagttgagtttgccggcatagccccggtcctctccatctctctcctcggcagcagcgggaggcagaggaaggcggcagaagatgaagagctttcccatccaggggtgacttttttaagaacccacctcttgtgctccccatcccgcctcctgccgggtttcagggggacagtggaggatccaggtcttggggagctcaggacttgggctgtttgtagttttttgccttttagacaagaaaaaaaaatctttccactctttagtttttgattctgatgactcgttttttcttctactctgtggccccaaattttataaagtga

SEQ ID NO: 1663 - DNA, 2733 bp, Homo sapiens
aagggaagatggagacaatactggagcagcagcggcgctatcatgaggagaaggaacggctcatggacgtcatggctaaagagatgctcaccaagaagtccacgctccgggaccagatcaattctgatcaccgcactcgggccatgcaagataggtatatggaggtcagtgggaacctgagggatttgtatgatgataaggatggattacgaaaggaggagctcaatgccatttcaggacccaatgagtttgctgaattctataatagactcaagcaaataaaggaattccaccggaagcacccaaatgagatctgtgtgccaatgtcagtggaatttgaggaactcctgaaggctcgagagaatccaagtgaagaggcacaaaacttggtggagttcacagatgaggagggatatggtcgttatctcgatctccatgactgttacctcaagtacattaacctgaaggcatctgagaagctggattatatcacatacctgtccatctttgaccaattatttgacattcctaaagaaaggaagaatgcagagtataagagatacctagagatgctgcttgagtaccttcaggattacacagatagagtgaagcctctccaagatcagaatgaactttttgggaagattcaggctgagtttgagaagaaatgggagaatgggacctttcctggatggccgaaagagacaagcagtgccctgacccatgctggagcccatcttgacctctctgcattctcctcctgggaggagttggcttctctgggtttggacagattgaaatctgctctcttagctttaggcttgaaatgtggcgggaccctagaagagcgagcccagagactattcagtaccaaaggaaagtccctggagtcacttgatacctctttgtttgccaaaaatcccaagtcaaagggcaccaagcgagacactgaaaggaacaaagacattgcttttctagaagcccagatctatgaatatgtagagattctcggggaacagcgacatctcactcatgaaaatgtacagcgcaagcaagccaggacaggagaagagcgagaagaagaggaagaagagcagatcagtgagagtgagagtgaagatgaagagaacgagatcatttacaaccccaaaaacctgccacttggctgggatggcaaacctattccctactggctgtataagcttcatggcctaaatatcaactacaactgtgagatttgtggaaactacacctaccgagggcccaaagccttccagcgacactttgctgaatggcgtcatgctcatggcatgaggtgtttgggcatcccaaatactgctcactttgctaatgtgacacagattgaagatgctgtctccttgtgggccaaactgaaattgcagaaggcttcagaacgatggcagcctgacactgaggaagaatatgaagactcaagtgggaatgttgtgaataagaagacatacgaggatctgaaaagacaaggactgctctagtgttgagggatgtagctcagcttttgggctagcccaggcttccctaagatctgctttttctatttctcccaaccaaatcctcttaaagaccctttgctatgtagtctcatggtctagcatgcatcttgtagaaacaaggcatgctggcagattgcagggttgagatgtgttttatctgttttatattttaaaagattctgccagaaaataaaaccagaccttgttctaaagcccagggttatggaccaactcagtgcttcaggtcttaatgcctccatacctcttcctcaccaactttactagtagctgagatttaatgggcacctattatgctacatatcatgttaggtaaatctgacctgacctctttccccaccctcctttgttgctgcttccctgaatgagtattaccccaggatgaggtctgccatcagcttagttagccattgatgcaaatactagggaaagactaggaggatgagccagggttgctactaaggactaagtgtcgcaccaaggtttgccttttgtatttgcataaagaaaggagttggagctgggtgcagtggcttgtgcctgtagtcccagctacttgggaggctgaggcaggagggttgcttgagactagcctaggtaacatagtgagaccctgtctcattaaaaaaaaaaaaaaaaggcatggtggcacgcactgtagtcccagctactcaggagactgaggctagaagatcctttgaacctaggagtttgagaccagcctgggcgatatagtgaggccccatctcaaaaaaaaaaaaaagcggggggggggagttgggctgtgttggaatgggcctgcagcccaacaaacaagggaactaggaccgacagtgacttcaccagcttgctaggtcagaatgagagactggtgggtctgtctacctgtttcttctacaagatccctatttgactgtaaaagtagctaatactcacatgttctccaatcccaggtagccatggtagagttgggtagagttgagcagccgccccaggatccaaatgtggtgtctgaaatggaaagaactaaggcaaccaggaaggcactgatctgccttataagcacagtcatctgaaagtcaggcctgctgcaggacaggatcccccagagaccccatttgcctctcaacactcagaccttcaactgttttttaataaatctactttttaaaaaaaaaaaata

SEQ ID NO: 1664 - DNA, 1733 bp, Homo sapiens
ggacgaggggggagcggaggtggcggcggcggcggtagcggtggccttggttgtcttccagtctcctcggctcgccctttagccggcaccgctccccttccctcccccttcctctcttccttccttccctccccttccctttttcccttccccgtcggtgagcggcgggggtggctccagcaacggctgggcccaagctgtgtagaggccttaaccaacgataacggcggcgacggcgaaacctcggagctcgcagggcgggggcaaggcccgggccttggagatggagaattctcagttgtgtaagctgttcatcggcggcctcaatgtgcagacgagtgagtcgggcctgcgcggccactttgaggcctttgggactctgacggactgcgtggtggtggtgaatccccagaccaagcgctcccgttgctttggcttcgtgacctactccaatgtggaggaggcggacgccgccatggccgcctcgccccatgccgtggacggcaacactgtggagctgaagcgggcggtgtcccgggaggattcggcgcggcccggtgcccacgccaaggttaagaagctctttgtcggaggccttaaaggagacgtggctgagggcgacctgatcgagcacttctcgcagtttggcaccgtggaaaaggccgagattattgccgacaagcagtccggcaagaagcgtggattcggcttcgtgtatttccagaatcacgacgcggcagacaaggccgcggtggtcaagttccatccgattcagggccatcgcgtggaggtgaagaaagcagtccccaaggaggatatctactccggtgggggtggaggcggctcccgatcctcccggggcggccgaggcggccgggggcgcggcggtggtcgagaccagaacggcctttccaagggcggcggcggcggttacaacagctacggtggttacggcggcggcggaggcggcggctacaatgcctacggaggcggcggcggcggttcgtcctacggtgggagcgactacggtaacggcttcggcggcttcggcagctacagccagcatcagtcctcctatgggcccatgaagagcggcggcggcggcggcggtggaggcagtagctggggcggtcgcagtaatagtggaccttacagaggcggctatggcggtgggggtggctatggaggcagctccttctaaaagaaaatttaaaatgcctgggagtggctataggggtagctctttccaacagcccaagtggggtcaactcctaagccccaccccctcacacacaccgccttccctgttttgcccttgggggagccacttctaaggctgcttacccttgggggtgttcctctatttgcctgccacctctcttgtctctccctctgaagatggactcggccccacatacacatttttgtgttacagtcattgatggactctatttttttattattacttggaccttggtcgtttttatactagcaaaatgtcttgttttaatttgtgttttttggggggagggagggagtgaacttgctgattctgtagcaaaacctgggtgggggttggggtggggggtagtttactttgttgtaaggacttgataacctggctacagcgttttctatgaaatctacttggatcccatgcctgaaatttggaagcatatgtacacaaatcatttttacgttttatttttaataaatcattgtgtttgaccgta

SEQ ID NO: 1665 - DNA, 2148 bp, Homo sapiens
ttatgggaggctgaggggagggccgttggccggggcctgcggtacgccgcttcagtgagggacgccactgcggccacccggcttgctgccttcctgggcgccactcccccaggcgacccgacgcgacgcgccagtagcgcagcaccgattcctctcgggctcttgggcgctgctctgagcagcgtcaccctttacaccagaaagctggcgggcactatggggaaaaaacaaaacaagaagaaagtagaggaggtgctagaagaggaggaagaggaatatgtggtggaaaaagttctcgaccgtcgagtggtaaagggcaaagtggagtacctcctaaagtggaagggattctcagatgaggacaacacatgggagccagaagagaacctggattgccccgacctcattgctgagtttctgcagtcacagaaaacagcacatgagacagataaatcagagggaggcaagcgcaaagctgattctgattctgaagataagggagaggagagcaaaccaaagaagaagaaagaagagtcagaaaagccacgaggctttgctcgaggtttggagccggagcggattattggagctacagactccagtggagagctcatgttcctgatgaaatggaaaaactctgatgaggctgacctggtccctgccaaggaagccaatgtcaagtgcccacaggttgtcatatccttctatgaggaaaggctgacgtggcattcctacccctcggaggatgatgacaaaaaagatgacaagaactaacgctcctgagtaccagcccctgtcacatctgactgtgggtttcaagtgggaagggaaggagttctacttgtcttgacaccatagaggtggcttgagaagatgtcctttgaagagccagtatagtttctgttccctgcagcagcccaagtgctttaaagccgtttcaagctgtatagtttgcacacccatcccagtggaggggaaaggggataagtgtttcaaggcaaccttttctgcactttgctgcgaaaagcaaagggccttctatgaaggacaacccttgcagaattgggtgtgtgggagagcaaaaaaatactgtagatcttcaaagagcatctccacaacccacagccttcttcccaatagtgttaactctgcatttttacagcgtagcatgtgtgtagtttttggctattactggtgtattatttgggggagggagggatggggaggggagaaagggagatgggtagcatcattttgattaacatttggggcctgataggggaaatggtgaagcaatggaaaagaacagacaactaatgatttgcttctatgtccagaatattttacctttaaaaaaatgtcattggcaccataaataaggactgtgagagactgtttaaaagctgtgaaagtctgaaacctataagccaaggtgttccctgcctaaacttattgctgttcccacaaaggactaagcctgttcataagttaccaaagttgccattttggagatggaaattgacgaggagggaaggtcttttattggagagtatacaggacaagcagatcattctgccttagaggtgctaattcccgaaattagaagaccctttcttttccagtaatgaagttataaatatcagcttgttcatccaagccactggctgaggtgttaggaagaggaagagggtggtagaggaggtaagacagtagggaaagacaagggcccatgctcttagtggggaaaactcttggacccgtttactttgagctttgaacactgaaaccattgttggcagggttcagtcactgacagcacaagtttcactgaattgatccaagagtttagtgatttcaaaagccttggtctcaggagaagattaaactttcatattgggcagtggttcactttaaaacacacacatacacacacaaaacaattttttaagaaatcctaataagtaacatacccaaaatgctctgtcttgagtcatgagaaccatcagttcttgatattgtctagacttgcatctagagctacgttgtaaaattcttttaggcatgtgttagatttctgtgtaaactttgtttaaatgtaaacttcatactacattgtcagtttttgtcttaataaaactatagatttat

SEQ ID NO: 1666 - DNA, 1892 bp, Homo sapiens
ggcacgagctcagctggcagttaccaccgtgttagaaagcagcctcaggaccggccacctccatcactggcgtcaccatgggggctgtgctgggtgtcttctccctcgccagctgggttccatgcctctgcagcggtgcctcatgtttgctgtgtagttgctgtcctaacagtaagaattccacggtgactcgcctcatttatgctttcattctcctcctgagcactgtcgtatcctatatcatgcagagaaaagagatggaaacttacttgaagaagattcctggattttgtgaagggggatttaaaatccatgaggctgatataaatgcagataaagattgtgatgtgctggttggttataaagctgtgtatcggatcagctttgccatggccatctttttctttgtcttttctctgctcatgttcaaagtaaaaacaagtaaagatctccgagcggcagtacacaatgggttttggttcttcaaaattgctgcccttattggaatcatggttggctctttctacatccctgggggctatttcagctcagtctggtttgttgttggcatgataggggccgccctcttcatcctcattcagctggtgctgctggtagattttgctcattcttggaatgaatcatgggtaaatcgaatggaagaaggaaacccaaggttgtggtatgctgctttactgtctttcacaagcgccttttatatcctgtcaatcatctgtgtcgggctgctctatacatattacaccaaaccagatggctgcacagaaaacaagttcttcatcagtattaacctgatcctttgcgttgtggcttctattatatcgatccacccaaaaattcaggaacaccagcctcgctccggcctcttgcagtcctccctcatcaccctctacactatgtacctcacctggtcagccatgtccaatgaacctgatcgttcctgcaatcccaacctgatgagctttattacacgcataactgcaccaaccctggctcctggaaattcaactgctgtggtccctacccctactccaccatcaaagagtgggtctttactggattcagataattttattggactgtttgtctttgttctctgcctcttgtattctagcatccgcacttccactaatagccaagtagacaagctgaccctgtcagggagtgacagcgtcatccttggtgatacaactaccagtggtgccagtgatgaagaagatggacagcctcggcgggctgtggacaacgagaaagagggagtgcagtatagctactccttattccacctcatgctctgcttggcttccttgtacatcatgatgaccctgaccagctggtacagccctgatgcaaagtttcagagcatgaccagcaagtggccagctgtgtgggtcaagatcagctccagctgggtctgcctcctgctttacgtctggacccttgtggctccacttgtcctcaccagtcgggacttcagctgaacctctgagtgccaaggacaccactggaactcacaaaggtctccttcaccgaaaacccatataccttttaagtttgtttcaactaaaatattaagtgaatgctttgcaagtttgactgtatgcaggtttatatcagaaggtgagattgaataatgcttgatgcagaatcgaaacttctcatttatctgtatattatgtttacttctaaggatatagcacaaagggaacattttttgtttaaagtgaactacagctgtgctgtgaagagagttctttataaagcctgtaggttcttttaactttggtttaaaatgtaagataggaaaatgttggatatttgaggccatgcttaatatatttatattgcagtatcctttaaaagcaaaaaaaaaa

SEQ ID NO: 1667 - DNA, 2736 bp, Homo sapiens
ttgcactctcccacacccttttcttttcgtccgctcttcgcttatttctcccgccgtctcctctgcataagaaggggaacgaaagatggcggcggaaacgctgctgtccagtttgttaggactgctgcttctgggactcctgttacccgcaagtctgaccggcggtgtcgggagcctgaacctggaggagctgagtgagatgcgttatgggatcgagatcctgccgttgcctgtcatgggagggcagagccaatcttcggacgtggtgattgtctcctctaagtacaaacagcgctatgagtgtcgcctgccagctggagctattcacttccagcgtgaaagggaggaggaaacacctgcttaccaagggcctgggatccctgagttgttgagcccaatgagagatgctccctgcttgctgaagacaaaggactggtggacatatgaattctgttatggacgccacatccagcaataccacatggaagattcagagatcaaaggtgaagtcctctatctcggctactaccaatcagccttcgactgggatgatgaaacagccaaggcctccaagcagcatcgtcttaaacgctaccacagccagacctatggcaatgggtccaagtgcgaccttaatgggaggccccgggaggccgaggttcggttcctctgtgacgagggtgcaggtatctctggggactacatcgatcgcgtggacgagcccttgtcctgctcttatgtgctgaccattcgcactcctcggctctgcccccaccctctcctccggcccccacccagtgctgcaccacaggccatcctctgtcacccttccctacagcctgaggagtacatggcctacgttcagaggcaagccgactcaaagcagtatggagataaaatcatagaggagctgcaagatctaggcccccaagtgtggagtgagaccaagtctggggtggcaccccaaaagatggcaggtgcgagcccgaccaaggatgacagtaaggactcagatttctggaagatgcttaatgagccagaggaccaggccccaggaggggaggaggtgccggctgaggagcaggacccaagccctgaggcagcagattcagcttctggtgctcccaatgattttcagaacaacgtgcaggtcaaagtcattcgaagccctgcggatttgattcgattcatagaggagctgaaaggtggaacaaaaaaggggaagccaaatataggccaagagcagcctgtggatgatgctgcagaagtccctcagagggaaccagagaaggaaaggggtgatccagaacggcagagagagatggaagaagaggaggatgaggatgaggatgaggatgaagatgaggatgaacggcagttactgggagaatttgagaaggaactggaagggatcctgcttccgtcagaccgagaccggctccgttcggaggtgaaggctggcatggagcgggaactggagaacatcatccaggagacagagaaagagctggacccagatgggctgaagaaggagtcagagcgggatcgggcaatgctggctctcacatccactctcaacaaactcatcaaaagactggaggaaaaacagagtccagagctggtgaagaagcacaagaaaaagagggttgtccccaaaaagcctcccccatcaccccaacctacagaggaggatcctgagcacagagtccgggtccgggtcaccaagctccgtctcggaggccctaatcaggatctgactgtcctcgagatgaaacgggaaaacccacagctgaaacaaatcgaggggctggtgaaggagctgctggagagggagggactcacagctgcagggaaaattgagatcaaaattgtccgcccatgggctgaagggactgaagagggtgcacgttggctgactgatgaggacacgagaaacctcaaggagatcttcttcaatatcttggtgccgggagctgaagaggcccagaaggaacgccagcggcagaaagagctggagagcaattaccgccgggtgtggggctctccaggtggggagggcacaggggacctggacgaatttgacttctgagaccaacactacacttgacccttcacggaatccagactcttcctggactggcttgcctcctccccacctccccaccctggaacccctgagggccaaacagcagagtggagctgagctgtggacctctcgggcaactctgtgggtgtgggggccctgggtgaatgctgctgcccctgctggcagccaccttgagacctcaccgggcctgtgatatttgctctcctgaactctcactcaatcctcttcctctcctctgtggcttttcctgttattgtcccctaatgataggatattccctgctgcctacctggagattcagtaggatcttttgagtggaggtgggtagagagagcaaggagggcaggacacttagcaggcactgagcaagcaggcccccacctgcccttagtgatgtttggagtcgttttaccctcttctattgaattgccttgggatttccttctccctttccctgcccaccctgtcccctacaatttgtgcttctgagttgaggagccttcacctctgttgctgaggaaatggtagaatgctgcctatcacctccagcacaatcccagcgaaaaaggtgtgaagcacccaccatgttcttgaacaatcaggtttctaaataaacaactggaccatca

SEQ ID NO: 1668 - DNA, 2061 bp, Homo sapiens
tgttccgcgatcttctcaggctctcctagcagcatccatcgccgccaccctatcttcactggcttcaccttctccttctctcttcgttgctgagcgacaagcttcctagcgctatgactgtcgtctccgtcccgcagcgggagccgctcgtcctgggtggccgccttgcgccgcttggcttttcctcccgaggttactttggggccctcccgatggtgaccacggctccgcctcctttaccccggatcccggacccccgggcactgcccccgaccctcttcctccctcatttcctagggggagatggcccgtgtctgaccccccagcctcgcgctccagcagctctgcccaaccgcagcctcgccgtggcgggaggcactcctcgggcagcgccgaagaagcggcgaaagaagaaggtgcgggccagccccgcagggcagctgcccagccgcttccaccagtaccagcagcaccggccgagtctggagggcggccggagccccgcgaccggcccgagcggagcgcaggaggtcccgggcccggccgccgccttggccccgagtcctgcagccgcagccggcacggagggagccagccccgaccttgccccgctgcggcccgcggctcccggccaaacccccctcaggaaagaggttttaaaatcaaagatgggaaaatcggagaaaattgcccttccccatggccagcttgttcatggtatacacttgtatgagcaaccaaagataaacagacagaaaagcaaatataacttgccactaaccaagatcacctctgcaaaaagaaatgaaaacaacttttggcaggattctgtttcatctgacagaattcagaagcaggaaaaaaagccttttaaaaataccgagaacattaaaaattcgcatttgaagaaatcagcatttctaactgaagtgagccaaaaggaaaattatgctggggcaaagtttagtgatccaccttctcctagtgttcttccaaagcctcctagtcactggatgggaagcactgttgaaaattccaaccaaaacagggagctgatggcagtacacttaaaaaccctcctcaaagttcaaacttagatttcagatttcagtatgtgtgtaaaacataatttttcccatatccctggactcttgagaaaattggtacagaaatggaaatttgccttgttgcaacatacaattgcaaaagatgagtttaaaaaattacatacaaacagcttgtattatattttatattttgtaaatactgtataccatgtattatgtgtatattgttcatacttgagaggtatattatagttttgttatgaaagtatgtattttgccctgcccacattgcaggtgttttgtatatatacaatggataaattttaagtgtgtgctaaggcacatggaagaccgattttatttgcacaaggtactgagatttttttcaagaaacagctgtcaaatctcaaggtgaagatctaaatgtgaacagtttactaatgcactactgaagtttaaatctgtggcacaatcaatgtaagcatggggtttgtttctctaaattgatttgtaatctgaaattactgaacaactcctattcccatttttgctaaactcaatttctggttttggtatatatccattccagcttaatgcctctaattttaatgccaacaaaattggttgtaatcaaattttaaaataataataatttggcccccccttttaaaatagtcttgactctttgtgtgtgactgtttctcatgtttgaatgtgtgactaggagatgattttgtgtggttggatttttttgacttctactttactggctgagtgtgagccgccatgcctggccataatctacattttcttaccaggagcagcattgaggtttttgagcatagtacttgactactctagaggctgagacgggagcatctcttgagcctgagaagtggagattgcaattgagctaggatcaggccactgcactccagcctgggtaacagacgctgtctcaaaaaaaaggccaagagaaagtaagggagacaga

SEQ ID NO: 1669 - DNA, 780 bp, Homo sapiens
cgtcctggcttcggcctcagccccaccatggtgacgcttgctgaactgctggtgctcctggccgctctcctggccacggtctcgggctatttcgttagcatcgacgcccatgctgaagagtgcttctttgagcgggtcacctcgggcaccaagatgggcctcatcttcgaggtggcggagggcggcttcctggacatcgacgtggagattacaggaccagataacaaaggaatttacaaaggagacagagaatccagtgggaaatacacatttgctgctcacatggatggaacatacaaattttgttttagtaaccggatgtccaccatgactccaaaaatagtgatgttcaccattgatattggggaggctccaaaaggacaagatatggaaacagaagctcaccagaacaagctagaagaaatgatcaatgagctagcagtggcgatgacagctgtaaagcacgaacaggaatacatggaagtccgggagagaatacacagagccatcaacgacaacacaaacagcagagtggtcctttggtccttctttgaagctcttgttctagttgccatgacattgggacagatctactacctgaagagattttttgaagtccggagagttgtttaaaaagcctcttcctgatgatcccaactcagaattcactgtttaccaaacaccttggtcataataatgtcattagtttctccatttttattttctgaactgtacattcccaacttatgtttctttgagattaatagatattgggggaaa

SEQ ID NO: 1670 - DNA, 963 bp, Homo sapiens
cggccggcgatatggctgccgctgtgccccgcgccgcatttctctccccgctgcttccccttctcctgggcttcctgctcctctccgctccgcatggcggcagcggcctgcacaccaagggcgcccttcccctggatacggtcactttctacaaggtcattcccaaaagcaagttcgtcttggtgaagttcgacacccagtacccctacggtgagaagcaggatgagttcaagcgtcttgctgaaaactcggcttccagcgatgatctcttggtggcagaggtggggatctcagattatggtgacaagctgaacatggagctgagtgagaaatacaagctggacaaagagagctacccagtcttctacctcttccgggatggggactttgagaacccagtcccatacactggggcagttaaggttggagccatccagcgctggctgaaggggcaaggggtctacctaggtatgcctggttgcctgcctgtatacgacgccctggccggggagttcatcagggcctctggtgtggaggcccgccaggccctcttgaagcaggggcaagataacctctcaagtgtgaaggagactcagaagaagtgggccgagcaatacctgaagatcatggggaagatcttagaccaaggggaggacttcccagcatcagagatgacacggatcgccaggctgattgagaagaacaagatgagtgacggcaagaaggaggagctccagaagagcttaaacatcctgactgccttccagaagaagggggccgagaaagaggagctgtaaaaaggctgtctgtgattttccagggtttggtgggggtagggaggggagagttaacctgctggctgtgagtcccttgtggaatataagggggtagtgggaacagtggtactaacccacgattctgagccctgagtatgcctggacattgatgctaacatgacatgct

SEQ ID NO: 1671 - DNA, 1874 bp, Homo sapiens
ggccgcggagacgtgaagctctcgaggctcctcccgctgcgggtcggcgctcgccctcgctctcctcgccctccgccccggccccggccccgcgcccgccatggagaagactgagctgatccagaaggccaagctggccgagcaggccgagcgctacgacgacatggccacctgcatgaaggcagtgaccgagcagggcgccgagctgtccaacgaggagcgcaacctgctctccgtggcctacaagaacgtggtcgggggccgcaggtccgcctggagggtcatctctagcatcgagcagaagaccgacacctccgacaagaagttgcagctgattaaggactatcgggagaaagtggagtccgagctgagatccatctgcaccacggtgctggaattgttggataaatatttaatagccaatgcaactaatccagagagtaaggtcttctatctgaaaatgaagggtgattacttccggtaccttgctgaagttgcgtgtggtgatgatcgaaaacaaacgatagataattcccaaggagcttaccaagaggcatttgatataagcaagaaagagatgcaacccacacacccaatccgcctggggcttgctcttaacttttctgtattttactatgagattcttaataacccagagcttgcctgcacgctggctaaaacggcttttgatgaggccattgctgaacttgatacactgaatgaagactcatacaaagacagcaccctcatcatgcagttgcttagagacaacctaacactttggacatcagacagtgcaggagaagaatgtgatgcggcagaaggggctgaaaactaaatccatacagggtgtcatccttctttccttcaagaaacctttttacacatctccattccttattccacttggatttcctatagcaaagaaacccattcatgtgtatggaatcaactgtttatagtcttttcacactgcagctttgggaaaacttcattccttgatttgtgtttgtcttggccttcctggtgtgcagtactgctgtagaaaagtattaatagcttcatttcatataaacataagtaactcccaaacacttatgtagaggactaaaaatgtatctggtatttaagtaatctgaaccagttctgcaagtgactgtgttttgtattactgtgaaaataagaaaatgtagttaattacaatttaaagagtattccacataacttcttaatttctacattccctcccttactcttcgggggtttcctttcagtaagcaacttttccatgctcttaatgtattcctttttagtaggaatccggaagtattagattgaatggaaaagcacttgccatctctgtctaggggtcacaaattgaaatggctcctgtatcacatacggaggtcttgtgtatctgtggcaacagggagtttccttattcactctttatttgctgctgtttaagttgccaacctcccctcccaataaaaattcacttacacctcctgcctttgtagttctggtattcactttactatgtgatagaagtgcatgttgctgccagaatacaagcattgcttttggcaaattaaagtgcatgtcatttcttaatacactagaaaggggaaataaattaaagtacacaagtccaagtctaaaactttagtacttttccatgcagatttgtgcacatgtgagagggtgtccagtttgtctagtgattgttatttagagagttggaccactattgtgtgttgctaatcattgactgtagtcccaaaaaagccttgtgaaaatgttatgccctatgtaacagcagagtaacataaaataaaagtacattttataaaccaaaaaaaaaaaaaaaaaaa

SEQ ID NO: 1672 - DNA, 1302 bp, Homo sapiens
tctccagcaccatgtctggtttgtctggcccaccagcccggcgcggcccttttccgttagcgttgctgcttttgttcctgctcggccccagattggtccttgccatctccttccatctgcccattaactctcgcaagtgcctccgtgaggagattcacaaggacctgctagtgactggcgcgtacgagatctccgaccagtctgggggcgctggcggcctgcgcagccacctcaagatcacagattctgctggccatattctctactccaaagaggatgcaaccaaggggaaatttgcctttaccactgaagattatgacatgtttgaagtgtgttttgagagcaagggaacagggcggatacctgaccaactcgtgatcctagacatgaagcatggagtggaggcgaaaaattacgaagagattgcaaaagttgagaagctcaaaccattagaggtagagctgcgacgcctagaagacctttcagaatctattgttaatgactttgcctacatgaagaagagagaagaggagatgcgtgataccaacgagtcaacaaacactcgggtcctatacttcagcatcttttcaatgttctgtctcattggactagctacctggcaggtcttctacctgcgacgcttcttcaaggccaagaaattgattgagtaatgaatgaggcatattcccctcccaccttgtacctcagccagcagaacatcgctgggacgtgcctggcctaaggcatcctaccaacagcaccatcaaggcacgttggagctttcttgccagaactgatctcttttggtgtgggaggacatggggtaccacctacacccaacaagtcaatgagggacttctttttaatttggtaggattttgactggttttgcaacaataggtctattattagagtcacctatgacaaaaaataggggttacctagataatgccaaagtcagcatttgtcctgggttcccttgtgtgatctgtttggactatgttttcttttcttctcccacttgctcagcagcttgggcttccattctagttcttttaccaagatttttgtgtgaccatgttgacttcatttggattgccctctttcaatttccttgtgaaaacacccttaactttctctttacccttagctgaaatgtttacatagcttctggtgatatcttctcatgattttatatctcttaaaatggtgatggatgtgacacctcataaaagtgagctttgaactgtagataactcttaaagaaaatgtcattttagacaattaaaatatttgtgctcc

SEQ ID NO: 1673 - DNA, 419 bp, Homo sapiens
ctcttgacgactccacagataccccgaagccatggcaagcaagggcttgcaggacctgaagcaacaggtggaggggaccgcccaggaagccgtgtcagcggccggagcggcagctcagcaagtggtggaccaggccacagaggcggggcagaaagccatggaccagctggccaagaccacccaggaaaccatcgacaagactgctaaccaggcctctgacaccttctctgggatcgggaaaaaattcggcctcctgaaatgacagcagggagacttgggtcggcctcctgaaatgatagcagggagacttgggtgaccccccttccaggcgccatctagcacagcctggccctgatctccgggcagccaccacctcctcggtctgccccctcattaaaattcacgttcccaccctgaaa

SEQ ID NO: 1674 - DNA, 1305 bp, Homo sapiens
cctgagggtgcgactccgccgcgatggtgacccggttcctgggcccacgctaccgggagctggtcaagaactgggtcccgacggcctacacatggggcgctgtgggcgccgtggggctggtgtgggccaccgattggcggctgatcctggactgggtaccttacatcaatggcaagtttaagaaggataattaattacacaaacccttcacagactgctctggtgcctggtggtgctagctcctcccacctcagcacctgctgcatctggagcagcccaagcctcaggatggacaagaggaaacccacagctcagcttcaggcttcttatgtttctgaaaacagcttggatattttaatgcacgttgcattaaacctcactgaaacctgctccgtgcccggatgttgatcatgctggtggcttggttactgtgactgtagctggagtggcacaggtgacccaggcgtcctttcagctccagaatgttgcaagtctaggagagtgttccaatggctgacagaaactgcctatttgaaatggctcataagtagtatctgcagtgtgttcatccgttgctgccttaacaagtcacccacacgtagtggcttaaagcaacgaacattcactctctcacagtctgtgtcagtcggggatttgggagtgatgtatctgggtggttgtggcccagagtctctcatgaggttgcagttaagacatcagccaaggccacttcgtctgaggaaggctcaactggggctggagccacttccaagccagtgccctcacgtggctgtcggtgacagccacagttccttcccatgggggcccctacacgaagctgcttgagcatcctcacggcatggcctctgccttccccagagcaggtgaaccaagggagaggaaggagcaagccacagtgcttctatgagccaccctgagaagtctcacgtgatcacttccgccacagcctgtttatcaaaagcaagccccccaggcccagcccacgtgcagagggaggagaatgaggttctgtgttttgaagggaagaatatcagaattggtagacatttcaaactgtcacattagggatacaaaaatgaacaggctgggagtggtggctcagcctacaatcccaacactttgggaggctgaggaaggggcatcacttgaaccaggagttcagtactaacctgggcaacaaagaggcccctgtctctgataaaaagaaaaaaaatgaaaaaataaaaatgaacaggtataaaaagaaaaaaaaaaaaaaaaaaaaaaaaaaaaaaaaaaaaaaaa

SEQ ID NO: 1675 - DNA, 1060 bp, Homo sapiens
caagtttggcaccggggtggatgcagcagtagtccccagcgtgatggcctgcggagtgactgggagtgtttccgtcgctctccatccccttgtcattctcaacatctcagaccactggatccgcatgcgctcccaggaggggcggcctgtgcaggtgattggggctctgattggcaagcaggagggccgaaatatcgaggtgatgaactcctttgagctgctgtcccacaccgtggaagagaagattatcattgacaaggaatattattacaccaaggaggagcagtttaaacaggtgttcaaggagctggagtttctgggttggtataccacaggggggccacctgacccctcggacatccacgtccataagcaggtgtgtgagatcatcgagagccccctctttctgaagttgaaccctatgaccaagcacacagatcttcctgtcagcgtttttgagtctgtcattgatataatcaatggagaggccacaatgctgtttgctgagctgacctacactctggccacagaggaagcggaacgcattggtgtagaccacgtagcccgaatgacagcaacaggcagtggagagaactccactgtggctgaacacctgatagcacagcacagcgccatcaagatgctgcacagccgcgtcaagctcatcttggagtacgtcaaggcctctgaagcgggagaggtcccctttaatcatgagatcctgcgggaggcctatgctctgtgtcactgtctcccggtgctcagcacagacaagttcaagacagatttttatgatcaatgcaacgacgtggggctcatggcctacctcggcaccatcaccaaaacgtgcaacaccatgaaccagtttgtgaacaagttcaatgtcctctacgaccgacaaggcatcggcaggagaatgcgcgggctctttttctgatgagggtacttgaagggctgatggacaggggtcaggcaactatccaaaggggagggcactacacttccttgagagaaaccgctgtcattaataaaaggggagcagcccctgagcaccgaaaaa

SEQ ID NO: 1676 - DNA, 1890 bp, Homo sapiens
cccgcgagcggacgcggcagcgcctctgtctcgctttttcttatttttcccccctttcccctttctttttttttttttcttttcttttctcccctccccccctttcaccatttcccctcggaggcgctttccccgggcaggggcagagccggtctcaccccccgcctctccccggcccccgccgccctatggcgagagggagccccctcccaacccgggctcgagcggcggcggcctcaggccgggggtcatcatggaactaattcgctgaccgacccagcggccgcagccgtgcgtcccgctcgagcgccagcgcccgcgcccgcgccccccgatccgcttcccctttctccctcctcagttggccgagtcgtcccgcgcgcaccgcctccgcgcgcctatgagaatgaggtggtaacgggcccccggatgaccccgcgtcaccactgtgaggcctacagctctgccggggaggaggaggaggaggaagaggaggagaaggtagctacagcaagctgggtagcaggcagatccaaaggatatcatgaagtttccagggcctttggaaaaccagagattgtctttcctgttggaaaaggcaatcactagggaagcacagatgtggaaagtgaatgtgcggaaaatgccttcaaatcagaatgtttctccatcccagagagatgaagtaattcaatggctggccaaactcaagtaccaattcaacctttacccagaaacatttgctctggctagcagtcttttggataggtttttagctaccgtaaaggctcatccaaaatacttgagttgtattgcaatcagctgttttttcctagctgccaagactgttgaggaagatgagagaattccagtactaaaggtattggcaagagacagtttctgtggatgttcctcatctgaaattttgagaatggagagaattattctggataagttgaattgggatcttcacacagccacaccattggattttcttcatattttccatgccattgcagtgtcaactaggcctcagttacttttcagtttgcccaaattgagcccatctcaacatttggcagtccttaccaagcaactacttcactgtatggcctgcaaccaacttctgcaattcagaggatccatgcttgctctggccatggttagtctggaaatggagaaactcattcctgattggctttctcttacaattgaactgcttcagaaagcacagatggatagctcccagttgatccattgtcgggagcttgtggcacatcacctttctactctgcagtcttccctgcctctgaattccgtttatgtctaccgtcccctcaagcacaccctggtgacctgtgacaaaggagtgttcagattacatccctcctctgtcccaggcccagacttctccaaggacaacagcaagccagaagtgccagtcagaggtacagcagccttttaccatcatctcccagctgccagtgggtgcaagcagacctctactaaacgcaaagtagaggaaatggaagtggatgacttctatgatggaatcaaacggctctataatgaagataatgtctcagaaaatgtgggttctgtgtgtggcactgatttatcaagacaagagggacatgcttccccttgtccacctttgcagcctgtttctgtcatgtagtttcaacaagtgctacctttgagtgtaaactaaggtagactactttgggaatgagaacatgcaaaatcaggaaaggctgtagaaggaaatataccttaacaggctgatttggagtgagccagaaaaaaaaaataaaactctcattatttgtgtggctaattataattcagcgttatttaagcacataaagaccaaaaaaaaaaaaaaaaaaa

SEQ ID NO: 1677 - DNA, 1277 bp, Homo sapiens
caagagtctaggtaagagtttgttcccgtggtgcggagggtcaaggcccacacccggaaacctagcgaggtaaagttgcgtcttggttgtagagacgacaacttctccgcttcctcggcgatggcggcgtccgggagcggtatggcccagaaaacctgggaactggccaacaacatgcaggaagctcagagtatcgatgaaatctacaaatacgacaagaaacagcagcaagaaatcctggcggcgaaccttgggactaaggatcaccattactttaagtactgcaaaatctcagcattggctcttctgaagatggtgatgcatgccagatcgggaggcaatttggaagtgatgggtctgatgctaggaaaggtggatggtgaaaccatgatcattatggacagttttgctttgcctgtggagggcactgaaacccgagtaaatgctcaggctgctgcatatgaatacatggctgcatacatagaaaatgcaaaacaggttggccgccttgaaaatgcaatcgggtggtatcatagccaccctggctatggctgctggctttctgggattgatgttagtactcagatgctcaatcagcagttccaggaaccatttgtagcagtggtgattgatccaacaagaacaatatccgcagggaaagtgaatcttggcgcctttaggacatacccaaagggctacaaacctcctgatgaaggaccttctgagtaccagactattccacttaataaaatagaagattttggtgtacactgcaaacaatattatgccttagaagtctcatatttcaaatcctctttggatcgcaaattgcttgagctgttgtggaataaatactgggtgaatacgttgagttcttctagcttgcttactaatgcagactataccactggtcaggtctttgatttgtctgaaaagttagagcagtcagaagcccagctgggacgagggagtttcatgttgggtttagaaacgcatgaccgaaaatcagaagacaaacttgccaaagctacaagagacagctgtaaaactaccatagaagctatccatggattgatgtctcaggttattaaggataaactgtttaatcaaattaacatctcttaaacagtctctgagaagtactttacctgaaagacagtatgagaaaaatattcaagtaacactttaaaaccagttacccaaaatctgattagaagtataaggtgctctgaagtgtcctaaatattaatatcctgtaataaagctctttaaaatga

SEQ ID NO: 1678 - DNA, 2569 bp, Homo sapiens
tccctcgtctctctcgggcaacatggcgggcgtggaggaggtagcggcctccgggagccacctgaatggcgacctggatccagacgacagggaagaaggagctgcctctacggctgaggaagcagccaagaaaaaaagacgaaagaagaagaagagcaaagggccttctgcagcaggggaacaggaacctgataaagaatcaggagcctcagtggatgaagtagcaagacagttggaaagatcagcattggaagataaagaaagagatgaagatgatgaagatggagatggcgatggagatggagcaactggaaagaagaagaaaaagaagaagaagaagagaggaccaaaagttcaaacagaccctccctcagttccaatatgtgacctgtatcctaatggtgtatttcccaaaggacaagaatgcgaatacccacccacacaagatgggcgaacagctgcttggagaactacaagtgaagaaaagaaagcattagatcaggcaagtgaagagatttggaatgattttcgagaagctgcagaagcacatcgacaagttagaaaatacgtaatgagctggatcaagcctgggatgacaatgatagaaatctgtgaaaagttggaagactgttcacgcaagttaataaaagagaatggattaaatgcaggcctggcatttcctactggatgttctctcaataattgtgctgcccattatactcccaatgccggtgacacaacagtattacagtatgatgacatctgtaaaatagactttggaacacatataagtggtaggattattgactgtgcttttactgtcacttttaatcccaaatatgatacgttattaaaagctgtaaaagatgctactaacactggaataaagtgtgctggaattgatgttcgtctgtgtgatgttggtgaggccatccaagaagttatggagtcctatgaagttgaaatagatgggaagacatatcaagtgaaaccaatccgtaatctaaatggacattcaattgggcaatatagaatacatgctggaaaaacagtgccgattgtgaaaggaggggaggcaacaagaatggaggaaggagaagtatatgcaattgaaacctttggtagtacaggaaaaggtgttgttcatgatgatatggaatgttcacattacatgaaaaattttgatgttggacatgtgccaataaggcttccaagaacaaaacacttgttaaatgtcatcaatgaaaactttggaacccttgccttctgccgcagatggctggatcgcttgggagaaagtaaatacttgatggctctgaagaatctgtgtgacttgggcattgtagatccatatccaccattatgtgacattaaaggatcatatacagcgcaatttgaacataccatcctgttgcgtccaacatgtaaagaagttgtcagcagaggagatgactattaaacttagtccaaagccacctcaacacctttattttctgagctttgttggaaaacatgataccagaattaatttgccacatgttgtctgttttaacagtggacccatgtaatacttttatccatgtttaaaaaagaaggaatttggacaaaggcaaaccgtctaatgtaattaaccaacgaaaaagctttccggacttttaaatgctaactgtttttccccttcctgtctaggaaaatgctataaagctcaaattagttaggaatgacttatacgttttgttttgaatacctaagagatactttttggatatttatattgccatattcttacttgaatgctttgaatgactacatccagttctgcacctataccctctggtgttgctttttaaccttcctggaatccattttctaaaaaataaagacacattcttctcagcaccacacaacacctattccaaaatcgaccacatatttggaagtaaagctctcctcagcaaatgtaaaagaacagaaattataacaaactgtctctcagaccacagtataaccaaactagaactcaggattaagaaactcactcaaaaccacacaactacatggaaactgaacaacctgctcctgaatgactactggatacataacaaaatgaaggcagaaataaagatgttctttaaaaccaatgagaacaaagacacaacataccagaatctctgggacacattcaaagcagtgtgtagagggaaatttatagcactaaatgcccacaagagaaagcaggaaatatctaaaattgacaccctaacatcacaattaaaagaactagagaagcaagagcaaacacattgaaaagctaagagaaggcaagaaataactaagatcagagcagaactgaaggaaatagagacacaaaaaactcttcaaaaaatcaatgaatccaggagctggttttttgaaacgatcaacaaaattgatagacactagcaagactaataaagaagaaaggagagaagaatcaaatagaagcaataaaaaatgataaaggggatatcaccaccaatcccacagaaataaaccaccatcagagaatactacaaacacctctacgcaa

SEQ ID NO: 1679 - DNA, 2697 bp, Homo sapiens
acgcgggcacgcacacacggaagcacgcctccacttaactcgcgccgccgcggcagctcgagtccaccagcagcgccgtccgcttgaccgagatgctgcgggcctgtcagttatcgggtgtgaccgccgccgcccagagttgtctctgtgggaagtttgtcctccgtccattgcgaccatgccgcagatactctacttcaggcagctctgggttgactactggcaaaattgctggagctggccttttgtttgttggtggaggtattggtggcactatcctatatgccaaatgggattcccatttccgggaaagtgtagagaaaaccataccttactcagacaaactcttcgagatggttcttggtcctgcagcttataatgttccattgccaaagaaatcgattcagtcgggtccactaaaaatctctagtgtatcagaagtaatgaaagaatctaaacagtctgcctcacaactccaaaaacaaaagggagatactccagcttcagcaacagcacctacagaagcggctcaaattatttctgcagcaggtgataccctgtcggtcccagcccctgcagttcagcctgaggaatctttaaaaactgatcaccctgaaattggtgaaggaaaacccacacctgcactttcagaagaagcatcctcatcttctataagggagcgaccacctgaagaagttgcagctcgccttgcacaacaggaaaaacaagaacaagttaaaattgagtctctagccaagagcttagaagatgctctgaggcaaactgcaagtgtcactctgcaggctattgcagctcagaatgctgcggtccaggctgtcaatgcacactccaacatattgaaagccgccatggacaattctgagattgcaggcgagaagaaatctgctcagtggcgcacagtggagggtgcattgaaggaacgcagaaaggcagtagatgaagctgccgatgcccttctcaaagccaaagaagagttagagaagatgaaaagtgtgattgaaaatgcaaagaaaaaagaggttgctggggccaagcctcatataactgctgcagagggtaaacttcacaacatgatagttgatctggataatgtggtcaaaaaggtccaagcagctcagtctgaggctaaggttgtatctcagtatcatgagctggtggtccaagctcgggatgactttaaacgagagctggacagtattactccagaagtccttcctggatggaaaggaatgagtgtttcagacttagctgacaagctctctactgatgatctgaactccctcattgctcatgcacatcgtcgtattgatcagctgaacagagagctggcagaacagaaggccaccgaaaagcagcacatcacgttagccttggagaaacaaaagctggaagaaaagcgggcatttgactctgcagtagcaaaagcattagaacatcacagaagtgaaatacaggctgaacaggacagaaagatagaagaagtcagagatgccatggaaaatgaaatgagaacccagcttcgccgacaggcagctgcccacactgatcacttgcgagatgtccttagggtacaagaacaggaattgaagtctgaatttgagcagaacctgtctgagaaactctctgaacaagaattacaatttcgtcgtctcagtcaagagcaagttgacaactttactctggatataaatactgcctatgccagactcagaggaatcgaacaggctgttcagagccatgcagttgctgaagaggaagccagaaaagcccaccaactctggctttcagtggaggcattaaagtacagcatgaagacctcatctgcagaaacacctactatcccgctgggtagtgcagttgaggccatcaaagccaactgttctgataatgaattcacccaagctttaaccgcagctatccctccagagtccctgacccgtggggtgtacagtgaagagacccttagagcccgtttctatgctgttcaaaaactggcccgaagggtagcaatgattgatgaaaccagaaatagcttgtaccagtacttcctctcctacctacagtccctgctcctattcccacctcagcaactgaagccgcccccagagctctgccctgaggatataaacacatttaaattactgtcatatgcttcctattgcattgagcatggtgatctggagctagcagcaaagtttgtcaatcagctgaagggggaatccagacgagtggcacaggactggctgaaggaagcccgaatgaccctagaaacgaaacagatagtggaaatcctgacagcatatgccagcgccgtaggaataggaaccactcaggtgcagccagagtgaggtttaggaagattttcataaagtcatatttcatgtcaaaggaaatcagcagtgatagatgaagggttcgcagcgagagtcccggacttgtctagaaatgagcaggtttacaagtactgttctaaatgttaacacctgttgcatttatattctttccatttgctatcatgtcagtgaacgccaggagtgctttctttgcaacttgtgtaacattttctgttttttcaggttttactgatgaggcttgtgaggccaatcaaaataatgtttgtgatctctactactgttgattttgccctcggagcaaactgaataaagcaacaagatg

SEQ ID NO: 1680 - DNA, 2212 bp, Homo sapiens
  misc_feature (625)..(625): n is a, c, g, or t
gcatatcctggaggtgaaggtaccacctcatggagacccccgcggccgccgcccccgctgggagcttattcccctccttcctgctcctggcctgcgggacgctggtggccgccttgctgggcgccgctcaccgcctggggctcttctatcagctgctgcacaaggtggacaaggcaagcgtccggcatggcggagagaacgtggccgctgtgctgagggcccatggtgtgcggttcatcttcacgctggtcggtgggcacatttccccgctgctggtggcctgtgagaaactgggcatccgtgtggtggacacacgccatgaggtcacggccgtctttgctgctgatgctatggcccgcctgtccgggacggtgggcgtggcggcagtgacagcaggccctggcctcaccaacacggtgactgcggtgaagaatgctcagatggctcagtccccaatcctgcttctgggtggggctgccagcactctgctgcagaaccggggtgcgctccaggctgttgatcagctgtcccttttccggccactctgtaagttttgtgtgtctgtgcggagggtgcgggacattgtgcccaccctgagggccgcgatggctgccgcccagtcggncaccccaggtccggtgtttgtggagctgcccgttgacgtgctttacccctacttcatggtccagaaggagatggtgccagccaagccacccaagggcctcgtgggccgagtggtctcctggtatttagagaattacctggccaacctctttgcaggagcctgggagcctcagcccgagggaccgctgcccctggacatcccccaggcttccccgcagcaggttcagcgctgtgtggagatcctgagccgggccaagaggcctctgatggtgctggggagtcaggccctgctcaccccaacgtctgccgacaagcttcgggctgccgtggagaccttgggtgttccctgcttccttggagggatggcacgggggctgttaggccgcaaccaccccctccacatccgggagaaccgcagtgcggccctgaagaaggcggacgtcattgtcctagcaggaactgtgtgtgacttccgcctatcctatggccgtgtcctcagccacagcagcaagatcatcatcgtcaatcgtaatcgggaagagatgttgctcaactcagacatcttctggaagccccaggaggctgtgcagggagatgtgggttccttcgtgctgaagttagtggagggccttcagggccagacctgggccccagactgggtggaggagctgcgggaagccgaccggcagaaggagcagacctttcgggagaaggcagcgatgcctgtggcccagcacctgaacccagtgcaggtgctgcagctggtggaggaaacgctacctgacaactcaattctggtggtggatggcggggacttcgtgggcactgctgcccatctggtacagccccgcggccccctgcgctggctcgatcctggggcctttgggactctgggagttggtgcaggatttgcacttggggccaagctgtgccggccagatgctgaggtctggtgcctgtttggggacggagcttttggctacagcctcatcgaatttgatacattcgtcagacacaagatcccagtgatggccttggtagggaatgatgctggctggacacagatttctcgggagcaggtgccctctctgggcagcaacgtggcctgtggcctggcctacactgattatcacaaggcagccatgggtctgggggcccggggcttgctgctctcacgggagaacgaggatcaggtggtcaaggtgctgcacgatgcccagcagcagtgccgagacggccacccggttgtggtcaacatcctcattgggaggacggacttccgcgatggctccattgctgtatagggccttgtgggtcaggacgcttggctgccttcctgcccctggactgtgtccagctggtttggagtctcatcattgcttgccctgggcctatcccatgaggcccagtgactccacaacctccctgaggaggggatggaggggtcaaatctcagagaggctctcttgtgagctcttggaccctcctcttcacggacccaactgtgccgtttgtcccctctcttatggagactgaataaaccacctctggcccatgtaggcccaagtaaaaaaaaaaaaaaaaaaaa

SEQ ID NO: 1681 - DNA, 3528 bp, Homo sapiens
tatgcatggagtggacctgtaggcgacttgcatcgtcttcaacatgaagatagccacagtgtcagtgcttctgcccttggctctttgcctcatacaagatgctgccagtaagaatgaagatcaggaaatgtgccatgaatttcaggcatttatgaaaaatggaaaactgttctgtccccaggataagaaattttttcaaagtcttgatggaataatgttcatcaataaatgtgccacgtgcaaaatgatactggaaaaagaagcaaaatcacagaagagggccaggcatttagcaagagctcccaaggctactgccccaacagagctgaattgtgatgattttaaaaaaggagaaagagatggggattttatctgtcctgattattatgaagctgtttgtggcacagatgggaaaacatatgacaacagatgtgcactgtgtgctgagaatgcgaaaaccgggtcccaaattggtgtaaaaagtgaaggggaatgtaagagcagtaatccagagcaggatgtatgcagtgcttttcggccctttgttagagatggaagacttggatgcacaagggaaaatgatcctgttcttggtcctgatgggaagacgcatggcaataagtgtgcaatgtgtgctgagctgtttttaaaagaagctgaaaatgccaagcgagagggtgaaactagaattcgacgaaatgctgaaaaggatttttgcaaggaatatgaaaaacaagtgagaaatggaaggcttttttgtacacgggagagtgatccagtccgtggccctgacggcaggatgcatggcaacaaatgtgccctgtgtgctgaaattttcaagcggcgtttttcagaggaaaacagtaaaacagatcaaaatttgggaaaagctgaagaaaaaactaaagttaaaagagaaattgtgaaactctgcagtcaatatcaaaatcaggcaaagaatggaatacttttctgtaccagagaaaatgaccctattcgtggtccagatgggaaaatgcatggcaacttgtgttccatgtgtcaagtctacttccaagcagaaaatgaagaaaagaaaaaggctgaagcacgagctagaaacaaaagagaatctggaaaagcaacctcatatgcagagctttgcaatgaatatcgaaagcttgtgaggaacggaaaacttgcttgcaccagagagaacgatcctatccagggcccagatgggaaagtgcacggcaacacctgctccatgtgtgaggtcttcttccaagcagaagaagaagaaaagaaaaagaaggaaggcgaatcaagaaacaaaagacaatctaagagtacagcttcctttgaggagttgtgtagtgaataccgcaaatccaggaaaaacggacggcttttttgcaccagagagaatgaccccatccagggcccagatgggaaaatgcatggcaacacctgctccatgtgtgaggccttctttcaacaagaagaaagagcaagagcaaaggctaaaagagaagctgcaaaggaaatctgcagtgaatttcgggaccaagtgaggaatggaacacttatatgcaccagggagcataatcctgtccgtggaccagatggcaaaatgcatggaaacaagtgtgccatgtgtgccagtgtgttcaaacttgaagaagaagagaagaaaaatgataaagaagaaaaagggaaagttgaggctgaaaaagttaagagagaagcagttcaggagctgtgcagtgaatatcgtcattatgtgaggaatggacgactcccctgtaccagagagaatgatcctattgagggtctagatgggaaaatccacggcaacacctgctccatgtgtgaagccttcttccagcaagaagcaaaagaaaaagaaagagctgaacccagagcaaaagtcaaaagagaagctgaaaaggagacatgcgatgaatttcggagacttttgcaaaatggaaaacttttctgcacaagagaaaatgatcctgtgcgtggcccagatggcaagacccatggcaacaagtgtgccatgtgtaaggcagtcttccagaaagaaaatgaggaaagaaagaggaaagaagaggaagatcagagaaatgctgcaggacatggttccagtggtggtggaggaggaaacactcaggacgaatgtgctgagtatcaggaacaaatgaaaaatggaagactcagctgtactcgggagagtgatcctgtacgtgatgctgatggcaaatcgtacaacaatcagtgtaccatgtgtaaagcaaaattggaaagagaagcagagagaaaaaatgagtattctcgctccagatcaaatgggactggatcagaatcagggaaggatacatgtgatgagtttagaagccaaatgaaaaatggaaaacttatctgcactcgagaaagtgaccctgtccggggtccagatggcaagacacatggtaataagtgtactatgtgtaaggaaaaactggaaagggaagcagctgaaaaaaaaaagaaagaggatgaagacaggagcaatacaggagaaaggagcaatacaggagaaaggagcaatgacaaagaggatctgtgtcgtgaatttcgaagcatgcagagaaatggaaagcttatctgcaccagagaaaataaccctgttcgaggcccatatggcaagatgcacatcaataaatgtgctatgtgtcagagcatctttgatcgagaagctaatgaaagaaaaaagaaagatgaagagaaatcaagtagcaagccctcaaataatgcaaaggatgagtgcagtgaatttcgaaactatataaggaacaatgaactcatctgccctagagagaatgacccagtgcacggtgctgatggaaagttctatacaaacaagtgctacatgtgcagagctgtctttctaacagaagctttggaaagggcaaagcttcaagaaaagccatcccatgttagagcttctcaagaggaagacagcccagactctttcagttctctggattctgagatgtgcaaagactaccgagtattgcccaggataggctatctttgtccaaaggatttaaagcctgtctgtggtgacgatggccaaacctacaacaatccttgcatgctctgtcatgaaaacctgatacgccaaacaaatacacacatccgcagtacagggaagtgtgaggagagcagcaccccaggaaccaccgcagccagcatgcccccgtctgacgaatgacaggaagattgttgaaagccatgagggaaaaaataaaccccagttctgaatcacctaccttcaccatctgtatatacaaagaattcttcggagcttgtcttatttgctatagaaaacaatacagagcttttgggaatggaatcactgattttcagtcttttccatttctttcctcctagaatctgtgatctgagggtataaagacatttccaccaagtttgagccctcaaaatgtcctgattacaatgctgtctgtccaactgcctgttcaataaaagtaaactcagcag

SEQ ID NO: 1682 - DNA, 3327 bp, Homo sapiens
ccgggcggggggttgcggcgctcaggagaggccccggctccgccccgggcctgcccagggggagagcggagctccgcagccgggtcgggtcggggcccctcccgggaggagcgtggagcgcggcggcggcggcggcagcagaaatgatggaagaattgcatagcctggacccacgacggcaggaattattggaggccaggtttactggagtaggtgttagtaagggaccacttaatagtgagtcttccaaccagagcttgtgcagcgtcggatccttgagtgataaagaagtagagactcccgagaaaaagcagaatgaccagcgaaatcggaaaagaaaagctgaaccatatgaaactagccaagggaaaggcactcctaggggacataaaattagtgattactttgagtttgctgggggaagcgcgccaggaaccagccctggcagaagtgttccaccagttgcacgatcctcaccgcaacattccttatccaatcccttaccgcgacgagtagaacagcccctctatggtttagatggcagtgctgcaaaggaggcaacggaggagcagtctgctctgccaaccctcatgtcagtgatgctagcaaaacctcggcttgacacagagcagctggcgcaaaggggagctggcctctgcttcacttttgtttcagctcagcaaaacagtccctcatctacgggatctggcaacacagagcattcctgcagctcccaaaaacagatctccatccagcacagacggacccagtccgacctcacaatagaaaaaatatctgcactagaaaacagtaagaattctgacttagagaagaaggagggaagaatagatgatttattaagagccaactgtgatttgagacggcagattgatgaacagcaaaagatgctagagaaatacaaggaacgattaaatagatgtgtgacaatgagcaagaaactccttatagaaaagtcaaaacaagagaagatggcgtgtagagataagagcatgcaagaccgcttgagactgggccactttactactgtccgacacggagcctcatttactgaacagtggacagatggttatgcttttcagaatcttatcaagcaacaggaaaggataaattcacagagggaagagatagaaagacaacggaaaatgttagcaaagcggaaacctcctgccatgggtcaggcccctcctgcaaccaatgagcagaaacagcggaaaagcaagaccaatggagctgaaaatgaaacgttaacgttagcagaataccatgaacaagaagaaatcttcaaactcagattaggtcatcttaaaaaggaggaagcagagatccaggcagagctggagagactagaaagggttagaaatctacatatcagggaactaaaaaggatacataatgaagataattcacaatttaaagatcatccaacgctaaatgacagatatttgttgttacatcttttgggtagaggaggtttcagtgaagtttacaaggcatttgatctaacagagcaaagatacgtagctgtgaaaattcaccagttaaataaaaactggagagatgagaaaaaggagaattaccacaagcatgcatgtagggaataccggattcataaagagctggatcatcccagaatagttaagctgtatgattacttttcactggatactgactcgttttgtacagtattagaatactgtgagggaaatgatctggacttctacctgaaacagcacaaattaatgtcggagaaagaggcccggtccattatcatgcagattgtgaatgctttaaagtacttaaatgaaataaaacctcccatcatacactatgacctcaaaccaggtaatattcttttagtaaatggtacagcgtgtggagagataaaaattacagattttggtctttcgaagatcatggatgatgatagctacaattcagtggatggcatggagctaacatcacaaggtgctggtacttattggtatttaccaccagagtgttttgtggttgggaaagaaccaccaaagatctcaaataaagttgatgtgtggtcggtgggtgtgatcttctatcagtgtctttatggaaggaagccttttggccataaccagtctcagcaagacatcctacaagagaatacgattcttaaagctactgaagtgcagttcccgccaaagccagtagtaacacctgaagcaaaggcgtttattcgacgatgcttggcctaccgaaagagggaccgcattgatgtccagcagctggcctgtgatccctacttgttgcctcacatccgaaagtcagtctctacaagtagccctgctggagctgctattgcatcaacctctggggcgtccaataacagttcttctaattgagactgactccaaggccacaaactgttcaacacacacaaagtggacaaatggcgttcagcagcgggtttggaacatagcgaatccgaatggatctgatgaaacctgtaccaggtgcttttattttcttgcttttttcccatccatagagcatgacagcatcgattctcattgaggagaaaccttgggcagctccggccaggccttgtaggaaaaggccccgcccgaggttccagcgtcaacggccactgtgtgtggctgctctgagtgaggaaaaaattaaaaagaaaaactggttccatgtactgtgaacttgaaaacttgcagactcaggggggtccctgatgcagtgcttcagatgaagaatgtggacttgaaaatacagactgggctagtccagtgtctatatttaaacttgttcttttcttttaataaagtttaggtaacatctcctgaaaagcttgtagcacaaaggctcagctggggatggtgtttgacttcggaggaaaaaagttgctattgcccgttaaaggcactagagttagtgttttatccctaaataatttcaatttttaaaaacatgcagcttccctctccccttttttatttttgaaagaatacatttggtcataaagtgaaacccgtattagcaagtacgaggcaatgttcattccaatcagatgcagctttctcctccgtctggtctcctgtttgcaattgcttccctcatctcagtagggaaaaaattgagtgggagtactgagatgtgtgggtttttgccattggacaaagaatgaggttagaagactgcagcttggagtctctctaggttttcaactatttcttcacaatttgaacacttgacggttgtcccttttaatttatttgaagtgctatttttttaaataaaggttcatctgtccatgcaaaaaaa

SEQ ID NO: 1683 - DNA, 1186 bp, Homo sapiens
aggaatctgcgctcgggttccgcagatgcagaggttgaggtggctgcgggactggaagtcatcgggcagaggtctcacagcagccaaggaacctggggcccgctcctcccccctccaggccatgaggattctgcagttaatcctgcttgctctggcaacagggcttgtagggggagagaccaggatcatcaaggggttcgagtgcaagcctcactcccagccctggcaggcagccctgttcgagaagacgcggctactctgtggggcgacgctcatcgcccccagatggctcctgacagcagcccactgcctcaagccccgctacatagttcacctggggcagcacaacctccagaaggaggagggctgtgagcagacccggacagccactgagtccttcccccaccccggcttcaacaacagcctccccaacaaagaccaccgcaatgacatcatgctggtgaagatggcatcgccagtctccatcacctgggctgtgcgacccctcaccctctcctcacgctgtgtcactgctggcaccagctgcctcatttccggctggggcagcacgtccagcccccagttacgcctgcctcacaccttgcgatgcgccaacatcaccatcattgagcaccagaagtgtgagaacgcctaccccggcaacatcacagacaccatggtgtgtgccagcgtgcaggaagggggcaaggactcctgccagggtgactccgggggccctctggtctgtaaccagtctcttcaaggcattatctcctggggccaggatccgtgtgcgatcacccgaaagcctggtgtctacacgaaagtctgcaaatatgtggactggatccaggagacgatgaagaacaattagactggacccacccaccacagcccatcaccctccatttccacttggtgtttggttcctgttcactctgttaataagaaaccctaagccaagaccctctacgaacattctttgggcctcctggactacaggagatgctgtcacttaataatcaacctggggttcgaaatcagtgagacctggattcaaattctgccttgaaatattgtgactctgggaatgacaacacctggtttgttctctgttgtatccccagccccaaagacagctcctggccatatatcaaggtttcaataaatatttgctaaatgagtg

SEQ ID NO: 1684 - DNA, 1705 bp, Homo sapiens
gggcggcggcgcgcgggtgcgatcgcggagctgtgaggcgcaggcagggctctggggcacctagagaccggggccggagacgtggcagccgccctgcccgccagaaagtttcctagaagtttgctgggcgcgggcgcacgactgactggctggaccatgaacgtgttccgaatcctcggcgacctgagccacctcctggccatgatcttgctgctggggaagatctggaggtccaagtgctgcaagggcatctctgggaagagccagatcctgtttgctctcgtcttcaccaccaggtacctggacctgttcaccaacttcatctccatctacaacacagtaatgaaggtggtttttctcctctgtgcctatgttacagtgtacatgatatatgggaaattccgtaaaacttttgacagtgagaatgacacattccgcctggagtttcttctggtcccagtcattggcctttccttccttgaaaactacagtttcactctgctggagatcctctggactttctctatctatctggaatcagtggctatcctgccccagctcttcatgatcagcaagactggagaggctgagaccataactactcactacctgttctttctgggtctgtaccgggcactctacctggctaactggatcaggcggtaccagactgagaatttctatgaccaaattgcagtcgtgtctggagtagtacaaaccatcttctactgtgacttcttctacttgtatgtgaccaaagtccttaagggaaagaagttaagtcttccaatgccaatctgaggaccttcagagacagtctacgccttaacaagcacatgaaggaaactattttgaatgttctctttggcaacttatccataatttgggatcaaatgttaaaaccagaaaagtgtttagtgtggatttcagcaaaacctgatcatcccacccagaagaccttctcatcaatagatcgcccttaaagacccattgtaaggtcataaaaaacctcggccacctgcacaaagatggtgcctcactgcaacaagaaaccttaaggtgtcttaccgacgaaataaaaaacataaatgattgttctccaaggcctgagggcaagactcatgatgagcaagtcaaccccaatctggaacaatgtccctcctcttagaatgtcccaactaaagaccagttaaaatattagggtacgttcttgtgaatttccactttccaggtagatgaccaaatttaggtggtcaagatataaaggtgtcagctagttttaagtgtgaaacttatttcactttcacactgccttcaggccagaagcaaaccaaatttaccaggtttggctggaggagttttgtgactcatcttttactggtttgaattttttcaaaccagtggctgatacctgccttgtacttagtaccttaataccaataacctaatggtacttaggcgagtaccatttgcacaatcactgttttacttatgagcagatacagatatatccaaacccttacctactaggtatcctgctagggttttcaattccaattcttgtattaagttttttcctttcagttttaggtgcgaaagtaatcagtcaatccaatatcccccatctttgtcttgaaacaaaaactgttttaagacgtctacgttgaattattcagagaattaagcaataaaagctcacacctta

SEQ ID NO: 1685 - DNA, 1303 bp, Homo sapiens
ctgccaatgagctccgccgagtagcaccggggcagggctagcgcttaaaggagccgcgacccctttgcagaccagagggtgacccggatgatggcggccggcgcggccctagccctggccttgtggctactaatgccaccagtggaggtgggaggggcggggcccccgccaatccaggacggtgagttcacgttcctgttgccggcggggaggaagcagtgtttctaccagtccgcgccggccaacgcaagcctcgagaccgaataccaggtgatcggaggtgctggactggacgtggacttcacgctggagagccctcagggcgtgctgttggtcagcgagtcccgcaaggctgatggggtacacacggtggagccaacggaggccggggactacaagctgtgctttgacaactccttcagcaccatctccgagaagctggtgttctttgaactgatctttgacagcctccaggatgacgaggaggtcgaaggatgggcagaggctgtggagcccgaggagatgctggatgttaaaatggaggacatcaaggagtccattgagaccatgcggacccggctggagcgcagcatccagatgctcacgctactgcgggccttcgaggcacgtgaccgcaacctgcaagagggcaacttggagcgggtcaacttctggtcagctgtcaacgtggcggtgctgctgctggtggctgtgctgcaggtctgcacgctcaagcgcttcttccaggacaagcgcccggtgcccacgtagcccctgccatggaaggaagaacgggacaaaggaggggcagcagggtgtgtgcatatgagacttgggggtccctccccaattttagtttcctgccaaaacgggagtgtgcagtcagggcctgcggtctggccccatgagtctccttccgtcctcagcgggcagggaacacctctggcttgtagaagggacggctcagtggctgcaccgacggtcctggaaatctcacatggtgggcactgcagcgttggaacgtgagcctcggatttcctggcccctctactgtaaatgtgccttagcctaagcctcccatcctgtgttagcgttgcctggtgcggggcagggcctaacaaggaaacctgggccctccaagccaggttgaggtctggtaacagaatgccaggaagggggcctggaagaccacctgccccggcccctctcctgcaggggccccacacaggcatgagggatggcccggccaaagtctaggcagaagcctcctataacaaagggtggtgtggcctgggcattggag

SEQ ID NO: 1686 - DNA, 1439 bp, Homo sapiens
cggggaggacggtctgcatactcgctgcccgccggctccctcccccgcgtccctgcgaccgccgcggcgaagatggcctcaggagtgcaagtagctgatgaagtatgtcgcattttttatgacatgaaagttcgtaaatgctccacaccagaagaaatcaagaaaagaaagaaggctgtcattttttgtctcagtgcagacaaaaagtgcatcattgtagaagaaggcaaagagatcttggttggagatgttggtgtaaccataactgatcctttcaagcattttgtgggaatgcttcctgaaaaagattgtcgctatgctttgtatgatgcaagctttgaaacaaaagaatccagaaaagaagagttgatgttttttttgtgggcaccagaactagcacctctgaaaagtaaaatgatctatgcaagctccaaggatgcaattaaaaagaaatttcaaggcataaaacatgaatgtcaagcaaatggaccagaagatctcaatcgggcttgtattgctgaaaagttaggtggatccttaattgtagcctttgaaggatgccctgtgtagattattcagtgccacaaattgaaagcttccatgtttaatgttatcctcttgctatataaataaagcaaatatatttaggccagggtctcactgagggggagctgtcttgtcatcttttagagtaaactattctataaacatatgcaaacagccctaaataaatctaaagtctaaagttttattgatgtgaaattaaattcttattggccaaatgcctgttttgatgagttgatttataaagatttttgttaagctcaggattttaaattacacagttcacaaacagtaaaggccatgtgaagagaattattacatctttattaacctcagcatttactttgtttcttttgcttaggaaattgctcataatctggttataattttggtccaaattctttattcttccttgagctaagcagaataatggaatataatatgtcttcataatataacaacactaatacactaatagtaagattaagttaggcagtcttctaccaaatgtgtaatggagattgcctcaaaattgtgtccacataatccacgctcatcttgcaaagcgctatttcaggcacatcattggaatacaggaagtagccctgcacctgccagtgagctcgccattcactgattggaagagtgacctggcatcttggaaatcattgtgtgtcttcaggagaatgtgcagtgtcttgtaacaactaattaataatgcaaattagggctacattgtaatctgctttgttaatgaaaatgataaaacagaatattgacaagctaggacacctgtggtatctttaattgtatctccttcagaagtttgcttcttatggtataataaagtatggaagaataaaaaaaaaaaaaaa

SEQ ID NO: 1687 - DNA, 434 bp, Homo sapiens
cgacgatcttcctgcggctgaaccgcccggctgagccgacattgccggcgtcttggcgattcggcccgacgagctccgctttcgctacagcatggtggcctactggagacaggctggactcagctacatccgatactcccagatctgtgcaaaagcagtgagagatgcactgaagacagaattcaaagcaaatgctgagaagacttctggcagcaacgtaaaaattgtgaaagtaaagaaggaataatctaccctgactaaagcttgaaatgctacatttccaaggtgaagatgtgtgggcacatgttatggcagattgaaaaggatctcattccatgggaaaaaaaaaaatcctgtcttgttcataaattgacaatgtcaataaattgaaatatggttcactgccaaaaaaaaaaaaaaaaaaaaaaaaaaaa

SEQ ID NO: 1688 - DNA, 1597 bp, Homo sapiens
tgatacatcgttgctcattttgcagaacataacagttgcacattgcaagagtcaacttgcttcgggtcttttcatgctcatggcggtattgagcggagtccgctggctgacccgagcgctggtctccgccgggaaccctggggcatggagaggtctgagtacctcggccgcggcgcacgctgcatcgcggagccaggccgaggacgtgagggtggagggctcctttcccgtgaccatgcttccgggagacggtgtggggcctgagctgatgcacgccgtcaaggaggtgttcaaggctgccgctgtcccagtggagttccaggagcaccacctgagtgaggtgcagaatatggcatctgaggagaagctggagcaggtgctgagttccatgaaggagaacaaagtggccatcattggaaagattcataccccgatggagtataagggggagctagcctcctatgatatgcggctgaggcgtaagttggacttatttgccaacgtagtccatgtgaagtcacttcctgggtatatgactcggcacaacaatctagacctggtgatcattcgagagcagacagaaggggagtacagctctctggaacatgagagtgcaaggggtgtgattgagtgtttgaagattgtcacacgagccaagtctcagcggattgcaaagttcgcctttgactatgccaccaagaaggggcggggcaaggtcactgctgtccacaaggccaacatcatgaaacttggggatgggttgttcctgcagtgctgtgaggaagttgctgaactgtaccccaaaatcaaatttgagacaatgatcatagacaactgctgcatgcagctggtgcagaatccttaccagtttgatgtgcttgtgatgcccaatctctatgggaacattattgacaatctggctgctggcctggttgggggagctggtgtggtccctggtgagagctatagtgcagaatacgcagtctttgagacgggtgcccggcacccatttgcccaggcagtgggcaggaatatagccaatcccacggccatgctgctgtcggcttccaacatgctgcggcatcttaatcttgagtatcactccagcatgatcgcagatgcggtgaagaaggtgatcaaagttggcaaggtgcggactcgagacatgggcggctacagcaccacaaccgacttcatcaagtctgtcatcggtcacctgcagactaaagggagctagagccctttatttcttccaaccttgcaaggaccacactccccatacccttcagtgcagtgtaccagggaagagaccttgtgcctctaagcagtggaccatggtcaccccttgctgggtagagcctaggttgtccttgggccggcttccttaggggacagactgttgggtggtgatggggattgttaggatggagcccaggccacatggatgatgatgattctcccccacaggttcgaacctctgacatgggtggctatgctacttgccatgacttcactgaggctgtcattgctgccttgccccacccataggccctgtccatacccatgtaaggtgttcaataaagaacatgaaccaaaa

SEQ ID NO: 1689 - DNA, 3500 bp, Homo sapiens
ggaaaggaggaagaaggagattgtgatggagaaagggggtctgtgaaacgtcaggcacagcacaaaggctttgccacgtaattacaggctcctattaagtcgagatctgccctcccaggggtctccaattttcttgtattccctacaaagcctcctctgcatgccagtttgtgccttttgaagtgccagagagcttcttgatccaactgagaaggaaaaaggagcccagcaagaagagggggagagagagaaggggaaaggggggaacccaccagcaccctccgtcggactcttgaagccttttttttttaattcttaatttttttttttactctttacaaaaagtaaagtgagaatcctgctctctaatacatctgcaagacatcaccctctcctcctgaaactttagtcactcctgagaatccacaggagtgcagagaggggggaacacgttttcttgaagatgttttaaagctggaacaagccttcttctgttggtgcttgaactcttgcctgggaataacttttttaacctttaaaaaaaccattcactttgattcttctctcccaccccttcttctctcttcttctgtttgcctaactcccccgccctgctggcctccgctttcctctctcccccttgttattatttttagtctgtgcgtgtggacacttttggagagttggaagggatttttttctcctgacttgaacatagggtgactttttaatattgtattttactgtggattatctctttggaccgcgccggacttggcctcaggaaatcaaccaatgctgcggaaggcggctggtgcacaacgctctgctctacagaagggggtcccccaccctcttttccaattttttttttttggccttcctctccttccctccctcttcctccctctctctctctctctctccactacccccctctttcttccccactcggctcctctcccccctcgcgcccacagcgtttggtgttgattcgagcgggaagaggggggtgggtgggatcggtgggggagaccatgacctccagctacgggcacgttctggagcggcaaccggcgctgggcggccgcttggacagcccgggcaacctcgacaccctgcaggcgaaaaagaacttctccgtcagtcacctgctagacctggaggaagccggggacatggtggcggcacaggcggatgagaacgtgggcgaggctggccggagcctgctggagtcgccgggactcaccagcggcagcgacaccccgcagcaggacaatgaccagctgaactcagaagaaaaaaagaagagaaagcagcgaaggaataggacaaccttcaatagcagccagctgcaggctttggagcgtgtctttgagcggacacactatcctgatgcttttgtgcgagaagaccttgcccgccgggtgaacctcaccgaggcgagagtgcaggtgtggtttcagaaccgaagagccaagttccgcaggaatgagagagccatgctagccaataaaaacgcttccctcctcaaatcctactcaggagacgtgactgctgtggagcagcccatcgtacctcgtcctgctccgagacccaccgattatctctcctgggggacagcgtctccgtacagatcctcgtccctcccaagatgttgtttacacgaggggcttcataacggattctaacggaagacactgaaaagcgccatggctacttattctgccacatgtgccaacaatagccctgcacagggcatcaacatggccaacagcattgccaacctgagactgaaggccaaggaatatagtttacagaggaaccaggtgccaacagtcaactgaggaaaaaaaataattaaacaggcctaagaagaaatcaaaaaccataagacacctatcctgctctgttatttcttcatctgctggggggaaaaagtaaattacaaacaaacaaacaaagcagaactaaaatattgggaccatggcagagaaaagcaggagaggagcaaaatgaaaattagttaacaaatgttcctcctccctctgggataccaccaccacttgtttctgtgtgtgtttattttgtttttctttcattcatgctttgcttaatgtactccaggcttcttcagataggttcagcccacccacccccatgattgtatgaagttttaaaaaaaactacagcagccaaagaaactatatatatatatatatatatatatatccagaatgattgcctctactgtcctcattgacttgtttgaaccttagtgccttaccctgtcctcttcccagttctctttatagaagctctaggagctttcgaaaagccaaagtctttctgaagaatctgtgctggacagacataattccctttctcattgtctccatctttgttggtcatggtaaggtttttccatcagcctctgaaaaaatagttgtgcacaacatctgctcactggactgtctgatccaatgtaattggctgcgtctggctaattctaagcactaaagtctacatctaagctatagatttaagcttgaagctacagattatatcactatcaccaccacccctcaccctatgcaatcaatcaatcaatcatcttaagttaaagatatttgttgtctttgaatgatttgctgtcacagactatttggtagaagaaatatttttcacctgagagaggaagagaaatttctctagtaacacaaagagtgagttctaaaaggcatgcccacatctctttcgtgccttaaggatagtgagatgcacacttatatatatactgtatatatttatatatttatatatatatttcatatatatatataatattgcaagcttaagtttgcaatttcccaaacaatacaaaaagcaaattacacaccctcaccactgttcttatctctatagtgatgaaacattaattagggatcttgctgcttttctttttctacacgaagttttcattaaagccacagaataattgatagggcagctgtttgagaacaggtcccattttcacattagggctttaaatgaattagaaactatttgaggctataaaaatgtccttgagtttggagcctgagctctggtgaaatgctgatacatctgatctatcatgggaattgcagttagagagagtaaggaataccatttagtcatctatccgttcttcacttagcaggaatatgaaagaaaggcacatgtttaagaggaatacctaaaggtttttctaaattccaacatttaaaaggcaattgtgggctatttttattttttaatattttgaaataaagtttagtgtctagggctgggagccaggactgatcttccatttctttttctttgttcccagccatgcttttgtaacttgccaggtggacttgaccaactacattaccatgctgtgcctcagtttacccatttgtaaaatgggattaataatacttacctacctcacaggggtgttgtgaggctctatt

SEQ ID NO: 1690 - DNA, 1792 bp, Homo sapiens
ctccggacagcatgagcgtgggcttcatcggcgctggccagctggcttttgccctggccaagggcttcacagcagcaggcgtcttggctgcccacaagataatggctagctccccagacatggacctggccacagtttctgctctcaggaagatgggggtgaagttgacaccccacaacaaggagacggtgcagcacagtgatgtgctcttcctggctgtgaagccacacatcatccccttcatcctggatgaaataggcgccgacattgaggacagacacattgtggtgtcctgcgcggccggcgtcaccatcagctccattgagaagaagctgtcagcgtttcggccagcccccagggtcatccgctgcatgaccaacactccagtcgtggtgcgggagggggccaccgtgtatgccacaggcacgcacgcccaggtggaggacgggaggctcatggagcagctgctgagcacggtgggcttctgcacggaggtggaagaggacctgattgatgccgtcacggggctcagtggcagcggccccgcctacgcattcacagccctggatgccctggctgatgggggtgtgaagatgggacttccaaggcgcctggcagtccgcctcggggcccaggccctcctgggggctgccaagatgctgctgcactcagaacagcacccaggccagctcaaggacaacgtcagctctcctggtggggccaccatccatgccttgcatgtgctggagagtgggggcttccgctccctgctcatcaacgctgtggaggcctcctgcatccgcacacgggagctgcagtccatggctgaccaggagcaggtgtcaccagccgccatcaagaagaccatcctggacaaggtgaagctggactcccctgcagggaccgctctgtcgccttctggccacaccaagctgctcccccgcagcctggccccagcgggcaaggattgacacgtcctgcctgaccaccatcctgccaccaccttctcttctcttgtcactagggggactagggggtccccaaagtggcccactttctgtggctctgatcagcgcaggggccagccagggacatagccagggaggggccacatcacttcccactggaaatctctgtggtctgcaagtgcttcccagcccagaacaggggtggattccccaacctcaacctcctttcttctctgctcccaaaccatgtcaggaccaccttcctctagagctcgggagcccggagggtcttcacccactcctactccagtatcagctggcacgggctccttcctgagagcaaaggtcaaggaccccctctgtgaaggctcagcagaggtgggatcccacgccccctcccggcccctccctgccctccattcagggagaaacctctccttcccgtgtgagaagggccagagggtccaggcatcccaagtccagcgtgaagggccacagcccctcttggctgccaagcacgcagatcccatggacatttggggaaagggctccttgggctgctggtgaacttctgtggccaccacctcctgctcctgacctccctgggagggtgctatcagttctgtcctggccctttcagttttataagttggtttccagcccccagtgtcctgacttctgtctgccacatgaggagggaggccctgcctgtgtgggagggtggttactgtgggtggaatagtggaggccttcaactgattagacaaggcccgcccacatcttggagggcatctgccttactgattaaaatgtcaatgtaatct

SEQ ID NO: 1691 - DNA, 579 bp, Homo sapiens
atgcaggccatcaagtgtgtggtggtgggagacggagctgtaggtaaaacttgcctactgatcagttacacaaccaatgcatttcctggagaatatatccctactgtctttgacaattattctgccaatgttatggtagatggaaaaccggtgaatctgggcttatgggatacagctggacaagaagattatgacagattacgccccctatcctatccgcaaacagatgtgttcttaatttgcttttcccttgtgagtcctgcatcatttgaaaatgtccgtgcaaagtggtatcctgaggtgcggcaccactgtcccaacactcccatcatcctagtgggaactaaacttgatcttagggatgataaagacacgatcgagaaactgaaggagaagaagctgactcccatcacctatccgcagggtctagccatggctaaggagattggtgctgtaaaatacctggagtgctcggcgctcacacagcgaggcctcaagacagtgtttgacgaagcgatccgagcagtcctctgcccgcctcccgtgaagaagaggaagagaaaatgcctgctgttgtaa

SEQ ID NO: 1692 - DNA, 2994 bp, Homo sapiens
ggcacgaggaaacctctaggtccaccacctccatcttacacgtgtttccgttgtggtaaacctggacattatattaagaattgcccaacaaatggggataaaaactttgaatctggtcctaggattaaaaagagcactggaattcccagaagttttcatgatggaagtgaaagatcctaatatgaaaggtgcaatgcttaccaacactggaaaatatgcaataccaactatagatgcagaagcatatgcaattgggaagaaagagaaacctcccttcttaccagaggagccatcttcttcctcagaagaagatgatcctatcccagatgaattgttgtgtctcatctgcaaggatattatgactgatgctgttgtgattccctgctgtggaaacagttactgtgatgaatgtataagaacagcactcctggaatcagatgagcacacatgtccgacgtgtcatcaaaatgatgtttctcctgatgctttaattgccaataaatttttacgacaggctgtaaataacttcaaaaatgaaactggctatacaaaaagactacgaaaacagttacctcctccaccacccccaataccacctccgagaccactgattcagaggaacctacaacctctgatgagatctccgatatcaagacaacaagatcctcttatgattccagtgacatcttcatcaactcacccagctccgtctatatcttcattaacttctaatcagtcttccttggcccctcctgtgtctggaaatccgtcttctgctccagctcctgtacctgatataactgcaacagtatccatatcagttcattcagaaaaatcagatggaccttttcgggattctgataataaaatattgccagctgcagctcttgcatcagagcactcaaagggaacctcctcaattgcaattaccgctcttatggaagagaagggttaccaggtgcctgttcttggaaccccatctttgcttggacagtcattattgcatggacagttgatccccacaactggtccagtaagaataaatactgctcgtccaggtggtggtcgaccaggctgggaacattccaacaaacttggctatctggtttctccaccacaacaaattagaagaggggagaggagctgctacagaagtataaaccgtgggcgacaccacagcgaaagatcacagaggactcaaggcccgtcactaccagcaactccagtctttgtacctgttccaccacctcctttgtatccgcctcctccccatacacttcctctccctccgggtgttcctcctccacagttttctcctcagtttcctcctggccagccaccacccgctgggtatagtgtccctcctccagggtttcctccagctcctgccaatttatcaacaccttgggtatcatcaggagtgcagacagctcattcaaataccatcccaacaacacaagcaccacctttgtccagggaagaattctatagagagcagcgacgactaaaagaagaggaaaagaaaaagtccaagctagatgagtttacaaatgattttgctaaggaattgatggaatacaaaaagattcaaaaggagcgtaggcgctcattttccaggtctaaatctccctatagtggttcttcgtattcaagaagttcatatacttattctaaatcaagatctgggtcaacacgttcacgctcttattctcgatcattcagccgctcacattctcgttcctattcacggtcacctccataccccagaagaggcagaggcaagagccgcaattaccgttcacggtctagatctcatggatatcatcgatctaggtcaaggtcacccccttacagacgctatcattcacgatcaagatctcctcaagcgtttaggggacagtctcctaataaacgtaatgtacctcaaggggaaacagaacgtgaatattttaatagatacagagaagttccaccaccatatgacatgaaagcatattatgggagaagtgttgactttagagacccatttgaaaaagaacgctaccgagaatgggagagaaaatatagagagtggtatgaaaaatattataaaggttatgctgctggagcacagcctagaccctcagcaaatagagagaacttttctccagagagatttttgccacttaacatcaggaattctcccttcacaagaggccgcagagaagactatgttggtgggcaaagtcatagaagtcgaaacataggtagcaactatccagaaaagctttcagcaagagatggtcacaatcagaaggataatacaaagtcaaaagagaaggagagtgaaaacgctccaggagatggtaaaggaaataagcataagaaacacagaaaaagaagaaaaggggaggaaagtgagggttttctgaacccagagttattagagacttctaggaaatcaagagaacctacaggtgttgaagaaaataaaacagactcattgtttgttctcccaagtagagatgatgccacacctgttagagatgaaccaatggatgcagaatcaatcacttttaaatcagtgtctgaaaaagacaagagagaaagggataaaccaaaagcaaagggtgataaaaccaaacggaagaatgatggatctgctgtgtccaaaaaagaaaatattgtaaaacctgctaaaggaccccaagaaaaagtagatggagacgtgagagatctcctcgatctgaacctccaattaaaaaagccaaagaggagactccgaagactgacaatactaaatcatcatcttcctctcagaaggatgaaaaaatcactggaacccccagaaaagctcactctaaatcagcaaaagacaccaagaaacaaaaccagtcaaagaggaaaaagtgaagaaggactattccaaagatgtcaaatcagaaaagctaacaactaaggaagaaaaggccaagaagcctaatgagaaaaacaaaccacttgataataagggag

SEQ ID NO: 1693 - DNA, 543 bp, Homo sapiens
atggcagcagcggaggaggaggacgggggccccgaagggccaaatcgcgagcggggcggggcgggcgcgaccttcgaatgtaatatatgtttggagactgctcgggaagctgtggtcagtgtgtgtggccacctgtactgttggccatgtcttcatcagtggctggagacacggccagaacggcaagagtgtccagtatgtaaagctgggatcagcagagagaaggttgtcccgctttatgggcgagggagccagaagccccaggatcccagattaaaaactccaccccgcccccagggccagagaccagctccggagagcagagggggattccagccatttggtgataccgggggcttccacttctcatttggtgttggtgcttttccctttggctttttcaccaccgtcttcaatgcccatgagcctttccgccggggtacaggtgtggatctgggacagggtcacccagcctccagctggcaggattccctcttcctgtttctcgccatcttcttctttttttggctgctcagtatttga

SEQ ID NO: 1694 - DNA, 2092 bp, Homo sapiens
ccacgcgtccggtgcggacgggcgcggaccacctccaggggctaagtgatggatcttgtactccgtgttgcagattactatttttttacaccatacgtgtatccagccacatggccagaagatgacatcttccgacaagctattagtcttctgattgtaacaaatgttggtgcttacatcctttatttcttctgtgcaacactgagctattattttgtcttcgatcatgcattaatgaaacatccacaatttttaaagaatcaagtccgtcgagagattaagtttactgtccaggcattgccatggataagtattcttactgttgcactgttcttgctggagataagaggttacagcaaattacatgatgacctaggagagtttccatatggattgtttgaacttgtcgttagtataatatctttcctctttttcactgacatgttcatctactggattcacagaggccttcatcatagactggtatataagcgcctacataaacctcaccatatttggaagattcctactccatttgcaagtcatgcttttcaccctattgatggctttcttcagagtctaccttaccatatatacccttttatctttccattacacaaggtggtttatttaagtctgtacatcttggttaatatctggacaatttccattcatgacggtgattttcgtgtcccccaaatcttacagccatttattaatggctcagctcatcatacagaccaccatatgttctttgactataattatggacaatatttcactttgtgggataggattggcggctcattcaaaaatccttcatcctttgaggggaagggaccgctcagttatgtgaaggagatgacagagggaaagcgcagcagcccttcaggaaatggctgtaagaatgaaaaattattcaatggagagtttacaaagactgaatagattattgcccagttattcttaagtaaggacaaagaaggaaatatcatcgtatttcttttttttaataaggaaaaaataatctccatacagtcaagatacatagtaaatggtatcatttggaaatcagcatcgtgggcactgctgaggaatgatcctagtggtaggtcagaagaagatgctgtgaacaccaggactttaatcttatgcttaaaatgccagatgttgttcgggccccaacttgtatttctagcagcagatctgtagtttgtatagcctcaacaacaattttaaataagatggagaataaattattgaggggactaggctatatgcatttgccttcatccacccatgtttattaagaatcattgtgcttaataataccaagactaagcaccataaccaagaaatactaatgtaaagattgtttcttgtttcaggaatggttaattcttcaacgttggtatgataatgataacttgttttgacttgaataaagtactacatcagtgtggaaaaaaattctgatacattagcagctatgtaaatgacctaattgatagcaggtgtaataagactatcgtcttcctacacataggaggctcattctctggacacactatcacctattacattttactgattaacaaataaattggaatttaaaaatatcgatatcaccatgatttaatccagatctgggattatgtagctaaacattgtgatgattattatttaaaaccattatttaataagagtaaaaatatgtgaatctggatatatttaaaaaaagaaatttgattgcccagataatatattaggcactactgattttttagttaaattgatgcactacacttttgatgtttgaagttacaacctgtaatttttttgtaaaggaaataattgccaaatacctaggcccattgctgacgattagttctaaaatcttattcctcctcttctcccctcacttttccctacttcctctgcaaaaagatttaacaaatacattcataaggaaatgtgtgttgtaacaaatatattgcaaaaacatagtttgtaaaggcattctataagctatttatgtaaaatcaataaaagttgatcataattaaactgtaaaaaaaaaaaaaaaggcggc

SEQ ID NO: 1695 - DNA, 1694 bp, Homo sapiens
ctctctgcccacctctgcttcctctaggaacacaggagttccagatcacatcgagttcaccatgaattcactcagtgaagccaacaccaagttcatgttcgacctgttccaacagttcagaaaatcaaaagagaacaacatcttctattcccctatcagcatcacatcagcattagggatggtcctcttaggagccaaagacaacactgcacaacagattaagaaggttcttcactttgatcaagtcacagagaacaccacaggaaaagctgcaacatatcatgttgataggtcaggaaatgttcatcaccagtttcaaaagcttctgactgaattcaacaaatccactgatgcatatgagctgaagatcgccaacaagctcttcggagaaaaaacgtatctatttttacaggaatatttagatgccatcaagaaattttaccagaccagtgtggaatctgttgattttgcaaatgctccagaagaaagtcgaaagaagattaactcctgggtggaaagtcaaacgaatgaaaaaattaaaaacctaattcctgaaggtaatattggcagcaataccacattggttcttgtgaacgcaatctatttcaaagggcagtgggagaagaaatttaataaagaagatactaaagaggaaaaattttggccaaacaagaatacatacaagtccatacagatgatgaggcaatacacatcttttcattttgcctcgctggaggatgtacaggccaaggtcctggaaataccatacaaaggcaaagatctaagcatgattgtgttgctgccaaatgaaatcgatggtctccagaagcttgaagagaaactcactgctgagaaattgatggaatggacaagtttgcagaatatgagagagacacgtgtcgatttacacttacctcggttcaaagtggaagagagctatgacctcaaggacacgttgagaaccatgggaatggtggatatcttcaatggggatgcagacctctcaggcatgaccgggagccgcggtctcgtgctatctggagtcctacacaaggcctttgtggaggttacagaggagggagcagaagctgcagctgccaccgctgtagtaggattcggatcatcacctacttcaactaatgaagagttccattgtaatcaccctttcctattcttcataaggcaaaataagaccaacagcatcctcttctatggcagattctcatccccgtagatgcaattagtctgtcactccatttggaaaatgttcacctgcagatgttctggtaaactgattgctggcaacaacagattctcttggctcatatttcttttctttctcatcttgatgatgatcgtcatcatcaagaatttaatgattaaaatagcatgcctttctctctttctcttaataagcccacatataaatgtactttttcttccagaaaaattctccttgaggaaaaatgtccaaaataagatgaatcacttaataccgtatcttctaaatttgaaatataattctgtttgtgacctgttttaaatgaaccaaaccaaatcatactttttctttgaatttagcaacctagaaacacacatttctttgaatttaggtgatacctaaatccttcttatgtttctaaattttgtgattctataaaacacatcatcaataaaatagtgacataaaatca

SEQ ID NO: 1696 - DNA, 1865 bp, Homo sapiens
gcgtggaggtcgacgactccgtcgcagactacggacctgtctgggtctcagccgccaaagaccccgtccggtaggtgagtggctcactttgagggcaagccttctcggatcgaggcttcttcatggccgctcagatcgtgagcggccggggctgctctctttgcggaggatggcgtctaatgagcgcagttgattcgaggaagtactagccggacatcatgagtggctgtcgggtattcatcgggagactaaatccagcggccagggagaaggacgtggaaagattcttcaagggatatggacggataagagatattgatctgaaaagaggctttggttttgtggaatttgaggatccaagggatgcagatgatgctgtgtatgagcttgatggaaaagaactctgtagtgaaagggttactattgaacatgctagggctcggtcacgaggtggaagaggtagaggacgatactctgaccgttttagtagtcgcagacctcgaaatgatagacggtatgtgaagggtggatggctgcattgaacaattattgtaggggtagcatttaagattcaggagtcattagcagtgatgattttgggacctgccgtataatctgttcttctattcccacgttagccaattgttcttgatgaatctatatgagtcatagaacacaaatctattgacggaagtcattagaatggcttgtgatatctgatggcttgaacttgcccacagttgaacacaagtgctgtcattgcatttcttccattgtgaatacgaattttcttcctcagaaatgctccacctgtaagaacagaaaatcgtcttatagttgagaatttatcctcaagagtcagctggcaggatctcaaagatttcatgagacaagctggggaagtaacgtttgcggatgcacaccgacctaaattaaatgaaggggtggttgagtttgcctcttatggtgacttaaagaatgctattgaaaaactttctggaaaggaaataaatgggagaaaaataaaattaattgaaggcagcaaaaggcacaggtcaagaagcaggtctcgatcccggaccagaagttcctctaggtctcgtagccgatcccgttcccgtagtcgcaaatcttacagccggtcaagaagcaggagcaggagccggagccggagcaagtcccgttctgttagtaggtctcccgtgcctgagaagagccagaaacgtggttcttcaagtagatctaagtctccagcatctgtggatcgccagaggtcccggtcccgatcaaggtccagatcagttgacagtggcaattaaactgtaaataacttgccctgggggcctttttttttaaaaaacaaaaaccacaaaaattcccaaaccatacttgctaaaaattctggtaagtatgtgcttttctgtgggggtgggatttggaaggggggttgggttgggctggatatctttgtagatgtggaccaccaaggggttgttgaaaactaattgtattaaatgtcttttgataagccttctgctcacatttttgtgaatgtctgaagtatatagtttgtgtatattgacagagctcttttataactaaagcaaatttaatttttttgtactagaaaaaaatttgaacattttagttcttggttataaaaatgttaattcagaattagtttaatgccttaattaaactaattaatagctttggacacttaaaagagctctaaatttgcttgtacataaaggcttaatttgttttccttgttagggtcaagggtgtcctccactctttaacagctgctggacagacacattagagcagctgtttgttattgataataaaatattataaaacta

SEQ ID NO: 1697 - DNA, 1733 bp, Homo sapiens
  misc_feature (19)..(19): n is a, c, g, or t
ttcggcacaggcgggagancggcggggccgaagcgtgaactcgcccgctccggcttgcttcccccgcgccgcctccccgcgccgctcggaagccatgtccgaggagaagcccaaggagggtgtgaagacagagaatgaccacatcaacctgaaggtggccgggcaggacggctccgtggtgcagttcaagatcaagaggcacacgtcgctgagcaagctgatgaaggcctactgcgagaggcagggcttgtcaatgaggcagatcagattcaggttcgacgggcagccaatcaatgaaactgacactccagcacagctgagaatggaggacgaggacaccatcgacgtgttccagcagcagacgggaggtgtgccggagagcagcctggcagggcacagtttctagagggcccgtccccagcccgggccgtccatcctcgcattgctgttgaatggtgagcacgtgaccatgccgaccacaaaggtgtctgcggaaactcgaggacattcaccacgatgattttcctctctttgatgtacttcaagtgcaactcaaaactatatctgcagggatgaatctgtaacttaaattgggccaatcagaattgttatctttgttcaggtaaaatgagttgcaagatattgtgggtacttttgtgtgctcatttgtgttttccccccctcctacaacatttttttaaccccaaaattatagcctgaatgttcgcttttagtctggccagggatctgactcctgagttggttgcctctcccctgctcactccagtcacatagagaattggtgtttcccgcagtggggattgcagctgttggacaggtattgggggcaaggttggtagggaggacagactgtcacttgctgttacaggcacaggtgattaaaatgctaaatattgcaaatttaagctttgtcagtatatggaaaagttgaagggaaaatactggaatgcttcttcaaaggttaaaaaataaccgagtcttttggtaatttgaccccacgtgctctctggccctcaagcatgtaacctcggggtctgaggcccaggacccacccccctgccacccctcccaccccactccctgctcagtacctggcgttggtacacaggcaaggattggcacaaccaaaattggcctttttctccctcttaatattgaagaaattcccacatttctcatttggtaatggtgttgtggcctcagatttcttctagtatttgcttctgatgaatgattatggtctatacataaaaaagtaagactaagtattgctgaatttgcagttatgttgtcgtgtataagagctacttccaagtgtggttacaaatgaacccatggaatgatgacttcatgttcttctcgtgggtttgtgccgtgctgctttccaaataggtattgaatttatgcattagtctggtgatttcagttctgtgaaatattttgggatctataccaattaaacattttcatagttctgcctattgtccttccctgaggctccattgctgcttggtggccattctctgcctttttacagtcacctgaacaatgacccatcatctcttgcttgcttgaaatcttgctgaaatgttctcatttcctgtttgctgtatgggctcgggtgggatgtttgttggctctgttgtgtttattcaccaatttgtacattatttgttgtcctttactactgtaaacagtaaatatagtttggt

SEQ ID NO: 1698 - DNA, 774 bp, Homo sapiens
  misc_feature (689)..(689): n is a, c, g, or t
  misc_feature (739)..(739): n is a, c, g, or t
  misc_feature (744)..(744): n is a, c, g, or t
cggcacgagggtgctgcttgtgtgctcgtttggtgcggacctggtacctcttyttgtgaagcggcagctgaggagactccggcgctcgccatggccgacgaaaagcccaaggaaggagtcaagactgagaacaacgatcatattaatttgaaggtggcggggcaggatggttctgtggtgcagtttaagattaagaggcatacaccacttagtaaactaatgaaagcctattgtgaacgacagggattgtcaatgaggcagatcagattccgatttgacgggcaaccaatcaatgaaacagacacacctgcacagttggaaatggaggatgaagatacaattgatgtgttccaacagcagacgggaggtgtctactgaaaagggaacctgcttctttactccagaactctgttctttaaagaccaagattacattctcaattagaaaactgcaatttggttccaccacatcctgactactaccgtatagttttctctattctttcatttcccccttccccattcctttattgtacataaagtaactggtatatgtgcacaagcatattgcattttttttttttttaactaaacagccaatggtatgttttgattgacatccaagtggagacggggatggggaaaaatactgattctgtggaaaatacccccctttctcccattagtggncatgctccattcagcccttaaacctttataatcccaggtaaggtaatttngcccncaccggttttacccaaaaaaaaaaaaactt

SEQ ID NO: 1699 - DNA, 636 bp, Homo sapiens
atgatttccagaatggagaagatgacgatgatgatgaagatattgattatgtttgctcttggaatgaactactggtcttgctcaggtttcccagtgtacgactacgatccatcctccttaagggatgccctcagtgcctctgtggtaaaagtgaattcccagtcactgagtccgtatctgtttcgggcattcagaagctcattaaaaagagttgaggtcctagatgagaacaacttggtcatgaatttagagttcagcatccgggagacaacatgcaggaaggattctggagaagatcccgctacatgtgccttccagagggactactatgtgtccacagctgtttgcagaagcaccgtgaaggtatctgcccagcaggtgcagggcgtgcatgctcgctgcagctggtcctcctccacgtctgagtcttacagcagcgaagagatgatttttggggacatgttgggatctcataaatggagaaacaattatctatttggtctcatttcagacgagtccataagtgaacaattttatgatcggtcacttgggatcatgagaagggtattgcctcctggaaacagaaggtacccaaaccaccggcacagagcaagaataaatactgactttgagtaa

SEQ ID NO: 1700 - DNA, 1246 bp, Homo sapiens
ctgccccatgcagccctgagccccacagcaagtctgccatgggccgcggggcccgtgtcccctcggaggccccgggggcaggcgtcgagcgccgctggcttggagccgcgctggtcgccctgtgcctcctccccgcgctggtgctgctggcccggctgggggccccggcggtgccggcctggagcgcagcgcagggagacgtcgctgcgctgggcctctcggcggtcccccccacccgggtcccgggcccactggccccccgcagacgccgctacacgctgactccagccaggctgcgctgggaccacttcaacctcacctacaggatcctctccttcccgcggaacctgctgagcccgcgggagacgcggcgggccctagctgccgccttccgcatgtggagcgacgtgtcccccttcagcttccgcgaggtggcccccgagcagcccagcgacctccggataggcttctacccgatcaaccacacggactgcctggtctccgcgctgcaccactgcttcgacggccccacgggggagctggcccacgccttcttccccccgcacggcggcatccacttcgacgacagcgagtactgggtcctgggccccacgcgctacagctggaagaaaggcgtgtggctcacggacctggtgcacgtggcggcccacgagatcggccacgcgctgggcctgatgcactcacaacacggccgggcgctcatgcacctgaacgccacgctgcgcggctggaaggcgttgtcccaggacgagctgtgggggctgcaccggctctacggatgcctcgacaggctgttcgtgtgcgcgtcctgggcgcggaggggcttctgcgacgctcgccggcggctcatgaagaggctctgccccagcagctgcgacttctgctacgaattccccttccccacggtggccaccaccccaccgccccccaggaccaaaaccaggctggtgcccgagggcaggaacgtgaccttccgctgcggccagaagatcctccacaagaaagggaaagtgtactggtacaaggaccaggagcccctggagttctcctaccccggctacctggccctgggcgaggcgcacctgagcatcatcgccaacgccgtcaatgagggcacctacacctgcgtggtgcgccgccagcagcgcgtgctgaccacctactcctggcgagtccgtgtgcggggctgagcccggctgataaagcactttctctctgaaaaaaa

SEQ ID NO: 1701 - DNA, 1070 bp, Homo sapiens
atgttttgttgcttaggatatgaatggctgagcggaggctgtaaaacctggcactctgcttgggttatcaatactctggctgaccatcgtcatcgtgggactgactttggtggaagtccttggttacttatcattactgtgtttctgagaagttataaatttgccatctccctctgcacaacttacctttgtgtgtctttcctgaagactatcttcccgtctcaaaatggacatgatggatccacggatgtacagcagagagccaggaggtccaaccgccgtagacaggaaggaattaaaattgtcctggaagacatctttactttatggagacaggtggaaaccaaagttcgagctaaaatccgtaagatgaaggtgacaacaaaagtcaaccgtcatgacaaaatcaatggaaagaggaagaccgccaaagaacatctgaggaaactaagcatgaaagaacgtgagcacggagaaaaggagaggcaggtgtcagaggcagaggaaaatgggaaattggatatgaaagaaatacacacctacatggaaatgtttcaacgtgcgcaagcgttgcggcggcgggcagaggactactacagatgcaaaatcaccccttctgcaagaaagcctctttgcaaccgggtcagaatggcggcagtggagcatcgtcattcttcaggattgccctactggccctacctcacagctgaaactttaaaaaacaggatgggccaccagccacctcctccaactcaacaacattctataattgataactccctgagcctcaagacaccttccgagtgtctgctcactccccttccaccctcagctctaccctcagcggatgataatctcaagacacctgcggagtgtctgctctatccccttccaccctcagcggatgataatctcaagacacctcccgagtgtctgctcactccccttccaccctcagctccaccctcagcggatgataatctcaagacacctcccgagtgtgtctgctcactccccttccaccctcagcggatgataatctcaagaaactaaggaagaataaataaata

SEQ ID NO: 1702 - DNA, 2713 bp, Homo sapiens
ggcacgaggagagtgcggctgctgagagccgagcccagcaatcccgatcctctgagtcgtgaagaagggaggcagcgagggggttggggttggggcctgaggcaagcccccaggctccgctcttgccagagggacaggagccatggctcagaaaatggactgtggtgcgggcctcctcggcttccaggctgaggcctccgtagaagacagcgccttgcttatgcagaccttgatggaggccatccagatctcagaggctccacctactaaccaggccaccgcagctgctagtccccagagttcacagcccccaactgccaatgagatggctgacattcaggtttcagcagctgccgctaggcctaagtcagcctttaaagtccagaatgccaccacaaaaggcccaaatggtgtctatgatttctctcaggctcataatgccaaggatgtgcccaacacgcagcccaaggcagcctttaagtcccaaaatgctacctccaaaggtccaaatgctgcctatgatttttcccaggcagcaaccactggtgagttagctgctaacaagtctgagatggccttcaaggcccagaatgccactactaaagtgggcccaaatgccacctacaatttctctcagtctctcaatgccaatgacctggccaacagcaggcctaagacccctttcaaggcttggaatgataccactaaggccccaacagctgatacccagacccagaatgtaaatcaggccaaaatggccacttcccaggctgacatagagaccgacccaggtatctctgaacctgacggtgcaactgcacagacatcagcagatggttcccaggctcagaatctggagtcccggacaataattcggggcaagaggacccgcaagattaataacttgaatgttgaagagaacagcagtggggatcagaggcgggccccactggctgcagggacctggaggtctgcaccagttccagtgaccactcagaacccacctggcgcaccccccaatgtgctctggcagacgccattggcttggcagaacccctcaggctggcaaaaccagacagccaggcagaccccaccagcacgtcagagccctccagctaggcagaccccaccagcctggcagaacccagtcgcttggcagaacccagtgatttggccaaacccagtaatctggcagaacccagtgatctggccaaaccccattgtctggcccggccctgttgtctggccgaatccactggcctggcagaatccacctggatggcagactccacctggatggcagaccccaccgggctggcagggtcctccagactggcaaggtcctcctgactggccgctaccacccgactggccactgccacctgattggccacttcccactgactggccactaccacctgactggatccccgctgattggccaattccacctgactggcagaacctgcgcccctcgcctaacctgcgcccttctcccaactcgcgtgcctcacagaacccaggtgctgcacagccccgagatgtggcccttcttcaggaaagagcaaataagttggtcaagtacttgatgcttaaggactacacaaaggtgcccatcaagcgctcagaaatgctgagagatatcatccgtgaatacactgatgtttatccagaaatcattgaacgtgcatgctttgtcctagagaagaaatttgggattcaactgaaagaaattgacaaagaagaacacctgtatattctcatcagtacccccgagtccctggctggcatactgggaacgaccaaagacacacccaagctcggtctcctcttggtgattctgggtgtcatcttcatgaatggcaaccgtgccagtgaggctgtcctctgggaggcactacgcaagatgggactgcgtcctggggtgagacatcccctccttggagatctaaggaaacttctcacctatgagtttgtaaagcagaaatacctggactacagacgagtgcccaacagcaaccccccggagtatgagttcctctggggcctccgttcctaccatgagactagcaagatgaaagtgctgagattcattgcagaggttcagaaaagagaccctcgtgactggactgcacagttcatggaggctgcagatgaggccttggatgctctggatgctgctgcagctgaggccgaagcccgggctgaagcaagaacccgcatgggaattggagatgaggctgtgtctgggccctggagctgggatgacattgagtttgagctgctgacctgggatgaggaaggagattttggagatccctggtccagaattccatttaccttctgggccagataccaccagaatgcccgctccagattccctcagacctttgccggtcccattattggtcctggtggtacagccagtgccaacttcgctgccaactttggtgccattggtttcttctgggttgagtgagatgttggatattgctatcaatcgcagtagtctttcccctgtgtgagctgaagcctcagattccttctaaacacagctatctagagagccacatcctgttgactgaaagtggcatgcaagataaatttatttgctgttccttgtctactgctttttttccccttgtgtgctgtcaagttttggtatcagaaataaacattgaaattgcaaagtgaaaaaaaaaaaaaaaaaaaa

SEQ ID NO: 1703 - DNA, 4459 bp, Homo sapiens
ctctcagtgtctccaactttgcgctggaagaaaaacttcccgcgcgccggcagaactgcagcgcctccttttagtgactccgggagcttcggctgtagccggctctgcgcgcccttccaacgaataatagaaattgttaattttaacaatccagagcaggccaacgaggctttgctctcccgacccgaactaaagctccctcgctccgtgcgctgctacgagcggtgtctcctggggctccaatgcagcgagctgtgcccgaggggttcggaaggcgcaagctgggcagcgacatggggaacgcggagcgggctccggggtctcggagctttgggcccgtacccacgctgctgctgctcgccgcggcgctactggccgtgtcggacgcactcgggcgcccctccgaggaggacgaggagctagtggtgccggagctggagcgcgccccgggacacgggaccacgcgcctccgcctgcacgcctttgaccagcagctggatctggagctgcggcccgacagcagctttttggcgcccggcttcacgctccagaacgtggggcgcaaatccgggtccgagacgccgcttccggaaaccgacctggcgcactgcttctactccggcaccgtgaatggcgatcccagctcggctgccgccctcagcctctgcgagggcgtgcgcggcgccttctacctgctgggggaggcgtatttcatccagccgctgcccgccgccagcgagcgcctcgccaccgccgccccaggggagaagccgccggcaccactacagttccacctcctgcggcggaatcggcagggcgacgtcggcggcacgtgcggggtcgtggacgacgagccccggccgactgggaaagcggagaccgaagacgaggacgaagggactgagggcgaggacgaaggggctcagtggtcgccgcaggacccggcactgcaaggcgtaggacagcccacaggaactggaagcataagaaagaagcgatttgtgtccagtcaccgctatgtggaaaccatgcttgtggcagaccagtcgatggcagaattccacggcagtggtctaaagcattaccttctcacgttgttttcggtggcagccagattgtacaaacaccccagcattcgtaattcagttagcctggtggtggtgaagatcttggtcatccacgatgaacagaaggggccggaagtgacctccaatgctgccctcactctgcggaacttttgcaactggcagaagcagcacaacccacccagtgaccgggatgcagagcactatgacacagcaattcttttcaccagacaggacttgtgtgggtcccagacatgtgatactcttgggatggctgatgttggaactgtgtgtgatccgagcagaagctgctccgtcatagaagatgatggtttacaagctgccttcaccacagcccatgaattaggccacgtgtttaacatgccacatgatgatgcaaagcagtgtgccagccttaatggtgtgaaccaggattcccacatgatggcgtcaatgctttccaacctggaccacagccagccttggtctccttgcagtgcctacatgattacatcatttctggataatggtcatggggaatgtttgatggacaagcctcagaatcccatacagctcccaggcgatctccctggcacctcgtacgatgccaaccggcagtgccagtttacatttggggaggactccaaacactgccccgatgcagccagcacatgtagcaccttgtggtgtaccggcacctctggtggggtgctggtgtgtcaaaccaaacacttcccgtgggcggatggcaccagctgtggagaagggaaatggtgtatcaacggcaagtgtgtgaacaaaaccgacagaaagcattttgatacgccttttcatggaagctggggaatgtgggggccttggggagactgttcgagaacgtgcggtggaggagtccagtacacgatgagggaatgtgacaacccagtcccaaagaatggagggaagtactgtgaaggcaaacgagtgcgctacagatcctgtaaccttgaggactgtccagacaataatggaaaaacctttagagaggaacaatgtgaagcacacaacgagttttcaaaagcttcctttgggagtgggcctgcggtggaatggattcccaagtacgctggcgtctcaccaaaggacaggtgcaagctcatctgccaagccaaaggcattggctacttcttcgttttgcagcccaaggttgtagatggtactccatgtagcccagattccacctctgtctgtgtgcaaggacagtgtgtaaaagctggttgtgatcgcatcatagactccaaaaagaagtttgataaatgtggtgtttgcgggggaaatggatctacttgtaaaaaaatatcaggatcagttactagtgcaaaacctggatatcatgatatcatcacaattccaactggagccaccaacatcgaagtgaaacagcggaaccagaggggatccaggaacaatggcagctttcttgccatcaaagctgctgatggcacatatattcttaatggtgactacactttgtccaccttagagcaagacattatgtacaaaggtgttgtcttgaggtacagcggctcctctgcggcattggaaagaattcgcagctttagccctctcaaagagcccttgaccatccaggttcttactgtgggcaatgcccttcgacctaaaattaaatacacctacttcgtaaagaagaagaaggaatctttcaatgctatccccactttttcagcatgggtcattgaagagtggggcgaatgttctaagtcatgtgaattgggttggcagagaagactggtagaatgccgagacattaatggacagcctgcttccgagtgtgcaaaggaagtgaagccagccagcaccagaccttgtgcagaccatccctgcccccagtggcagctgggggagtggtcatcatgttctaagacctgtgggaagggttacaaaaaaagaagcttgaagtgtctgtcccatgatggaggggtgttatctcatgagagctgtgatcctttaaagaaacctaaacatttcatagacttttgcacaatggcagaatgcagttaagtggtttaagtggtgttagctttgagggcaaggcaaagtgaggaagggctggtgcagggaaagcaagaaggctggagggatccagcgtatcttgccagtaaccagtgaggtgtatcagtaaggtgggattatgggggtagatagaaaaggagttgaatcatcagagtaaactgccagttgcaaatttgataggatagttagtgaggattattaacctctgagcagtgatatagcataataaagccccgggcattattattattatttcttttgttacatctattacaagtttagaaaaaacaaagcaattgtcaaaaaaagttagaactattacaacccctgtttcctggtacttatcaaataacttagtatcatgggggttgggaaatgaaaagtaggagaaaagtgagattttactaagacctgttttactttaccttcactaacaatggggggagaaaggagtacaaataggatctttgaccagcactgtttatggctgctatggtttcagagaatgtttatacattatttctaccgagaattaaaacttcagattgttcaacatgagagaaaggctcagcaacgtgaaataacgcaaatggcttcctctttccttttttggaccatctcagtctttatttgtgtaattcattttgaggaaaaaacaactccatgtatttattcaagtgcattaaagtctacaatggaaaaaaagcagtgaagcattagatgctggtaaaagctagaggagacacaatgagcttagtacctccaacttcctttctttcctaccatgtaaccctgctttgggaatatggatgtaaagaagtaacttgtgtctcatgaaaatcagtacaatcacacaaggaggatgaaacgccggaacaaaaatgaggtgtgtagaacagggtcccacaggtttggggacattgagatcacttgtcttgtggtggggaggctgctgaggggtagcaggtccatctccagcagctggtccaacagtcgtatcctggtgaatgtctgttcagctcttctgtgagaatatgattttttccatatgtatatagtaaaatatgttactataaattacatgtactttataagtattggtttgggtgttccttccaagaaggactatagttagtaataaatgcctataataacatatttatttttatacatttatttctaatgaaaaaaacttttaaattatatcgcttttgtggaagtgcatataaaatagagtatttatacaatatatgttactagaaataaaagaacacttttggaaaaaaaaaaaaaaaaaaaaa

SEQ ID NO: 1704 - DNA, 2937 bp, Homo sapiens
acgcgtccgcttcggaatgagagactcaaccataatagaaagaatggagaactattaaccaccattcttcagtgggctgtgattttcagaggggaatactaagaaatggttttccatactggaacccaaaggtaaagacactcaaggacagacatttttggcagagcatagatgaaaatggcaagttccctggctttccttctgctcaactttcatgtctccctcttcttggtccagctgctcactccttgctcagctcagttttctgtgcttggaccctctgggcccatcctggccatggtgggtgaagacgctgatctgccctgtcacctgttcccgaccatgagtgcagagaccatggagctgaggtgggtgagttccagcctaaggcaggtggtgaacgtgtatgcagatggaaaggaagtggaagacaggcagagtgcaccatatcgagggagaacttcgattctgcgggatggcatcactgcagggaaggctgctctccgaatacacaacgtcacagcctctgacagtggaaagtacttgtgttatttccaagatggtgacttctacgaaaaagccctggtggagctgaaggttgcagcattgggttctgatcttcacattgaagtgaagggttatgaggatggagggatccatctggagtgcaggtccactggctggtacccccaaccccaaataaagtggagcgacaccaagggagagaacatcccggctgtggaagcacctgtggttgcagatggagtgggcctgtatgcagtagcagcatctgtgatcatgagaggcagctctggtgggggtgtatcctgcatcatcagaaattccctcctcggcctggaaaagacagccagcatatccatcgcagaccccttcttcaggagcgcccagccctggatcgcggccctggcagggaccctgcctatctcgttgctgcttctcgcaggagccagttacttcttgtggagacaacagaaggaaaaaattgctctgtccagggagacagaaagagagcgagagatgaaagaaatgggatacgctgcaacagagcaagaaataagcctaagagagaagctccaggaggaactcaagtggaggaaaatccagtacatggctcgtggagagaagtctttggcctatcatgaatggaaaatggccctcttcaaacctgcggatgtgattctggatccagacacggcaaacgccatcctccttgtttctgaggaccagaggagtgtgcagcgtgctgaagagccgcgggatctgccagacaaccctgagagatttgaatggcgttactgtgtccttggctgtgaaaacttcacatcagggagacattactgggaggtggaagtgggggacagaaaagagtggcatattggggtatgtagtaagaacgtggagaggaaaaaaggttgggtcaaaatgacaccggagaacggatactggactatgggcctgactgatgggaataagtatcgggctctcactgagcccagaaccaacctgaaacttcctgagcctcctaggaaagtggggatcttcctggactatgagactggagagatctcgttctataatgccacagatggatctcatatctacacctttccgcacgcctctttctctgagcctctatatcctgttttcagaattttgaccttggagcccactgccctgaccatttgcccaataccaaaagaagtagagagttcccccgatcctgacctagtgcctgatcattccctggagacaccactgaccccgggcttagctaatgaaagtggggagcctcaggctgaagtaacatctctgcttctccctgcccaccctggagctgaggtctccccttctgcaacaaccaatcagaaccataagctacaggcacgcactgaagcactttactgatattcattccattattccatatgacagttgttttgagtttcgtaccaccttattgtccccttatacagataaggaaactggggtgcagaaaggtgaattaactttacaaagtagacatgacaagtgaacagcagagctgggatctaaacagcaataactaacattaacagagaatttaaaatgttcttagtgctgtgttataagctttggtggatgtcactcctttaatcctcacaacaccctgtcgggtagtcatattttgcaagtatggaagctgaggcagggcaacatgaagtaacttacataattcatacagtaatttgtgcagttgggagatgttcagccttagtccctggctaattgcctgttcttttccagcctgattttttttcccacaggaagagcccacatgtagccctgaggtttccttcccaggacagctgcagggtagagatcattttaagtgcttgtggagttgacatccctattgactctttcccagctgatatcagagacttagacccagcactccttggattagctctgcagagtgtcttggttgagagaataacctcatagtaccaacatgacatgtgacttggaaagagactagaggccacacttgataaatcatggggcacagatatgttcccacccaacaaatgtgataagtgattgtgcagccagagccagccttccttcaatcaaggtttccaggcagagcaaataccctagagattctctgtgatataggaaatttggatcaaggaagctaaaagaattacagggatgtttttaatcccactatggactcagtctcctggaaataggtctgtccactcctggtcattggtggatgttaaacccatattcctttcaactgctgcctgctagggaaaactgctcctcattatcatcactattattgctcaccactgtatcccctctacttggcaagtggttgtcaagttctagttgttcaataaatgtgttaataatgaaaaaaaaaaa

SEQ ID NO: 1705 - DNA, 1785 bp, Homo sapiens
agcctagttacagattgcactgcgtcagactgttccacacccagaagacgtcaggtgacttcagtcctgctgcagttgtgcagcagaggagactgcagacttcggttgaggaaacgggtatttcatgtctcagggagtaggtttgtgcagttacagcttttctgttggtatgcataattaataattgggctgcaaagcagatcgtgacaagagatggacggtcagaagaaaaattggaaggacaaggttgttgacctcctgtactggagagacattaagaagactggagtggtgtttggtgccagcctattcctgctgctttcattgacagtattcagcattgtgagcgtaacagcctacattgccttggccctgctctctgtgaccatcagctttaggatatacaagggtgtgatccaagctatccagaaatcagatgaaggccacccattcagggcatatctggaatctgaagttgctatatctgaggagttggttcagaagtacagtaattctgctcttggtcatgtgaactgcacgataaaggaactcaggcgcctcttcttagttgatgatttagttgattctctgaagtttgcagtgttgatgtgggtatttacctatgttggtgccttgtttaatggtctgacactactgattttggctctcatttcactcttcagtgttcctgttatttatgaacggcatcaggcacagatagatcattatctaggacttgcaaataagaatgttaaagatgctatggctaaaatccaagcaaaaatccctggattgaagcgcaaagctgaatgaaaacgcccaaaataattagtaggagttcatctttaaaggggatattcatttgattatacgggggagggtcagggaagaacgaaccttgacgttgcagtgcagtttcacagatcgttgttagatctttatttttagccatgcactgttgtgaggaaaaattacctgtcttgactgccatgtgttcatcatcttaagtattgtaagctgctatgtatggatttaaaccgtaatcatatctttttcctatctgaggcactggtggaataaaaaacctgtatattttactttgttgcagatagtcttgccgcatcttggcaagttgcagagatggtggagctagaaaaaaaaaaaaaaaaagcccttttcagtttgtgcactgtgtatggtccgtgtagattgatgcagattttctgaaatgaaatgtttgtttagacgagatcataccggtaaagcaggaatgacaaagcttgcttttctggtatgttctaggtgtattgtgacttttactgttatattaattgccaatataagtaaatatagattatatatgtatagtgtttcacaaagcttagacctttaccttccagccaccccacagtgcttgatatttcagagtcagtcattggttatacatgtgtagttccaaagcacataagctagaagaagaaatatttctaggagcactaccatctgttttcaacatgaaatgccacacacatagaactccaacaacatcaatttcattgcacagactgactgtagttaattttgtcacagaatctatggctgaatctaatgctccaaaaatgttgtttgttgcaaataccaacattgttatgccagaaattttattccaaatgagattatccatgtggttaactggactgacctaaacgtggaatgcatgtgactgtaaagcaagtccataagcttgcttaaaaaaaaaaaaaaaagggggaggttcctgggggt

SEQ ID NO: 1706 - DNA, 3455 bp, Homo sapiens
cgcttctgtggccacggcagatgaaacagaaaggctaaagagggctggagtcaggggacttctcttccaccagcttcacggtgatgatatggcatctgccagctctagccgggcaggagtggccctgccttttgagaagtctcagctcactttgaaagtggtgtccgcaaagcccaaggtgcataatcgtcaacctcgaattaactcctacgtggaggtggcggtggatggactccccagtgagaccaagaagactgggaagcgcattgggagctctgagcttctctggaatgagatcatcattttgaatgtcacggcacagagtcatttagatttaaaggtctggagctgccataccttgagaaatgaactgctaggcaccgcatctgtcaacctctccaacgtcttgaagaacaatgggggcaaaatggagaacatgcagctgaccctgaacctgcagacggagaacaaaggcagcgttgtctcaggcggaaaactgacaattttcctggacgggccaactgttgatctgggaaatgtgcctaatggcagtgccctgacagatggatcacagctgccttcgagagactccagtggaacagcagtagctccagagaaccggcaccagccccccagcacaaactgctttggtggaagatcccggacgcacagacattcgggtgcttcagccagaacaaccccagcaaccggcgagcaaagccccggtgctcggagccggcaccgccagcccgtcaagaactcaggccacagtggcttggccaatggcacagtgaatgatgaacccacaacagccactgatcccgaagaaccttccgttgttggtgtgacgtccccacctgctgcacccttgagtgtgaccccgaatcccaacacgacttctctccctgccccagccacaccggctgaaggagaggaacccagcacttcgggtacacagcagctcccagcggctgcccaggcccccgacgctctgcctgctggatgggaacagcgagagctgcccaacggacgtgtctattatgttgaccacaataccaagaccaccacctgggagcggccccttcctccaggctgggaaaaacgcacagatccccgaggcaggttttactatgtggatcacaatactcggaccaccacctggcagcgtccgaccgcggagtacgtgcgcaactatgagcagtggcagtcgcagcggaatcagctccagggggccatgcagcacttcagccaaagattcctataccagttttggagtgcttcgactgaccatgatcccctgggccccctccctcctggttgggagaaaagacaggacaatggacgggtgtattacgtgaaccataacactcgcacgacccagtgggaggatccccggacccaggggatgatccaggaaccagctttgcccccaggatgggagatgaaatacaccagcgagggggtgcgatactttgtggaccacaatacccgcaccaccacctttaaggatcctcgcccggggtttgagtcggggacgaagcaaggttcccctggtgcttatgaccgcagttttcggtggaagtatcaccagttccgtttcctctgccattcaaatgccctacctagccacgtgaagatcagcgtttccaggcagacgcttttcgaagattccttccaacagatcatgaacatgaaaccctatgacctgcgccgccggctttacatcatcatgcgtggcgaggagggcctggactatgggggcatcgccagagagtggtttttcctcctgtctcacgaggtgctcaaccctatgtattgtttatttgaatatgccggaaagaacaattactgcctgcagatcaaccccgcctcctccatcaacccggaccacctcacctactttcgctttataggcagattcatcgccatggcgctgtaccatggaaagttcatcgacacgggcttcaccctccctttctacaagcggatgctcaataagagaccaaccctgaaagacctggagtccattgaccctgagttctacaactccattgtctggatcaaagagaacaacctggaagaatgtggcctggagctgtacttcatccaggacatggagatactgggcaaggtgacgacccacgagctgaaggagggcggcgagagcatccgggtcacggaggagaacaaggaagagtacatcatgctgctgactgactggcgtttcacccgaggcgtggaagagcagaccaaagccttcctggatggcttcaacgaggtggccccgctggagtggctgcgctactttgacgagaaagagctggagctgatgctgtgcggcatgcaggagatagacatgagcgactggcagaagagcaccatctaccggcactacaccaagaacagcaagcagatccagtggttctggcaggtggtgaaggagatggacaacgagaagaggatccggctgctgcagtttgtcaccggtacctgccgcctgcccgtcgggggatttgccgaactcatcggtagcaacggaccacagaagttttgcattgacaaagttggcaaggaaacctggctgcccagaagccacacctgcttcaaccgtctggatcttccaccctacaagagctacgaacagctgagagagaagctgctgtatgccattgaggagaccgagggctttggacaggagtaaccgaggccgcccctcccacgccccccagcgcacatgtagtcctgagtcctccctgcctgagaggccactggccccgcagcccttgggaggcccccgtggatgtggccctgtgtgggaccacactgtcatctcgctgctggcagaaaagcctgatcccaggaggccctgcagttcccccgacccgcggatggcagtctggaataaagccccctagttgcctttggccccacctttgcaaagttccagagggctgaccctctctgcaaaactctcccctgtcctctagaccccaccctgggtgtatgtgagtgtgcaagggaaggtgttgcatccccaggggctgccgcagaggccggagacctcctggactagttcggcgaggagactggccactgggggtggctgttcgggactgagagcgccaagggtctttgccagcaaaggaggttctgcctgtaattgagcctctctgatgatggagatgaagtgaaggtctgagggacgggccctggggctaggccatctctgcctgcctccctagcaggcgccagcggtggaggctgagtcgcaggacacatgccggccagttaattcattctcagcaaatgaaggtttgtctaagctgcctgggtatccacgggacaaaaacagcaaactccctccagactttgtccatgttataaacttgaaagttggttgttgtttgttaggtttgccaggtttttttgtttacgcctgctgtcactttcctgtc

SEQ ID NO: 1707 - DNA, 1328 bp, Homo sapiens
atgacagagaactccgacaaagttcccattgccctggtgggacctgatgacgtggaattctgcagccccccggcgtacgctacgctgacggtgaagccctccagccccgcgcggctgctcaaggtgggagccgtggtcctcatttcgggagctgtgctgctgctctttggggccatcggggccttctacttctggaaggggagcgacagtcacatttacaatgtccattacaccatgagtatcaatgggaaactacaagatgggtcaatggaaatagacgctgggaacaacttggagacctttaaaatgggaagtggagctgaagaagcaattgcagttaatgatttccagaatggcatcacaggaattcgttttgctggaggagagaagtgctacattaaagcgcaagtgaaggctcgtattcctgaggtgggcgccgtgaccaaacagagcatctcctccaaactggaaggcaagatcatgccagtcaaatatgaagaaaattctcttatctgggtggctgtagatcagcctgtgaaggacaacagcttcttgagttctaaggtgttagaactctgcggtgaccttcctattttctggcttaaaccaacctatccaaaagaaatccagagggaaagaagagaagtggtaagaaaaattgttccaactaccacaaaaagaccacacagtggaccacggagcaacccaggcgctggaagactgaataatgaaaccagacccagtgttcaagaggactcacaagccttcaatcctgataatccttatcatcagcaggaaggggaaagcatgacattcgaccctagactggatcacgaaggaatctgttgtatagaatgtaggcggagctacacccactgccagaagatctgtgaacccctggggggctattacccatggccttataattatcaaggctgccgttcggcctgcagagtcatcatgccatgtagctggtgggtggcccgtatcttgggcatggtgtgaaatcacttcatatatcacgtgctgtaaaataagaactagctgaagagacaaccaaagaagcattaaggcaggttgatgctgatgggaccataaaatatttttacacgcagcctgagcggttattcttgacactcttaacagaatttttttaatcgttttccagaactttagtatatgcaaatgcactgaaagggtagttcaagtctaaaatgccataaccccgttatttgttattttttatttgcattgatttgccataagtcttcccttgcttgcatcttccaaagctatttcgaaataaacacgaaaatttacagtttgcc

SEQ ID NO: 1708 - DNA, 2013 bp, Homo sapiens
gcagcagctcagggccgcgccctgggctggcgtcgtgcctagccaaggagaagtttcagtcacgtgccagactttttcttaattacaaactgatagatggtcacatctcaactaacagtattgacgctgtaagagcatcagatttgaaacatatctgtattaatgaagagtgactgcatgcaaacgacaatatgtcaggaaagaaaaaagatcccatagaaatgtttcattctggacagctggtaaaagtctgtgccccaatggttcgatattcaaagttggcttttaggacactagtaagaaaatatagttgtgatctgtgttacacaccaatgattgttgccgctgattttgtcaaatctataaaagccagagacagcgaatttaccacaaatcaaggtgattgcccattgattgttcagtttgctgctaacgatgcaagacttttatctgatgctgctcgtatagtctgtccttatgcgaatggaatagacattaactgtggttgccctcagaggtgggcaatggcagaaggttatggggcttgcttaataaacaagccagagcttgttcaagacatggtgaaacaagtaagaaatcaagtggaaacccctggattttcagtttctattaaaataaggatcaatgatgaccttaaaagaactgtagatctttgtcaaaaggctgaagcaacaggagtttcatggattacagtccatggaagaactgctgaagaaagacatcagccagtgcactatgattccattaaaataattaaggaaaatatgtgtatacctgtaattgctaatggagacatcagaagcttaaaggaagcagaaaatgtgtggcggattactgggacagatggtgtgatggttgcaagaggactcttagcaaacccggccatgtttgctggatatgaggaaaccccactgaaatgcatctgggactgggttgacattgctcttgaactcgggactccttacatgtgtttccatcaacatttaatgtacatgatggaaaagataacttcaaggcaggaaaaaagggtatttaatgctctgtcaagcacatcagcaatcatagattaccttacagaccattatggcatttgactagacttcccaaataattttaatatatacttttagacccacagtgaaaccacagaaggtcatattttgtaccttaaaccagtagctctcaaattttagtataaaaacaattcctgggagcgttttttaaaaatcagttgtagacaccaccctcagagattctgattaggtagatctggagtagacccagaaatacacagtttaaagaaaacccagtggttcaaacatcctgatcatcctaggcaaacattgacaaatactgctctgaatcctgttctatagatattggggggatgggtagagtgggaattttttcctaatcatgtttttaacattttaaaataaaatttaatactaagaaattatggcttatagtatctataaattaacaagaagtatgcaggtgcaaaaaagtggtggaacaaataccaacatccatccaaaatgaaaaagaacaggaaattctgaatagaattgcactcagaacttatattaaaaattccatttggttaatgacattaaatttggtacatttcaaaacttctggtcctccaaagattgaaagcttaataatagctcctagctaaaaagataaaattaattgcaatctaccatatcttaaggtataggaaatttggtgtcaacctggagatgattatatatttgaaatatttcctagagaatagtaaccaggttttgtttttaactttaaaacctaattacttttgtgcctctcagccgttgattgtaactttaaatgccatggtttggagtgttattaatagattttgttatcggtgggcatgcactgcaagaattaagtatctcagactgaaataaaaccgtgataataagtatattgttgccacagaaactgtataggaacataaaaaaaaaa

SEQ ID NO: 1709 - DNA, 1067 bp, Homo sapiens
ctgacatcaggagtttgaggccggcttggaacatggtgaaatcctgtctgtactagaaatgcaaaaattagctgggcgtggtggtgtgtgtctgtgatcccagctgctcggcctcccaaggtgctgggattacaggcgtgagccaccgcgtctggcctcagccaaggtttttaagtaacatatttcagcattggctctacagcgttgcagaacatgaacgattggatgcccatcgccaaggagtatgatccactcaaagcgggcagcattgatggcaccgatgaagacccacacgaccgcgcggtctggagggcaatgctggcacgatatgtccccaacaaaggtgtcataggagatcccctcctcaccctgtttgtggccagactaaacttgcagaccaaggaggacaaattaaaggaagtcttttcccgctatggtgacatccggcggcttcggctggtcagggacttggtcacaggtttttcaaagggctacgccttcatcgaatacaaggaggagcgtgccgtgatcaaagcttaccgagatgctgatggcctggttattgaccagcatgagatatttgtggactacgagctggaaaggactctcaaagggtggatccctcggcgacttggaggcggtcttgggggaaaaaaggagtctgggcaactgagatttgggggacgggaccggccttttcgaaaacctattaacttgccagttgttaaaaacgacctctatagagagggaaaacgggaaaggcgggagcgatctcgatcccgagaaagacactgggactcgaggacaagggatcgagaccatgacaggggccgggagaagagatggcaagaaagagagccgaccagggtgtggcccgacaatgactgggagagagagagggacttcagagatgacaggatcaaggggagggagaagaaggaaagaggcaagtagaggcccaacagcagaaccccaaagtgaagttacagtggaaatgagtggagggggattgtctttcaacgcagcgtgagtctaatggttgaataaaacttactgatgatcaaaaa

SEQ ID NO: 1710 - DNA, 2114 bp, Homo sapiens
cacactgctcagggaagagcctgctacggtggactgtgagactcagtgcactgtcctcctcccagcgaccccacgctggaccccctgccggaccctccacccttcggcccccaagcttcccaggggcttcctttggactggactgtccctgctcatccattctcctgccacccccagacctcctcagctccaggttgccacctcctctcgccagagtgatgaggtcccggcttctgctctccgtggcccatctgcccacaattcgggagaccacggaggagatgctgcttgggggtcctggacaggagcccccaccctctcctagcctggatgactacgtgaggtctatatctcgactggcacagcccacctctgtgctggacaaggccacggcccagggccaacccaggccaccccacaggccagcccaggcctgccggaagggccgccctgctgtgtccctgcgagacatcaccgcacgtttcagtggccagcagcccacactgcccatggctgatactgtggaccccctggactggctttttggggagtcccaggaaaagcagccaagccagagggacctgccaaggaggactggcccctctgctggcctctggggtccacatagacagatggacagcagcaagcccatgggggcccccagagggaggctctgtgaagccaggatgcctgggcattccctggcaagaccaccgcaggatgggcagcagagctctgacctaagaagctggacttttgggcagtctgcccaagccatggcctcccgccaccgcccccgccccagcagtgtcctcagaacactctactcgcacctcccggtgatccatgaactctgacccctccccagtaaaggcttctgtagagagcatgctgggtctgcatctcctctcgtctcctccatggtggtcactgcccctggcaggtctctgaaagggaaatgcttttctgcagaggccccttcttgggcagttcacagttagacccaccccctctgaatatgataacagcctgtttcacatgaggagatgttaccaatcccgttcgctctgacccttgctggctgatcaccttgagcaacttacttaacatctgtgttcctcagtttctcatgggtaatatagggataattactggcacctgcctcccaggccattctgacgtgtaccgcatataggagcccactggctgagtagctaccatcatcgctggtggggaaactggtggtaggggtgtgagggtagtgggggtgtcagcccccaggtgtttcagaacaaggcctcgggcactcccaagtctgcctcttggctcccaccctcaaagcccatgttctgtgaggcccaagagaacacatggagtcttagcaaatgcactaatgtattccgggggactgtcacctggcaccactggggcactctgctggctacaactcatacgtcctgtggtggcattgggagagttcccccatgatgagggccaagatagaatctgtaccactcagtgctaccatccccacccctacaccacttccacacaggggcctcatggcatggtcagggtcccagctgtgggtgagagcagggcactgtccagctgtccactggggaagtcaagatgtcctaaggcccaggccagggcatctggagtctgaaggaccctagttcctagaggcatctggcagcaagaaggtgaggcatcagggaacgggaatcaggctgggactgatcagaggtgaagggacagagagaggagaggaggaagattgagctggggcaacagccaagctcacctggcaggtctctgccacctccttctctgtgagctgtcagtctaggttattctctttttttgtggctatttttaattgctttggatttgttaaatgttttctgtcttctgttaagtgtgttttctctggagatagaatgtaaaccatattaaaaggaaaaagtttcagacaagcaattacccagtttccttatctataaaatggggacatcagcaatgttcttcacaccctgcaagggctgggaattgcgcatgtgaacttggagctgcatttatgagcactgtagacaaatgtttgtatctgtcac

SEQ ID NO: 1711 - DNA, 1417 bp, Homo sapiens
ccgtgccccgccgtcctccttcccgcggccgtgagggagaccgcggctcggccgtagcggagctgcgagttacagaatgtctgaaggggacagtgtgggagaatccgtccatgggaaaccttcggtggtgtacagatttttcacaagacttggacagatttatcagtcctggctagacaagtccacaccctacacggctgtgcgatgggtcgtgacactgggcctgagctttgtctacatgattcgagtttacctgctgcagggttggtacattgtgacctatgccttggggatctaccatctaaatcttttcatagcttttctttctcccaaagtggatccttccttaatggaagactcagatgacggtccttcgctacccaccaaacagaacgaggaattccgccccttcattcgaaggctcccagagtttaaattttgggatgcttctgtttgcggggacggtcggtgcagctgcaaggctggaggcggccggcagtgcccggtgctggctgcagatgcggcgctaaccttctctccccacttgaaggcatgcggctaccaagggcatccttgtggctatggtctgtactttcttcgacgctttcaacgtcccggtgttctggccgattctggtgatgtacttcatcatgctcttctgtatcacgatgaagaggcaaatcaagcacatgattaagtaccggtacatcccgttcacacatgggaagagaaggtacagaggcaaggaggatgccggcaaggccttcgccagctagaagcgggactgaggctgcctcacgtgttgcaagaacagttttgagccattgttaacaatgccttttttcttcacataaagtagttgattacgagggagtcaaattttctttttaaaaaggagcttcaatgatttgtaactgaaatatcaggttctagaagaaactggcgcttaaaccaaatcgcatggatttctttttcagtgacgttaagtgtttctcacggatggaattctagtcagctgcaggcgggaagccaggcgggtggagcccatgggagcaagggcgagtggccggtccccgctgtgccaggtgggcaggcaggagcaaggcctgcgagggaggaacgggccgctccccgccagccgccttccccagcagccgcaggtggtgccagccactccacagagcccgagggatgatctagcctgattcctgcgtgtccgaaagaacttaacgttttaaaggtgattgtcaagtaactgtgtggggttctaatgccagtttcctaattccatctcactggagatgtttaaagttggcctctatcctaatgactcaaaacttggttcttaactaccatgattgcttttgagggcccggaattataaatatatattatattttaaaaaaaaaaaaaaaaa

SEQ ID NO: 1712 - DNA, 3711 bp, Homo sapiens
  misc_feature (3592)..(3592): n is a, c, g, or t
  misc_feature (3662)..(3662): n is a, c, g, or t
  misc_feature (3675)..(3675): n is a, c, g, or t
  misc_feature (3686)..(3686): n is a, c, g, or t
acagggtcgctgagaccagtgcacgagcctcttcggaagatgcatcctggactcttggccgcagaagagaaagcggttggggtctcccagggactctttctaaagggtcagtccaccatggtaggggttaacgtgggtccacccgtatagggaaaggaaagaaattgtatttgacacttcaggggggcgggtggcggacgggtctcgctgcctgattggttttgcatttcatcccaatttttttttctccactctctctccctcttttcagtttctctctctgatcccaggggaggggaaacgggaatagtgagagatcaaaaataaacctcttatgtcaagccgggaaggaagtataaataagaagggctcggcagcccactcggtgcttcccggggtggggaggaggcaggaggcggctgcgcggggctggcgcgggcaggggcggaggacgggcgcacgcgggccggggccagctgctcgcgctcggctcgggggcggcggcgcgggaggagcgggctgcgccagccagaggggccgccgggggagcgctcccgccgccgggccccgcgggcggagtcggccttgcacccgattgattccgttttcctggagagagcggccgggccgcgctcgggccgccagcacctgcccgcgcctggcgggtttttccttttcctgcgcgcagccaccgccgcagcccccatgttccccgcccccgccgccccccggtggcttccgttcctgctgctgctgctgctgctgctgctgccgctggcccgcggcgccccggcccggcccgcagccggggggcaggcctcggagctggtggtgcccacgcggttgcccggcagcgcgggcgagctcgcgctccacctgtccgccttcggcaagggcttcgtgttgcgcctggcgcccgacgacagcttcctggcgcccgagttcaagatcgagcgcctcgggggctccggccgggcgaccgggggcgagcgggggctgcgcggctgttttttttccggcaccgtgaatggggagcccgagtcgctggcggcggtcagcctgtgccgcgggctgagcggctccttcctgctggacggcgaggagttcaccatccagccgcagggcgcggggggctccctggctcagccgcaccgcctgcagcgctggggtcccgccggagcccgccccctcccgcgaggacccgagtgggaggtggagacgggagagggtcagaggcaggagagaggagaccaccaggaggacagcgaggaggagagccaagaagaggaggcagaaggcgctagcgagccgccaccgcccctgggggccacgagtaggaccaagcggtttgtgtctgaggcgcgcttcgtggagacgctgctggtggccgatgcgtccatggctgccttctacggggccgacctgcagaaccacatcctgacgttaatgtctgtggcagcccgaatctacaagcaccccagcatcaagaattccatcaacctgatggtggtaaaagtgctgatcgtagaagatgaaaaatggggcccagaggtgtccgacaatggggggcttacactgcgtaacttctgcaactggcagcggcgtttcaaccagcccagcgaccgccacccagagcactacgacacggccatcctgctcaccagacagaacttctgtgggcaggaggggctgtgtgacaccctgggtgtggcagacatcgggaccatttgtgaccccaacaaaagctgctccgtgatcgaggatgaggggctccaggcggcccacaccctggcccatgaactagggcacgtcctcagcatgccccacgacgactccaagccctgcacacggctcttcgggcccatgggcaagcaccacgtgatggcaccgctgttcgtccacctgaaccagacgctgccctggtccccctgcagcgccatgtatctcacagagcttctggacggcgggcacggagactgtctcctggatgcccctggtgcggccctgcccctccccacaggcctcccgggccgcatggccctgtaccagctggaccagcagtgcaggcagatctttgggccggatttccgccactgccccaacacctctgctcaggacgtctgcgcccagctttggtgccacactgatggggctgagcccctgtgccacacgaagaatggcagcctgccctgggctgacggcacgccgtgcgggcctgggcacctctgctcagaaggcagctgtctacctgaggaggaagtggagaggcccaagcccgtggtagatggaggctgggcaccgtggggaccctggggagaatgttctcggacctgtggaggaggagtacagttttcacaccgtgagtgcaaggaccccgagcctcagaatggaggaagatactgcctgggtcggagagccaagtaccagtcatgccacacggaggaatgcccccctgacgggaaaagcttcagggagcagcagtgtgagaagtataatgcctacaattacactgacatggacgggaatctcctgcagtgggtccccaagtatgctggggtgtccccccgggaccgctgcaagttgttctgccgagcccgggggaggagcgagttcaaagtgttcgaggccaaggtgattgatggcaccctgtgtgggccagaaacactggccatctgtgtccgtggccagtgtgtcaaggccggctgtgaccatgtggtggactcgcctcggaagctggacaaatgcggggtgtgtgggggcaaaggcaactcctgcaggaaggtctccgggtccctcacccccaccaattatggctacaatgacattgtcaccatcccagctggtgccactaatattgacgtgaagcagcggagccacccgggtgtgcagaacgatgggaactacctggcgctgaagacggctgatgggcagtacctgctcaacggcaacctggccatctctgccatagagcaggacatcttggtgaaggggaccatcctgaagtacagcggctccatcgccaccctggagcgcctgcagagcttccggcccttgccagagcctctgacagtgcagctcctgacagtccctggcgaggtcttccccccaaaagtcaaatacaccttctttgttcctaatgacgtggactttagcatgcagagcagcaaagagagagcaaccaccaacatcatccagccgctgctccacgcacagtgggtgctgggggactggtctgagtgctctagcacctgcggggccggctggcagaggcgaactgtagagtgcagggacccctccggccaggcctctgccacctgcaacaaggctctgaaacccgaggatgccaagccctgcgaaagccagctgtgccccctgtgattcaggggggcaggggccagtcttgtgctcctggacatgcggtactgaggtgcagacaaggtctccactgtggtgactgggtcccttggccatatcaaggcagcacggcccacccaggcctcccattgccgcaacccctccagtactgcacaaattcctaagggggaagagaaaaggtatggggcggcaaaacctatcatcaactgtccawtgnaatggaacttgctcgggttcaattaaaggcataagttaaagtaaattcattatgatcaacagacctcacntcatctgttgcangatacaactantaaaaaaaaaaaaaaaaaaaaaaaa

SEQ ID NO: 1713 - DNA, 5533 bp, Homo sapiens
cttgactcaatcctgcaagcaagtgtgtgtgtgtccccatcccccgccccgttaacttcatagcaaataacaaatacccataaagtcccagtcgcgcagcccctccccgcgggcagcgcactatgctgctcgggtgggcgtccctgctgctgtgcgcgttccgcctgcccctggccgcggtcggccccgccgcgacacctgcccaggataaagccgggcagcctccgactgctgcagcagccgcccagccccgccggcggcagggggaggaggtgcaggagcgagccgagcctcccggccacccgcaccccctggcgcagcggcgcaggagcaaggggctggtgcagaacatcgaccaactctactccggcggcggcaaggtgggctacctcgtctacgcgggcggccggaggttcctcttggacctggagcgagatggttcggtgggcattgctggcttcgtgcccgcaggaggcgggacgagtgcgccctggcgccaccggagccactgcttctatcggggcacagtggacgctagtccccgctctctggctgtctttgacctctgtgggggtctcgacggcttcttcgcggtcaagcacgcgcgctacaccctaaagccactgctgcgcggaccctgggcggaggaagaaaaggggcgcgtgtacggggatgggtccgcacggatcctgcacgtctacacccgcgagggcttcagcttcgaggccctgccgccgcgcgccagctgcgaaacccccgcgtccacaccggaggcccacgagcatgctccggcgcacagcaacccgagcggacgcgcagcactggcctcgcagctcttggaccagtccgctctctcgcccgctgggggctcaggaccgcagacgtggtggcggcggcggcgccgctccatctcccgggcccgccaggtggagctgcttctggtggctgacgcgtccatggcgcggttgtatggccggggcctgcagcattacctgctgaccctggcctccatcgccaataggctgtacagccatgctagcatcgagaaccacatccgcctggccgtggtgaaggtggtggtgctaggcgacaaggacaagagcctggaagtgagcaagaacgctgccaccacactcaagaacttttgcaagtggcagcaccaacacaaccagctgggagatgaccatgaggagcactacgatgcagctatcctgtttactcgggaggatttatgtgggcatcattcatgtgacaccctgggaatggcagacgttgggaccatatgttctccagagcgcagctgtgctgtgattgaagacgatggcctccacgcagccttcactgtggctcacgaaatcggacatttacttggcctctcccatgacgattccaaattctgtgaagagacctttggttccacagaagataagcgcttaatgtcttccatccttaccagcattgatgcatctaagccctggtccaaatgcacttcagccaccatcacagaattcctggatgatggccatggtaactgtttgctggacctaccacgaaagcagatcctgggccccgaagaactcccaggacagacctacgatgccacccagcagtgcaacctgacattcgggcctgagtactccgtgtgtcccggcatggatgtctgtgctcgcctgtggtgtgctgtggtacgccagggccagatggtctgtctgaccaagaagctgcctgcggtggaagggacgccttgtggaaaggggagaatctgcctgcagggcaaatgtgtggacaaaaccaagaaaaaatattattcaacgtcaagccatggcaactggggatcttggggatcctggggccagtgttctcgctcatgtggaggaggagtgcagtttgcctatcgtcactgtaataaccctgctcccagaaacaacggacgctactgcacagggaagagggccatctaccgctcctgcagtctcatgccctgcccacccaatggtaaatcatttcgtcatgaacagtgtgaggccaaaaatggctatcagtctgatgcaaaaggagtcaaaacttttgtggaatgggttcccaaatatgcaggtgtcctgccagcggatgtgtgcaagctgacctgcagagccaagggcactggctactatgtggtattttctccaaaggtgaccgatggcactgaatgtaggccgtacagtaattccgtctgcgtccgggggaagtgtgtgagaactggctgtgacggcatcattggctcaaagctgcagtatgacaagtgcggagtatgtggaggagacaactccagctgtacaaagattgttggaacctttaataagaaaagtaagggttacactgacgtggtgaggattcctgaaggggcaacccacataaaagttcgacagttcaaagccaaagaccagactagattcactgcctatttagccctgaaaaagaaaaacggtgagtaccttatcaatggaaagtacatgatctccacttcagagactatcattgacatcaatggaacagtcatgaactatagcggttggagccacagggatgacttcctgcatggcatgggctactctgccacgaaggaaattctaatagtgcagattcttgcaacagaccccactaaaccattagatgtccgttatagcttttttgttcccaagaagtccactccaaaagtaaactctgtcactagtcatggcagcaataaagtgggatcacacacttcgcagccgcagtgggtcacgggcccatggctcgcctgctctaggacctgtgacacaggttggcacaccagaacggtgcagtgccaggatggaaaccggaagttagcaaaaggatgtcctctctcccaaaggccttctgcgtttaagcaatgcttgttgaagaaatgttagcctgtggttatgatcttatgcacaaagataactggaggattcagcaccgatgcagtcgtggtgaacaggaggtctacctaacgcacagaaagtcatgcttcagtgacattgtcaacaggagtccaattatgggcagaatctgctctctgtgaccaaaagaggatgtgcactgcttcacgtgacagtggtgaccttgcaatatagaaaaacttgggagttattgaacatcccctgggattacaagaaacactgatgaatgtaaaatcaggggacatttgaagatggcagaactgtctcccccttgtcacctacctctgatagaatgtctttaatggtatcataatcattttcacccataatacacagtagcttcttcttactgtttgtaaatacattctcccttggtatgtcactttatatcccctggttctattaaaatatccatatatatttctataaaaaaagtgtttgaccaaagtaggtctgcagctatttcaacttccttccgtttccagaaagagctgtggatattttactggaaattaagaacttgctgctgttttaataagatgtagtatattttctgactacaggagataaaatttcagtcaaaaaaccattttgacagcaagtatcttctgagaaattttgaaaagtaaatagatctcagtgtatctagtcacttaaatacatacacgggttcatttacttaaaacctttgactgcctgtatttttttcaggtagctagccaaattaatgcataatttcagatgtagaagtagggtttgcgtgtgtgtgtgtgatcatactcaagagtctaaaaactagtttccttgtgttggaaatttaaaaggaaaaaaatcgtatttcactgtgttttcaatttatattttcacaactactttctctctccagagctttcatctgatatctcacaatgtatgatatacgtacaaaacacacagcaagttttctatcatgtccaacacattcaacactggtatacctcctaccagcaagcctttaaaatgcgtttgtgtttgcttatttgttttgttcaagggttcagtaagacctacaatgttttgtatttcttgacttattttattagaaacattaaagatcacttggtagttagccacattgagaagtggttatcattgttaatgtggttaatgccaaaaagtggttaatattaataagactgtttccacaccataggcaataatttcttaatttaaaaaatctaagtatattcctattgtactaaatatttttcccaactggaaagcacttgattgtacccgtaagtgtttgagtgatgacatgtgatgattttcagaaagttgttgtttttgtttccatagcctgtttaagtaggttgtaagtttgaatagttagacatggaaattattttataagcacacacctaaagatatctttttagatgataaaatgtacacccccccatcaccaacctcacaacttagaaaatctaagttgtttgatttcattgggatttcttttgttgtgaaacactgcaaagccaatttttctttataaaaattcatagtaatcctgccaaatgtgcctattgttaaagatttgcatgtgaagatcttagggaaccactgtttgagttctacaagctcatgagagtttatttttattataagatgtttttaatataaaagaattatgtaactgatcactatattacatcatttcagtgggccaggaaaatagatgtcttgctgttttcagtattttcttaagaaattgcttttaaaacaaataattgttttacaaaaccaataattatcctttgaattttcatagactgactttgctttcgacgtagaaatttttttttcttaataaattatcactttgagaaatgaggcctgtacaaggctgataacctatatgtgatggagatcacccaatgccaagggcagaaagcaaacctagttaaataggtgagaaaaaaaataataatcccagtgccatttgtctgtgcaaagagaattaggagagaggttaatgttacttttttccattttggaaataattttaatcaagtaactcaaatgtgacaaaatttatttttattttttgtggttatattcccaacaacattaaaaaatactcgaggcataaatgtagttgtctcctactctgcttctcttactatactcatacatttttaatatggtttatcaatgattcatgtttccctcaaatagtgatggtttacacctgtcatggaaacaatcctagagagctcagagcaattaaaccactattccatgcttttaagtagttttctccacctttttcttatgagtctcactagattgactgaggaatgtatgtctaaattcctggagaagatgatatggattggaaactgaaattcagagaaatggagtgttcaatagataccacgaattgtgaacaaagggaaaattctatacaactcaatctaagtcagtccactttgacttcgtactgtctttcacctttccattgttgcatcttgaattttttaaaatgtctagaattcaggatgctaggggctacttctccaaaaaaaaaaaaaaaaaaaaaaaaaaaa

SEQ ID NO: 1714 - DNA, 3513 bp, Homo sapiens
  misc_feature (3414)..(3414): n is a, c, g, or t
  misc_feature (3435)..(3435): n is a, c, g, or t
  misc_feature (3469)..(3469): n is a, c, g, or t
  misc_feature (3501)..(3501): n is a, c, g, or t
cggacgaggcacgagtgaggggggaggcggtggcggcggccattttgagccgctgccgccattggagtgggccccccccctttcccccttcgcctcctgacaggaaaggtttaagggggacagagccctgggaggccgggccgggctcgggggccaccccgggggcccgggccatggatgtgcgccgtctgaaggtgaacgaacttcgcgaggagctgcagcgccgcggcctggacactcgaggcctcaagaccgagcttgctgagcggctgcaggcggcgttggaggccgaggagcctgacgacgagcgggagctcgacgccgacgacgaaccggggcgacccgggcacatcaacgaggaggtcgagaccgaggggggctccgagctggaggggaccgcgcagccaccgccgcccgggctgcagccgcacgcggagcccggcggctactcggggccggacggacattatgccatggacaatattaccaggcagaaccaattctacgatacccaagtcatcaaacaagaaaacgagtcaggctacgagaggagaccactggaaatggagcagcagcaggcctatcgtccagaaatgaagacagagatgaagcaaggagcacccaccagcttcctcccgcctgaagcttctcaactcaagccagacaggcagcaattccagagtcgaaagaggccttatgaagaaaaccggggacgggggtactttgagcaccgagaggataggaggggccgctctcctcagcctcctgctgaagaggatgaagatgactttgatgatacccttgttgctattgacacctataactgcgacctccacttcaaggtggcccgagatcggagtagtggctatccgctcacaattgagggctttgcatacctgtggtcaggagcccgtgccagctatggggtcagaaggggccgtgtatgcttcgagatgaagatcaatgaggaaatctccgtgaagcaccttccgtctacagagcctgacccccacgtggtccgtatcggctggtccctggactcctgcagcacccagctaggcgaagagcctttctcctatggctatggaggcactgggaagaagtccaccaatagccggtttgaaaactacggagacaagtttgcagagaacgatgtgattggctgctttgcggattttgaatgtggaaatgacgtggaactgtcttttaccaagaatggaaagtggatgggcattgctttccgaatccagaaggaagccttggggggtcaggccctctatcctcatgtcctggtgaagaattgcgcagtggagttcaacttcggacagagagcagagccctactgttctgtcctcccggggtttaccttcatccagcaccttccccttagtgagcgtatccggggcaccgttggaccaaagagcaaggcagaatgtgagattctgatgatggtgggcctgcctgctgctggcaagaccacatgggccatcaaacatgcagcctccaacccttccaagaagtacaacatcctgggtaccaatgccatcatggataagatgcgggtgatgggcctacgccggcagcggaactatgctggccgctgggatgtcctgatccagcaggccacccagtgcctcaaccgcctcatccagattgctgcccgcaagaaacgcaactatatcctagatcagacaaatgtttatgggtcagcccagagacgaaaaatgagaccatttgaaggcttccagcgcaaagctattgtaatttgtcccactgacgaggacctaaaagaccgaacaataaagcgaaccgacgaggaagggaaggatgtcccagatcatgcggtcttagaaatgaaagccaacttcacgttgccagatgttggggacttcctggatgaggttctgttcattgagctgcagcgggaggaagcggacaagctagtgaggcagtacaacgaggaaggccgcaaggctgggccaccccctgaaaagcgctttgacaaccgaggtggtggtggcttccgggcccgcgggggtggtggtgccttccagcgctatgaaaaccgaggaccccctggaggcaaccgtggcggcttccagaaccgagggggaggcagcggtggaggaggcaactaccgaggaggtttcaaccgcaacggaggtggtggctatagccagaaccgctggggtaacaacaaccgggataacaacaactccaacaacagaggcagctacaaccgggctccccagcaacagccgccaccacagcagcctccgccaccacagccaccaccccagcagccaccgccaccacccagctacagccctgctcggaaccccccaggggccagcacctacaataagaacagcaacatccctggctcaagcgccaataccagcacccccaccgtcagcagctacagccctccacagccgagttacagccagccaccctacaaccagggaggttacagccagggttacacaggcccaccgcctccacctccaccaccacctgcctacaactatgggagctacggcggttacaacccggccccctataccccaccgccaccccccaccgcacagacctaccctcagcccagctataaccagtatcagcagtatgcccagcagtggaaccagtactatcagaaccagggccagtggccgccatactacgggaactacgactacgggagctactccgggaacacacagggtggcacaagtacacagtagccagtgtgacccagaggctcccggaggcccctgccggcttcctccaccagcgcctgcctcggcccctcctctgcccccgccagatcccgtggtgctggggatggggtcatcccagggctgcctccctccagcccactgcctcccctctgagggggttccttcccctccatagggccaggcatttttttctggattcaaacaggcaacaatgaccttttattttctgtttgtccccacctccccaggcttccacctcctgttcttcctaccttcttcctttttgactaaataatccccacctcccttgatcatacagtgaggctacagtgactgaggggagaatcccctcctgttcactctcccaaccctgctccagcccctcagcttcccagaccctcatgcagttggttgtaaattctcccaggagctgttttactgtctacttttcagggttaaaaaaaaaatcaaaacttaaaaaaaaaaaagtttaaaaagcaaaatggggagggggaggaagcagtgacttttttttggtaattatgcgcttttttttaatttttagaatttgtctttttactgtggggtggggctgttgatatttcatcaagataaggcatttctttcccggagttcaggtgactgagggaagggcccccaaaacaaaacacanccaaaacccaaacccccaggnttcctctttttaaccccaacttttttttaccggntggcccccagtttcccccttaacttttggcancacaagggtttt

SEQ ID NO: 1715 - DNA, 1567 bp, Homo sapiens
gaattcggcacgagggagaagccaaacgtaaagacaccaggagtttctcgggcccagctgtggctgctgccggggagccccaagccttggcggtccttgctgcgaataggagtctggtcaggcgtcaggctagtccgacgaagagtgggtgtgatcagcactggaaaagatgcctgcccctgctgccacatatgaaagagtagtttacaaaaacccttccgagtaccactacatgaaagtctgcctagaatttcaagattgtggagttggactgaatgctgcacagttcaaacagctgcttatttcggctgtgaaggacctgtttggggaggttgatgccgccttacctttggacatcctaacctatgaagagaagaccttgtcagccatcttgagaatatgtagcagtggtcttgtcaaattgtggagctctttgaccctgttaggatcctataaaggcaaaaaatgtgctttccgggtgattcaggtttctccatttcttcttgcattatctggtaatagtagggaactagtattggattgaatgaatagtcttccattttggaaacgttcatccactctcatatttattttttcggtgcctgcatgtttgaagactgaagcaggctaaaagctcttgatgaaatttgagggtgctgaagatgttcccactaatttccagccatcacctttggtggggtgggcttcggaggacagtctgtctgaacctgccagtgctgaccctgcagcactttcagcatatgcacatcaaagttggagaccgcgctgaacttaggagggccttcacacagactgatgtggctaccttctcagaattaacaggggatgttaatcctttgcatttgaatgaagactttgcaaaacacaccaagtttggaaatacaattgtacatggagttttgatcaacggacttatctcagctctcctaggaactaaaatgccagggccaggctgtgtatttctttcccaggaaattagctttccagcccctttatatattggagaagttgttttagcttctgcagaagtgaaaaagctgaagcggttcattgctattattgcagtgtcatgttctgtaatagaaagtaaaaagactgttatggaaggctgggttaaagttatggttccagaagcttccaaatcctgaaatagatgttttaaagatgcaacctcaaacaccaatgctgttgttaaagagcctatggggaattgctgctctttaccaaagaatggttgataggcccagaagcccatgttagttaggggaagggagcaggaagagggttgttcaaatgcccactttccagtttggccttatgctttatgcagacttgagtgtatgcaggatttcattatctgcctgggtttttttgtttgttttttgttttttaattcaagaagtaggctgggcccggtggctcatgcctgtaatcctggcactttgggaggctgcggcaggcggatcacttgaggtcaggagtccaagaccagcctggccaacatggtgaaaccccatctctaccaaaaaaaaaaaaaaaaaaaaaa

SEQ ID NO: 1716 - DNA, 1666 bp, Homo sapiens
atttgctttctctttttcctttcttccggatgagaggctaagccataatagaaagaatggagaattattgattgaccgtctttattctgtgggctctgattctccaatgggaataccaagggatggttttccatactggaacccaaaggtaaagacactcaaggacagacatttttggcagagcatagatgaaaatggcaagttccctggctttccttctgctcaactttcatgtctccctcctcttggtccagctgctcactccttgctcagctcagttttctgtgcttggaccctctgggcccatcctggccatggtgggtgaagacgctgatctgccctgtcacctgttcccgaccatgagtgcagagaccatggagctgaagtgggtaagttccagcctaaggcaggtggtgaacgtgtatgcagatggaaaggaagtggaagacaggcagagtgcaccgtatcgagggagaacttcgattctgcgggatggcatcactgcagggaaggctgctctccgaatacacaacgtcacagcctctgacagtggaaagtacttgtgttatttccaagatggtgacttctatgaaaaagccctggtggagctgaaggttgcagcactgggttctaatcttcacgtcgaagtgaagggttatgaggatggagggatccatctggagtgcaggtccaccggctggtacccccaaccccaaatacagtggagcaacgccaagggagagaacatcccagctgtggaagcacctgtggttgcagatggagtgggcctatatgaagtagcagcatctgtgatcatgagaggcggctccggggagggtgtatcctgcatcatcagaaattccctcctcggcctggaaaagacagccagcatttccatcgcagaccccttcttcaggagcgcccagccctggatcgcagccctggcagggaccctgcctatcttgctgctgcttctcgccggagccagttacttcttgtggagacaacagaaggaaataactgctctgtccagtgagatagaaagtgagcaagagatgaaagaaatgggatatgctgcaacagagcgggaaataagcctaagagagagcctccaggaggaactcaagaggaaaaaatccagtacttgactcgtggagaggagtcttcgtccgataccaataagtcagcctgatgctctaatggaaaaatggccctcttcaagcctggtgaggaaatgcttcagatgaggctccaccttgttaaataaattggatgtatggaaaaatagactgcagaaaaggggaactcatttagctcacgagtggtcgagtgaagattgaaaattaacctctgagggccagcacagcagctcatgcctgtaatcctagcactttggaaggctgaggagggcggatcacaaggtcaggagatcaagaccatcctggctaacacggtgaaaccccgtctctactaaaaatacaaaaaataaaaaattagccgggcatggtgacgggcacctgtagtcccagctactcgggaggctgaggcaggagaatggcatgaacccggaaggcagagcttgcagtgagccgagatcacgccactgcactccagcctgggagacagagcgagactctgtctcaagaaaaaaaaaaaaaaaaaaaaa

SEQ ID NO: 1717 - DNA, 3452 bp, Homo sapiens
ctgaagcttgcatgcctgcaggtcgacccacgcgtccgcggacgcgtgggcggacgcgtgggtttttcctttcttccagaaggagatttaaccatagtagaaagaatggagaactattaactgccttccttctgtgggctgtgattttcagaggggaatgctaagaggtgattttcaatgttgggactcaaaggtgaagacactgaaggacagaatttttggcagaggaaagatcttcttcggtcaccatacttgagttagctctagggaagtggaggtttccatttggaattctatagcttcttccaggtcatagtgtctgccccccaccttccagtatctcctgatatgcagcatgaatgaaaatggcaagtttcctggccttccttctgctcaactttcgtgtctgcctccttttgcttcagctgctcatgcctcactcagctcagttttctgtgcttggaccctctgggcccatcctggccatggtgggtgaagacgctgatctgccctgtcacctgttcccgaccatgagtgcagagaccatggagctgaagtgggtgagttccagcctaaggcaggtggtgaacgtgtatgcagatggaaaggaagtggaagacaggcagagtgcaccgtatcgagggagaacttcgattctgcgggatggcatcactgcagggaaggctgctctccgaatacacaacgtcacagcctctgacagtggaaagtacttgtgttatttccaagatggtgacttctatgaaaaagccctggtggagctgaaggttgcagcactgggttctgatcttcacgttgatgtgaagggttacaaggatggagggatccatctggagtgcaggtccactggctggtacccccaaccccaaatacagtggagcaacaacaagggagagaacatcccgactgtggaagcacctgtggttgcagacggagtgggcctgtatgcagtagcagcatctgtgatcatgagaggcagctctggggagggtgtatcctgtaccatcagaagttccctcctcggcctggaaaagacagccagcatttccatcgcagaccccttcttcaggagcgcccagaggtggatcgccgccctggcacggaccctgcctgtcttgctgctgcttcttgggggagccggttacttcctgtggcaacagcaggaggaaaaaaagactcagttcagaaagaaaaagagagagcaagagttgagagaaatggcatggagcacaatgaagcaagaacaaagcacaagagtgaagctcctggaggaactcagatggagaagtatccagtatgcatctcggggagagagacattcagcctataatgaatggaaaaaggccctcttcaagcctgcggatgtgattctggatccaaaaacagcaaaccccatcctccttgtttctgaggaccagaggagtgtgcagcgtgccaaggagccccaggatctgccagacaaccctgagagatttaattggcattattgtgttctcggctgtgagagcttcatatcagggagacattactgggaggtggaggtaggggacaggaaagagtggcatataggggtgtgcagtaagaatgtgcagagaaaaggctgggtcaaaatgacacctgagaatggattctggactatggggctgactgatgggaataagtatcggactctaactgagcccagaaccaacctgaaacttcctaagccccctaagaaagtgggggtcttcctggactatgagactggagatatctcattctacaatgctgtggatggatcgcatattcatactttcctggacgtctccttctctgaggctctatatcctgttttcagaattttgaccttggagcccacggccctgagtatttgtccagcgtgaaaagaagaagagagttcctccaattctgaccgagtgctgatcattccctagagacaccagtaaccccgggcttagctaacgaaagtggggagcctcaggctgaagtaacttttctctgcttctccctgcccagctcagagctgagggcctccccctccacagcaaccaatcacaaccataaagctacaagcacgcactgaagcactttactgatactcattcaattattcatatgacagttgtttgagtttggtaccatcttattttccccttatacagataaggaaactggggtgcagaaaagtgaattgactacaaagtagacatgactagttaacaacacagctgggatctaaacagcaataactaacattaatggagaacttaaaatgctctgagtgctgtgttatgagctttggtggatgtcactcctttaatcctcgcaacaccctgtcgggtagtctcatttagcaagtatggaagttgaggcagggcaacattaagcaacttacataactcatgcagtaatttctgcagttgggagatgttcagcttcagtccccggccctatggccgttcttttccaccctgtttcttcccccataggaagaacccacctgtagccctgaggttcttttcccaggatggctccaggataaggatcactgtaggtggttgtggagttgacacccctgttgactccttcccagctgattgtcagagccttagacccagcacgccttggattagctttgcagagtgtcttggttgagagaataacctcaccgtacccacatgacacgtgatttggaaagagactagaggccacacttgataaatcatggggaacagatgtgttccacccaacaaatgtgataagtgatcatgcagccagagccagccttccttcaatcaaggtttccaggcagagcaaataccctagagattttctgtgatataggaaatttggatgaagggagctagaagaaatacagggatttttttttttttttaagatggagtcttactctgttgctaggctggagtgcagtggtgcgatctcagctccctgcaacctccacctcctgggttcaaacaattctcctgcctcagcctcccgagtactgggaatataggtgcacgccaccacacccaacaaatttttgtacttttagtacagatgagggttcactatgttggccaggatggtctcgatctcttgacctcatgatccacccacctcggtctcccaaagtgctgggattacaggcttgagccaccgggtgaccggcttacagggatatttttaatcccgttatggactctgtctccaggagaggggtctatccacccctgctcattggtggatgttaaaccaatattcctttcaactgctgcctgctagggaaaaactactcctcattatcatcattattattgctctccactgtatcccctctacctggcatgtgcttgtcaagttctagttgttcaataaatttgttaataatgctgaaaaaaaaaaaaaaaaaaaaaaaaaaaaaaaaaaaa

SEQ ID NO: 1718 - DNA, 2338 bp, Homo sapiens
ctccccagggccgagtcttccggagtcagcagagagcctggatggatcacaggaggataagcctcggggctcatgtgcggagcccacttttactgatacgggaatggtggctcacataaacaacagccggctcaaggccaagggcgtgggccagcacgacaacgcccagaactttggtaaccagagctttgaggagctgcgagcagcctgtctaagaaagggggagctcttcgaggaccccttattccctgctgaacccagctcactgggcttcaaggacctgggccccaactccaaaaatgtgcagaacatctcctggcagcggcccaaggatatcataaacaaccctctattcatcatggatgggatttctccaacagacatctgccaggggatcctcggggactgctggctgctggctgccatcggctcccttaccacctgccccaaactgctataccgcgtggtgcccagaggacagagcttcaagaaaaactatgctggcatcttccattttcagatttggcagtttggacagtgggtgaacgtggtggtagatgaccggctgcccacaaagaatgacaagctggtgtttgtgcactcaaccgaacgcagtgagttctggagtgccctgctggagaaggcgtatgccaagctgagtgggtcctatgaagcattgtcagggggcagtaccatggagggccttgaggacttcacaggaggcgtggcccagagcttccaactccagaggccccctcagaacctgctcaggctccttaggaaggccgtggagcgatcctccctcatgggttgctccattgaagtcaccagtgatagtgaactggaatccatgactgacaagatgctggtgagagggcacgcttactctgtgactggccttcaggatgtccactacagaggcaaaatggaaacactgattcgggtccggaatccctggggccggattgagtggaatggagcttggagtgacagtgccagggagtgggaagaggtggcctcagacatccagatgcagctgctgcacaagacggaggacggggagttctggatgtcctaccaagatttcctgaacaacttcacgctcctggagatctgcaacctcacgcctgatacactctctggggactacaagagctactggcacaccaccttctacgagggcagctggcgcagaggcagctccgcagggggctgcaggaaccaccctggcacgttctggaccaacccccagtttaagatctctcttcctgagggggatgacccagaggatgacgcagagggcaatgttgtggtctgcacctgcctggtggccctaatgcagaagaactggcggcatgcacggcagcagggagcccagctgcagaccattggctttgtcctctacgcggtcccaaaagagtttcagaacattcaggatgtccacttgaagaaggaattcttcacgaagtatcaggaccacggcttctcagagatcttcaccaactcacgggaggtgagcagccaactccggctgcctccgggggaatatatcattattccctccacctttgagccacacagagatgctgacttcctgcttcgggtcttcaccgagaagcacagcgagtcatgggaattggatgaagtcaactatgctgagcaactccaagaggaaaaggtctctgaggatgacatggaccaggacttcctacatttgtttaagatagtggcaggagagggcaaggagataggggtgtatgagctccagaggctgctcaacaggatggccatcaaattcaaaagcttcaagaccaagggctttggcctggatgcttgccgctgcatgatcaacctcatggataaagatggctctggcaagctggggcttctagagttcaagatcctgtggaaaaaactcaagaaatggatggacatcttcagagagtgtgaccaggaccattcaggcaccttgaactcctatgagatgcgcctggttattgagaaagcaggcatcaagctgaacaacaaggtaatgcaggtcctggtggccaggtatgcagatgatgacctgatcatagactttgacagcttcatcagctgtttcctgaggctaaagaccatgttcacattctttctaaccatggaccccaagaatactggccatatttgcttgagcctggaacagtggctgcagatgaccatgtggggatagaggcgctgtaggagcctggtcatctctaccagcagcagcagcagcgaggttctagcccaggagggtggggtgcttcttgtagccctcagctctccagtctctgctgatgaaatgggatccaggtgg

SEQ ID NO: 1719 - DNA, 2030 bp, Homo sapiens
ccgcgacggccgccgccgtgcagacgacgagtccgccctcgtcccgcgcccccggggctcgcggagccaggtctccacctctgggcaggagagttgccgaccacctcgggggtgctttctctgcgcttgaacatctatagctgcttctgaggggctgggagccgggcccctgggagagacgagccatgaaccccccacagcctctgcatttggggacctcaccttaggagagtgccatttacagcttccgccagggcaaaggagctgagcagccatcccaagcccagcccacctccctcccccggcccctggtaggcatggactagcagctgtgagcagccagagctgatgcccggcccccaggggggcagaggcgccgccaccatgagcctgggcaagctctcgcctgtgggctgggtgtccagttcacagggaaagaggcggctgactgcagacatgatcagccacccactcggggacttccgccacaccatgcatgtgggccgtggcggggatgtcttcggggacacgtccttcctcagcaaccacggtggcagctccgggagcacccatcgctcaccccgcagcttcctggccaagaagctgcagctggtgcggagggtgggggcgcccccccggaggatggcatctccccctgcaccctccccggctccaccggccatctcccccatcatcaagaacgccatctccctgccccagctcaaccaggccgcctacgacagcctcgtggttggcaagctcagcttcgacagcagccccaccagctccacggacggccactccagctacggcctggactctgggttctgcaccatctcccgcctgccccgctcggaaaagccgcatgaccgagaccgggatggttccttcccctctgagcccgggcttcgccgctctgactctctcttgtccttccgcctggacctcgaccttgggccctcactcctcagcgagctgctaggggtcatgagcctgccagaagcccctgcagctgagactccagcccccgctgcaaaccccccagcccctactgcaaaccccacgggtcctgctgcaaaccccccagccactactgcaaaccccccagcgcctgctgcaaacccctcagcacctgccgcaacccccacgggtcctgctgcaaatcccccagcccctgccgcaagctccacaccccatggacactgtcccaatggggtaacagctgggttgggcccagtggctgaggtgaagtccagcccagtgggagggggtccccgaggacctgctggccctgccctcggcaggcactggggagcaggctgggatggcggccaccactacccagagatggatgcgcggcaggagcgggtggaggtgctgccccaagcccgggcctcctgggagagcctggacgaagagtggagggcgccccaggcaggcagcaggaccccagtgcccagcacagtgcaagcaaacacctttgaatttgcggatgctgaggaggatgatgaggtcaaggtgtgaggggctggggcacggtcccagggccccacctaggtgcagagccggcccctcacctaacagctggttcctaccagaccggagaggggagaagtcatgttgcccctaaacccctccccacctctgcaggacagacatgggagggaggacagggaaggccaggcttgctctgggacttttatgctcccagaggccctgccaaactgaccacctcccccgactgccactctggacctaatagctgttccttaggccccactccatgccacccccaccagctggaggacccagcctcacagtgtgtcctttgtgccagaccaagcggcccgtggggggtggggggcagggagtgtaccacacagggccattgtctcacctcccaaagggaccgcctgcccccagctcatcccagagcgtccctgctgcaaccctgacagccggtactcccaggccggcttaccccaactaccccgccccagccaccctccttaccccagcaaaggtcaggt

SEQ ID NO: 1720 - DNA, 1626 bp, Homo sapiens
ggcacgaggccgccacccgagccggagcgggctgggccgccaaggcaagatggtggactacagcgtgtgggaccacattgaggtgtctgatgatgaagacgagacgcaccccaacatcgacacggccagtctcttccgctggcggcatcaggcccgggtggaacgcatggagcagttccagaaggagaaggaggaactggacaggggctgccgcgagtgcaagcgcaaggtggccgagtgccagaggaaactgaaggagctggaggtggccgagggcggcaaggcagagctggagcgcctgcaggccgaggcacagcagctgcgcaaggaggagcggagctgggagcagaagctggaggagatgcgcaagaaggagaagagcatgccctggaacgtggacacgctcagcaaagacggcttcagcaagagcatggtaaataccaagcccgagaagacggaggaggactcagaggaggtgagggagcagaaacacaagaccttcgtggaaaaatacgagaaacagatcaagcactttggcatgcttcgccgctgggatgacagccaaaagtacctgtcagacaacgtccacctggtgtgcgaggagacagccaattacctggtcatttggtgcattgacctagaggtggaggagaaatgtgcactcatggagcaggtggcccaccagacaatcgtcatgcaatttatcctggagctggccaagagcctaaaggtggacccccgggcctgcttccggcagttcttcactaagattaagacagccgatcgccagtacatggagggcttcaacgacgagctggaagccttcaaggagcgtgtgcggggccgtgccaagctgcgcatcgagaaggccatgaaggagtacgaggaggaggagcgcaagaagcggctcggccccggcggcctggaccccgtcgaggtctacgagtccctccctgaggaactccagaagtgcttcgatgtgaaggacgtgcagatgctgcaggacgccatcagcaagatggaccccaccgacgcaaagtaccacatgcagcgctgcattgactctggcctctgggtccccaactctaaggccagcgaggccaaggagggagaggaggcaggtcctggggacccattactggaagctgttcccaagacgggcgatgagaaggatgtcagtgtgtgacctgccccagctaccaccgccacctgcttccaggcccctatgtgccccttttcagaaaacagatagatgccatctcgcccgctcctgacttcctctacttgcgctgctcggcccagcctggggggcccgcccagccctccctggcctctccactgtctccactctccagcgcccattcaagtctctgctttgagtcaaggggcttcactgcctgcagccccccatcagcattatgccaaaggcccgggggtccggggaagggcagaggtcaccaggctggtctaccaggtagttggggagggtccccagccaaggggccggctctcgtcactgggctctgttttcactgttcgtctgctgtctgtgtcttctatttggcaaacagcaatgatcttccaataaaagatttcagatgctcaaaaaaaaaaaaaaaaaaaaaa

SEQ ID NO: 1721 - DNA, 1073 bp, Homo sapiens
gcacgaggcctcgtgccggcggcccaggcacggagaggcggcgagaccgcagaattcccgtactgattagtcaacagtggaaaatctgaagagatgcaagcaggaaaaagaaattaaaccaggcctgaggagcgatgcgacaggcatgatggaggtcgagtcctcctactcggacttcatctcctgtgaccggacaggccgtcggaatgcggtccctgacatccagggagactcagaggctgtgagcgtgaggaagctggctggagacatgggcgagctggcactcgagggggcagaaggacaggtggagggaagcgccccagacaaggaagctggcaaccagccccagagcagcgatgggaccacctcgtcttgaatctgaccttgtccaagaaggctggacgagagaccttctgtcccctcccagagggggaaccctggcactggcccagcagcctcttctctgagctccatgtcccagataaaccaggccagactgagaaggctccccagaggcctctgtggcctccactccgggaaagccctctgcccacacccacaggcttcacattcccaccaccttcgcaccgtgcccaggtacactttcaagacactgtaaccacaagatgttatttattgagctggcgccgggacttgggcggggcctgccctacagtgagcagcccacacaggaacgctcctctcgcgagcggcccgggcagggaccctgtcccaacaccaacacctcctctccagcccaatcttctgggtccagacctgcttgtcccttttttagaaaacacttttaaactttttaaaaattttaaaccttttttcagcagatatggagagagctgacaatcaattcacattttttaagccattttagctaaactgtcattgtgcatctctgaggttccctcatggagctccacagatccatttttagggaagggattttggctcaaaacgatctgaccacctctgccctgtccaccaggataagtgacacctaggacccaggaaataaatgccgatgatttgtgtaaaaaaaaaaaaaaaaaaaaaaaaaa

SEQ ID NO: 1722 - DNA, 1070 bp, Homo sapiens
gcgattgctggggctgcagcgctgcctccgagaccgagagtgggtggagcgggtcttcctggaagggtgcgataaggccgggcgaggtgcctgggatgcttctccccttccgcgaggaagagatctaattgggtagggcgggtgtagactagcctgccgagccgcccgctggcacctgcagcctcctgggcgcccgcgggcccggcgagaaagttgttaaagggagcgaggtggttgttcctggggtccgaggcgcgcctctcacgccctgcccaacagaagccgcagtcccgtggggtctggagacgcagtttccttgttaatgacaataaatccctgctccccctgcctcagacatctacgcagcgaaatcgagcctggccttgagggtccacaccgcgaggaagatgcgtgcgcccattccagagcctaagcctggagacctgattgagatttttcgccctttctacagacactgggccatctatgttggcgatggatatgtggttcatctggcccctccaagtgaggtcgcaggagctggtgcagccagtgtcatgtccgccctgactgacaaggccatcgtgaagaaggaattgctgtatgatgtggccgggagtgacaagtaccaggtcaacaacaaacatgatgacaagtactcgccgctgccctgcacgaaaatcatccagcgggcggaggagctggtggggcaggaggtgctctacaagctgaccagtgagaactgcgagcactttgtgaatgagctgcgctatggagtcgcccgcagtgaccaggtcagagatgtcatcatcgctgcaagcgttgcaggaatgggcttggcagccatgagccttattggagtcatgttctcaagaaacaagcgacaaaagcaataactgaaaaagactgtctgtcagcgatgactttatacatcaagggggtcttgttttgctagagagtttggggtttggtttgtggatttcattgtgatttataataaggcttattttcacagaataaaataaagcaaaacgagggaggattttattgggggagtgcagcccaaaaaa

SEQ ID NO: 1723 - DNA, 1659 bp, Homo sapiens
tcagcgggcgagtccccggctcctccagctccttcctcctcttcctcctcctcctccacctccggcttttgggggatcactgtcctctctcggcagcagaatgagccggcaggtggtccgctccagcaagttccgccacgtgtttggacagccggccaaggccgaccagtgctatgaagatgtgcgcgtctcacagaccacctgggacagtggcttctgtgctgtcaaccctaagtttgtggccctgatctgtgaggccagcgggggaggggccttcctggtgctgcccctgggcaagactggacgtgtggacaagaatgcgcccacggtctgtggccacacagcccctgtgctagacatcgcctggtgcccgcacaatgacaacgtcattgccagtggctccgaggactgcacagtcatggtgtgggagatcccggatgggggcctgatgctgcccctgcgggagcccgtcgtcaccctggagggccacaccaagcgtgtgggcattgtggcctggcacaccacagcccagaacgtgctgctcagtgcaggttgtgacaacgtgatcatggtgtgggacgtgggcactggggcggccatgctgacactgggcccagaggtgcacccagacacgatctacagtgtggactggagccgagatggaggcctcatttgtacctcctgccgtgacaagcgcgtgcgcatcatcgagccccgcaaaggcactgtcgtagctgagaaggaccgtccccacgaggggacccggcccgtgcgtgcagtgttcgtgtcggaggggaagatcctgaccacgggcttcagccgcatgagtgagcggcaggtggcgctgtgggacacaaagcacctggaggagccgctgtccctgcaggagctggacaccagcagcggtgtcctgctgcccttctttgaccctgacaccaacatcgtctacctctgtggcaagggtgacagctcaatccggtactttgagatcacttccgaggcccctttcctgcactatctctccatgttcagttccaaggagtcccagcggggcatgggctacatgcccaaacgtggcctggaggtgaacaagtgtgagatcgccaggttctacaagctgcacgagcggaggtgtgagcccattgccatgacagtgcctcgaaagtcggacctgttccaggaggacctgtacccacccaccgcagggcccgaccctgccctcacggctgaggagtggctggggggtcgggatgctgggcccctcctcatctccctcaaggatggctacgtacccccaaagagccgggagctgagggtcaaccggggcctggacaccgggcgcaggagggcagcaccagaggccagtggcactcccagctcggatgccgtgtctcggctggaggaggagatgcggaagctccaggccacggtgcaggagctccagaagcgcttggacaggctggaggagacagtccaggccaagtagagccccgcagggcctccagcagggtcagccattcacacccatccactcacctcccattcccagccacatggcagagaaaaaaatcataataaaatggctttattttctggtaaaaaaaaaaaaaaaaaaaaaaaaaaaaaaaaaaaaaaaaaaaaaaaaaaagggggggggga

SEQ ID NO: 1724 - DNA, 1571 bp, Homo sapiens
cgggaggtcagaaaaccgggccgcgggcggcaccgacagctggggcccgggtcagggacacgcggaggtcaggccggtgaaggcggcaggaagctggagcacgatcccaggaggaacaatcctgcaccatgactcaacagccacttcgaggagtgaccagcctgcgtttcaaccaagaccaaagctgcttttgctgcgccatggagacaggtgtgcgcatctacaacgtggagcccttgatggagaaggggcatctggaccacgagcaggtgggcagcatgggcttggtggagatgctgcaccgctccaaccttctggccttggtgggcggtggtagtagtcccaagttctcagagatctcagtgctgatctgggacgatgcccgggagggcaaggactccaaggagaagctggtgctggagttcaccttcaccaagccagtgctttctgtgcgcatgcgccatgacaagatcgtgatcgtgctgaagaaccgcatctatgtgtactccttccccgacaatccccgaaagctgtttgagtttgatacccgggacaaccccaaggggctctgtgacctctgccccagcctggagaagcaactgctagtgttcccgggacacaagtgtgggagtctgcaacttgtggacctggcgagcacaaagcctggcacctcgtctgctccattcacgatcaatgcacatcagagtgacatagcctgtgtgtctctaaaccagccaggcactgtagtggcctcagcctcccagaagggtacccttattcgcctctttgacacacaatccaaggagaaactggtggagctgcgccgaggcactgaccctgccaccctctactgcattaacttcagccacgactcctccttcctctgcgcttccagtgataagggtactgtccatatctttgctctcaaggatacccgcctcaaccgccgctccgcgctggctcgcgtgggcaaggtggggcctatgattgggcagtacgtggactctcagtggagcctggcgagcttcactgtgcctgctgagtcagcttgcatctgcgccttcggtcgcaatacttccaagaacgtcaactctgtcattgccatctgcgtagatgggaccttccacaaatatgtcttcactcctgatggaaactgcaacagagaggctttcgacgtgtaccttgacatctgtgatgatgatgacttttaaggaccctgggggctgtgctagggacctgcagtggcagaactgcagagctgagccttggcagtggggcgtgcttggaagccaccagccagcaagcattaatggggctggtgcccactttccactcagcagagctatgtctaaataaagagctcacttccccccagcacttcttgatgactgtgtgccccaagggccaggccagagacccaggaaggcagcgaccccttgggatccctaacctggaggaaattgccagggacccagagggagtgccctaatccaacctggggattttttaaaagcttcctaggaagagatgatctccgatgtgatgaatacgaataaaaggcccttaatggc

SEQ ID NO: 1725 - DNA, 2114 bp, Homo sapiens
gggcgtggttcgagagcgcgcagagtccagactggcggcagggcccgaggggccgacccgcagcgtccctggtctctccagccctcactcggaaccgcactgacaataccctcccctcccttgggctggacccctctctacagctaggagccaatggcagaagacaaaaccaaaccgagtgagttggaccaagggaagtatgatgctgatgacaacgtgaagatcatctgcctgggagacagcgcagtgggcaaatccaaactcatggagagatttctcatggatggctttcagccacagcagctgtccacgtacgccctgaccctgtacaagcacacagccacggtagatggaaggaccatccttgtggacttttgggacacggcaggccaggagcggttccagagcatgcatgcctcctactaccacaaggcccacgcctgcatcatggtgtttgatgtacagaggaaagtcacctataggaacctgagcacctggtatacagagcttcgggagttcaggccagagatcccatgcatcgtggtggccaataaaattgatgacataaacgtgacccaaaaaagcttcaattttgccaagaagttctccctgcccctgtatttcgtctcggctgctgatggtaccaatgttgtgaagctcttcaatgatgcaattcgattagctgtgtcttacaaacagaactcccaggacttcatggatgagatttttcaggagctcgagaacttcagcttggagcaggaagaggaggacgtgccagaccaggaacagagcagcagcatcgagaccccatcagaggaggcggcctctccccacagctgaggggctggggctaggggtgggtggagcccttttaaaatacccttcccttcaacaactctccagctctgaatggagaaactctctaggccatcccctcttctacctcctgcaacccacccatcctattagcctcccacattctaggcccgtgatacagggatgaggtcagcaccagcaaactctggactggtggaagaattccccaccagatctccttgaagcagaagtagggatcagcatcattaacaccttccccaccccctccccgcaggcagacagtgaagagaatcagaaaacatgattatgtgtcactttaatacaggaaatttaggtgttttttggtgtttttgtttttgtttttgtttttgttttctttccaaagctcacctcggggacaattccttgggcttctcctgaggtaatgatttacccccccacccacagctgagtctgtgaggccccatcctttccctacgttttctcccatcttttttcctcttcagtctcccagtcatctggtttgtttgtttctttgttcgttctgagacggagtctcgctctgtcgccaggctggagtgcagtggcgcagtctcggctcgctgcaacctctgactccctggttcaaacgattctcctgcctcagcctcccgagtggctggcatcaccacgcccagctaatttttgtatttttagtagagacggggtttcaccatgttgcccaggatggtctcgatctcctcacctcgtgatccgcccgcctcggcctcccaaagtgctgggattacaggcatgagccaccgcgcccggccccaatcatctgtttttaaacaatcgtttttgagcagatagctattcattccagattttcgtgtacccattctgtttcaggagctcttctaggtaaagctgagatcacaggaacagcaggtgacaggcctagctatagttaggaatacacaagccgtaaaatcgagtccttacagccataccacaaggtacgtccatttggactacaagaagagcttcctttaaagttcctatttcagcataaagaggctgtcctttttttttgaggaatagtttggaccttgtgcctcctgtgggaggctgaggactgcaagaggagagctagcagatatgcctgttcacccctctctggtacttgtggcttgctagtatgtttttatgataatctcgggcattgtttgcattgtgtttattaatagggttttgtttttattgtttccttttttacagtaaaggctgaattacat

SEQ ID NO: 1726 - DNA, 1056 bp, Homo sapiens
gcacgaggttcgagagcgcgcagagtccagactggcggcagggcccgaggggccgacccgcagcgtccctggtctctccagccctcactcggaaccgcactgacaataccctcccctcccttgggctggacccctctctacagctaggagccaatggcagaagacaaaaccaaaccgagtgagttggaccaagggaagtatgatgctgatgacaacgtgaagatcatctgcctgggagacagcgcagtgggcaaatccaaactcatggagagatttctcatggatggctttcagccacagcagctgtccacgtacgccctgaccctgtacaagcacacagccacggtagatggcaagaccatccttgtggacttttgggacacggcaggccaggagcggttccagagcatgcatgcctcctactaccacaaggcccatgcctgcatcatggtgtttgatatacagaggaaagtcacctataggaacctgagcacctggtatacagagcttcgggagttcaggccagagatcccatgcatcgtggtggccaataaaattgatgacataaacgtgacccaaaaaagcttcaattttgccaagaagttctccctgcccctgtatttcgtctcggctgctgatggtaccaatgttgtgaagctcttcaatgatgcaattcgattagctgtgtcttacaaacagaactcccaggacttcatggatgagatttttcaggagctcgagaacttcagcttggagcaggaagaggaggacgtgccagaccaggaacagagcagcagcatcgagaccccatcagaggaggtggcctctccccacagctgaggggctggggctaggggaatagtttggaccttgtgcctcctgtgggaggctgaggactgcaagaggagagctagcagatatgcctgttcacccctctctggtacttgtggcttgctagtatgtttttatgataatctcgggcattgtttgcattgtgtttattaatagggttttgtttttattgtttccttttttacagtaaaggctgaatgacat

SEQ ID NO: 1727 - DNA, 1186 bp, Homo sapiens
ggcacgaggcaagcggcgtggagatgcggcagccgctgagctggggccgctggcgcgcgatgcttgcccgaacctacggccccgggccttcggcgggttaccgctgggcctcgggcgcacagggttacgtgcggaatccgccagttggagcgtgcgatctgcagggcgagctggacagattcgggggcatctcggtgcgcctggcgcggctcgatgcgctggaccgcctggacgctgccgccttccagaagggcttgcaggctgcagtacagcaatggcgatcagaaggtagaacagctgtatggctgcacattcccatcctccaaagccgatttattgcccctgctgcttccctgggcttctgctttcaccacgcagaatcggattcatcaacgttgactctgtggctgagagaagggcccagcagattaccaggatatgcttcacatcaagtaggagttgcaggagctgtatttgatgaaagtactagaaaaatactggttgtacaagatcgaaataaattgaaaaatatgtggaagtttccaggaggcctgtcagagcctgaagaagatattggagacacagcggttcgagaagtttttgaagagactggtataaaatcagaattcaggtccgtcctgagtattcggcaacagcacacaaatcctggagcttttgggaagtcagatatgtatatcatctgccgcctaaagccatattcattcaccataaatttttgccaggaagaatgcttaagatgtgagtggatggatctcaatgacctggcgaagactgaaaatacaactcccatcaccagcagagttgctaggctgctgctgtatgggtacagagaagggtttgacaaaattgacctgactgtggaagaacttccagcagtttacacaggactgttttataaactctatcataaggaactgccagagaattataaaactatgaaaggaattgattaaattcacatttatatgtttagaaacatgtagactaacgaatgacataagaaatagtggacattttggattgattaaacatctgactgtgattttctaatgtatatgatttccatgaagaaattttgtttctaaacatgcacattttaaaagcctcttttcgaataaagcaaatgcgtgaaaaagaaaaaaaaaaaaaaaaaaaaaaaaaaaaa

SEQ ID NO: 1728 - DNA, 3714 bp, Homo sapiens
ggcacgagggatcggcggagctcccacctccgcttacagctcgctgccgccgtcctgccccgcgcccccaggagacctggaccagaccacgatgtggaaacgctggctcgcgctcgcgctcgcgctggtggcggtcgcctgggtccgcgccgaggaagagctaaggagcaaatccaagatctgtgccaatgtgttttgtggagccggccgggaatgtgcagtcacagagaaaggggaacccacctgtctctgcattgagcaatgcaaacctcacaagaggcctgtgtgtggcagtaatggcaagacctacctcaaccactgtgaactgcatcgagatgcctgcctcactggatccaaaatccaggttgattacgatggacactgcaaagagaagaaatccgtaagtccatctgccagcccagttgtttgctatcagtccaaccgtgatgagctccgacgtcgcatcatccagtggctggaagctgagatcattccagatggctggttctctaaaggcagcaactacagtgaaatcctagacaagtattttaagaactttgataatggtgattctcgcctggactccagtgaattcctgaagtttgtggaacagaatgaaactgccatcaatattacaacgtatccagaccaggagaacaacaagttgcttaggggactctgtgttgatgctctcattgaactgtctgatgaaaatgctgattggaaactcagcttccaagagtttctcaagtgcctcaacccatctttcaaccctcctgagaagaagtgtgccctggaggatgaaacgtatgcagatggagctgagaccgaggtggactgtaaccgctgtgtctgtgcctgtggaaattgggtctgtacagccatgacctgtgacggaaagaatcagaagggggcccagacccagacagaggaggagatgaccagatatgtccaggagctccaaaagcatcaggaaacagctgaaaagaccaagagagtgagcaccaaagagatctaatgaggaggcacagaccagtgtctggatcccagcatcttctccacttcagcgctgagttcagtatacacaagtgtctgctacagtcgccaaatcaccagtatttgcttatatagcaatgagttttattttgtttatttgttttgcaataaaggatatgaaggtggctggctaggaagggaagggccacagccttcatttctaggagtgctttaagagaaactgtaaatggtgctctggggctggaggctagtaaggaaactgcatcacgattgaaagaggaacagacccaaatctgaacctcttttgagtttactgcatctgtcagcaggctgcagggagtgcacacgatgccagagagaacttagcagggtgtccccggaggagaggtttgggaagctccacggagaggaacgctctctgcttccagcctctttccattgccgtcagcatgacagacctccagcatccacgcatctcttggtcccaataactgcctctagatacatagccatactgctagttaacccagtgtccctcagacttggatggagtttctgggagggtacacccaaatgatgcagatacttgtatactttgagccccttagcgacctaaccaaattttaaaaatactttttaccaaaggtgctatttctctgtaaaacactttttttttggcaagttgactttattcttcaattattatcattatattattgttttttaatattttattttcttgactaggtattaagcttttgtaattatttttcagtagtcccaccacttcataggtggaaggagtttggggttcttcctggtgcaggggctgaaataacccagatgcccccaccctgccacatactagatgcagcccatagttggcccccctagcttccagcagtccactatctgccagaggagcaagggtgccttagaccgaagccaggggaagaagcatcttcataaaaaactttcaagatccaaacattaatttgtttttatttattctgagaagttgaggcaaatcagtattcccaaggatggcgacaagggcagccaagcagggcttaggatatcccagcctaccaatatgctcattcgactaactaggagggtgagttggccctgtctcttcttttttctggacctcagtttcctcagtgagctggtaagaatgcactaaccttttgatttgataagttataaattctgtggttctgatcattggtccagaggggagataggttcctgtgatttttccttcttctctatagaataaatgaaatcttgttactagaacaagaaatgtcagatggccaaaaacaagatgaccagatttgatctcagcctgatgaccctacaggtcgtgctatgatatggagtcctcatgggtaaagcaggaagagagtgggaaagagaaccaccccactctgtcttcatatttgcatttcatgtttaacctccggctggaaatagaaagcattcccttagagatgaggataaaagaaagtttcagattcaacagggggaagaaaatggagatttaatcctaaaactgtgacttggggaggtcagtcatttacagttagtcctgtgtctttcgacttctgtgattattaaccccactcactaccctgtttcagatgcatttggaataccaaagattaaatccttgacataagatctcatttgcagaaagcagattaaagaccatcagaaggaaattatttaggttgtaatgcacaggcaactgtgagaaactgttgtgccaaaaatagaattccttctagtttttcttgttctcatttgaaaggagaaaattccactttgtttagcatttcaagcttttatgtatccatcccatctaaaaactcttcaaactccacttgttcagtctgaaatgcagctccctgtccaagtgccttggagaactcacagcagcacgccttaatcaaaggttttaccagcccttggacactatgggaggagggcaagagtacaccaatttgttaaaagcaagaaaccacagtgtctcttcactagtcatttagaacatggttatcatccaagactactctaccctgcaacattgaactcccaagagcaaatccacattcctcttgagttctgcagcttctgtgtaaatagggcagctgtcgtctatgccgtagaatcacatgatctgaggaccattcatggaagctgctaaatagcctagtctggggagtcttccataaagttttgcatggagcaaacaaacaggattaaactaggtttggttccttcagccctctaaaagcatagggcttagcctgcaggcttccttgggctttctctgtgtgtgtagttttgtaaacactatagcatctgttaagatccagtgtccatggaaacattcccacatgccgtgactctggactatatcagtttttggaaagcagggttcctctgcctgctaacaagcccacgtggaccagtctgaatgtctttcctttacacctatgtttttaagtagtcaaacttcaagaaacaatctaaacaagtttctgttgcatatgtgtttgtgaacttgtatttgtatttagtaggcttctatattgcatttaacttgtttttgtaactcctgattcttccttttcggatactattgatgaataaagaaattaaagtgaaaaaaaaaaaaaaaaaaaaaaa

SEQ ID NO: 1729 - DNA, 1566 bp, Homo sapiens
atcgcgccagttcctcagcctcagtgctatgaaggtgacagcgtgaggtgacccatctggcccgccgcgatgctggcaacacggcggctgctcggctggtcgcttcccgcgcgggtatctgtgcgtttcagcggcgacacgacagcacccaagaaaacctcatttggctcgctgaaggatgaagaccggattttcaccaacctgtacggccgccatgactggaggctgaaaggttccctgagtcgaggtgactggtacaagacaaaggagatcctgctgaaggggcccgactggatcctgggcgagatcaagacatcgggtttgaggggccgtggaggcgctggcttccccactggcctcaagtggagcttcatgaataagccctcagatggcaggcccaagtatctggtggtgaacgcagacgagggggagccgggcacctgcaaggaccgggagatcttacgccatgatcctcacaagctgctggaaggctgcctggtggggggccgggccatgggcgcccgcgctgcctatatctacatccgaggggaattctacaatgaggcctccaatctgcaggtggccatccgagaggcctatgaggcaggtctgattggcaagaatgcttgtggctctggctatgattttgacgtgtttgtggtgcgcggggctggggcctacatctgtggagaggagacagcgctcatcgagtccattgagggcaagcagggcaagccccgcctgaagccccccttccccgcagacgtgggagtgtttggctgccccacaactgtggccaacgtggagacagtggcagtgtcccccacaatctgccgccgtggaggtacctggtttgctggctttggcagagaacgcaactcaggcaccaaactattcaacatctctggccatgtcaaccacccttgcactgtggaggaggagatgtctgtgcccttgaaagaactgattgagaagcatgctgggggtgtcacgggcggctgggacaacctccttgctgtgatccctggcggctcgtctaccccactgatccccaagtctgtgtgtgagacggtgctgatggacttcgatgcgctggtgcaggcacagacaggcctgggcacagctgcggtgatcgtcatggaccgctcgacggacatcgtgaaagccatcgcccgcctcattgagttctataagcacgagagctgtggccagtgtaccccatgccgtgagggtgtggactggatgaacaaggtgatggcacgtttcgtgaggggggatgcccggccggccgagatcgactccctgtgggagatcagcaagcagatagaaggccatacgatttgtgctctgggtgacggggccgcctggcctgtgcagggtctgatccgccactttcggccggagctcgaggagcggatgcagcggtttgcccagcagcatcaggcccggcaggctgcctcttagcccaccaccctggcctgctgtcctgcgtctatccatgtggaatgctggacaataaagcgagtgctgcccaccctccaaaaaaaaaaaaaaaaaaaaaaaaaa

SEQ ID NO: 1730 - DNA, 1566 bp, Homo sapiens; identical to SEQ ID NO: 1729

SEQ ID NO: 1731 - DNA, 700 bp, Homo sapiens
gcggcgtgagaagccatgagcagcaaagtctctcgcgacaccctgtacgaggcggtgcgggaagtcctgcacgggaaccagcgcaagcgccgcaagttcctggagacggtggagttgcagatcagcttgaagaactatgatccccagaaggacaagcgcttctcgggcaccgtcaggcttaagtccactccccgccctaagttctctgtgtgtgtcctgggggaccagcagcactgtgacgaggctaaggccgtggatatcccccacatggacatcgaggcgctgaaaaaactcaacaagaataaaaaactggtcaagaagctggccaagaagtatgatgcgtttttggcctcagagtctctgatcaagcagattccacgaatcctcggcccaggtttaaataaggcaggaaagttcccttccctgctcacacacaacgaaaacatggtggccaaagtggatgaggtgaagtccacaatcaagttccaaatgaagaaggtgttatgtctggctgtagctgttggtcacgtgaagatgacagacgatgagcttgtgtataacattcacctggctgtcaacttcttggtgtcattgctcaagaaaaactggcagaatgtccgggccttatatatcaagagcaccatgggcaagccccagcgcctatattaaggcacatttgaataaattctattaccagttc

SEQ ID NO: 1732 - DNA, 3323 bp, Homo sapiens
gatcacgaaccagtcaaaatcgtggtttatttctgtaacgtgaagacttctgctcttttttctttgtttgtttttttcgtaaacatctgggtgtatatcaaacggcaagatgtccagtaatgtcccggcggatatgataaatttgcgcctcattttggtaagcggaaaaacaaaagagttcctgttttctcctaacgattctgcttctgacattgcaaagcatgtatatgacaattggccaatggactgggaagaagagcaggtcagcagtccaaatattctacgacttatttatcaaggacgatttctacatggaaatgtcacattaggagcattaaaacttccttttggcaaaacaacagtgatgcatttggtggccagagagacattaccagagccaaactctcaaggtcagaggaatcgtgagaagactggagagagtaattgttgtgtaatcctgtaaacactgtctgcctagtgtgatgtgatatagtctttgtctttcatgctgctgggacagaaaagacccgacattgcttcagaaaccgttcagaacagtctgcctgtaaacacatggaactgaattaccacatgaacactgtcatcttttctcatgaaagtaaaaagaaccaagaacatttttcactctgattttttatttcttgtattttttgttgagctgttttaacacatattggtttttgaatgcagtcaatctccaggggaaaagttaacaagttatctttcgtagcagaaaccattttgctgccacaaaattttcatcatcagaactaataaatcaagtgttccaaatacaatttgcactaaaaagattggcattattttcctcatcagcagaatttataacagtgtgtggtatctagaaatacttatatatacaattccacactggaagacactcagcaattaatgaagttaattactgggccaacttgagaggaaaaaatggaaaagaaactaaaatgttgggtgaattctaccaaagtcagccgtggtggctgcactggcacagaatactaaactgagtgtgactattttcactgcaacaaatgaaaaaacaaaatgtgcctgtttaaagcactcagtagagggctgatgaaactaattttttttcctttaagacatgcactcttgagtcctacagtaactgagtgtttgtttagacagcacaagaaggggtgagagtgcgtctcctagccttaatgtgggagggtagtttcagtcactcatcggctttcattattgtgcagaaatattagaaaacctcattgatcaattttatgtatttgaatatcagcaaattgaaattttccataattatcattaatttgtaaccacatccagtgtcatgcttactccttagagttcagatgaattcttaaaattaaaaaaaaactccatagtactaattttgtttctttatatagtttgcgtttgatattagtgcttgcaattgtattaaagtcaaaagctgatttttatggcatacacaagaatgccactttttcttttatttcataccaataatttaaagattgatatgctaaaaacaatttgcacagcactaaagcatgagctactttcatctaaacctgtaaaaatatgaaagatttttatattttttcactgggaagaaattcttcctggatgaaattacaaatatgtgtagaatatatttaataaaagacttataaaatacctaactacaggacttaaaatatagattggcgcgtagtatatagaacaatattccatataaataagtttagcctttataaaaatgaagttgcaggctgacattacattctgtacttactaagtgtcaacagcccttacaaacattaaatgtaaatggtttcaaatggtcagcgttgtttaaatgtaatcatgttattttattcattgttaatgctttgatgaaaaggctttatatgcagtagatctacgaaaatattgttcatactgatcagaattaaatttgtatagagcagagttttaaaatgaatgtaaatagcactaaacgttttctttctgcaacctgtacttacagattcttcctgtaaactaaataaaaaaaaaatgatagtgcattttggtggtaattttaaaggtcttgattaggtcaataattgtttaagcaccgtctcattcatgttttctactttcatttcttaagcttttaaaattcatttaattaatattctgttgttgttttggggagtattcccaatgtatctttgatatttaacctggttaatttgtggacagtcacaacaatggatagaattatgtagtctccgttatcactaaaatgttatcttcaagagatgttaaatatttatatgctttgttgactagctgaaatgtgaattctgttagtgttgactaaagaatctggtagttgcttaattgggcaattaaacaatttatggctctattttgtaaaacaaactactggtaattatttttaatacctattttcattctgattactctttttttaagttaaagactatcagttaattaagattgagtttttatgatggttaaaaataattctctattggtttttcaatatatttttctgtgtgttctcagattatatatttccctcaatttagagtttgctaagtgaaataaactggttcactagtagagaaagaattacgtcgcttaatacctaatatcatagttgtacaatatgaaaaaaaagaataaaaagtagcagtaaaattatatactgaaaacaccaaaaatttagatgccttaatagtatatacgtgaaatactcagctgtccctttaaaaataattccttggactgcctggtggttaaaatacgattcctcatatccaaggctacttttgaagatccctctgccaaaaatatagctcacttatctaaaggtgagagctgcatagatccagtaatgtacataaagcctgaatgatgagcctatgtccctgcctaacgctggtgtctcactcatctcttttacctaaattgtcctgaactttgttaagtgttctggacaaggccaagcttttctttattaaaacctcagcatgtctccctgatctgaactatttgctttctcttcaagataagttgtattttaccatggaaaaatacagtatctaacattaccattcacgttaaatgaagtttcctcataacatttatctttagttttatgaagtcatcgtgaccaatgttacagtaatttctgttagctgattgtggtaaacaatgtttaatgtgaaaagaaattaaaactttcttcatctgttgtaaaaaaaaaa

SEQ ID NO: 1733 - DNA, 3198 bp, Homo sapiens
ctgccactgccacctcgcggatcaggagccagcgttgttcgcccgacgcctcgctgccggtgggaggaagcgagagggaagccgcttgggctcttgtcgccgctgctcgcccaccgcctggaagagccgagccccggccagtcggtcgcttgccaccgctcgtagccgttacccgcgggccgccacagccgccggcgggagaggcgcgcgccatggcttctggagccgattcaaaaggtgatgacctatcaacagccattctcaaacagaagaaccgtcccaatcggttaattgttgatgaagccatcaatgaggacaacagtgtggtgtccttgtcccagcccaagatggatgaattgcagttgttccgaggtgacacagtgttgctgaaaggaaagaagagacgagaagctgtttgcatcgtcctttctgatgatacttgttctgatgagaagattcggatgaatagagttgttcggaataaccttcgtgtacgcctaggggatgtcatcagcatccagccatgccctgatgtgaagtacggcaaacgtatccatgtgctgcccattgatgacacagtggaaggcattactggtaatctcttcgaggtataccttaagccgtacttcctggaagcgtatcgacccatccggaaaggagacatttttcttgtccgtggtgggatgcgtgctgtggagttcaaagtggtggaaacagatcctagcccttattgcattgttgctccagacacagtgatccactgcgaaggggagcctatcaaacgagaggatgaggaagagtccttgaatgaagtagggtatgatgacattggtggctgcaggaagcagctagctcagatcaaagagatggtggaactgcccctgagacatcctgccctctttaaggcaattggtgtgaagcctcctagaggaatcctgctttacggacctcctggaacaggaaagaccctgattgctcgagctgtagcaaatgagactggagccttcttcttcttgatcaatggtcctgagatcatgagcaaattggctggtgagtctgagagcaaccttcgtaaagcctttgaggaggctgagaagaatgctcctgccatcatcttcattgatgagctagatgccatcgctcccaaaagagagaaaactcatggcgaggtggagcggcgcattgtatcacagttgttgaccctcatggatggcctaaagcagagggcacatgtgattgttatggcagcaaccaacagacccaacagcattgacccagctctacggcgatttggtcgctttgacagggaggtagatattggaattcctgatgctacaggacgcttagagattcttcagatccataccaagaacatgaagctggcagatgatgtggacctggaacaggtagccaatgagactcacgggcatgtgggtgctgacttagcagccctgtgctcagaggctgctctgcaagccatccgcaagaagatggatctcattgacctagaggatgagaccattgatgccgaggtcatgaactctctagcagttactatggatgacttccggtgggccttgagccagagtaacccatcagcactgcgggaaaccgtggtagaggtgccacaggtaacctgggaagacatcgggggcctagaggatgtcaaacgtgagctacaggagctggtccagtatcctgtggagcacccagacaaattcctgaagtttggcatgacaccttccaagggagttctgttctatggacctcctggctgtgggaaaactttgttggccaaagccattgctaatgaatgccaggccaacttcatctccatcaagggtcctgagctgctcaccatgtggtttggggagtctgaggccaatgtcagagaaatctttgacaaggcccgccaagctgccccctgtgtgctattctttgatgagctggattcgattgccaaggctcgtggaggtaacattggagatggtggtggggctgctgaccgagtcatcaaccagatcctgacagaaatggatggcatgtccacaaaaaaaaatgtgttcatcattggcgctaccaaccggcctgacatcattgatcctgccatcctcagacctggccgtcttgatcagctcatctacatcccacttcctgatgagaagtcccgtgttgccatcctcaaggctaacctgcgcaagtccccagttgccaaggatgtggacttggagttcctggctaaaatgactaatggcttctctggagctgacctgacagagatttgccagcgtgcttgcaagctggccatccgtgaatccatcgagagtgagattaggcgagaacgagagaggcagacaaacccatcagccatggaggtagaagaggatgatccagtgcctgagatccgtcgagatcactttgaagaagccatgcgctttgcgcgccgttctgtcagtgacaatgacattcggaagtatgagatgtttgcccagacccttcagcagagtcggggctttggcagcttcagattcccttcagggaaccagggtggagctggccccagtcagggcagtggaggcggcacaggtggcagtgtatacacagaagacaatgatgatgacctgtatggctaagtggtggtggccagcgtgcagtgagctggcctgcctggaccttgttccctgggggtggggcgcttgcccaggagagggaccaggggtgcgcccacagcctgctccattctccagtctgaacagttcagctacagtctgactctggacagggggtttctgttgcaaaaatacaaaacaaaagcgataaaataaaagcgattttcatttggtaggcggagagtgaattaccaacagggaattgggccttgggcctatgccatttctgttgtagtttggggcagtgcaggggacctgtgtggggtgtgaaccaaggcactactgccacctgccacagtaaagcatctgcacttgactcaatgctgcccgagccctcccttccccctatccaacctgggtaggtgggtaggggccacagttgctggatgtttatatagagagtaggttgatttattttacatgcttttgagttaatgttggaaaactaatcacaagcagtttctaaaccaaaaaatgacatgttgtaaaaggacaataaacgttgggtcaaaatggaaaaaaaaaaaaa

SEQ ID NO: 1734 - DNA, 2227 bp, Homo sapiens
gagagcccgaacaggaagagggtacagctttgtgcaggtcacatgcccactgcagccctccagcctctggtccccagagcggactttggaagctgaactgcttttgttgctggaagacttatgttataatttaccctgggtggaccagggtcgtacaaaagggcaacgctccccagtccccccactcccgaccccggaatcatgcatcggactacacggatcaaaatcacagagctgaacccccacctcatgtgtgccctctgcggggggtacttcatcgacgccaccactatcgtggagtgcctgcattccttctgcaaaacctgcatcgtgcgctacctggagaccaacaaatactgccccatgtgtgacgtgcaggtccataaaacccggccgctgctgagcatcaggtctgacaaaacacttcaagacattgtctacaaattggtccctgggctttttaaagatgagatgaaacggcggcgggatttctatgcagcgtaccccctgacggaggtccccaacggctccaatgaggaccgcggcgaggtcttggagcaggagaagggggctctgagtgatgatgagattgtcagcctctccatcgaattctacgaaggtgccagggaccgggatgagaagaagggccccctggagaatggggatggggacaaagagaaaacaggggtgcgcttcctgcgatgcccagcagccatgaccgtcatgcatcttgccaagtttctccgcaacaagatggatgtgcccagcaagtacaaggtggaggttctgtacgaggacgagccactgaaggaatactacaccctcatggacatcgcctacatctacccctggcggcggaacgggcctctccccctcaagtaccgtgtccagccagcctgcaagcggctcaccctagccacggtgcccaccccctccgagggcaccaacaccagcggggcgtccgagtgtgagtcagtcagcgacaaggctcccagccctgccaccctgccagccacctcctcctccctgcccagcccagccaccccatcccatggctctcccagttcccatgggcctccagccacccaccctacctcccccactcccccttcgacagccagtggggccaccacagctgccaacgggggtagcttgaactgcctgcagacaccatcctccaccagcagggggcgcaagatgactgtcaacggcgctcccgtgccccccttaacttgaggccagggaccctctcccttcttccagccaagcctctccactccttccactttttctgggcccttttttccacttcttctactttccccagctcttcccaccttgggggtggggggcgggttttataaataaatatatatatatatgtacataggaaaaaccaaatatacatacttattttctatggaccaaccagattaatttaaatgccacaggaaacaaactttatgtgtgtgtgtatgtgtggaaaatggtgttcattttttttggggggggtcttgtgtaatttgctgtttttgggggtgcctggagatgaactggatgggccactggagtctcaataaagctctgcaccatcctcgctgtttcccaaggcaggtggtgtgttgggggccccttcagacccaaagctttaggcatgattccaactggctgcatataggagtcagttagaattgtttctttctctccccgtttctctccccatcttggctgctgtcctgcctctgaccagtggccgccccccgcgttgttgaatgtccagaaattgctaagaacagtgccttttacaaatgcagtttatccctggttctgaggagcaagtgcagggtggaggtggcacctgcatcacctcctcctcttgcagtggaaactttgtgcaaagaatagatagttctgcctcttttttttttttttcctgtgtgtgtggcctttgcatcatttatcttgtggaaaagaagattcaggccctgagaggtctcagctcttggaggagggctaaggctttagcattgtgaagcgctgcacccccaccaaccttaccctcaccggggaaccctcactagcaggactggtggtggagtctcacctggggcctagagtggaagtgggggtgggttaacctcacacaagcacagatcccagactttgccagaggcaaacagggaattccgccgatactgacgggctccaggagtcgtcgccacactcg

SEQ ID NO: 1735 - DNA, 1315 bp, Homo sapiens
gaggcggctgcctgctgctctgcaggtaccatggagctgagctataggctcttcatctgcctcctgctctggggtagtactgagctgtgctacccccaacccctctggctcttgcagggtggagccagccatcctgagacgtccgtacagcccgtactggtggagtgtcaggaggccactctgatggtcatggtcagcaaagacctttttggcaccgggaagctcatcagggctgctgacctcaccttgggcccagaggcctgtgagcctctggtctccatggacacagaagatgtggtcaggtttgaggttggactccacgagtgtggcaacagcatgcaggtaactgacgatgccctggtgtacagcaccttcctgctccatgacccccgccccgtgggaaacctgtccatcgtgaggactaaccgcgcagagattcccatcgagtgccgctaccccaggcagggcaatgtgagcagccaggccatcctgcccacctggttgcccttcaggaccacggtgttctcagaggagaagctgactttctctctgcgtctgatggaggagaactggaacgctgagaagaggtcccccaccttccacctgggagatgcagcccacctccaggcagaaatccacactggcagccacgtgccactgcggttgtttgtggaccactgcgtggccacaccgacaccagaccagaatgcctccccttatcacaccatcgtggacttccatggctgtcttgtcgacggtctcactgatgcctcttctgcattcaaagttcctcgacccgggccagatacactccagttcacagtggatgtcttccactttgctaatgactccagaaacatgatatacatcacctgccacctgaaggtcaccctagctgagcaggacccagatgaactcaacaaggcctgttccttcagcaagccttccaacagctggttcccagtggaaggcccggctgacatctgtcaatgctgtaacaaaggtgactgtggcactccaagccattccaggaggcagcctcatgtcatgagccagtggtccacgtctgcttcccgtaaccgcaggcatgtgacagaagaagcagatgtcaccgtgggggccactgatcttcctggacaggagtggtgaccatgaagtagagcagtgggctttgccttctgacacctcagtggtgctgctgggcgtaggcctggctgtggtggtgtccctgactctgactgctgttatcctggttctcaccaggaggtgtcgcactgcctcccaccctgtgtctgcttccgaataaaagaagaaa

SEQ ID NO: 1736 - DNA, 4076 bp, Homo sapiens
gcttatggcggcgctggagagggggcgctgagctgttgggtatgaagtgtaacagaacagactttaccacctgaaactgctgcttcaagttcagatcaggcaaggaacaaacctcgtaacaactaacaagaccaaagaagagtacacttaagttgaagacacaacacttgatctgaaacaagaagtttgtgcctactcaacagctttgaaagagcacttcccaacgctgctagtagtctttgttttcttcagtgctgtactgtgagattgcccggtacagcagcagttgtattctttattagcttggtagatcattttctctcgctcttttttttaatactagcaactttcatcctttgaaacgtgtgctgaaaaagaagaatcagcaaatactactgaaagtgcaatatttgagtatcactgcgagatgagctttgatccaaaccttctccacaacaatggacataatgggtaccctaatggtacttcagcagcactgcgtgaaactggggttattgaaaaactgttaacctcttacggatttattcagtgttcagaacgtcaagctagacttttcttccactgttcacagtataatggcaacctgcaagacttaaaagtaggagatgatgttgaatttgaagtatcatcggaccgacggactgggaaacccattgctgttaaactggtgaagataaaacaagaaatcctccctgaagaacgaatgaatggacaagttgtgtgcgctgttcctcacaacttagagagtaaatctccagctgccccgggtcagagtccaacagggagtgtatgctacgaacgtaatggggaagtgttttatctgacttacacccctgaagatgtcgaagggaacgttcagctggaaactggagataaaataaactttgtaattgataacaataaacatactggtgctgtaagtgctcgcaacattatgctgttgaaaaagaaacaagcccgctgtcagggagtagtttgtgccatgaaggaggcatttggctttattgaaagaggtgatgttgtaaaagagatattctttcactatagtgaatttaagggtgacttagaaaccttacagcctggcgatgatgtggaattcacaatcaaggacagaaatggtaaagaagttgcaacagatgtcagactattgcctcaaggaacagtcatttttgaagatatcagcattgaacattttgaaggaactgtaaccaaagttatcccaaaagtacccagtaaaaaccagaatgacccattgccaggacgcatcaaagttgactttgtgatccctaaagaacttccctttggagacaaagatacgaaatccaaggtgaccctgctggaaggtgaccatgttaggtttaatatttcaacagaccgacgtgacaaattagagcgagcaaccaatatagaagttctgtcaaatacatttcagttcactaatgaagcccgagaaatgggtgtgattgctgccatgagagatggttttggtttcatcaagtgtgtggatcgtgatgttcgtatgttcttccacttcagtgaaattctggatgggaaccagctccatattgcagatgaagtagagtttactgtggttcctgatatgctctctgctcaaagaaatcatgctattaggattaaaaaacttcccaagggcacggtttcatttcattcccattcagatcaccgttttctgggcacggtagaaaaagaagccactttttccaatcctaaaaccactagcccaaataaaggcaaagagaaggaggctgaggatggcattattgcttatgatgactgtggggtgaaactgactattgcttttcaagccaaggatgtggaaggatctacttctcctcaaataggagataaggttgaatttagtattagtgacaaacagaggcctggacagcaggttgcaacttgtgtgcgacttttaggtcgtaattctaactccaagaggctcttgggttatgtggcaactctgaaggataattttggatttattgaaacagccaatcatgataaggaaatctttttccattacagtgagttctctggtgatgttgatagcctggaactgggggacatggtcgagtatagcttgtccaaaggcaaaggcaacaaagtcagtgcagaaaaagtgaacaaaacacactcagtgaatggcattactgaggaagctgatcccaccatttactctggcaaagtaattcgccccctgaggagtgttgatccaacacagactgagtaccaaggaatgattgagattgtggaggagggcgatatgaaaggtgaggtctatccatttggcatcgttgggatggccaacaaaggggattgcctgcagaaaggggagagcgtcaagttccaattgtgtgtcctgggccaaaatgcacaaactatggcttacaacatcacacccctgcgcagggccacagtggaatgtgtgaaagatcagtttggcttcattaactatgaagtaggagatagcaagaagctctttttccatgtgaaagaagttcaggatggcattgagctacaggcaggagatgaggtggagttctcagtgattcttaatcagcgcactggcaagtgcagcgcctgtaatgtttggcgagtctgtgagggccccaaggctgttgcagctcctcgacctgatcggttggtcaatcgcttgaagaatatcactctggatgatgccagtgctcctcgcctaatggttcttcgtcagccaaggggaccagataactcaatggggtttggtgcagaaagaaagatccgtcaagctggtgtcattgactaaccacatccacaaagcacaccattaatccactatgatcaagttggggggaatctggtgaagggttctgaatatctccctcttcatccctcccgaaatctggaatacttattctattgagctattacaccagttttaacaccttcctcgtgttatgtttaaaaaaataaataaatttaagaaaaccattttaaataatgcacagttgcagcctggaaaaacttaaggtggcgccttatagtatcaattttaggagctttatttggtgcatttaacgcaactggtaattgcagaatccactttgcctgtgtaagtgaaaaatatagactgttatcttgttggccctatgaaattctgcacttttcattatatactctaccttcattaattacttctggcaagatgttctgccttagcactcagttgcattcttttcctttttcttcctgttcattatgctttaattctgaggaccatatgagggtagaatatattatcttttaaaaattacaaaaatttgtataggcaaaccatttcttaaagttgatggccaaattttaaaatgttatttttcatatcatttataatcttgtcacaatccacttaaagaagtttggttatatttcagtgaaaattttcttccagagtaggttttttttcgtgggttggggggtaactttactacaattagtaagtatggtgcagaatttcatgcaaatgaggagtgccagcagtgtgataatttaaacatatttaaacaaaaacaaaaaaaatgaatgcacaaacttgctgctgcttagatcactgcagcttctaggacccggtttcttttactgatttaaaaacaaaacaaaaaaaaataaaaaagttgtgcctgaaatgaatcttgtttttttttataagtagccgcctggttactgtgtcctgtaaaatacagacacttgacccttggtgtagcttctgttcaactttatatcacgggaatggatgggtctgatttcttggccctcttcttgaattggccatatacagggtccctggccagtggactgaaggctttgtctaagatgacaagggtcagctcaggggatgtgggggagggcggttttatcttcccccttgtcgtttgaggttttgatctctgggtaaagaggccgtttatctttgtaaacacgaaacatttttgctttctccagttttctgttaatggcgaaagaatggaagcgaataaagttttactgatttttgagacact

SEQ ID NO: 1737 - DNA, 2053 bp, Homo sapiens
tccggagacacagtgggatccaaaaaagtaccatgtaataacatacatgatttctgcagcaaaatgttacactaagcaggacaaagatgtaaagtccctcacacatcaattgaggttattgtgctgccctatcaatttacttaaacttccaggggattttcagttttaacactgaatttccgggaaaaggcgaacaccaggaaagacaaaacaaagacccatttccctatcgataccggaatgcccacagtcgagctgcttgatctggacaccatggaggagagctctgagataaaagtggaaacaaacatttccaagacatcctggattcggagttccatggctgccagtgggaaaagggtcagcaaagccctcagctacatcacaggagagatgaaggagtgtggagagggacttaaagacaagtccccagtgttccagttctttgactgggtcctccgaggcacatctcaagtgatgtttgtgaacaaccccctcagcggcatcctcatcatcctcggcctcttcatccagaacccctggtgggcgatctcaggctgcctgggtaccatcatgtccaccttgacagccctcatcctgagtcaggacaagtcggccatcgctgcaggatttcacggctacaatggggtgctggtggggctgctgatggccgtgttctcagacaaaggtgactactactggtggctgttgctacccgtcatcatcatgtccatgtcttgccccatcctctccagtgccctgggtaccatcttcagcaagtgggacctcccagtcttcacactgcccttcaatatcactgtgactttgtacctggcagccacaggccactacaaccttttcttccccacaacgctgctgcagcctgcatccgccatgcccaacatcacctggtcagaggtccaagtgcccttgcttttgagagccatccccgttggaattggccaagtgtacggctgtgataacccctggactggaggcatcttcctcatagctctgttcatatcctcacctctcatttgcttgcatgcagcaattggatccaccatggggatgctagcagcactcactattgcgacgccctttgactccatctacttcggcctgtgtggcttcaacagcaccctcgcatgcatagcgataggaggcatgttctacgtcatcacctggcagacgcacctcctcgccatcgcctgcgcactgtttgctgcctacctgggtgctgccctggctaacatgttatctgtgtttggattgccgccctgcacttggcccttctgtctctcagctctcaccttcctgctcctgacgaccaataaccccgccatctacaagctcccgctcagcaaagtcacctacccagaggccaaccgcatctactacctgtcccaggagagaaacagaagggcatcaatcataacaaagtatcaagcctacgatgtctcctaagtttccctgtctaaaacacatcagtgtaaattcaggcttcagcacgccgtccagatccccaggataagagaccacttagccttccctttggtctgttctgtgactctctccccaaacacaaagaagcgtgtatgtagtcaccattccagaacctctcttttctaagatgcacaacacttatcaaagatatgtttagtttagactttatacccttagctttcccataagagctccctttgtggggaacttgccctcttctgcgaaataagcctcatccttaaagagaagtcaccggccgggcacggtcgtcacgcctgtaatcccagcactttgggaggccgaggcgggtggatcacgaggtcaggagatcgagaccatcctggcgaacatggtgagaccccatctctactaaaaatacaaaaaattagccaggcatggtggcgggcacctgtagtcccagctacttgggaggctgaggcaggagaatggcgtgaacccgggaggtggagcttgcagtgagccaagatcacgccactgcactccagcctgggcaacggagtgagactctgtctcaaaaaaaaaaccg

SEQ ID NO: 1738 - DNA, 2975 bp, Homo sapiens
ggcgtctgcctgagcccgcttttctacaagatgtggggatttttgaagcgccctgtagtggtgacggctgacatcaacttgagccttgtggccctgactgggatggggttactgagccggctgtggcgactcacctacccgcgggctgtggtttttgacgaagtatattatgggcagtacatctctttttacatgaaacaaatcttcttcttggatgacagtgggccgccatttggccacatggtgctggccttgggaggttatttaggaggattcgatggcaattttttgtggaacagaattggagcagaatacagtagcaacgtgcctgtgtggtccctgcgcctgctgccagcactcgcgggggccttgtcggtccccatggcctaccagatagtgttggagctccacttttctcattgtgccgccatgggagctgctctgttgatgcttatcgagaatgctctcatcactcagtcaaggctaatgcttttggaatcagtgttaatatttttcaatctattggccgtgttgtcctacctgaagttcttcaactgccaaaagcacagccctttttctctgagctggtggttctggctaacactgacaggggtcgcttgttcctgtgcagtgggcatcaagtacatgggtgtgttcacgtacgtgctcgtgctgggtgttgcagctgtccatgcctggcacctgcttggagaccagactttgtccaatgtaggtgctgatgtccagtgctgcatgaggccggcctgtatggggcagatgcggatgtcacagggggtctgtgtgttctgtcacttgctcgcccgagcagtggctttgctggtcatcccggtcgtcctgtacttactgttcttctacgtccacttgattctagtcttccgctctgggccccacgaccaaatcatgtccagtgccttccaggccagcttagagggaggactagctcggatcacccagggtcagccactggaggtggcctttgggtcccaggtcactctgaggaacgtctttgggaaacctgtgccctgctggcttcattcccaccaggacacctaccccatgatatatgagaacggccgaggcagctcccaccagcaacaggtgacctgttaccccttcaaagacgtcaataactggtggattgtaaaggatcccaggaggcaccagctggtggtgagcagccctccgagacctgtgaggcacggggacatggtgcagctggtccacggcatgaccacccgctccctgaacacgcatgatgttgcagcccccctgagcccccattcacaggaggtctcctgctacattgactataacatctccatgcccgcccagaacctctggagactggaaattgtgaacagaggatctgacacagacgtctggaagaccatcctctcagaggtccgctttgtgcacgtgaacacttccgctgtcttaaagctgagcggggctcacctccctgactgggggtatcggcaactggagatcgtcggggagaagctgtcccggggctaccacgggagcacggtgtggaacgtggaggagcaccgatacggcgcgagccaggagcagagggagcgggaacgggagctgcactcacctgcgcaggtggacgtcagcaggaacctcagcttcatggcgagattctcggagctgcagtggaggatgctggcgctgagaagtgatgactcggaacacaagtacagctccagcccactggagtgggtcaccctggacaccaatattgcctactggctgcaccccaggaccagcgctcagatccacctacttggaaacatagtgatctgggtttcgggcagcctcgctctggccatctacgccctgctgtccttgtggtacctgctccgacggcgaagaaatgtccatgacctccctcaggatgcctggctgcgctgggtgctggctggggcgctgtgtgccggtggctgggcagtgaactacctcccgttcttcctgatggagaagacactcttcctctaccactacctgcccgcactcaccttccaaatccttctgctccctgtggtcctgcagcacatcagcgaccacctgtgcaggtcccagctccagaggagcatcttcagcgccctggtggtggcctggtactcctccgcgtgccacgtgtccaacacgctgcgcccactcacctacggggacaagtcactctcgccacatgaactcaaggcccttcgctggaaagacagctgggacatcttgatccgaaaacactagaacaagagtgtggcaaagaacacccgtgctggggtcgggacgaggttgaagggtcttggtcaatgtacgtaatgagcagggtgggcccacgctgggaggacacgggctgggctgagcagggcctctagtggaacacattgggggtctcattgaaaagctctctgatgagcacctccttttgtgcaaagttaattttttctcgacaataaagatattccgtgtcttcacccctgaactaagacacagggagtatttcagaggccagcgtaggagtcatcgacaacgaaaagccgagaacccagggccagcagtggaagcctcaagcaagaccagggcctggtccttgctaattgctgcagggtggagtttgatctggcagacccgatcctccttcatgaacacccagcaacctgagcaagtcccggccctgccctcagcgagcccggcaggcgtcccgggacagctcagtgttggagggccacctgaaccacgagccagggctggggcttgcatgtcattgtctatgacagcgtcaagactgcccttggcaccgtgctgtgtggaaaccctcccctctgagactccactgagacgtggctgagtgaaatcttcctcgtcagtggtcaaggtgtgtcatccatacagctccatgcctttgtcttttttaaatgtaattaaaaaaggaaccaactggcgtttgt

SEQ ID NO: 1739 - DNA, 1647 bp, Homo sapiens
ggcaggcatgggagccgcgcgctctctcccggcgcccacacctgtctgagcggcgcagcgagccgcggcccgggcgggctgctcggcgcggaacagtgctcggcatggcagggattccagggctcctcttccttctcttctttctgctctgtgctgttgggcaagtgagcccttacagtgccccctggaaacccacttggcctgcataccgcctccctgtcgtcttgccccagtctaccctcaatttagccaagccagactttggagccgaagccaaattagaagtatcttcttcatgtggaccccagtgtcataagggaactccactgcccacttacgaagaggccaagcaatatctgtcttatgaaacgctctatgccaatggcagccgcacagagacgcaggtgggcatctacatcctcagcagtagtggagatggggcccaacaccgagactcagggtcttcaggaaagtctcgaaggaagcggcagatttatggctatgacagcaggttcagcatttttgggaaggacttcctgctcaactaccctttctcaacatcagtgaagttatccacgggctgcaccggcaccctggtggcagagaagcatgtcctcacagctgcccactgcatacacgatggaaaaacctatgtgaaaggaacccagaagcttcgagtgggcttcctaaagcccaagtttaaagatggtggtcgaggggccaacgactccacttcagccatgcccgagcagatgaaatttcagtggatccgggtgaaacgcacccatgtgcccaagggttggatcaagggcaatgccaatgacatcggcatggattatgattatgccctcctggaactcaaaaagccccacaagagaaaatttatgaagattggggtgagccctcctgctaagcagctgccagggggcagaattcacttctctggttatgacaatgaccgaccaggcaatttggtgtatcgcttctgtgacgtcaaagacgagacctatgacttgctctaccagcaatgcgatgcccagccaggggccagcgggtctggggtctatgtgaggatgtggaagagacagcagcagaagtgggagcgaaaaattattggcattttttcagggcaccagtgggtggacatgaatggttccccacaggatttcaacgtggctgtcagaatcactcctctcaaatatgcccagatttgctattggattaaaggaaactacctggattgtagggaggggtgacacagtgttccctcctggcagcaattaagggtcttcatgttcttattttaggagaggccaaattgttttttgtcattggcgtgcacacgtgtgtgtgtgtgtgtgtgtgtgtgtaaggtgtcttataatcttttacctatttcttacaattgcaagatgactggctttactatttgaaaactggtttgtgtatcatatcatatatcatttaagcagtttgaaggcatacttttgcatagaaataaaaaaaatactgatttggggcaatgaggaatatttgacaattaagttaatcttcacgtttttgcaaactttgatttttatttcatctgaacttgtttcaaagatttatattaaatatttggcatacaagagaaaaaaaaaaaaaaaa

SEQ ID NO: 1740 - DNA, 1007 bp, Homo sapiens
gttcccagaagctccccaggctctagtgcaggaggagaaggaggaggagcaggaggtggagattcccagttaaaaggctccagaatcgtgtaccaggcagagaactgaagtactggggcctcctccactgggtccgaatcagtaggtgaccccgcccctggattctggaagacctcaccatgggacgcccccgacctcgtgcggccaagacgtggatgttcctgctcttgctggggggagcctgggcaggacactccagggcacaggaggacaaggtgctggggggtcatgagtgccaaccccattcgcagccttggcaggcggccttgttccagggccagcaactactctgtggcggtgtccttgtaggtggcaactgggtccttacagctgcccactgtaaaaaaccgaaatacacagtacgcctgggagaccacagcctacagaataaagatggcccagagcaagaaatacctgtggttcagtccatcccacacccctgctacaacagcagcgatgtggaggaccacaaccatgatctgatgcttcttcaactgcgtgaccaggcatccctggggtccaaagtgaagcccatcagcctggcagatcattgcacccagcctggccagaagtgcaccgtctcaggctggggcactgtcaccagtccccgagagaattttcctgacactctcaactgtgcagaagtaaaaatctttccccagaagaagtgtgaggatgcttacccggggcagatcacagatggcatggtctgtgcaggcagcagcaaaggggctgacacgtgccagggcgattctggaggccccctggtgtgtgatggtgcactccagggcatcacatcctggggctcagacccctgtgggaggtccgacaaacctggcgtctataccaacatctgccgctacctggactggatcaagaagatcataggcagcaagggctgattctaggataagcactagatctcccttaataaactcacaactctc

SEQ ID NO: 1741 - DNA, 1634 bp, Homo sapiens
ggtggcgtggggactccctgaaagcagagcggcagggcgcccggaagtcgtgagtcgagtcttcccgggctaatccatgccgggttggaggctgctgacgcaggtcggcgcccaggtgctgggtcgactcggggacggcctgggtgctgccctgggcccggggaacagaacacacatctggctttttgttagaggtcttcatggaaagagtggtacatggtgggatgagcatctttctgaagaaaatgtcccattcattaagcagttggtctctgatgaagataaagcccaattagcaagtaaactgtgtcctctgaaagatgaaccatggcctatacatccttgggaaccaggttcctttagagttggtcttattgccttgaagctgggcatgatgcctttatggaccaaggatggtcaaaagcatgtggtcacattacttcaggtacaagactgtcatgtcttaaaatatacgtcaaaggaaaactgtaatggaaaaatggcaaccctgtctgtaggaggaaaaactgtatcacgttttcgtaaagctacatccatattggaattttaccgggaacttggattgccgccgaaacagacagttaaaatctttaatataacagataatgctgcaattaaaccaggcactcctctttatgctgctcactttcgtccaggacagtatgtggatgtcacagccaaaactattggtaaaggttttcaaggtgtcatgaaaagatggggatttaaaggccagcctgctacgcatggtcaaacgaaaacccacaggagacctggagctgttgcaactggtgatattggcagagtctggcctggaactaaaatgcctggaaaaatgggaaacatatacaggacagaatatggactgaaagtgtggagaataaacacaaagcacaacataatctatgtaaatggctctgtacctggacataaaaattgcttagtaaaggtcaaagattctaaactgcctgcatataaggatctcggtaaaaatctaccattccctacatattttcctgatggagatgaagaggaactgccagaagatttgtatgatgaaaacgtgtgtcagcccggtgcgccttctattacatttgcctaacatctttggacgtggcagaaccttacatattctgtgagcttcgatgagccagagtgatatcataaccaccagaaatcatactctcctttcttagtcacaacaaaatcacacatgtcatctttgtcaagggcataaatatatcattcatacccccattaaattttgttagaaaaattaccacattaaatatatgagttaagtagattggatttgctgaaattggtgttgggcatattagcaaaatattcttaatttgtggactcgattcttttttactacatatttcccaagttatcttaagatgtctgtaaatttaacttttattaaagttttgtcaatctttgtgaaatagtggttgtggaacagtagaaaaccatatggggactatagtgcaacctatttgggtaaagaaaccatttgctaaaatggagaaagtaaatagatttttatttaaattacagaaacatgttaaaggccggacaaaggaaagacaataaaatcataaattatc

SEQ ID NO: 1742 - DNA, 455 bp, Homo sapiens
cttcctctttccctcggagcgggcggcggcgttggcggcttgtgcagcaatggccaagatcaaggctcgagatcttcgcgggaagaagaaggaggagctgctgaaacagctggacgacctgaaggtggagctgtcccagctgcgcgtcgccaaagtgacaggcggtgcggcctccaagctctctaagatccgagtcgtccggaaatccattgcccgtgttctcacagttattaaccagactcagaaagaaaacctcaggaaattctacaagggcaagaagtacaagcccctggacctgcggcctaagaagacacgtgccatgcgccgccggctcaacaagcacgaggagaacctgaagaccaagaagcagcagcggaaggagcggctgtacccgctgcggaagtacgcggtcaaggcctgaggggcgcattgtcaataaagcacagctggctgag

SEQ ID NO: 1743 - DNA, 3467 bp, Homo sapiens
gcccctcgctcgctcgctccttcccgccctccccgcagcgccggccgagccggcttcccctcagtctctcatgaatattgagcggcccctgttgtatttcccgagctccattgcggaagctgaggctcgccatattgtgcggcggcgccggcgtccgcggcagctgataccagagtcttgctccggccgcggccagcggagccctgggctggggcaggagccgcaatgtctcaggctgtgcagacaaacggaactcaaccattaagcaaaacatgggaactcagtttatatgagttacaacgaacacctcaggaggcaataacagatggcttagaaattgtggtttcacctcgaagtctacacagtgaattaatgtgcccaatttgtttggatatgttgaagaacaccatgactacaaaggagtgtttacatcgtttttgtgcagactgcatcatcacagcccttagaagtggcaacaaagaatgtcctacctgtcggaaaaaactagtttccaaaagatcactaaggccagacccaaactttgatgcactcatcagcaaaatttatccaagtcgtgatgagtatgaagctcatcaagagagagtattagccaggatcaacaagcacaataatcagcaagcactcagtcacagcattgaggaaggactgaagatacaggccatgaacagactgcagcgaggcaagaaacaacagattgaaaatggtagtggagcagaagataatggtgacagttcacactgcagtaatgcatccacacatagcaatcaggaagcaggccctagtaacaaacggaccaaaacatctgatgattctgggctagagcttgataataacaatgcagcaatggcaattgatccagtaatggatggtgctagtgaaattgaattagtattcaggcctcatcccacacttatggaaaaagatgacagtgcacagacgagatacataaagacttctggtaacgccactgttgatcacttatccaagtatctggctgtgaggttagctttagaagaacttcgaagcaaaggtgaatcaaaccagatgaaccttgatacagccagtgagaagcagtataccatttatatagcaacagccagtggccagttcactgtattaaatggctctttttctttggaattggtcagtgagaaatactggaaagtgaacaaacccatggaactttattacgcacctacaaaggagcacaaatgagcctttaaaaaccaattctgagactgaacttttttatagcctatttctttaatattaaagatgtactggcattacttttatggagatcttggatatgttgttcaattttctttctgagccagactagtttacgctattcaaatcttttcccctttatttaagatttcctttttggaagggactgcaattattcagtatttttttctttcctttaaaaaaatatatctgaagtttcttgtgtttttttttttccccacaaagtgtgtttccacttggagcaccattttgacccaggaatttttcatagtttctgtattcttataagattcagttggctgtccttttcctgctcccctcaaaagatttttagtcatacagaatgttaaatattatgtattctgactttttttttcccccggagtcttgtatatttatagttttcctatataaactgtagtatcttcatgaagaacccaaggctcaaatttactgtccttaaaaacaattctcataggattattcttttcatggtattttcttccataatatctcattttaaaaagaagttctttatgaaacttagtgtccattgtcatgcaatgttttttttttccattctttttcccctgtaattttggaatttctggtcctgggaagaatcaaacaaaatcttaagttctatgagaacttggttcattgacatattctgctgaagaaagaaaaattaaattggtagtaaaatatagtcttcaagtatacgtttgagagtgcttttttttgtattagttctgctgtcacttcatttcctgtattatatgtgatgtttttccccattaaaataccagagataatggagatattttgcactttagccttgatgaaaagtacaagatatgttcaaagcttccctaatttttttcttatttgtagccacataagtttcaagaataacatggcacacagaacaatggaaaaaagtttgtttccattggaaaattatatcattttgggttgccacatcagtttataaatttggcgctcttttaattacactctgtagaaggttaatagagcttgagccctgctttaatatgtagtgaaagataattctgtagaaaaacgtcagccagtagggtaaagtcattctactgttcttaatttttatattgaggaacaatattgggtgtttgggagccagaaagctttgttgacagatcagaaataagattgacttgggtgttatatttcatctctctccagactctaggtatatttccaactttatatatcacagtatttaaaaagacatgtttgcattgagaaattaaccctaaagggttttcaatagggtgtagacctccagtacctttgtaactaaagtctgtctagtcattgtaaatatttatctgtcagttttgacagattggggccagcttgatgttttaaatcttcagcccggtatgaaaacttaaaggtatatattcaattttttaccattttatggaaaatatttaaaatttgtttttacagggtttttttttttttttttttttttttgtaatctgtgccatgaaatttgaaaaccaccaaaaatcaagggaacttttatatattcaattccttttctggtgtaatgttaaagttgtatagattattaatgcatgcccactgaatataaccctggttttgtgataaaactgcttagattttgttgatgacattagattagtagttgcattaaataactaaattcccattgtgattaattgaaattttgtctttaagcagagagttatttgtgactataagctttgtgcttagagaatgtatgtgtttttatctgtcagtatgggaggatataaactgcatcattagtgaaattattggttgtgtaatcctttgtgaaatataattctaggtatttgatagggtattgagtgtattttgtgtgtgtgtggatgtgtgttttggggtacggggagaggcgatgctattggccatcactaccaaccagggtttcaaaaagtatatacctaagtaatttcttttatcactacctcaactgaggaagaaaaggctcaccacaagtggtgtgaaggctttgggtacttagttctaaatttttttatggtaacatatacatagccacatttacagttttaaccattttaaggcatgtaattcagtggggttaggtacattcacaatgttgtgtaatgatcaccgccgtg

SEQ ID NO: 1744 - DNA, 3368 bp, Homo sapiens
gtgggggcggggaggagaggcggcggcggcagtgtccaagctacgccactcgggctggggcgttgggagcgggagtgcagagcgtggtcgtggcggcggcggtgagaagagcgaggcggaggagggggtgccatggccgggcagcagttccagtacgatgacagtgggaacaccttcttctacttcctcacctccttcgtggggctcatcgtgatcccggcgacatactacctctggccccgagatcagaatgccgagcaaattcgattaaagaatatcagaaaagtatatggaaggtgtatgtggtatcgtttacggttattaaaaccccagccaaatattattcctacagtaaagaaaatagttctgcttgcaggatgggcattgttcttattccttgcatataaagtttccaaaacagaccgagaataccaagaatacaatccttatgaagtattaaatttggatcctggagccacagtagcagaaattaaaaaacaatatcgtttgctgtcacttaaatatcatccagataaaggaggtgatgaggttatgttcatgaggatagcaaaagcttatgctgctttaacggatgaagagtcccggaaaaattgggaagaatttggaaatccagatgggcctcaagccacaagctttggaattgccctgccagcttggatagttgaccagaaaaattcaattctggttttacttgtatatggattggcatttatggttatccttccagttgttgtgggctcttggtggtatcgctcaatacgctatagtggagaccagattctaatacgcacaacacagatttatacatactttgtttataaaacccgaaatatggatatgaaacgtcttatcatggttttggctggagcttctgaatttgatcctcagtataataaagatgccacaagcagaccaacggataatattctaataccacagctaatcagagaaattggcagcattaatttaaagaagaatgagcctccacttacctgcccatatagcctgaaggccagagttcttttactgtctcatcttgctagaatgaaaattcctgagacccttgaagaagatcagcaattcatgctaaaaaagtgtcctgccctacttcaagaaatggttaatgtaatctgccaactaatagtaatggcccggaaccgtgaagaaagggagtttcgtgctccaactttggcatccctagaaaactgcatgaagctttctcagatggccgttcagggacttcagcaatttaagtctccccttctgcagctccctcatattgaagaggacaatcttagacgggtttctaatcataagaagtataaaattaaaactatccaggatttggtgagtttaaaagaatcagatcgtcacactctactgcacttccttgaagatgaaaaatatgaagaggttatggctgtccttgggagttttccatatgtgaccatggatataaaatcacaggtgttagatgatgaagatagcaacaacatcacagtaggatccttagttacagtgttggttaagttgacaaggcaaacaatggctgaagtatttgaaaaggagcagtccatctgtgctgcagaggaacagccagcagaagatgggcagggtgaaactaacaagaacaggacaaaaggaggatggcaacagaagagtaaaggacccaagaaaactgctaaatcaaaaaaaaagaaacctttaaaaaaaaaacctacacctgtgctattaccacagtcaaagcaacagaaacaaaagcaggcaaatggagtcgttgggaatgaagctgcagtaaaggaagatgaagaagaagtttcagataagggcagtgattctgaagaagaagaaaccaatagagattcccaaagtgagaaagatgatggtagtgacagagactctgatagagagcaagatgaaaaacaaaacaaagatgatgaagcagagtggcaagaattacaacaaagcatacagcgaaaagagagagctctattggaaaccaaatcaaaaataacacatcctgtgtatagcctttactttcctgaggaaaaacaagaatggtggtggctttacattgcagataggaaggagcagacattaatatccatgccatatcatgtgtgtacgctgaaagatacagaggaggtagagctgaagtttcctgcaccaggcaagcctggaaattatcagtatactgtgtttctgagatcagactcctatatgggtttggatcagattaaaccattgaagttggaagttcatgaggctaagcctgtgccagaaaatcacccacagtgggatacagcaatagagggggatgaagaccaggaggacagtgagggctttgaagatagctttgaggaagaagaggaggaagaagaagatgatgactaagcagtactctgaatggaccacagtgtttgcacatatttgcaattttttgctgttttgaaagtgtatcataaaccagaacagtacagaactgatgttgaggaaggtgtagtttttttactctagaaatgggtgcataatataactaggcagtggcggtgccttggtacaacctgaaaaatgttaaggcttattgaaacctttcaagtaggggatggtacatttatttcatctgcaaatgataataaatcctttgttattataactgtccagaagtgtgggctatgtattatctgatcagtctatggtcccagtaaaagtaaagatgcaggaaacacagtctgtaaatgagcgacttttctttgttcagctttagttttagcaaacaccacaaatatgttttaagtaacatcgctcaagtttaagtaacatcgctcaagttgataatctcttgataagctctgttgttgacattttgcagtgatacaacagctccactcatagatttaaacttttatttttacttatcttggtcataagttggcattctctcacattccacatgatatagagggctacgttttggaattttccttttcttaattgcccagagttatcagacagattataaaaatggcttttaatggcttaaaccatttctaaacctctatcttagcagatcaatgcaggatctaattcttttgataagttctagctctaaaagtgatagtgggactgtatgttttctgatactggtggcttatgttattaaaccttttttaaaaaaggttcactctaaaagctgaactacatccttagttttcagtctacttgactctatcaggagctttttaaggaaagtaagtataacatgcaaaggaagctttttttgtattcattttggactcctgtcaataaaaatagaagtttgttgactcgtaaaaaaaaaaaaaaaa

SEQ ID NO: 1745 - DNA, 1995 bp, Homo sapiens
atggcggccgtggggcccccgcagcagcaggtgcggatggcccatcagcagatctgggcggcgctcgaagtggcgctccgggtgccctgcctttacatcatcgacgccatcttcaactcctacccggattccagccaaagccggttctgcatcgtgctccagatcttcctccggctctttggtgtatttgcatccagtattgttctgatcttgtcacaacgatcacttttcaagttttacacgtacagctcagcctttctgttagctgcaacttcagtgttggtgaattattatgcttctttgcacattgacttctatggtgcctacaacacgtcagcttttggaattgagctgcttcctcgaaaaggtccctcgctgtggatggcacttatcgttctacagctaacatttggaattggatacgttacactactccagattcattccatctattcacaattaattattttggatctcttggttcctgtaataggcttaatcacagagctaccattacacatcagagagactttactgtttacttcttccttgattctcacattaaatacagtgtttgtcctggcagtgaaactgaagtggttttattattccacacgatatgtttatcttttggtgaggcacatgtatcgaatttatggattacagttattgatggaggacacatggaagaggattcgtttcccagacatactacgagtcttttggctaacaagagttacagctcaggctacagtgttaatgtacatcttaaggatggcaaatgaaactgattccttctttatttcttgggatgatttttgggacctcatttgcaatcttataattagtgggtgcgattctacactaactgtactgggcatgagtgctgtaatttcctcagtagcccattatttggggcttggaatattggcctttattggatcaactgaggaagatgacaggcgtcttggctttgttgcacctgttttattttttattttggctcttcagactgggttaagtgggctaagaccagaagagagacttattcgcttaagtagaaacatgtgccttttattaactgcagtcctgcattttatccatggaatgacagaccctgtattaatgtctctcagtgcctctcatgtgtcatcttttcgtagacattttcctgtgctgtttgtctctgcttgcctgtttattcttcctgtcttactcagttatgttctttggcatcactatgcactaaatacatggttgtttgcagttacagcattttgtgtggaactgtgcttaaaagtaattgtttctctcactgtttatacgttattcatgattgatggctactataatgtcctctgggaaaagcttgacgattatgtctactacgttcgttcaacaggcagtattattgaatttatatttggagttgtaatgtttggaaatggggcttacactatgatgtttgagtcgggaagtaaaattcgggcttttatgatgtgcctacatgcatattttaacatctacttacaagccaaaaatggctggaagacatttatgaatcgtaggactgctgtgaagaaaattaattcacttcctgaaataaaagggagccgcttacaagaaataaatgatgtatgtgcaatctgctatcatgagtttacaacatctgctcgtattacaccgtgtaatcattatttccatgcactttgccttcggaaatggctgtacattcaagatacttgtccaatgtgccatcagaaagtatacatcgaagatgatatcaaggataattcaaatgtatctaacaacaatggatttattccacccaatgaaactccagaggaagctgtaagagaagctgctgctgaatctgacagggaattgaacgaagatgacagtacagattgtgatgatgatgttcaaagagaaagaaatggagtgattcagcacacaggcgcagcagctgaagaatttaatgatgatactgactga

SEQ ID NO: 1746 - DNA, 1164 bp, Homo sapiens
cgtagtttcgatgccggaacgtgcaggttgcgaatccccgtaggcgagcgagcggctaggttcgtgatctggagagacgctcagattattaagttcctgcaacttaactgggaactgatcaagatttcaagctaaagatggtggtgatgaacagcctgagggtcattcttcaagcctctccaggcaaattgctgtggagaaagttccagattccgagattcatgccagcgaggccctgcagcctctatacttgtacttacaaaacccggaaccgagccttgcatccactctgggagagcgtggacctggttcctgggggcgatcgccagtcacccatcaacattcggtggagggacagtgtttatgatcccggcttaaaaccactgaccatctcttatgacccagccacctgcctccacgtctggaataatgggtactctttcctcgtggaatttgaagattctacagataaatcagtgatcaagggaggacccctggaacacaactaccgattgaagcagttccattttcactggggggccatcgatgcctggggttctgagcacaccgtggacagcaaatgcttcccagcagagctgcacttagtgcattggaacgcagtcagatttgaaaactttgaggatgcagcactggaagaaaatggtttggctgtgataggagtatttttaaagctaggcaaacatcataaggagctacagaaattagtggatactttgccgtcaattaagcataaggacgcccttgtggaatttgggtcatttgacccttcctgcctgatgcctacctgcccagattactggacctactcagggtctctgactaccccacccctctccgagtctgtcacctggatcattaagaagcaaccagtagaggttgatcatgatcagcttgagcaatttcggaccctgcttttcacttccgaaggggagaaagagaaaagaatggtggacaacttccgcccccttcagccactgatgaatcgcactgttcgttcatccttccggcatgattatgtgctgaatgtacaagcaaaacccaagccggccaccagccaagcaaccccctaaaacattcatatctaggcagtattttgcttttgctttaatatatactagcttactataaattgttaactagact

SEQ ID NO: 1747 - DNA, 3255 bp, Homo sapiens
accgttgcggccgcaggggtctgggcagggctgggcagtgctgccggagcaaaagcggtagcgggagcccggccggagctgggtctggagacgccgtggcagcctgaacggagtgtgcgacggattgggaggtttgtctacagattttgagcgttcgaagttgacccctgactaagtatactttgctgctccctcagcctttgaaaaaatgtctgtcacatatgatgattccgttggagtagaagtgtccagcgacagcttctgggaggtcgggaactacaagcggactgtgaagcggatcgacgatggccaccgcctgtgcagcgacctcatgaactgcctgcatgagcgggcgcgcatcgagaaggcgtatgcgcagcagctcactgagtgggcccggcgctggaggcagcttgtggagaaagggccccagtacgggaccgtggagaaggcctggatggccttcatgtccgaggcagagagggtgagcgagctgcacctcgaggtgaaggcctcactgatgaacgatgacttcgagaagatcaagaactggcagaaggaagcctttcacaagcagatgatgggcggcttcaaggagaccaaggaagctgaggacggctttcggaaggcacagaagccctgggccaagaagctgaaagaggtagaagcagcaaagaaagcccaccatgcagcgtgcaaagaggagaagctggctatctcacgagaagccaacagcaaggcagacccatccttcaaccctgaacagctcaagaaattgcaagacaaaatagaaaagtgcaagcaagatgttcttaagaccaaagagaagtatgagaagtccctcaaggaactcgaccagggcacaccccagtacatggagaacatggagcaggtgtttgagcagtgccagcagttcgaggagaaacgccttcgcttcttccgggaggttctgctggaggttcagaagcacctaaacctgtccaatgtggctggttacaaagccatttaccatgacctggagcagagcatcagagcagctgatgcagtggaggacctgaggtggttccgagccaatcacgggccaggcatggccatgaactggccgcagtttgaggagtggtccgcagacctgattcgaaccctcagccggagagagaagaagaaggccactgacggcttcaccctgacgggcatcaaccagacaggcgaccagtttttgccgagtaagcccagcagcacccttaatgtcccgagcaaccccgcccagtctgcgcagtcacagtccagctacaaccccttcgaggatgaggacgacacgggcagcaccgtcagtgagaaggaggacattaaggccaaaaatgtgagcagctacgagaagacccagagctatcccaccgactggtcagacgatgagtctaacaaccccttctcctccacggatgccaatggggactcgaatccattcgacgacgacgccacctcggggacggaagtgcgagtccgggccctgtatgactatgaggggcaggagcatgatgagctgagcttcaaggctggggatgagctgaccaagatggaggacgaggatgagcagggctggtgcaagggacgcttggacaacgggcaagttggcctatacccggcaaattatgtggaggcgatccagtgatgagtcggggacaggccagcggggggacggaggcggcgggcccaggagcctcagccagccacgtgggcatccactccttttcctgcaagagatgatggttccattgctcttggcttcatggtgttcctggaaggcagatgagctggtcatttcgcctgggactcggcacctttccgagtgcagctggagggatctgagcgcaggaagacgcagaacaacagaaatagccgcccctccccgcccactgtgcctgttggcctatcatagatctctatgttcttgactttgtctctcctttccgagtcaatggtgggttacactgatcttgttccactgattactctctctgacgagtccatcacctgcaacttaaatgaacaagcttacatcccattttgagtgaagattttgaggtttttaatttaaaggctgtgtacagttatacttttttatacacctgttcatttctacttaaattatggcacagattgatgcgcaccagtcttgaggaaacgatctccctattcccttaccctgttactcagccacgccgtgtgtaggcttagcctcaggtggcagatgtttgaggaaaggaattatgccaggaaggtgggaccgggttatggtcgggtttctattgggaatgctctttgtgcttttgggcatctgaatggaagctttacatagaaccttaggtagaactcccccaaatcgccatatttaaaaattattttcactctattcttgcttaaaactgtactcttttgcaaattaacaattttatcactgattcagagttaaaaagaagactaacttttcaagcaaatgcatctgtaaagatgctttagattagactgtcatgtctcagtgtctatctgtatatattatttgatattcagagaatctaaagcactcgtctactgttttaatgagatttaacagcttttaacagtgagtttcgtttgtaaactgcttgaagtctgtggcattcaggcacacgtctggctggccggctgggtctcctcccgggctcagtgggcctggggcctctctgacgtggtgcctgctggagggaggctcgtcgtcaccagctgactgctggtccggcttctgaccggcctttgtcctggctccgtagcagaacactgtaaaagtgcccgcgtctttgcagtagttgcagatttcagtcgtcgtgttacttgtgcacaaacagaagctgggtcttacccgcagcacgagtgtctcgggctgcccggagtcgcccgggagcaggtgctgcagccagagttacgcgggggccacgcgggccggcgggggtggggggaacgtgggggaacctgtgtttcacgtgactcagcagtgcccgccgccgtcaccagctatgcattcactccgtttccagtgagcagatgtcttgcttggaaagtggacctgtgtctgtgtctgtcctgagaacttaccagcagaaatcctcatttctgtgctacggatttaccaaaaattgtcaagtctttttcagtttaacagttcctttacatgtgtagtatttgaggaaaaaaatcaataaacagttgatctcgtgcata

SEQ ID NO: 1748 - DNA, 1271 bp, Homo sapiens
tgggcgcggccatgttggaggctccgggcccgagtgatggctgcgagctcagcaaccccagcgccagcagagtcagctgtgccgggcagatgctggaagtgcagccaggattgtatttcggtggggccgcggccgtcgcggagccagatcacctgagggaagcgggcatcacggccgtgctaacagtggactcggaggagcccagcttcaaggcggggcctggggtcgaggatctatggcgcctcttcgtgccagcgctggacaaacccgagacggacctactcagccatctggaccggtgcgtggccttcatcggtcaggcccgcgctgagggccgtgcggtgttggtgcactgtcatgcaggagtcagtcgaagtgtggccataataactgcttttctcatgaagactgaccaacttccctttgaaaaagcctatgaaaagctccagattctcaaaccagaggctaagatgaatgaggggtttgagtggcaactgaaattataccaggcaatgggatatgaagtggatacctctagtgcaatttataagcaatatcgtttacaaaaggttacagagaagtatccagaattgcagaatttacctcaagaactctttgctgttgacccaactaccgtttcacaaggattgaaagatgaggttctctacaagtgtagaaagtgcaggcgatcattatttcgaagttctagtattctggatcaccgtgaaggaagtggacctatagcctttgcccacaagagaatgacaccatcttccatgcttaccacagggaggcaagctcaatgtacatcttatttcattgaacctgtacagtggatggaatctgctttgttgggagtgatggatggacagcttctttgcccaaaatgcagtgccaagttgggttccttcaactggtatggtgaacagtgctcttgtggtaggtggataacacctgcttttcaaatacataagaatagagtggatgaaatgaaaatattgcctgttttgggatcacaaacaggaaaaatatgaacatgatattttatagcttgggaagaaacttgcagatgatatgtgctgcctttgcttcttatcattcatggcagattgttagtgctttcaacatttcatttgaaatgggagaagataaaatcacttgatgtaacctggaaactatgctttacatggcaatcaaagccttttgatcatgtacattttatttgatattaaaatcttttataaccagaaaaaaaaaaaaaaaaaaaaaaa

SEQ ID NO: 1749 - DNA, 2970 bp, Homo sapiens
ggcggatggaacgcggctcggcgggcgggcagtgccggcgtccgcggctgggaatggtgctggctgtgttggtcggtgcctgcgttctgaagcccgagaggagccacaatggagacgccgccgctgcctcccgcatgcacaaagcagggtcatcagaagcctctcgattcaaaagatgataataccgaaaaacactgcccagtgacagtgaatccttggcatatgaagaaagctttcaaagtcatgaacgaattaagaagtcaaaatttgctgtgcgatgtcacaattgtggcagaagacatggaaatttctgctcatagagtggtgctggccgcctgtagtccttattttcatgccatgtttacaggtgagatgagtgagagccgagcaaagagagttagaataaaagaggtagatggctggaccctgaggatgctaattgattatgtttacactgcagaaattcaggttacagaagaaaatgtacaggtacttctcccagcagctggtctcttacagttacaggatgtgaagaagacttgttgtgaatttttggaatcccagcttcaccctgtcaactgcttaggaatccgggcttttgctgatatgcatgcatgtaccgaccttctgaacaaggccaacacctatgcagagcaacattttgcagatgttgtacttagtgaagaatttctcaatcttggcatcgaacaagtgtgcagcttaatctcaagtgacaaacttaccatttcttcagaagagaaggtatttgaagcagtaatagcatgggtgaaccatgacaaggatgtgaggcaagagtttatggcccgactgatggaacatgtacggttacctttgcttcctcgggaatatttagttcagagggttgaagaggaagcattggtcaagaatagcagtgcttgcaaaaattacctcattgaagcaatgaagtaccatttgctgccaacagagcagcgtatattaatgaagagtgtccggacccggctgaggacacccatgaaccttcccaaattgatggtggtggttgggggccaagcaccaaaggctatccggagtgtggaatgctatgactttaaagaagaaaggtggcaccaagtagcagagttgccttccaggaggtgcagagcaggcatggtctacatggctggacttgtttttgctgttggtggctttaatggctcattaagagttcgcactgtagattcctacgaccctgtgaaggaccagtggaccagcgttgctaacatgagagaccggagaagcactttgggagctgctgtgttaaatggattattatacgctgtgggaggctttgatgggagtacaggtttgtcatctgtggaagcatacaacataaagtctaatgagtggtttcatgtagctcccatgaatacaaggaggagcagtgttggtgtgggtgttgttggaggtttgctctatgctgtaggaggttatgatggagcatcacgtcagtatcttagcacagtagaatgctataatgctacaacaaatgagtggacctatatagcagaaatgagcaccaggcggagtggagcaggtgttggtgtgttaaacaatttattgtatgctgtaggaggtcatgatggccctttagtacgaaaaagtgttgaagtatatgaccccaccactaacgcatggagacaggttgcagatatgaacatgtgcagaagaaatgcaggagtttgtgcagttaatggtctgttatatgttgttggaggggatgatggttcctgtaacttggcgtcagtagaatattataacccaacaaccgataaatggacagttgtgtcatcgtgtatgagcacagggagaagttatgcaggggtcacagttattgataaaccattatgagcctgaaggacattttcagcatatttatacatgagaaacagccttcaacaagtatttgtgaagtgactgagaatctagcacttctccacttgtagctgcactttaagtctcagcagaagatacgatcgtctgcctttataggcctcagatactgaagattatttttggtagaagcaccgtgtaggctttttctgcaatgagcagcagctgactgaattttcataagaaacttggactgcaggacttaatctgtagtctttagacaacagttgctttcataaagactagttcttatcaaccttgaatgactacagattattttgtgaaggaggatgaagtaatgtgtgttcttgtaaaattaaattttatctttatttcttctaaaaatctgtataccaggaactgaaaatctttgaacagatattaaaatctacgtaagtatacaaactagttgagggatacactgtttgcttttataaaataactttgattacatgaatataataaattatgtgcatataaatgtgtgtctatatgctttcctttaaatatgtttgaaaagatgtttgaaacttgattatactatttataattggcacagtactttgaattatgccagtactacattgtaaaacagagttgtattttttgatatttaacaatgcttaacactttaaatgccacttctgaggaatggacctggtgtaacacacttgaatatgtgtgatgccaaactttttaaaatacaatataaattatgcttatttattattttctttagtttaatcttggtcatgttttggtgtgtatttttaattttttcttaaattaacactttggcatgaacattactgcaggtttttgatgaatataatgaatgtatggaattcaattgaatttgcatggtcttcggaattttttctgtgtgtataaatttagctgctattaacagaagagagaactttctgtgagtagccatgtgtgttgatcagatacagtttttctgagatcttcaattaatctcactttaaaaatgaccaaaacatgtctttcttgaattaactttgaataaaagtttgt

SEQ ID NO: 1750 - DNA, 1648 bp, Homo sapiens
ggaagttccggcgggggcggccgagggggaagagtgtgtctgcgggagaaagaggagaatcgcccaagcggcctcggaagtcccagggagtggaggcccccgccgtggagccgtgtggtgtatgtgtggtaacaccatgtctgtgcccctgctcaccgatgctgccaccgtgtctggagctgagcgggaaacggccgcggttatttttttacatggacttggagacacagggcacagctgggctgacgccctctccaccatccggctccctcacgtcaagtacatctgtccccatgcgcctaggatccctgtgaccctcaacatgaagatggtgatgccctcctggtttgacctgatggggctgagtccagatgccccagaggacgaggctggcatcaagaaggcagcagagaacatcaaggccttgattgagcatgaaatgaagaacgggatccctgccaatcgaatcgtcctgggaggcttttcacagggcggggccctgtccctctacacggccctcacctgcccccaccctctggctggcatcgtggcgttgagctgctggctgcctctgcaccgggccttcccccaggcagctaatggcagtgccaaggacctggccatactccagtgccatggggagctggaccccatggtgcccgtacggtttggggccctgacggctgagaagctccggtctgttgtcacacctgccagggtccagttcaagacatacccgggtgtcatgcacagctcctgtcctcaggagatggcagctgtgaaggaatttcttgagaagctgctgcctcctgtctaactagtcgctggccccagtgcagtaccccagctcatgggggactcagcaagcaagcgtggcaccatcttggatctgagccggtcgagcccctgtccccacccttcctgacctgtccttttcccacaggcctctgggggcaggtggcaaggcctggccgggccttccttcctggccttagccacctggctctgtctgcagcaggggcaggctgctttcttatccatttccctggaggcgggcccccctggcagcagtattggaggggctacaggcagctggagaaaggggcccagccgctgacccactcactcaggacctcactcactagccccgctttgggccccctcctgtgacctcagggtttggcccatggggcccccccaggcccctgccccaactgattctgcccagataatcgtgtctcctgcctccactcagctgcttctcagtcatgaatgtggccatggccccggggtccccttgctgctgtgggctccctgtccctgggcaggagtgctggtgaggaggtggagccttttgaggggggccttccctcagctgtttccccacactggggggctgggccctgcctccccgttaccctccttccctgcaggcctggagcctgtagggctggactgaggttcaggtctccccccagctgtctcacccccactttgtccccactctagagcagggaggcagtgggggaggagttgtgtctcgtcttctgtctccatgtggtttttgggtgtttttcttgttgtgtcctggattccgataaaattaaagaaattgcttcctcaaaaaaaaaaaaaaaaaaaaaaaaaa

SEQ ID NO: 1751 - DNA, 842 bp, Homo sapiens
gaattcggcacgagataaaaatggcttccaaaagagctctggtcatcctggctaaaggagcagaggaaatggagacggtcatccctgtagatgtcatgaggcgagctgggattaaggtcaccgttgcaggcctggctggaaaagacccagtacagtgtagccgtgatgtggtcatttgtcctgatgccagccttgaagatgcaaaaaaagagggaccatatgatgtggtggttctaccaggaggtaatctgggcgcacagaatttatctgagtctgctgctgtgaaggagatactgaaggagcaggaaaaccggaagggcctgatagccgccatctgtgcaggtcctactgctctgttggctcatgaaataggttgtggaagtaaagttacaacacaccctcttgctaaagacaaaatgatgaatggaggtcattacacctactctgagaatcgtgtggaaaaagacggcctgattcttacaagccgggggcctgggaccagcttcgagtttgcgcttgcaattgttgaagccctgaatggcaaggaggtggcggctcaagtgaaggctccacttgttcttaaagactagagcagcgaactgcgacgatcacttagagaaacaggccgttaggaatccattctcactgtgttcgctctaaacaaaacagtggtaggttaatgtgttcagaagtcgctgtccttactacttttgcggaagtatggaagtcacaactacacagagatttctcagcctacaaattgtgtctatacatttctaagccttgtttgcagaataaacagggcatttagcaaactaaaaaaaaaaaaaaaaaaactcgag

SEQ ID NO: 1752 - DNA, 1130 bp, Homo sapiens
cttggcgcaggctggaagaggagctggtgagaagacagcgaaatggcgcctccggcccccggcccggcctccggcggctccggggaggtagacgagctgttcgacgtaaagaacgccttctacatcggcagctaccagcagtgcataaacgaggcgcagcgggtgaagctatcaagcccagagagagacgtggagagggacgtcttcctgtatagagcgtacctggcgcagaggaagttcggtgtggtcctggatgagatcaagccctcctcggcccctgagctccaggccgtgcgcatgtttgctgactacctcgcccacgagagtcggagggacagcatcgtggccgagctggaccgagagatgagcaggagcgtggacgtgaccaacatcaccttcctgctcatggccgcctccatctatctccacgaccagaacccggatgccgccctgcgtgcgctgcaccagggggacagcctggagtgcacagccatgacagtgcagatcctgctgaagctggaccgcctggacctcgcccggaaggagctgaagagaatgcaggacctggacgaggatgccaccctcacccagctcgccactgcctgggtcagcctggccacgggtggtgagaagctgcaggatgcctactacatcttccaggagatggctgacaagtgctcgcccaccctgctgctgctcaatgggcaggcggcctgccacatggcccagggccgctgggaggccgctgagggcctgctgcaggaggcgctagacaaggatagtggctacccagagacgctggtcaacctcatcgtcctgtcccagcacctgggcaagccccctgaggtgacaaaccgatacctgtcccagctgaaggatgcccacaggtcccatcccttcatcaaggagtaccaggccaaggagaacgactttgacaggctggtgctacagtacgctcccagcgcctgaggctggcccagagctgtcaggaccatgaagccaggacagaggccaggagccagccctgcagccctccccacccggcatccacctgcatcccctctgggggcaggagcccacccccagcacccccatctgttaataaatatctcaactccaaaaaaaaaaaa

SEQ ID NO: 1753 - DNA, 2508 bp, Homo sapiens
aaagtaggttgggagtggaaggtggtggctcctgctccgcatgtggggaagatggcgccgccggtggcagagagggggctaaagagcgtcgtgtggcagaagataaaagcaacagtgtttgatgactgcaagaaagaaggcgaatggaagataatgcttttagatgaatttaccactaagcttttggcatcgtgttgcaaaatgacagatcttctagaagaaggtattactgttgtagagaatatttataagaaccgtgaacctgtcagacaaatgaaagctctttatttcatcactccgacatcaaagtctgtagattgtttcttacatgattttgcaagtaaatcggagaacaagtataaagcagcatatatttacttcactgacttttgccctgataatctctttaacaaaattaaggcttcttgctccaagtcaataagaagatgtaaagaaataaatatttccttcattccacatgaatctcaggtgtatactcttgatgtaccagatgcattctattactgttatagtccagaccctggtaatgcaaagggaaaagatgccattatggaaacaatggctgaccagatagttacagtgtgtgccaccttggatgaaaatcccggagtaagatataaaagtaaacctctagataatgccagtaagcttgcacagcttgttgaaaaaaagcttgaagactactacaagattgatgaaaagagcctaataaagggtaaaactcattcacagctcttaataattgatcgtggctttgatcctgtgtccactgtcctgcatgaactgacctttcaggcaatggcatatgatctactaccaattgagaatgatacatacaaatataaaacagatgggaaaggaaaggaggccatccttgaagaagaagatgacctctgggttagaattcgacatcgacatattgcggttgtgttagaggaaattcccaagcttatgaaagaaatttcatcaacaaagaaagcaacagaaggaaagacatcacttagtgctcttacccagctgatgaaaaagatgccccatttccgaaaacagattactaagcaagttgtccatcttaacttagcagaagattgcatgaataagttcaagcttaatatagaaaagctctgcaaaactgaacaggacctggcacttggaactgatgcagaaggacagaaggtgaaagattccatgcgagtactccttccagttctactcaacaaaaatcatgataattgtgataaaataagagcaattctactttatatcttcagtattaatggaactacggaagaaaatttggacaggttgatccagaatgtaaagataggaaatgagagtgacatgattcgtaactggagttaccttggtgttcccattgttccccaatctcaacaaggcaaaccgttaagaaaggatcggtctgcagaagaaacttttcagctctctcggtggacaccttttatcaaagatattatggaggatgctattgataatagattagattcaaaagaatggccatattgttcccagtgtccagcagtatggaatggttcaggagctgtaagtgctcgccagaaacccagagctaattatttagaagaccgaaaaaatgggtcaaagctgattgtttttgtaattggagggatcacatactctgaagtgcgtggtgcttatgaagtttctcaggcacataaatcctgtgaagttattattggttctacacatgttttaacacccaaaaagctgttggatgatataaagatgctgaataaacccaaggataaagtctccttaattaaagatgaatagcatttctttttggagggtttagagattcttactaatatgttgaactaaaatagaaagaaaatgttgctgtcatgtaatttaaacaatgtaaatattttatggaataatggcttttcaaatacatttcttaaggaactgtttatgattattactggatttgtcatttttgataatttaaatattgctgctgctttgtagatgatgagaagaaatgttaaagtgctttctaaaaggaaattttttcacctttggaggagaatatattagagttgtgggtaatttttcacagccacctatgtacatactaattacccattggatacttatatctaaaagtctcatgctgaagtatagtttttgggaaagaatgattttaaataaagagattgtaaaagtaaaaaactgtaaatgtatatgtatgatagaattgtttcctctaagtgtagtttttctttcaactaaaattcagtttatgtgtaaaataattcagtcattaatagaaatggagtgatttcacagtgtgtactgttttgccacatacttctaaagaacacaattttatataattttgaaatcatgtatgtttaaattagaaaaccaaaaatcatgaacattctaagaggaaataaatatagaatttaaaaaattaaaaaaaaaaaaaaaaaaaaaaaaggaatt

SEQ ID NO: 1754 - DNA, 894 bp, Homo sapiens
atgttgggcatcactgtcctcgctgcgctcttggcctgtgcctccacctgtggggtgcccagcttcccgcccaacctatccgcccgagtggtgggaggagaggatgcccggccccacagctggccctggcagatctccctccagtacctcaagaacgacacgtggaggcatacgtgtggcgggactttgattgctagcaacttcgtcctcactgccgcccactgcatcagcaacacccggacctaccgtgtggccgtgggaaagaacaacctggaggtggaagacgaagaaggatccctgtttgtgggtgtggacaccatccacgtccacaagagatggaatgccctcctgttgcgcaatgatattgccctcatcaagcttgcagagcatgtggagctgagtgacaccatccaggtggcctgcctgccagagaaggactccctgctccccaaggactacccctgctatgtcaccggctggggccgcctctggaccaacggccccattgctgataagctgcagcagggcctgcagcccgtggtggatcacgccacgtgctccaggattgactggtggggcttcagggtgaagaaaaccatggtgtgcgctgggggcgatggcgtcatctcagcctgcaatggggactccggtggcccactgaactgccagttggagaacggttcctgggaggtgtttggcatcgtcagctttggctcccggcggggctgcaacacccgcaagaagccggtagtctacacccgggtgtccgcctacatcgactggatcaacgagaaaatgcagctgtgatttgttgctgggagcggcggcagcgagtccctgcaacagcaataaacttccttctcctcgggccacctgaaaaaaaaaaaaaaaaaa

SEQ ID NO: 1755 - DNA, 1342 bp, Homo sapiens
gcagtacctaagccggagcggggtagaggcgggccggcacccccttctgacctccagtgccgccggcctcaagatcagacatggcccagaacttgaaggacttggcgggacggctgcccgccgggccccggggcatgggcacggccctgaagctgttgctgggggccggcgccgtggcctacggtgtgcgcgaatctgtgttcaccgtggaaggcgggcacagagccatcttcttcaatcggatcggtggagtgcagcaggacactatcctggccgagggccttcacttcaggatcccttggttccagtaccccattatctatgacattcgggccagacctcgaaaaatctcctcccctacaggctccaaagacctacagatggtgaatatctccctgcgagtgttgtctcgacccaatgctcaggagcttcctagcatgtaccagcgcctagggctggactacgaggaacgagtgttgccgtccattgtcaacgaggtgctcaagagtgtggtggccaagttcaatgcctcacagctgatcacccagcgggcccaggtatccctgttgatccgccgggagctgacagagagggccaaggacttcagcctcatcctggatgatgtggccatcacagagctgagctttagccgagagtacacagctgctgtagaagccaaacaagtggcccagcaggaggcccagcgggcccaattcttggtagaaaaagcaaagcaggaacagcggcagaaaattgtgcaggccgagggtgaggccgaggctgccaagatgcttggagaagcactgagcaagaaccctggctacatcaaacttcgcaagattcgagcagcccagaatatctccaagacgatcgccacatcacagaatcgtatctatctcacagctgacaaccttgtgctgaacctacaggatgaaagtttcaccaggggaagtgacagcctcatcaagggtaagaaatgagcctagtcaccaagaactccacccccagaggaagtggatctgcttctccagtttttgaggagccagccaggggtccagcacagccctaccccgccccagtatcatgcgatggtcccccacaccggttccctgaacccctcttggattaaggaagactgaagactagccccttttctggggaattactttcctcctccctgtgttaactggggctgttggggacagtgcgtgatttctcagtgatttcctacagtgttgttccctccctcaaggctgggaggagataaacaccaacccaggaattctcaataaatttttattacttaacctgaaaaaaaaaaaaaaaaaaaaaaaaaaaaaaa

SEQ ID NO: 1756 - DNA, 924 bp, Homo sapiens
gctccgctgaatccgcccgcgcgtcgccgccgtcgtcgccgccccccgtcccggcccccctgggttccctcagcccagccctgtccagcccggttcccgggaggatgaagttcgtgtacaaagaagagcatccgttcgagaagcgccgctctgagggcgagaagatccgaaagaaatacccggaccgggtgccggtgatagtagaaaaggctcccaaagctcggataggagacctggacaaaaagaaatacctggtgccttctgatctcacagttggtcagttctacttcttgatccggaagcgaattcatctccgagctgaggatgccttgtttttctttgtcaacaatgtcattccacccaccagtgccacaatgggtcagctgtaccaggaacaccatgaagaagacttctttctctacattgcctacagtgacgaaagtgtctacggtctgtgaagctgctgcccctgagctggaggggggtctcattctacaaagagagaggtggcccccctttcttgacctcctcctccttcaagctcaaacaccacctcccttattcaggaccggcacttcttaatgtttgtggctttctctccagcctctcttaggaggggtaatggtggagttggcatcttgtaactctcctttctcctttcttcccctttctctgcccgcctttcccatcctgctgtagacttcttgattgtcagtctgtgtcacatccagtgattgttttggtttctgttccctttctgactgcccaaggggctcagaaccccagcaatcccttcctttcactaccttcttttttgggggtagttggaagggactgaaattgtggggggaaggtaggaggcacatcaataaagaggaaaccaccaagctgaaaaaaaaaaaaaaaaaaaaaaaaaaaaaaaaa

SEQ ID NO: 1757 - DNA, 907 bp, Homo sapiens
cttttcttaagggaaaaatcacgctgtgttcttttaaaatccctcaggttttatgttttattgctaccagagtctgcctccctgaggttcttgtatagactagttatttccctctgtaaagaagctgttctattcgttctcgcctggtttggaacaaactgaacacttccaaaggaggcagtccttgcagccttgtctccttccactcccctcctccccacagtcctggctggagcagcgagtctgtcgatcccaggccagagacaaggcagacaaaggttcatttgtaaagaagctccttccagcacctcctctcttctccttttgcccaaactcacccagtgagtgtgagcatttaagaagcatcctctgccaagaccaaaaggaaagaagaaaaagggccaaaagccaaaatgaaactgatggtacttgttttcaccattgggctaactttgctgctaggagttcaagccatgcctgcaaatcgcctctcttgctacagaaagatactaaaagatcacaactgtcacaaccttccggaaggagtagctgacctgacacagattgatgtcaatgtccaggatcatttctgggatgggaagggatgtgagatgatctgttactgcaacttcagcgaattgctctgctgcccaaaagacgttttctttggaccaaagatctctttcgtgattccttgcaacaatcaatgagaatcttcatgtattctggagaacaccattcctgatttcccacaaactgcactacatcagtataactgcatttctagtttctatatagtgcaatagagcatagattctataaattcttacttgtctaagacaagtaaatctgtgttaaacaagtagtaataaaagttaattcaatctaatttttctctgtggaaaaa

SEQ ID NO: 1758 - DNA, 2455 bp, Homo sapiens
ggggggcctaggtgttgtcgtccctgctagtactccgggctgtgggggtcggtgcggatattcagtcatgaaatcagggtagggacttctcccgcagcgacgcggctggcaagactgtttgtgttgcgggggccggacttcaagagagaaagagagagtgggcagacatcgaagccaaacagcagtatcccggaagcactcatgcaactttggtggcggccactcagttttctctgccagtgtctggtgattttacaacgagatgctgctctccatagggatgctcatgctgtcagccacacaagtctacaccatcttgactgtccagctctttgcattcttaaacctactgcctgtagaagcagacattttagcatataactttgaaaatgcatctcagacatttgatgacctccctgcaagatttggttatagacttccagctgaaggtttaaagggttttttgattaactcaaaaccagagaatgcctgtgaacccatagtgcctccaccagtaaaagacaattcatctggcactttcatcgtgttaattagaagacttgattgtaattttgatataaaggttttaaatgcacagagagcaggatacaaggcagccatagttcacaatgttgattctgatgacctcattagcatgggatccaacgacattgaggtactaaagaaaattgacattccatctgtctttattggtgaatcatcagctaattctctgaaagatgaattcacatatgaaaaagggggccaccttatcttagttccagaatttagtcttcctttggaatactacctaattcccttccttatcatagtgggcatctgtctcatcttgatagtcattttcatgatcacaaaatttgtccaggatagacatagagctagaagaaacagacttcgtaaagatcaacttaagaaacttcctgtacataaattcaagaaaggagatgagtatgatgtatgtgccatttgtttggatgagtatgaagatggagacaaactcagaatccttccctgttcccatgcttatcattgcaagtgtgtagacccttggctaactaaaaccaaaaaaacctgtccagtgtgcaagcaaaaagttgttccttctcaaggcgattcagactctgacacagacagtagtcaagaagaaaatgaagtgacagaacatacccctttactgagacctttagcttctgtcagtgcccagtcatttggggctttatcggaatcccgctcacatcagaacatgacagaatcttcagactatgaggaagacgacaatgaagatactgacagtagtgatgcagaaaatgaaattaatgaacatgatgtcgtggtccagttgcagcctaatggtgaacgggattacaacatagcaaatactgtttgactttcagaagatgattggtttatttccctttaaaatgattaggtatatactgtaatttgattttttgctcccttcaaagatttctgtagaaataacttattttttagtattctacagtttaatcaaattactgaaacaggacttttgatctggtatttatctgccaagaatatacttcattcactaataatagactggtgctgtaactcaagcatcaattcagctcttcttttggaatgaaagtatagccaaaacataaaaaaaaaaaaaatcctcagtatagcttgcaattaagacctagatcacagtatttaagtgttttgcgttttatacatgaggtcagtgctacagccacctagcatgaactaacccagcttccacctccataaagttacctagagttgttgagttggaatatgttctggcatttacctgacctgccaatcattagggagaggcaacaaggtaattcagcctttcctcctatcagcacaaagaaactcaaagctgttttttccctttctgttccaaagcagtcttatcctgacaggagcggtctatactagtgcagatttcaacacttttttttaacgttttaattactatagtgttatgtagagatttgattgagcagctaatgtttctgaactttacttactaattttcagtgtccttaagggttctgtagtgttatcaaagcaaaaagaaaatgctgcataaaaataccaaacttcagcaactgttaatactcagatcatatacctcttaataaatagcatcttatgctaattagccctgctaaactatgtacagaggaaactgttcaagtattggatttgaaagtaagtgacttatgtttaacagaactaatgatgtattgaaacactgtattatgaaaagctaaattatacatcattgtaactatgtagaaagtgtagactaatgtataatcaaaatgctaaggatttttatatggccttgtatgaggggagtttgaatgttaataaacatgttttccaaaaaaaaaaaaaaaaaaaaaaaaaaaaa

SEQ ID NO: 1759 - DNA, 1582 bp, Homo sapiens
ggcacgaggcttccccggtgcagacacccggcgaagcccacccggttttcccagcggcatttccgatgacagcttcggggctacgtgtcctgtgctgtcggagacgcacaggaagcaaagtttgtgagaagccttgggggcgactttgccttgggcacccgcatttgtgcgtctgcgaggtgcctcggtgtgcgcggagctagtttcccagtttcccgggcccctcccttctccgagcccctctagcgatttgtttaggaaaagtgatgacatgaactagtagtggagaatcgcagcgccgctccccgccctggggagggaggggagccccggagagcctgccggtgggagctggaagcaggctcccggctgagcgccccagcccgaaaggcagggtctgggtgcgggaagagggctcggagctgccttcctgctgccttggggccgcccagatgagggaacagcccgatttgcctggttctgattctccaggctgtcgtggttgtggaatgcaaacgccagcacataatggaaacaggacctgaagacccttccagcatgccagaggaaagttcccccaggcggaccccgcagagcattccctaccaggacctccctcacctggtcaatgcagacggacagtacctcttctgcaggtactggaaacccacaggcacacccaaggccctcatctttgtgtcccatggagccggagagcacagtggccgctatgaagagctggctcggatgctgatggggctggacctgctggtgttcgcccacgaccatgttggccacggacagagcgaaggggagaggatggtagtgtctgacttccacgttttcgtcagggatgtgttgcagcatgtggattccatgcagaaagactaccctgggcttcctgtcttccttctgggccactccatgggaggcgccatcgccatcctcacggccgcagagaggccgggccacttcgccggcatggtactcatttcgcctctggttcttgccaatcctgaatctgcaacaactttcaaggtccttgctgcgaaagtgctcaaccttgtgctgccaaacttgtccctcgggcccatcgactccagcgtgctctctcggaataagacagaggtcgacatttataactcagaccccctgatctgccgggcagggctgaaggtgtgcttcggcatccaactgctgaatgccgtctcacgggtggagcgcgccctccccaagctgactgtgcccttcctgctgctccagggctctgccgatcgcctatgtgacagcaaaggggcctacctgctcatggagttagccaagagccaggacaagactctcaagatttatgaaggtgcctaccatgttctccacaaggagcttcctgaagtcaccaactccgtcttccatgaaataaacatgtgggtctctcaaaggacagccacggcaggaactgcgtccccaccctgaatgcattggccggtgcccggctcatggtctgggggatgcaggcaggggaagggcagagatggcttctcagatatggcttgcaaaaaaaaaaaaaaaaaaaaaaaaaaaaaaa

SEQ ID NO: 1760 - DNA, 1031 bp, Homo sapiens
cgacagccggaagtcccgcctgccgtgtagtcgccgccgtcgctgccgctgccgctgccgccgtcgttgttgttgtgctcggtgcgctgagctccgcggctccgcgagccggttccgtccccttcccgccgccgccatgaagtggatgttcaaggaggaccactcgctggaacacagatgcgtggagtccgcgaagattcgagcgaaatatcccgacagggttccggtgattgtggaaaaggtctcaggctctcagattgttgacattgacaaacggaagtacttggttccatctgatatcactgtggctcagttcatgtggatcatcaggaaaaggatccagcttccttctgaaaaggcgatcttcctgtttgtggataagacagtcccacagtccagcctaactatgggacagctttacgagaaggaaaaagatgaagatggattcttatatgtggcctacagcggagagaacacttttggcttctgagggccattgctgggctaggtgcaccgtaactgcttgtgtatcttgtaaatagccagccattttcagttattataccagaacctcttcacatagacctattagtgcatttgtaactggatttatttcttaatatattggaaggttttgtttccttagactagtaaattatcatacagagttttattttgagtttttctttttgtgcattgtcctcatgcctgtattctccaggaaacttgtccttctggaaatcatattgaatgatatttctatatcgaagtgaggtaggtgcggtattaaagtgaaagggaaggtgatgcatttattctgggttatgcttgaagtgttagatggctaagtattaaaattatccaaattaaatccttagcagtcagaacacttgcttcactagaatatgccaactgccaatcatgttggactgagctaatttgttcctctttctgaaactattaaggtaaataattaacaataaaaattctcttataaaggcaaaaaaaaaaaaaaaaaaaaaaaaaaaaaa

SEQ ID NO: 1761 - DNA, 5332 bp, Homo sapiens
gagaaaagtcacatccagctccttcatgttgctgccgatgtgggattttcctggcttcgtcagccaagcaattggctgcctttgccggaggctttgagaaccaaggcttgaaggccggcaggagcatccagggggaagcttggcttcagggaggacctagcagacgttgggccggagcactagcctcacggagaaggatctgaaagaagccaaggcgcggagccagcagattgcagcccagctgaccacccctcccagctccaattcccgtggcgtccagctcttcaacaggcgccggcagagggtgaacgagttcaccttggagagccacggccagaggggacagaagcccagccaggagtccctcagagtgctcccttcaagcctcccaggccatgcaccggggctcagcctgagttccacctcgctgccggagccaggccctccacggcaccccagtccccagagccccgacagaggggtccctggccacagcatggaggggtactcagaggaggctagcttgctgcggcacctggagaaggtggccagtgaggaggaagaggtaccactggtggtttatctaaaggagaatgcagcactgctgacagccaatgggctgcacctgtcccaaaaccgagaggcccagcagtcctcaccggccccacctccagctgaggtccacagcccagctgcagatgtcaaccaaaaccttgcctcgcccagtgccacgctcaccacaccaacttctaacagcagccacaatccgccagccaccgatgtcaatcagaacccaccggcaactgttgtcccacagagcctgccactttctagcatccaacagaattcctcagaggcccaactcccatctaatggcacagggcctgcttccaaacccagcaccctgtgtgctgatgggcaaccccaggcaccggctgaggaggtgagatgcagcacactcctaattgacaaggtatcaactccagctaccaccaccagcaccttctccagagaagctacgctcatccccagctccaggcccccagcctcagatttcatgtccagctccctgctcattgacatccagcccaacaccctagtggtgtcagcagatcaagagatgtctgggcgagcagctgccaccacgcccaccaaggtctacagtgaggtccacttcacactggccaagcccccatcagtggtcaacaggacggccaggccttttgggatccaggcgccagggggcaccagccagatggagaggagccccatgctagagagacgacattttggggagaaggccccggctccccagccccccagtttgccagacaggagcccccggccacagagacacataatgtcccgcagccccatggtggaaaggaggatgatggggcagcgaagcccggcctcagagagacgccccttggggaacttcactgcaccccccacctacactgagaccttgtccacagcccctctggcttcctgggtgaggtctcctccctcatattctgtcctgtatcccagctccgaccccaagtcttctcatctgaagggccaggcggttcctgccagcaagacgggcattctggaggagtcgatggcccgccggggcagccgcaaatccatgtttactttcgtggagaagcccaaggtgaccccgaatccagacttgctggatctggtacagacagcggatgagaagcggcggcagagggaccagggggaggtaggcgtggaggaggagcccttcgcactgggggccgaggcctccaacttccagcaggagccagcacctcgtgacagggccagccccgcggcggcggaggaggtggtaccagagtgggcctcctgcctcaagtcaccccgcatccaggccaagccgaagcccaaacccaaccagaacctctccgaggcctctgggaagggagctgagctctacgcccgccgccagtcacggatggagaaatatgtcatcgagtcttcaagccacacgccagagctggcccgctgcccatcacctaccatgtccctgccttcctcctggaaataccccactaacgcccccggggccttccgagtggcatcccgaagcccagcccggaccccgcctgcctccctctaccatggctacctgcctgagaacggggtcctgcgcccagagcccaccaagcagccgccataccagctgcgcccctcgctctttgtcctctcacctatcaaggagcctgccaaggtctcaccaagagctgcctcgcccgccaagcccagctccttggacctggtgcccaacctgcccaagggggctctccctccatctcctgccctgcctcggccctcgcgctcctcaccgggcctctacacctcccccggccaggacagcctgcagcccactgccgtgagccctccttacggcggtgacatctcccccgtgtctccctccagggcgtggtctccccgagccaagcaggcccccaggccctccttctctacccggaacgccgggatcgaggctcaggaccgccgggagagcctgcccacctccccaccctggacgccgggcgcgtcccggccccccagcagcctagacggctgggtgagcccgggcccgtgggagccaggtcgcgggagcagcatgagcagccccccgccgctgccgccgccaccgcccatgtctccctcgtggagcgagcgctcggtgtccccgctgcgacctgagaccgaggcgcggccccccagccgccagctgcaggcgcttctggcgcgaaacatcatcaatgcggcccggcgcaagagcgcctccccgcggtcggcgggcgccgagaacccgcggcccttctccccgccgagggcgccaccgcccccgcccccgcccccgcccccgcccccgcgcatgcgctcgccacagcccgcccgccccggctcggctgctgtgccgggggcagccttcgcgcccatcccgcggagcccgttgcccgccggtccttcgtcctgcaccagtccccggagcccgctgcccgcgcctcccaggcccttcctctaccgccgctcgcccacggactccgacgtgtccctcgactccgaggactccggggctaagtctccaggcatcctgggctacaatatctgtccccgcgggtggaatggcagccttcggctcaagcgtggcagcctccccgccgaggcctcctgcaccacctagagccccacccccgaccccaccccgggagggcagagccagaagaaggctcattagacctgggggacccaaagggtctggcctctttgggcagccccagagatgaggggtcagcagaggagagctctggggttggggatgggttagggacgcaagcttgagttctagcccttgctctcattcagctgttgtgtgaccctgggtaagacccttccttgtttgaccctcagctttcccatctgtttaatggtggctttggccaaggcaatccacaaacgtcaaaattccccttcccatcagtacacacaccgatgcacacacactctctctttctctctctctctctctcacacacacacacacacacacacacacacacacacacacacacacacactagttagtgccttggatgaggcggggcagtgtgtatatggacccctggacttgctaccttcagggttccatactcgtccctcccctcctggctctgctgtctggagtctggcaagcggggtgtgttcagaaggtcctaggcctgtgtcgcatgtccaggcactggcctgaccatccggctccctggcaccaagtcccaggcaggagcagctgttttccatcccttcccagacaagctctatttttatcacaatgacctttagagaggtctcccaggccagctcaaggtgtcccactatcccctctggagggaagaggcaggaaaattctccccgggtccctgtcatgctactttctccatcccagttcagactgtccaggacatcttatctgcagccataagagaattataaggcagtgatttcccttaggcccaggacttgggcctccagctcatctgttccttctgggcccattcatggcaggttctgggctcaaagctgaactggggagagaagagatacagagctaccatgtgactttacctgattgccctcagtttggggttgcttattgggaaagagagagacaaagagttacttgttacgggaaatatgaaaagcatggccaggatgcatagaggagattctagcaggggacaggattggctcagatgacccctgagggctcttccagtcttgaaatgcattccatgatattaggaagtcgggggtgggtggtggtggtgggctagttgggcttgaatttaggggccgatgagcttgggtacgtgagcagggtgttaagttagggtctgcctgtatttctggtccccttggaaatgtccccttcttcagtgtcagacctcagtcccagtgtccatatcgtgcccagaaaagtagacattatcctgccccatcccttccccagtgcactctgacctagctagtgcctggtgcccagtgacctgggggagcctggctgcaggccctcactggttccctaaaccttggtggctgtgattcaggtccccaggggggactcagggaggaatatggctgagttctgtagtttccagagttggctggtagagccttctagaggttcagaatattagcttcaggatcagctgggggtatggaattggctgaggatcaaacgtatgtaggtgaaaggataccaggatgttgctaaaggtgagggacagtttgggtttgggacttaccggggtgatgttagatctggaacccccaagtgaggctggagggagttaaggtcagtatggaagatagggttgggacagggtgctttggaatgaaagagtgaccttagagggctccttgggcctcaggaatgctcctgctgctgtgaagatgagaaggtgctcttactcagttaatgatgagtgactatatttaccaaagcccctacctgctgctgggtcccttgtagcacaggagactggggctaagggcccctcccagggaagggacaccatcaggcctctggctgaggcagtagcatagaggatccatttctacctgcatttcccagaggactagcaggaggcagccttgagaaaccggcagttcccaagccagcgcctggctgttctctcattgtcactgccctctccccaacctctcctctaacccactagagattgcctgtgtcctgcctcttgcctcttgtagaatgcagctctggccctcaataaatgcttcctgcatt

SEQ ID NO: 1762 - DNA, 850 bp, Homo sapiens
gggcctggagctgcacccgcttctgggtggacgcacttggcgagcggcgcgggatgcagacggctgcgaggcgctgggcacagttgctgtcccctttgacgatgatgacaagattgttgggggctacacctgtgagaattctctcccctaccaggtgtccctgaattctggctcccacttctgcggtggctccctcatcagcgaacagtgggtggtatcagcagctcactgctacaagacccgcatccaggtgagactgggagagcacaacatcaaagtcctggaggggaatgagcagttcatcaatgcggccaagatcatccgccaccctaaatacaacagggacactctggacaatgacatcatgctgatcaaactctcctcacctgccgtcatcaatgcccgcgtgtccaccatctctctgcccaccgcccctccagctgctggcactgagtgcctcatctccggctggggcaacactctgagctttggtgctgactacccagacgagctgaagtgcctggatgctccggtgctgacccaggctgagtgtaaagcctcctaccctggaaagattaccaacagcatgttctgtgtgggcttccttgagggaggcaaggattcctgccagcgtgactctggtggccctgtggtctgcaacggacagctccaaggagttgtctcctggggccatggctgtgcctggaagaacaggcctggagtctacaccaaggtctacaactatgtggactggattaaggacaccatcgctgccaacagctaaagcccccggtccctctgcagtctctataccaataaagtggccctgctctcaaaaaaaaaaaaaaaa

SEQ ID NO: 1763 - DNA, 2847 bp, Homo sapiens
ttgggggttgggagaaaggtggcggtgctttcggagggaataaaatggaaggagaatcaagcagatttgaaatccacactccagtttctgacaagaaaaagaaaaagtgttctatacataaggaaagacctcagaaacattcccacgaaattttcagagactcctccctggtgaatgaacagtctcaaataactaggaggaaaaagaggaaaaaagatttccagcatctcatttcttctcctttgaaaaaatccagaatctgtgatgagactgcaaatgccacttccacactcaaaaagagaaaaaagagaagatatagtgctttggaggtggacgaggaagcaggtgttacagttgtccttgtggataaagaaaatattaacaacacaccaaagcattttagaaaggatgttgatgttgtttgtgttgatatgagcatagaacagaagttaccaagaaagcctaaaacagacaaatttcaggtacttgctaagtcacatgcacataaatcagaagccctgcacagtaaagttagggagaaaaagaataaaaagcatcagaggaaagctgcatcctgggagagccagcgggcaagggacaccctgcctcagtcagaatcccaccaggaggagtcctggctttctgtgggtccagggggtgaaattacagaactaccagcatctgctcataaaaacaagtctaagaaaaaaaagaaaaagtccagtaaccgggaatatgagacactggccatgcctgaaggatcgcaagcaggcagagaggccgggactgatatgcaggaatcccagcctactgtgggcttggatgatgaaactccacaactactaggacctactcacaaaaaaaagtctaagaaaaaaaagaagaaaaagtccaatcaccaggaatttgaggcattggccatgcctgaaggatcacaagtgggcagtgaggttggggctgatatgcaggaatcccggcctgctgtgggcctgcatggtgaaactgcaggaataccagcacctgcttataaaaacaagtctaagaaaaaaaagaaaaagtccaatcaccaggaatttgaggcagtggccatgcctgagagcctcgagagtgcataccctgaaggatcacaggtgggcagtgaggttgggactgtggaaggcagtacagctcttaaagggttcaaggaatccaacagtacaaagaagaagtctaagaaaaggaagcttacgtctgtcaaaagggcacgagtgtctggtgatgatttttcagtgcccagtaagaactctgagagcacactctttgattcagtagaaggtgatggcgccatgatggaagaaggtgtgaaatctaggccccgacaaaagaaaacccaggcctgtttggcaagcaagcacgtgcaagaggcgccaaggttagaacctgcaaatgaagaacacaatgtggaaacagctgaagattccgaaataagatacttatctgcagattcaggagatgccgatgattcagatgcggatttgggttctgccgtgaaacagcttcaggagttcattcctaacatcaaggacagggccaccagcacaatcaagcggatgtaccgggacgacttggaacggtttaaggaatttaaagcacaaggtgtcgctattaaatttggcaagttttctgtaaaggaaaataagcagttagagaaaaatgtggaagactttctagccctgacaggcattgagagtgcagacaagctcctgtacacggacagatatcctgaggaaaaatctgtgatcaccaacttaaaaaggagatactcgtttagattacacattggtaggaacattgcccggccctggaaacttatatactatcgagcaaagaagatgttcgatgtcaacaattacaaaggcaggtatagcgaaggagatactgagaagttaaagatgtaccattctctccttgggaatgactggaagacgattggtgagatggtggcccgacgtagcctctccgtggccctcaagttctcacagatcagcagtcaaagaaatcgtggtgcttggagtaagtctgaaacccggaaactaatcaaggctgtcgaagaagtgattctgaagaagatgtctccccaggagttaaaagaggtggattccaaactccaagaaaatcctgaaagttgcctatcaattgttcgggaaaaactctacaagggcatatcttgggtagaagtagaagctaaagtgcaaaccagaaattggatgcagtgtaaaagtaagtggacagaaattctaaccaagaggatgactaatggtcggcgtatatactatggcatgaatgccctgcgggccaaggtcagccttattgaaaggttgtatgaaataaatgtggaagatactaatgaaatagactgggaagatcttgctagtgccataggtgatgttcctccatcttacgttcaaactaaattttctaggctgaaagctgtctatgttccattttggcagaaaaagacttttccagagatcatcgactacctttatgagacgactctacctttgctgaaggaaaagttagaaaaaatgatggagaaaaaaggcactaaaatccagactcctgcagcacccaagcaagttttcccatttcgagacatcttttattatgaagacgatagtgaaggaggaggacatagaaaaagaaagcgaaggggaattccgtaaagcctagaatcaaaagaaaacaaaacccatagtcaagccacagacaagcccagaataatatggccaggggatcaatccgattagccgactggcccagatccagcaggcaaaaaaggagaaggagccagagtacacgctcctc

SEQ ID NO: 1764 - DNA, 896 bp, Homo sapiens
cctatcatcgcaaaactcatgatgctccggctgctcagttccctcctccttgtggccgttgcctcaggctatggcccaccttcctctcgcccttccagccgcgttgtcaatggtgaggatgcggtcccctacagctggccctggcaggtttccctgcagtatgagaaaagcggaagcttctaccacacctgtggcggtagcctcatcgcccccgactgggttgtgactgccggccactgcatctcgagctcccggacctaccaggtggtgttgggcgagtacgaccgtgctgtgaaggagggccccgagcaggtgatccccatcaactctggggacctctttgtgcatccactctggaaccgctcgtgtgtggcctgtggcaatgacatcgccctcatcaagctctcacgcagcgcccagctgggagacgccgtccagctcgcctcactccctccggctggtgacatccttcccaacgagacaccctgctacatcaccggctggggccgtctctataccaacgggccactcccagacaagctgcaggaggccctgctgccggtggtggactatgaacactgctccaggtggaactggtggggttcctccgtgaagaagaccatggtgtgtgctggaggggacatccgctccggctgcaatggtgactctggaggacccctcaactgccccacagaggatggtggctggcaggtccatggcgtgaccagctttgtttctgcctttggctgcaacacccgcaggaagcccacggtgttcactcgagtctccgccttcattgactggattgaggagaccatagcaagccactagaaccaaggcccagctggcagtgctgatcgatcccacatcctgaataaagaadaaagatctctcag

SEQ ID NO: 1765 - DNA, 2567 bp, Homo sapiens
ctccggcgcagtgttgggactgtctgggtatcggaaagcaagcctacgttgctcactattacgtataatccttttcttttcaagatgcctgaggaagtgcaccatggagaggaggaggtggagacttttgcctttcaggcagaaattgcccaactcatgtccctcatcatcaataccttctattccaacaaggagattttccttcgggagttgatctctaatgcttctgatgccttggacaagattcgctatgagagcctgacagacccttcgaagttggacagtggtaaagagctgaaaattgacatcatccccaaccctcaggaacgtaccctgactttggtagacacaggcattggcatgaccaaagctgatctcataaataatttgggaaccattgccaagtctggtactaaagcattcatggaggctcttcaggctggtgcagacatctccatgattgggcagtttggtgttggcttttattctgcctacttggtggcagagaaagtggttgtgatcacaaagcacaacgatgatgaacagtatgcttgggagtcttctgctggaggttccttcactgtgcgtgctgaccatggtgagcccattggcaggggtaccaaagtgatcctccatcttaaagaagatcagacagagtacctagaagagaggcgggtcaaagaagtagtgaagaagcattctcagttcataggctatcccatcaccctttatttggagaaggaacgagagaaggaaattagtgatgatgaggcagaggaagagaaaggtgagaaagaagaggaagataaagatgatgaagaaaaacccaagatcgaagatgtgggttcagatgaggaggatgacagcggtaaggataagaagaagaaaactaagaagatcaaagagaaatacattgatcaggaagaactaaacaagaccaagcctatttggaccagaaaccctgatgacatcacccaagaggagtatggagaattctacaagagcctcactaatgactgggaagaccacttggcagtcaagcacttttctgtagaaggtcagttggaattcagggcattgctatttattcctcgtcgggctccctttgacctttttgagaacaagaagaaaaagaacaacatcaaactctatgtccgccgtgtgttcatcatggacagctgtgatgagttgataccagagtatctcaattttatccgtggtgtggttgactctgaggatctgcccctgaacatctcccgagaaatgctccagcagagcaaaatcttgaaagtcattcgcaaaaacattgttaagaagtgccttgagctcttctctgagctggcagaagacaaggagaattacaagaaattctatgaggcattctctaaaaatctcaagcttggaatccacgaagactccactaaccgccgccgcctgtctgagctgctgcgctatcatacctcccagtctggagatgagatgacatctctgtcagagtatgtttctcgcatgaaggagacacagaagtccatctattacatcactggtgagagcaaagagcaggtggccaactcagcttttgtggagcgagtgcggaaacggggcttcgaggtggtatatatgaccgagcccattgacgagtactgtgtgcagcagctcaaggaatttgatgggaagagcctggtctcagttaccaaggagggtctggagctgcctgaggatgaggaggagaagaagaagatggaagagagcaaggcaaagtttgagaacctctgcaagctcatgaaagaaatcttagataagaaggttgagaaggtgacaatctccaatagacttgtgtcttcaccttgctgcattgtgaccagcacctacggctggacagccaatatggagcggatcatgaaagcccaggcacttcgggacaactccaccatgggctatatgatggccaaaaagcacctggagatcaaccctgaccaccccattgtggagacgctgcggcagaaggctgaggccgacaagaatgataaggcagttaaggacctggtggtgctgctgtttgaaaccgccctgctatcttctggcttttcccttgaggatccccagacccactccaaccgcatctatcgcatgatcaagctaggtctaggtattgatgaagatgaagtggcagcagaggaacccaatgctgcagttcctgatgagatcccccctctcgagggcgatgaggatgcgtctcgcatggaagaagtcgattaggttaggagttcatagttggaaaacttgtgcccttgtatagtgtccccatgggctcccactgcagcctcgagtgcccctgtcccacctggctccccctgctggtgtctagtgtttttttccctctcctgtccttgtgttgaaggcagtaaactaagggtgtcaagccccattccctctctactcttgacagcaggattggatgttgtgtattgtggtttattttattttcttcattttgttctgaaattaaagtatgcaaaataaagaatatgccgttttaaaaaaaaaaaaaaaaaaaaaaaaaaaaa

SEQ ID NO: 1766 - DNA, 2690 bp, Homo sapiens
gctcttttctcgggacgggagaggccgtgtagcgtcgccgttactccgaggagataccagtcggtagaggagaagtcgaggttagagggaactgggaggcactttgctgtctgcaatcgaagttgagggtgcaaaaatgcagagtaataaaacttttaacttggagaagcaaaaccatactccaagaaagcatcatcaacatcaccaccagcagcagcaccaccagcagcaacagcagcagccgccaccaccgccaatacctgcaaatgggcaacaggccagcagccaaaatgaaggcttgactattgacctgaagaattttagaaaaccaggagagaagaccttcacccaacgaagccgtctttttgtgggaaatcttcctcccgacatcactgaggaagaaatgaggaaactatttgagaaatatggaaaggcaggcgaagtcttcattcataaggataaaggatttggctttatccgcttggaaacccgaaccctagcggagattgccaaagtggagctggacaatatgccactccgtggaaagcagctgcgtgtgcgctttgcctgccatagtgcatcccttacagttcgaaaccttcctcagtatgtgtccaacgaactgctggaagaagccttttctgtgtttggccaggtagagagggctgtagtcattgtggatgatcgaggaaggccctcaggaaaaggcattgttgagttctcagggaagccagctgctcggaaagctctggacagatgcagtgaaggctccttcctgctaaccacatttcctcgtcctgtgactgtggagcccatggaccagttagatgatgaagagggacttccagagaagctggttataaaaaaccagcaatttcacaaggaacgagagcagccacccagatttgcacagcctggctcctttgagtatgaatatgccatgcgctggaaggcactcattgagatggagaagcagcagcaggaccaagtggaccgcaacatcaaggaggctcgtgagaagctggagatggagatggaagctgcacgccatgagcaccaggtcatgctaatgagacaggatttgatgaggcgccaagaagaacttcggaggatggaagagctgcacaaccaagaggtgcaaaaacgaaagcaactggagctcaggcaggaggaagagcgcaggcgccgtgaagaagagatgcggcggcacgaagaagaaatgatgcggcgacacgaggaaggattcaagggaaccttccctgatgcgagagagcaggagattcggatgggtcagatggctatgggaggtgctatgggcataaacaacagaggtgccatgccccctgctcctgtgccagctggtaccccagctcctccaggacctgccactatgatgccggatggaactttgggattgaccccaccaacaactgaacgctttggtcaggctgctacaatggaaggaattggggcaattggtggaactcctcctgcattcaaccgtgcagctcctggagctgaatttgccccaaacaaacgtcgccgatactaataagttgcagtgtctagtttctcaaaacccttaaaagaaggaccctttttggactagccagaattctaccctggaaaagtgttagggattccttccaatagttagatctaccctgcctgtactactctaagggattccttccaatagttagatctaccctgcctgtactactctagggagtatgctggaggcagagggcaagggaggggtggtattaaacaatgcaattctgtgtggtatattgtttaatcagttctgtgtggtgcattcctgaagtctctaatgtgactgttgagggcctggggaaaccatggcaaagtggatccagttagagcccattaatcttgatcattccggttttttttttttttgtccatcttgtttcatttgcttgccccgcccccgagacggagtcttactctgtcgcccaggctggagtgtagtggcatgatctcggctcactgcaatctctgcctcccgggttcaagcttgtccaggttgatcttgaactcctgacctcgtgatctacccacctcggtctcccaaaatgctgggattacaggggtgagccaccgtgcccaacctcacttgcttcttatccttacactcccccagccccagagaaactgccacatacaccacaaaaaccaaacatgccccaatgaccttagccccattgctccattcactcccaggtgagaattcaggcaaacgtccacaaaggtcacaggcagcgtacatacggttctgttataccccatatattaccccttcatgtcctaaagaagacattttctcttagagattttcattttagtgtatctttaaaaaaaaaatcttgtgttaacttgcctccatctttttcttggggtgagggacaccagggaatgacccttttgtgtctatgatgttgctgttcacagcttttcttgataggcctagtacaatcttgggaacagggttactgtatactgaaggtctgacagtagctcttagactcgcctatcttaggtagtcatgctgtgcattttttttttcattggtgtactgtgtttgatttgtctcatatatttggagtttttctgaaaaatggagcagtaatgcagcatcaacctattaaaatacttttaagcctttt

SEQ ID NO: 1767 - DNA, 3347 bp, Homo sapiens
atcccttggaggcattcatggctgaagtggaggatcaggcagctagagacatgaagaggcttgaagaaaaggacaaggaaagaaaaaacgtaaagggtattcgagatgacattgaagaggaagatgaccaagaagcttattttcgatacatggcagaaaacccaactgctggtgtggttcaggaggaagaggaagacaatctagaatatgatagtgacggaaatccaattgcacctaccaaaaaaatcattgatcctcttccccccattgatcattcagagattgactatccaccatttgaaaaaaacttttacaatgagcatgaagagataaccaacctcactccacagcagttaatagatctccggcataagctcaatcttcgggtctctggtgctgcacctcctagaccaggaagtagctttgctcattttgggtttgacgaacaacttatgcaccagattcggaaatctgaatacacacagcccactccaatacagtgccagggtgtgcctgtggcattaagtggtagagacatgattggtattgccaaaacaggtagtgggaaaactgcagccttcatttggcccatgttgattcatataatggaccagaaggagttggaaccaggtgatggaccaattgcagtgattgtgtgtcctaccagggagctttgccagcagatccatgcagaatgtaagcggtttggaaaagcatataatcttcgatcagtggccgtatatggaggagggagtatgtgggagcaggccaaggcccttcaggagggggcagagattgttgtgtgtaccccaggtcgactgatagatcatgtgaaaaagaaagctaccaatcttcaaagagtctcttaccttgtgtttgatgaagcagatcgaatgtttgacatgggatttgagtaccaagttcgatccatagcaagtcatgttcgtcctgacaggcagactctcttatttagtgcaacttttcggaagaagattgaaaagttggccagagacatcctgatcgaccctattcgagtggtgcagggagatattggagaggcaaatgaagatgtgacacagattgtggagattctccattctggacctagtaaatggaactggcttacccggcgtctggtagaatttacctcttcagggagtgtcctcctctttgttactaaaaaagccaatgctgaagagctagcgaataaccttaaacaggagggtcataatcttgggctgctccatggggatatggatcagagtgagagaaacaaggtcatttcagactttaagaaaaaggacatcccagtcctggtggccacagatgttgcagcccgtggtctggacattccttcaattaagactgtcattaactatgatgtggcacgagacattgatacccacacgcataggattggccgcacaggaagagcgggtgagaaaggtgtggcctataccctactcactcccaaggacagcaattttgctggtgacctggtccggaacttggaaggagccaatcaacacgtttctaaggaactcctagatctggcaatgcagaatgcctggtttcggaaatctcgattcaaaggagggaaaggaaaaaagctgaacattggtggaggaggcctaggctacagggagcggcctggcctgggctctgagaacatggatcgaggaaataacaatgtaatgagcaattatgaggcctacaagccttccacaggagctatgggagatcgactaacggcaatgaaagcagctttccagtcacagtacaagagtcactttgttgcagccagtttaagtaatcagaaggctggaagttctgctgctggggcaagtgggtggactagtgcagggagcttgaattctgttccaactaactcagcacaacagggccataacagtcctgacagccccgtcaccagtgccgccaagggcatcccaggctttggcaatactggcaacatcagtggtgcccctgtgacctacccgtctgccggagcccaaggagtcaacaacacagcttcagggaataacagccgagaagggactgggggcagcaacgggaaaagagagagatatactgagaaccggggcagcagcccgtcacagtcacggagagactggcaatcggcatagcgatagtccacgtcacggagatggtggtcgccatggagatggataccgccatccagaaagcagcagccgtcatactgatggccatcggcacggggagaacagacatggaggaagcgcaggccggcatggggagaaccggggtgcaaatgatggtcggaatggggaaagcaggaaagaagcttttaatcgtgagagcaagatggagcccaagatggaacccaaagtggacagcagcaagatggacaaggtggacagcaagacagataagacagctgacggctttgctgtcccagagccgcctaaacgcaagaaaagtcgatgggacagttagaggggatgtgctaaagcgtgaaatcagttgtccttaatttttagaaagattttggtaactaggtgtctcagggctgggttggggtccaaagtgtaaggaccccctgcccttagtggagagctggagcttggagacattaccccttcatcagaaggaattttcggatgttttcttgggaagctgttttggtccttggaagcagtgagagctgggaagcttcttttggctctaggtgagttgtcatgtgggtaagttgaggttatcttgggataaagggtcttctagggcacaaaactcactctaggtttatattgtatgtagcttatattttttactaaggtgtcaccttataagcatctataaattgacttctttttcttagttgtatggccaggcagtccccattttaggagttggcttctgcaaattcaatccattgagctaactgttggggagcaatttggtagttgtagacatttgcagggaagggagatgtctgattctaaatgggagttgatgctcaggtccccagccaggtttgcatccagccctgagacatgtaggaaacacctttcagacccaggctctgaagattcccagaagccacaaggattgaagggaaaaggtgatcctggtaactgttccaggattgctccaggtttgagatggtattgctaaatttaaaattaaacaagaaacccaacaacagcttttaaagtgtcttctatctcattgtattttttttaacttgccccaatgatagaaaagtcttttgctgaaatgattttgatgatttttgtttatcgtttataaaaaggaaaagaaatatacaaactttgacttttgtgaaaaaaaaaaaaaaaaaaaaa

SEQ ID NO: 1768 - DNA, 3872 bp, Homo sapiens
aggagggcgagcgaggaggatggcggagtcggggctcctgacggaactctaatgaatcattgattgaccagcactattttaccagttggaatgaatgatcagaaatgggcatagtgcttttagatccaacatgtaacagatggatgttactccatgctgattacttcttcaagccagtacttttttgattgtgtaggatctttgtctcttcatctttgaattcaattactggaaaataaaaggagttcatgtagtttttgtccaggcttgagtcaccatgagtagtagtttaggaaaagaaaaagactctaaagaaaaagatcccaaagtaccatcagccaaggaaagagaaaaggaggcaaaagcctctggaggttttgggaaagagagcaaagaaaaagaacctaagaccaaagggaaagatgccaaagatggaaagaaggactccagtgctgcccaaccaggggtggcattttcagttgacaatacgatcaaacggccaaacccagcacctgggactagaaaaaaatccagcaatgcagaggtgattaaagagctcaacaaatgccgggaagagaattcaatgcgtttggacttatccaagagatctatacacatattgccatcatcaatcaaagagttgactcaattaacagaactttatttatacagtaacaaattgcagtccctcccagcagaggtgggatgtttagtaaatctcatgacactggctctaagtgaaaattcacttaccagtttgcctgactctcttgataacttgaagaagctgcggatgcttgatttacggcataataaactgagagaaattccttcagtggtgtataggctggattctctcaccactctttaccttcgctttaatcgtataactactgtggaaaaggacatcaaaaacttgtcaaaactcagcatgcttagcattcgagagaacaaaattaaacaactacctgctgaaattggtgaattatgtaacctcattacgctggatgtagctcacaatcaacttgaacaccttccaaaggagattggaaactgtacacagataaccaaccttgacttgcagcacaatgaactgctagacctcccagatactataggaaacctgtccagtttaagtcgtcttggtctgagatataacagactgtcagcaatacccagatcattagcaaaatgcagtgcacttgaagaattaaatttagagaacaataacatttctactttaccagagagtcttttatcaagtcttgtgaaactgaatagtttgaccttagctagaaattgcttccagttgtatccagtgggtggtccatctcagttttctaccatctattccctcaacatggaacacaatcgaatcaacaaaattccatttggaattttctccagagcaaaagtattaagtaagctgaatatgaaggacaatcagttaacatcacttcccttggattttggaacttggaccagtatggtagaattgaatttagccactaatcagctcacaaagatccctgaggatgtgtctggtctcgtttctcttgaggttcttatcttatcaaacaatcttctaaagaagcttccccatggtcttggaaaccttaggaagttaagagagttggatctagaagagaacaaattggaatccttgccaaatgaaattgcatatcttaaggatttacagaaattagtcttgacaaacaaccagttgaccactcttcccagaggcattggtcaccttactaatctcacacatctgggccttggagagaacctacttactcaccttcctgaagaaattggtacactggagaacctagaagaactgtatttgaatgacaaccccaacctgcatagccttccccttgagctggcactctgcagcaagctttcaatcatgagtattgagaactgtccactcagtcaccttccacctcagattgttgctggggggccttctttcatcattcagttcttaaagatgcagggtccatatcgtgccatggtctgatataaatctgctggtcccacacactgttcaaaaatagactgccattaatgtttcttatctatatctgtatctatttatgtagatattggtatatggcagatttataaaaattgcattatgtgtttctgctaatagaggaatcatagccatttagaattttttttaaattctgtacaaaaggcttatataagttttctttgctgaatttgatggatgtttttctgttgtgtaatctgatatgccagtttgcttaaaacatttgccaacacattatgaagttattaaatttaagggacagaggtagtatagttagatatactttctcttaggaaaaataatgggcaaaaatttttgttgcaacttttcatatatattttccccttaccaattgttttatccttatagtattgtaggccctgaaagtagaatttttctttaacttattttgagatttgagatttaaattttatgtattgtttacagtcagagtaaatcactggatttcttttgtttgttttgatttgctctgttttattcagtcaaatctagagtttgaatcctctgctaaagaatttgcatccactggtgtaaacagtgaaaggtatttgcttgttgaaaaaaaaaactggcaaagtgaaaagatacagtcaaaaatctagaatttctttaattttgcttctctgacgagttgtgaagcaaaatacctgaagtgagtctttgggtaggggaagggtattgagaccttttctagtatgaatattttttaagtttgggggaagagaaacttgcagtgaaaaggagttttttcattcctgaaagttgcagatccacaaaactaacaggataattgggcaaataaattacatataaacacacacaatctatatatgtatatacaatgctatatagatatgtatttattatatcataaactacagtaggtaactttaaggatttcttcctatccttgtacaatgacatgaatgtctttctttgaaaactgcaatgtatgtatgtttcaaggttatttaacagtgtactatggttttatatcttgacttgccttgtacatctttcaattctggaatatctgtgtctaagcacaatatcttcacactgtgctgtattgctgctgaactaaatgcacttttccccacatatggggcactggcttcaaacaattcagttcagtatcattacttttaatctcatctttcctttcttggtagttgttaatacagttatggaaaagaggcacattgcatagaagccattggggagttcagtggaagttctgtaagatgtgcatgtactatttgatgcgttttctttgcttcactgcttttaatacttagcagtattgttggtctaagtcaatttgattattgaggagtctcagagcaaggtgcgttctagatgtcatcctaaaaaacacttcatatataattaatcactattttgtataattacatattgctgcttgtgtgtttttttttttttccatttagttgggcgttgtgttttacacaaaaccatttttgaattaaggctatgatattaagatagaaatttggactgttgttctgcttttcctggcactcaaattcatgactagttttgaggtcaaacctatgttcgtaatgagagattttataaggatcaactaagaaatggaaggcaggtgaagatataaaaccctagaatgcttaaatgtgctgtaaaactattgtagatgtcactggattttaccaagtaatatcctttcttttttttttccccccatctgctgtggcttttcagttaaaattttgtttataaaaggaatttgtttattacagctctacct

SEQ ID NO: 1769 - DNA, 2789 bp, Homo sapiens
ggtgggcggggggaggaggcggccctagcgccattttgtgggagcgaagcggtggctgggctgcgcttgggtccgtcgctgcttcggtgtccctgtcgggcttcccagcagcggcctagcgggaaaagtaaaagatgtctgaatatattcgggtaaccgaagatgagaacgatgagcccattgaaataccatcggaagacgatgggacggtgctgctctccacggttacagcccagtttccaggggcgtgtgggcttcgctacaggaatccagtgtctcagtgtatgagaggtgtccggctggtagaaggaattctgcatgccccagatgctggctggggaaatctggtgtatgttgtcaactatccaaaagataacaaaagaaaaatggatgagacagatgcttcatcagcagtgaaagtgaaaagagcagtccagaaaacatccgatttaatagtgttgggtctcccatggaaaacaaccgaacaggacctgaaagagtattttagtacctttggagaagttcttatggtgcaggtcaagaaagatcttaagactggtcattcaaaggggtttggctttgttcgttttacggaatatgaaacacaagtgaaagtaatgtcacagcgacatatgatagatggacgatggtgtgactgcaaacttcctaattctaagcaaagccaagatgagcctttgagaagcagaaaagtgtttgtggggcgctgtacagaggacatgactgaggatgagctgcgggagttcttctctcagtacggggatgtgatggatgtcttcatccccaagccattcagggcctttgcctttgttacatttgcagatgatcagattgcgcagtctctttgtggagaggacttgatcattaaaggaatcagcgttcatatatccaatgccgaacctaagcacaatagcaatagacagttagaaagaagtggaagatttggtggtaatccaggtggctttgggaatcagggtggatttggtaatagcagagggggtggagctggtttgggaaacaatcaaggtagtaatatgggtggtgggatgaactttggtgcgttcagcattaatccagccatgatggctgccgcccaggcagcactacagagcagttggggtatgatgggcatgttagccagccagcagaaccagtcaggcccatcgggtaataaccaaaaccaaggcaacatgcagagggagccaaaccaggccttcggttctggaaataactcttatagtggctctaattctggtgcagcaattggttggggatcagcatccaatgcagggtcgggcagtggttttaatggaggctttggctcaagcatggattctaagtcttctggctggggaatgtagacagtggggttgtggttggttggtatagaatggtgggaattcaaatttttctaaactcatggtaagtatattgtaaaatacatatgtactaagaattttcaaaattggtttgttcagtgtggagtatattcagcagtatttttgacatttttctttagaaaaaggaagagctaaaggaattttataagttttgttacatgaaaggttgaaatattgagtggttgaaagtgaactgctgtttgcctgattggtaaaccaacacactacaattgatatcaaaaggtttctcctgtaatattttatccctggacttgtcaagtgaattctttgcatgttcaaaacggaaaccattgattagaactacattctttaccccttgttttaatttgaaccccaccatatggatttttttccttaagaaaatctccttttaggagatcatggtgtcacagtgtttggttcttttgttttgttttttaacacttgtctcccctcatacacaaaagtacaatatgaagccttcatttaatctctgcagttcatctcatttcaaatgtttatggaagaagcacttcattgaaagtagtgctgtaaatattctgccataggaatactgtctacatgctttctcattcaagaattcgtcatcacgcatcacaggccgcgtctttgacggtgggtgtcccatttttatccgctactctttatttcatggagtcgtatcaacgctatgaacgcaaggctgtgatatggaaccagaaggctgtctgaacttttgaaaccttgtgtgggattgatggtggtgccgaggcatgaaaggctagtatgagcgagaaaaggagagagcgcgtgcagagacttggtggtgcataatggatattttttaacttggcgagatgtgtctctcaatcctgtggctttggtgagagagtgtgcagagagcaatgatagcaaataatgtacgaatgttttttgcattcaaaggacatccacatctgttggaagacttttaagtgagtttttgttcttagataacccacattagatgaatgtgttaagtgaaatgatacttgtactccccctacccctttgtcaactgctgtgaatgctgtatggtgtgtgttctcttctgttactgatatgtaagtgtggcaatgtgaactgaagctgatgggctgagaacatggactgagcttgtggtgtgctttgcaggaggacttgaagcagagttcaccagtgagctcaggtgtctcaaagaagggtggaagttctaatgtctgttagctacccataagaatgctgtttgctgcagttctgtgtcctgtgcttggatgctttttataagagttgtcattgttggaaattcttaaataaaactgatttaaataataaaaaaaaaaaaaaaaaaaa

SEQ ID NO: 1770 - DNA, 1247 bp, Homo sapiens
  misc_feature (1184)..(1184): n is a, c, g, or t
ggaattcgccgcccgctccgagcctggtgcttccgaccgctgcgcgcggctcctgggctgtcacagtctcccgttgccgccgtcatgtcccggcagctgtcgcgggcccggccagccacggtgctgggcgccatggagatggggcgccgcatggacgcgcccaccagcgccgcagtcacgcgcgccttcctggagcgcggccacaccgagatagacacggccttcgtgtacagcgacggccagtccgagaccatccttggcggcctggggctccggctgggcggcagcgactgcagagtgaaaattgataccaaggccattccactgtttgggaactccctgaagcctgacagtctccggttccagctggagacgtcactgaagcggctgcagtgtccccgagtggacctcttctacctgcatatgccagaccacagcaccccggtggaagagacactgcgtgcctgccaccagctgcaccaggagggcaagttcatggagcttggcctctccaactatgcagcctgggaagtggccgagatctgtaccctctgcaagagcaacggctggatcctgcccactgtgtaccagggcatgtacaatgccatcacccggcaggtggaaacggagctcttcccctgcctcaggcactttggactgaggttctatgccttcaaccctctggctgggggcctgctgaccggcaagtacaagtatgaggacaaggatgggaaacagcctgtgggccgcttctttgggaatacctgggcagagatgtacaggaatcgctactggaaggagcaccactttgagggcattgccctggtggagaaggccctgcaggccgcgtatggcgccagcgcccccagcatgacctcggccaccctccggtggatgtaccaccactcacagctgcagggtgcccacggggacgcggtcatcctgggcatgtccagcctggagcagctggagcagaacttggcagcggcagaggaagggcccctggagccggctgtcgtggacgcctttaatcaagcctggcatttggttgctcacgaatgtcccaactacttccgctaggcccatcgtttctcaggctgcccaaggctcttctgtaacatcttttgttactcacattttctttaatttagaactgcctcagtaaattcttagggatggaagtntttggacaaaaacctaatagaagagtcaccaccaaatgaagaataaaactcccaaaaaaaaaa

SEQ ID NO: 1771 - DNA, 3597 bp, Homo sapiens
atggtggccgcagcggcggcaactgaggcaaggctgaggaggaggacggcggcgacggcagcgctcgcgggcaggagcggcgggccgcactgtgtcaacggcggtcgctgcaaccctggcaccggccagtgcgtctgccccgccggctgggtgggcgagcaatgccagcactgcgggggccgcttcagactaactggatcttctgggtttgtgacagatggacctggaaattataaatacaaaacgaagtgcacgtggctcattgaaggacagccaaatagaataatgagacttcgtttcaatcattttgctacagagtgtagttgggaccatttatatgtttatgatggggactcaatttatgcaccgctagttgctgcatttagtggcctcattgttcctgagagagatggcaatgagactgtccctgaggttgttgccacatcaggttatgccttgctgcatttttttagtgatgctgcttataatttgactggatttaatattacttacagttttgatatgtgtccaaataactgctcaggccgaggagagtgtaagatcagtaatagcagcgatactgttgaatgtgaatgttctgaaaactggaaaggtgaagcatgtgacattcctcactgtacagacaactgtggttttcctcatcgaggcatctgcaattcaagtgatgtcagaggatgctcctgcttctcagactggcagggtcctggatgttcagttcctgtaccagctaaccagtcattttggactcgagaggaatattctaacttaaagctccccagagcatctcataaagctgtggtcaatggaaacattatgtgggttgttggaggatatatgttcaaccactcagattataacatggttctagcgtatgaccttgcttctagggagtggcttccactaaaccgttctgtgaacaatgtggttgttagatatggtcattctttggcattatacaaggataaaatttacatgtatggaggaaaaattgattcaactgggaatgtgaccaatgagttgagagtttttcacattcataatgagtcatgggtgttgttgacccctaaggcaaaggagcagtatgcagtggttgggcactctgcacacattgttacactgaagaatggccgagtggtcatgctggtcatctttggtcactgccctctctatggatatataagcaatgtgcaggaatatgatttggataagaacacatggagtatattacacacccagggtgcccttgtgcaagggggttacggccatagcagtgtttacgaccataggaccagggccctatacgttcatggtggctacaaggctttcagtgccaataagtaccggcttgcagatgatctctaccgatatgatgtggatacccagatgtggaccattcttaaggacagccgatttttccgttacttgcacacagctgtgatagtgagtggaaccatgctggtgtttgggggaaacacacacaatgacacatctatgagccatggcgccaaatgcttctcttcagatttcatggcctatgacattgcctgtgaccgctggtcagtgcttcccagacctgattccaccatgatgtcaacagatttggccattccagcagtcttacacaacagcaccatgtatgtgttcggtggtttcaatagtctcctcctcagcgacatcctggtattcacctcggaacagtgtgatgcgcatcggagtgaagccgcttgtttagcagcaggacctggtattcggtgtgtgtggaacacagggtcgtctcagtgtatctcgtgggcgctggcaactgatgaacaagaagaaaagttaaaatcagaatgtttttccaaaagaactcttgaccatgacagatgtgaccagcacacagattgttacagctgcacagccaacaccaatgactgccactggtgcaatgaccattgtgtccccaggaaccacagctgctcagaaggccagatctccatttttaggtatgagaattgccccaaggataaccctatgtactactgtaacaagaagaccagctgcaggagctgtgccctggaccagaactgccagtgggagccccggaatcaggagtgcattgccctgcccgaaaatatctgtggcattggctggcatttggttggaaactcatgtttgaaaattactactgccaaggagaattatgacaatgctaaattgttctgtaggaaccacaatgcccttttggcttctcttacaacccagaagaaggtagaatttgtccttaagcagctgcgaataatgcagtcatctcagagcatgtccaagctcaccttaaccccatgggtcggccttcggaagatcaatgtgtcctactggtgctgggaagatatgtccccatttacaaatagtttactacagtggatgccgtctgagcccagtgatgctggattctgtggaattttatcagaacccagtactcggggactgaaggctgcaacctgcatcaacccactcaatggtagtgtctgtgaaaggcctgcaaaccacagtgctaagcagtgccggacaccatgtgccttgaggacagcatgtggagattgcaccagcggcagctctgagtgcatgtggtgcagcaacatgaagcagtgtgtggactccaatgcctatgtggcctccttcccttttggccagtgtatggaatggtatacgatgagcacctgcccccctgaaaattgttcaggctactgtacctgtagtcattgcttggagcaaccaggctgtggctggtgtactgatcccagcaatactggcaaagggaaatgcatagagggttcctataaaggaccagtgaagatgccttcgcaagcccctacaggaaatttctatccacagcccctgctcaattccagcatgtgtctagaggacagcagatacaactggtctttcattcactgtccagcttgccaatgcaacggccacagtaaatgcatcaatcagagcatctgtgagaagtgtgagaacctgaccacaggcaagcactgcgagacctgcatatctggcttctacggtgatcccaccaatggagggaaatgtcagccatgcaagtgcaatgggcacgcgtctctgtgcaacaccaacacgggcaagtgcttctgcaccaccaagggcgtcaagggggacgagtgccagctatgtgaggtagaaaatcgataccaaggaaaccctctcagaggaacatgttattatactcttcttattgactatcagttcacctttagtctatcccaggaagatgatcgctattacacagctatcaattttgtggctactcctgacgaacaaaacagggatttggacatgttcatcaatgcctccaagaatttcaacctcaacatcacctgggctgccagtttctcagctggaacccaggctggagaagagatgcctgttgtttcaaaaaccaacattaaggagtacaaagatagtttctctaatgagaagtttgattttcgcaaccacccaaatatcactttctttgtttatgtcagtaatttcacctggcccatcaaaattcaggtgcaaactgaacaatga

SEQ ID NO: 1772 - DNA, 2058 bp, Homo sapiens
cgcccccgcagcccgtcacccacctcatctttgacatggacggacttcttctggatactgaacggctgtattcagtggtgtttcaagaaatatgtaatcgctatgacaagaaatacagctgggatgtaaagtccctggttatgggtaagaaggcattagaggcggcacagattataatagacgtcttgcagctcccgatgtccaaagaggagctggtggaagaaagccaaacgaagttaaaggaagtgttccccatggctgcgctcatgccaggggcggagaaactcatcatccacctgcggaaacatggcatcccctttgcactagccaccagctcggggtccgcgtcgttcgatatgaagacaagccgccacaaggagttcttcagcttgttttcccacattgtgctgggagatgaccccgaagtgcagcatggcaagccagacccagacatcttcctagcttgtgccaagaggttctctccccctcctgctatggagaagtgccttgtctttgaagatgctcccaatggggtggaggcggccctggcagctgggatgcaggcggtcatggttcctgacggaaacttgagccgagatctgacaacaaaggccaccctggtgctgaattccctgcaggacttccagcccgagctgtttggtttgccctcctatgagtgagagggagggcctcagtcttccgcccccagcccactctcatggtccacactgctgggggaaagggaaaggaaatcagcaactcttcaatcccaacctgcgctgtgattttagcctcctgagattggagtttccatcccatgttggtttgtcccagtctaacgtgttgataaaatgtgacttgacggttgagacaaaaaatacagtagagacagaaacgaagcccagaacaaagatgaaacttgaattaccatctcagaagtcaagctgatggagtatgtgataaagtgaatgtacatgtatatacacacacacctccatatatacacgtgtgtatcagtttggtaatatgcaggtaggcattacatgcatatgtatgtagacatatgcatgcatgtatatgtaaaatatatacttttccaagacaaaatggaacatcacttctcctagtttttctgaacactggctgggaaatgtaaactgtgtatgcatataagtatatgctttatgtatgcatatgtatgtagatatgtttatatctatcgtctgcatcactctcctcagtgttgatgtcaacatgcaatgacaactgataaagcgagatggtagttctgcctggtttgcagtctgagtgggaaagtcctgtttttgatgagcactccttgttagctaacatttaaattctttttgtgacctcagaatgtctctggatctttcctcattgactgactctgtgccacgtcatccatagtttattgttagtatgaacacaactgtaacatttacctggtatctacatccttacctgcattggaaaatgtttgctacctcacaacaaccatttgcctcctttaagaacactgatgggctgcactttttggatagaaatagaatttgatttcagaatgtatgcttggtgagtctcagtgcccaggaacacttttggaataatttatcagacattgaacttctgtgattaatcgcttttatagatttactcagtctttaaaattcgtctctgatttgccagagaaaaacggtggtagccatggaaatcgggagtgaaggagcactgcttcattgtggctcagcccttcctaggggcctctgccctttgatgtccttgagctactcttcagctctggaagttgtggacaaaccgtaggaatgtatgtgtgcgtgtggtggagtgattgtctgtgaatgacaggccctggctattgattgatgttgcatcaatttagcaaattcatttcctcattcttgatggcctgaatatatgtctgcacttttaatgctcctcttaaccagttgtaacatcttaccatttccctaccaaattgaattagtttaataaaatcttttgacacatgttaaaaac

SEQ ID NO: 1773 - DNA, 5970 bp, Homo sapiens
ggcgcggggagctgtgggcggcagctgcgtctcctgccaccgccctccctccgccacgatgccggggatcgacaagctgcccatcgaggagacgctggaggacagcccgcagacaaggtctttactaggtgtatttgaagaagatgccacagctatttccaactatatgaaccagttgtatcaagctatgcatcggatttatgatgcacagaatgaattaagtgcagcaacacacctgacctcaaaacttttaaaagaatatgaaaaacagcgttttccattgggaggtgatgatgaagttatgagctctacattgcaacagttttcaaaagttatagatgagcttagctcttgtcatgcagtgctttcaactcaacttgctgatgccatgatgttccccattacccagtttaaagaaagagatctgaaagaaatactaacattaaaggaagtatttcagattgcaagtaatgatcatgatgctgcgattaatagatatagccgtttatcaaaaaaaagagaaaatgacaaggtgaagtatgaagtaacagaagatgtgtacacatccagaaagaaacaacaccagaccatgatgcattatttttgtgcattaaatactcttcagtacaagaagaaaatagcattgttagaacctctacttgggtacatgcaagctcagataagtttctttaagatgggttctgaaaatcttaatgaacaactggaagaatttttagctaatattggaacaagcgttcagaatgttcgcagggaaatggacagtgatatagagaccatgcaacagacaatagaggatttggaagtagccagtgatcccttatatgtgcctgacccagaccccaccaaatttcctgttaatcgaaatttaacccgaaaggctggataccttaatgctaggaataaaacaggcttggtgtcatctacctgggacagacagttttacttcacgcagggtggaaatttaatgagtcaggcccgtggggatgtagcaggaggcctggccatggacatagacaactgttcagtgatggctgtggactgtgaagacagacgatattgttttcagatcacctctttcgatggaaaaaaatcttcaattttgcaagcagagagtaaaaaagatcatgaagagtggatctgtacaataaacaacatatctaaacaaatatacttaagtgaaaatccagaggaaactgctgcacgagtaaatcaatcagctctggaagctgtcactccttccccatctttccagcagaggcacgagagcctgcggccagcagcaggacaatctcggccaccgacagctcgaaccagcagttcaggatccttaggatctgagtctacaaatttggctgccctctctctagattctcttgttgccccagacaccccaatacagtttgacataatttctcctgtgtgtgaagatcagcctggccaggcaaaagcctttggccagggaggcaggcgtacaaatccatttggagaatctggaggaagtacaaaatctgaaactgaagattctattcttcatcagttatttattgtccgattccttggttcaatggaggtgaaatcagatgaccatccagatgttgtttatgaaactatgcgccaaatcttagctgcccgggccatccataacatctttcgtatgacagaatcgcatttattagtcacttgtgactgtttaaagttaattgatccacagacacaagttacaaggctcacgtttccattaccttgtgtagttttgtatgctacacaccaggaaaataagcgcctttttggatttgttcttcggacatcaagcgggagaagtgaaagtaatctgtcatcagtctgctatatatttgagtcaaacaatgagggggaaaagatatgtgattctgttggactggcaaaacagatagctttgcatgctgaactggatcgtagggcatcagaaaaacaaaaagaaatagagagagtaaaagagaagcaacagaaagaactcaataaacaaaaacagattgaaaaggacttggaagaacaaagtcggttgatagctgcttccagtagaccaaaccaagccagtagtgaggggcagtttgttgtccttagcagtagccagtcagaagagagtgatttgggagaaggaggaaagaagagagaatcagaagcataagcttatacttttggtagatattcccccttggaatttgacagtttctatggtgaaatggcagaaggtaacaactatgttgaaatatcaaggaggagattaagctttatatttgcttatttgttgtagctacattttaaaaaaaagattgaacttgatgacttaggtttgcattgatcttttttcccccttaaacataatgtactatgtattaacatctaaaggaaacctgctcatctccctgaagcagactgctgaggaattacatttgctcaagaattttttccgtcaaattgtgaacttttaattcttgcattgtaattggctgtgtccataagaaatcatttattcttcaggcttagacattcatggatatgcttttctttcattaggaacattttgctggtgatgaggaagcatttagctgaataagtttaaagccctttatacagagaattctacaagtttgcaaatattttaacaatattaaatgtgcaatagaacttttataaaataattagaacagagattttacagttaaggtttcaaattgtggcaggtggtactgttgatctcagggtactttctgggattgctcacatttctctaatgtactgcacttgatgccagtaggaaagaagcttaagtgtcttcagttcaagattgatagagcccttggcattttattatcacattcttagttctcaggttgggacttcaattactgctgcagagcagtagtggttaaaaataagatattggaatttattaaaagatttttgttcaatacattttagattaggattgacaagtaaagatactgctatggaatgatacattgtattttctgcattgtgtgaaatagtttttattgaaagtcaagtgacatttcaaaagaagttctataacaattatgtttcatgcttaaagtaaaaattcccagagtttagtttagaaaatgtaatcttttaaatttcagactgatatattcccagtattttcataatgccatgttttgataaagtactgaatcaccactttatatccacaaaggcaaataactaatgtatgataatagaataatttgcactaattattgtaaatatgtctactcttcaaatgagtaaaaggtccaattttgtgaaagattgaaaatgaattgaatgcctagtagagtataggagaagttgaccaaggaaggatttaacctggtgccaaggttaaaataacatttctctactgcctattgtttatgttaaaccttaattttttttctgtaatcacttttaacactgctaatagaaattatgttttcatgtgtttcacatgaaaaagtatatatatacaaagttaatatagtgggtaaaatactttacatagtcacacatttacaaatttttcaagaggttagccactaagactttaataattttacaagggaaaaagcctttttttttctttgatatacagttttttcttcttagttctgcattagaaatggcatctgttttaggtctcaaaatataactcggctgtttcacactgtatatgtacattgttttctgtaggaataggataatgatatataggatcatgatattccttctatccatgtgccaaatgggtgtaatgtttatttactgatgctttatgttaccaaaacatacagtaaaaaagtagaaatttatgaaatacttttgataaaaagtttattttgtgcttaccaaaaggaatgctttcacaatagtgtatcagttcttttgttttgttaaagttggaatttattctgttgccagcatttaagtagtcatggcaagtcctgtttttaagaccttttggagactggagctttctgttccattaagtcttttgtttatactacaaattgtcacctcacttagttcagatgaaatctgttactctacaaggaaggtgttcatcattaggaggcagctttactaagctggtgctttgcatggtagcaagtgctgccctttatcagcaccctgggtcatagtgtaggctagagttaaggcactggcagacttagggatgctggacagacctgtagttcgttttaagtcatgttcacaggaatttctacaataataaacccatcatctccataggtcagatcgaagtgcattccaatgctaaatagaagttatgagtgggtttaacaattttagatgattcagcttttgttccattactgttgaactatatgaactattccattactgcagagatttaagtatctgttttaataagctctttttgttatttaaaggctgcccatgggtttctgcctagtggtaaagctgattgttaccctcctttgaaatcccttctagttctgagatgctttgagggtaactggattcgattttgggatatcttttctcacattcagacttacacttaatggtgttagaaatcaacaaaactcctttttaaaaagaaaagatattaagcctgcctacttctacaatgcattctgttacctatttgaacagtatgtttgtaactatggcaatgaagtcagtagataggaaaccagttattccttctacctttaaaaattttgagaacttgccaaccagggattaaagctattatcttgaacagagtccctaaagctagtctagtttttgccacatctgcaatgattattgtttaatttcaaaagaatcctcaggctctacaatctaggggtggtaaatgtgtttccactatacttgggaaaaggtcagtaggatgtgcatcctagggaagataaaatcgtatatggtaaaggcatttgagttaattttgcattatatctaggaaccatattatttaaaatttgaatcctattaatgctgagagatcctaagagctagtatgttgtaaaacctgccacctgaataaaatgaaaaaaaaaagtgtttttttgagacagagtcttgctctgttgcccaggctggagtgcagtggtgtgatcttgggtcactgcaaactccgcctcccaggttcacgccattctcctgcctcagcctcccgagtagctgggaccacaggggcccaccaccgcgcccggctaattttttgtatttttagtagagacggggtttcaccgtgttagccaggatgttctcgatctcctgacctcatgatccgcccgcctcggcctcccaaagtgctgggattacaggcgtgagccaccgtgcccggccctaaaatgaaattattaatgttggttctgaaacagcctcttagcattcagattgtattttaaatacttaaacacaccaattgtagaaagcaaccctttatttttagcaagtttggtttactcttctcccatgagattttgtctttctacattaactagtaagacataaagatttgaaactggaactatattatactttttaaccaatctctgtggcttcactcatgaaatttacttcagttaatatgagactgggggttaagttgtaactaatatgcaaaattgctttgtatatttggtgattttgtaatgtaagtgaattgattcttatttcactgatactattaatcatgcagtgtacaattcaaaatcatgcaatgtttcactttagaattggatttgaagaactcgactttatgtgatcatggtattggtatacatgtggggtggagaacttattttttcattttgtcacaataggtatatactgacaaggcttcaggaaaaaagttgttagaagattttttaatgtataataaagtccatgatttttgtacagtgttttttaatg

SEQ ID NO: 1774 - DNA, 1281 bp, Homo sapiens
tcagcctgagccgggggaagccaggcggcccgggtgtctggaggggggggggtccgctgcccgagaatgggaattctcttcactagaatatggagactgttcaatcaccaggagcacaaagttatcattgttgggctggataatgcagggaaaactaccattctttaccaattttctatgaatgaagttgtacatacatctcctacaataggaagtaatgtagaagagatagtgattaataatacacgtttcctaatgtgggatattggtggccaagaatctcttcgttcttcctggaacacttactatactaacacagagtttgtaatagttgttgtggacagtacagacagagagaggatttctgtaactagagaagaactctataaaatgttagcgcatgaggacctaagaaaagctggattgctgatttttgctaataaacaagatgttaaagaatgcatgactgtagcagaaatctcccagtttttgaagctaacttctattaaagatcaccagtggcatatccaggcatgctgtgctctaactggcgagggattgtgccaaggacttgaatggatgatgtcacgacttaagattagatgatctctactgacctcttctcatagattttgtataaatgaagtgctggactttacctgaaagctgcaaaaattaatggtttagatatatttataataaactgatttaaactttttctataagaagaaaaattaagaccacttatttgaaaacaaagatgaagtctcaccttccagtttgctttctcattagttttttccaaagtaagttattgaagctgtgattgacatttttctcataatgaatcctctcaggacattgtgtagcctatggtaagtacaaagggagaggaagacattttgaattttaagagctttattatcagtttaaccctccctagttgaatgttattttcttcttgttccattaagtcagaatacaaatcagcacagatattcgaatgtttccaatattttaaaatgtaatgttacttatgaaaagtattttgcttaaggttgtgtgtgtattgtgtatatacctcaagttcaagttaatggcattgatttatgttccagacaaaaataacacaaataataatatccttcgttataaccacaatgagataagtattggcattagtgttcagtgccattttatactttctctctgtgttctctgtattgtactaaccaacctcccaaatcgctgagctgcttgtttaaaaaaaaaaaaaaaaaa

SEQ ID NO: 1775 - DNA, 1518 bp, Homo sapiens
aaccaccattttgcaaggaccatgaggccactgtgcgtgacatgctggtggctcggactgctggctgccatgggagctgttgcaggccaggaggacggttttgagggcactgaggagggctcgccaagagagttcatttacctaaacaggtacaagcgggcgggcgagtcccaggacaagtgcacctacaccttcattgtgccccagcagcgggtcacgggtgccatctgcgtcaactccaaggagcctgaggtgcttctggagaaccgagtgcataagcaggagctagagctgctcaacaatgagctgctcaagcagaagcggcagatcgagacactgcagcagctggtggaggtggacggcggcattgtgagcgaggtgaagctgctgcgcaaggagagccgcaacatgaactcgcgggtcacgcagctctacatgcagctcctgcacgagatcatccgcaagcgggacaacgcgttggagctctcccagctggagaacaggatcctgaaccagacagccgacatgctgcagctggccagcaagtacaaggacctggagcacaagtaccagcacctggccacactggcccacaaccaatcagagatcatcgcgcagcttgaggagcactgccagagggtgccctcggccaggcccgtcccccagccaccccccgctgccccgccccgggtctaccaaccacccacctacaaccgcatcatcaaccagatctctaccaacgagatccagagtgaccagaacctgaaggtgctgccaccccctctgcccactatgcccactctcaccagcctcccatcttccaccgacaagccgtcgggcccatggagagactgcctgcaggccctggaggatggccacgacaccagctccatctacctggtgaagccggagaacaccaaccgcctcatgcaggtgtggtgcgaccagagacacgaccccgggggctggaccgtcatccagagacgcctggatggctctgttaacttcttcaggaactgggagacgtacaagcaagggtttgggaacattgatggcgaatactggctgggcctggagaacatttactggctgacgaaccaaggcaactacaaactcctggtgaccatggaggactggtccggccgcaaagtctttgcagaatacgccagtttccgcctggaacctgagagcgagtattataagctgcggctggggcgctaccatggcaatgcgggtgactcctttacatggcacaacggcaagcagttcaccaccctggacagagatcatgatgtctacacaggaaactgtgcccactaccagaagggaggctggtggtataacgcctgtgcccactccaacctcaacggggtctggtaccgcgggggccattaccggagccgctaccaggacggagtctactgggctgagttccgaggaggctcttactcactcaagaaagtggtgatgatgatccgaccgaaccccaacaccttccactaagccagctccccctcc

SEQ ID NO: 1776 - DNA, 1696 bp, Homo sapiens
gcacgagggtgatgaaggcctacgagtgcggcgcggcctgaaggggcacgcgggggacctgcaaagctagtgaggggcggggcaggcggcgcggtgggggcgggccgagcccggaggccagatgagcggacacagccccacgcgcggggccatgcaggtggccatgaacggtaaggcccgcaaagaggcggtgcagactgcggctaaggaactcctcaagttcgtgaaccggagtccctctcctttccatgctgtggctgaatgccgcaaccgccttctccaggctggcttcagtgaactcaaggagactgagaaatggaatattaagcccgagagcaagtacttcatgaccaggaactcctccaccatcatagcttttgctgtagggggccagtacgttcctggcaatggcttcagcctcatcggggcccacacggacagcccctgcctccgggtgaaacgtcggtctcgccgcagccaggtgggcttccagcaagtcggtgtggagacctatggtggtgggatctggagcacctggtttgaccgtgacctgactctggctggacgcgtcattgtcaagtgccctacctcaggtcggctggagcagcagctggtgcacgtggagcggcccattcttcgcatcccacacctggccatccatctgcagcgaaatatcaacgagaactttgggcccaacacagagatgcatctagtccccattcttgccacagccatccaggaggagctggagaaggggactcctgagccagggcctctcaatgctgtggatgagcggcaccattcggtcctcatgtccctgctctgtgcccatctggggctgagccccaaggacatagtggagatggagctctgccttgcagacacccagcctgcggtcttgggtggtgcctatgatgagttcatctttgctcctcggctggacaatctgcacagctgcttctgtgccctgcaggccttgatagattcctgtgcaggccctggctccctggccacagagcctcacgtgcgcatggtcacactctatgacaacgaagaggtggggtctgagagtgcacagggagcacagtcactgctgacagagctggtgctgcggcggatctcagcctcgtgccagcacccgacagccttcgaggaagccatacccaagtccttcatgatcagcgcagacatggcccatgctgtgcatcccaactacctggacaagcatgaggagaaccaccggcctttattccacaagggccccgtgatcaaggtgaacagcaagcaacgctatgcttcaaacgcggtgtcagaggccctgatccgagaggtggccaacaaagtcaaggtccccctgcaggatctcatggtccggaatgacaccccctgtggaaccaccattggacctatcttggcttctcggctggggctgcgggtgctggatttaggcagcccccaactggccatgcactctatccgggagatggcctgcaccacaggagtcctccagaccctcaccctcttcaagggcttctttgagctgttcccttctctaagccataatctcttagtggattgagccctcttggaaagacttctctgccatccctttgcacctgagaggggaagttctcagctgagctgaagctggattattaaagtggattgtcactcagaaaaaaaaaaaaaaaaaaaa

SEQ ID NO: 1777 - DNA, 1664 bp, Homo sapiens
agagcccctgcgcctgggcgcgaaaatggcggcggcggcgacggccgggcgctcctgaagcagcagttatggagcttccctcagggccggggccggagcggctctttgactcgcaccggcttccgggtgactgcttcctactgctcgtgctgctgctctacgcgccagtcgggttctgcctcctcgtcctgcgcctctttctcgggatccacgtcttcctggtcagctgcgcgctgccagacagcgtccttcgcagattcgtagtgcggaccatgtgtgcggtgctagggctcgtggcccggcaggaggactccggactccgggatcacagtgtcagggtcctcatttccaaccatgtgacacctttcgaccacaacatagtcaatttgcttaccacctgtagcaccgtgagtgagagcgaggccgagagcgccacggggcggttccctggggcccagctgaaggcccccctgtccccactcgcgttccgcatggaggatactgaggccttacccctaaccccgatcctctacccaacatgtcagtttttttttttcattttcctcaatatttttcttcttgctttctcttctcctggttcccagcctctactcaatagtccccccagctttgtgtgctggtctcggggcttcatggagatgaatgggcggggggagttggtggagtcactcaagagattctgtgcttccacgaggcttccccccactcctctgctgctattccctgaggaagaggccaccaatggccgggaggggctcctgcgcttcagttcctggccattttctatccaagatgtggtacaacctcttaccctgcaagttcagagacccctggtctctgtgacggtgtcagatgcctcctgggtctcagaactgctgtggtcacttttcgtccctttcacggtgtatcaagtaaggtggcttcgtcctgttcatcgccaactaggggaagcgaatgaggagtttgcactccgtgtacaacagctggtggccaaggaattgggccagacagggacacggctcactccagctgacaaagcagagcacatgaagcgacaaagacaccccagattgcgcccccagtcagcccagtcttctttccctccctcccctggtccttctcctgatgtgcaactggcaactctggctcagagagtcaaggaagttttgccccatgtgccattgggtgtcatccagagagacctggccaagactggctgtgtagacttgactatcactaatctgcttgagggggccgtagctttcatgcctgaagacatcaccaagggaactcagtccctacccacagcctctgcctccaagtttcccagctctggcccggtgacccctcagccaacagccctaacatttgccaagtcttcctgggcccggcaggagagcctgcaggagcgcaagcaagcactatatgaatacgcaagaaggagattcacagagagacgagcccaggaggctgactgagctcaaaggaacaggatggcacccagagccgcaggacggagactgggggcagccctcacccaactcacaacaggctggatgggtgggtggtaaaaagggaaggatgaggctcccccaatgtcacattaaattcatggttttcattcaaaaaaaaaaaaaaaaaaa

SEQ ID NO: 1778 - DNA, 5878 bp, Homo sapiens
cgcactcgtccccagcccgcccgggagctgcgagccgcgagctggattatggtggcctgagcagccaacgcagccgcaggagcccggagcccttgcccctgcccgcgccgccgcccgccggggggaccagggaagccgccaccggcccgccatgcccgcccctcccagccccgccgggagcccgcgcccgctgcccaggctggccgccgccgtgccgatgtagcgggctccggatcccagcctctcccctgctcccgtgctctgcggatctcccctgaccgctctccacagcccggacccgggggctggcccagggccctgcaggccctggcgtcctgatgcccccaagctccctctcctgagaagccaccagcaccacccagacttgggggcaggcgccagggacggacgtgggccagtgcgagcccagagggcccgaaggccggggcccaccatggcccaagccctgccctggctcctgctgtggatgggcgcgggagtgctgcctgcccacggcacccagcacggcatccggctgcccctgcgcagcggcctggggggcgcccccctggggctgcggctgccccgggagaccgacgaagagcccgaggagcccggccggaggggcagctttgtggagatggtggacaacctgaggggcaagtcggggcagggctactacgtggagatgaccgtgggcagccccccgcagacgctcaacatcctggtggatacaggcagcagtaactttgcagtgggtgctgccccccaccccttcctgcatcgctactaccagaggcagctgtccagcacataccgggacctccggaagggtgtgtatgtgccctacacccagggcaagtgggaaggggagctgggcaccgacctggtaagcatcccccatggccccaacgtcactgtgcgtgccaacattgctgccatcactgaatcagacaagttcttcatcaacggctccaactgggaaggcatcctggggctggcctatgctgagattgccaggcctgacgactccctggagcctttctttgactctctggtaaagcagacccacgttcccaacctcttctccctgcagctttgtggtgctggcttccccctcaaccagtctgaagtgctggcctctgtcggagggagcatgatcattggaggtatcgaccactcgctgtacacaggcagtctctggtatacacccatccggcgggagtggtattatgaggtcatcattgtgcgggtggagatcaatggacaggatctgaaaatggactgcaaggagtacaactatgacaagagcattgtggacagtggcaccaccaaccttcgtttgcccaagaaagtgtttgaagctgcagtcaaatccatcaaggcagcctcctccacggagaagttccctgatggtttctggctaggagagcagctggtgtgctggcaagcaggcaccaccccttggaacattttcccagtcatctcactctacctaatgggtgaggttaccaaccagtccttccgcatcaccatccttccgcagcaatacctgcggccagtggaagatgtggccacgtcccaagacgactgttacaagtttgccatctcacagtcatccacgggcactgttatgggagctgttatcatggagggcttctacgttgtctttgatcgggcccgaaaacgaattggctttgctgtcagcgcttgccatgtgcacgatgagttcaggacggcagcggtggaaggcccttttgtcaccttggacatggaagactgtggctacaacattccacagacagatgagtcaaccctcatgaccatagcctatgtcatggctgccatctgcgccctcttcatgctgccactctgcctcatggtgtgtcagtggcgctgcctccgctgcctgcgccagcagcatgatgactttgctgatgacatctccctgctgaagtgaggaggcccatgggcagaagatagagattcccctggaccacacctccgtggttcactttggtcacaagtaggagacacagatggcacctgtggccagagcacctcaggaccctccccacccaccaaatgcctctgccttgatggagaaggaaaaggctggcaaggtgggttccagggactgtacctgtaggaaacagaaaagagaagaaagaagcactctgctggcgggaatactcttggtcacctcaaatttaagtcgggaaattctgctgcttgaaacttcagccctgaacctttgtccaccattcctttaaattctccaacccaaagtattcttcttttcttagtttcagaagtactggcatcacacgcaggttaccttggcgtgtgtccctgtggtaccctggcagagaagagaccaagcttgtttccctgctggccaaagtcagtaggagaggatgcacagtttgctatttgctttagagacagggactgtataaacaagcctaacattggtgcaaagattgcctcttgaattaaaaaaaaaaactagattgactatttatacaaatgggggcggctggaaagaggagaaggagagggagtacaaagacagggaatagtgggatcaaagctaggaaaggcagaaacacaaccactcaccagtcctagttttagacctcatctccaagatagcatcccatctcagaagatgggtgttgttttcaatgttttcttttctgtggttgcagcctgaccaaaagtgagatgggaagggcttatctagccaaagagctcttttttagctctcttaaatgaagtgcccactaagaagttccacttaacacatgaatttctgccatattaatttcattgtctctatctgaaccaccctttattctacatatgataggcagcactgaaatatcctaaccccctaagctccaggtgccctgtgggagagcaactggactatagcagggctgggctctgtcttcctggtcataggctcactctttcccccaaatcttcctctggagctttgcagccaaggtgctaaaaggaataggtaggagacctcttctatctaatccttaaaagcataatgttgaacattcattcaacagctgatgccctataacccctgcctggatttcttcctattaggctataagaagtagcaagatctttacataattcagagtggtttcattgccttcctaccctctctaatggcccctccatttatttgactaaagcatcacacagtggcactagcattataccaagagtatgagaaatacagtgctttatggctctaacattactgccttcagtatcaaggctgcctggagaaaggatggcagcctcagggcttccttatgtcctccaccacaagagctccttgatgaaggtcatctttttcccctatcctgttcttcccctccccgctcctaatggtacgtgggtacccaggctggttcttgggctaggtagtggggaccaagttcattacctccctatcagttctagcatagtaaactacggtaccagtgttagtgggaagagctgggttttcctagtatacccactgcatcctactcctacctggtcaacccgctgcttccaggtatgggacctgctaagtgtggaattacctgataagggagagggaaatacaaggagggcctctggtgttcctggcctcagccagctgcccacaagccataaaccaataaaacaagaatactgagtcagttttttatctgggttctcttcattcccactgcacttggtgctgctttggctgactgggaacaccccataactacagagtctgacaggaagactggagactgtccacttctagctcggaacttactgtgtaaataaactttcagaactgctaccatgaagtgaaaatgccacattttgctttataatttctacccatgttgggaaaaactggctttttcccagccctttccagggcataaaactcaaccccttcgatagcaagtcccatcagcctattatttttttaaagaaaacttgcacttgtttttctttttacagttacttccttcctgccccaaaattataaactctaagtgtaaaaaaaagtcttaacaacagcttcttgcttgtaaaaatatgtattatacatctgtatttttaaattctgctcctgaaaaatgactgtcccattctccactcactgcatttggggcctttcccattggtctgcatgtcttttatcattgcaggccagtggacagagggagaagggagaacaggggtcgccaacacttgtgttgctttctgactgatcctgaacaagaaagagtaacactgaggcgctcgctcccatgcacaactctccaaaacacttatcctcctgcaagagtgggctttccagggtctttactgggaagcagttaagccccctcctcaccccttccttttttctttctttactcctttggcttcaaaggattttggaaaagaaacaatatgctttacactcattttcaatttctaaatttgcaggggatactgaaaaatacggcaggtggcctaaggctgctgtaaagttgaggggagaggaaatcttaagattacaagataaaaaacgaatcccctaaacaaaaagaacaatagaactggtcttccattttgccacctttcctgttcatgacagctactaacctggagacagtaacatttcattaaccaaagaaagtgggtcacctgacctctgaagagctgagtactcaggccactccaatcaccctacaagatgccaaggaggtcccaggaagtccagctccttaaactgacgctagtcaataaacctgggcaagtgaggcaagagaaatgaggaagaatccatctgtgaggtgacaggcaaggatgaaagacaaagaaggaaaagagtatcaaaggcagaaaggagatcatttagttgggtctgaaaggaaaagtctttgctatccgacatgtactgctagtacctgtaagcattttaggtcccagaatggaaaaaaaaatcagctattggtaatataataatgtcctttccctggagtcagtttttttaaaaagttaactcttagtttttacttgtttaattctaaaagagaagggagctgaggccattccctgtaggagtaaagataaaaggataggaaaagattcaaagctctaatagagtcacagctttcccaggtataaaacctaaaattaagaagtacaataagcagaggtggaaaatgatctagttcctgatagctacccacagagcaagtgatttataaatttgaaatccaaactactttcttaatatcactttggtctccatttttcccaggacaggaaatatgtccccccctaactttcttgcttcaaaaattaaaatccagcatcccaagatcattctacaagtaattttgcacagacatctcctcaccccagtgcctgtctggagctcacccaaggtcaccaaacaacttggttgtgaaccaactgccttaaccttctgggggagggggattagctagactaggagaccagaagtgaatgggaaagggtgaggacttcacaatgttggcctgtcagagcttgattagaagccaagacagtggcagcaaaggaagacttggcccaggaaaaacctgtgggttgtgctaatttctgtccagaaaatagggtggacagaagcttgtggggtgcatggaggaattgggacctggttatgttgttattctcggactgtgaattttggtgatgtaaaacagaatattctgtaaacctaatgtctgtataaataatgagcgttaacacagtaaaatattcaataagaagtcaaaaaaaaaaaaaaaaaaaaaaaaaaaaaaaaaaaaaaaaaaaaaaaaaaaaa

SEQ ID NO: 1779 - DNA, 1885 bp, Homo sapiens
tcgcccggtcgacgccgcggctgccggacgggacgggaccggctaggctgggcgcccccccgggccccgccgtgggcatgggcgcactggcccgggcgctgctgctgcctctgctggcccagtggctcctgcgcgccgccccggagctggcccccgcgcccttcacgctgcccctccgggtgaccgcggccacgaaccgcgtagttgcgcccaccccgggacccgggacccctgccgagcgccacgccgacggcttggcgctcgccctggagcctgccctggcgtcccccgcgggcgccgccaacttcttggccatggtagacaacctgcagggggactctggccgcggctactacctggagatgctgatcgggacccccccgcagaagctacagattctcgttgacactggaagcagtaactttgccgtggcaggaaccccgcactcctacatagacacgtactttgacacagagaggtctagcacataccgctccaagggctttgacgtcacagtgaagtacacacaaggaagctggacgggcttcgttggggaagacctcgtcaccatccccaaaggcttcaatacttcttttcttgtcaacattgccactatttttgaatcagagaatttctttttgcctgggattaaatggaatggaatacttggcctagcttatgccacacttgccaagccatcaagttctctggagaccttcttcgactccctggtgacacaagcaaacatccccaacgttttctccatgcagatgtgtggagccggcttgcccgttgctggatctgggaccaacggaggtagtcttgtcttgggtggaattgaaccaagtttgtataaaggagacatctggtatacccctattaaggaagagtggtactaccagatagaaattctgaaattggaaattggaggccaaagccttaatctggactgcagagagtataacgcagacaaggccatcgtggacagtggcaccacgctgctgcgcctgccccagaaggtgtttgatgcggtggtggaagctgtggcccgcgcatctctgattccagaattctctgatggtttctggactgggtcccagctggcgtgctggacgaattcggaaacaccttggtcttacttccctaaaatctccatctacctgagagacgagaactccagcaggtcattccgtatcacaatcctgcctcagctttacattcagcccatgatgggggccggcctgaattatgaatgttaccgattcggcatttccccatccacaaatgcgctggtgatcggtgccacggtgatggagggcttctacgtcatcttcgacagagcccagaagagggtgggcttcgcagcgagcccctgtgcagaaattgcaggtgctgcagtgtctgaaatttccgggcctttctcaacagaggatgtagccagcaactgtgtccccgctcagtctttgagcgagcccattttgtggattgtgtcctatgcgctcatgagcgtctgtggagccatcctccttgtcttaatcgtcctgctgctgctgccgttccggtgtcagcgtcgcccccgtgaccctgaggtcgtcaatgatgagtcctctctggtcagacatcgctggaaatgaatagccaggcctgacctcaagcaaccatgaactcagctattaagaaaatcacatttccagggcagcagccgggatcgatggtggcgctttctcctgtgcccacccgtcttcaatctctgttctgctcccagatgccttctagattcactgtcttttgattcttgattttcaagctttcaaatcctccctacttccaagaaaaacaattaaaaaaaaaaacttcattctaaaccaaaaaaaaaaaaaaaaaa

SEQ ID NO: 1780 - DNA, 777 bp, Homo sapiens
aggatcagacaagggtgctgagagccgggactcacaaccaaaggagaaatgagcaatccgcggtctttggaagaggagaaatatgatatgtcaggtgcccgcctggccctaatactgtgtgtcaccaaagcccgggaaggttccgaagaagacctggatgctctggaacacatgtttcggcagctgagattcgaaagcaccatgaaaagagaccccactgccgagcaattccaggaagagctggaaaaattccagcaggccatcgattcccgggaagatcccgtcagttgtgccttcgtggtactcatggctcacgggagggaaggcttcctcaagggagaagatggggagatggtcaagctggagaatctcttcgaggccctgaacaacaagaactgccaggccctgcgagctaagcccaaggtgtacatcatacaggcctgtcgaggagaacaaagggaccccggtgaaacagtaggtggagatgagattgtgatggtcatcaaagacagcccacaaaccatcccaacatacacagatgccttgcacgtttattccacggtagagggatacatcgcctaccgacatgatcagaaaggctcatgctttatccagaccctggtggatgtgttcacgaagaggaaaggacatatcttggaacttctgacagaggtgacccggcggatggcagaagcagagctggttcaagaaggaaaagcaaggaaaacgaaccctgaaatccaaagcaccctccggaaacggctgtatctgcagtag

SEQ ID NO: 1781 - DNA, 2821 bp, Homo sapiens
gttcagccagcagcagcagcagctccagcaacagcagcagcagctccagcagttacagcagcagcagctccagcagcagcaattgcagcagcagcagtcactgcagctccagcagctgctccagcagtccccaccacaggccccgttgcccatggctgtcagccgggggctccccccgcagcagccacagcagccgcttctgaatctccagggcaccaactcagcctccctcctcaacggctccatgctgcagagagctttgcttttacagcagttgcaaggactggaccagtttgcaatgccaccagccacgtatgacactgccggtctcaccatgcccacagcaacactgggtaacctccgaggctatggcatggcatccccaggcctcgcagcccccagcctcacacccccacaactggccactccaaatttgcaacagttctttccccaggccactcgccagtccttgctgggacctcctcctgttggggtccccatgaacccttcccagttcaacctttcaggacggaacccccagaaacaggcccggacctcctcctctaccacccccaatcgaaaggattcttcttctcagacaatgcctgtggaagacaagtcagaccccccagaggggtctgaggaagccgcagagccccggatggacacaccagaagaccaagatttaccgccctgcccagaggacatcgccaaggaaaaacgcactccagcacctgagcctgagccttgtgaggcgtccgagctgccagcaaagagattgaggagctcagaagagcccacagagaaggaacctccagggcagttacaggtgaaggcccagccgcaggcccggatgacagtaccgaaacagacacagacaccagacctgctgcctgaggccctggaagcccaagtgctgccacgattccagccacgggtcctgcaggtccaggcccaggtgcagtcacagactcagccgcggataccatccacagacacccaggtgcagccaaagctgcagaagcaggcgcaaacacagacctctccagagcacttagtgctgcaacagaagcaggtgcagccacagctgcagcaggaggcagagccacagaagcaggtgcagccacaggtacagccacaggcacattcacagggcccaaggcaggtgcagctgcagcaggaggcagagccgctgaagcaggtgcagccacaggtgcagccccaggcacattcacagcccccaaggcaggtgcagctgcagctgcagaagcaggtccagacacagacatatccacaggtccacacacaggcacagccaagcgtccagccacaggagcatcctccagcgcaggtgtcagtacagccaccagagcagacccatgagcagcctcacacccagccgcaggtgtcgttgctggctccagagcaaacaccagttgtggttcatgtctgcgggctggagatgccacctgatgcagtagaagctggtggaggcatggaaaagaccttgccagagcctgtgggcacccaagtcagcatggaagagattcagaatgagtcggcctgtggcctagatgtgggagaatgtgaaaacagagcgagagagatgccaggggtatggggcgccgggggctccctgaaggtcaccattctgcagagcagtgacagccgggcctttagcactgtacccctgacacttgtcccccgccccagtgactccgtctcctccacccctgcggctaccagcactccctctaagcaggccctccagttcttctgctacatctgcaaggccagctgctccagccagcaggagttccaggaccacatgtcggagcctcagcaccagcagcggctaggggagatccagcacatgagccaagcctgcctcctgcccctgctgcccgtgccccgggacgtcctggagacagaggatgaggagcctccaccaaggcgctggtgcaacacctgccagctctactacatgggggacctgatccaacaccgcaggacacaggaccacaagattgccaaacaatccttgcgacccttctgcaccgtttgcaaccgctacttcaaaacccctcgcaagtttgtggagcacgtgaagtcccaggggcataaggacaaagccaaggagctgaagtcgcttgagaaagaaattgctggccaagatgaggaccacttcattacagtgggcgctgtgggttgcttcgagggtgatgaagaagaggaagaggatgatgaggatgaagaagagatcgaggttgaggaggaactctgcaagcaggtgaggtccagagatatatccagagaggagtggaagggctcggagacctacagccccaatactgcatatggtgtggacttcctggtgcccgtgatgggctatatctgccgcatctgccacaagttctatcacagcaactcaggggcacagctctcccactgcaagtccctgggccactttgagaacctgcagaaatacaaggcggccaagaaccccagccccaccacccgacctgtgagccgccggtgcgcaatcaacgcccggaacgctttgacagccctgttcacctccagcggccgcccaccctcccagcccaacacccaggacaaaacacccagcaaggtgacggctcgaccctcccagcccccactacctcggcgctcaacccgcctcaaaacctgatagagggacctccctgtaccctggcctgcctgggtccagatctgctaatgctttttaggagtctgcctggaaactttgacatggttcatgtttttactcaaaatccaataaaacaaggtagtttggctg

SEQ ID NO: 1782 - DNA, 3110 bp, Homo sapiens
tcgccggctgcggcgcctgggacggttgcggtgggtctgggcgctgggaagtcgtccaagatgattaaaaaattcgacaagaaggacgaggagtctggtagtggctccaatcctttccagcatctggagaagagtgctgttttacaggaggctcgtatattcaatgaaactccaatcaatccaagaagatgtttgcatattcttacaaagattctttacttactgaaccagggtgaacactttggaacaacggaagctacagaagccttctttgcaatgacgcgattgtttcaatctaatgatcaaacattgaggagaatgtgctaccttaccatcaaagaaatggctaccatctctgaggatgtgataattgtcacaagcagtctgactaaagacatgactggaaaagaagatgtataccgaggcccggccatcagagctctctgcaggatcaccgatggaacaatgttgcaagccattgaaagatacatgaagcaggccattgtggataaagtttccagtgtatccagttcagcactggtatcttccctgcacatgatgaagataagctatgatgtggttaagcgctggatcaatgaagcccaagaagctgcatcaagtgataatattatggtccagtaccatgcattgggagtcctgtatcaccttagaaagaatgatcgacttgctgtttccaagatgttgaataagtttactaaatctggtctcaagtcacagtttgcttactgcatgctgatccgaattgccagtcgcttactaaaagaaactgaggatggccatgaaagtccactgtttgatttcattgagagctgcttgcgaaataaacatgaaatggttatttatgaagctgcttcagctatcatccatcttcctaactgcactgcaagagagttggcacctgctgtttcagttcttcaacttttctgtagttctcctaagccagccttgagatatgcagctgtgaggaccttgaacaaggtggcaatgaagcacccctctgctgttactgcctgcaatctggacttagaaaacttaatcacagactcaaacagaagcattgctaccttagccattactacactcctcaaaacaggaagtgagagcagtgtggaccggctcatgaagcagatatcttcttttgtgtctgaaatctcagatgagttcaaggtggtggttgtacaggcaattagtgctctctgtcagaaataccctcgaaagcacagtgtcatgatgactttcctctccaacatgctccgagatgatggaggctttgagtacaagcgggccattgtggactgtataatcagcattgtggaagagaaccctgagagtaaagaagcaggcctagcccacctttgtgaattcattgaggactgtgaacacactgttctggctactaagattctacacttgttgggcaaagagggccctagaacgcctgtcccctccaaatatatccgttttatttttaatagggttgtcctggagaatgaggctgtcagagctgctgctgtgagtgctttggctaaatttggggctcagaatgagagtcttctcccaagcatccttgtactcttacagaggtgtatgatggatactgatgacgaggtacgagacagagctaccttctatctgaatgtgctgcagcagaggcagatggcactaaatgccacatatatctttaatggtttgacggtctctgtaccagggatggaaaaagccttacaccagtacacgttggagccttcagaaaaaccgtttgacatgaaatcaattcctcttgctatggctcctgtctttgaacagaaagcagaaatcacacttgtggctactaagccagagaagttggctccttccaggcaagacattttccaagaacaattggctgccattcctgagtttctgaatataggacccttgttcaagtcttctgagcctgttcaacttacagaagcagagacagaatattttgttcgatgtatcaagcacatgtttaccaatcacatcgtgttccagtttgactgcaccaacactctcaatgaccagctgctggaaaaagtgacagtgcagatggagccatcagattcctatgaagtgctgtcttgtatcccagcccccagccttccttataaccaaccaggaatatgttacactcttgttcgtttgcctgatgatgaccctacagcagttgcaggctcctttagctgcaccatgaagtttacagtccgggactgtgaccctaacactggagttccagatgaggatgggtatgatgatgagtatgtgctggaagatctcgaagtgactgtgtctgaccatattcagaaagtactgaagcctaactttgctgctgcttgggaagaggtgggagatacctttgagaaagaggaaacctttgccctcagttctaccaaaacccttgaagaggctgtcaacaatatcatcacatttctgggcatgcagccatgtgagaggtccgataaagtacctgagaacaagaattcccattcgctctatctggcaggtatattcagaggtggctatgatttattggtgaggtccaggctggccttagccgatggagtgaccatgcaggtgactgtcagaagtaaagagagaacacctgtagatgttatcttagcttctgttggataaatgcttactggacaagaggaaactgatgcacactacatggtcagtgggcttttaggctagtggcatcagtttcccagaatcagacttttgaagatgaatgactttggagaagcaaattaaacatttggccctgagccagcagatcaagcaaatgtctatctttgcgcatgggttgttttttttttttttctttttattctacttggtcagctttgggacgatagtgcagctttgggtgatcttgaaaatcaaatactatcctatactccagctgcttaacttcattttattctttaatgtgtacctgaaagctcctggcaatgctggaaaatttttatcccagaggggtgggggggaggggggaggggaagccagagtccacttttgtcacaattcatttttattaatagaaaataaacacttattccagtttc

SEQ ID NO: 1783 - DNA, 1743 bp, Homo sapiens
gccccggcccgcccgccagctgcggcggcgcgtcgggaagtgcttggggcggcgagcatggcggcagcggctgcaggcctgggcggcggcggcgccggcccgggacccgaggccggggacttcctggcccgctaccggctggtatcgaacaagctgaagaagcggttcctgcggaagccgaacgtggcggaggccggcgagcagttcggacagctgggccgggagctgcgcgcccaggagtgtctgccctacgcggcctggtgccagctggcggtggcgcgctgccagcaggcgctcttccacgggcccggggaggcgctggccctcaccgaggccgcccgcctcttcctgcggcaggagcgcgacgcgcgccagcgcctggtctgccccgccgcctacggggagccgctgcaggccgccgccagcgccctgggcgccgcggtgcgtctgcacctcgagctgggccagccggccgccgccgccgccctctgcctcgagctggccgccgccctgcgcgacctgggccagccggccgccgccgccggtcacttccagcgcgccgcccagctccagctgccccagctgcccctggccgcgctgcaggcgcttggcgaggccgcctcctgccagctgctggcgcgcgactacaccggcgccctggcggtcttcacgcgcatgcagcgcctggcgcgggagcacggcagccacccggtgcagtcactgccgccgcccccgccgccggcaccccagcccgggcccggggcgacgcccgccctaccggccgcgctgcttcctccgaactccggctcggcggcgccctctcccgccgccctgggcgccttctcggacgtgctggtccgctgcgaggtgtcccgcgtgctgctgctgctcctcctgcaaccaccgcccgccaagctgctgccggagcacgcccagaccctggagaagtactcctgggaggcttttgacagccacgggcaggagagcagcggccagcttcccgaggagctctttctgctgctccagtctttggtcatggctacccacgaaaaggacacggaagccatcaagtcgctgcaggtggagatgtggccactgttgactgctgagcagaaccacctccttcacctcgttctgcaagaaaccatctccccctcaggacagggagtctgatccatcccattcacccagtgacttctttttgcccaggcctggactttttgcatcagtcacgttaaccagatgactttgcctgttaccaaacctcatgcatccacgtttgcgtctggggaggaataaaaagacatcgttcccgcttctgcgttttgttattcctactgccgccataggaattatttcgttggctgaacgttaccagcaccccgagaacacattttgatagaatcagagtagaggacatggctgtcttctaaaaagccacgacatgaaaatgacaatccctttcgtctccttcctccgctgcttccacctaacgcagcctcctgcctccgcctttgtttcatagtgaggattttattttgcacggcgccctccctctaaatacctaccctagatgatttcatcctgcccctcacttcttaacatattcctgtgtctttgtaatggccaaatttctccttccactcgtccgcacggtacgtcttcatgggagtcattttattccttacagcttccttgtaaccacagccctaaatccatgataaagctactcttgtactcttc

SEQ ID NO: 1784 - DNA, 2165 bp, Homo sapiens
ccccgagaggcccggttcctttaggccgcctgcccgcctccagctctcggggtcggctctaggaggcgccctcaggagaggggcgggcgctctattccagagaccgagtggcagggcggccactgtggcggggctctttccccgtttcgcctcagctacccctcagctccggtagtcgccagtccggggtcgtcgccgtttggggcgggagctgctcggccccgccgccgtccccgtcgccgcttccgggtccaggcccctcgggccgcctgccgccgtcatgaggctgcgggtgcggcttctgaagcggacctggccgctggaggtgcccgagacggagccgacgctggggcatttgcgctcgcacctgaggcagtccctgctgtgcacctgggggtacagttctaatacccgatttacaattacattgaactacaaggatcccctcactggagatgaagagaccttggcttcatatgggattgtttctggggacttgatatgtttgattcttcaagatgacattccagcgcctaatataccttcatccacagattcagagcattcttcactccagaataatgagcaaccctctttggccaccagctccaatcagactagcatacaggatgaacaaccaagtgattcattccaaggacaggcagcccagtctggtgtttggaatgacgacagtatgttagggcctagtcaaaattttgaagctgagtcaattcaagataatgcgcatatggcagagggcacaggtttctatccctcagaacccatgctctgtagtgaatcggtggaagggcaagtgccacattcattagagaccttgtatcaatcagctgactgttctgatgccaatgatgccttgatagtgttgatacatcttctcatgttggagtcaggttacatacctcagggcaccgaagccaaagcactgtccatgccggagaagtggaagttgagcggggtgtataagctgcagtacatgcatcctctctgcgagggcagctccgctactctcacctgtgtgcctttgggaaacctgattgttgtaaatgctacactaaaaatcaacaatgagattagaagtgtgaaaagattgcagctgctaccagaatcttttatttgcaaagagaaactaggggaaaatgtagccaacatatacaaagatcttcagaaactctctcgcctctttaaagaccagctggtgtatcctcttttggcttttacccgacaagcactgaacctaccagatgtatttgggttggtcgtcctcccattggaactgaaactacggatcttccgacttctggatgttcgttccgtcttgtctttgtctgcggtttgtcgtgacctctttactgcttcaaatgacccactcctgtggaggtttttatatctgcgtgattttcgagacaatactgtcagagttcaagacacagattggaaagaactgtacaggaagaggcacatacaaagaaaagaatccccgaaagggcggtttgtgatgctcctgccatcgtcaactcacaccattccattctatcccaaccccttgcaccctaggccatttcctagctcccgccttcctccaggaattatcgggggtgaatatgaccaaagaccaacacttccctatgttggagacccaatcagttcactcattcctggtcctggggagacgcccagccagtttcctccactgagaccacgctttgatccagttggcccacttccaggacctaaccccatcttgccagggcgaggcggccccaatgacagatttccctttagacccagcaggggtcggccaactgatggccggctgtcattcatgtgattgatttgtaatttcatttctggagctccatttgtttttgtttctaaactacagatgtcaactccttggggtgctgatctcgagtgttattttctgattgtggtgttgagagttgcactcccagaaaccttttaagagatacatttatagccctaggggtggtatgacccaaaggttcctctgtgacaaggttggccttgggaatagttggctgccaatctccctgctcttggttctcctctagattgaagtttgttttctgatgctgttcttaccagattaaaaaaaagtgtaaattaaaaaaaaaaaaaaaaaa

SEQ ID NO: 1785 - DNA, 1567 bp, Homo sapiens
gggtgaggaggaagaggaggaggaagaggaggaagaggatgacctgagtgagctgccaccgctggaggacatgggacaacccccggcggaggaggctgagcagcctggggccctggcccgagagttccttgctgccatggagcccgagcccgccccagccccggccccagaagagtggctggacattctggggaacgggctgttgaggaagaagacgctggtcccagggccgccaggttcgagccgcccggtcaagggccaggtggtcaccgtacatctgcagacgtcgctggagaatggcacacgggtgcaggaggagccggagctggtgttcactctgggtgactgtgacgtcatccaggccctggatctcagtgtcccactcatggacgtgggggagacggccatggtcactgctgactccaagtactgctacggcccccaaggcagcaggagcccatacatccccccgcacgcggccctgtgcctggaggtgaccctgaagacggctgtggacgggcctgacctggagatgctcacggggcaggagcgcgtggccctggccaaccggaagcgggagtgcggcaacgcccactaccagcgggcggacttcgtcctggccgccaactcctacgacctcgccatcaaggctatcacctccagcgccaaagtggacatgacgttcgaggaggaggcacagctcctgcagttgaaggtgaagtgtctgaacaacctggcggcctcgcagctgaagctcgaccactaccgcgcagccctgcgctcctgcagccttgtgctggagcaccagccagacaacatcaaggctctcttccgcaagggcaaggtgctggcccagcagggggagtacagtgaggccatccccatcctgagggcagccctgaagctggaaccttccaacaagacgatccacgcagagctctcaaagctggtgaagaagcatgcggcgcagcggagcacggagaccgccttgtaccggaaaatgctgggcaaccccagccggctgcctgctaagtgccctggcaagggtgcctggtccatcccatggaagtggctgtttggggcgactgctgttgccttggggggtgtggcactctctgtggtcatcgctgccaggaactgaccacctaggtggctgccaccccctctgcacaccatggaccctgccctgcgctccccaactcccccaggctccctgtccactgccctccctggtctggccccctcctccgggttaggggagcaaggattgggggtcgtgcagcccagccagcaggagggactgaggccctctaggaggaaagcccagagggagggggccctcattccttcagacccagttttcccccaccctccttaccccgctgggctaggtctccgccagggctggcctcagtttctcctcaacaggcctgggggcagcccttcccctgcctagtccccgcctgagtgccagccccccaccccgcctgccgccccctgtccaggttccctccccgccacagtgaaataaagcatcccaccctgcaaaaaaaaaaaaaaaaaaaaa

SEQ ID NO: 1786 - DNA, 3909 bp, Homo sapiens
ggcacgaggctcgccgcggactcaagatggcggcgtgtggacgtgtacggaggatgttccgcttgtcggcggcgctgcatctgctgctgctattcgcggccgggggcagaaactccccggccagggcgtcccacagccagggccagggtcccggggccaactttgtgtccttcgtagggcaggccggaggcggcggcccggcgggtcagcagctgccccagctgcctcagtcatcgcagcttcagcagcaacagcagcagcagcaacagcaacagcagcctcagccgccgcagccgcctttcccggcgggtgggcctccgcggcggggaggagcgggggctggtgggggctggaagctggcggaggaagagtcctgcagggaggacgtgacccgcgtgtgccctaagcacacctggagcaacaacctggcggtgctcgagtgcctgcaggatgtgagggagcctgaaaatgaaatttcttcagactgcaatcatttgttgtggaattataagctgaacctaactacagatcccaaatttgaatctgtggccagagaggtttgcaaatctactataacagagattaaagaatgtgctgatgaaccggttggaaaaggttacatggtttcctgcttagtggatcaccgaggcaacatcactgagtatcagtgtcaccagtacattaccaagatgacggccatcatttttagtgattaccgtttaatctgtggcttcatggatgactgcaaaaatgacatcaacattctgaaatgtggcagtattcggcttggagaaaaggatgcacattcacaaggtgaggtggtatcatgcttggagaaaggcctggtgaaagaagcagaagaaagagaacccaagattcaagtttctgaactctgcaagaaagccattctccgggtggctgagctgtcatcggatgactttcacttagaccggcatttatattttgcttgccgagatgatcgggagcgtttttgtgaaaatacacaagctggtgagggcagagtgtataagtgcctctttaaccataaatttgaagaatccatgagtgaaaagtgtcgagaagcacttacaacccgccaaaagctgattgcccaggattataaagtcagttattcattggccaaatcctgtaaaagtgacttgaagaaataccggtgcaatgtggaaaaccttccgcgatcgcgtgaagccaggctctcctacttgttaatgtgcctggagtcagctgtacacagagggcgacaagtcagcagtgagtgccagggggagatgctggattaccgacgcatgttgatggaagacttttctctgagccctgagatcatcctaagctgtcggggggagattgaacaccattgttccggattacatcgaaaaggacggaccctacactgtctgatgaaggtagttcgaggggagaaggggaaccttggaatgaactgccagcaggcgcttcaaacactgattcaggagactgaccctggtgcagattaccgcattgatcgagctttgaatgaagcttgtgaatctgtaatccagacagcctgcaaacatataagatctggagacccaatgatctcgtcgtgcctgatggaacatttatacacagagaagatggtagaagactgtgaacaccgtctcttagagctgcagtatttcatctcccgggattggaagctggaccctgtcctgtaccgcaagtgccagggagacgcttctcgtctttgccacacccacggttggaatgagaccagtgaatttatgcctcagggagctgtgttctcttgtttatacagacacgcctaccgcactgaagaacagggaaggaggctctcacgggagtgccgagctgaagtccaaaggatcctacaccagcgtgccatggatgtcaagctggatcctgccctccaggataagtgcctgattgatctgggaaaatggtgcagtgagaaaacagagactggacaggagctggagtgccttcaggaccatctggatgacttggtggtggagtgtagagatatagttggcaacctcactgagttagaatcagaggatatccaaatagaagccttgctgatgagagcctgtgagcccataattcagacattctgccacgatgcggataaccagatagactctggggacctgatggagtgtctgatacagaacaaacaccagaaggacatgaacgagaagtgtgccatcggagttacccacttccagctggtgcagatgaaggattttcggttttcttacaagtttaaaatggcctgcaaggaggacgtgttgaagctttgcccaaacataaaaaagaaggtggacgtggtgatctgcctgagcacgaccgtgcgcaatgacactctgcaggaagccaaggagcacagggtgtccctgaagtgccgcaggcagctccgtgtggaggagctggagatgacggaggacatccgcttggagccagatctatacgaagcctgcaagagtgacatcaaaaacttctgttccgctgtgcaatatggcaacgctcagattatcgaatgtctgaaagaaaacaagaagcagctaagcacccgctgccaccaaaaagtatttaagctgcaggagacagagatgatggacccagagctagactacaccctcatgagggtctgcaagcagatgataaagaggttctgtccggaagcagattctaaaaccatgttgcagtgcttgaagcaaaataaaaacagtgaattgatggatcccaaatgcaaacagatgataaccaagcgccagatcacccagaacacagattaccgcttaaaccccatgttaagaaaagcctgtaaagctgacattcctaaattctgtcacggtatcctgactaaggccaaggatgattcagaattagaaggacaagtcatctcttgcctgaagctgagatatgctgaccagcgcctgtcttcagactgtgaagaccagatccgaatcattatccaggagtccgccctggactaccgcctggatcctcagctccagctgcactgctcagacgagatctccagtctatgtgctgaagaagcagcagcccaagagcagacaggtcaggtggaggagtgcctcaaggtcaacctgctcaagatcaaaacagaattgtgtaaaaaggaagtgctaaacatgctgaaggaaagcaaagcagacatctttgttgacccggtacttcatactgcttgtgccctggacattaaacaccactgcgcagcactcacccctggccgcgggcgtcaaatgtcctgtctcatggaagcactggaggataagcgggtgaggttacagcccgagtgcaaaaagcgcctcaatgaccggattgagatgtggagttacgcagcaaaggtggccccagcagatggcttctctgatcttgccatgcaagtaatgacgtctccatctaagaactacattctctctgtgatcagtgggagcatctgtatattgttcctgattggcctgatgtgtggacggatcaccaagcgagtgacacgagagctcaaggacaggtagagccaccttgaccaccaaaggaactacctatccagtgcccagtttgtacagccctcttgtatagcatccccactcacctcgctcttctcagaagtgacaccaaccccgtgttagagcattagcagatgtccactgcgttgtcccatccagcctccactcgtgtccatggtgtcctcctcctcctcaccgtgcagcagcagcagctggtcgctggggttactgcctttgtttggcaaacttgggtttacctgcctgtagacaagtctctctcataccaacagaacttccggtacttccagaaccaactcacctgacctgcaactcaaaggcttttttaagaaaaccacca

SEQ ID NO: 1787 - DNA, 1235 bp, Homo sapiens
gcttctgtactgccaggtccgggtcggcggctgcactgcggatgagaccggtgcgactcatgaaggtgttcgtcacccgcaggatacccgccgagggtagggtcgcgctcgcccgggcggcagactgtgaggtggagcagtgggactcggatgagcccatccctgccaaggagctagagcgaggtgtggcgggggcccacggcctgctctgcctcctctccgaccacgtggacaagaggatcctggatgctgcaggggccaatctcaaagtcatcagcaccatgtctgtgggcatcgaccacttggctttggatgaaatcaagaagcgtgggatccgagttggctacaccccagatgtcctgacagataccaccgccgaactcgcagtctccctgctacttaccacctgccgccggttgccggaggccatcgaggaagtgaagaatggtggctggacctcgtggaagcccctctggctgtgtggctatggactcacgcagagcactgtcggcatcatcgggctggggcgcataggccaggccattgctcggcgtctgaaaccattcggtgtccagagatttctgtacacagggcgccagcccaggcctgaggaagcagcagaattccaggcagagtttgtgtctacccctgagctggctgcccaatctgatttcatcgtcgtggcctgctccttaacacctgcaaccgagggactctgcaacaaggacttcttccagaagatgaaggaaacagctgtgttcatcaacatcagcaggggcgacgtcgtaaaccaggacgacctgtaccaggccttggccagtggtaagattgcagctgctggactggatgtgacgagcccagaaccactgcctacaaaccaccctctcctgaccctgaagaactgtgtgattctgccccacattggcagtgccacccacagaacccgcaacaccatgtccttgttggcagctaacaacttgctggctggcctgagaggggagccgatgcctagtgaactcaagctgtagccaaacagtagagatggagggccgggaagcaaaccgtgccctggtattgtcagacacacccaggcttgatttggatccacaggcagagccaagggaaggtgtgattctctgaggaaagagtgattctgatatatgtacttgtcacattggtgttggacacatttgcgccaaaagtatggtaattctattattaaataattctctgag

SEQ ID NO: 1788 - DNA, 4986 bp, Homo sapiens
aggaggctgccgctctggcttgccgccccccgccgccgctgcacaccggacccagccgccgtgccgcgggccatggacctgcccaggggcctggtggtggcctgggcgctcagcctgtggccagggttcacggacaccttcaacatggacaccaggaagccccgggtcatccctggctccaggaccgccttctttggctacacagtgcagcagcacgacatcagtggcaataagtggctggtcgtgggcgccccactggaaaccaatggctaccagaagacgggagacgtgtacaagtgtccagtgatccacgggaactgcaccaaactcaacctgggaagggtcaccctgtccaacgtgtccgagcggaaagacaacatgcgcctcggccttagtctcgccaccaaccccaaggacaacagcttcctggcctgcagccccctctggtctcatgagtgtgggagctcctactacaccacagggatgtgttcaagagtcaactccaacttcaggttctccaagaccgtggccccagctctccaaaggtgccagacctacatggacatcgtcattgtcctggatggctccaacagcatctacccctgggtggaggttcagcacttcctcatcaacatcctgaaaaagttttacattggcccagggcagatccaggttggagttgtgcagtatggcgaagatgtggtgcatgagtttcacctcaatgactacaggtctgtaaaagatgtggtggaagctgccagccacattgagcagagaggaggaacagagacccggacggcatttggcattgaatttgcacgctcagaggctttccagaagggtggaaggaaaggagccaagaaggtgatgattgtcatcacagatggggagtcccacgacagcccagacctggagaaggtgatccagcaaagcgaaagagacaacgtaacaagatatgcggtggccgtcctgggctactacaaccgcagggggatcaatccagaaacttttctaaatgaaatcaaatacatcgccagtgaccctgatgacaagcacttcttcaatgtcactgatgaggctgccttgaaggacattgtcgatgccctgggggacagaatcttcagcctggaaggcaccaacaagaacgagacctcctttgggctggagatgtcacagacgggcttttcctcgcacgtggtggaggatggggttctgctgggagccgtcggtgcctatgactggaatggagctgtgctaaaggagacgagtgccgggaaggtcattcctctccgcgagtcctacctgaaagagttccccgaggagctcaagaaccatggtgcatacctggggtacacagtcacatcggtcgtgtcctccaggcaggggcgagtgtacgtggccggagccccccggttcaaccacacgggcaaggtcatcctgttcaccatgcacaacaaccggagcctcaccatccaccaggctatgcggggccagcagataggctcttactttgggagtgaaatcacctcggtggacatcgacggcgacggcgtgactgatgtcctgctggtgggcgcacccatgtacttcaacgagggccgtgagcgaggcaaggtgtacgtctatgagctgagacagaaccggtttgtttataacggaacgctaaaggattcacacagttaccagaatgcccgatttgggtcctccattgcctcagttcgagacctcaaccaggattcctacaatgacgtggtggtgggagcccccctggaggacaaccacgcaggagccatctacatcttccacggcttccgaggcagcatcctgaagacacctaagcagagaatcacagcctcagagctggctaccggcctccagtattttggctgcagcatccacgggcaattggacctcaatgaggatgggctcatcgacctggcagtgggagcccttggcaacgctgtgattctgtggtcccgcccagtggttcagatcaatgccagcctccactttgagccatccaagatcaacatcttccacagagactgcaagcgcagtggcagggatgccacctgcctggccgccttcctctgcttcacgcccatcttcctggcaccccatttccaaacaacaactgttggcatcagatacaacgccaccatggatgagaggcggtatacaccgagggcccacctggacgagggcggggaccgattcaccaacagagccgtactgctctcctccggccaggagctctgtgagcggatcaacttccatgtcctggacactgctgactacgtgaagccagtgaccttctcagtcgagtattccctggaggaccctgaccatggccccatgctggacgacggctggcccaccactctcagagtctcggtgcccttctggaacggctgcaatgaggatgagcactgtgtccctgaccttgtgttggatgcccggagtgacctgcccacggccatggagtactgccagagggtgctgaggaagcctgcgcaggactgctccgcatacacgctgtccttcgacaccacagtcttcatcatagagagcacacgccagcgagtggcggtggaggccacactggagaacaggggcgagaacgcctacagcacggtcctaaatatctcgcagtcagcaaacctgcagtttgccagcttgatccagaaggaggactcagacggtagcattgagtgtgtgaacgaggagaggaggctccagaagcaagtctgcaacgtcagctatcccttcttccgggccaaggccaaggtggctttccgtcttgattttgagttcagcaaatccatcttcctacaccacctggagatcgagctcgctgcaggcagtgacagtaatgagcgggacagcaccaaggaagacaacgtggcccccttacgcttccacctcaaatacgaggctgacgtcctcttcaccaggagcagcagcctgagccactacgaggtcaagctcaacagctcgctggagagatacgatggtatcgggcctcccttcagctgcatcttcaggatccagaacttgggcttgttccccatccacgggattatgatgaagatcaccattcccatcgccaccaggagcggcaaccgcctactgaagctgagggacttcctcacggacgaggtagcgaacacgtcctgtaacatctggggcaatagcactgagtaccggcccaccccagtggaggaagacttgcgtcgtgctccacagctgaatcacagcaactctgatgtcgtctccatcaactgcaatatacggctggtccccaaccaggaaatcaatttccatctactggggaacctgtggttgaggtccctaaaagcactcaagtacaaatccatgaaaatcatggtcaacgcagccttgcagaggcagttccacagccccttcatcttccgtgaggaggatcccagccgccagatcgtgtttgagatctccaagcaagaggactggcaggtccccatctggatcattgtaggcagcaccctggggggcctcctactgctggccctgctggtcctggcactgtggaagctcggcttctttagaagtgccaggcgcaggagggagcctggtctggaccccacccccaaagtgctggagtgaggctccagaggagactttgagttgatgggggccaggacaccagtccaggtagtgttgagacccaggcctgtggccccaccgagctggagcggagaggaagccagctggctttgcacttgacctcatctcccgagcaatggcgcctgctccctccagaatggaactcaagctggttttaagtggaactgccctactgggagactgggacacctttaacacagacccctagggatttaaagggacacccctacacacacccaggcccacgccaaggcctccctcaggctctgtggagggcatttgctgccccagctactaaggtgctaggaattcgtaatcatccccatcctccagagaaacccagggaggaagactgtaaatacgaacccaatctgcacactccaggcctctagttccagaaggatccaagacaaaacagatctgaattctgcccttttctctcacccatcccacccctccattggctcccaagtcacacccactcccttccccatagataggcccctggggctcccgaagaatgaacccaagagcaagggcttgatggtgacagctgcaagccagggatgaagaaagactctgagatgtggagactgatggccaggcaagtgggaccaggatactggacgctgtcctgagatgagaggtagccgggctctgcacccacgtgcattcacattgaccgcaactcacacattcccccaccagctgcagccccttgctctcagctgccaaccctcccgggtcacttttgttcccaggtacctcatgggaagcatgtggatgacacaatccctggggctgtgcattcccacgtcttcttgctgcagcctgcccctagacatggacgcaccggcctggctgcagctgggcagcaggggtaggggtagggagcctcccctccctgtatcaccccctccctacacacacacacacacacacacacacacactgcctcccatccttccctcatgcccgccagtgcacagggaagggcttggccagcgctgttgaggggtcccctctggaatgcactgaataaagcacgtgcaaggactcccggagcctgtgcagccttggtggcaaatatctcatctgccggcccccaggacaagtggtatgaccagtgataatgccccaaggacaaggggcgtgcctggcgcccagtggagtaatttatgccttagtcttgttttgaggtagaaatgcaagggggacacatgaaaggcatcagtccccctgtgcatagtacgacctttactgtcgtatttttgaaaaattaaaaatacagtgtttaaaaacaaaaaaaaaaaaaaaaaaaaa

SEQ ID NO: 1789 - DNA, 729 bp, Homo sapiens
atgctcctccttgctccccagatgctgagcctgctgctgctggcgctgcccgtcctggcgagcccggcctacgtggcccctgccccaggccaggccctgcagcaaacgggcattgttggggggcaggaggcccccaggagcaagtggccctggcaggtgagcctgagagtccgcggcccatactggatgcacttctgcgggggctccctcatccacccccagtgggtgctaaccgcggcgcactgcgtggaaccggacatcaaggatctggccgccctcagggtgcaactgcgggagcagcacctctactaccaggaccagctgctgccggtcagcaggatcatcgtgcacccacagttctacatcatccagaccggggcggacatcgccctgctggagctggaggagcccgtgaacatctccagccacatccacacggtcacgctgccccctgcctcggagaccttccccccggggatgccgtgctgggtcactggctggggcgacgtggacaataatgtgcacctgccgccgccatacccgctgaaggaggtggaagtccccgtagtggaaaaccacctttgcaacgcggaatatcacaccggcctccatacgggccacagctttcaaatcgtccgcgatgacatgctgtgtgcggggagcgaaaatcacgactcctgccagggtgactctggagggcccctggtctgcaaggtgaatggcacctaa

SEQ ID NO: 1790 - DNA, 3364 bp, Homo sapiens
gattgttgccgtgcgctggagccgagtttcgctctgctgcccaggctggagtacagtgatgtgatctcctgacgtcaagtgatccattcgcctcggcctcccaaagttctgggattacaagtaatacaaaatacagttaataaaatgtcaacctcctggagtgatcggttacagaatgcagcagatatgcctgctaacatggataagcatgccctgaaaaagtatcgtcgagaagcctatcatcgggtgtttgtgaaccgaagtttagcaatggaaaagataaagtgttttggttttgatatggattatacccttgctgtgtacaagtccccagagtatgagtcccttggttttgagcttactgtggagagattagtttctattggctatccccaggagttgctcagctttgcttatgattctacattccctaccaggggacttgtctttgacacactgtatggaaatcttttgaaagtcgatgcctatggaaacctcttggtctgtgcacatggatttaactttataaggggaccagaaactagagaacagtatccaaataaatttatccagcgagatgatactgaaagattttacattctgaacacactattcaacctaccagagacctacctgttggcctgcctagtagatttttttactaattgtcccagatataccagttgtgaaacaggatttaaagatggggacctcttcatgtcctaccggagtatgttccaggatgtaagagatgctgttgactgggttcattacaagggctcccttaaggaaaagacagttgaaaatcttgagaagtatgtagtcaaagatggaaaactgcctttgcttctgagccggatgaaggaagtagggaaagtatttcttgctaccaacagtgactataaatatacagataaaattatgacttacctgtttgacttcccacatggccccaagcctgggagctcccatcgaccatggcagtcctactttgacttgatcttggtggatgcacggaaaccactcttttttggagaaggcacagtactgcgtcaggtggatactaaaactggcaagctgaaaattggtacctacacagggcccctacagcatggtatcgtctactcaggaggttcttctgatacgatctgtgacctgttgggagccaagggaaaagacattttgtatattggagatcacatttttggggacattttaaaatcaaagaaacggcaagggtggcgaacttttttggtgattcctgaactcgcacaggagctacatgtctggactgacaagagttcacttttcgaagaacttcagagcttggatattttcttggctgaactctacaagcatcttgacagcagtagcaatgagcgtccagacatcagttccatccagagacgtattaagaaagtaactcatgacatggacatgtgctatgggatgatgggaagcctgtttcgcagtggctcccggcagaccctttttgccagtcaagtgatgcgttatgctgacctctatgcagcatctttcatcaacctgctgtattaccctttcagctacctcttcagggctgcccatgtcttgatgcctcatgaatcaacggtggagcacacacacgtagatatcaatgagatggagtctcctcttgccacccggaaccgcacatcagtggatttcaaagacactgactacaagcggcaccagctgacacggtcaattagtgagattaaacctcccaacctcttcccactggccccccaggaaattacacactgccatgacgaagatgatgatgaagaggaggaggaggaggaagaataaggaggaaaaccaaaaccccaagcacccattaaacaagtcctggcaggactcacaggaacaaacgaggtccctgttagggttctactcgggggagggagggggctccatgaaaggtacgtctgaaaagtttctgaagattttattatcatagatacttgttttggttttgtgtatctgtactctctgcagatggtccaaaattgtaatggagtctgtattagaagaaaataagggtaaaatcaggctgaactgcatgtatatggctccactgtggcttgtgacacttttaaaatcatccgtatgtcagtgtatctggatacacgaggaaaaggaaagagtctcagagtggaacaaagagtgggaagaggtgatctgtaatgttacaaattgtgctattactccaaggtccaacttttccagtgcattacatggtattgtatatcagtggagaaatgtattatttccatgatcaaatgtagtctctgttaaggtcaagttttcttttataagcctttaattcatcctcagtgactctggcaaggctgcttctctatcactggctttgcacagaagtatgctctacttgcgttgctttagggcaggattctattttgagggaaaagacagtatccttattaccttttgtttgtttaatagcacaaatgcttatttgttatccaaaaacaacctccttcttatctgtgataaatctatagaaagaatttagctgcaagtggacaaaggaacaagcccccagaaaagaaagggaagaactgccttcttatactacagaacatgcattagtgtgggctatatagctgtggctcatgctacccaattccagatttctttgtcctctaagagttgattgctgtatattaaaattgaacatcagaggatgggaagagggctctgtaagccagaaccttactaaagtagagggcacaatcagtgtgaataaattcacttcagaatctcaagtcaaggccaggcacggcggctcacgcctgtaatcccagcactttgggaggccgagacaggcggatcacctgaggtcgggagttcgagaccagccttaccaacatggagaaaccccatctctactaaaaatacaaaattacctgggcgtggtggtgcatgcctgtaatcccatcatctactcaggaggctgaggcaggagaattgcttgaacccaggaggcggaggttgcagtgagccaggattgtgccattgcactccagcctgggcaacaagaacaaaactccatctcaaaaaataaaaatcccaatcccaagtcgaaatcacctcttgttttaaacaagaatgaatcattactgtgtatgttagggtattaaaactgtttcaccagtacagtgaaagttgtttcaacattttaaacaaacagtggttatagactctttctttaaccattgtatattttcttccattcttgtcattggtcaataggggagggtagattagctgctccagaattcaataaagtgtaatatttctaaaaaaaaaaaaaaaaaaa

SEQ ID NO: 1791 - DNA, 1496 bp, Homo sapiens
gggccggcggctgcggcggctggagcaggcgagcggcggcggccgatagcgagtgtcagggccggccggggcggcgcttctcggcctgtcgctggtcggcctcctactgtacctcgtgcctgctgcggctgcgctggcctggctggccgtggggactaccgcggcctggtggggactgagccgcgagccccgaggttcgcgccccttgtcctccttcgttcagaaggcgcgacatcggcgaacactgttcgcttcgcctccggccaagtcgacagccaacggaaacctcctagagccgcggaccctgctcgaaggacctgaccctgccgaactgctcctcatgggcagttacctgggcaagcccgggccgccgcagcccgcccccgctccggagggccaggacctgcggaataggcctggccgccgcccgcccgcccggcgccgcgctccacaccgccctccccgccgacccatcgcgttcaccacttttacccctctctccccactcctcttctccgaccctccgggaggccttccccacgggatcgtgggactttaccagatcggtttgtaataacacctcgaagacgctatccgatccatcaggcccagtattcctgtccgggggtacttcccacagtgtgctggaatggttatcacaagaaggctgtgctgtcccctcgcaactccaggatggtgtgtagcccagtgactgtgaggatcgcccctcctgacagaagattttcgcgttctgcgataccagagcagataatcagctcaacactgtcctcaccatcaagtaatgccccagacccatgtgcaaaggagactgtactgagtgccctcaaagagaagaagaagaaaaggacagtggaggaagaagaccaaatattccttgatggccaggaaaataaaagaagctgtcttgtcgacggtctcactgatgcctcttctgcattcaaagttcctcgacccgggccagatacactccagttcacagtggatgtcttccactttgctaatgactccagaaacatgatatacatcacctgccacctgaaggtcaccctagctgagcaggacccagatgaactcaacaaggcctgttccttcagcaagccttccaacagctggttcccagtggaaggcccggctgacatctgtcaatgctgtaacaaaggtgactgtggcactccaagccattccaggaggcagcctcgtgtcgtgagccagtggtccacgtctgcttcccgtaaccgcaggcatgtgacagaagaagcagatgtcaccgtgggggccactgatcttcctggacaggagtggtgaccatgaagtagagcagtgggctttgccttctgacacctcagtggtgctgctgggcgtaggcctggctgtggtggtgtccctgactctgactgctgttatcctggttctcaccaggaggtgtcgcactgcctcccaccctgtgtctgcttccgaataaaagaagaaagcaa

SEQ ID NO: 1792 - DNA, 1036 bp, Homo sapiens
cccggacggcgtttctcctccgagcggcgccggtttcggcttggggggggcggggtacagcccatccatgaccatgggcgacaagaagagcccgaccaggccaaaaagacaagcgaaacctgccgcagacgaagggttttgggattgtagcgtctgcaccttcagaaacagtgctgaagcctttaaatgcagcatctgcgatgtgaggaaaggcacctccaccagaaaacctcggatcaattctcagctggtggcacaacaagtggcacaacagtatgccaccccaccaccccctaaaaaggagaagaaggagaaagttgaaaagcaggacaaagagaaacctgagaaagacaaggaaattagtcctagtgttaccaagaaaaataccaacaagaaaaccaaaccaaagtctgacattctgaaagatcctcctagtgaagcaaacagcatacagtctgcaaatgctacaacaaagaccagcgaaacaaatcacacctcaaggccccggctgaaaaacgtggacaggagcactgcacagcagttggcagtaactgtgggcaacgtcaccgtcattatcacagactttaaggaaaagactcgctcctcatcgacatcctcatccacagtgacctccagtgcagggtcagaacagcagaaccagagcagctcggggtcagagagcacagacaagggctcctcccgttcctccacgccaaagggcgacatgtcagcagtcaatgatgaatctttctgaaattgcacatggaattgtgaaaactatgaatcagggtatgaaattcaaaacctccacctgcccatgctgcttgcatccctggagaatcttctgtggacatcgacctcttagtgatgctgccaggataatttctgcttgccatgggcatctggccaccaaggaatttcgcaccctgacgattactcttgacacttttatgtattccattgttttatatgattttcctaacaatcatttataattggatgtgctcctgaatctacttttaataaaaaaaaaaaa

SEQ ID NO: 1793 - DNA, 3445 bp, Homo sapiens
aagtgctggtgccctctgccgctgctcccgtctctttggttacgctcgtcagccggtcggccgccgcctccagccgtgtgccgctatgggagtcccggcgttcttccgctggctcagccgcaagtacccgtccatcatagtcaactgcgtggaagagaagccaaaagaatgcaatggtgtaaagattccagttgatgccagtaaacctaatccaaatgatgtggagtttgataatctgtatttggatatgaatggaatcatccatccctgtactcatcctgaagacaaaccagcaccaaaaaatgaagatgaaatgatggttgcaatttttgagtacattgacagacttttcagtattgtaagaccaagaagacttctctacatggcaatagatggagtggcaccacgtgctaaaatgaaccagcagcgttcaaggaggttcagggcatcaaaagaaggaatggaagcagcagtcgagaagcagcgagtcagggaagaaatattggcaaaaggtggctttcttcctccagaagaaataaaagaaagatttgacagcaactgtattacaccaggaactgaattcatggacaatcttgctaaatgccttcgctattacatagctgatcgtttaaataatgaccctgggtggaaaaatttgacagttattttatctgatgctagtgctcctggtgaaggagaacataaaatcatggattacattagaaggcaaagagcccagcctaaccatgacccaaatactcatcattgtttatgtggagcagatgctgatctcattatgcttggccttgccacacatgaaccgaactttaccattattagagaagaattcaaaccaaacaagcccaaaccatgtggtctttgtaatcagtttggacatgaggtcaaagattgtgaaggtttgccaagagaaaagaagggaaagcatgatgaacttgccgatagtcttccttgtgcagaaggagagtttatcttccttcggcttaatgttcttcgtgagtatttggaaagagaactcacaatggccagcctaccattcacatttgatgttgagaggagcattgatgactgggttttcatgtgcttctttgtgggaaatgacttcctccctcatttgccatcgttagagattagggaaaatgcaattgaccgtttggttaacatatacaaaaatgtggtacacaaaactgggggttaccttacagaaagtggttatgtcaatctgcaaagagtacagatgatcatgttagcagttggtgaagttgaggatagcatttttaaaaagagaaaggatgatgaggacagttttagaagacgacagaaagaaaaaagaaagagaatgaagagagatcaaccagctttcactcctagtggaatattaactcctcatgccttgggttcaagaaattcaccaggttctcaagtagccagtaatccgagacaagcagcctatgaaatgaggatgcagaataactctagtccttcgatatctcctaatacgagtttcacatctgatggctccccgtctccattaggaggaattaagcgaaaagcagaagacagtgacagtgaacctgagccagaggataatgtcaggttatgggaagctggctggaagcagcggtactacaagaacaaatttgatgtggatgcagctgatgagaaattccgtcggaaagttgtgcagtcgtacgttgaaggactttgctgggttcttagatattattaccagggctgtgcttcctggaagtggtattatccatttcattatgcaccatttgcttcagactttgaaggcattgcagacatgccatctgattttgagaagggtacgaaaccgtttaaaccactagaacaacttatgggggtatttccagctgcaagtggtaattttctacctccatcatggcggaagctcatgagtgatcctgattctagtataattgacttctatcctgaagattttgctattgatttgaatgggaagaaatatgcatggcaaggtgttgctctcttgccattcgtggatgagcgaaggctacgagctgccctagaagaggtatacccagacctcactccagaagagaccagaagaaacagccttggaggtgatgtcttatttgtggggaaacatcacccactccatgacttcattttagagctgtaccagacaggttccacagagccagtggaggtaccccctgaactatgtcatgggattcaaggaaagttttctttggatgaagaagccattcttccagatcaaatagtatgttctcctgttcctatgttaagggatctgacacagaacactgtagtcagtattaattttaaagacccacagtttgctgaagattacatttttaaagctgtaatgcttccaggagcaagaaagccagcagcagtactgaaacctagtgactgggaaaaatccagcaatggacggcagtggaagcctcagcttggctttaaccgtgaccggaggcctgtgcacctggatcaggcagccttcaggactttgggccatgtgatgccaagaggctcaggaactggcatttacagcaatgctgcaccaccacctgtgacttaccagggaaacttatacaggccgcttttgagaggacaagcccagattccaaaacttatgtcaaatatgaggccccaggattcctggcgaggtcctcctccccttttccagcagcaaaggtttgacagaggcgttggggctgaacctctgctcccatggaaccggatgctgcaaacccagaatgcagccttccagccaaaccagtaccagatgctagctgggcctggtgggtatccacccagacgagatgatcgtggagggagacagggatatcccagagaaggaaggaaataccctttgccaccaccctcaggaagatacaattggaattaagcttttgtaaagctttcccaaatcctttcatcattctacagttttatgctatttgtggaaagatttctttctcaagtagtagtttttaataaaactacagtactttgtgtatttcttttaactgtgtatatttctactgatctgatctcactgtttatgttgctttccaaagatgtatgttgcataatacagtggatctgaatttattattgcttataaaacacatttgatggaataggagtactggtttttcataatggttaaaaatgaaaccagctgtggatttcaaaacacagtgtattctagatcatctaagatccatgctgatttttattgcacaagaattaggtttgaactcttgagctggaacctcagcaaactagagtatatattgttcagtatttctttggaaacatttcattaatgtacttgtcttacagaaatttctgaactttagtaaaaaaaaataaagttaaacttttaaaactcaaaaaaaaaaaaaaaaaa

SEQ ID NO: 1794 - DNA, 1976 bp, Homo sapiens
ggtaccagaggtggcagtgctgccgacttcgcgtttgccttgctggatgattccgcttgtttgccggctgcgtgagtgcttagagcttttcggtggaagatgccggacagtaacttcgcagagcgcagcgaggagcaggtgtctggtgctaaagtcatcgctcaggccctgaaaacgcaagatgtggagtacatatttggcatcgtaggcatcccagtgaccgaaatcgccattgctgcccagcagctaggcatcaagtacatcgggatgaggaatgagcaagcggcttgttatgctgcctccgcgattggatatctgacaagcaggccaggagtctgccttgttgtttctggcccaggtctcatccatgccttgggcggtatggcaaatgcaaacatgaactgctggcccttgcttgtgattggtggttcctctgaaagaaaccaagaaacaatgggagctttccaggagtttcctcaggttgaagcttgtagattatataccaagttctctgcccgcycaagcagcatagaagctattccttttgttattgaaaaggcagtgagaagcagtatctatggtcgtccaggtgcttgctatgttgacataccagcagattttgtgaaccttcaggtgaatgtgaattctataaagtacatggaacgctgcatgtcacctcctattagcatggcagaaacctctgctgtgtgcacggcggcttctgttattaggaatgccaaacaaccccttcttatcatcgggaaaggtgctgcttacgctcatgcagaagagagtatcaagaaattggtggagcaatataaactgccatttttgcccacccctatgggaaagggtgttgtccctgacaaccatccatactgtgtaggtgcagccagatccagggctttgcaatttgctgatgtaattgtgttatttggtgccagactaaattggattttacattttggactgcctccaagatatcagccagatgtgaagtttatccaggttgatatctgtgcagaagaattggggaataatgtaaagcccgctgttactttgctaggaaacatacatgctgtcactaagcagcttttagaggaacttgataaaacaccatggcagtatcctccagagagcaagtggtggaaaactctgagagaaaaaatgaagagcaatgaagctgcatccaaggaactagcttctaaaaaatccctgcctatgaattattacacagtattctaccatgttcaagaacaactacctagagactgtttcgtggtaagtgaaggagcaaatactatggacattggacggactgtgcttcagaactaccttcctcgtcacaggcttgatgctggtactttcggaacaatgggagttggtttgggatttgctattgcagctgccgtggtggctaaagatagaagccctgggcattggatcatctgtgtggaaggagacagtgcatttgggttttctggcatggaggtagaaaccatctgcaggtacaacttgccaatcatactgttggtagtgaataacaatggaatttaccaaggttttgatacagatacttggaaagaaatgttaaaatttcaagatgctactgcagtggtccctccaatgtgtttgctgccaaattcacattatgagcaagtcatgactgcatttggaggcaaagggtattttgtacaaacaccagaagaactccaaaaatccctggagcagagcctagcagacacaactaaaccttctcttatcaacatcatgattgagccacaagccacacggaaggcccaggattttcattggctgacccgctctaatatgtaaataaagacgccagttggtggtcttgagttttctctttcttgcaagatgaaattttattttccacagcaaaattactctactgttaaaattgtgcaaaataaaataaacatttaaaatgacattttacagtaaaaaaaaaa

SEQ ID NO: 1795 - DNA, 1530 bp, Homo sapiens
gacgcggcgcccagcagagtcaggtgcggacgactttgtctgtaggagcagcggcggcttgaggacccggggagaccctcaagaatcgacccatcaggacgccagagctgcttcagcggtgaccaccttctccctctaacacattcttcccttcttcacaaacggcccatgtcagacgaaggctcaagggggagccgcctgcccctggcgctgcccccggcctcccagggttgctcttcagggggcggcggcggcggctcctcggctgggggctcgggcaattcccggcccccacgcaacctccaaggcttgctgcagatggccatcaccgcgggctctgaagagccagaccctcctccagaaccgatgagtgaggagaggcgtcagtggctgcaggaggccatgtcggctgccttccgaggccagcgggaggaggtggagcagatgaagagctgcctccgagtgctgtcacagcccatgccccccactgctggggaggccgagcaggcggccgaccagcaagagcgagagggggccctggagctgctggccgacctgtgtgagaacatggacaatgccgcagacttctgccagctgtctggcatgcacctgctggtgggccggtacctggaggcgggggctgcgggactgcggtggcgggcggcacagctcatcggcacgtgcagtcagaacgtggcagccatccaggagcaggtgctgggcctgggtgccctgcgtaagctgctgcggctgctggaccgcgacgcctgcgacacggtgcgcgtcaaggccctcttcgccatctcctgtctggtccgagagcaggaggctgggctgctgcagttcctccgcctggacggcttctctgtgttgatgagggccatgcagcagcaggtgcagaagctcaaggtcaaatcagcattcctgctgcagaacctgctggtgggccaccctgaacacaaagggaccctgtgctccatggggatggtccagcagctggtggccctggtgcggacagagcacagccccttccacgagcacgtgcttggagccctgtgcagcctggtgacagactttccgcagggtgtgcgcgagtgtcgggagccggaactgggcctggaggagctcctccgccaccgctgtcagctgctgcagcagcatgaggagtaccaggaggagctggagttctgtgaaaagctgctacagacctgtttctccagcccagcggacgacagcatggatcggtgaaaccaggtggcttcttgcccccttctccgtgggaaccccaggcttcttgcctccctccccacctacaaggccctctcccaagggatcgcagggcctaggtgcctggacccagggtgtgccagcccgtctctgtgcagtccctggaaggggcgctgagaaaggcaccagctccttggaccccacctcccatgctctcactctcatccccgttctcttgtccacacagctcttccaataaaggtgtttctcttcctccttctcaagaaaaaaaaaaaaaaaaaa

SEQ ID NO: 1796 - DNA, 2131 bp, Homo sapiens
ctctttataatttagtttccatagaagttatatgtgcatttaaaaaaattcaatgctggagcgaccgtgtctggggagccgagccccgcttctcgctgcggtgagcccggactggggcacgcactgcgcagactccccgctgcagtgggcggagtcccacaggccccgcccctcctcccaccctcgttcagcctgtccagacagaagctggggcccagcggaggtagcagcagacgcctgagagcgaggccgaggccctcagggtttggagaccctgacacacccaccttctcacctgggctctgcgtatcccccagccttgagggaagatgaagcctaaactgatgtaccaggagctgaaggtgcctgcagaggagcccgccaatgagctgcccatgaatgagattgaggcgtggaaggctgcggaaaagaaagcccgctgggtcctgctggtcctcattctggcggttgtgggcttcggagcctgatgactcagctgtttctatgggaatacggcgacttgcatctctttgggcccaaccagcgcccagccccctgctatgacccttgcgaagcagtgctggtggaaagcattcctgagggcctggacttccccaatgcctccacggggaacccttccaccagccaggcctggctgggcctgctcgccggtgcgcacagcagcctggacatcgcctccttctactggaccctcaccaacaatgacacccacacgcaggagccctctgcccagcagggtgaggaggtcctccggcagctgcagaccctggcaccaaagggcgtgaacgtccgcatcgctgtgagcaagcccagcgggccccagccacaggcggacctgcaggctctgctgcagagcggtgcccaggtccgcatggtggacatgcagaagctgacccatggcgtcctgcataccaagttctgggtggtggaccagacccacttctacctgggcagtgccaacatggactggcgttcactgacccaggtcaaggagctgggcgtggtcatgtacaactgcagctgcctggctcgagacctgaccaagatctttgaggcctactggttcctgggccaggcaggcagctccatcccatcaacttggccccggttctatgacacccgctacaaccaagagacaccaatggagatctgcctcaatggaacccctgctctggcctacctggcgagtgcgcccccacccctgtgtccaagtggccgcactccagacctgaaggctctactcaacgtggtggacaatgcccggagtttcatctacgtcgctgtcatgaactacctgcccactctggagttctcccaccctcacaggttctggcctgccattgacgatgggctgcggcgggccacctacgagcgtggcgtcaaggtgcgcctgctcatcagctgctggggacactcggagccatccatgcgggccttcctgctctctctggctgccctgcgtgacaaccatacccactctgacatccaggtgaaactctttgtggtccccgcggatgaggcccaggctcgaatcccatatgcccgtgtcaaccacaacaagtacatggtgactgaacgcgccacctacatcggaacctccaactggtctggcaactacttcacggagacggcgggcacctcgctgctggtgacgcagaatgggaggggcggcctgcggagccagctggaggccattttcctgagggactgggactccccttacattcatgaccttgacacctcagctgacagcgtgggcaacgcctgccgcctgctctgaggcccgatccagtgggcaggccaaggcctgctgggcccccgcggacccaggtgctctgggtcacggtccctgtccccgcacccccgcttctgtctgccccattgtggctcctcaggctctctcccctgctctcccacctctacctccacccccaccggcctgacgctgtggccccgggacccagcagagctgggggagggatcagcccccaaagaaatgggggtgcatgctggcctgccccctggcccacccccactttccagggcaaaaagggcccagggttataataagtaaataacttgtctgtaaaaaaaaaaaaaaaaaaaaaaa

SEQ ID NO: 1797 - DNA, 1826 bp, Homo sapiens
cacgtcggctgctgggaagatctggattctcgtttcaggtcaccatcagaaaagctaagtttgctgtatagtgaggatcaggagatctgatcctgattgcagaaccttccctgattacagaatcttggatgatttcacaaaagttcatcttcattgcagatacctgcctttctttctaggttgtatctcccacttcacccttctagaccatcccagaagatctataagatttcatctgggaaatcactaggagttcttggaagggaaagaaggaagattgttggttggaataaaaacagggttgaatgagttccagaaagcagggttctcaacctcgtggacagcaatctgcagaagaagagaacttcaaaaaaccaactagaagcaacatgcagagaagtaaaatgagaggggcctcctcaggaaagaagacagctggtccacagcagaaaaatcttgaaccagctctcccaggaagatggggtggtcgctctgcagagaaccccccttcaggatccgtgaggaagaccagaaagaacaagcagaagactcctggaaacggagatggtggcagtaccagcgaagcacctcagccccctcggaagaaaagggcccgggcagaccccactgttgaaagtgaggaggcgtttaagaatagaatggaggttaaagtgaagattcctgaagaattaaaaccatggcttgttgaggactgggacttagttaccaggcagaagcagctgtttcaactccctgccaagaaaaatgtagatgcaattctggaggagtatgcaaattgcaagaaatcgcagggaaatgttgataataaggaatatgcggttaatgaagttgtggcaggaataaaagaatatttcaatgtgatgttgggcactcagctgctctacaaatttgagaggccccagtatgctgaaatcctcttggctcaccctgatgctccaatgtcccaggtttatggagcaccacacctactgagattatttgtaagaattggagcaatgttggcctatacgccccttgatgagaaaagccttgcattattgttgggctatttgcatgatttcctaaaatatctggcaaagaattctgcatctctctttactgccagtgattacaaagtggcttctgctgagtaccaccgcaaagccctgtgagcgtctacagacagctcaccatttttgtcctgtatctgtaaacactttttgttcttagtctttttcttgtaaaattgatgttctttaaaatcgttaatgtataacagggcttatgtttcagtttgttttccgttctgttttaaacagaaaataaaaggagtgtaagctccttttctcatttcaaagttgctaccagtgtatgcagtaattagaacaaagaagaaacattcagtagaacattttattgcctagttgacaacattgcttgaatgctggtggttcctatccctttgacactacacaattttctaatatgtgttaatgctatgtgacaaaacgccctgattcctagtgccaaaggttcaacttaatgtatatacctgaaaacccatgcatttgtgctctttttttttttatggtgcttgaagtaaaacagcccatcctctgcaagtccatctatgttgttcttaggcattctatctttgctcaaattgttgaaggatggtgatttgtttcatggtttttgtatttgagtctaatgcacgttctaacatgatagaggcaatgcattattgtgtagccacggttttctggaaaagttgatattttaggaattgtatttcagatcttaaataaaatttgtttctaaatttc

SEQ ID NO: 1798 - DNA, 4210 bp, Homo sapiens
gagcccgggagccggaggtgtagcggcagagacattgttcttgccggctccctacggtgccgtgtgtgcgtgagagaagaccagtctttcctctagcatttgacattgtgcagcaaagaaatggttatggagaagcccagtccgctgcttgtagggcgggagtttgtgaggcaatattatactttgctgaataaagctccggaatatttacacaggttttatggcaggaattcttcctatgttcatggtggagtagatgctagtggaaagccccaggaagctgtttatggccaaaatgatatacaccacaaagtattatctctgaacttcagtgaatgtcatactaaaattcgtcatgtggatgctcatgcaaccttgagtgatggagtagttgtccaggtcatgggtttgctgtctaacagtggacaaccagaaagaaagtttatgcaaacctttgttctggctcctgaaggatctgttccaaataaattttatgttcacaatgatatgtttcgttatgaagatgaagtgtttggtgattctgagcctgaacttgatgaagaatcagaagatgaagtagaagaggaacaagaagaaagacaaccatctcctgaacctgtgcaagaaaatgctaacagtggttactatgaagctcaccctgtgactaatggcatagaggagcctttggaagaatcctctcatgaacctgaacctgagccagaatctgaaacaaagactgaagagctgaaaccacaagtggaggagaagaacttagaagaactagaggagaaatctactactcctcctccggcagaacctgtttctctgccacaagaaccaccaaaggctttctcctgggcttcagtgaccagtaaaaacctgcctcctagtggtactgtttcttcctctggaattccaccccatgttaaagcaccagtctcacagccaagagtcgaagctaaaccagaagttcaatctcagccacctcgtgtgcgtgaacaacgacctagagaacgacctggttttcctcctagaggaccaagaccaggcagaggagatatggaacagaatgactctgacaaccgtagaataattcgctatccagatagtcatcaactttttgttggtaacttgccacatgatattgatgaaaatgagctaaaggaattcttcatgagttttggaaacgttgtggaacttcgcatcaataccaagggtgttgggggaaagcttccaaattttggttttgtggtttttgatgactctgaaccagttcagagaatcttaattgcaaaaccgattatgtttcgaggggaagtacgtttaaatgtggaagagaaaaaaacaagagctgcaagagagcgagaaaccagaggtggtggtgatgatcgcagggatattaggcgcaatgatcgaggtcccggtggtccacgtggaattgtgggtggtggaatgatgcgtgatcgtgatggaagaggacctcctccaaggggtggcatggcacagaaacttggctctggaagaggaaccgggcaaatggagggccgcttcacaggacagcgtcgctgaagctccactgttggcaaagtcttggcagtggtacattattcatcgtgtttgcattcttgttaattttttttttggctttggaatgtgacacagcctttttgatcatttctttgatgtgaaaagcatctttggttatcagttaaattgaggtggacattatttccccaatttcacaacaggattcacattgttaatttataaatctagacttggagaattaaggactgagaaatgaccatatcttaaactatctacgacaaagtgaacttaaaaggacatgcccactgaattcaggtcctttgagtaaaaaaaaaatcttctgctgcacattttgtttaagtgttactgtttctgcctgttaatgctgggaacacaaatagtgcaatttgtgcaattggagaatcttgccttttttcttggctccccccaaaaatacaaaccaacagaaacttgttatgcactcatcaaaatgtactaatgggtactctgaactcattaacattgacatctgcaacaggaggcaacagggaaaaaatctcatcttcttttccagtagaaaatagtttgtgaaatgatgagggcattttatctgcttgctgtgaccagcgtgtgtacacataaaccttaacaagactacaagtatattccagaaggaaatcattttagttatgaactaaataataaaaattagaacttcaaatgcgatggtcttgactattagaccagatttagtagctccatatctaagatttttctacctgcccctcttcagtacagggatggctggctgctcaacacactcctcctccccttttttcctttctttaagctgtgtacagtgaaaattgtctttactgtatttttgttctctggtaatgtaataagcatgatggtgccttctattaatacatcattccagtcttgctggtaattttgtacagtatagtgtatgaattgctgtgctgcaaagccaaacagctgcaaaatgttgaaaaatcatcgaaatgtataaaaattgcagtatctttaaaatcagtaaaatggactagcatattatttatcttgttcttcagttaacaactttgtgttctctgtgggagggagggagtcctgtgtgtttgtggggagagggaaggaggaagtcagttatttgagtaagcctctagttgacttttctcttagcctgaatgtggacgttgaaacatatcacttcagggcttggaaaagtcagtcaacttgacgtacatttttagtgacattttaaaagcagtcagattctataaatggcaagtaagcctgaagtgaggatactgcaattttcggagaaaagaacagcagctctttaagtgtttgcattttctatttggggggcagggaactgtcattcattttgcacaattcttgaactgatgtcagcacccgagtggctcctgaatttaagtctgggacgacatcttttatttttacatgaatctttaaacaattctgtgagcaaagtttgtagctgctggattattgtctgtctttatagcaagttccagtaaaccacaagtatggcaaagcttatccaattttatgcttggagcagtcagtacataccagtttctgatgtttcaggcaggagtggggtaaataagtgtgaccacttaaagctgctcgttagcatggaagacttctccattctatctttgtaaaacagacaagatatgcacttgacatagtagcaaattggttctgaattatgcaactgtttgctatttagtaaactagcaaatgatgcatgtattttgtttttcatgtactgggcaatatgagtaaaatctgtccctttttccccctttgaatgaggtcttccatgtttgagggaaagtcttgcactattgcatatattttggggacacagattttcatagtttccatttttggggggcttaaggattttttttttttctgtttgaaacagttttatactttctgatatagtacttgaaattcttaccagaaaattactttggagttttgaagcctttattaatactacttttaaagaagcagttgttttattgtcaatgttttttttcccccaagcatattttcttgtatttctgtttccatatatatatatatatataatttccaattcaggatattgccctgccatccatgaaaactgttctggcaccaaaagtaatgacaaatgttaagtgtaataatagaaaagtagagcaaagagccattcagcttcagtctttacataccatgaataaaacattaaaacatcatatggagaagtttacatggtgattgttcacctgcagtactgtggagttttaacattttgtcctcttttcagtgaaacagagtaaaaatattcatctaccattactgttatttgctgattttgttttattttttgatggtaatattctatccttatgacactattgcaaccaaattggctttaccatcttggctttagtaggtatagaagacaatggattaccatctttattgctgtaatgtgttaagcattatatgctagtagaatctagtttaattgtttcaggtggaaagtattctttgagtttccatattgaatgtgtttggactaaacaaacaataaactactgatgtctgcagc

SEQ ID NO: 1799 - DNA, 4929 bp, Homo sapiens
agccttgagtgtcattcaagggacagcacaacctcatccaagctctcctacctctgcccagccgtccctctcatcctccccattcctcgtccacactccatccaaagaagagggaaagcaccgaatagaggggggcgaaggcaaagtctgctgttcttccccctgggcccccttgctcctccatcctcattctctcaccaccagcccccctaaccccaaggagcccaggaactgaggcgactcgccccactgccatgtccaaaagcttgaaaaagaaaagccactggactagcaaagtccatgagagtgtcattggcaggaacccggagggccagctgggctttgaactgaaggggggcgccgagaatggacagttcccctacctgggggaggtgaagcccggcaaggtggcctatgagagcggcagcaaattggtgtcggaggagctgctgctggaggtgaacgagacccccgtggcggggctcaccatcagggacgtgctggccgtgatcaaacactgcaaggaccccctccggctcaagtgtgtcaagcaaggaggaattgttgataaagaccttcgtcactacctcaacttacgatttcaaaagggttctgtggaccatgagcttcagcaaatcattcgtgacaacctctacctccgcacggtgccatgcaccacaaggccacataaggagggtgaggtccctggagtggattatattttcatcactgttgaagattttatggaattggagaaaagtggtgctctcctagaaagtgggacttatgaagacaattactacggtaccccaaagccgccagcagaaccagcaccattattgttaaatgtaacagaccagatacttccaggagccactccaagtgctgaaggaaaacggaagaggaataaatcagtgagcaacatggagaaagccagtatagagcctcctgaggaggaagaggaagagaggcctgtggtcaatggaaatggagtagtagtaacaccagaatccagtgaacatgaagacaaaagtgcaggtgcctcaggggagatgccctcccagccttatcctgcaccagtgtacagtcagcctgaggagctgaaggagcagatggatgacacaaagccaactaaacctgaagacaatgaggaaccagacccattgcctgataactgggaaatggcctatacagagaagggcgaagtctacttcattgaccataacacaaagacaacatcatggctggatccacgacttgcgaaaaaagctaaacctccagaagagtgcaaagaaaatgagcttccatatggctgggaaaaaatcgatgatcccatttatggcacttattatgttgaccacataaatagaagaacacagtttgaaaatcctgtcctggaagcaaaaaggaagctacagcaacataacatgccccacacagaacttggaacaaagcccctgcaggccccaggtttccgagaaaaaccactcttcacccgggatgcatcccagttgaagggaacattcctcagcaccaccctaaaaaagagcaacatgggctttggatttaccatcattggtggagacgagcctgatgagtttctgcaggtgaaaagtgtgattccggatgggcctgcagcacaggatggaaaaatggaaacaggtgatgtcattgtctatattaatgaagtttgtgtccttggacacactcatgcagatgttgtcaaacttttccagtctgttcctattggtcagagtgtcaacctggtgttgtgtcgtggctaccctttgccctttgatcctgaagaccctgctaacagcatggtgccaccccttgcaataatggagaggccacctccagtgatggtcaatggaagacacaactatgaaacatatttggagtacatttctcggacctcacagtcagttccagatataacagatcggccgcctcattctctgcactccatgccaactgatggtcagctagacggcacgtatccaccgcccgtccatgatgacaatgtgtctatggcttcatctggggccacccaagctgaacttatgaccttaaccattgtgaaaggtgcccagggcttcggcttcactattgccgacagtcctacaggacagcgggtgaaacaaatacttgacattcagggatgccctggcctgtgtgaaggcgacctcattgttgagatcaaccagcagaatgtacagaacctgagccatacagaagtagtggatatacttaaggactgtcccattggaagtgaaacttctttgattatccatcgaggaggtttcttttctccatggaaaactccaaagcctataatggaccgatgggagaatcaaggcagtcctcaaacgagtttatctgctccggccataccgcagaacctgcccttcccacctgcccttcacaggagctcctttcctgactcaacagaggcctttgacccacggaagcctgatccatatgagctctacgagaaatctagggccatttatgaaagtaggcaacaagtgccacccaggaccagttttcgaatggattcctctggtccagattataaggaattggatgttcatcttcggaggatggagtctggatttggcttcagaatcctcgggggagatgagcctggacagcctattttgattggagctgtcattgccatgggctcagccgacagagatggccgccttcacccaggagatgagcttgtgtatgttgatgggattccagtagccggcaaaacccaccgctatgtcatcgacctcatgcaccacgcagcccgcaatgggcaggtcaacctcactgtgagaagaaaggtgctatgtggaggggagccctgcccagagaacgggagaagtccaggctctgtatccacccaccacagctctccacgcagtgactacgcaacctacaccaacagcaaccacgctgcccccagtagcaatgcctctccccctgaaggcttcgcctcccacagcctgcagaccagtgatgtggtcattcaccgcaaagagaatgagggcttcggctttgtcatcatcagctccctgaacaggcctgagtctggatccactataactgtgycccataaaatcggacgcatcattgatgggagtcctgcagatcgctgtgcaaaactaaaagtgggagaccggatcctagcagtgaatggccagtctatcatcaacatgcctcacgctgacatcgtgaagctcatcaaggatgcaggtcttagtgtcacccttcgcatcattcctcaggaggagctcaacagccccacctcggcacccagctcagagaagcagagtcccatggcgcagcagagtcccctggcacagcagagtcccctggcccagccaagcccagccacccccaacagccccatcgcccagccagcaccacctcaaccacttcagctgcaaggacacgaaaatagttacaggtcagaagtgaaagcaaggcaagatgtgaaaccagacatccgacagcctccattcacagactacaggcagcccccgctggattacaggcaacccccaggaggggactaccagcagcccccacccttggactacaggcagcctcccctgctggactacaggcagcactcccccgacaccaggcagtaccctctgtcggactacagacaaccccaggattttgattatttcactgtggacatggagaaaggagccaaaggatttggattcagcattcgtggaggaagggaatacaaaatggatttgtatgtgttgagactggcagaagatggaccagcaataaggaatgggaggatgagggtaggagatcaaatcattgaaatcaatggggaaagcacaagggacatgacacatgccagagcaatagaactcatcaaatctggaggaagacgagtgaggctgctgctcaagagaggcacgggacaggtcccacaatatgacgaacccgccccctggagttctcccgctgccgccgccccatgtctgccggaagtaggcgtctccctggacgacggcctcgctccattctctccatcacatccagccccaccctccgacccttcccaccagataagcccaggcccaacttgggatatcaaacggaaacacgacgttaggaaaccaaaggagctttcagcctgcggccagaagaagcagcgcctcggggagcagagggagcgctcggcgagtccgcagagggccgcgcggccgaggctcgaggaggcgcccggcggccaggggcggcccgaggccggcaggcccgcctcggaggccagggcgcccgggctcgcggcggcagacgcggcggacgcggcgcgggcgggcgggaaggaggcgccccgtgcggcggcgggctccgagctctgccggcgcgaaggcctgggggctgcgccggcgagtgctgacccggcagacggcggcagcggcgcgctggcggccgagggcagggcgggtgcgcgcgcggcaccccgatcggtgccgcgaccgccggcgggcgccgccgcgcgcagggcggccggcgcgccggggycctggaaggtgcggggttctgacaagctgccgagcgtcctcaaacccggcgcctcggccgccagcagatgagccgcgcggccacggccaacccgcccgccccggcgcaggcagttcttcttaggttccgtctcacggcgttttaatttattttcactgtcacacgcatagatccacgaggcaccaaggcctgggagcatggacgtggagtcccacgtgtccggtgtgcttgggcggcatcgcatcaacgcgcagacctaaactgatcctaaagcccccggttcccttgtgggggctttggcagctatggaagaaccaaaataacgtgaagaacatcacagagagacagtgcagtgtagctttagtttaagaaaaaaaa

SEQ ID NO: 1800 - DNA, 3309 bp, Homo sapiens
gcggcgcgcccgagcctagtccccacgccgcggcgcgcccgggctccctgctgatcccagaacaatcaaccatgacgaccgaatctggatcagactcggaatccaagccggaccaggaggccgagccccaggaggcggcgggggcgcaggggcggcgggggccgtgccggagccgcccaaggaggagcagcagcaggccctggagcagttcgccgccgctgcagcgcacagcaccccggtgcgagggaggtcactgacaaggaacaggagtttgctgccagggctgcaaaacagctcgaatatcagcaattagaagacgataaactttctcagaaatcatctagcagtaaactctctcggtctccattaaagattgtcaaaaagcctaaaagcatgcagtgcaaagtgatacttctcgatggatcagaatatacctgtgatgtagagaaacgctccagaggacaagtgctgtttgataaagtgtgtgaacacttgaacttgctagagaaagactactttgggcttacgtatcgagatgctgaaaaccagaagaattggttggaccctgctaaggaaataaaaaaacaggttcgaagtggtgcttggcacttttcatttaatgtgaaattttatccaccagaccctgcccaactatctgaagatatcaccaggtactacctctgcttgcagttgcgagatgacatcgtgtccggaaggctgccctgctcctttgttaccctggccttgctgggctcctacactgtccagtcagagctcggagactatgacccagatgaatgtgggagcgattacattagtgagttccgctttgcaccaaaccacactaaagaactggaagacaaagtgatcgagctgcacaagagccacagaggaatgacgccagcagaagcagagatgcatttcttggaaaatgccaaaaaattatcaatgtatggggtagatttacatcatgctaaggactcagaaggggtagaaattatgttaggagtttgtgcaagtggtctgttgatatatcgcgaccggctgcgaataaacagatttgcctggcccaaggttctaaagatttcatacaaacggaacaacttttacattaagatccggccgggagagtttgaacaatttgaaagcaccattgggtttaagctgccaaaccatcgagctgccaagcgtttatggaaagtatgtgttgagcatcatacatttttcagactactgttaccagaagcacctcccaagaaattcctaaccttgggttccaagtttcgttatagtggcaggacacaagcgcaaacgagaagagccagtgcgttgatagatcgcccagcaccttactttgaacgctcatccagcaaacgttataccatgtctcgcagcttggatggagcatcagtgaatgaaaaccatgaaatatacatgaaggattctatgtctgctgcagaggttggtactggccagtacgccacaacaaaaggcatctctcagaccaacttgatcaccactgtgactccggagaagaaggctgaggaggagcgggacgaggaagaggacaaacggaggaagggggaagaagtcacgcccatctcggccatccagcacgagggaaagactgacagtgagcgcacggacaccgcagccgacggggagaccactgccactgaggagctagaaaaaactcaagatgacctgatgaaacatcaaaccaacattagcgagctgaaaagaaccttcttagaaacctcaacagacactgccgtaacgaatgaatgggagaagaggctttccacctcccccgtgcgactggccgccaggcaggaggatgcccccatgatcgaaccacttgtccctgaagagaaaatggaaaccaagacggagtccagtggatagagacggaacccaccgtgcaccacctgccgcttagcactgagaaggtggtgcaggagaccgtgttggtggaggagcggcgtgtggtgcacgcgagtggggatgcttcttactcggcgggagacagcggggatgctgcagcacagcccgcattcacaggcattaaagggaaagagggctctgcttgacggagggggctaaagaggaaggaggggaggaggtcgctaaagctgtcctggaacaggaagagacagccgctgcttcccgtgagcgacaagaggagcagagtgcagccatccacatttcagaaactttggaacaaaaacctcattttgagtcctcaacggtgaagacggaaaccatcagttttggcagtgtttcaccgggaggagtaaagctagaaatttccacaagaagtgccagtagttcacaccgaaaccaaaaccatcacatatgaatcatcacaggtcgatccaggcacagatctggagccaggcgtgctgatgagtgcacagacgatcacatctgaaaccaccagtaccaccaccactacccacatcaccaaaactgtgaaagggggcatttcagagacaagaattgagaagcgaatagtcatcacgggggatgcagacattgaccatgaccaggcgctggctcaggcaattaaagaggccaaagagcagcaccctgacatgtcagtgaccaaagtagtggtccataaagagacagagatcacaccagaagatggagaggattgaccagaggaataacttagcttgcacatgaatgcagtcatgcaaaccgttaggaaaaccagagcctatatggagttccctcttctaacccaactgtacttgtatctgtccgtggaaaatttcagtccagaagaattgaccttgaccattaataaagacactggcagagagatcttcccataataaagcaatctgattcagcatcactaaaccgataatgcatgaagcaacgataaaattacaaaagagcagcatttttaattttcacaaaatgtctcagttttcagctatacctgctcgttcataaccaacaatataaaccgtggtctcatgtaacacataaacaattcatgcctttcatagtttattattattaaagtctaaacaaaattgcaatttcttaggtaaccttatatttacaataaatgaagattaccctcaaatgctagaagctgtctaggtccgtccggtgtgtcagatttcctcagattagatgtgccaataaccaagtttattcagtaaacaacttgtacttgtttcatctggtttattactctcacccataaacagtaatgactctctgaccctctggaaatatgtaatgcttccaatcttgctttgtgtatctcatttaatttgttccggttaagga

SEQ ID NO: 1801 - DNA, 1606 bp, Homo sapiens
gcgtcgggggaggacaacaaagggccgcgggcggcgggcagtggtgtcccagtctcccggtgcttccctgaggctgaggcgcccggcctcccgcccgccgcgctccagatgaagtgtgagcactgcacgcgcaaggaatgtagtaagaaaacaaaaactgatgaccaagagaatgtgtcagccgatgcaccgagtccagcccaggaaaatggagagaagggagaattccacaagttggctgatgccaagatatttttgagcgactgcctggcatgtgacagctgtatgactgcagaggaaggagtccaactttcccagcaaaatgccaaggacttcttccgcgttctgaaccttaacaagaaatgtgatacctcaaagcacaaagtgctggtagtgtctgtgtgtcctcaatctttgccttattttgctgctaaattcaacctcagtgtaactgatgcatccagaagactctgtggtttcctcaaaagtcttggggtgcactatgtatttgatacgacgatagctgcggattttagtatcctggagagtcaaaaagaattcgtgcgtcgctatcgccagcacagtgaggaggaacgcaccctgcccatgctgacctctgcctgtcctggctgggtccgatacgccgagcgggtgctgggtcgccccatcactgcccacctctgcaccgccaagtccccccagcaggtcatgggctctttggtgaaggattatttcgccagacagcagaacctgtctccagagaagattttccacgtcattgtggccccttgttatgacaagaagctggaggctcttcaggaaagccttccccctgctttgcatggctcccggggcgctgactgcgtgttaacatcaggtgaaattgctcaaataatggagcaaggtgacctctcagtgagagatgctgccgtcgacactctgtttggagacttgaaggaggacaaagtgacgcgtcatgatggagccagctcagacgggcacctggcacacatcttcagacatgcggccaaggagctgttcaacgaggatgtggaggaggtcacttaccgagccctgagaaacaaagacttccaagaggtcacccttgagaagaacggagaggtggtgttacgctttgctgcagcctatggctttcgaaacatccagaacatgatcctgaagcttaagaagggcaagttcccattccactttgtggaggtcctcgcctgtgctggaggatgcttaaatggcagaggccaagcccagactccagacggacatgcggataaggccctgctgcggcagatggaaggcatttacgctgacatccctgtgcggcgtccggagtccagtgcacacgtgcaggagctgtaccaggagtggctggaggggatcaactcccccaaggcccgagaggtgctgcataccacgtaccagagccaggagcgtggcacacacagcctggacatcaagtggtgaagtcaggccagggccttccagctgctcttggggccagagccaagagcctctcagtagagggaggggctgccctgagtggagtattaaagacacttaagaaaaccgctcaaaaaaaaaaaaaaaaaaa

SEQ ID NO: 1802 - DNA, 719 bp, Homo sapiens
cagccttataagctgagggagtggagaggcccggggccaggaaagcagagacagacaaagcgttaggagaagaagagaggcagggaagacaagccaggcacgatggccaccttcccaccagcaaccagcgccccccagcagcccccaggcccggaggacgaggactccagcctggatgaatctgacctctatagcctggcccattcctacctcggaggtggaggccggaaaggtcgcaccaagagagaagctgctgccaacaccaaccgccccagccctggcgggcacgagaggaaactggtgaccaagctgcagaattcagagaggaagaagcgaggggcacggcgctgagacagagctggagatgaggccagaccatggacactacacccagcaatagagacgggactgcggaggaaggaggacccaggacaggatccaggccggcttgccacaccccccacccctaggacttattcccgctgactgagtctctgaggggctaccaggaaagcgcctccaaccctagcaaaagtgcaagatggggagtgagaggctgggaatggaggggcagagccaggaagatcccccagaaaagaaagctacagaagaaactggggctcctccagggtggcagcaacaataaatagacacgcacggcagccacagcttgggtgtgtgttcatccttgttaaaaaaaaaaaaaaaaaaaaaaaaaa

SEQ ID NO: 1803 - DNA, 4957 bp, Homo sapiens
gcatccccttgattaaatgtttttcctcctatgcaatcaccattagctgtttggctcccattctgtattcttctgaagcagccctgcattgcaaatcaatatctttctgaaaagacagtgtgttgtgaattgccttgacagcatatgcacggttactttggctgcaatgctgctgcagagcccggttactctgccttcgtgggaactccacagatatgtgtcacaaagatgtctacacggaactgccagggaatggactcagtgatcaaacccctggacacaattcctgaggataaaaaagtcagagttcagaggacacagagcacttttgacccatttgagaaaccagctaatcaagtaaagagggtgcattctgagaacaatgcttgcattaactttaagacctcctccactggcaaagagtcacctaaagttaggcggcactccagccccagctcgccaacaagtcccaaatttggaaaagctgactcatatgaaaagctggaaaaactaggggaaggatcttatgctacagtatacaaagggaaaagcaaggtaaatgggaagttggtagctctgaaggtgatcaggctgcaggaagaagaagggacacctttcacagctatcagggaagcttctcttttaaaaggactaaaacatgctaacatagtgctacttcatgacatcatccataccaaggagacgctgacacttgtgtttgaatatgtgcacactgatttatgtcagtacatggacaagcaccctggggggctgcatccagataatgtgaagttgtttttatttcagttgctgcgaggtctgtcttacatccaccagcgttatattttgcacagagacctgaaaccacagaaccttctgatcagtgacacgggggagttaaagctggcagatttcggtcttgcaagagcaaaatccgtccctagccacacatactccaacgaagtggttaccttgtggtacagacctccagatgtccttctaggctcaacagaatattccacctgccttgacatgtggggagtaggttgcatctttgttgaaatgatccaaggagttgctgcttttccaggaatgaaagacattcaggatcaacttgaacgaatatttctggttcttggaacaccaaatgaggacacatggcctggagttcattctttaccacattttaagccagaacgctttaccctgtacagctctaaaaaccttagacaagcatggaataagctcagctatgtgaaccatgcagaggacctggcctccaagctcctacaatgttccccaaagaacagactgtcggcacaggctgccttgagccacgagtattttagtgacctgccgccacggctatgggaactcaccgacatgtcttctatttttactgtcccaaatgtgagattgcaaccagaagctggagaaagcatgcgggcctttgggaaaaacaatagttatggcaaaagtctatcaaacagcaagcactgacaagcagcacattctcaagagcacacaggattaagttgtcatcattctgggaagaaaaaaaaaacattaatgaagaggccaataatatgaagggaatcatggatcagttttctttcgctccctgtggtggatttcacttacaagaaaattgaagctggcaagaccctgttttctctgcaatttatttaaaaccttgcacgcatttggataccttgtgatttccaagaactacgtgaagattaagctttgcttactgatacatggcatgtattcttttcagtcttttgtgtttgattttgtttgatttccctctgcagcacagcgtctctgtaaaggtttttatgctttcaccagccatgtcttaaatacattaagacaacacatttggtgttcacacttcttcagtaatgtctgaacttgaaagccacagagtggcataaaacaatgtgtgttttctttgagagcagtgcacattttgcaaccactaggaaggaaattttctgctaaagcaaacccctgttctctgacttgacaacttggccccggactgtggggccccacctgttgcttaccttttgaggtaattttgcaaatgtggtttttttacttggaaataactgcacatttatatataggatattggactctgcttagcattttcaagccacatagcatgactgttttttgaataggttggaattgaaaaaacaattatcaaacgttaagaacaaagacagggataaattgcttacatttcaacctctagagattgaggtaactttttgtgtctgggtcttgtcaacatctaatttttttccatccattctgttacactttgtattttctaactggagaaaagagtgaggaacagaatgttttaaatctggtgcaaaagaactatatctgctggatgagccttgaaagcagtcttggcctgttagggcttacaaagtaaattacaaagtgatccagttcaaagtttgcttagttacaacaaagcacctttaaaaaaaatacattttaaaaaaacattccaagccaattggaagacatcattgggttcttactttaagacatctcctggaataactgttcaaatgcaggttttagaaacaatgcaggaatcttgctttaaagatgaaaaagggaatgggccagcttcccttactcaaggagttgagggaccttggaggatgaaggcgagtatgtgacactggagaaaagtggaccaggcatgtcttttgctttgatctggagggagggctgcctgatgcaggccggctcccagtggggcaggcctcgctgcagaatgcccagtagtactgcggccaaggggacagttaggagacttcatctaaagcatgaaacctagctcctctacacacaaattcctatggaaatacctttgtgtacagtgtcttacattttcctattagtcagaaagaaggagagaatgagtgagtgcttgaaatgtgtcatactgttttaggatcaagactaggaattaggagccaggttgacaaggactttttctgagagttgggtgagggtaaagcttttctataatcaagctcaatacaccaaggaaactggatccagaattcctaaactttaaaatggtactgtctgcggagtggagtatggatggttatgtcaaagtcatagttcatcctatccagatgtagcattcatggtaaacttttaagtgctaagcaaggaattatttactgattggttttaaagagagcagaaaacacccaagtgtagaatgtctactgtttgctacctagaaatcttttccattcctctttcatacattccaacccactggaagtctttagaggtattttgatttaaagtatacttaaattaggatttcttaaagaaaacatagggagaaaactttacatgcaattaaaaatggactttcctgtgatttgtttttaatcattcatttggagaagaggcatgacctttgtatttcactaagtttaaagcaagagcaactgatgattaaatgttgctttttaataaggtttttaacttgaaaatttgaaaatatttaatgttgaaagacttcaattagggctattagagttatatctccctgtcgtaggcagcttcttcggagaagtgaaatataacattactcagtggacggagaagtctgttttgttacagagacatgcctctcagaaggtcaggaggttttgagtacctatccttgccacccatacaggaaatccaaagtttggtgtctctctctctctctgtctctttctttctctttctccccccaaacccctctcactccctccctccctctctccttcccctatttgcaatcatattctccctctgcttcttttctcttctgccctccttgtgggcagtcatgaaaatcaattcagactgtgttcattagcagatttattattctattgagaaagcactggaatgttttgtgagattatttttatatgaaggaatagcctgaactcaaacagatggtaagaatagtacaaacaccttagcacatcactgcacacacagtattctgaaaggagatttgacacttaattcccattttcttaaaataacagttttgttgacttaaaaatatgagatacataggatgtgaaaaaaaatgtttgcagtactcagcaaaaaatagggtacataaagcagggtggctgtccatccactgattctggggtgagaagcgatttctacctcgcaagagtgactagaaagtttctaggagcacctccaggcttgcaaagaaagtgaggcctcttggtatcctttcctcagtgtgtatatgacagccagtataatcaataccctaggttatgcgtctatatgatactcatctgtgaatattattggttttgtaatctttgttatataagaggatgtttaggctgtatatactggggtagattattgcctgccccttatacataggaatatgctgcataattgcgcataacttccatctcccttactggcttgtaggcagaggaaactgtatatgttactgccttgtacttttctcatacaccaaaaacacaccaaaaaaatcaataaaataagcaatcttctattctcattccttttcccacagcagcatattttagaggcacatacaaaacctacattctctagttgggagtggatttttaaagttttccttttatcttttatttttttttttgtatgatgcactgagatgtgtactttctaacaggggattggtacctaagaaacgtggtagcattattcagaaaactattatactttcaaatgacacatagtaaggagaatggaataatacatgttgcatatttgttaccagttgtaatttgtctgtattatgaaagatgtaatggtttgtcagctgtcactgttgttttcttgtaacatgatatggaataaagtatagcagaatctccgt

SEQ ID NO: 1804 - DNA, 3143 bp, Homo sapiens
ctataaattaaggatcccagctacttaattgacttatgcttcctagttcgttgcccagccaccaccgtctctccaaaaacccgaggtctcgctaaaatcatcatggattcacttggcgccgtcagcactcgacttgggtttgatcttttcaaagagctgaagaaaacaaatgatggcaacatcttcttttcccctgtgggcatcttgactgcaattggcatggtcctcctggggacccgaggagccaccgcttcccagttggaggaggtgtttcactctgaaaaagagacgaagagctcaagaataaaggctgaagaaaaagaggtgattgagaacacagaagcagtacatcaacaattccaaaagtttttgactgaaataagcaaactcactaatgattatgaactgaacataaccaacaggctgtttggagaaaaaacatacctcttccttcaaaaatacttagattatgttgaaaaatattatcatgcatctctggaacctgttgattttgtaaatgcagccgatgaaagtcgaaagaagattaattcctgggttgaaagcaaaacaaatgaaaaaatcaaggacttgttcccagatggctctattagtagctctaccaagctggtgctggtgaacatggtttattttaaagggcaatgggacagggagtttaagaaagaaaatactaaggaagagaaattttggatgaataagagcacaagtaaatctgtacagatgatgacacagagccattcctttagcttcactttcctggaggacttgcaggccaaaattctagggattccatataaaaacaacgacctaagcatgtttgtgcttctgcccaacgacatcgatggcctggagaagataatagataaaataagtcctgagaaattggtagagtggactagtccagggcatatggaagaaagaaaggtgaatctgcacttgccccggtttgaggtggaggacggttacgatctagaggcggtcctggctgccatggggatgggcgatgccttcagtgagcacaaagccgactactcgggaatgtcgtcaggctccgggttgtacgcccagaagttcctgcacagttcctttgtggcagtaactgaggaaggcaccgaggctgcagctgccaccggcataggctttactgtcacatccgccccaggtcatgaaaatgttcactgcaatcatcccttcctgttcttcatcaggcacaatgaatccaacagcatcctcttcttcggcagattttcttctccttaagatgatcgttgccatggcattgctgcttttagcaaaaaacaactaccagtgttactcatatgattatgaaaatcgtccattcttttaaatgttgtctcacttgcatttccagtcttggccatcaaatcaatgatttaatgactccaataatgtgtgtgtttataaccatcctcgaaagtgaaatgtccttttttttgtgccatgcgtaaggtgagtcaaaccaaacctcattgataatctcccctttggtttcctttgaaagtaaattggtatcttgtagttttgtgcacacgaaaggagagaaagtttctccagtaaagagtacgaactagtaattttggggggtctctctaattctggtattttgacatgttataatacgcaagtaaaataaaacaatagtttactcagctcatgttactattccccaacagatattgtggcaaatcacacataggaaagaggatttgggaatacagtagcaaaacataaattaaaactcaaatgcccaggacaaaataaaacaatataccagatggagaggatgcccgtattttcatcttccattctaacattatccattgttagatgcataagcattttgatattgtgtaataaatgtggtatttgagaagataaatgatgtagttgatcagtaatcctcctctatcacctttttagactttgtaaggtaaatatttggactaacttttagaaaagtttccctttttttctccatttacatttttctggtttttttttttttttttgagtgaggtacgagtattaccaaatgatattttctgaagatgctttttggaaagctctgaatctatacctaatgctcttaattattggcttgtttcatttttttcctccagtttttaacaagatcacataactggcttatttttaacagctttgtcaaactacaatttacatgccgtaaaatgtacacactgtaattttataattcattgacttttagtaaattttctagcgttatgcatcgccacaatccagttttagaatatttccatgaccctaagaagtttcctcatgtctattaatattcccaatcctaggcaccactgagttgttttctgtctttataagtttttctttctacatcttatataaatggaatcataatacatgtagtattttgtgtctggcgtcttgcacttagcatggtgttcttgaggttcatctgttgtagtatgtattgatacttaggatttttttattgccgaatactattccattgcatggaaaagacctattttatttctaggttcaccagttgagggacatttggattgttcccacttcttgggctgttaggaataatgttgctctgaacatgtaaataaagatctttgtgttcacatatgtttttcattttctgttggggagattccctaggctagaaattgctgggccatatgaaaaatcaatagttagctttgtaagaaacagtcaaactgttttcccaacgtgacattttatattcccaccaggaatgtttaaaactagtgtcttcaaatcctcaccaacatccaggattgtgtctttatgattatagccatttttgtaggtacaaagtggcatctcatggtggttttaatttgcatttccataatatctaattaggttgagctttttttatgtgcttattggccatttgtttgactttgtttggtgaaatgtatacaaatcatttgctcatttttaatttgggttgtctgtcttgtcttctcattttattgagttaaatgagttcttaataatctctggcttacaagtccttaatttatcaaatatatgatacgtggacatttcctcataaaaaaaaaaaaaaaaaa

SEQ ID NO: 1805 - DNA, 1142 bp, Homo sapiens
cttttccaagcggctgccgaagatggcggaggtgcaggtcctggtgcttgatggtcgaggccatctcctgggccgcctggcggccatcgtggctaaacaggtactgctgggccggaaggtggtggtcgtacgctgtgaaggcatcaacatttctggcaatttctacagaaacaagttgaagtacctggctttcctccgcaagcggatgaacaccaacccttcccgaggcccctaccacttccgggcccccagccgcatcttctggcggaccgtgcgaggtatgctgccccacaaaaccaagcgaggccaggccgctctggaccgtctcaaggtgtttgacggcatcccaccgccctacgacaagaaaaagcggatggtggttcctgctgccctcaaggtcgtgcgtctgaagcctacaagaaagtttgcctatctggggcgcctggctcacgaggttggctggaagtaccaggcagtgacagccaccctggaggagaagaggaaagagaaagccaagatccactaccggaagaagaaacagctcatgaggctacggaaacaggccgagaagaacgtggagaagaaaattgacaaatacacagaggtcctcaagacccacggactcctggtctgagcccaataaagactgttaattcctcatgcgttgcctgcccttcctccattgttgccctggaatgtacgggacccaggggcagcagcagtccaggtgccacaggcagccctgggacataggaagctgggagcaaggaaagggtcttagtcactgcctcccgaagttgcttgaaagcactcggagaattgtgcaggtgtcatttatctatgaccaataggaagagcaaccagttactatgagtgaaagggagccagaagactgattggagggccctatcttgtgagtggggcatctgttggactttccacctggtcatatactctgcagctgttagaatgtgcaagcacttggggacagcatgagcttgctgttgtacacagggtatttctagaagcagaaatagactgggaagatgcacaaccaaggggttacaggcatcgcccatgctcctcacctgtattttgtaatcagaaataaattgcttttaaagaaaaaaaaaaaaaaaaaa

SEQ ID NO: 1806 - DNA, 1536 bp, Homo sapiens
ggcacgaggggaaggcacaggcctgagaagtctgcggctgagctgggagcaaatcccccaccccctacctgggggacagggcaagtgagacctggtgagggtggctcagcaggaaggaaggagaggtgtctgtgcgtcctgcacccacatctttctctgtcccctccttgccctgtctggaggctgctagactcctatcttctgaattctatagtgcctgggtctcagcgcagtgccgatggtggcccgtccttgtggttcctctctacttggggaaatcaggtgcagcggccatggctacagcaagacccccctggatgtgggtgctctgtgctctgatcacagccttgcttctgggggtcacagagcatgttctcgccaacaatgatgtttcctgtgaccacccctctaacaccgtgccctctgggagcaaccaggacctgggagctggggccggggaagacgcccggtcggatgacagcagcagccgcatcatcaatggatccgactgcgatatgcacacccagccgtggcaggccgcgctgttgctaaggcccaaccagctctactgcggggcggtgttggtgcatccacagtggctgctcacggccgcccactgcaggaagaaagttttcagagtccgtctcggccactactccctgtcaccagtttatgaatctgggcagcagatgttccagggggtcaaatccatcccccaccctggctactcccaccctggccactctaacgacctcatgctcatcaaactgaacagaagaattcgtcccactaaagatgtcagacccatcaacgtctcctctcattgtccctctgctgggacaaagtgcttggtgtctggctgggggacaaccaagagcccccaagtgcacttccctaaggtcctccagtgcttgaatatcagcgtgctaagtcagaaaaggtgcgaggatgcttacccgagacagatagatgacaccatgttctgcgccggtgacaaagcaggtagagactcctgccagggtgattctggggggcctgtggtctgcaatggctccctgcagggactcgtgtcctggggagattacccttgtgcccggcccaacagaccgggtgtctacacgaacctctgcaagttcaccaagtggatccaggaaaccatccaggccaactcctgagtcatcccaggactcagcacaccggcatccccacctgctgcagggacagccctgacactcctttcagaccctcattccttcccagagatgttgagaatgttcatctctccagcccctgaccccatgtctcctggactcagggtctgcttcccccacattgggctgaccgtgtctctctagttgaaccctgggaacaatttccaaaactgtccagggcgggggttgcgtctcaatctccctggggcactttcatcctcaagctcagggcccatcccttctctgcagctctgacccaaatttagtcccagaaataaactgagaagtggaaaaaaaaaaaaaaaaaaaaaaaaaaaaaaaaaaa

SEQ ID NO: 1807 - DNA, 2388 bp, Homo sapiens
gaaggacggagccgagccgcggctgcctccctcgctcactccctcgcgcactcgcccgccccctccctccctcccctcccttccccgggcccgggtctggccccggcccattcgctgttgggtcttctgctagggaggatgtcgggttcgtcgctgcccagcgccctggccctctcgctgttgctggtctctggctccctcctcccagggccaggcgccgctcagaacgctgggtttgtcaagtcgcccatgtcagaaactaagctcacgggggacgcctttgagctgtactgtgacgtggtcgggagccccacgccagagatccagtggtggtacgcagaagtcaaccgggcagagtctttcagacagctgtgggacggtgctcggaagcgccgtgtcaccgtaaacaccgcctacgggtcaaacggcgtgagtgtgctgagaataacccggctcaccttggaggactctgggacttacgagtgcagggccagcaacgaccccaagaggaatgacttgaggcaaaacccctccataacatggattcgagcccaggccaccataagcgtccttcagaagccaaggattgtcaccagtgaagaggtcattattcgagacagccctgttctccctgtcaccctgcagtgtaacctcacctccagctctcacacccttacatacagctactggacaaagaatggggtggaactgagtgccactcgtaagaatgccagcaacatggagtacaggatcaataagccgagagctgaggattcaggcgaataccactgcgtatatcactttgtcagcgctcctaaagcaaacgccaccattgaagtgaaagccgctcctgacatcactggccataaacggagtgagaacaagaatgaagggcaggatgccactatgtattgcaagtcagttggctacccccacccagactggatatggcgcaagaaggagaacgggatgcccatggacattgtcaatacctctggccgcttcttcatcatcaacaaggaaaattacactgagttgaacattgtgaacctgcagatcacggaagaccctggcgagtatgaatgtaatgccaccaacgccattggctccgcctctgttgtcactgtcctcagggtgcggagccacctggccccactctggcctttcttgggaattctggctgaaattatcatccttgtggtgatcattgttgtgtatgagaagaggaagaggccagatgaggttcctgacgatgatgaaccagctggaccaatgaaaaccaactctaccaacaatcacaaagataaaaacttgcgccagagaaacacaaattaagtactgcttacaatatctttaggttcctgaaactggtggcaacatgacctgctaaaattttctgcttggacctctttggttctctcccctttcaagtgagcaacaccacaatgactgtctaaagcatgccttatttagcctctcctgtaagggtgatctagccaggtacattttaaacaatgcttcagtgtagaaggtgtaaactattttgggcttgatgtgctgtgaatgttgcttttttttttcctttgttaaaatatttaaatagaagtgaaaaggtcctctgaggatcagatcatgcatgcgccattttttacttaatgcagctgttaaattggcaaagctctaaaatgcactgctgccatctagtgatacacttttgtaaagtacagcaaaacctacaggtatatacagcatataaatatatatatatatatatttatatttttgggggtgggagaaatccaaaataaagtaaatgcttgtttcatttttaagctgctgatattcattccttattgtatgttgtcagatgaggaaattgtgcagttctggtacataaagatgagtaatataaactgaaatctataattttaagggcttaacctgtgactttaataagctggaacagtccactgaatgggtataatgaattgcagtatatacgtatgattgctttttaagtgattatcttttcttctgttaagtcatgtaaattcataaatccttttgcactgatgtgttgaaccttattcttgtacattcattcaatcaaggcaaacttttataatttttcttttgtttccaatgaccttgaaatgttatagcatggtaatattctatgcaactatagttatactttttggtttgacactgtattttttcacattgatttactggttgatgatagattttataacctaacggttctcatgcggtgcgtaattgtagatgcatgtacttgtgtgttttgtgtaactattgaagtgcaatgatgtataaaaaagtggattcacctgtttttaaaaataaaacattgataaaaaaaaaaaa

SEQ ID NO: 1808 - DNA, 6474 bp, Homo sapiens
gtttggcaagtcagtgcaagaggctgacttctgagaggcttccaggagcccgaagagaggacctccacgggagaagggagtgcgtgtgctcggttttttttttttctctcttttttttttttttttctgaatgaacagctttgcccaagtgactgaaaaatacagcttcttcctgaatctaccggcgtagttgctgaagagcgctctagacaggacatggctctgaagactcactctttggaatgtcctcttgctcccggcttataaacaactgtcccgaggaaagaaaggttttacatagccaaatacagcctgacaaatggcacttcggaactgtgctttctgatgacaacgcgttcgatttctgacaaagcctctcgcacgctgcccctggagggaagtcctaagtaaaactcagaccctccttaaagtgaggagcgagggcttggacggtgaacacggcagcatggcatccgcggggcacattatcaccttgctcctgtggggttacttactggagctttggacaggaggtcatacagctgatactacccacccccggttacgcctgtcacataaagagctcttgaatctgaacagaacatcaatatttcatagcccttttggatttcttgatctccatacaatgctgctggatgaatatcaagagaggctcttcgtgggaggcagggaccttgtatattccctcagcttggagagaatcagtgacggctataaagagatacactggccgagtacagctctaaaaatggaagaatgcataatgaagggaaaagatgcgggtgaatgtgcaaattatgttcgggttttgcatcactataacaggacacaccttctgacctgtggtactggagcttttgatccagtttgtgccttcatcagagttggatatcatttggaggatcctctgtttcacctggaatcacccagatctgagagaggaaggggcagatgtccttttgaccccagctcctccttcatctccactttaattggtagtgaattgtttgctggactctacagtgactactggagcagagacgctgcgatcttccgcagcatggggcgactggcccatatccgcactgagcatgacgatgagcgtctgttgaaagaaccaaaatttgtaggttcatacatgattcctgacaatgaagacagagatgacaacaaagtatatttcttttttactgagaaggcactggaggcagaaaacaatgctcacgcaatttacaccagggtcgggcgactctgtgtgaatgatgtaggagggcagagaatactggtgaataagtggagcactttcctaaaagcgagactcgtttgctcagtaccaggaatgaatggaattgacacatattttgatgaattagaggacgtttttttgctacctaccagagatcataagaatccagtgatatttggactctttaacactaccagtaatatttttcgagggcatgctatatgtgtctatcacatgtctagcattcgggcagccttcaacggaccatatgcacataaggaaggacctgaataccactggtcagtctatgaaggaaaagtcccttatccaaggcctggttcttgtgccagcaaagtaaatggagggagatacggaaccaccaaggactatcctgatgatgccatccgatttgcaagaagtcatccactaatgtaccaggccataaaacctgcccataaaaaaccaatattggtaaaaacagatggaaaatataacctgaaacaaatagcagtagatcgagtggaagctgaggatggccaatatgacgtcttgtttattgggacagataatggaattgtgctgaaagtaatcacaatttacaaccaagaaatggaatcaatggaagaagtaattctagaagaacttcagatattcaaggatccagttcctattatttctatggagatttcttcaaaacggcaacagctgtatattggatctgcttctgctgtggctcaagtcagattccatcactgtgacatgtatggaagtgcttgtgctgactgctgcctggctcgagacccttactgtgcctgggatggcatatcctgctcccggtattacccaacaggcacacatgcaaaaaggcgtttccggagacaagatgttcgacatggaaatgcagctcagcagtgctttggacaacagtttgttggggatgctttggataagactgaagaacatctggcttatggcatagagaacaacagtactttgctggaatgtaccccacgatctttacaagcgaaagttatctggtttgtacagaaaggacgtgagacaagaaaagaggaggtgaagacagatgacagagtggttaagatggaccttggtttactcttcctaaggttacacaaatcagatgctgggacctatttttgccagacagtagagcatagctttgtccatacggtccgtaaaatcaccttggaggtagtggaagaggagaaagtcgaggatatgtttaacaaggacgatgaggaggacaggcatcacaggatgccttgtcctgctcagagtagcatctcgcagggagcaaaaccatggtacaaggaattcttgcagctgatcggttatagcaacttccagagagtggaagaatactgcgagaaagtatggtgcacagatagaaagaggaaaaagcttaaaatgtcaccctccaagtggaagtatgccaaccctcaggaaaagaagctccgttccaaacctgagcattaccgcctgcccaggcacacgctggactcctgatggggtgagactatctactgtcttttgaagaatttatatttggaaagtaaaaaagtaaaaaaataaatcatccaacttctttgcattacttaaaagagatttctgtaatacaggaatgactatgaaggtgttataataaattattctacatactcatttgactggataaactttacataaaattaactaattttttaaataaatgcattgcttaatggtttctcattatgtttatcaaaaaacaactgtagctgttattttcagtacttggctgcttttctgtgaaaattattattttacttttggaagacaagattattagaatattgaagaaaaattggagacttataatcatggtaaatataaaactaaatatgttttaatatttctgaatttttcttttccatcacaatgtaagatatgcagaatacaagatactttggcattctcatgtgaactttctgtactctttaaggattattttattagtgttgtttaagccatgagtgttaagtagcaggtgtgttgtgagtgctgtaacccatgaaaggaaaaatgtcattctgaggcttgtgcccttcgtaaaatattcattaaagtacattcacactatttttgctttataacacagtctttaattttcactcactgtggaaataaaaactaaggtaacttctcagaaagatatcaaatctcagaaagaatgtcaaatcagatgaagttatagttaggattctaactactgtaaaagatttttgcttccctcttgtggtaaaaaaaattatattctcacacatttcttttttctctacagacggatatctgtttaggaaagatttgaaagcagattatcagtaggtacatggatacatcaagttcatttgcagaaacaaataactgaaataaaaaacatgttaatccttgtatcatactttaatatgaaagtattgtttatagataatttatctcacaagtcaaaaatgaagattttgcagcactgaaaatctattaaagctccaaattttaagtttctaaataatcttcgctgaaatctaaaatatactataacaaccgtgttttatttgtgaaaaaaatattaaagtgatttgctctcaaatatcaaattttcttctctcttttatattaagagacagaaaattgtttcatgagttcacttaactactgagatattcagagcatttttacctctctcttaaatgttataaaaaacaattgtatttttaagaatgtttatttatcaaagtctttccttcttctattaaatatttagcaattacctttctaaaatatgaaattttgtaagatgttttcacctaaataaaaattgaaagcaagtggattacacaggagaaccattatgaacatttatttagatattaatcttaaacagtgtttatttcagttttcaaagttagcttataggttatacatttaagttaaagtgctcataatcacttgcaatttcattgtaaaatgaacaaatacataaatattttaagaaaaatttaagtttattcagataagtcaccatgcttcaaaagatctaagaaatgcaaatatactgaaaattgacatcctctgaaaattccacttgctatttacccaagaatccactggaggtcattactgccattaaataataactgaaaagactatgtagtgaaatgtatttttaaaaactatattcagtaaaagcctgctcaatttggagaaatagaaccacaaacacagatcacaggggccttacaaagtttatgtctgaacaaataagtcaattaagtacactttattgaaaattgccttccattaacacacaagaaagaaagcaggattttctcctgtatctgaattttaaaattaaaaaggcagataagacataaatagttatcattttaattgcaataacacagacaagtagttaatgatgataacaatggtgtaacttgtaaactaaatatttggtaactgaagcaataggcagaggaaaatagcttttctatgacacaagtcataagaagtccatatactgaagagcgtttgattaaaataaagtgactattaaccagaaaagaaacattttacataaaatgctaaaatttattataggaaaataaatcaaacccaaagaaagtttattcaatgctaatttgaaagaaaattgataagaaaactttgagggcccaagtccacaatttggtgagaccactaaattttacatataattatacacacacatatgtacatatatatgtatataatcttgcttcccgcctgtttatggcagtactgaagagaaatgggaaagaagagggagggagagagaaagacgaagggagagagaaagcagtttccaaggatatgtttcatgtcccaccattttctcagtttctccctctctctcccaacacacacacacacacacccctcacatactataaaataaatcttcactgccctatcaaaatacaaataaatcaatctatgctgttctgtccttcttgagaatctaaaacataccacaaaaatacatccccagtcttttgttctgtctgaggttagaattaattcaaattcagaatctgttgtgagaaatgcccaggctttaaaaattaaaaatggatggatcttctctgaactcagggagggcacatacttagatacctacaagacttggaggaattaagagttcacccttcatctcaccaaattttccccatttttctctttcttgtagaaggagagaaaccatgctctctagcaacattgagcaaaaatcataaccactcatctaatttctaagaggcacctccatcgagggccggtctcctgcttctttagacctcttctatctttgttacaggagaggacctgtggatagacttagttttgacataaaacaatgcccattcacctcctccttcagcacaacgtcacccattgggcaagagatccagatttgttaacaaaaaagattttacttcgtgattccacgtctataattctatattgctaattttttcttttgtgtgaattactgaatatttcagagcaaagctatcaacttggagaaacagggattaaaaataaggataaacactaataagagctctagaaaaaagggaacagaaagtctgcctgtttagtaagtggcaattccatacatattttagagttttttctatctaaaattagttaaatacttagaatgtttgtaatgagtgttcgatatttgctataggttttagggttttgtaaatcttcatagtaattataaacatttgtaaaatttgtaaaatactataagtcattttgagtgttggtgttaagcatgaaacaaacagcagctgttgtccttaaaaatgaattgacctggccgggcgcggtggctcacgcctgtaatcccagcactttgggaggccgaggcgggtggatcatgaggtcaggagatggagaccatcctggctaacaaggtgaaaccccgtctctactaaaaatacaaaaaattagccgggcgcggtggcgggcgcctgtagtcccagctacttgggaggctgaggcaggagaatggcgtgaacccgggaagcggagcttgcagtgagccgagattgcgccactgcagtccgcagtccggcctgggcgacagagcgagactccgtctc

SEQ ID NO: 1809 - DNA, 1807 bp, Homo sapiens
gcacgagggaagagggtgatccgacccggggaaggtcgctgggcagggcgagttgggaaagcggcagcccccgccgcccccgcagccccttctcctcctttctcccacgtcctatctgcctctcgctggaggccaggccgtgcagcatcgaagacaggaggaactggagcctcattggccggcccggggcgccggcctcgggcttaaataggagctccgggctctggctgggacccgaccgctgccggccgcgctcccgctgctcctgccgggtgatggaaaaccccagcccggccgccgccctgggcaaggccctctgcgctctcctcctggccactctcggcgccgccggccagcctcttgggggagagtccatctgttccgccagagccccggccaaatacagcatcaccttcacgggcaagtggagccagacggccttccccaagcagtaccccctgttccgcccccctgcgcagtggtcttcgctgctgggggccgcgcatagctccgactacagcatgtggaggaagaaccagtacgtcagtaacgggctgcgcgactttgcggagcgcggcgaggcctgggcgctgatgaaggagatcgaggcggcgggggaggcgctgcagagcgtgcacgcggtgttttcggcgcccgccgtccccagcggcaccgggcagacgtcggcggagctggaggtgcagcgcaggcactcgctggtctcgtttgtggtgcgcatcgtgcccagccccgactggttcgtgggcgtggacagcctggacctgtgcgacggggaccgttggcgggaacaggcggcgctggacctgtacccctacgacgccgggacggacagcggcttcaccttctcctcccccaacttcgccaccatcccgcaggacacggtgaccgagataacgtcctcctctcccagccacccggccaactccttctactacccgcggctgaaggccctgcctcccatcgccagggtgacactggtgcggctgcgacagagccccagggccttcatccctcccgccccagtcctgcccagcagggacaatgagattgtagacagcgcctcagttccagaaacgccgctggactgcgaggtctccctgtggtcgtcctggggactgtgcggaggccactgtgggaggctcgggaccaagagcaggactcgctacgtccgggtccagcccgccaacaacgggagcccctgccccgagctcgaagaagaggctgagtgcgtccctgataactgcgtctaagaccagagccccgcagcccctggggcccccggagccatggggtgtcgggggctcctgtgcaggctcatgctgcaggcggccgaggcacagggggtttcgcgctgctcctgaccgcggtgaggccgcgccgaccatctctgcactgaagggccctctggtggccggcacgggcattgggaaacagcctcctcctttcccaaccttgcttcttaggggcccccgtgtcccgtctgctctcagcctcctcctcctgcaggataaagtcatccccaaggctccagctactctaaattatggtctccttataagttattgctgctccaggagattgtccttcatcgtccaggggcctggctcccacgtggttgcagatacctcagacctggtgctctaggctgtgctgagcccactctcccgagggcgcatccaagcgggggccacttgagaagtgaataaatggggcggtttcggaagcgtcagtgtttccatgttatggatctctctgcgtttgaataaagactatctctgttgctcac

SEQ ID NO: 1810 - DNA, 2782 bp, Homo sapiens
ggagccgtcaccccgggcggggacccagcgcaggcaactccgcgcggcgcccggccgagggagggagcgagcgggcgggcgggcaagccagacagctgggccggagcagccgccggcgcccgaggggccgagcgagattgtaaaccatggctgtgtggatacaagctcagcagctccaaggagaagcccttcatcagatgcaagcgttatatggccagcattttcccattgaggtgcggcattatttatcccagtggattgaaagccaagcatgggactcagtagatcttgataatccacaggagaacattaaggccacccagctcctggagggcctggtgcaggagctgcagaagaaggcagagcaccaggtgggggaagatgggtttttactgaagatcaagctggggcactatgccacacagctccagaacacgtatgaccgctgccccatggagctggtccgctgcatccgccatatattgtacaatgaacagaggttggtccgagaagccaacaatggtagctctccagctggaagccttgctgatgccatgtcccagaaacacctccagatcaaccagacgtttgaggagctgcgactggtcacgcaggacacagagaatgagttaaaaaagctgcagcagactcaggagtacttcatcatccagtaccaggagagcctgaggatccaagctcagtttggcccgctggcccagctgagcccccaggagcgtctgagccgggagacggccctccagcagaagcaggtgtctctggaggcctggttgcagcgtgaggcacagacactgcagcagtaccgcgtggagctgcccgagaagcaccagaagaccctgcagctgctgcggaagcagcagaccatcatcctggatgacgagctgatccagtggaagcggcggcagcagctggccgggaacggcgggccccccgagggcagcctggacgtgctacagtcctggtgtgagaagttggcggagatcatctggcagaaccggcagcagatccgcagggctgagcacctctgccagcagctgcccatccccggcccagtggaggagatgctggccgaggtcaacgccaccatcacggacattatctcagccctggtgaccagcacgttcatcattgagaagcagcctcctcaggtcctgaagacccagaccaagtttgcagccactgtgcgcctgctggtgggcgggaagctgaacgtgcacatgaaccccccccaggtgaaggccaccatcatcagtgagcagcaggccaagtctctgctcaagaacgagaacacccgcaatgattacagtggcgagatcttgaacaactgctgcgtcatggagtaccaccaagccacaggcacccttagtgcccacttcaggaatatgtccctgaaacgaattaagaggtcagaccgtcgtggggcagagtcggtgacagaagaaaaatttacaatcctgtttgaatcccagttcagtgttggtggaaatgagctggtttttcaagtcaagaccctgtccctgccagtggtggtgatcgttcatggcagccaggacaacaatgcgacggccactgttctctgggacaatgcttttgcagagcctggcagggtgccatttgccgtgcctgacaaagtgctgtggccacagctgtgtgaggcgctcaacatgaaattcaaggccgaagtgcagagcaaccggggcctgaccaaggagaacctcgtgttcctggcgcagaaactgttcaacaacagcagcagccacctggaggactacagtggcctgtctgtgtcctggtcccagttcaacagggagaatttaccaggacggaattacactttctggcaatggtttgacggtgtgatggaagtgttaaaaaaacatctcaagcctcattggaatgatggggccattttggggtttgtaaacaagcaacaggcccatgacctactgattaacaagccagatgggaccttcctcctgagattcagtgactcagaaattggcggcatcaccattgcttggaagtttgattctcaggaaagaatgttttggaatctgatgccttttaccaccagagacttctccatcaggtccctagccgaccgcttgggagacttgaattaccttatctacgtgtttcctgatcggccaaaagatgaagtatactccaaatactacacaccagttccctgcgagtctgctactgctaaagctgttgatggatacgtgaagccacagatcaagcaagtggtccctgagtttgtgaacgcatctgcagatgccgggggcggcagcgccacgtacatggaccaggccccctccccagctgtgtgtccccaggctcactataacatgtacccacagaaccctgactcagtccttgacaccgatggggacttcgatctggaggacacaatggacgtagcgcggcgtgtggaggagctcctgggccggccaatggacagtcagtggatcccgcacgcacaatcgtgaccccgcgacctctccatcttcagcttcttcatcttcaccagaggaatcactcttgtggatgttttaattccatgaatcgcttctcttttgaaacaatactcataatgtgaagtgttaatactagttgtgaccttagtgtttctgtgcatggtggcaccagcgaagggagtgcgagtatgtgtttgtgtgtgtgtgtgtgtgtgtgtgtgtgtgcgttggtgcacgttatggtgtttctccctctcactgtctgagagtttagttgtagcaga

SEQ ID NO: 1811 - DNA, 1195 bp, Homo sapiens
ccgagactcacggtcaagctaaggcgaagagtgggtggctgaagccatactattttatagaattaatggaaagcagaaaagacatcacaaaccaagaagaactttggaaaatgaagcctaggagaaatttagaagaagacgattatttgcataaggacacgggagagaccagcatgctaaaaagacctgtgcttttgcatttgcaccaaacagcccatgctgatgaatttgactgcccttcagaacttcagcacacacaggaactctttccacagtggcacttgccaattaaaatagctgctattatagcatctctgacttttctttacactcttctgagggaagtaattcaccctttagcaacttcccatcaacaatatttttataaaattccaatcctggtcatcaacaaagtcttgccaatggtttccatcactctcttggcattggtttacctgccaggtgtgatagcagcaattgtccaacttcataatggaaccaagtataagaagtttccacattggttggataagtggatgttaacaagaaagcagtttgggcttctcagtttcttttttgctgtactgcatgcaatttatagtctgtcttacccaatgaggcgatcctacagatacaagttgctaaactgggcatatcaacaggtccaacaaaataaagaagatgcctggattgagcatgatgtttggagaatggagatttatgtgtctctgggaattgtgggattggcaatactggctctgttggctgtgacatctattccatctgtgagtgactctttgacatggagagaatttcactatattcagagcaagctaggaattgtttcccttctactgggcacaatacacgcattgatttttgcctggaataagtggatagatataaaacaatttgtatggtatacacctccaacttttatgatagctgttttccttccaattgttgtcctgatatttaaaagcatactattcctgccatgcttgaggaagaagatactgaagattagacatggttgggaagacgtcaccaaaattaacaaaactgagatatgttcccagttgtagaattactgtttacacacatttttgttcaatattgatatattttatcaccaacatttcaagtttgtatttgttaataaaatgattattcaaggaaaaaaaaaaaaaaaaaa

SEQ ID NO: 1812 - DNA, 1027 bp, Homo sapiens
gggccgcgctcctgtccagaccctgaccctccctcccaaggctcaaccgtcccccaacaaccsccagccttgtactgatgtcggmtgcgagasctgtgcttaagtaagaatcaggccttattggagacattcaagcaaaggttggacaactacttttccagaacagaaaggaaactcatgcatcagaaaaggtgactaataaaggtaccagaagaatatggctgcacaaataccagaatctgatcagataaaacagtttaaggaatttctggggacctacaataaacttacagagacctgctttttggactgtgttaaagacttcacaacaagagaagtaaaacctgaagagaccacctgttcagaacattgcttacagaaatatttaaaaatgacacaaagaatatccatgagatttcaggaatatcatattcagcagaatgaagccctggcagccaaagcaggactccttggccaaccacgatagagaagtcctgatggatgaacttttgatgaaagattgccaacagctgctttattggaaatgaggactcatctgatagaatcccctgaaagcagtagccaccatgttcaaccatctgtcatgactgtttggcaaatggaaaccgctggagaaacaaaattgctatttaccaggaataatcacaatagaaggtcttattgttcagtgaaataataagatgcaacatttgttgaggccttatgattcagcagcttggtcacttgattagaaaaataaaccattgtttcttcaattgtgactgttaattttaaagcaacttatgtgttcgatcatgtatgagatagaaaaatttttattactcaaagtaaaataaatggaaatatcactgagcagttgtttatactgtatggtaccatagtattctcactggactgtggatacgttgaaatgtttttcaatcaggatcatcctccaagcagtcctgttcattcatgtctgcctcaaattgctggtgaatacataaaatagttayttgctaatcat

SEQ ID NO: 1813 - DNA, 2095 bp, Homo sapiens
acgtttaaagctgagcgacccagtgccactggagacggtcagcttctccactcaggctcctccagcccgagccagaagaccccctcccccataattctgggggccgatggaagggagccgagtcagatcgcgaggtacccatagccgacagaccggagcgacagggagttgccataagccccgcccctaggagtgatcggaaagcctcacccatccgggtgaggaacccggagggaccgcctccgggcggagcccgccgaccatggctacgcccctggtggcgggtcccgcagctctacgcttcgccgccgcggctagctggcaggttgtgcgcggacgctgcgtggaacattttccgcgagtactggagtttctgcgatctctgcgcgctgttgcccctggcttggttcgctaccggcaccacgaacgcctttgtatgggcctaaaggccaaggtggtggtggagctgatcctgcagggccggccttgggcccaagtcctgaaagccctgaatcaccactttccagaatctggacctatagtgcgggatcccaaggctacaaagcaggatctgaggaagattttggaggcacaggaaactttttaccagcaggtgaagcagctgtcagaggctcctgtggatttggcctcgaagctgcaggaacttgaacaagagtatggggaaccctttctggctgccatggaaaagctgctttttgagtacttgtgtcagctggagaaagcactgcctacaccgcaggcacagcagcttcaggatgtgctgagttggatgcagcctggagtctctatcacctcttctcttgcctggagacaatatggtgtggacatggggtggctgcttccagagtgctctgttactgactcagtgaacctggctgagcccatggaacagaatcctcctcagcaacaaagactagcactccacaatcccctgccaaaagccaagcctggcacacatcttcctcagggaccatcttcaaggacgcacccagaacctctagctggccgacacttcaatctggcccctctaggccgacgaagagttcagtcccaatgggcctccactaggggaggccataaggagcgccccacagtcatgctgtttccctttaggaatctcggctcaccaacccaggtcatatctaatcctgagagcaaggaagaacatgcgatatacacagcagacctagccatgggcacaagagcaccctccaatgggaagtataagggtccataccagaccctggggggaagggctctgaaggagaacccagttgacttgcctgccacagagcaaaaggagtgagtggaacagagttgcttcttaataggagcacattctttgcctgccttcccttcatcctatcctctttgcttgctctcacctcaggaattgcttggattgatacatggaccccctgagactatcattattacctcctagggccaggaagccaggtaggtagtctgagtcaggattggatcaacagcctcctctcttggggactctcaagagcctgtgttcatctagaagtagtagtttgattctggtttccctcatacagtgtgtcctccgtctctgtgcagctccgtcattaccataggggacttggttttagactctgatgaggaagaaaatggccagggggaaggaaaggtgagtgggaaggagcagaaagctgggaaaggggatgggtagaacaagactgagaaatccacatgcttcagaattcagagggttcagggaatggtttcggatagtaggctctccctgctcccttctatacaggaatctctggaaaactatcagaagacaaagtttgacaccttgatacccactttttgtgaatacctacccccttctggccacggtgccatacctgtttcttcctgtgactgtagaaacagttctagacctttgtgatagaactaaaatgctctctgtactctagtctcctgcctcctcagttctgcaagtagtttagtaggaatgaagtggaagtccaggcttggattgcctaactacactgctaaaaatatttgtaatccttaataattaaactttggatttgtt

SEQ ID NO: 1814 - DNA, 3919 bp, Homo sapiens
ctcacacttttgctctcttgcagtcagttgctttgctggcttctgcaggcttttaaggtctcgcggcgtagaaatgcctggcccccacccccttcctcggtctcccctttcaattcagatgtgctgatgtgcagaccggattcatcttctcggagctgcggcggcggctttgggctcaggcggcggcggctcgcgctcggccgcggagtcctggcagcagcggggacgcggcgcgggagtccgagctctggtggcagctgagcccgcggggcgccgctcgccgagccgcggccgcgggaagttcggcagccagaaggacgacctggcaggctgcgagcgccagcgccgccagagccgagtttgcctgcgccctccccgcctccgagtgcagagttccttacctgccctccgcccacccgtgggcccctagccaacttctccctgcgactgggggtaacaggcagtgcttgccctctctactgtcccggcggcatccacatgtttccggacacctgagcaccccggtcccgccgaggagcctccgggtggggagaagagcaccggtgcccctagccccgcacatcagcgcggaccgcggctgcctaacctctgggtcccgtcccctccttttcctccgggggaggaggatggggttgggaacgctttccccgaggatgctcgtgtggctggtggcctcggggattgttttctacggggagctatgggtctgcgctggcctcgattatgattacacttttgatgggaacgaagaggataaaacagagactatagattacaaggacccgtgtaaagccgctgtattttggggcgatattgccttagatgatgaagacttaaatatctttcaaatagataggacaattgaccttacgcagaacccctttggaaaccttggacataccacaggtggacttggagaccatgctatgtcaaagaagcgaggggccctctaccaacttatagacaggataagaagaattggctttggcttggagcaaaacaacacagttaagggaaaagtacctctacaattctcagggcaaaatgagaaaaatcgagttcccagagccgctacatcaagaacggaaagaatatggcctggaggcgttattccttatgttataggaggaaacttcactggcagccagagagccatgttcaagcaggccatgaggcactgggaaaagcacacatgtgtgactttcatagaaagaagtgatgaagagagttacattgtattcacctataggccttgtggatgctgctcctatgtaggtcggcgaggaaatggacctcaggcaatctctatcggcaagaactgtgataaatttgggattgttgttcatgaattgggtcatgtgataggcttttggcatgaacacacaagaccagatcgagataaccacgtaactatcataagagaaaacatccagccaggtcaagagtacaattttctgaagatggagcctggagaagtaaactcacttggagaaagatatgatttcgacagtatcatgcactatgccaggaacaccttctcaagggggatgtttctggataccattctcccctcccgtgatgataatggcatacgtcctgcaattggtcagcgaacccgtctaagcaaaggagatatcgcacaggcaagaaagctgtatagatgtccagcatgtggagaaactctacaagaatccaatggcaacctttcctctccaggatttcccaatggctacccttcttacacacactgcatctggagagtttctgtgaccccaggggagaagattgttttaaattttacaacgatggatctatacaagagtagtttgtgctggtatgactatattgaagtaagagacgggtactggagaaaatcacctctccttggtagattctgtggggacaaattgcctgaagttcttacttctacagacagcagaatgtggattgagtttcgtagcagcagtaattgggtaggaaaaggctttgcagctgtctatgaagcgatctgtggaggtgagatacgtaaaaatgaaggacagattcagtctcccaattatcctgatgactatcgcccgatgaaagaatgtgtgtggaaaataacagtgtctgagagctaccacgtcgggctgacctttcagtcctttgagattgaaagacatgacaattgtgcttatgactacctggaagttagagatggaaccagtgaaaatagccctttgatagggcgtttctgtggttatgacaaacctgaagacataagatctacctccaatactttgtggatgaagtttgtttctgacggaactgtgaacaaagcagggtttgctgctaacttttttaaagaggaagatgagtgtgccaaacctgaccgtggaggctgtgagcagcgatgtctgaacactctgggcagttaccagtgtgcctgtgagcctggctatgagctgggcccagacagaaggagctgtgaagctgcttgtggtggacttcttaccaaacttaacggcaccataaccacccctggctggcccaaggagtaccctcctaataagaactgtgtgtggcaagtggttgcaccaacccagtacagaatttctgtgaagtttgagttttttgaattggaaggcaatgaagtttgcaaatatgattatgtggagatctggagtggtctttcctctgagtctaaactgcatggcaaattctgtggcgctgaagtgcctgaagtgatcacatcccagttcaacaatatgagaattgaattcaaatctgacaatactgtatccaagaagggcttcaaagcacattttttctcagacaaagatgaatgctctaaggataatggtggatgtcagcacgaatgtgtcaacacgatggggagctacatgtgtcaatgccgtaatggatttgtgctacatgacaataaacatgattgcaaggaagctgagtgtgaacagaagatccacagtccaagtggcctcatcaccagtcccaactggccagacaagtacccaagcaggaaagaatgcacttgggaaatcagcgccactcccggccaccgaatcaaattagcctttagtgaatttgagattgagcagcatcaagaatgtgcttatgaccacttagaagtatttgatggagaaacagaaaagtcaccgattcttggacgactatgtggcaacaagataccagatccccttgtggctactggaaataaaatgtttgttcggtttgtttctgatgcatctgttcaaagaaaaggctttcaagccacacattctacagagtgtggcggacgattgaaagcagaatcaaaaccaagagatctgtactcacatgctcagtttggtgataacaactacccaggacaggttgactgtgaatggctattagtatcagaacggggctctcgacttgaattatccttccagacatttgaagtggaggaagaagcagactgtggctatgactatgtggagctctttgatggtcttgattcaacagctgtggggcttggtcgattctgtggatccgggccaccagaagagatttattcaattggagattcagttttaattcatttccacactgatgacacaatcaacaagaagggatttcatataagatacaaaagcataagatatccagataccacacataccaaaaaataacaccaaaacctctgtcagaacacaaaggaatgtgcataatggagagaagacatattttttttaaaactgaagatattggcacaaatgttttatacaaagagtttgaacaaaaaatccctgtaagaccagaattatctttgtactaaaagagaagtttccagcaaaaccctcatcagcattacaaggatatttgaactccatgcttgatggtattaataaagctggtgaaa

SEQ ID NO: 1815 - DNA, 5021 bp, Homo sapiens
cgcccattggctcctcagccaagcacgtacaccaaatgtctgaacctgcggttcctctcgtactgagcaggattaccatggcaacaacacatcatcagtagggtaaaactaacctgtctcacgacggtctaaacccaggcagcctcggccgccgggcaagtagctccgagcggctgcttcccggttgcctcgaagaagacagggggcgccgcgctccgcttgctccgcgcctgagccatgcccagcagccctgtgtaaccaccgagtcccggccggagccgaccgacccagtgtgcgccgtctttcggccgagctgagctttcgtgcacgcaactccctctgccccagccggccccgcgccaccatgccccgggcgactgcacttggggccctggtgtcactgctgctgctgctgccgctgcctcgcggcgccgggggactcggggagcgcccggacgccaccgcagactactcagagctggacggcgaggagggcacggagcagcagctggagcattaccacgacccttgcaaagccgctgtcttttggggagacattgccttagatgaagatgacttgaagctgtttcacattgacaaagccagagactggaccaagcagacagtgggggcaacaggacacagcacaggtgggcttgaagagcaggcatctgagagcagcccagacaccacagccatggacactggcaccaaggaagctggaaaggatggccgggagaataccacactcctgcacagccctgggaccttgcatgccgcagccaagaccttctctccccgggtccgaagagccacaacctcaaggacagagaggatatggcctggaggagtcatcccctacgtcattggagggaacttcactgggagccagagggccatttttaagcaggccatgagacactgggagaagcacacctgtgtgaccttcatagaaaggacggatgaggaaagctttattgtattcagttacagaacctgtggctgttgctcctatgttgggcgccgaggaggaggcccacaggccatatccattgggaagaactgtgacaagtttggcattgtggctcacgagctgggccatgtggttgggttttggcatgaacacacccggccagacagagaccaacatgtcaccatcatcagggaaaacatccagccaggtcaggagtataatttcttaaaaatggaagctggggaagtgagctctctgggagagacatacgactttgacagcatcatgcactacgcccggaacaccttctcaagaggagttttcttagacaccatccttccccgtcaagatgacaatggcgtcaggccaaccattggccagcgcgtgcggctcagtcagggagacatagctcaagcccggaagctgtacaaatgcccagcgtgtggggagaccctgcaggacacaacgggaaacttttctgcacctggtttcccaaatgggtacccatcttactcccactgcgtctggaggatctcggtcaccccaggggaaaagatcgtattaaacttcacatccatggatttgtttaaaagccgactgtgctggtatgattacgtggaggtccgggatggttactggagaaaagccccccttttgggcaggttttgtggcgataagatcccggagcccctcgtctccacggacagccggctctgggtggagttccgcagcagcagcaacatcttgggcaagggcttctttgcagcgtacgaagctacctgcgggggagacatgaacaaagatgccggtcagattcaatctcccaactatccggatgactacagaccttccaaggaatgtgtctggaggattacggtttcggaggggtttcacgtgggacttaccttccaagcttttgagattgaaaggcacgacagctgtgcatatgactacctggaagtccgggatggccccacggaagagagtgccctgatcggccacttttgtggctatgagaagccggaggatgtgaaatcgagctccaacagactgtggatgaagtttgtgtccgatggctctatcaataaagcgggctttgcagccaattttttcaaggaggtggatgagtgttcctggccagatcacggcgggtgcgaacatcgctgtgtgaacacgctgggcagctacaagtgtgcctgtgaccctggctacgagctggccgccgataagaagatgtgtgaagtggcctgtggcggtttcattaccaagctgaatggaaccatcaccagccctgggtggccgaaggagtatcccacaaacaaaaactgtgtctggcaggtggtggcccccgctcagtaccggatctcccttcagtttgaagtgtttgaactggaaggcaatgacgtctgtaagtacgactttgtagaggtgcgcagcggcctgtcccccgacgccaagctgcacggcaggttctgcggctctgagacgccggaagtcatcacctcgcagagcaacaacatgcgcgtggagttcaagtccgacaacaccgtctccaagcgcggcttcagggcccacttcttctcagataaggacgagtgtgccaaggacaacggcgggtgtcagcatgagtgcgtcaacaccttcgggagctacctgtgcaggtgcagaaacggctactggctccacgagaatgggcatgactgcaaagaggctggctgtgcacacaagatcagcagtgtggaggggaccctggcgagccccaactggcctgacaaataccccagccggagggagtgtacctggaacatctcttcgactgcaggccacagagtgaaactcacctttaatgagtttgagatcgagcagcaccaggaatgtgcctatgaccacctggaaatgtatgacgggccggacagcctggcccccattctgggccgtttctgcggcagcaagaaaccagaccccacggtggcttccggcagcagtatgtttctcaggttttattcggatgcctcagtgcagaggaaaggcttccaggcagtgcacagcacagagtgcgggggcaggctgaaggctgaagtgcagaccaaagagctctattcccacgcccagtttggggacaacaactacccgagcgaggcccgctgtgactgggtgatcgtggcagaggacggctacggcgtggagctgacattccggacctttgaggttgaggaggaggccgactgcggctacgactacatggaagcctacgacggctacgacagctcagcgcccaggctcggccgcttctgtggctctgggccattagaagaaatctactctgcaggtgattccctgatgattcgattccgcacagatgacaccatcaacaagaaaggctttcatgcccgatacaccagcaccaagttccaggatgccctgcacatgaagaaatagtgctgatgttcttgaaagacagaaactgagaatttttttgttttgttttgtttttaacaacaatagcaccttgaaaatctgccctaaaacagtgtacagtatttttctcaaacaaaaactcagaatccagccttagaggtatatatttgaatgaaagtcttgtaagtttggccaacaaggtggagaaaaaaatgttcttttgcttctgtctgcaatgttgtcattcatgaactgttaaagtgttaaagattaggattggagtcactgaccattccggctatgcttcttcataccattctccttgttgtcccttgctcctatgtggcaaaaggtcagccttggggttggccgttcctctaatctggacttgcttgcaaaggtgccaggctgtcttctgtccatgttgggcataagggatgaaaacttggccgagactaatgtgtggcccacagctttggctggaatcattttctttctctctgccagggacatgtcaaccaagaaacctgaaaatatggatggatgtcaggactaaaaaaaggcatcacagtgagcagtgagcacagagggagtttcgagtataagaatcattgtcatgaagttaggagaccacaaagccatttctcagagtcattcactctccttgtccctttggtttccccccttccttaattgcagtgggggctaaggtatccattatgaatacagcagaacatttgctggcgagagtcctgtctgctgagaagacaatattgtggctcgtcctgatattttttcattcattgactttgagaagactccacctgtgcttggaattccatgggcttcaaagaacatttcttcttttagctttggaggcacttgccgtggcacacctggactccttgacatccaattcaaactgcatttgcaaaatgtgcaaagacctcttatgagggaccaattcaggtcccttatggggtgaacactgttgaagactggttaattataagttatgtaagaatcatcgccttgtggaacaagtcaatcagtgactagcttcctgtagccaatcaggttaaagagggcgttggtaattttgttctgatttaactagtattcaatcaccaacttgcaaacagaattcataacacttggcacttgttctagagaagtgtagaggatgatgttaacataattttagcacttcaaggtataatttaaacagtgaggtagttttgaatggcatttcattaaggcatctatgggcattatgagctaaaagctgtggtatgttagctttaaaagagtatttatgttggaataatttttaaataatgtttacataactgtaagtcctgtttggttgttgttggacgcagggcggcacatgagtgtttttggttagagccaagatagctcccatgcaccggaattcctttgggatgaatcagcatcattttaaacaaagtatatgtaaaaggtgaaaggttatattttttacagatcagaatgtggcaccagaggactgtgtctcattaaagtgattgctgggagcaaaaactagaatgatacaaagaaaggtcagagaaatgcatgggaatattttttctttaaaaaaaaaaaaaaa

SEQ ID NO: 1816 - DNA, 1199 bp, Homo sapiens
ccgggcaggtattcaagtgattctcccatctcggtctcctgagtagctgggactacaggtgcatgccactaagccccatggcccttggggcctgtggcctcctgctgctcctggctgtgcccggtgtgtccctcaggactttgcagccagggtgtggccggccgcaggtttcggatgcaggcggccggatcgtggggggtcacgctgccccggccggcgcatggccatggcaggccagcctccgcctgcggaggatgcacgtgtgcggcgggtcactgctcagcccccagtgggtgctcacagctgcccactgcttctccgggtccctgaactcatccgactaccaggtgcacctgggggaactggagatcactttgtctccccacttctccaccgtgaggcagatcatcctgcactccagcccctcaggacagccggggaccagcggggacatcgccctggtggagctcagtgtccccgtgaccctctccagccggatcctgcccgtctgcctcccggaggcctcagatgacttctgccctgggatccggtgctgggtgaccggctggggctatacgcgggagggagagcctctgccacccccgtacagcctgcgggaggtgaaagtctccgtggtggacacagagacctgccgccgggactatcccggccccgggggcagcatccttcagcccgacatgctgtgtgcccggggccccggggatgcctgccaggacgactccggggggcctctggtctgccaggtgaacggtgcctgggtgcaggctggcattgtgagctggggtgagggctgcggccgccccaacaggccgggagtctacactcgtgtccctgcctacgtgaactggatccgccgccacatcacagcatcagggggctcagagtctgggtaccccaggctccccctcctggctggcttattcctccccggcctcttccttctgctagtctcctgtgtcctgctggccaagtgcctgctgcacccatctgcggatggtactcccttccccgcccctgactgatggcaggaatccaagtgcatttcttaaataagttactatttattccgctccgccccctccctctcccttgagaagctgagtcttctgcatcagattattgcaacatttaacctgaatttaaaagcacacgaaacaaaaaaaaaaaaaaaaaaaaaa

SEQ ID NO: 1817 - DNA, 1868 bp, Homo sapiens
tagggggtggccctgaactggggcctggccctggctggcctctcccgccgcctcactgggggacaggtccagcctgtggtgtccacaatgccccaggcctctgagcaccgcctgggccgtacccgagagccacctgttaatatccagccccgagtgggatccaagctaccatttgcccccagggcccgcagcaaggagcgcagaaacccagcctctgggccaaaccccatgttacgacctctgcctccccggccaggtctgcctgatgaacggctcaagaaactggagctgggacggggacggacctcaggccctcgtcccagaggcccccttcgagcagatcatggggttcccctgcctggctcaccacccccaacagtggctttgcctctcccatctcggaccaacttagcccgttccaagtctgtgagcagtggggacttgcgtccaatggggattgccttgggagggcaccgtggcaccggagagcttggggctgcactgagccgcttggccctccggcctgagccacccactttgagacgtagcacttctctccgccgcctagggggctttcctggaccccctaccctgttcagcatacggacagagccccctgcttcccatggctccttccacatgatatccgcccggtcctctgagcctttctactctgatgacaagatggctcatcacacactccttctgggctctggtcatgttggccttcgaaacctgggaaacacgtgcttcctgaatgctgtgctgcagtgtctgagcagcactcgacctcttcgggacttctgtctgagaagggacttccggcaagaggtgcctggaggaggccgagcccaagagctcactgaagcctttgcagatgtgattggtgccctctggcaccctgactcctgcgaagctgtgaatcctactcgattccgagctgtcttccagaaatatgttccctccttctctggatacagccagcaggatgcccaagagttcctgaagctcctcatggagcggctacaccttgaaatcaaccgccgaggccgccgggctccaccgatacttgccaatggtccagttccctctccaccccgccgaggaggggctctgctagaagaacctgagttaagtgatgatgaccgagccaacctaatgtggaaacgttacctggagcgagaggacagcaagattgtggacctgtttgtgggccagttgaaaagttgtctcaagtgccaggcctgtgggtatcgctccacgaccttcgaggttttttgtgacctgtccctgcccatccccaagaaaggatttgctgggggcaaggtgtctctgcgggattgtttcaaccttttcactaaggaagaagagctagagtcggagaatgccccagtgtgtgaccgatgtcggcagaaaactcgaagtaccaaaaagttgacagtacaaagattccctcgaatcctcgtgctccatctgaatcgattttctgcctcccgaggctccatcaaaaaaagttcagtaggtgtagactttccactgcagcgactgagcctaggggactttgccagtgacaaagccggaagtcctgtataccagctgtatgccctttgcaaccactcaggcagcgtccactatggccactacacagccctgtgccggtgccagactggttggcatgtctacaatgactctcgtgtctcccctgtcagtgaaaaccaggtggcatccagcgagggctacgtgctgttctaccaactgatgcaggagccaccccggtgcctgtgacacctctaagctctggcacctgtgaagccctttaaacacccttaagccccaggctccccgtttacctcagagacgtctatttt

SEQ ID NO: 1818 - DNA, 1971 bp, Homo sapiens
ggctcagcctagagctctccggcggcggcgcagcttcagggcagcgcgggctgcagcggcggcggcggttagggctgtgtagggcgaggcctcccccttcctcctcgccatcctactcctccctcctcgtcatcctcccccttcgtcctcctcgccttcctcctcctcgtcaggctcgacccagctgtgagcggcaagatggcggcgcccaggccgccgcctgccaggctgtcgggcgtcatggtgccggcgcccatccaagacctggaggccctgcgcgcgctcacggcgctcttcaaagagcagcggaaccgagaaacagcacccaggactatcttccaaagagttctggatatcctaaagaaatcttctcatgctgttgagcttgcctgcagagatccatcccaagtggaaaacctggcttccagtctgcagttaataacagaatgcttcaggtgtcttcgcaatgcttgcatagagtgttctgtgaaccagaattcaatcaggaacttggatacgattggtgttgctgttgatttgattcttctgtttcgtgaactgcgagtggaacaggaatctctgttgacagcttttcgctgtggcctgcagtttttaggcaacattgcctcacggaatgaagattcccagtctattgtttgggtgcatgctttcccagaactgtttttgtcttgcttaaatcatccggacaaaaaaattgttgcctactcttcaatgattttgtttacatcccttaatcatgaaagaatgaaagaactggaggagaacctcaatattgcaattgatgtcatagatgcttaccaaaaacatcctgaatcagaatggccgttcttgattattacagacctctttctgaaaagcccggaattggtacaagccatgtttcccaaactgaacaatcaagaaagagttacactgttagaccttatgatagccaagataacgagtgatgagccactcaccaaggatgacatccctgtgtttttgcggcatgctgagttgattgcaagcacctttgtggatcagtgcaagactgtgctcaagctggcctctgaggagcctcctgatgatgaggaggcactggctacaattaggcttctcgacgtcctgtgcgaaatgactgtgaatactgagctgctcggctatctgcaggttttccctggcttgctggaaagagtgattgatcttttgcgggtgattcatgtagctggaaaagaaaccacaaacatcttcagtaattgtggttgcgtgagagcagaaggtgacatctccaatgtggccaatgggtttaagtctcatctcattcgtctgattggaaatctgtgttacaagaataaagataaccaagacaaggtaaatgagctggatggtatcccgttgatcctggacaactgcaacatcagtgacagtaacccctttctgacccagtgggtgatatatgccatccgaaaccttaccgaagacaacagccaaaaccaagatttgattgcaaagatggaggaacaggggctggcagatgcatccctacttaaaaaagtgggttttgaagttgaaaagaaaggcgaaaagctgatcctgaaatctactagagacacccctaagccatgaatgaactacatccaaatacctgaatttttggaatctgtttcatggatttttcatcttctaccgtatgtgaaattgcaagtgtttgaagatttataagtacaaatttgggaacatacaaatcttttaggtagtagagtttaacgtgtataagctaaaagtgaaagtaactgagtgttctcttgtttctttgcattaatgtaactgtgtggtttgcctttgtccccctggatagaacgtgcatttaaagaatatattgtacttactgtgacagcagataataaaccagtctcttggagggcaaaaaaaaaaaaaaaaaaaaaaaaaaaaaaaaaaaaaaaaaaaaaa

SEQ ID NO: 1819 - DNA, 1597 bp, Homo sapiens
cagccaaggcggagctgatggctgcgccgagggcggggcggggtgcaggctggagccttcgggcatggcgggctttggggggcattcgctgggggaggagaccccgtttgacccctgacctccgggccctgctgacgtcaggaacttctgacccccgggcccgagtgacttatgggacccccagtctctgggcccggttgtctgttggggtcactgaaccccgagcatgcctgacgtctgggaccccgggtccccgggcacaactgactgcggtgaccccagataccaggacccgggaggcctcagagaactctggaacccgttcgcgcgcgtggctggcggtggcgctgggcgctgggggggcagtgctgttgttgttgtggggcgggggtcggggtcctccggccgtcctcgccgccgtccctagcccgccgcccgcttctccccggagtcagtacaacttcatcgcagatgtggtggagaagacagcacctgccgtggtctatatcgagatcctggaccggcaccctttcttgggccgcgaggtccctatctcgaacggctcaggattcgtggtggctgccgatgggctcattgtcaccaacgcccatgtggtggctgatcggcgcagagtccgtgtgagactgctaagcggcgacacgtatgaggccgtggtcacagctgtggatcccgtggcagacatcgcaacgctgaggattcagactaaggagcctctccccacgctgcctctgggacgctcagctgatgtccggcaaggggagtttgttgttgccatgggaagtccctttgcactgcagaacacgatcacatccggcattgttagctctgctcagcgtccagccagagacctgggactcccccaaaccaatgtggaatacattcaaactgatgcagctattgattttggaaactctggaggtcccctggttaacctggatggggaggtgattggagtgaacaccatgaaggtcacagctggaatctcctttgccatcccttctgatcgtcttcgagagtttctgcatcgtggggaaaagaagaattcctcctccggaatcagtgggtcccagcggcgctacattggggtgatgatgctgaccctgagtcccagcatccttgctgaactacagcttcgagaaccaagctttcccgatgttcagcatggtgtactcatccataaagtcatcctgggctcccctgcacaccgggctggtctgcggcctggtgatgtgattttggccattggggagcagatggtacaaaatgctgaagatgtttatgaagctgttcgaacccaatcccagttggcagtgcagatccggcggggacgagaaacactgaccttatatgtgacccctgaggtcacagaatgaatagatcaccaagagtatgaggctcctgctctgatttcctcctttcctttctggctgaggttctgagggcaccgagacagagggttaaatgaaccagtgggggcaggtccctccaaccaccagcactgactcctaggcttctgaacaatcacagaaacactttttatataaaataaaattatacctagcaaaaaaaaaaaaaa

SEQ ID NO: 1820 - DNA, 2479 bp, Homo sapiens
  misc_feature (1146)..(1146): n is a, c, g, or t
ggcacgagggggcggcggctgcgggcgcagagcggagatgcagcggcttggggccaccctgctgtgcctgctgctggcggcggcggtccccacggcccccgcgcccgctccgacggcgacctcggctccagtcaagcccggcccggctctcagctacccgcaggaggaggccaccctcaatgagatgttccgcgaggttgaggaactgatggaggacacgcagcacaaattgcgcagcgcggtggaagagatggaggcagaagaagctgctgctaaagcatcatcagaagtgaacctggcaaacttacctcccagctatcacaatgagaccaacacagacacgaaggttggaaataataccatccatgtgcaccgagaaattcacaagataaccaacaaccagactggacaaatggtcttttcagagacagttatcacatctgtgggagacgaagaaggcagaaggagccacgagtgcatcatcgacgaggactgtgggcccagcatgtactgccagtttgccagcttccagtacacctgccagccatgccggggccagaggatgctctgcacccgggacagtgagtgctgtggagaccagctgtgtgtctggggtcactgcaccaaaatggccaccaggggcagcaatgggaccatctgtgacaaccagagggactgccagccggggctgtgctgtgccttccagagaggcctgctgttccctgtgtgcacacccctgcccgtggagggcgagctttgccatgaccccgccagccggcttctggacctcatcacctgggagctagagcctgatggagccttggaccgatgcccttgtgccagtggcctcctctgccagccccacagccacagcctggtgtatgtgtgcaagccgaccttcgtggggagccgtgaccaagatggggagatcctgctgcccagagaggtccccgatgagtatgaagttggcagcttcatggaggaggtgcgccaggagctggaggacctggagaggagcctgactgaagagatggcgctgggggagcctgcggctgccgccgctgcactgctgggaggggaagagatttagatctggaccaggctgtgggtagatgtgcaatagaaatagctaatttatttccccangtgtgtgctttaagcgtgggctgaccaggcttcttcctacatcttcttcccagtaagtttcccctctggcttgacagcatgaggtgttgtgcatttgttcagctcccccaggctgttctccaggcttcacagtctggtgcttgggagagtcaggcagggttaaactgcaggagcagtttgccacccctgtccagattattggctgctttgcctctaccagttggcagacagccgtttgttctacatggctttgataattgtttgaggggaggagatggaaacaatgtggagtctccctctgattggttttggggaaatgtggagaagagtgccctgctttgcaaacatcaacctggcaaaaatgcaacaaatgaattttccacgcagttctttccatgggcataggtaagctgtgccttcagctgttgcagatgaaatgttctgttcaccctgcattacatgtgtttattcatccagcagtgttgctcagctcctacctctgtgccagggcagcattttcatatccaagatcaattccctctctcagcacagcctggggagggggtcattgttctcctcgtccatcagggatttcagaggctcagagactgcaagctgcttgcccaagtcacacagctagtgaagaccagagcagtttcatctggttgtgactctaagctcagtgctctctccactaccccacaccagccttggtgccaccaaaagtgctccccaaaaggaaggagaatgggatttttcttttgaggcatgcacatctggaattaaggtcaaactaattctcacatccctctaaaagtaaactactgttaggaacagcagtgttctcacagtgtggggcagccgtccttctaatgaagacaatgatattgacactgtccctctttggcagttgcattagtaactttgaaaggtatatgactgagcgtagcatacaggttaacctgcagaaacagtacttaggtaattgtagggcgaggattataaatgaaatttgcaaaatcacttagcagcaactgaagacaattatcaaccacgtggagaaaatcaaaccgagcagggctgtgtgaaacatggttgtaatatgcgactgcgaacactgaactctacgccactccacaaatgatgttttcaggtgtcatggactgttgccaccatgtattcatccagagttcttaaagtttaaagttgcacatgattgtataagcatgctttctttgagttttaaattatgtataaacataagttgcatttagaaatcaagcataaatcacttcaactgctaaaaaaaaaaaaaaaaaaaaaaaaaaaaaaa

SEQ ID NO: 1821 - DNA, 2546 bp, Homo sapiens
ttcctttccagcctcacgcccgtgggctgcagttggaacgatggcggcggcagctgccgccgggcctagcccggggtctggacctggggactccccagaagggcccgagggggaggctccggagcgtcggcggaaggcgcacgggatgctgaagctttactacggcctctcggaaggggaggcggcgggacgccccgcggggcccgaccccctggacccgactgatctgaacggggcgcacttcgacccggaagtttacctagacaagctgcgtagagagtgccctctggcccagttgatggacagtgagacggacatggtgcggcagatccgggctctagacagcgacatgcagaccctggtctatgagaactacaacaagttcatctcagccacagacaccatccggaagatgaagaacgatttccggaagatggaggatgagatggaccggctggccaccaacatggcagtgatcaccgacttcagcgctcgcatcagcgccacgctgcaggaccgccacgagcgcatcaccaagctggcaggggtccacgcgctgctgcggaagctgcagttcctctttgagctgccctcgcgcctcaccaagtgcgtggaactgggcgcctatgggcaggcggtgcgctaccagggccgcgcgcaggccgtgctgcagcagtaccaacacctgccctcgttccgcgccatccaggacgactgccaggtcatcacggcccgcctggcccagcagctgcggcagcgctttagggagggcggctcaggcgccccggagcaggcagagtgcgtggagctgctgctggccctgggcgagcctgcggaggagctgtgcgaggagttcctggcgcacgcccgcggccggctggagaaggagctgagaaacctggaggccgagctggggccctcacctccggctcccgacgtgttagagttcaccgaccatggaggcagtggcttcgtgggcggcctctgccaggtggcggcggcctaccaggagctgtttgcggcccagggcccagcaggtgccgagaagctggcggccttcgcccggcagctgggcagccgctattttgcgctggtggagcggcggctggcgcaggagcagggtggtggtgacaactcactgctggtgcgggcgctggaccgcttccaccggcgcttgcgggctcccggggccctgctggccgctgccgggctcgcagacgctgccacggagatcgtggaacgagtggcccgcgagcgcctgggccaccacctgcagggtctccgggcggccttcctgggctgcctgacagacgtccgccaggcgctggcagcacctcgcgtggctgggaaggagggccctggcctggccgagttgctggccaatgtggccagctccatcctgagccacattaaggcctctctggcagcagtgcaccttttcaccgccaaagaggtgtccttctccaacaagccctacttccggggtgagttctgcagtcagggtgtccgtgagggcctcatcgtgggcttcgtccactctatgtgccagacggctcagagcttctgcgacagccctggggagaaggggggtgccacaccacctgccctgctcctgctgctctcccgcctctgcctggactacgagacggccaccatctcctacatcctcactctcactgatgaacagtttctggtgcaggatcagttcccagtgacgcccgtgagcacgctgtgtgcagaggccagggaaacggcgcggcggctgctgacccactacgtgaaggtgcagggcctggtcatatcacagatgctgcgcaagagcgtggagactcgcgactggctcagcactctggagccccggaatgtgcgggccgtcatgaagcgggtggtggaggataccaccgccatcgacgtgcaggtggggctcctgtacgaagagggtgttcgcaaggcccagagcagcgactccagcaagaggactttctccgtgtacagcagctctcggcagcagggccgctacgcccccagctatacccccagtgccccgatggacaccaacctcttgagcaatatccagaagctattctctgaacgtattgatgtgttcagccctgtggagttcaacaaggtgtcggtgctgaccggcatcatcaagatcagcctgaagacgctgctggagtgtgtgcggctgcgcacctttgggcgcttcgggctgcagcaggtgcaagtggactgccactttctgcagctctacctgtggcgttttgtggccgacgaagaactcgtgcacttgctgctggacgaagtggtggcctctgctgccctgcgctgcccagaccctgtgcccatggagcccagtgtggttgaggtcatctgcgagcgcggctaggcgcagccgctgccatgcaccggtctgtccctgcaccccatggcacccaggatctggtctcggtggtccttccccgcaggcaggtgtcaggaccggcctaataaacatgtgtggcctcctcaaaaaaaaaaaaaaaaaaaaaaaaaaaaaaaaaaaa

SEQ ID NO: 1822 - DNA, 1240 bp, Homo sapiens
gtcgtgggggcggcactgggagcgccttccggagagacgcagtcggctgccaccccgggatgggtcgctggtgccagaccgtcgcgcgcgggcagcgcccccggacgtctgccccctcccgcgccggtgccctgctgctgctgcttctgttgctgaggtctgcaggttgctggggcgcaggggaagccccgggggcgctgtccactgctgatcccgccgaccagagcgtccagtgtgtccccaaggccacctgtccttccagccggcctcgccttctctggcagaccccgaccacccagacactgccctcgaccaccatggagacccaattcccagtttctgaaggcaaagtcgacccataccgctcctgtggcttttcctacgagcaggaccccaccctcagggacccagaagccgtggctcggcggtggccctggatggtcagcgtgcgggccaatggcacacacatctgtgccggcaccatcattgcctcccagtgggtgctgactgtggcccactgcctgatctggcgtgatgttatctactcagtgagggtggggagtccgtggattgaccagatgacgcagaccgcctccgatgtcccggtgctccaggtcatcatgcatagcaggtaccgggcccagcggttctggtcctgggtgggccaggccaacgacatcggcctcctcaagctcaagcaggaactcaagtacagcaattacgtgcggcccatctgcctgcctggcacggactatgtgttgaaggaccattcccgctgcactgtgacgggctggggactttccaaggctgacggcatgtggcctcagttccggaccattcaggagaaggaagtcatcatcctgaacaacaaagagtgtgacaatttctaccacaacttcaccaaaatccccactctggttcagatcatcaagtcccagatgatgtgtgcggaggacacccacagggagaagttctgctatgagctaactggagagcccttggtctgctccatggagggcacgtggtacctggtgggattggtgagctggggtgcaggctgccagaagagcgaggccccacccatctacctacaggtctcctcctaccaacactggatctgggactgcctcaacgggcaggccctggccctgccagccccatccaggaccctgctcctggcactcccactgcccctcagcctccttgctgccctctgactctgtgtgccctccctcacttg

SEQ ID NO: 1823 - DNA, 990 bp, Homo sapiens
tccggagcccggctcgctggggcagcatggcggggtcgccgctgctctgggggccgcgggccgggggcgtcggccttttggtgctgctgctgctcggcctgtttcggccgccccccgcgctctgcgcgcggccggtaaaggagccccgcggcctaagcgcagcgtctccgcccttggctgagactggcgctcctcgccgcttccggcggtcagtgccccgaggtgaggcggcgggggcggtgcaggagctggcgcgggcgctggcgcatctgctggaggccgaacgtcaggagcgggcgcgggccgaggcgcaggaggctgaggatcagcaggcgcgcgtcctggcgcagctgctgcgcgtctggggcgccccccgcaactctgatccggctctgggcctggacgacgaccccgacgcgcctgcagcgcagctcgctcgcgctctgctccgcgcccgccttgaccctgccgccctcgcagcccagcttgtccccgcgcccgtccccgccgcggcgctccgaccccggcccccggtctacgacgacggccccgcgggcccggatgctgaggaggcaggcgacgagacacccgacgtggaccccgagctgttgaggtacttgctgggacggattcttgcgggaagcgcggactccgagggggtggcagccccgcgccgcctccgccgtgccgccgaccacgatgtgggctctgagctgccccctgagggcgtgctgggggcgctgctgcgtgtgaaacgcctagagaccccggcgccccaggtgcctgcacgccgcctcttgccaccctgagcactgcccggatcccgtgcaccctgggacccagaagtgcccccgccatcccgccaccaggactgctccccgccagcacgtccagagcaacttaccccggccagccagccctctcacccgaggatccctaccccctggccccacaataaacatgatctgaagcaaaaaaaaaaaaaaaaaa

SEQ ID NO: 1824 - DNA, 2740 bp, Homo sapiens
ggcggcggcggcggcggcgaagaactgttccttccacctcttcagccccggcaggacgggggcggccgccgcgaacccggggcggggacagcacgcagcctcgaggcgcgcacccccgcccggcagcggccccgacacccggggcgagcgggaaaacggcaacggcggcggcggcggcggcggcgggggaaggatgcaggggaagaagccgggcggttcgtcgggcggcggccggagcggcgagctgcagggggacgaggcgcagaggaacaagaaaaagaaaaagaaggtgtcctgcttttccaacatcaagatcttcctggtgtccgagtgcgccctgatgctggcgcagggcacggtgggcgcctacctggtgagcgtcctgaccaccctggagcgtaggttcaacctgcagagcgctgacgtgggtgtgatcgctagcagcttcgagatcgggaacctggcgctcatcctcttcgtgagctacttcggggcacgcgggcaccggccgcgcctgatcggctgcggcggcatcgtcatggcgctgggcgcgctgctgtcggcgctgcccgagttcctgacccaccagtacaagtacgaggcgggcgagatccgctggggcgccgagggccgcgacgtctgcgcagccaacggctcgggcggcgacgaggggcccgaccccgacctcatctgccgcaaccggacggctaccaacatgatgtacttgctgctcattggggcccaggtgctcctgggcatcggtgctacccctgtgcagcccctgggcgtctcctactacgacgaccacgtgcggaggaaggactcctcgctctatataggaatcctgttcacgatgctggtatttggaccagcctgcgggtttatcctgggctctttctgtaccaaaatctacgtggatgcggtcttcattgacacaagtaacctggacatcactccggacgacccccgctggatcggagcctggtggggtggctttctgctctgcggtgccttactcttcttctcttccctcttgatgtttgggtttccacagtccctgcccccgcactcagaccccgccatggaaagcgagcaggccatgctctccgaaagagaatacgagagacccaagcccagcaacggggtcctgaggcaccccctggagccagacagcagtgcctcctgtttccagcagctgagagtgatcccgaaggtcaccaagcacctgctctcaaaccctgtgttcacctgcatcatcctggccgcctgcatggagattgcagtggtggctggcttcgctgcctttttggggaagtacctggagcagcagtttaacctcaccacctcttctgccaaccagctgcttgggatgactgcgatcccgtgtgcttgtctgggtatcttcctgggaggtcttttggtgaagaagctcagcctgtctgccctgggggccattcggatggccatgctcgtcaacctggtgtccactgcttgctacgtctccttcctcttcctgggctgcgacactggccctgtggctggggttactgttccctatggaaacagcacagcacctggctcagccctggacccctactcgccctgcaataataactgtgaatgccaaaccgattccttcactccagtgtgtggggcagatggcatcacctacctgtctgcctgctttgctggctgcaacagcacgaatctcacgggctgtgcgtgcctcaccaccgtccctgctgagaacgcaaccgtggttcctggaaaatgccccagtcctgggtgccaagaggccttcctcactttcctctgtgtgatgtgtatctgcagcctgatcggtgccatggcacagacaccctcagtcatcatcctcatcaggacagtcagccctgaactcaagtcttacgctttgggagttctttttctcctccttcgtttgttgggcttcatccctccacccctcatcttcggggctggcatcgactccacctgcctgttctggagcacgttctgtggggagcaaggcgcctgcgtcctctacgacaatgtggtctaccgatacctgtatgtcagcatcgccatcgcgctcaaatccttcgccttcatcctgtacaccaccacgtggcagtgcctgaggaaaaactataaacgctacatcaaaaaccacgagggcgggctgagcaccagtgagttctttgcctctactctgaccctagacaacctggggagggaccctgtgcccgcaaaccagacacataggacaaagtttatctataacctggaagaccatgagtggtgtgaaaacatggagtccgttttatagtgactaaaggagggctgaactctgtattagtaatccaagggtcatttttttcttaaaaaaagaaaaaaaggttccaaaaaaaaccaaaactcagtacacacacacaggcacagatgcacacacacgcagacagacacaccgactttgtcctttttctcagcatcagagccagacaggattcagaataaggagagaatgacatcgtgcggcagggtcctggaggccactcgcgcggctgggccacagagtctactttgaaggcacctcatggttttcaggatgctgacagctgcaagcaacaggcactgccaaattcagggaacagtggtggccagcttggaggatggacatttctggatacacatacacatacaaaacagaaaacattttttaaaagaagtttcctaaaataaa

SEQ ID NO: 1825 - DNA, 2678 bp, Homo sapiens
ctgctggtaagtggtctattcctgcccacccccgggtgactagcttggccagtagtcgaccccacccggggaccgactctgggggttggagagactcttggggccggggtcgggcactccagctttcttctagccccgagctgggattccctggcctgcgccagctgcgtacacggcgagtacaccgcacctgcccgggacttcacccgcagctgcgagactcctccattcccggagggctccccacacctgctgcggccgtgccccatctccccgcagctgcggcgctgagcacccccatgtcgagaggctgagaccaggacagcagccctgaccaacgctccaataggccgggatccagccatacttcaatggatcccaggggtatcttgaaggcatttcccaagcggcagaaaattcatgctgatgcatcatcaaaagtacttgcaaagattcctaggagggaagagggagaagaagcagaagagtggctgagctcccttcgggcccatgttgtgcgcactggcattggacgagcccgggcagaactctttgagaagcagattgttcagcatggcggccagctatgccctgcccagggcccaggtgtcactcacattgtggtggatgaaggcatggactatgagcgagccctccgccttctcagactaccccagctgcccccgggtgctcagctggtgaagtcagcctggctgagcttgtgccttcaggagaggaggctggtggatgtagctggattcagcatcttcatccccagtaggtacttggaccatccacagcccagcaaggcagagcaggatgcttctattcctcctggcacccatgaggccctgcttcagacagccctttctcctcctcctcctcccaccaggcctgtgtctcctccccaaaaggcaaaagaggcaccaaacacccaagcccagcccatctctgatgatgaagccagtgatggggaagaaacccaggttagtgcagctgatctggaagccctcatcagtggccactaccccacctcccttgagggagattgtgagcctagcccagcccctgctgtcctggataagtgggtctgtgcacagccctcaagccagaaggcgaccaatcacaacctccatatcacagagaagctggaagttctggccaaagcctacagtgttcagggagacaagtggagggccctgggctatgccaaggccatcaatgccctcaagagcttccataagcctgtcacctcgtaccaggaggcctgcagtatccctgggattgggaagcggatggctgagaaaatcatagagatcctggagagcgggcatttgcggaagctggaccatatcagtgagagcgtgcctgtcttggagctcttctccaacatctggggagctgggaccaagactgcccagatgtggtaccaacagggcttccgaagtctggaagacatccgcagccaggcctccctgacaacccagcaggccatcggcctgaagcattacagtgacttcctggaacgtatgcccagggaggaggctacagagattgagcagacagtccagaaagcagcccaggcctttaactctgggctgctgtgtgtggcatgtggttcataccgacggggaaaggcgacctgtggtgatgtcgacgtgctcatcactcacccagatggccggtcccaccggggtatcttcagccgcctccttgacagtcttcggcaggaagggttcctcacagatgacttggtgagccaagaggagaatggtcagcaacagaagtacttgggggtgtgccggctcccagggccagggcggcggcaccggcgcctggacatcatcgtggtgccctatagcgagtttgcctgtgccctgctctacttcaccggctctgcacacttcaaccgctccatgcgagccctggccaaaaccaagggcatgagtctgtcagaacatgccctcagcactgctgtggtccggaacacccatggctgcaaggtggggcctggccgagtgctgcccactcccactgagaaggatgtcttcaggctcttaggcctcccctaccgagaacctgctgagcgggactggtgacccatggctgggggtgctgaggagagccgagttggactggctacccctcctggccacccagtactccctccagcctcagctggctgaacctcgccgctccaaccaccagcttcctcagcgagcagggcccagggctctgggcctgaagcaagagccagcccggctcccagtgtctgcccggctcccagtgtctgcccagccctctcccagacaggagcaggctgccaccccttctacctcaccactgcccctcgaagaattttgcaaatggccccttgccccattttaagcaggagcaggtggctggtttgaagccccaggtatcccccttccctgctatgggaaaggccaagctgctgggtggggacagaagctgcaggggagagggaagcagccgtgctgtcaacatcatccggcaccctctggggtaggagaacagccattccacatgtgttccctctatccgtcctgcttcctgggcagctggtggtgctgggaatggggtgccccagccttggtgaggacagtgttgggaggcccaggggcccagtaaagtgcatttgacattgaaaaaaaaaa

SEQ ID NO: 1826 - DNA, 1603 bp, Homo sapiens
ggccgcgggctgcatgggcagcgcccgcgccccgccgctgagccgtcgcggagccgcgcagccctcggagcacgaatatatacagccctgctctgggacacacctccattggatttaaaagacagtcctcgtcagcactgactttcagctatggaatcgcagacggttgatgatgaagcgccggccgtgtaaatgaagatcgggtgaggagcaggacgatgcccaagggtgggtgccctaaagcaccacagcaggaagagcttcccctcagcagcgacatggtggagaagcagactgggaaaaaggataaagataaagtttctctaaccaagaccccaaaactggagcgtggcgatggcgggaaggaggtgagggagcgagccagcaagcggaagctgcccttcaccgcgggcgccaatggggagcagaaggactcggacacagagaagcagggccctgagcggaagaggattaagaaggagcctgtcacccggaaggccgggctgctgtttggcatggggctgtctggaatccgagccggctaccccctctccgagcgccagcaggtggcccttctcatgcagatgacggccgaggagtctgccaacagcccagtggacacaacaccaaagcacccctcccagtctacagtgtgtcagaagggaacgcccaactctgcctcaaaaaccaaagataaactgaacaagagaaacgagcgtggagagacccgcctgcaccgagccgccatccgcggggacgcccggcgcatcaaagagctcatcagcgagggggcagacgtcaacgtcaaggacttcgcaggctggacggcgctgcacgaggcctgtaaccggggctactacgacgtcgcgaagcagctgctggctgcaggtgcggaggtgaacaccaagggcctagatgacgacacgcctttgcacgacgctgccaacaacgggcactacaaggtggtgaagctgctgctgcggtacggagggaacccgcagcagagcaacaggaaaggcgagacgccgctgaaagtggccaactcccccacgatggtgaacctcctgttaggcaaaggcacttacacttccagcgaggagagctcgacggagagctcagaagaggaagacgcaccatccttcgcaccttccagttcagtcgacggcaacaacacggactccgagttcgaaaaaggctcaagcacaaggccaagaacccagagccacagaaggccacggcccccgtcaaggacgagtatgagtttgatgaggacgacgagcaggacagggttcctccggtggacgacaagcacctattgaaaaaggactacagaaaagaaacgaaatccaatagttttatctctatacccaaaatggaggttaaaagttacactaaaaataacacgattgcaccaaagaaagcgtcccatcgtatcctgtcagacacgtcggacgaggaggacgcgagtgtcaccgtggggacaggagagaagctgagactctcggcacatacgatattgcctggtagtaagacacgagagccttctaatgccaagcagcagaaggaaaaaaaaaaaaaaaaaaaatgagcgcctcgtgccgaa

SEQ ID NO: 1827 - DNA, 2054 bp, Homo sapiens
gggggaggcccgcgtcgatcctgggttggaggaggtggcggccgctgaggctgcggcgtgaagacggcgggcatggtggggcgggagaaagagctctctatacactttgttcccgggagctgtcggctggtggaggaggaagttaacatccctaataggagggttctggttactggtgccactgggcttcttggcagagctgtacacaaagaatttcagcagaataattggcatgcagttggctgtggtttcagaagagcaagaccaaaatttgaacaggttaatctgttggattctaatgcagttcatcacatcattcatgattttcagccccatgttatagtacattgtgcagcagagagaagaccagatgttgtagaaaatcagccagatgctgcctctcaacttaatgtggatgcttctgggaatttagcaaaggaagcagctgctgttggagcatttctcatctacattagctcagattatgtatttgatggaacaaatccaccttacagagaggaagacataccagctcccctaaatttgtatggcaaaacaaaattagatggagaaaaggctgtcctggagaacaatctaggagctgctgttttgaggattcctattctgtatggggaagttgaaaagctcgaagaaagtgcagtgactgttatgtttgataaagtgcagttcagcaacaagtcagcaaacatggatcactggcagcagaggttccccacacatgtcaaagatgtggccactgtgtgccggcagctagcagagaagagaatgctggatccatcaattaagggaacctttcactggtctggcaatgaacagatgactaagtatgaaatggcatgtgcaattgcagatgccttcaacctccccagcagtcacttaagacctattactgacagccctgtcctaggagcacaacgtccgagaaatgctcagcttgactgctccaaattggagaccttgggcattggccaacgaacaccatttcgaattggaatcaaagaatcactttggcctttcctcattgacaagagatggagacaaacggtctttcattagtttatttgtgttgggttctttttttttttaaatgaaaagtatagtatgtggccctttttaaagaacaaaggaaatagttttgtatgagtactttaattgtgactcttaggatctttcaggtaaatgatgctcttgcactagtgaaattgtctaaagaaactaaagggcagtcatgccctgtttgcagtaatttttctttttatcattatgtttgtcctggctaaacttggagtttgagtatagtaaattatgatccttaaatatttgagggtcaggatgaagcagatctgctgtagacttttcagatgaaattgttcattctcgtaacctccatattttcaggatttttgaagctgttgaccatttcatgttgattattttaaattgtgtggaatagtataaaaatcattggtgttcattatttgctttgcctgagctcagatcaaaatgtttgaagaaaggaactttatttttgcaagttacgtacagtttttatgcttgagatatttcaacatgttatgtatattggaacttctacagcttgatgcctcctgcttttatagcagtttatggggagcacttgaaagagcgtgtgtacatgtattttttttctaggcaaacattgaatgcaaacgtgtatttttttaatataaatatataactgtccttttcatcccatgttgccgctaagtgatatttcatatgtgtggttatactcataataatgggccttgtaagtcttttcaccattcatgaataataataaatatgtactgctggcatgtaatgcttagttttcttgtatttacttcttttttttaaatgtaaggaccaaacttctaaactaattgttcttttgttgctttaatttttaaaaattacattcttctgatgtaacatgtgatacatacaaaagaatatagtttaatatgtattgaaataaaacacaataaaattaaaaaaaaaaaaaaaaaaaa

SEQ ID NO: 1828 - DNA, 2336 bp, Homo sapiens
ggcacgaggaagaatcaggagcttaggatgtattaacaccaactcattaatatactaaccggacaatgttctacaaacaattctacattgtaaaggactggattggcacaaaataaaataattttattttattcagcttataatatgactcgatggaggaaaatttgataagcatgagagaagaccattcttttcatgttcgttacagaatggaagcttcttgcctagagctggccttggaaggggaacgtctatgtaaatcaggagactgccgcgctggcgtgtcattctttgaagctgcagttcaagttggaactgaagacctaaaaacacttagcgctatttacagccagttgggcaatgcttatttctatttgcatgattatgccaaagcattagaatatcaccatcatgatttaacccttgcaaggactattggagaccagctgggggaagcgaaagctagtggtaatctgggaaacaccttaaaagttcttgggaattttgacgaagccatagtttgttgtcagcgacacctagatatttccagagagcttaatgacaaggtgggagaagcaagagcactttacaatcttgggaatgtgtatcatgccaaagggaaaagttttggttgccctggtccccaggatgtaggagaatttccagaagaagtgagagatgctctgcaggcagccgtggatttttatgaggaaaacctatcattagtgactgctttgggtgaccgagcggcacaaggacgtgcctttggaaatcttggaaacacacattacctccttggcaacttcagggatgcagttatagctcatgagcagcgtctccttattgcaaaagaatttggagataaagcagctgaaagaagagcatatagcaaccttggaaatgcatatatatttcttggtgaatttgaaactgcctcggaatactacaagaagacactactgttggcccgacagcttaaagaccgagctgtagaagcacagtcttgttacagtcttggaaatacatatactttacttcaagactatgaaaaggccattgattatcatctgaagcacttagcaattgctcaagagctgaatgatagaattggtgaaggaagagcatgttggagcttaggaaatgcatacacagcactaggaaatcatgatcaagcaatgcattttgctgaaaagcacttggaaatttcaagagaggttggggataaaagtggtgaactaacagcacgacttaatctctcagaccttcaaatggttcttggtctgagctacagcacaaataactccataatgtctgaaaatactgaaattgatagcagtttgaatggtgtactccccaagttgggacgccggcatagtatggaaaatatggaacttatgaagttaacaccagaaaaggtacagaactggaacagtgaaattcttgctaagcaaaaacctcttattgccaaaccttctgcaaagctactctttgtcaacagactgaaggggaaaaaatacaaaacgaattcctccactaaagttctccaagatgccagtaattctattgaccaccgaattccaaattctcagaggaaaatcagtgcagatactattggagatgaagggttctttgacttattaagccgatttcaaagcaataggatggatgatcagagatgttgcttacaagaaaagaactgccatacagcttcaacaacaacttcttccactccccctaaaatgatgctaaaaacatcatctgttcctgtggtatcccccaacacggatgagtttttagatcttcttgccagctcacagagtcgccgtctggatgaccagagggctagtttcagtaatttgccagggcttcgtctaacacaaaacagccagtcggtacttagccacctgatgactaatgacaacaaagaggctgatgaagatttctttgacatccttgtaaaatgtcaaggatccagattagatgatcaaagatgtgctccaccacctgctaccacaaagggtccgacagtaccagatgaagactttttcagccttattttacggtcccagggaaagagaatggatgaacagagagttcttttacaaagagatcaaaacagagacactgactttgggctaaaggactttttgcaaaataatgctttgttggagtttaaaaattcagggaaaaaatcggcagaccattagttactatggatttattttttttcctttcaaacacggtaaggaaacaatctattacttttttccttaaaaggagaatttatagcactgtaatacagcttaaaatatttttagaatgatgtaaatagttaa

SEQ ID NO: 1829 - DNA, 2531 bp, Homo sapiens
gctcgctggtggcggacccggaggctgctgcggcgccggggctccgtggcctggattgaatccgatcgggagccatgagcgtggacaaagctgagctatgcgggtctctgctcacctggttacagacgttccacgttccgtctccctgtgccagccctcaggacctgagcagcggccttgccgtagcctatgtgctgaaccagatagacccctcctggttcaacgaggcatggctccagggcatctcggaagatccaggtcccaactggaagctgaaggtcagcaatctgaagatggtcttacggagcctagtagagtactcccaggatgtcctggcgcatcctgtgtcagaagagcatctcccagatgtgagcctcattggagagttctcagacccggcagagctcggcaagctgcttcagctggtgctgggctgtgccatcagttgcgagaaaaagcaggaccacatccagagaatcatgacgctggaagaatcggttcagcatgtggtgatggaagccatccaagagctcatgaccaaagacactcctgactccctgtcaccagagacgtatggcaactttgacagccagtcccgcaggtactatttcctaagtgaggaggctgaggagggggacgaattacagcagcgctgtctggatctggagcggcagctgatgctcctgtcagaggagaagcagagcctggcgcaagagaatgcagggctgcgggagcggatgggccggcctgaaggcgagggtaccccaggtctcactgccaagaagctgctgctgctgcaatcccagctggagcagttgcaggaggagaacttcaggctggagagtggcagggaggatgagcgcctgcgctgtgccgagctggagagggaggttgcggagctgcagcaccggaaccaggcgctgactagcctggcccaggaggcacaggccctgaaggatgagatggatgaactacggcagtcttcggagcgtgctgggcagctggaggccacgctgaccagttgccggcgccgcttgggcgagctgagggagctgcggcggcaggtgcggcagctggaggaacgcaacgccggccacgccgagcgcacgcgacaactggaggatgagctacgccgagcgggctccctgcgcgcccagctggaggcgcagcggcggcaggtgcaggaactgcagggccagctgcaggaggaggccatgaaggccgagaaatggctatttgaatgccgcaacctggaggaaaagtatgagtcggtgacaaaggagaaggagcggctgttggcggagcgggactccttgcgggaggccaatgaggagctgcgctgcgcccagctgcagccgcgggggttgacccaggccgatccctcactggatcccacctccacacccgtggataacttagccgcagagatcctgcctgcggagctcagggagacgctcctgcggcttcagctggagaacaagcggctgtgcaggcaggaggcggccgaccgggagcggcaggaggagctgcagcgccacctggaggatgccaaccgcgcgcgccacgggttggagacgcagcaccggctgaaccagcagcagctatccgagctgcgggcccaggtggaggacctgcagaaagccctgcaggagcaggggggcaagactgaagatgccatttccattttgctgaaaaggaagctggaggaacatttgcagaagcttcatgaggcagatctggagttgcagaggaagcgggagtacattgaggagctggagccacccactgacagcagcacagcccggcggatcgaggagctgcagcataacttgcagaagaaggacgcggacttgcgggccatggaggagcgataccgccgctacgtggacaaggcccgcatggtcatgcagaccatggaacccaagcagcggccagctgcgggggcacctccagaactccattccctgaggacacagctccgagaacgggatgtccgcatccgacacctggagatggactttgagaaaagccgaagtcagcgggagcaggaagaaaagctgctcatcagtgcctggtataatatgggcatggccttgcagcagcgagctggggaggagcgggcgcctgcccatgcccagtcattcctggcacagcagcggctggcaaccaattctcgccgtggacccttgggacgcctggcatctctgaaccttcgccccactgacaagcactgacagacctcacaatcaagccagcctgggctccacccaccctggcttcctccagctcacatggcgcccagcactgggcttcagccaggtgctcgagagctttgaggccatgatctctgctcttccctctcccagattggtggggagggagggcgggaggtagatataggcctgttctttttagcaatgtgattcttgttgttgattctctctctggagttcatgtgctgcctcaggagactctgattttatatttgagaaaaataaaggcgttcaatctgcaaaaaaaaaaaaaaaaaa

SEQ ID NO: 1830 - DNA, 744 bp, Homo sapiens
atggaaagagctagtacaatcacatatttgaaaggagaaacaataggtactgaaccggagggaaagggcgagggtgagtgtgccagcaccggcctggtgaatccacgattcgatttcccatccaaggtaagtttcccaaaataccgtataaacaagctgcacattacacctctagccgtcgtctgccctttcaaatatgctggtctacatggaaagacaaagaggaaaggccaaaacataaacaaaaggaaacaaaaacaaaacacaaccctctcaggaaccaaacaaaacccccaaatccttttttactacacaaggcatgaggtcaaaagcttgagtacagtgtcccctatagatcacgggagaaaggcgtccacacagagccttagcaggaatttccactctgaggcttcagaacatgctgaagatggggctctgagggtgccactaccatcctggaggccaccaagtggggtggaaacagtgaagagcaggtctcacatgcccgaagaccaccagccaactacacattggtggccctggtggagcatggctgggcgacagcgtccatccccaacactgagccacttcctgtcctggatgacttcctgcttaggtccgtcacatttcagaagagagctggctttctggaagcctacgtttcccattcatcacagaacacgacagagtgcacacatcctggtacccttggtcttcaaaggccatttccagcagaccctctaa

SEQ ID NO: 1831 - DNA, 1372 bp, Homo sapiens
gcacgagggcgcttttgtctccggtgagttttgtggcgggaagcttctgcgctggtgcttagtaaccgactttcctccggactcctgcacgacctgctcctacagccggcgatccactcccggctgttcccccggagggtccagaggcctttcagaaggagaaggcagctctgtttctctgcagaggagtagggtcctttcagccatgaagcatgtgttgaacctctacctgttaggtgtggtactgaccctactctccatcttcgttagagtgatggagtccctagaaggcttactagagagcccatcgcctgggacctcctggaccaccagaagccaactagccaacacagagcccaccaagggccttccagaccatccatccagaagcatgtgataagacctccttccatactggccatattttggaacactgacctagacatgtccagatgggagtcccattcctagcagacaagctgagcaccgttgtaaccagagaactattactaggccttgaagaacctgtctaactggatgctcattgcctgggcaaggcctgtttaggccggttgcggtggctcatgcctgtaatcctagcactttgggaggctgaggtgggtggatcacctgaggtcaggagttcgagaccagcctcgccaacatggcgaaaccccatctctactaaaaatacaaaagttagctgggtgtggtggcagaggcctgtaatcccagttccttgggaggctgaggcgggagaattgcttgaacccggggacggaggttgcagtgaaccgagatcgcactgctgtacccagcctgggccacagtgcaagactccatctcaaaaaaaaaaagaaaagaaaaagcctgtttaatgcacaggtgtgagtggattgcttatggctatgagataggttgatctcgcccttaccccggggtctggtgtatgctgtgctttcctcagcagtatggctctgacatctcttagatgtcccaacttcagctgttgggagatggtgatattttcaaccctacttcctaaacatctgtctggggttcctttagtcttgaatgtcttatgctcaattatttggtgttgagcctctcttccacaagagctcctccatgtttggatagcagttgaagaggttgtgtgggtgggctgttgggagtgaggatggagtgttcagtgcccatttctcattttacattttaaagtcgttcctccaacatagtgtgtattggtctgaagggggtggtgggatgccaaagcctgctcaagttatggacattgtggccaccatgtggcttaaatgattttttctaactaataaagtggaatatatatttcaaaaaaaaaaaaaaaaaa

SEQ ID NO: 1832 - DNA, 1543 bp, Homo sapiens
aggagcttgcagtagcgggcggcagagctggagtgacgggagctagtgtttaggtagcagtcaccattatgctcaaagcggtgatcctgattggaggccctcaaaagggaactcgcttcagacctttgtcttttgaggtgcccaaaccattgtttcctgtggcaggggtccctatgatccaacaccatattgaagcctgtgcccaggtccctggaatgcaggagattctgctcattggcttctaccaacctgatgagcccctcacccagttcctagaagccgcccagcaggagtttaaccttccagtcaggtacctgcaggaatttgcccccctaggcacagggggtggtctttaccattttcgagaccagatcctggctgggagccccgaggcattcttcgtgctcaatgctgatgtctgctccgacttccccttgagtgctatgttggaagcccaccgacgccagcgtcaccctttcttactccttggcactacggctaacaggacgcaatccctcaactacggctgcatcgttgagaatccacagacacacgaggtattgcactatgtggagaaacccagcacatttatcagtgacatcatcaactgcggcatctacctcttttctcctgaagccttgaagcctcttcgggatgtcttccagcgtaatcagcaggatgggcaattggaggactcaccaggcttgtggccaggggcaggtaccatccgcctagagcaggatgtgttttcagccctggcagggcagggccagatatacgtgcatctcactgatggtatctggagtcagatcaagtccgcaggttcagccctctacgcctcccgcctctacctgagccgataccaggacactcacccagaacggctggccaagcacaccccagggggcccatggatccgagggaatgtgtacatccacccgaccgccaaggtggccccctcggctgtgctgggccccaacgtctccatcgggaagggggtgaccgtgggtgagggtgtgcggctccgggagagcatcgtcctccatggagccactttgcaggagcacacgtgtgttctgcattgcatcgtgggctgggggagcaccgtgggacgctgggcccgcgtggaggtacccccagtgaccctaaccccaacgatccccgagcccgcatggacagtgagagcctcttcaaggacgggaagctgctgcctgctatcaccatcctgggctgccgagtccggatccctgccgaggtgctcatcctgaactcgattgttctgccacacaaggagctgagccgaagcttcaccaaccagatcatcctctgagtagggctgccagaaggcccccagctcctacccactccccttgaggactgctgcctgcttggccagcctctgtccagaaaggaccagagaaagccaggctggatcgtcacatgccggggagcaatgtggatggcctggggactcctgggttttctccctcccgactccctaataaaccccgtgaaccttggaaaaaaaaaaaaaaaaaaaaaa

SEQ ID NO: 1833 - DNA, 3655 bp, Homo sapiens
agcgatccgaggcccggccccggccccgccccgcgccgcgccgcgccgcttgccgccgggctagcactgacgtgtctctcggcggagctgctgtgcagtggaacgcgctgggccgcgggcagcgtcgcctcacgcggagcagagctgagctgaagcgggacccggagcccgagcagccgccgccatggcaatcaaatttctggaagtcatcaagcccttctgtgtcatcctgccggaaattcagaagccagagaggaagattcagtttaaggagaaagtgctgtggaccgctatcaccctctttatcttcttagtgtgctgccagattcccctgtttgggatcatgtcttcagattcagctgaccctttctattggatgagagtgattctagcctctaacagaggcacattgatggagctagggatctctcctattgtcacgtctggccttataatgcaactcttggctggcgccaagataattgaagttggtgacaccccaaaagaccgagctctcttcaacggagcccaaaagttatttggcatgatcattactatcggccagtctatcgtgtatgtgatgaccgggatgtatggggacccttctgaaatgggtgctggaatttgcctgctaatcaccattcagctctttgttgctggcttaattgtcctacttttggatgaactcctgcaaaaaggatatggccttggctctggtatttctctcttcattgcaactaacatctgtgaaaccatcgtatggaaggcattcagccccactactgtcaacactggccgaggaatggaatttgaaggtgctatcatcgcacttttccatctgctggccacacgcacagacaaggtccgagcccttcgggaggcgttctaccgccagaatcttcccaacctcatgaatctcatcgccaccatctttgtctttgcagtggtcatctatttccagggcttccgagtggacctgccaatcaagtcggcccgctaccgtggccagtacaacacctatcccatcaagctcttctatacgtccaacatccccatcatcctgcagtctgccctggtgtccaacctttatgtcatctcccaaatgctctcagctcgcttcagtggcaacttgctggtcagcctgctgggcacctggtcggacacgtcttctgggggcccagcacgtgcttatccagttggtggcctttgctattacctgtcccctccagaatcttttggctccgtgttagaagacccggtccatgcagttgtatacatagtgttcatgctgggctcctgtgcattcttctccaaaacgtggattgaggtctcaggttcctctgccaaagatgttgcaaagcagctgaaggagcagcagatggtgatgagaggccaccgagagacctccatggtccatgaactcaaccggtacatccccacagccgcggcctttggtgggctgtgcatcggggccctctcggtcctggctgacttcctaggcgccattgggtctggaaccgggatcctgctcgcagtcacaatcatctaccagtactttgagatcttcgttaaggagcaaagcgaggttggcagcatgggggccctgctcttctgagcccgtctcccggacaggttgaggaagctgctccagaagcgcctcggaaggggagctctcatcatggcgcgtgctgctgcggcatatggacttttaataatgtttttgaatttcgtattctttcattccactgtgtaaagtgctagacattttccaatttaaaattttgctttttatcctggcactggcaaaaagaactgtgaaagtgaaattttattcagccgactgccagagaagtgggaatggtataggattgtccccaagtgtccatgtaacttttgttttaacctttgcaccttctcagtgctgtatgcggctgcagccgtctcacctgtttccccacaaagggaatttctcactctggttggaagcacaaacactgaaatgtctacgtttcattttggcagtagggtgtgaagctgggagcagatcatgtatttcccggagacgtgggaccttgctggcatgtctccttcacaatcaggcgtgggaatatctggcttaggactgtttctctctaagacaccattgttttcccttattttaaaagtgatttttttaaggacagaacttcttccaaaagagagggatggctttcccagaagacactcctggccatctgtggatttgtctgtgcacctattggctcttctagctgactcttctggttgggcttagagtctgcctgtttctgctagctccgtgtttagtccacttgggtcatcagctctgccaagctgagcctggccaagctaggtggacagacccttgcagtgatgtccgtttgtccagattctgccagtcatcactggacacgtctcctcgcagctgccctagcaaggggagacattgtggtagctatcagacatggacagaaactgacttagtgctcacaagcccctacaccttctgggctgaagatcacccagctgtgttcagaattttcttactgtgcttaggactgcacgcaagtgagcagacaccaccgacttcctttctgcgtcaccagtgtcgtcagcagagagaggacagcacaggctcaaggttggtagtgaagtcaggttcggggtgcatgggctgtggtggtgttgatcagttgctccagtgtttgaaataagaagactcatgtttatgtctggaataagttctgtttgtgctgacaggtggcctaggtcctggagatgagcaccctctctctggcctttagggagtcccctcttaggacaggcactgcccagcagcaagggcagcagagttgggtgctaagatcctgaggagctcgaggtttcgagctggctttagacattggtgggaccaaggatgttttgcaggatgccctgatcctaagaagggggcctgggggtgcgtgcagcctgtcggggagaccccactctgacagtgggcacacggcagcctgcaaagcacagggccaccgccacagcccggcagaggggcacactctggagaccttgctggcagtgctagccaggaaacagagtgaccaagggacaagaagggacttgcctaaagccacccagcaactcagcagcagaaccaagatgggccccaggctcctccatatggcccagggcttaccaccctatcacacgtggccttgtctagacccagtcctgagcaggggagaggctcttgagacctgatgccctcctacccacatggttctcccactgccctgtctgctctgctgctacagaggggcagggcctcccccagcccacgcttaggaatgcttgcctctggcaggcaggcagctgtacccaagctggtgggcagggggctggaaggcaccaggcctcaggaggagccccatagtcccgcctgcagcctgtaaccatcggctgggccctgcaaggcccacactcacgccctgtgggtgatggtcacggtgggtgggtgggggctgaccccagcttccaggggactgtcactgtggacgccaaaatggcataactgagataaggtgaataagtgacaaataaagccagttttttacaaggtaaaaaaaaaaaaaaaaaaaaa

SEQ ID NO: 1834 - DNA, 1759 bp, Homo sapiens
cagccgttgaggggacgggcctgcgttctctcctccttcctccccgcctccagctgccggcaggacctttctctcgctgccgctgggaccccgtgtcatcgcccaggccgagcacgatgccccctaaaaagggaggtgatggaattaaaccacccccaatcattggaagatttggaacctcactgaaaattggtattgttggattgccaaatgttgggaaatctactttcttcaatgtgttaaccaatagtcaggcttcagcagaaaacttcccgttctgcactattgatcctaatgagagcagagtacctgtgccagatgaaaggtttgactttctttgtcaataccacaaaccagcaagcaaaattcctgcctttctaaatgtggtggatattgctggccttgtgaaaggagctcacaatgggcagggcctggggaatgcttttttatctcatattagtgcctgtgatggcatctttcatctaacacgtgcttttgaagatgatgatatcacgcacgttgaaggaagtgtagatcctattcgagatatagaaataatacatgaagagcttcagcttaaagatgaggaaatgattgggcccattatagataaactagaaaaggtggctgtgagaggaggagataaaaaactaaaacctgaatatgatataatgtgcaaagtaaaatcctgggttatagatcaaaagaaacctgttcgcttctatcatgattggaatgacaaagagattgaagtgttgaataaacacttatttttgacttcaaaaccaatggtctacttggttaatctttctgaaaaagactacattagaaagaaaaacaaatggttgataaaaattaaagagtgggtggacaagtatgacccaggtgctttggtcattccttttagtggggccttggaactcaagttgcaagaattgagtgctgaggagagacagaagtatctggaagcgaacatgacacaaagtgctttgccaaagatcattaaggctgggtttgcagcactccaactagaatactttttcactgcaggcccagatgaagtgcgtgcatggaccatcaggaaagggactaaggctcctcaggctgcaggaaagattcacacagattttgaaaagggattcattatggctgaagtaatgaaatacgaagattttaaagaggaaggttctgaaaatgcagtcaaggctgctggaaagtacagacaacaaggcagaaattatattgttgaagatggagatattatcttcttcaaatttaacacacctcaacaaccgaagaagaaataaaatttagttattgctcagataaacatacaacttccaaaaggcatctgatttttaaaaaattaaaatttctgaaaaccaatgcgacaaataaagttggggagatgggaatctttgacaaacaaattatttttatttgttttaaaattaaaatactgtgtacccccccccccccatgaaatgcaggttcactaaatgtgaacagctttgcttttcacgtgattaagaccctactccaaattgtagaagcttttcaggaaccatattactctcatgatacttcattaatctccatcatgtatgccaagcctgacacatttgacagtgaggacaatgtggcttgctcctttttgaatctacagataatgcatgttttacagtactccagatgtctacactcaataaaacatttgacaaaaccaaaaaaaaaaaaaaaaaaaaaaaaaaaaaaaaaa

SEQ ID NO: 1835 - DNA, 953 bp, Homo sapiens
ggcacgaggctcaccatggtgggccccgcgccgcggcggcggctgcggccgctggcagcgctggccctggtcctggcgctggccccggggctgcccacagcccgggccgggcagacaccgcgccctgccgagcgggggcccccagtgcggcttttcaccgaggaggagctggcccgctatggcggggaggaggaagatcagcccatctacttggcagtgaagggagtggtgtttgatgtcacctccggaaaggagttttatggacgaggagccccctacaatgccttgacggggaaggactccactagaggggtagccaagatgtccttggatcctgcagacctcacccatgacactacgggtctcacggccaaggaactggaggccctggatgaggtcttcaccaaagtgtacaaagccaaataccccatcgtcggctacactgcccggagaattctcaatgaggatggcagccctaacctggacttcaagcctgaagaccagccccattttgacatcaaggatgagttctgatgttccccctgcaggagcaggttcttgggagcgtgaggcaggaagacactaggtgctgaatctcctgcaaaactggctgcctggaggccctgagccacccagatctgaataaaacagatgcttaccctggaagagcaaatgcctcctgttgtctttggtcaggggttctgtctacctggggacccctgtctgcacaccagggatcaataagagccaaagtgggacacctcctagatgtcagtatcagctggctgggcagtggaattttgagcgacctttactttatacttttctgtgcttgacagattttcagccatgaccatgttcactttataatcaaaacaaaaataaaggtcccatttttacaaaaggaaaaaaaaaaaaaaaaaaaaaaaaaaaaaaaaaaaaaaaaaaaaaaa

SEQ ID NO: 1836 - DNA, 3998 bp, Homo sapiens
ccgggagcccgggcgccctggagtgaggaggaccgggagctggctctggaggctgcggaggcgacgccggagagaacgaagcctcggctgggagcggatctttcgaagatggtttggctgccttggagatttggagatctgatgccacgatgaggactcacacacggggggctcccagtgtgtttttcatatatttgctttgctttgtgtcagcctacatcaccgacgagaacccagaagttatgattcccttcaccaatgccaactacgacagccatcccatgctgtacttctccagggcagaagtggcggagctgcagctcagggctgccagctcgcacgagcacattgcagcccgcctcacggaggctgtgcacacgatgctgtccagccccttggaatacctccctccctgggatcccaaggactacagtgcccgctggaatgaaatttttggaaacaacttgggtgccttggcaatgttctgtgtgctgtatcctgagaacattgaagcccgagacatggccaaagactacatggagaggatggcagcgcagcctagttggttggtgaaagatgctccttgggatgaggtcccgcttgctcactccctggttggttttgccactgcttatgacttcttgtacaactacctgagcaagacacaacaggagaagtttcttgaagtgattgccaatgcctcagggtatatgtatgaaacttcatacaggagaggatggggatttcaatacctgcacaatcatcagcccaccaactgtatggctttgctcacgggaagcctagtcctgatgaatcaaggatatcttcaagaagcctacttatggaccaaacaagttctgaccatcatggagaaatctctggtcttgctcagggaggtgacggatggctccctctatgaaggagttgcgtatggcagctacaccactagatcactcttccaatacatgtttctcgtccagaggcacttcaacatcaaccactttggccatccgtggcttaaacaacactttgcatttatgtatagaaccatcctgccagggtttcaaaggactgtggctattgcggactcaaattacaactggttttatggtccagaaagccaattagtgttccttgataaatttgtcatgcgtaatggcagtggtaactggctagctgaccaaatcagaaggaaccgtgtggtggaaggtccaggaacaccatccaaagggcagcgctggtgcactctgcacacagaatttctctggtatgatggcagcttgaaatcggttcctcctccagactttggcacccctacactgcattattttgaagactggggtgtcgtgacttatggaagtgcactacctgcagaaatcaatagatctttcctttccttcaagtctggaaaactggggggacgtgcaatatatgacattgtccacagaaacaaatacaaagattggatcaaaggatggagaaattttaatgcagggcatgaacatcctgatcaaaactcatttacttttgctcccaatggtgtgcctttcattactgaggctctgtacgggccaaagtacaccttcttcaacaatgttttgatgttttccccagctgtgtcaaagagctgcttttctccctgggtgggtcaggtcacagaagactgctcatcaaaatggtctaaatacaagcatgacctggcagctagttgtcaggggagggtggttgcagcagaggagaaaaatggggtggttttcatccgaggagaaggtgtgggagcttataacccccagctcaacctgaagaatgttcagaggaatctcatcctcctacatccacagctgcttctccttgtagaccaaatacacctgggagaggagagtcccttggagacagcagcgagcttcttccataatgtggatgttccttttgaggagactgtggtagatggtgtccatggggctttcatcaggcagagagatggtctctataaaatgtactggatggacgatactggctacagcgagaaagcaacctttgcctcagtgacatatcctcggggctatccctacaacgggacaaactatgtgaatgtcaccatgcacctccgaagtcccatcaccagggcagcttacctcttcatagggccatctatagatgttcagagcttcactgtccacggagactctcagcaactggatgtgttcatagccaccagcaaacatgcctacgccacatacctgtggacaggtgaggccacaggacagtctgcctttgcacaggtcattgctgatcgtcacaaaattctgtttgaccggaattcagccatcaagagcagcattgtccctgaggtgaaggactatgctgctattgtggaacagaacttgcagcattttaaaccagtgtttcagctgctggagaagcagatactgtcccgagtccggaacacagctagctttaggaagactgctgaacgcctgctgagattttcagataagagacagactgaggaggccattgacaggatttttgccatatcacagcaacagcagcagcaaagcaagtcaaagaaaaaccgaagggcaggcaaacgctataaatttgtggatgctgtccctgatatttttgcacagattgaagtcaatgagaaaaagattagacagaaagctcagattttggcacagaaagaactacccatagatgaagatgaagaaatgaaagaccttttagattttgcagatgtaacatacgagaaacataaaaatgggggcttgattaaaggccggtttggacaggcacggatggtgacaactacacacagcagggccccatcactgtctgcttcctataccaggttgttcctgattctgaacattgctattttctttgtcatgttggcaatgcaactgacttatttccagagggcccagagcctacatggccaaagatgtctttatgcagttcttctcatagatagctgtattttattatggttgtactcttcttgttcccaatcacagtgttagcactgaagctataaattacctggtcattttgtgatcacaagagtctatgcaaaaaaaaaaatttctttaccccagattatcagatttttttccctcagattcattttaacaaattaagggaagatattttgacacaagaaagcaggaacgtggagaaattggagcaggaaaagaaattatcaaagcaatagaaatagcttggtggtcctatggtgtttttggaagtatttggcattgctaattgagcagtccatatagtactacttttagaagaaacaaaaagtctattttttaaagtaatgttttttcttatgagaaaaaggtttagatagaattgggttttattaatattaatttaatgctattagcaatttccatatactatattgtggaaaagactgaagaatacaattctgagaaatataaaaaaattttaatggtatactcatgttgaaagataaatgttgctaagtcctggtatgatggtgtgagcttccttggggaagtacttcttgagttatgtaactaacaggatgttttactacagatctggatggctattcagataacatggcaaaaaatgatagcagaagatcattaaaaacttaaaatatattttattagaaaacatttatctatgaatgaatatttccttgatgctggtctctgcacacatatgcttggttacttgcatgcattcattggttgttcaataagtgagatgattacagataatactgtattttccttatatggaaaaccgttatagacccaataacaactaaacctttcaaaagaaaatattttctattatgaatgttgattttcataccaaagaagatggagagtctaaaatttggatatgattcttatgtttttttaatagaaaaccttcttcaagtttattttcctaaataaacatcataattgtgaaaaaaaaaaaaaaaaaaaaaaaaaaaaaaaaaaaaaaaa

SEQ ID NO: 1837 - DNA, 1988 bp, Homo sapiens
gccggccgcgtatcccccggctacctgggccgccccgcggcggtgcgcgcgtgagagggagcgcgcgggcagccgagcgccggtgtgagccagcgctgctgccagtgtgagcggcggtgtgagcgcggtgggtgcggaggggcgtgtgtgccggcgcgcgcgccgtggggtgcaaaccccgagcgtctacgctgccatgaggggcgcgaacgcctgggcgccactctgcctgctgctggctgccgccacccagctctcgcggcagcagtccccagagagacctgttttcacatgtggtggcattcttactggagagtctggatttattggcagtgaaggttttcctggagtgtaccctccaaatagcaaatgtacttggaaaatcacagttcccgaaggaaaagtagtcgttctcaatttccgattcatagacctcgagagtgacaacctgtgccgctatgactttgtggatgtgtacaatggccatgccaatggccagcgcattggccgcttctgtggcactttccggcctggagcccttgtgtccagtggcaacaagatgatggtgcagatgatttctgatgccaacacagctggcaatggcttcatggccatgttctccgctgctgaaccaaacgaaagaggggatcagtattgtggaggactccttgacagaccttccggctcttttaaaacccccaactggccagaccgggattaccctgcaggagtcacttgtgtgtggcacattgtagccccaaagaatcagcttatagaattaaagtttgagaagtttgatgtggagcgagataactactgccgatatgattatgtggctgtgtttaatggcggggaagtcaacgatgctagaagaattggaaagtattgtggtgatagtccacctgcgccaattgtgtctgagagaaatgaacttcttattcagtttttatcagacttaagtttaactgcagatgggtttattggtcactacatattcaggccaaaaaaactgcctacaactacagaacagcctgtcaccaccacattccctgtaaccacgggtttaaaacccaccgtggccttgtgtcaacaaaagtgtagacggacggggactctggagggcaattattgttcaagtgactttgtattagccggcactgttatcacaaccatcactcgcgatgggagtttgcacgccacagtctcgatcatcaacatctacaaagagggaaatttggcgattcagcaggcgggcaagaacatgagtgccaggctgactgtcgtctgcaagcagtgccctctcctcagaagaggtctaaattacattattatgggccaagtaggtgaagatgggcgaggcaaaatcatgccaaacagctttatcatgatgttcaagaccaagaatcagaagctcctggatgccttaaaaaataagcaatgttaacagtgaactgtgtccatttaagctgtattctgccattgcctttgaaagatctatgttctctcagtagaaaaaaaaatacttataaaattacatattctgaaagagcattccgaaagatgggactggttgactcttcacatgatggaggtatgaggcctccgagatagctgagggaagttctttgcctgctgtcagaggagcagctatctgattggaaacctgccgacttagtgcggtgataggaagctaaaagtgtcaagcgttgacagcttggaagcgtttatttatacatctctgtaaaaggatattttagaattgagttgtgtgaagatgtcaaaaaaagattttagaagtgcaatatttatagtgttatttgtttcaccttcaagcctttgccctgaggtgttacaatcttgtcttgcgttttctaaatcaatgcttaataaaatatttttaaaggattacaaaaaaaaaaaaaaaaaaaaaaaaaaaaaaaaaaaaaaaaaaaaaaaaaaaaaaaaaaaaaaaaaaaaaaaaaaaaaaa

SEQ ID NO: 1838 - DNA, 4049 bp, Homo sapiens
gcggccgcactcagcgccacgcgtcgaaagcgcaggccccgaggacccgccgcactgacagtatgagccgcacagcctacacggtgggagccctgcttctcctcttggggaccctgctgccggctgctgaagggaaaaagaaagggtcccaaggtgccatccccccgccagacaaggcccagcacaatgactcagagcagactcagtcgccccagcagcctggctccaggaaccgggggcggggccaagggcggggcactgccatgcccggggaggaggtgctggagtccagccaagaggccctgcatgtgacggagcgcaaatacctgaagcgagactggtgcaaaacccagccgcttaagcagaccatccacgaggaaggctgcaacagtcgcaccatcatcaaccgcttctgttacggccagtgcaactctttctacatccccaggcacatccggaaggaggaaggttcctttcagtcctgctccttctgcaagcccaagaaattcactaccatgatggtcacactcaactgccctgaactacagccacctaccaagaagaagagagtcacacgtgtgaagcagtgtcgttgcatatccatcgatttggattaagccaaatccaggtgcacccagcatgtcctaggaatgcagccccaggaagtcccagacctaaaacaaccagattcttacttggcttaaacctagaggccagaagaacccccagctgcctcctggcaggagcctgcttgtgcgtagttcgtgtgcatgagtgtggatgggtgcctgtgggtgtttttagacaccagagaaaacacagtctctgctagagagcactccctattttgtaaacatatctgctttaatggggatgtaccagaaacccacctcaccccggctcacatctaaaggggcggggccgtggtctggttctgactttgtgtttttgtgccctcctggggaccagaatctcctttcggaatgaatgttcatggaagaggctcctctgagggcaagagacctgttttagtgctgcattcgacatggaaaagtccttttaacctgtgcttgcatcctcctttcctcctcctcctcacaatccatctcttcttaagttgatagtgactatgtcagtctaatctcttgtttgccaaggttcctaaattaattcacttaaccatgatgcaaatgtttttcattttgtgaagaccctccagactctgggagaggctggtgtgggcaaggacaagcaggatagtggagtgagaaagggagggtggagggtgaggccaaatcaggtccagcaaaagtcagtagggacattgcagaagcttgaaaggccaataccagaacacaggctgatgcttctgagaaagtcttttcctagtatttaacagaacccaagtgaacagaggagaaatgagattgccagaaagtgattaactttggccgttgcaatctgctcaaacctaacaccaaactgaaaacataaatactgaccactcctatgttcggacccaagcaagttagctaaaccaaaccaactcctctgctttgtccctcaggtggaaaagagaggtagtttagaactctctgcataggggtgggaattaatcaaaaacckcagaggctgaaattcctaatacctttcctttatcgtggttatagtcagctcatttccattccactatttcccataatgcttctgagagccactaacttgattgataaagatcctgcctctgctgagtgtacctgacagtaagtctaaagatgaragagtttagggactactctgttttagcaagaratattktgggggtctttttgttttaactattgtcaggagattgggctaragagaagacgacgagagtaaggaaataaagggrattgcctctggctagagagtaagttaggtgttaatacctggtagaaatgtaagggatatgacctccctttctttatgtgctcactgaggatctgaggggaccctgttaggagagcatagcatcatgatgtattagctgttcatctgctactggttggatggacataactattgtaactattcagtatttactggtaggcactgtcctctgattaaacttggcctactggcaatggctacttaggattgatctaagggccaaagtgcagggtgggtgaactttattgtactttggatttggttaacctgttttcttcaagcctgaggttttatatacaaactccctgaatactctttttgccttgtatcttctcagcctcctagccaagtcctatgtaatatggaaaacaaacactgcagacttgagattcagttgccgatcaaggctctggcattcagagaacccttgcaactcgagaagctgtttttatttcgtttttgttttgatccagtgctctcccatctaacaactaaacaggagccatttcaaggcgggagatattttaaacacccaaaatgttgggtctgattttcaaacttttaaactcactactgatgattctcacgctaggcgaatttgtccaaacacatagtgtgtgtgttttgtatacactgtatgaccccaccccaaatctttgtattgtccacattctccaacaataaagcacagagtggatttaattaagcacacaaatgctaaggcagaattttgagggtgggagagaagaaaagggaaagaagctgaaaatgtaaaaccacaccagggaggaaaaatgacattcagaaccagcaaacactgaatttctcttgttgttttaactctgccacaagaatgcaatttcgttaatggagatgacttaagttggcagcagtaatcttcttttaggagcttgtaccacagtcttgcacataagtgcagatttggctcaagtaaagagaatttcctcaacactaacttcactgggataatcagcagcgtaactaccctaaaagcatatcactagccaaagagggaaatatctgttcttcttactgtgcctatattaagactagtacaaatgtggtgtgtcttccaactttcattgaaaatgccatatctataccatattttattcgagtcactgatgatgtaatgatatattttttcattattatagtagaatatttttatggcaagatatttgtggtcttgatcatacctattaaaataatgccaaacaccaaatatgaattttatgatgtacactttgtgcttggcattaaaagaaaaaaacacacatcctggaagtctgtaagttgttttttgttactgtaggtcttcaaagttaagagtgtaagtgaaaaatctggaggagaggataatttccactgtgtggaatgtgaatagttaaatgaaaagttatggttatttaatgtaattattacttcaaatcctttggtcactgtgatttcaagcatgttttctttttctcctttatatgactttctctgagttgggcaaagaagaagctgacacaccgtatgttgttagagtcttttatctggtcaggggaaacaaaatcttgacccagctgaacatgtcttcctgagtcagtgcctgaatctttattttttaaattgaatgttccttaaaggttaacatttctaaagcaatattaagaaagactttaaatgttattttggaagacttacgatgcatgtatacaaacgaatagcagataatgatgactagttcacacataaagtccttttaaggagaaaatctaaaatgaaaagtggataaacagaacatttataagtgatcagttaatgcctaagagtgaaagtagttctattgacattcctcaagatatttaatatcaactgcattatgtattatgtctgcttaaatcatttaaaaacggcaaagaattatatagactatgaggtaccttgctgtgtaggaggatgaaaggggagttgatagtctcataaaactaatttggcttcaagtttcatgaatctgtaactagaatttaattttcaccccaataatgttctatatagcctttgctaaagagcaactaataaattaaacctattctttcaaaaaaaaa

SEQ ID NO: 1839 - DNA, 3221 bp, Homo sapiens
cgcaggcggagcgcaagtccgtcagccagtcagtccgccagtccgccagcccagtacctctctctcctcggccctcgtaagctgtccgcggtctgtttggcccgaacggcggcggaggcgctgatcatggcgacattcatctcggtgcagctgaaaaagacctcagaggtggacctggccaagccgctggtgaagttcatccagcagacttacccaagcggcggggaagagcaggcccagtactgccgcgcggcggaggagctcagcaagctgcgccgcgccgcagtcggtcgtccgctggacaagcacgagggcgcgctcgagacgctcctgagatattatgatcagatttgttctattgaacccaaattcccattttctgaaaatcagatctgcttgacatttacctggaaggatgctttcgataaaggttcactttttggaggctctgtaaaactggctcttgcaagcttaggatatgaaaagagctgtgtgttgttcaattgtgcagccttagctagccaaattgcagcagaacagaacctggataatgatgaaggattgaaaatcgctgctaaacattaccagtttgctagtggtgcctttttacatattaaagagacggttttatctgccttaagtcgagagccgaccgtggacatatctccagatactgttgggaccctcagtcttattatgctggcacaggctcaagaagtattttttttaaaagccacaagagataaaatgaaagatgccatcatagctaaattggctaatcaggctgcagattattttggtgatgctttcaaacagtgtcaatacaaagatactctccccaaggaggtgttccctgtcttggctgcaaagcactgtatcatgcaggccaatgctgagtaccatcagtctatcctggcaaaacagcagaagaaatttggagaagaaattgcaaggttacagcatgcagcagaactgattaaaacagtggcatctcgctatgatgaatatgttaatgtgaaggatttttctgacaaaatcaatcgtgcccttactgcagcaaagaaggataatgacttcatttatcatgatcgagttccagaccttaaagatctagatcctattggcaaagccacacttgtgaaatctaccccggtcaatgtacccatcagtcagaaatttactgatctgtttgagaagatggttcccgtgtcagtacagcagtctttggctgcctataatcagaggaaagccgatttggttaacagatcaattgctcagatgagagaagccaccactttggcaaatggggtgctagcttcccttaatcttccagcagcaattgaagatgtgtctggagacactgtacctcagtctatattgactaaatccagatctgtgattgaacagggaggcatccagactgttgatcagttgattaaagaactgcctgaattactgcaacgaaatagagaaatcctagatgagtcattaaggttgttggatgaagaagaagcaaccgataatgatttaagagcaaaatttaaggaacgttggcaaaggacaccatccaatgaactgtataagcctttaagagcagagggaaccaacttcagaacagttttagataaagctgtgcaggcagatggacaagtgaaagaatgttaccagtctcatcgtgacaccatcgtgcttttgtgtaagccagagcctgagctgaatgctgccatcccttctgctaatccagcaaagaccatgcagggcagtgaggttgtaaatgtcttaaaatccttattgtcaaatcttgatgaagtaaagaaggaaagagagggtctggagaatgacttgaaatctgtgaattttgacatgacaagcaagtttttgacagccctggctcaagatggtgtgataaatgaagaagctctttctgttactgaactagatcgagtctatggaggtcttacaactaaagtccaagaatctctaaagaaacaggaggggcttcttaaaaatattcaggtctcacatcaggaattttcgaaaatgaaacaatctaataatgaagctaacttaagagaagaagttttgaagaatttagctactgcatatgacaactttgttgaacttgtagctaatttgaaggaaggcacaaagttttacaatgagttgactgaaatcctggtcaggttccagaacaaatgcagtgatatagtttttgcacggaagacagaaagagatgaactcttaaaggacttgcaacaaagcattgccagagaacctagtgctccttcaattcctacacctgcgtatcagtccttaccagcaggaggacatgcaccaactcctccaactccagcgccaagaaccatgccgcctactaagccccagcccccagccaggcctccaccacctgtgcttccagcaaatcgagctccttctgctactgctccatctccagtgggggctgggactgctgcgccagctccatcacaaacgcctggctcagctcctcctccacaggcgcagggaccaccctatcccacctatccaggatatcctgggtattgccaaatgcccatgcccatgggctataatccttatgcgtatggccagtataatatgccatatccaccagtgtatcaccagagtcctggacaggctccatacccgggaccccagcagccttcataccccttccctcagcccccacagcagtcttactatccacagcagtaatatgtctgctcagcagctcagctgattcagatcagagggaaagaaataccaaccctgcaataagtgtactaaactctacgctctggttaatgtaatgtactctcctggactgaatgcagtgtataatttctgtctacagctagaagctgtgccccagttccacatttgattacacatgtgagatttgctgctgttgcagtataaacactaggtataataggatttgaaattgcattacagttcataaaaattgaaaatgagaaattaaacctgcaagtgaaacatttgaaacgattatactttctacataagacatggttgggacatcagatacttacaaagatggtttaagtatggatactagagaaaattaagttttctttctctttggtttattgatttggtttaatttccattatgctattttgcataatcaaggcactgtaaatcttataattttaaaataaattacttaagaacaaaaaaaa

SEQ ID NO: 1840 - DNA, 2255 bp, Homo sapiens
tacggccgtcgtgccgctcgtgtcagtcaacatggaggcagaggaatcggagaaggccgcaacggagcaagagccgctggaagggacagaacagacactagatgcggaggaggagcaggaggaatccgaagaagcggcctgtggcagcaagaagcgggtagtgccaggtattgtgtacctgggccatatcccgccgcgcttccggcccctgcacgtccgcaaccttctcagcgcctatggcgaggtcggacgcgtcttctttcaggctgaggaccggttcgtgagacgcaagaagaaggcagcagcagctgccggaggaaaaaagcggtcctacaccaaggactacaccgagggatgggtggagttccgtgacaagcgcatagccaagcgcgtggcggccagtctacacaacacgcctatgggtgcccgcaggcgcagccccttccgttatgatctttggaacctcaagtacttgcaccgtttcacctggtcccacctcagcgagcacctcgcctttgagcgccaggtgcgcaggcagcgcttgagagcggaggttgctcaagccaagcgtgagaccgacttctatcttcaaagtgtggaacggggacaacgctttcttgcggccgatggggaccctgctcgcccagatggctcctggacatttgcccagcgtcctactgagcaggaactgagggcccgtaaagcagcacggccagggggacgtgaacgggctcgcctggcaactgcccaggacaaggcccgctccaacaaagggctcctggccaggatctttggagccccgccaccctcagagagcatggagggaccttcccttgtcagggactcctgagggcctgggtggccccttccatttcctggccctgctctgcttcctgtctacctcatactagaatgatcgtgactacccgggcagacattttactgtgtttctcagaccaagtgtctactgatggcccaaacatggagttttgtgggcttccactgtccccactccgaactcctgtatgtgcctggctgagtcacctaattcatactgtcatactagcataattatgactattgcatatgcttgttttgtttgactcttggctgcctacgtctgtagggtcccctgaaaatcccacttcctgcccccagaaagggcctttatttccaactaggaggataatgcctagtccaggcaatctttctctgtttagcagtcacaggtgagggtggtattagcatcttttttatgtagaaaaaattgagttaatggggtggactgggttgggaagaaatacatttcctaatgtatttatagaaaataaaaatatttttatgtgcctttttatttttgttggtggggaggtcattggacaagttccaactttcatcttgtgttcccttcaccttcatatcctgatcttagagcccccctccccctgccacccaccttactgtttaacctggatttttttttctatttaatttttgtctaatatcttagcccagtttatcaatcagttatcttaagtcagcattttctaagccattgtttgaggaaacagtgacaataggtaataacacatcttagtattaagagttttacaggccactagtataagataggcatcgtggtagatgcatataaagggtggaatgggagccatggcaggtcatagagtcctctcaatgggaacctgattgatgatcacagtcttcagtggtgagtcagtcctcaccaagttttccagatcattcctacaaagtaaactgggagaataataagtctgaaagagtgtggagtgctcccacaattacaaagaatgcttcctgggtggagtgttgagttggaaccattgtaaaggtgggcaaagcctagtagagaaccagtgcacctcaggtgcacttacatatggtggggctgaggcaaagcagccctgtaggcttcaaagaatcagtgtaagccactaaaaggaactgaaaacctaggtgtcacaataaacagtctacacagtctcacgtagaccaaaattctgatcattttccaggctgttgcatgaagtgatagagtatgattataatttctgtttgcttgtgctgtttgtttttgtttttcatctgtcaatgtgatgatctgtgttttatagggtagagtggatttgtctactttggctgtaaaataccctaatcacattatgatcttgacaggtgcactttactggggagaataaaaaggaccatacggtaaa

SEQ ID NO: 1841 - DNA, 1218 bp, Homo sapiens
tcgctagaactgcgtctcgcgacccagggccggtttccggaggacagccaacaagcgatgctgccgccgccgtttcctgattggttgtgggtggctacctcttcgttctgattggccgctagtgagcaagatgctgagcaagggtctgaagcggaaacgggaggaggaggaggagaaggaacctctggcagtcgactcctggtggctagatcctggccacgcagcggtggcacaggcacccccggccgtggcctctagctccctctttgacctctcagtgctcaagctccaccacagcctgcagcagagtgagccggacctgcggcacctggtgctggtcgtgaacactctgcggcgcatccaggcgtccatggcacccgcggctgccctgccacctgtgcctagcccacctgcagcccccagtgtggctgacaacttactggcaagctcggacgctgccctttcagcctccatggccagcctcctggaggacctcagccacattgagggcctgagtcaggctccccaacccttggcagacgaggggccaccaggccgtagcatcgggggagcagcgcccagcctgggtgccttggacctgctgggcccagccactggctgtctactggacgatgggcttgagggcctgtttgaggatattgacacctctatgtatgacaatgaactttgggcaccagcctctgagggcctcaaaccaggccctgaggatgggccgggcaaggaggaagctccggagctggacgaggccgaattggactacctcatggatgtgctggtgggcacacaggcactggagcgaccgccggggccagggcgctgagccctcgtgctggaatggttgtctggtatctgaactgagcctgctggctggaccaactgtcctcgaaaagacacagctggcttccctagtacagagaacagggcttgggccactttggagagacagaatctagtcctgggcaacttcacatccgtcctcctgtctcagggctggcagggggagcctggaattaccccctagtgatggaatgacagggtctggtggggactgaattccctggccctggggtcatagcttgggctgttccttctctgatacgggaagagaccccaatcagatttttcaaattaaagccagtcctgggaaaaaaaaaaaaaaaaaaaaaaaaaaaaaaaaaaaaaaaaaaaaaaaaaaaa

SEQ ID NO: 1842 - DNA, 1479 bp, Homo sapiens
atgggctccgctccctgggccccggtcctgctgctggcgctcgggctgcgcggcctccaggcgggggcccgcagggccccggaccccggcttccaggagcgcttcttccagcagcgtctggaccacttcaacttcgagcgcttcggcaacaagaccttcccccagcgcttcctggtgtcggacaggttctgggtccggggcgaggggcccaccttcttctacactgggaacgagggcgacgtgtgggccttcgccaacaactcgggcttcgtcgcggagctggcggccgagcggggggctctactggtcttcgcggagcaccgctactacgggaagtcgctgccgttcggtgcgcagtccacgcagcgcgggcacacggagctgctgacggtggagcaggccctggccgacttcgcagagctgctccgcgcgctacgacgcgacctcggggcccaggatgcccccgccatcgccttcggtggaagttatggggggatgctcagtgcctacctgaggatgaagtatccccacctggtggcgggggcgctggcggccagcgcgcccgttctagctgtggcaggcctcggcgactccaaccagttcttccgggacgtcacggcggactttgagggccagagtcccaaatgcacccagggtgtgcgggaagcgttccgacagatcaaggacttgttcctacagggagcctacgacacggtccgctgggagttcggcacctgccagccgctgtcagacgagaaggacctgacccagctcttcatgttcgcccggaatgccttcaccgtgctggccatgatggactacccctaccccactgacttcctgggtcccctccctgccaaccccgtcaaggtgggctgtgatcggctgctgagtgaggcccagaggatcacggggctgcgagcactggcagggctggtctacaacgcctcgggctccgagcactgctacgacatctaccggctctaccacagctgtgctgaccccactggctgcggcaccggccccgacgccagggcctgggactaccaggcctgcaccgagatcaacctgaccttcgccagcaacaatgtgaccgatatgttcccggacctgcccttcactgacgagctccgccagcggtactgcctggacacctggggcgtgtggccccggcccgactggctgctgaccagcttctgggggggtgatctcagagccgccagcaacatcatcttctccaacgggaacctggacccctgggcagggggcgggattcggaggaacctgagtgcctcagtcatcgccgtcaccatccaggggggagcgcaccacctcgacctcagagcctcccacccagaagatcctgcttccgtggttgaggcgcggaagctggaggccaccatcatcggcgagtgggtaaaggcagccaggcgtgagcagcagccagctctgcgtggggggcccagactcagcctctga

SEQ ID NO: 1843 - DNA, 1646 bp, Homo sapiens
ctggcttctcggaactttttcagaagactgcgcctgtcctggttgcggcatggctgtcactgtggataaaccctggttctatgacatgaagaaagtttgggagggatatcccatacagagcactatcccttcccagtattggtactacatgattgaactttccttctactggtccctgctcttcagcattgcctctgatgtcaagcgaaaggatttcaaggaacagatcatccaccatgtggccaccatcattctcatcagcttttcctggtttgccaattacatccgagctgggactctaatcatggctctgcatgactcttccgattacctgctggagtcagccaagatgtttaactacgcgggatggaagaacacctgcaacaacatcttcatcgtcttcgccattgtttttatcatcacccgactggtcatcctgcccttctggatcctgcattgcaccctggtgtacccactggagctctatcctgccttctttggctattacttcttcaattccatgatgggagttctacagctgctgcatatcttctgggcctacctcattttgcgcatggcccacaagttcataactggaaagctggtagaagatgaacgcagtgaccgggaagtaacagagagctcagagggggagaaggctgcagctgggggaggagcaaagagccggcccctagccaatggccaccccatcctcaataacaaccatcgtaagaatgactgactgaaccattattccagctggctcccagattaatgcataaagccaaggaactaccccgctccctgcgctatagggtcactttagctctggggaaaaaggagaaaggagaggagagttctctgcatcctccctccttgcttgtcacccagttgcctttaaaccaaattctaaccagcctatccccaggtaggggacgttggttatattctgttagagggggaccggtcgtattttcctccctacccgccaagtcatcctttctactgcttttgagggcctccctcaagctctctgtgggtaggggttacaattcacattcctttattctgagaatttggccccagcagtttgcctttgactccctgaactccaaagcaagggttggtgccttaaggtcccatctgtggggcctcattctggcaaagctggaccaaggctaacctttctaacctccctaaattgggccagaaaccaaagctgagcttttaactttctccctctatgacacaaatgaattgagggtaggaggagggtgcacataacccttaccctacctctgccaaaaagtgggggctgtactggggactgctcggatgatctttcttagtgctacttctttcagctgtccctgtagcgacaggtctaagatctgactgcctcctttctctggcctcttcccccttccctcttctcttcagctaggctagctggtttggagtagaatggcaactaattctaatttttatttattaaatatttggggttttggttttaaagccagaattacggctagcacctagcatttcagcagagggaccattttagaccaaaatgtactgttaatgggtttttttttaaaattaaaagattaaataaaaaatattaaataaaaaaaaaaaaaaaa

SEQ ID NO: 1844 - DNA, 2059 bp, Homo sapiens
gtgtgagaggggtagggagtgctcccggcggcgacggggccgagttcaccagccgccggggcagtagtcgaaggcccggcgcggcatgtcctgggtgccgcggtgcgggcagtgaacgcgcgccgggcgggatgggccggcgccgggcgccagagctgtaccgggctccgttcccgttgtacgcgcttcaggtcgaccccagcactgggctgctcatcgctgcgggcggaggaggcgccgccaagacaggcataaagaatggcgtgcactttctgcagctagagctgattaatgggcgcttgagtgcctccttgctgcactcccatgacacagagacacgggccaccatgaacttggcactggctggtgacatccttgctgcagggcaggatgcacactgtcagctcctgcgcttccaggcacatcaacagcagggcaacaaggcagagaaggccggttccaaggagcaggggcctcgacaaaggaagggagcagccccagcagagaagaaatgtggagcggaaacccagcacgaggggctagaactcagggtagagaatttgcaggcggtgcagacagactttagctccgatccactgcagaaagttgtgtgcttcaaccacgataataccctgcttgccactggaggaacagatggctacgtccgtgtctggaaggtgcccagcctggagaaggttctggagttcaaagcccacgaaggggagattgaagacctggctttagggcctgatggcaagttggtaaccgtgggccgggaccttaaggcctctgtgtggcagaaggatcagctggtgacacagctgcactggcaagaaaatggacccaccttttccagcacaccttaccgctaccaggcctgcaggtttgggcaggttccagaccagcctgctggcctgcgactcttcacagtgcaaattccccacaagcggctgcggcagccccctccctgctacctcacagcctgggatggctccaacttcttgccccttcggaccaagtcctgtggccatgaagtcgtctcctgcctcgatgtcagtgaatccggcaccttcctaggcctgggcacagtcactggctctgttgccatctacatagctttctctctccagtgcctctactacgtgagggaggcccatggcattgtggtgacggatgtggcctttctacctgagaagggtcgtggtccagagctccttgggtcccatgaaactgccctgttctctgtggctgtggacagtcgttgccagctgcatctgttgccctcacggcggagtgttcctgtgtggctcctgctcctgctgtgtgtcgggcttattattgtgaccatcctgctgctccagagtgcctttccaggtttcctttagcttccctgcttcctgggaatcaggagcctggacactgccatctctagagcagagtggaggcctggactccctttgctcactccattcgggtccacagctgaggttgcctctgacaagatgaatgggcactgcctgcccttctagtgaaaaggcttggctatggccctgtgtgactccaggtcccaggaaccttgccttcgtcatctgtggatccatccagaacagcggtatctgaagcccaggccatactccctgcctcctttcttctgcctaccagaggctccagagttgagcttgtccttatctagaaacatgtgaagatgcccaagagcctggaggcactgctgtccttcctgcagaaacagtttctcctcctcccctcagccttgtggccagttcctcttcacatgaagcccctggcatttgctggggaagggactggcctggtacttgctgttagggcaggaaggggcaaaaggaagacttgggtagtaatctgggggttcagatgggtagcactaagccagctggcctaaagatgcaataagttcctaggtagtctacccttaccttgaggaatgggaaaatgaacctcagcccattaggcaggaaaagttgatatttaataaacaaggaaagagtgaactgagaccccaaaaaaaaaaaaaaaaaaa

SEQ ID NO: 1845 - DNA, 2163 bp, Homo sapiens
gcggagcgcagctgtgagggagtcgctgtgatccggggccccggaacccgagctggagctgaagcgcaggctgcggggcgcggagtcgggaggcctgagtgttccttccagcatgtcggagggggagtcccagacagtacttagcagtggctcagacccaaaggtagaatcctcatcttcagctcctggcctgacatcagtgtcacctcctgtgacctccacaacctcagctgcttccccagaggaagaagaagaaagtgaagatgagtctgagattttggaagagtcgccctgtgggcgctggcagaagaggcgagaagaggtgaatcaacggaatgtaccaggtattgacagtgcatacctggccatggatacagaggaaggtgtagaggttgtgtggaatgaggtacagttctctgaacgcaagaactacaagctgcaggaggaaaaggttcgtgctgtgtttgataatctgattcaattggagcatcttaacattgttaagtttcacaaatattgggctgacattaaagagaacaaggccagggtcatttttatcacagaatacatgtcatctgggagtctgaagcaatttctgaagaagaccaaaaagaaccacaagacgatgaatgaaaaggcatggaagcgttggtgcacacaaatcctctctgccctaagctacctgcactcctgtgacccccccatcatccatgggaacctgacctgtgacaccatcttcatccagcacaacggactcatcaagattggctctgtggctcctgacactatcaacaatcatgtgaagacttgtcgagaagagcagaagaatctacacttctttgcaccagagtatggagaagtcactaatgtgacaacagcagtggacatctactcctttggcatgtgtgcactggagatggcagtgctggagattcagggcaatggagagtcctcatatgtgccacaggaagccatcagcagtgccatccagcttctagaagacccattacagagggagttcattcaaaagtgcctgcagtctgagcctgctcgcagaccaacagccagagaacttctgttccacccagcattgtttgaagtgccctcgctcaaactccttgcggcccactgcattgtgggacaccaacacatgatcccagagaacgctctagaggagatcaccaaaaacatggatactagtgccgtactggctgaaatccctgcaggaccaggaagagaaccagttcagactttgtactctcagtcaccagctctggaattagataaattccttgaagatgtcaggaatgggatctatcctctgacagcctttgggctgcctcggccccagcagccacagcaggaggaggtgacatcacctgtcgtgcccccctctgtcaagactccgacacctgaaccagctgaggtggagactcgcaaggtggtgctgatgcagtgcaacattgagtcggtggaggagggagtcaaacaccacctgacacttctgctgaagttggaggacaaactgaaccggcacctgagctgtgacctgatgccaaatgagaatatccccgagttggcggctgagctggtgcagctgggcttcattagtgaggctgaccagagccggttgacttctctgctagaagagaccttgaacaagttcaattttgccaggaacagtaccctcaactcagccgctgtcaccgtctcctcttagagctcactcgggccaggccctgatctgcgctgtggctgtccctggacgtgctgcagccctcctgtcccttccccccagtcagtattaccctgtgaagccccttccctcctttattattcaggagggctgggggggctccctggttctgagcatcatcctttcccctcccctctcttcctcccctctgcactttgtttacttgttttgcacagacgtgggcctgggccttctcagcagccgccttctagttgggggctagtcgctgatctgccggctcccgcccagcctgtgtggaaaggaggcccacgggcactaggggagccgaattctacaatcccgctggggcggccggggcgggagagaaaggtggtgctgcagtggtggccctggggggccattcgattcgcctcagttgctgctgtaataaaagtctactttttgct

SEQ ID NO: 1846 - DNA, 684 bp, Homo sapiens
tggttccccagaaataataggtcccccccaggggcaggggctgacaatacggctgccttacccgccatacataaagttttatttttttggcccgaatgagggagcctcccgaaggattaaacgacgccccgatcctcaccggacctcaactaaccctaaaaaatgcacacctcaggagtctacctgagcattcaggcagcactgacaatagttatgcctgtactaaggagcatgattttaagaggctttggcccaactgcctcttgcaggctgagtccctccatgcaaaagtggggctaaatgaagtgtgttaaggggtcggctaagtgggacattagtaactgcacactatttccctctactgagtaaaccctatctgtgattcccccaaacatctggcatggctcccttttgtccttcctgtgccctgcaaatattagcaaagaagcttcatgccaggttaggaaggcagcattccatgaccagaaacagggacaaagaaatccccccttcagaacagaggctttggggtcctagcccagtgcttctccaacactgaagtgcttgcagatcatctggggacctggtttgaatggagattatgattcagtgggttgggggcagagtttctgcagttccatcaggtcccccccaggtgcaggtgctgacaatactgctgcctta

SEQ ID NO: 1847 - DNA, 5213 bp, Homo sapiens
aagcagcccgcggaccggcagcaaaggaacgtgcgaacgcgtgacgccgcccgactggctcgcgctctcccgtgccccggcgtcctccgcccgctcatggcccgggccgccgcggacgatcggcgctgaggcgggccgcgtggagacgtgaggcggccgccgtggccctcacagtcggcgtttcgccgcctgcccgcggtgcccgcgcacgcctgccgccatcgccttcgcgcctggctggcgggggcgctgtcctcccaggccgtccgcgccgctccctggagctcggcggagcgcggcagccagggccggcggaggcgcgaggagccgggcgccaccgccgccgccgccgccgccgccgcgggggccatgaccgtggagcagaacgtgctgcagcagagcgcggcgcagaagcaccagcagacgtttttgaatcaactgagagaaattacggggattaatgacacccagatactacagcaagccttgaaggatagtaatggaaacttggaattagcagtggctttccttactgcgaagaatgctaagacccctcagcaggaggagacaacttactaccaaacagcacttcctggcaatgatagatacatcagtgtgggaagccaagcagatacaaatgtgattgatctcactggagatgataaagatgatcttcagagagcaattgccttgagtttggccgaatcaaacagggcattcagggagactggaataactgatgaggaacaagccattagcagagttcttgaagccagcatagcagagaataaagcatgtttgaagaggacacctacagaagtttggagggattctcgaaacccttatgatagaaaaagacaggacaaagctcccgttgggctaaagaatgttggcaatacttgttggtttagtgctgttattcagtcattatttaatcttttggaatttagaagattagttctgaattacaagcctccatcaaatgctcaagatttaccccgaaaccaaaaggaacatcggaatttgccttttatgcgtgagctgaggtatctatttgcacttcttgttggtaccaaaaggaagtatgttgatccatcaagagcagttgaaattcttaaggatgctttcaaatcaaatgactcacagcagcaagatgtgagtgagtttacacacaaattattagattggttagaagatgccttccaaatgaaagctgaagaggagacggatgaagagaagccaaagaaccccatggtagagttgttctatggcagattcctggctgtgggagtacttgaaggtaaaaaatttgaaaacactgaaatgtttggtcagtacccacttcaggtcaatgggttcaaagatctgcatgagtgcctagaagctgcaatgattgaaggagaaattgagtctttacattcagagaattcaggaaaatcaggccaagagcattggtttactgaattaccacctgtgttaacatttgaattgtcaagatttgaatttaatcaggcattgggaagaccagaaaaaattcacaacaaattagaatttccccaagttttatatttggacagatacatgcacagaaacagagaaataacaagaattaagagggaagagatcaagagactgaaagattacctcacggtattacaacaaaggctagaaagatatttaagctatggttccggtcccaaacgattccccttggtagatgttcttcagtatgcattggaatttgcctcaagtaaacctgtttgcacttctcctgttgacgatattgacgctagttccccacctagtggttccataccatcacagacattaccaagcacaacagaacaacagggagccctatcttcagaactgccaagcacatcaccttcatcagttgctgccatttcatcgagatcagtaatacacaaaccatttactcagtcccggatacctccagatttgcccatgcatccggcaccaaggcacataacggaggaaaaactttctgtgctggaaagttgtttacatcgctggaggacagaaatagaaaatgacaccagagatttgcaggaaagcatatccagaatccatcgaacaattgaattaatgtactctgacaaatctatgatacaagttccttatcgattacatgccgttttagttcacgaaggccaagctaatgctgggcactactgggcatatatttttgatcatcgtgaaagcagatggatgaagtacaatgatattgctgtgacaaaatcatcatgggaagagctagtgagggactcttttggtggttatagaaatgccagtgcatactgtttaatgtacataaatgataaggcacagttcctaatacaagaggagtttaataaagaaactgggcagccccttgttggtatagaaacattaccaccggatttgagagattttgttgaggaagacaaccaacgatttgaaaaagaactagaagaatgggatgcacaacttgcccagaaagctttgcaggaaaagcttttagcgtctcagaaattgagagagtcagagacttctgtgacaacagcacaagcagcaggagacccagaatatctagagcagccatcaagaagtgatttctcaaagcacttgaaagaagaaactattcaaataattaccaaggcatcacatgagcatgaagataaaagtcctgaaacagttttgcagtcgatcatgatgacaccgaacatgcaaggtattatcatggcgataggtaaatccaggagtgtatatgacaggtgtggccctgaagcagggttctttaaggcaattaagttggaatatgcaaggttggttaagttggcccaagaagacaccccaccagaaaccgattatcgtttacatcatgtagtggtctactttatccagaaccaggcaccaaagaaaattattgagaaaacattactagaacaatttggagatagaaatttgagttttgatgaaaggtgtcacaacataatgaaagttgctcaagccaaactggaaatgataaaacctgaagaagtaaacttggaggaatatgaggagtggcatcaggattataggaaattcagggaaacaactatgtatctcataattgggctagaaaattttcaaagagaaagttatatagattccttgctgttcctcatctgtgcttatcagaataacaaagaactcttgtctaaaggcttatacagaggacatgatgaagaattgatatcacattatagaagagaatgtttgctaaaattaaatgagcaagccgcagaactcttcgaatctggagaggatcgagaagtaaacaatggtttgattatcatgaatgagtttattgtcccatttttgccattattactggtggatgaaatggaagaaaaggatatactagctgtagaagatatgagaaatcgatggtgttcctaccttggtcaagaaatggaaccacacctccaagaaaagctgacagattttttgccaaaactgcttgattgttctatggagattaaaagtttccatgagccaccgaagttaccttcatattccacgcatgaactctgtgagcgatttgcccgaatcatgttgtccctcagtcgaactcctgctgatggaagataaactgcacactttccctgaacacactgtataaactctttttagttcttaacccttgccttcctgtcacagggtttgcttgttgctgctatagtttttaacttttttttattttaataactgcaaaagacaaaatgactatacagactttagtcagactgcagacaataaagctgaaaatcgcatggcgctcagacattttaaccggaactgatgtataatcacaaatctaattgattttattatggccaaactatgcttttgccaccttcctgttgcagtattactttgcttttatcttttctttctcaacagctttccattcagtctggatccttccatgactacagccatttaagtgttcagcactgtgtacgatacataatatttggtagcttgtaaatgaaataaagaataaagttttatttatggctacctatgtgtttgtaagcaggtatattgtatattagtgtattagtaatactagataaatgaattttgtctggggattaagattggatagttaatagattaatacaatcttttaattctgctctaatgctagcaaattggaaaatgtttaagtctttgacacttaaatttatctatatttttaacaaagttcttgaacttagtatggcaccggaacctgttttgaattcagtcaggtttttactcaagtaagtggtgttttttttaagtcaaactacactgaaacttttatccttttcttagattaatcttactttttaaatgtatttacaatatacagcaaggtgattatttcaagagaatcccaaagtacttgaataagggctattgtaaaatttaaaagaaatatttatatatacacatatatacacatacacacatgtatatatatattcttcataatggaggacaatgttttgcaatatataaatcattctatttttgtaaattgtatatcactttaattgaaaatgttctctactaattaatactgtgaaacaaaattgatgttgtttaactagaagttatgagtatcttaactgcctttattccttttcaaaaagaaaaagctgtagaacattttgtagatgaaactactgtttaagattaatgaattaatattgtgaatgaaaatcaaaatccatactttaaaggtaatcatgttactaaccacctatttttgaattcataaaaatttctttataaatgatgttttgtgaacatagtaaaatagaccattatactatgtgtatgtttgatacagcgtcgccaaaactagtgttctttattagtgcctctcacaaaagatcctggatggaggagtaagatgaaatattatgctattatatgatgctgtttgtaaaggtattaatgtactagtaaggtgttaatgacaaggaattagtactattcctgttgtaaagttagattttgcatattgtatctatcaaaatatgtttgggtttagattttaagttgtctactgagcagatttctgcattggttttccagtcctgttaaaagtttagaaacttcatatgtgtcatcacagcttttgtaaagaaagtatccttaatattttatgacattct

SEQ ID NO: 1848 - DNA, 4501 bp, Homo sapiens
ggcacgagggcgagcttcgccagctgagcaaggcgaaagccaaggcgcagagggccgggcagcggcgcgaagaggccgcgctgtgccaccagctgggggagctcctggccggccatggccgctacgccgaggctctggagcagcactggcaggagctgcagcttcgggagcgcgctgacgaccctctgggctgtgccgtggcccaccgcaagatcggagagcgcctggccgagatggaggactacccggctgccttgcagcaccagcaccagtacctggagctggcacattccctgcgcaaccacacggagctgcagagggcctgggccaccatcggccgcacccacctggacatctatgaccactgccagtcgagggatgctttgctgcaggcacaggctgcctttgagaagagcttggctattgtggatgaggagctggaggggacactggcccagggagagctgaatgagatgaggacccgcctctatctcaacctgggcctcacctttgagagcctgcagcagacagccctgtgcaacgattacttcaggaagagcatcttccttgcggagcagaaccacctttacgaggacctattccgcgcccgctacaacctgggcaccatccactggcgcgcgggccagcactcccaggctatgcgctgcttggagggtgcccgggagtgtgcgcacaccatgaggaagcggttcatggagagcgagtgctgcgtggttattgcacaggtcctccaagacctgggagactttttggctgccaagcgagccctgaagaaggcctacaggctgggctcccagaagcctgtgcagagggcagccatctgtcagaacctccagcatgtgctggcagtggtccggctgcagcaacagctggaagaggctgagggcagagaccctcagggtgccatggtcatctgtgagcagctaggggacctcttctccaaggcaggagactttcccagggcagctgaggcttaccagaagcagctgcgttttgctgagctgctggacagaccgggtgctgagcgggccatcatccacgtgtccctggccaccacactgggagacatgaaggaccaccatggggccgtgcgccactatgaggaggaactgaggctgcgcagcggcaacgtgctggaggaggccaagacctggctgaacattgcactgtcccgcgaggaggccggcgatgcctacgagctgctggccccgtgcttccagaaagcgctcagctgtgcccagcaggcccagcgtccccagctgcagaggcaggtcttgcagcatctccataccgtgcagctgaggctgcagccccaggaggcccctgagaccgaaaccagactgcgggagctcagtgtagctgaagatgaagatgaggaggaggaggcggaggaggcggcagccacagcggagagcgaagccctggaggccggcgaggtggagctctcagagggcgaggacgacaccgatggcctgaccccgcagctggaggaggacgaggagcttcagggccacctgggccggcggaaggggagcaagtggaaccggcgaaacgacatgggggagaccctgctgcaccgagcctgcatcgagggccagctgcgccgcgtccaggaccttgtgaggcagggccacccccttaaccctcgggactactgtggctggacacctctgcacgaggcctgcaactacgggcatctagaaattgtccgcttcctgctggaccacggggccgcagtggacgacccaggtggccagggctgcgaaggcatcacccccctccacgatgccctcaactgtggccacttcgaggtggctgagctgctgcttgaacggggggcgtccgtcaccctccgcactcgaaagggcctcagcccgctggagacgctgcagcagtgggtgaagctgtaccgcagggacctggacctggagacgcggcagaaggccagggccatggagatgctgctccaggcggctgcctcgggccaagatccccacagctcccaggccttccacaccccaagcagccttctgtttgaccccgagacctctcctcctttgagcccctgcccagaacccccctctaatagcactagactcccagaggcctctcaggtccatgtcagggtctccccagggcaggcggcaccagccatggccaggcctcggaggagcaggcatgggccagccagcagcagcagcagctcagaaggcgaggacagcgcaggccccgcacggccgtcccagaagaggcctcggtgctcggccacagcacaacgggtggcagcctggacgcctggccccgccagcaacagggaagcagccacagccagcaccagccgggcagcctaccaggcagccatccggggtgtgggcagtgctcagagccggctggggcctggcccaccgcggggccacagcaaagcccttgccccccaggcagcgctcatcccggaggaggagtgcctggctggggactggctggagctggacatgcccctgacccgcagccgccggccccgcccccggggcactggagacaaccgcaggcccagtagtacctctgggtcggacagtgaggagagcaggccccgtgcccgagccaagcaggtccgcctgacctgcatgcagagttgcagtgcgccagttaacgcagggcccagcagcctggcttcagaacctccagggagccccagcacccccagggtctcagagcccagtggggacagctctgcggcaggccagcccttgggtccggccccgccccctcccatccgggttcgagttcaagttcaggatcatctcttcctcatccctgtcccacacagcagtgacacccactctgtggcctggctggccgagcaggcggcccagcgctactaccagacctgcgggctgctgcccaggctcaccctacggaaagagggggccctgctggccccacaggacctcatccctgatgtgctgcagagcaatgacgaggtgttggctgaggtgacttcgtgggacctgcccccgttgactgaccgctaccgcagggcctgccagagcctggggcaaggggagcaccaacaggtgctgcaggccgtggagctccagggcttgggcctctcgttcagcgcctgctccctggccctggaccaggcccagcttacacccctgctgcgggccctcaagctgcacacagcactccgggagctgcgcctggcagggaaccggctgggggacaagtgtgtggctgagctggtggctgccctgggcaccatgcccagcctggccctccttgacctctcctccaatcacctgggtcccgaaggcctgcgccagcttgccatggggctcccaggccaagccaccttgcagagtttggaggagctggacttaagcatgaaccccctgggggacggctgtggccagtccctggcctccctcctgcacgcctgccccttactcagcaccctgcgcctgcaggcgtgtggcttcggccccagcttctttctgagccaccagacagcactgggtagtgctttccaagatgctgagcacctgaagaccctgtccctgtcctacaacgccctgggagcccctgccctggccaggaccctgcagagcctgcccgccggcaccctcctgcacttagagctcagctccgtggcagccggcaagggtgattcggacctcatggagcctgtattccgatacctggccaaggaaggctgtgctctagcccacctgaccctgtctgcaaaccacctgggggacaaggctgttagagacctgtgcagatgtctctctctgtgcccctcactcatctcactggatctgtctgccaaccctgagatcagctgtgccagcttggaagagctcctgtccaccctccaaaagcggccccaaggccttagcttccttggcctgtcaggctgcgccgtccagggtcccctgggcctgggcctgtgggacaagatagccgcgcagctccgggaactgcagctgtgcagcagacgcctctgcgctgaggacagggacgccctgcgccagctgcagcccagtcggccgggccccggcgagtgcacgctggaccacggctccaagctcttctttcggcgcctctgaccctggcgctgcctttccccaccctcaccgaagcccctaataaatgaagctgctggccgggcgcggtggctcacgcctgtaatcccaacactttgggaggcccaggcgggcggatcacgaggtcaggagatcgagaccatcctggctaacatggtgaaaccccgtctctactaaaaataccaaaaattagccgggcgtggtggtggaagcctgtagtcccagctactccggaggctgaggcaggagaatggcgtgaacccgggaggcggagcttgcagtgagccgagatcgcaccactgcactccagcctgggcgacagaccgagactccgtctcaaaaaaaaaaaaaaaaaaaaaaaaaaaaaaaaa

SEQ ID NO: 1849 - DNA, 2974 bp, Homo sapiens
ggaggaagcggtggctgctgcggatgtcggtgtgagcgagcggcgcctgaacacacggcggctgccgagcgcctgacccgggcctgcgccagagcctgcaccgagctccggggccccacacccgctacggtggccctgcgcccgttgctactgaggcggcgtgctctgcattcttcgctgtccaggcctgccggctctggtgtctgctggctcctccttgctcgcctgctccctcctgcttgcctgagtcaccgccgccgccgccgccacagccatggccgagagtggtgaaagcggcggtcctccgggctcccaggatagcgccgccggagccgaaggtgctggcgcccccgcggccgctgcctccgcggagcccaaaatcatgaaagtcaccgtgaagaccccgaaggaaaaggaggaattcgccgtgcccgagaatagctccgtccagcagtttaaggaagaaatctctaaacgttttaaatcacatactgaccaacttgtgttgatatttgctggaaaaattttgaaagatcaagataccttgagtcagcatggaattcatgatggacttactgttcaccttgtcattaaaacacaaaacaggcctcaggatcattcagctcagcaaacaaatacagctggaagcaatgttactacatcatcaactcctaatagtaactctacatctggttctgctactagcaacccttttggtttaggtggccttgggggacttgcaggtctgagtagcttgggtttgaatactaccaacttctctgaactacagagtcagatgcagcgacaacttttgtctaaccctgaaatgatggtccagatcatggaaaatccctttgttcagagcatgctctcaaatcctgacctgatgagacagttaattatggccaatccacaaatgcagcagttgatacagagaaatccagaaattagtcatatgttgaataatccagatataatgagacaaacgttggaacttgccaggaatccagcaatgatgcaggagatgatgaggaaccaggaccgagctttgagcaacctagaaagcatcccagggggatataatgctttaaggcgcatgtacacagatattcaggaaccaatgctgagtgctgcacaagagcagtttggtggtaatccatttgcttccttggtgagcaatacatcctctggtgaaggtagtcaaccttcccgtacagaaaatagagatccactacccaatccatgggctccacagacttcccagagttcatcagcttccagcggcactgccagcactgtgggtggcactactggtagtactgccagtggcacttctgggcagagtactactgcgccaaatttggtgcctggagtaggagctagtatgttcaacacaccaggaatgcagagcttgttgcaacaaataactgaaaacccacaactgatgcaaaacatgttgtctgccccctacatgagaagcatgatgcagtcactaagccagaatcctgaccttgctgcacagatgatgctgaataatcccctatttgctggaaatcctcagcttcaagaacaaatgagacaacagctcccaactttcctccaacaaatgcagaatcctgatacactatcagcaatgtcaaaccctagagcaatgcaggccttgttacagattcagcagggtttacagacattagcaacggaagccccgggcctcatcccagggtttactcctggcttgggggcattaggaagcactggaggctcttcgggaactaatggatctaacgccacacctagtgaaaacacaagtcccacagcaggaaccactgaacctggacatcagcagtttattcagcagatgctgcaggctcttgctggagtaaatcctcagctacagaatccagaagtcagatttcagcaacaactggaacaactcagtgcaatgggatttttgaaccgtgaagcaaacttgcaagctctaatagcaacaggaggtgatatcaatgcagctattgaaaggttactgggctcccagccatcatagcagcatttctgtatcttgaaaaaatgtaatttatttttgataacggctcttaaactttaaaatacctgctttatttcattttgactcttggaattctgtgctgttataaacaaacccaatatgatgcattttaaggtggagtacagtaagatgtgtgggtttttctgtatttttcttttctggaacagtgggaattaaggctactgcatgcatcacttctgcatttattgtaattttttaaaaacatcaccttttatagttgggtgaccagattttgtcctgcatctgtccagtttatttgctttttaaacattagcctatggtagtaatttatgtagaataaaagcattaaaaagaagcaaatcatttgcactctataatttgtggtacagtattgcttattgtgactttggcatgcatttttgcaaacaatgctgtaagatttatactactgataattttgttttatttgtatacaatatagagtatgcacatttgggactgcatttctggaaacatactgcaataggctctctgagcaaaacacctgtaactaaaaaagtgaagataagaaaatactcttaaagctgagtatttcctaattgtatagaatcttacagcatctttgacaaacatctcccagcaaaagtgccggttagtcaggtttgttgaaaatacagtagaaaagctgattctggttatctctttaaggacaattaattgtacagacacataatgtaacattgtctcaacattcattcacagattgactgtaaattaccttaatctttgtgcagactgaaggaacactgtagtataccccaaagtgcatttgcctaggacttctcagcttctcccataggtagtttaacaggcattaaaatttgtaattgaaatgttgctttcactcaaaaaaaaaaaaaaaaaaaa

SEQ ID NO: 1850 - DNA, 1303 bp, Homo sapiens
ggcttctgggagcgaccgctccgctcgtctcgttggttccggaggtcgctgcggcggtgggaaatgctggcgcgcgcggcgcggggcactggggcccttttgctgaggggctctctactggcttctggccgcgctccgcgccgcgcctcctctggattgccccgaaacaccgtggtactgttcgtgccgcagcaggaggcctgggtggtggagcgaatgggccgattccaccggatcctggagcctggtttgaacatcctcatccctgtgttagaccggatccgatatgtgcagagtctcaaggaaattgtcatcaacgtgcctgagcagtcggctgtgactctcgacaatgtaactctgcaaatcgatggagtcctttacctgcgcatcatggacccttacaaggcaagctacggtgtggaggaccctgagtatgccgtcacccagctagctcaaacaaccatgagatcagagctcggcaaactctctctggacaaagtcttccgggaacgggagtccctgaatgccagcattgtggatgccatcaaccaagctgctgactgctggggtatccgctgcctccgttatgagatcaaggatatccatgtgccaccccgggtgaaagagtctatgcagatgcaggtggaggcagagcggcggaaacgggccacagttctagagtctgaggggacccgagagtcggccatcaatgtggcagaagggaagaaacaggcccagatcctggcctccgaagcagaaaaggctgaacagataaatcaggcagcaggagaggccagtgcagttctggcgaaggccaaggctaaagctgaagctattcgaatcctggctgcagctctgacacaacataatggagatgcagcagcttcactgactgtggccgagcagtatgtcagcgcgttctccaaactggccaaggactccaacactatcctactgccctccaaccctggcgatgtcaccagcatggtggctcaggccatgggtgtatatggagccctcaccaaagccccagtgccagggactccagactcactctccagtgggagcagcagagatgtccagggtacagatgcaagtcttgatgaggaacttgatcgagtcaagatgagttagtggagctgggcttggccagggagtctggggacaaggaagcagattttcctgattctggctctagcttccctgccaagattttggtttttatttttttatttgaactttagtcgtgtaataaactcaccagtggcaaacctgaaaaaaaaaaaaaaaaaaaaaaaaaaaa

SEQ ID NO: 1851 - DNA, 1009 bp, Homo sapiens
tgtgaacccacatccctgcccccagggccacctgcaggacgccgacacctacccctcagcagacgccggagagaaatgagtagcaacaaagagcagcggtcagcagtgttcgtgatcctctttgccctcatcaccatcctcatcctctacagctccaacagtgccaatgaggtcttccattacggctccctgcggggccgtagccgccgacctgtcaacctcaagaagtggagcatcactgacggctatgtccccattctcggcaacaagacactgccctctcggtgccaccagtgtgtgattgtcagcagctccagccacctgctgggcaccaagctgggccctgagatcgagcgggctgagtgtacaatccgcatgaatgatgcacccaccactggctactcagctgatgtgggcaacaagaccacctaccgcgtcgtggcccattccagtgtgttccgcgtgctgaggaggccccaggagtttgtcaaccggacccctgaaaccgtgttcatcttctgggggcccccgagcaagatgcagaagccccagggcagcctcgtgcgtgtgatccagcgagcgggcctggtgttccccaacatggaagcatatgccgtctctcccggccgcatgcggcaatttgacgacctcttccggggtgagacgggcaaggacagggagaagtctcattcgtggttgagcacaggctggtttaccatggtgatcgcggtggagttgtgtgaccacgtgcatgtctatggcatggtcccccccaactactgcagccagcggccccgcctccagcgcatgccctaccactactacgagcccaaggggccggacgaatgtgtcacctacatccagaatgagcacagtcgcaagggcaaccaccaccgcttcatcaccgagaaaagggtcttctcatcgtgggcccagctgtatggcatcaccttctcccacccctcctggacctaggccacccagcctgtgggacctcaggagggtcaga

SEQ ID NO: 1852 - DNA, 9408 bp, Homo sapiens
gttccactcacagatttcttcttattgcccaggcttgagtgcaatgacctgttctcagcttactcaacctctgcctcttgggtttcagtgatttttctgcctcggcctcctgagtagctaagggaggagtcttgagattatcatccacggagggtggaagaggagagggtggaaggggaataagaagacattcgggaggtgtcttgaggctcagggagttatcagttatagaatgttgttgagttggaggaagtggctggcggcccatcctgttttttaaagtttcacctgtgaagtagggccagtagggcaatcctgaagaatgacgatgctccgctgccgccattctgacctgtaaggccgaaagaaagggaatgttttcacacatattcatttgatggacaaaattaccgccaccaacacggtctgcaccttctgttgctggtgataaatttttgcacctttccatcctccaggtttcaaaatagcagtatcagtgtcataatatcacccttccactgagtactgccgacagctggggagtaaaaaaaagtcattgggacatcaccctacagcagttcaggctgtgtggttcgcaagaagcatacactggctttttgattcttgctagttcccagctcacagtttgggaggatccaacaccaacctttacgtgaagtggaggcccaaggacagtgaggagctgggtggtcccagcctggagctgtgccagcctgacatggaaatggaggcaaacgaggcaaacgaccattttaactttactggccttccccctgcacctgctgcctcaggactgaaaccctctccttcctcaggggagggcctctacactaacgggtctcccatgaacttcccccagcaagggaaaagtttgaatggggatgtgaatgttaatggcttatctactgtatctcacactactacttcagggattttgaactctgctccccactcctccagcacctcacacctccatcaccccagcgtggcctacgactgtctctggaactactcacagtacccatctgccaatcctggcagcaacctcaaggacccaccccttctctcccagttctcggggggacaatacccactcaacggcatccttgggggcagccggcaaccttcatccccaagtcataacactaaccttcgggctgggagccaaaagttctgggccaacggtacccatagtcccatggggcttaactttgattcacaagaactgtatgattcctttcctgaccagaattttgaggaggtatgcagtggtatccatcctgatgaggcagcagaaaaagagatgacttccgttgtggcagaaaatggcactggcttggtatgcagcttggagctggaagaagaacagccagaactgaagatgtgtggctacaatggctctgtcccttctgtggaatcgttacaccaagaggtctcagtcctggtccctgaccccacagtgagctgtttagatgatccttcacatcttcctgatcaactggaagacactccaatcctcagtgaagactctctggagcccttcaactctctggcaccagagccagtgagtggaggactatatggtattgatgacacggagctgatgggtgcagaagacaagctgcctcttgaggacagccctgtgatttctgcccttgattgcccttccctcaataatgctactgccttcagtctcctggcagatgatagtcaaacatcaacttctatctttgccagtcccacttctccacctgtcctaggggagtctgtcctgcaagataacagctttgacctgaataatggtagtgacgctgaacaggaagaaatggaaactcaatcttcagacttcccaccatccctgacccagccagctcctgatcagtcatccactattcagctacatccagcaacctcaccagcagtctcgccaacaacctccccagcagtctccctagtggtttctccagcagcctccccagaaatctctccagaagtttgtcccgcagcttctacagttgtctctccagcagtcttctcagtggtctctccagcttcttcagcagtcctcccagcagtctccttagaagtcccgttgacggcttcagtgacatccccaaaagcctctcccgtaacttccccagcagctgcctttccaacagcctccccagcaaataaggatgtcagcagctttctagaaaccactgctgacgtggaagagatcactggagaaggactcactgcttctggtagtggtgatgtcatgaggagacgtattgctaccccagaagaagttcgtcttcccctccaacatgggtggcggagagaggtgcgcatcaagaagggcagccaccgatggcagggggagacctggtattatggcccctgtgggaagaggatgaagcaatttccagaagtgatcaagtacctgagccgcaacctggtacacagtgtccgccgagagcacttcagcttcagtccccgtatgcctgttggagatttctttgaagaaagagacacgccagagggcttgcagtgggtgcagctctcagcagaggagatcccgtcgaggattcaggcaattactggcaaacggggtcgacctcgaaacactgagaaggctaagactaaggaagtccccaaggtgaaacggggtcgaggtcggccacctaaggtcaaaatcactgagctattgaacaagacagacaaccgccccctaaagaaactggaggcccaagaaacattgaatgaggaggataaagcaaagattgctaaaagcaagaagaagatgaggcagaaggttcaacggggagagtgtctgactactatccaagggcaggccagaaataagcggaaacaagagaccaagagcttaaagcacaaggaagctaagaagaaatccaaggctgagaaagaaaaaggaaagacaaagcaggaaaaactgaaggaaaaagtcaagagggaaaagaaggagaaggttaaaatgaaggaaaaggaggaggtgaccaaagccaagccagcctgtaaagcagataagaccctggccacacagaggcgcttggaggaacggcagaagcagcagatgatcttggaggaaatgaagaagccgacagaggatatgtgtctgactgaccaccagcccctgcctgacttctcacgagtccctggtctgacattgcccagtggagccttctcagactgcttgaccattgtggagttcctgcatagctttggcaaggtgctgggctttgatcctgccaaagatgtgcctagcctgggggtcctgcaggagggactcctgtgtcaaggtgacagcttgggtgaggtgcaagacctgctggtcaggctgctgaaggctgcactccatgatcctggctttccctcctactgtcagtccctaaagatcttgggggagaaggtgtctgaaatcccactgacaagagacaatgtgtcagagatcctgcgctgcttccttatggcatatggagtagagccagccctctgtgaccgcctgcgcacccagccttttcaggcccagccaccccagcagaaggctgctgtcctggccttccctgtgcatgagctcaatggctccaccctcatcatcaatgagattgacaagactctggagagtatgtccagctacaggaaaaacaagtggattgttgaaggccggctccggaggctgaaaactgttctggccaagcgaactgggcggtctgaagtagagatgggaaggccagaggaatgcctgggacggaggcgcagttctcggatcatggaggagaccagtggcatggaagaagaggaagaagaggagtctatagcagctgtccctggccgcaggggtcgaagagatggagaggttgatgccacagcatctagcatcccagagctagagcgccagatagaaaaactcagcaagcgtcagcttttctttcgcaaaaagctgcttcactcatcccagatgcttcgggcggtctccctgggtcaggaccgctacagacgtcgctactgggtattgccgtatttggctggtatctttgtagaaggaacagaggggaacttagttcctgaggaggtgataaagaaggaaactgactccttaaaagtggcagcccatgcgtcactcaaccctgccctcttctctatgaagatggagttagctggctccaacaccactgccagttctcctgcccgggcccgaagccgacctctaaaaactaagcccgggtttatgcaacctaggcattttaagtcccctgtcaggggtcaggattcagaacagccccaggcccagcttcagcctgaggctcagcttcatgttcctgcccagccccagcctcagcttcagcttcagcttcagtcccataaggggttcctggagcaagaaggctcccctttgtcactgggtcagagccagcatgacctcagccagtcagccttcctgtcttggctgagccagactcagagccatagctccctgttgagcagctcagtcctcacacctgatagcagtccgggaaaactagacccagctccatcacaacccccggaggagccagagcctgatgaggcagaatccagccctgatcttcaagcattctggtttaacatctcagcccagatgccctgcaatgctgcccccacaccgccccttgcagtttctgaggaccaacccactccctcccctcagcagcttgcctcctccaagccaatgaatagacctagtgctgccaacccttgttctccagtgcagttctcttccacgcccttggctgggttggcccctaagaggcgagcaggagaccctggagaaatgccacagagtcccacagggctgggacagcccaaacggagagggagacctcccagtaagttcttcaaacagatggaacagcgttacctaacccagctgacagcccagcctgtcccacctgagatgtgctcaggctggtggtggataccagatcctgagatgttggatgccatgctcaaggccctacacccccgaggtatccgggagaaggcacttcacaaacaccttaacaagcacagggacttcttgcaggaagtctgcctgcggccctcagctgaccccatctttgagcccaggcaactacctgcctttcaagaagggattatgagctggtcccccaaagagaagacatacgagacagacctagcagtgcttcaatgggtagaggagctggagcagcgggttatcatgtctgatctgcagattcggggctggacatgtcctagcccagactctacccgtgaagacttggcctactgtgagcacctctccgactcccaggaggatatcacctggcgaggtccgggcagggagggactggcacctcaacgtaaaactaccaaccctttggacctggctgtgatgcggctggctgccctggaacaaaatgtaaaacggcggtacctgcgggagcccctctggccaactcatgaggttgtgctggagaaagccctgcttagcacacctaatggtgcccctgagggcaccactacagagatatcatatgagatcacccctcgcattcgtatctggcgccagaccctccagcggtgccggagcgcagcccatgtgtgcttgtgcctgggccatctggagaggtccattgcctgggagaagtctgtcaacaaagtgacatgtctagtctgccggaagggtgacaatgatgagtttcttctgctttgtgatgggtgtgaccgtggctgccacatttactgccatcgtcccaagatggaggctgtcccagaaggagattggttctgtactgtctgtttggctcagcaggtggagggagaattcactcagaagcctggtttcccaaagcgtggccagaagcggaaaagtggttattcgctgaacttctcagaaggtgatggccgccgacgccgggtactgttgaagggccgagaaagcccagcagcagggcctcggtactcggaagaaaggctctccccctccaagcggcggcgactctctatgcggaaccaccacagtgatctcacattttgcgagattatcctgatggagatggaatcccatgatgcagcctggcctttcctagagcctgtgaacccacgtttggtgagtgggtaccggcgcatcatcaaaaatcctatggatttttccaccatgcgggagcggctgctcaggggagggtacaccagctcagaggagtttgcggctgatgccctcctggtatttgacaactgccagactttcaacgaggatgactctgaagtaggcaaggctgggcacatcatgcgccgcttcttcgagagccgctgggaggagttttatcagggaaaacaggccaatctgtgaggcaagggaggtggggagtcaccttgtggcatctccccccaccttccaaacaaaaacctgccattttcacctgctgatgctgccctgggtccagactcaagtcagatacaaccctgatttttgaccttgcccttggcagtgccccacatcctcttattcctacatccctttctcccttccctcctcttgctcctcaagtaagaggtgcagagaggagtccttctggactaaaagccaaaaaaagaaagaaaaaaataatttttcttttctgttttatttgctaattaaaaatggggagggggaaagtcgtccctacttcctcctccgtgcttcctctcctcccctgtacgtgccccagcattctggggttatttaacaatagcaatagttctagtgaatgtgtgaaaccaagaaacactctgtactgtgtgcggacccgcagtgacggccagtaaagtggacttaactcccaagtgtgtcgcggccggacaccgggccctggacatgctgcttccatgttcagtcccttccctgcttctcgctgtctttcttttcccacctcccaccccccagttttcagattttctctcatccaataatgtaaaactatcgtgtacgggttcctccctccttttctcttctcccaaatcttttcccttcaaaggaaaaaaaaatgttcagaggtccctgtcttctgtccccatcttcctgccgatagctatcccctgtatgatgttggatgctcctcacatgctgagtttccagccttttctgaaactcattagctggggagagggcagggaggcttcctgggccttccaacctccttccccacctccttcccaaaccctcttgggaactcctcagggacaactactgctgagtttgggtgcacccaaagatggaggccaagtagcaatggggccggcctcacagagagcgccgtgtgtgtgtgtgtgtgtgtgtgtgtgtgtgtgtccgccacacaacgcgctgtgtgtgtgtgtgtgtgtctcacacacacagcgcgcagtgtgtgtgtgtgtgtgtgtgtgtatgtgtgtgtgtgtgtgaccctgtattgtttgataggatccattcagtttccccaagtacctgttttcattcccatttttcccattgtttaaaaccatcacttttttgtctttgggaaaccacaggaacaatttctctggagacaaggctgtgtctctctcctggtcatttttgttccagcctcttcagactgtgcatcttttcagcaggaactccctctcttctcggtagctttgaatcttaagcttctacgggagagtggtagaactggatcatttcataatcccatttagttgtgcttttcttcatatacttcataccccaggaccccttccccagcagcagagaccctggagcacaggagagtagggaggaggggttctgggtccatcactgccttacatgtgactatgtccaagttaagcccccaacacgagaggaaagctgctgactcccagctatagccatgggcacttggccccctgcttttcctgctcagcagagcccctcccttcagagattacgggtacttgcactggggaggtggctgctggctggcccaagcagagagctgaggcatccaagaaatgttccattggggggtgggggtgccaggtgaggtggagcattccttgtattctggcagcactgaagagccactgaagggggtaggggcagtgtaggtcctggggcagcccctttattcctttatgccccttctccctcatagcctatttctaaagtcgccttttctgtcagataaacctcaaaacttttaattttatttgagatttttttttgcttttaagaggtggattgaagaatatttgaattgactttatattatgcataaatatttatattttatctaaataactgcgctgtaacaaactttgtgttagacagttgaaactgttagagttgggggctctgctttttccccctggcaattttcccttggtataagatgtgctagattaatttcattgtgaggtggatgggggagtgaaattgtgaggtggatgggggagtgaaatctccatggttcctgctttgtgttcctctcccagctccatctctttccctagggaccaggcactcatatggcggggtggggtcctagcctcagtttgaagaagtgggggctggagcggggttgggggtggtagggatagggcatgatcaaaggggccatttcttgcttttctttcctcatcttcactgcccccttgagctaggtggattttctcttcatgacaagagtatttggtagggaaagcaggtttaaaataaaaagacaacccaccccctgcccttttgcttccctcccatcagtctggttgacaggaagaaaccacaccatcaacaccaacaagtttctgtgttccttttacagcaaaagggactttttatataaccaaatgtggtgttttagtgactttttgataatgtacagttttttgtgaatttaaatttatttctttctatatttttaggaccaatttcatttttaataaggttaaaaagaaaaaaaaagtctagcgaaaaaactcctgtttttgccatgtgatgttccacaagtgcagctgtagaaaagtgcttgtcagttgttgaataaaaaaaccacatttgatagagattcaaaagactctgtgtattcatcttcccttctacacacctgagggggagacggcgttgggataggtatgactggcttaagagaccacaggcaagggaacaacaggggctcctgttccataccctctgtgtgggatggaaagggtcattagtgctcccgcctaaatgtctggctgagttgctggaagcaaaggggggattcagtgcatccaggtcctgccttgtgagatgtggccccagcttcctaagctgccacctctgtgttcctgtcatagcaaatatgggaccatcaccagcttaccacttcccactcacggataagacaccaagacgtagac

SEQ ID NO: 1853 - DNA, 4318 bp, Homo sapiens
aagcggctcgggctgcggctggctcagagtgccgcggggggcgtggggcggtgctgaggagctgaagccgtggccagctcgactccggacagtccagcgagcagcacggcgggaaccggcagccggagcagtcccggagcagaagcagcagcagcagcagcagccctcgccgttcgcggagcgcagccgagccggccatggcgttgtcgatgccgctgaatgggctgaaggaggaggacaaagagcccctcatcgagctcttcgtcaaggctggcagtgatggtgaaagcataggaaactgccccttttcccagaggctcttcatgattctttggctcaaaggagttgtatttagtgtgacgactgttgacctgaaaaggaagccagcagacctgcagaacttggctcccgggacccacccaccatttataactttcaacagtgaagtcaaaacggatgtaaataagattgaggaatttcttgaagaggtcttatgccctcccaagtacttaaagctttcaccaaaacacccagaatcaaatactgctggaatggacatctttgccaaattctctgcatatatcaagaattcaaggccagaggctaatgaagcactggagaggggtctcctgaaaaccctgcagaaactggatgaatatctgaattctcctctccctgatgaaattgatgaaaatagtatggaggacataaagttttctacacgtaaatttctggatggcaatgaaatgacattagctgattgcaacctgctgcccaaactgcatattgtcaaggtggtggccaaaaaatatcgcaactttgatattccaaaagaaatgactggcatctggagatacctaactaatgcatacagtagggacgagttcaccaatacctgtcccagtgataaggaggttgaaatagcatatagtgatgtagccaaaagactcaccaagtaaaatcgcgtttgtaaaagagatgtcttcatgtcttcccctaagaatacgcttttcctaacaggctactccttcctgtagagcagaaattgtattttgcacgaacatgcagttattgaagattaggatcaaggatagacaaggtatagtagttatcttaaaatatacactcctaagcagtattattttaaaatcctttaccctggctacctcccctacccgggttcccctctctttaatttggagacactccaccacaaacttttcactttagaggtagcttgccatctctcaggagccctcaccattgtgtccattcactgtgtatagatggcagaacttttgaggtgcaatgtttaattgttaaaaatagtagccacgactttatcaggcagccccaaactggtgcataatgcatggtacaagaaatatttatgtattttttggaattttgtaatatttagtaggagtatatgaaaggattgctactgtatcagaaatattgtttcaatttagtctatcctggatatgtactaacgaatattaccaccagagaagagagctttctacaaaagtcactacagattttgctatattgctttgtagatagatttttacttttgcctaaaagcatttatccttcataccaattgtaacatctgacaccatgtagaagctaaaagtttagagggagtgagcgttttctcaagaccttcctcaagcattttatctttagaagagaaactgatgggcacctgatactctgtctaaatacgtttgttatatgtgttttgccctgtgccattcatttggaactttattgcattctttattttaaaaagcttgtttttacgtaatcatagagcttgctatttgtacatctgttgagcaacactacataactgatttttagttgacttagctatagcagtacaatgattagtaatgtaaaaattaacacagaaattaacctaaggaatgaagggtgggtttgtcaaaatatcaagtaaatttttgtttctaaagtacatttaatgtagatgacctaaagaatgcgttatccatcctatataaaagaaagataaaacacaggtcaccaattttctcatttcaccccatttaccttgtatagaggattgttcattcctttgggactaagttatagttatggtgagtgtgtatttactgtagttttgcctgatctcactcattgcacttcctggagttaaattttccaacagccatgttgaggaatagcactctgcatgtttttgttttgtttttcggggttttttttaattgaagccctaaaccaggaattatttgtgttctaacaggaggatgaacttgctgaaaataaaactttgctatgtatttactcttttttaaaagacaaaagcaaaaccagactttctacgtactactccaaagactgtgattgtgactataatacatttttggtaatttttttatacctaatttgtataggaagtgctatttctcataggctgtttcttgaaattttaagtttattgctttaaaatggcagtgtttctcccactttgatatgctaacatttagtaagcactggctttatgaaagcggctttttataagtatactgcattttttgagcctatcattaattagcttagtatgaaagataagaaaatctccatgttgtatccatttggctcaggaagattctttgccttacctttcttagaactctttattgcttatcaaaagtttgagtacccgcttggtttttttttggtaattaaatattgtatgatttatctggttcaaggaagatgcactattcagttatctattgagaaattattttgcagtggttttagtgggtgaaaatgtcccatctgcaccagtacacaggcaggcattatcattcttcacctactttttaaatagtggcaacttgggattctttctggtgattctgaaccttgcctcatagcttaaagtataaaaaaagattcaagagcagtgaggtttgttctttccagtgaatggtggactgagtggtgcgaggtggagggctaacaagaggaaagaactacattcttcagaatacagtgatgaaaattcattttgaaactcaaatattttcattttggatattctcctgtttttattaaaccagtgattacacctggccatccctctaaatgttctaggaaggcatgtctattgtgattttgatgaagacagaattatttttctctgtagaaacacagataccactttatcagggaagttagtcaaatgaaatggaaattggtaaatggacaaaagctagctagtaaaaaggacgacccagcaacatgctttaaccccattgtatgtttgtggaaagagcatagtttaacatcttgagaaatttgggacataaagttttcatggtagacagttcatgcagtatatgaattgacataatggaaataatctgattttatttttacaactaacatccattccccttcatttaaacaccttttgtgttttacttcagtgaggagattggagtctgaatggatctgttttccaagagattctgagaaatttttgtattcagcagttggaaagctctctattctagttgataaaacttcccttttttgatgtagatgcagatattctatacagttctgttgtcttttactaggactgtaaacttttgtgataaaattcaaataagattttatttctttgtaattttggctttcacaatttatctttaaatccttgagcaatctgtatacaattaagagatttctgacatttattcttacactaaatggatcaactctaggatttaggcatgttaacttctgttgtgttttgaatctctccagagttgcatgtagatagcatttatttctgtgcccttaaacccatttagaaaataactacaaagtaaaaatgtagaggaaatagaaatgtattttttcatgaacattttgatacaaatttcatcatttaatgattcaccaatttcttgcattaatttgaatttaagcatttaattcaaagagaggggagcatccattattggtacatgtgggcttttaaaaactccatcctttataaatagtcaaggtttgggccacacaaagtatatttttatcatggaaaaatttcaactcctcaagccgtaatgttgaacagaattggagtattttctttataatttcttgaacaggcaaatgaaagcttattatagaatgcatgtattttcttttatctttggaacatcagcaccagtatattgctggcagctattgtattaaaaaataaagtatattttcactatcaaaaaaaaaaaaaaaaaaaaaaaaaaaa

SEQ ID NO: 1854 - DNA, 3488 bp, Homo sapiens
ttcatctgtacctttcaagtattcaaatagaaaaatataaacaatgtaaataaaatagcaaaacaatgtaatatctcataaaactgcaatggtaaaagcatttatcctattgaaattccacaatttttatttgaaaatattatcgacatgtaattcaagtggcatttagaagaataatttaaaagcaacaactctatagaaagcttgtaaaatgattaagtagtttaaaccaaataaaacaatttctgagtcagtcatctccagtaggtctattttagtctcaagataaattcatttctggtgacaactgaagttcttagttatttgttagtatatattggagacatttacaataaagcttagagcacaatgggaaatgaaagtatcatgttttttttaagaccaaatgtattgcagaaatgtgagtaatttaatccgatgctacaatctgatcattctgatctaatctgatcatttaataacactaaataaaaccttcatctcacattctttggctgtttcttttaaaatatgggtttacggataaatcaaataaattcaaaacaaagtaataagcaaatgatttttttttctcagtaatctagtagagtattacatttagaagtaatctgtatctcagtgcagtaactatttaggactgtaagcgccgctgttcacctactggaagacaaatgcaaccgaaaacactcagatctcacacctcacgaagacccgcagatgccacaaactaactgctggactgcagcgaaacccgacccctgtttggaggcactccaggtttccggaggattgtcatctccatagctgcggcaagaaactaaataagacccatttatgcacagtgaagattctgagaggattctgcagcaaaacaacaatggccgctccacagagtcgccccagacgcggcgagctgatcctgctgtgcgcgctgctgggaacgctgtgggaaatcgggaggggacagattcgctactctgtgccagaagagacggacaaaggctccttcgtgggtaatatctccaaggacctggggctggacccccggaagctggcgaagcacggagtccgtatcgtctccagaggtaggacgcagctctttgctctgaacccgcgcagcggcagcttgatcaccgcgggcaggatagatcgggaggagctctgcgctcagagcccgcggtgtctgataaatattaacaccctggttgaggataaaggaaaactctttggggtagaaatagaaataattgatattaacgataataacccaaaattccaggtcgaagatctagaagtaaaaattaacgaaatcgcggttcctggagcacgttatccactcccagaagctgttgacccggatgtgggcgtgaactccctccagagctaccagctcagccccaatcaccacttctccctggacgtgcagactggagacaatggagccataaacccagagctggtgctggagcgcgccctggacagggaggaagaggctgctcaccacctggtcctcacggcctcggatggcggcaagccgcctcgctctagcacagtgcgcatccacgtgacagtgttggatacaaatgacaatgccccggtttttcctcacccgatttaccgagtgaaagtccttgagaacatgcccccaggcacgcggctgcttactgtaacagccagcgacccggatgagggaatcaacggaaaagtggcatacaaattccggaaaattaatgaaaaacaaactccgttattccagcttaatgaaaatactggggaaatatcaatagcaaaaagtctagattatgaagaatgttcattttatgaaatggaaatacaagccgaagatgtgggggcacttctggggaggaccaaattgctcatttcggtggaagatgtaaatgacaatagaccagaagtgatcattacgtctttgtttagcccagtgttagaaaattctcttcccgggacagtaattgccttcttgagtgtgcatgaccaagactctggaaagaatggtcaagttgtctgttacacacgtgataatttaccttttaaattagaaaagtcaataggtaattattatagattagtgacaaggaaatatttggaccgagaaaatgtctctatctacaatatcacagtgatggcctcagatctaggaacaccacctctgtccactgaaactcaaatcgctctgcacgtggcagacattaacgacaaccctcctactttccctcatgcctcctactcagcgtatatcctagagaacaacctgagaggagcctccatcttttccttgactgcacacgaccccgacagccaggagaatgcccaggtcacttactctgtgaccgaggacacgctgcagggggcgcccctgtcctcgtatatctccatcaactctgacaccggtgtcctgtatgcgctgcaatctttcgactatgagcagatccgagacctgcagctactggtaacagccagcgacagcggggacccgcccctcagcagcaacatgtcactgagcctgttcgtgctggaccagaatgacaacgcgcccgagatcctgtaccccgccctccccacagacggttccactggcgtggagctggcgccccgctccgcagagcgtggctacctggtgaccaaggtggtggcggtggacagagactcgggccagaacgcctggctgtcctaccgcctgctcaaggccagcgagccgggactcttctcggtgggtctgcacacgggcgaggtgcgcacggcgcgagccctgctggacagagatgcgctcaagcagagcctcgtggtggccgtccaggaccatggccagccccctctctccgccactgtcacgctcaccgtagccgtggctgacagcatccccgaagtcctgaccgagttgggcagtctgaagccttcggtcgacccgaacgattcgagccttacactctatctcgtggtggcagtggctgccatctcctgtgtcttcctcgcctttgtcgctgtgcttctggggctcaggctgaggcgctggcacaagtcacgcctgctccaggattccggtggcagattggtaggcgtgcctgcctcacattttgtgggtgttgaggaggtacaggctttcctgcagacctattcccaggaagtctccctcaccgccgactcgcggaagagtcacctgatctttccccagcccaactacgcagacatgctcatcagtcaggagggctgtgagaaaaatgattctttgttaacatccgtagattttcatgaatataagaatgaagctgatcatggtcaggtgagtttagttctttgcttgcttttaatttccagatgaattttatttggcataaattatgttttgaaaaacattgtgaagatagttgaaaataatttttaaggtgtatcacagagttttgggtttattttggtggtgttactataaaattgaactctaatagtca

SEQ ID NO: 1855 - DNA, 11036 bp, Homo sapiens
catgaggcttttaagaatcatgtgttcaatgtagacaatgcaaaatttgtagttaaatttgacctcaattgactacaaaatttgtagttaaatttgactacaattggaaatgccaaaaactcactaatagggatgtgggcgctatctccaactgtctttgcacttctgagtaagaatctgatgattgtgcacagtgacctggctgttcacttccctgccattcagtatgctgtgctctacacattgtattctcattgtaccaggcatgatcactttatctctagtagcctcagttcttcctctccttctttgtttgatggagctgtgattagcactgtaactacggctacaaagaaacatttctcaattatattaaatcttctgggaatattacttaagaaagataaccttaaccaggacacgaggaaactgttaatgacttgggctttggaagcagctgttttaatgaagaagtctgaaacatacgcacctttattctctcttccgtctttccataaattttgcaaaggccttttagccaacactctcgttgaagatgtgaatatctgtctgcaggcatgcagcagtctacatgctctgtcctcttccttgccagatgatcttttacagagatgtgtcgatgtttgccgtgttcaactagtgcacagtggaactcgtattcgacaagcatttggaaaactgttgaaatcaattcctttagatgttgtcctaagcaataacaatcacacagaaattcaagaaatttctttagcattaagaagtcacatgagtaaagcaccaagtaatacattccacccccaagatttctctgatgttattagttttattttgtatgggaactctcatagaacagggaaggacaattggttggaaagactgttctatagctgccagagactggataagcgtgaccagtcaacaattccacgcaatctcctgaagacagatgctgtcctttggcagtgggccatatgggaagctgcacaattcactgttctttctaagctgagaaccccactgggcagagctcaagacaccttccagacaattgaaggtatcattcgaagtctcgcagctcacacattaaaccctgatcaggatgttagtcagtggacaactgcagacaatgatgaaggccatggtaacaaccaacttagacttgttcttcttctgcagtatctggaaaatctggagaaattaatgtataatgcatacgagggatgtgctaatgcattaacttcacctcccaaggtcattagaacttttttctataccaatcgccaaacttgtcaggactggctaacgcggattcgactctccatcatgagggtaggattgttggcaggccagcctgcagtgacagtgagacatggctttgacttgcttacagagatgaaaacaaccagcctatctcaggggaatgaattggaagtaaccattatgatggtggtagaagcattatgtgaacttcattgtcctgaagctatacagggaattgctgtctggtcatcatctattgttggaaaaaatcttctgtggattaactcagtggctcaacaggctgaagggaggtttgaaaaggcctctgtggagtaccaggaacacctgtgtgccatgacaggtgttgattgctgcatctccagctttgacaaatcggtgctcaccttagccaatgctgggcgtaacagtgccagcccgaaacattctctgaatggtgaatccagaaaaactgtgctgtccaaaccgactgactcttcccctgaggttataaattatttaggaaataaagcatgtgagtgctacatctcaattgccgattgggctgctgtgcaggaatggcagaacgctatccatgacttgaaaaagagtaccagtagcacttccctcaacctgaaagctgacttcaactatataaaatcattaagcagctttgagtctggaaaatttgttgaatgtaccgagcagttagaattgttaccaggagaaaatatcaatctacttgctggaggatcaaaagaaaaaatagacatgaaaaaactgcttcctaacatgttaagtccggatccgagggaacttcagaaatccattgaagttcaattgttaagaagttctgtttgtttggcaactgctttaaacccgatagaacaagatcagaagtggcagtctataactgaaaatgtggtaaagtacttgaagcaaacatcccgcatcgctattggacctctgagactttctactttaacagtttcacagtctttgccagttctaagtaccttgcagctgtattgctcatctgctttggagaacacagtttctaacagactttcaacagaggactgtcttattccactcttcagtgaagctttacgttcatgtaaacagcatgacgtgaggccatggatgcaggcattaaggtatactatgtaccagaatcagttgttggagaaaattaaagaacaaacagtcccaattagaagccatctcatggaattaggtctaacagcagcaaaatttgctagaaaacgagggaatgtgtcccttgcaacaagactgctggcacagtgcagtgaagttcagctgggaaagaccaccactgcacaggatttagtccaacattttaaaaaactatcaacccaaggtcaagtggatgaaaaatgggggcccgaacttgatattgaaaaaaccaaattgctttatacagcaggccagtcaacacatgcaatggaaatgttgagttcttgtgccatatctttctgcaagtctgtgaaagctgaatatgcagttgctaaatcaattctgacactggctaaatggatccaggcagaatggaaagagatttcaggacagctgaaacaggtttacagagctcagcaccaacagaacttcacaggtctttctactttgtctaaaaacatactcactctaatagaactgccatctgttaatacgatggaagaagagtatcctcggatcgagagtgaatctacagtgcatattggagttggagaacctgacttcattttgggacagttgtatcacctgtcttcagtacaggcacctgaagtagccaaatcttgggcagcgttggccagctgggcttataggtggggcagaaaggtggttgacaatgccagtcagggagaaggtgttcgtctgctgcctagagaaaaatctgaagttcagaatctacttccagacactataactgaggaagagaaagagagaatatatggtattcttggacaggctgtgtgtcggccggcggggattcaggatgaagatataacacttcagataactgagagtgaagacaacgaagaagatgacatggttgatgttatctggcgtcagttgatatcaagctgcccatggctttcagaacttgatgaaagtgcaactgaaggagttattaaagtgtggaggaaagttgtagatagaatattcagcctgtacaaactctcttgcagtgcatactttactttccttaaactcaacgctggtcaaattcctttagatgaggatgaccctaggctgcatttaagtcacagagtggaacagagcactgatgacatgattgtgatggccacattgcgcctgctgcggttgctcgtgaagcacgctggtgagcttcggcagtatctggagcacggcttggagacaacacccactgcaccatggagaggaattattccgcaacttttctcacgcttaaaccaccctgaagtgtatgtgcgccaaagtatttgtaaccttctctgccgtgtggctcaagattccccacatctcatattgtatcctgcaatagtgggtaccatatcgcttagtagtgaatcccaggcttcaggaaataaattttccactgcaattccaactttacttggcaatattcaaggagaagaattgctggtttctgaatgtgagggaggaagtcctcctgcatctcaggatagcaataaggatgaacctaaaagtggattaaatgaagaccaagccatgatgcaggattgttacagcaaaattgtagataagctgtcctctgcaaaccccaccatggtattacaggttcagatgctcgtggctgaactgcgcagggtcactgtgctctgggatgagctctggctgggagttttgctgcaacaacacatgtatgtcctgagacgaattcagcagcttgaagatgaggtgaagagagtccagaacaacaacaccttacgcaaagaagagaaaattgcaatcatgagggagaagcacacagctttgatgaagcccatcgtatttgctttggagcatgtgaggagtatcacagcggctcctgcagaaacacctcatgaaaaatggtttcaggataactatggtgatgccattgaaaatgccctagaaaaactgaagactccattgaaccctgcaaagcctgggagcagctggattccatttaaagagataatgctaagtttgcaacagagagcacagaaacgtgcaagttacatcttgcgtcttgaagaaatcagtccatggttggctgccatgactaacactgaaattgctcttcctggggaagtctcagccagagacactgtcacaatccatagtgtgggcggaaccatcacaatcttaccgactaaaaccaagccaaagaaacttctctttcttggatcagatgggaagagctatccttatcttttcaaaggactggaggatttacatctggatgagagaataatgcagttcctatctattgtgaataccatgtttgctacaattaatcgccaagaaacaccccggttccatgctcgacactattctgtaacaccactaggaacaagatcaggactaatccagtgggtagatggagccacacccttatttggtctttacaaacgatggcaacaacgggaagctgccttacaagcacaaaaggcccaagattcctaccaaactcctcagaatcctggaattgtaccccgtcctagtgaactttattacagtaaaattggccctgctttgaaaacagttgggcttagcctggatgtgtcccgtcgggattggcctcttcatgtaatgaaggcagtattggaagagttaatggaggccacacccccgaatctccttgccaaagagctctggtcatcttgcacaacacctgatgaatggtggagagttacgcagtcttatgcaagatctactgcagtcatgtctatggttggatacataattggccttggagacagacatctggataatgttcttatagatatgacgactggagaagttgttcacatagattacaatgtttgctttgaaaaaggtaaaagccttagagttcctgagaaagtaccttttcgaatgacacaaaacattgaaacagcactgggtgtaactggagtagaaggtgtatttaggctttcatgtgagcaggttttacacattatgcggcgtggcagagagaccctgctgacgctgctggaggcctttgtgtacgaccctctggtggactggacagcaggaggcgaggctgggtttgctggtgctgtctatggtggaggtggccagcaggccgagagcaagcagagcaagagagagatggagcgagagatcacccgcagcctgttttcttctagagtagctgagattaaggtgaactggtttaagaatagagatgagatgctggttgtgcttcccaagttggacggtagcttagatgaatacctaagcttgcaagagcaactgacagatgtggaaaaactgcagggcaaactactggaggaaatagagtttctagaaggagctgaaggggtggatcatccttctcatactctgcaacacaggtattctgagcacacccaactacagactcagcaaagagctgttcaggaagcaatccaggtgaagctgaatgaatttgaacaatggataacacattatcaggctgcattcaataatttagaagcaacacagcttgcaagcttgcttcaagagataagcacacaaatggaccttggtcctccaagttacgtgccagcaacagcctttctgcagaatgctggtcaggcccacttgattagccagtgcgagcagctggagggggaggttggtgctctcctgcagcagaggcgctccgtgctccgtggctgtctggagcaactgcatcactatgcaaccgtggccctgcagtatccgaaggccatatttcagaaacatcgaattgaacagtggaagacctggatggaagagctcatctgtaacaccacagtagagcgttgtcaagagctctataggaaatatgaaatgcaatatgctccccagccacccccaacagtgtgtcagttcatcactgccactgaaatgaccctgcagcgatacgcagcagacatcaacagcagacttattagacaagtggaacgcttgaaacaggaagctgtcactgtgccagtttgtgaagatcagttgaaagaaattgaacgttgcattaaagttttccttcatgagaatggagaagaaggatctttgagtctagcaagtgttattatttctgccctttgtacccttacaaggcgtaacctgatgatggaaggtgcagcgtcaagtgctggagaacagctggttgatctgacttctcgggatggagcctggttcttggaggaactctgcagtatgagcggaaacgtcacctgcttggttcagttactgaagcagtgccacctggtgccacaggacttagatatcccgaaccccatggaagcgtctgagacagttcacttagccaatggagtgtatacctcacttcaggaattgaattcgaatttccggcaaatcatatttccagaagcacttcgatgtttaatgaaaggggaatacacgttagaaagtatgctgcatgaactggacggtcttattgagcagaccaccgatggcgttcccctgcagactctagtggaatctcttcaggcctacttaagaaacgcagctatgggactggaagaagaaacacatgctcattacatcgatgttgccagactactacatgctcagtacggtgaattaatccaaccgagaaatggttcagttgatgaaacacccaaaatgtcagctggccagatgcttttggtagcattcgatggcatgtttgctcaagttgaaactgctttcagcttattagttgaaaagttgaacaagatggaaattcccatagcttggcgaaagattgacatcataagggaagccaggagtactcaagttaatttttttgatgatgataatcaccggcaggtgctagaagagattttctttctaaaaagactacagactattaaggagttcttcaggctctgtggtaccttttctaaaacattgtcaggatcaagttcacttgaagatcagaatactgtgaatgggcctgtacagattgtcaatgtgaaaaccctttttagaaactcttgtttcagtgaagaccaaatggccaaacctatcaaggcattcacagctgactttgtgaggcagctcttgatagggctacccaaccaagccctcggactcacactgtgcagttttatcagtgctctgggtgtagacatcattgctcaagtagaggcaaaggactttggtgccgaaagcaaagtttctgttgatgatctctgtaagaaagcggtggaacataacatccagatagggaagttctctcagctggttatgaacagggcaactgtgttagcaagttcttacgacactgcctggaagaagcatgacttggtgcgaaggctagaaaccagtatttcttcttgtaagacaagcctgcagcgggttcagctgcatattgccatgtttcagtggcaacatgaagatctacttatcaatagaccacaagccatgtcagtcacacctcccccacggtctgctatcctaaccagcatgaaaaagaagctgcataccctgagccagattgaaacttctattgcgacagttcaggagaagctagctgcacttgaatcaagtattgaacagcgactcaagtgggcaggtggtgccaaccctgcattggcccctgtactacaagattttgaagcaacgatagctgaaagaagaaatcttgtccttaaagagagccaaagagcaagtcaggtcacatttctctgcagcaatatcattcattttgaaagtttacgaacaagaactgcagaagccttaaacctggatgcggcgttatttgaactaatcaagcgatgtcagcagatgtgttcgtttgcatcacagtttaacagttcagtgtctgagttagagcttcgtttattacagagagtggacactggtcttgaacatcctattggcagctctgaatggcttttgtcagcacacaaacagttgacccaggatatgtctactcagagggcaattcagacagagaaagagcagcagatagaaacggtctgtgaaacaattcagaatctggttgataatataaagactgtgctcactggtcataaccgacagcttggagatgtcaaacatctcttgaaagctatggctaaggatgaagaagctgctctggcagatggtgaagatgttccctatgagaacagtgttaggcagtttttgggtgaatataaatcatggcaagacaacattcaaacagttctatttacattagtccaggctatgggtcaggttcgaagtcaagaacacgttgaaatgctccaggaaatcactcccaccttgaaagaactgaaaacacaaagtcagagtatctataataatttagtgagttttgcatcacccttagtcaccgatgcaacaaatgaatgttcgagtccaacgtcatctgctacttatcagccatccttcgctgcagcagtccggagtaacactggccagaagactcagcctgatgtcatgtcacagaatgctagaaagctgatccagaaaaatcttgctacatcagctgatactccaccaagcaccgttccaggaactggcaagagtgttgcttgtagtcctaaaaaggcagtcagagaccctaaaactgggaaagcggtgcaagagagaaactcctatgcagtgagtgtgtggaagagagtgaaagccaagttagagggccgagatgttgatccgaataggaggatgtcagttgctgaacaggttgactatgtcattaaggaagcaactaatctagataacttggctcagctgtatgaaggttggacagcctgggtgtgaatggcaagacagtagatgagtctggttaagcgaggtcagacatccaccagaatcaactcagcctcaggcatccaaagccacaccacagtcggtggtgatgcaactgggggcttactctgaggaaacctaggaaatctcggtgcactaggaagtgaatcccgcaggacagctgcactcagggatacgcccaacaccatggcctgcaaccccagggtcaagggtgaaggaaagcaagctcaccgcctgaacacggagattgtctttctgccacagaacagcagcagacgtgtcgggaggttagctgcggaaagaaatcgggatgccgcggagcacagagtgatttggaactccattccacctgaccctgtgtgtacaatccaggaaaaaaacaaaccccactcagaaacagagaaaactggggtcgcgaagaaatcacagccaaggaagatttgatgcattcagattctcgtgtaacacttgttgcttggcaacagtactggttgggttgaccagtaagtagaaaaaggctaaaggctatgcgatatgaatttcagaaatggactgaaaatggagagctatgtaacagatacactacagtagaagaacttacttctgaaatgaagggaaaaaaaccaccccatcgttccctactcctccccaccacttacccgttccccctttacctaatctagtagattagccatctttcaaattcacttttatttcagtccttatatttcatatacttccgtctcgatgctgttaacaacttctgataacatggaaaattcaaggattgtttaaaggtctgatgatcacacacaaaatgtaattccggttatttaagtcatttctgtgattctatcatgtacagtttccagaattgtcactgtgcattcaaaagtaatgaatctaacagacatttgatttaatgtacactcccttttgcttatagtgtgcattttttttggaggtcattcaaattttccctcttctgtgatagctgtagtttctttcatagaaagtagctaatccagtgtaatcttttacctttttaaaaaccaagatagagtatctattagagttttacattgttgatgatagattaacaataaagtgatgttctggtggaggtagactgaaatttttttaattcatgtttttcatttgatacttttaatttacacttagtaaattaaaagttgtttaatttacttggcattttaggacatgtacatgaaacagtgaaaatgagatccaccaacatcttttattaagttcagttattagtctgtgaagtgctttactttttgcacaattttaatagcttgctattcagtaatacattatagtgaattcatgatcaaggtttccttaaatttagcattgcatttcagtactgactgtgtaagctaaattgctgatccaaaataaaaacccagactagaatagggttcttaaaatcaagtatcaatacaaaatagaacacaattaaaatcttaattgttggctgggcacagtggctcacgcctgtaatcccagcactttgggaggccgaggcgggcggatcatgaggttaggagagcgagaccatcctggctaacacggtgaaaccccgtctttactaaaatacaaaaaaaattagccgggcgtggtggcgggcgcctgtagtcccagctactcgggaggctgaggcaggagaatggcgtgaacccaggaggcggagcttgcagtgagccgagattgtgccactgcactccagcctgggcaacagagctagactctgtgtcaaaaataaatgactagat

SEQ ID NO: 1856 - DNA, 3572 bp, Homo sapiens
gagttgtagccgaggtggcggcgcggggcggggcgggcggagagagaaggaaggaggtggttgtgcaggatggcgacggcggcctacgagcagctgaagctgcatatcacacctgaaaaattttatgtggaagcttgtgatgatggagcagatgacgtacttaccattgaccgtgtgtccacagaggttacccttgcagtcaagaaagatgttcctccttcagctgtcacaagaccaatatttggtatactgggcacaatccatctggtggcaggtaattatcttatagtcattaccaaaaagataaaagtaggtgaatttttcagtcatgtagtctggaaagcaacagattttgatgtcctttcttataagaagacaatgttgcacttaactgatattcagttacaagataataaaaccttcctagcgatgctaaaccatgtcttgaatgtggatggattttacttttcaacaacatatgatttgacccatactttgcagcggctatccaacactagtcctgaattccaagaaatgagtctcttggaaagggcagatcagcggtttgtatggaatggtcatcttctaagagaactttctgcacagccagaggttcatcggtttgcccttccagtgttacatggctttattaccatgcattcatgttctattaatggaaaatactttgattggattctcatctcgaggaggagctgtttcagagctggtgtgcgctattatgtaagaggaattgattcggaaggccatgcagctaactttgtagaaacagaacaaattgtgcactacaatgggagcaaagcttcgtttgtacagactcgaggatcaatacctgttttctggtcccaaagaccaaacctcaagtacaaaccactgccacagatcagcaaagtagcaaatcacatggacggtttccaaaggcattttgattcccaagtaattatttatggaaaacaagttataatcaatctgattaaccagaagggctcggagaagccacttgagcagacatttgcaacaatggtgtcttccttgggaagtggaatgatgagatacattgcctttgacttccataaggaatgtaaaaatatgagatgggatcgactaagtattttattggatcaggtagcagaaatgcaagatgaattaagttattttctagtggactctgctggccaggtggtggcaaaccaggaaggcgtgttccgaagcaattgcatggattgtctagatagaaccaatgtgatccagagtttgttagctcgtcgttcacttcaggcccaacttcagagactaggagttttgcatgtgggacaaaagcttgaagaacaagatgaatttgagaagatttacaaaaatgcctgggctgacaacgcaaatgcttgtgccaagcaatatgcgggaactggtgccttgaagactgactttaccagaactggaaagagaactcatttgggacttataatggatggctggaactcaatgatacgatattataagaacaacttttccgatggatttagacaagattccatagacttatttcttggaaactattcagtggatgaattagaatctcatagtcctttaagtgttccaagggactggaaattcctggctttgcctattatcatggttgttgccttttcaatgtgcattatctgtttgcttatggctggtgacacttggacagaaacactggcctatgtgctcttctggggagttgcaagcattggaacattttttatcattctttacaatggcaaagattttgtcgatgctcccagactggtccagaaagaaaagatagactgaatttgtatttgtggaaagcggcttggcttggaagattccattgtgcagaactggagtctttactgacccgctttccacatcagcccaaggtctttttaatgcctttatccaaaagcacatcttgtgctccatgcaggatgatgacagaattgatctgatgttactgccttgatggtctctttactattgggacagttagatttataatttgaagctattctgtaattaaaatataacctgaattcagcttgcagaatggaagctgaatctgttcattgtattctattgattgtcaatttaattagctgttgcagaataagtaatatattttaaaaacctagctcctttcattatttaaaacagcaaaattatttttgtagctcagtttcattattgtcattgtagaagcggtcactattagcaggcatacttttccacacatctttggacttttcttaaaagttcagtaataagctaactgtgtttataaaatgtaagtctcttacagacatcaagtagtttgatgagacagtctgtgacttcatgataggaaagaggaggatgaggtctggggttctttaaagtctctggtgggctgcctcatgactttaatcagcttgaactgccagtgcaccagcagtttaggtgtgatgagagaattcagatatactttatctttttaaaaaagtgtaaataaaatcaaagaatgtaaagtctatctcttacgctagaggtccaaagctgcctctgttttaaagattatcccaatgtggaagatgcccatgactggtcagctacttcctcctatacattttggtttctttgagggtcactcattgagacacgcaggcctctgagagggtcttgttctagatttcatattgcacttggagggtaacagctgctttttcacgcatggtactcttgatgtttttcactctgtcaaggattttgttggctatcaatgaatgtgtctaaaacttagtgcttccaggtagttatagtactccaaatcaaggaccaacttaaacgttaatttttgtgcaaaaacaaacctgaaaaatatgcttcggaaactgtgcatagttctaattgtaagtcagattgtatattcaaattgtaattaagagatttaaatattagaacggtatgtaaggtagtataattaccactattttaaataattcagttaaacactgctgcaatatttcagtgttgtgcttgaaaatatgtacagtttttttccaatattaataccttatgttgtccttaaatatttctaaaagcgcctttatttcagcattacctttttttcatcactatcttttataaaacattaatataagtcgttacttttagaaactaaaggaaataatagctggaaaaccctctgtagtttaaaatcagtcattaaactcacaatagggtaagtaaatatagccacctgttaacatgtaaataagcataatttgttccaaagatggaatattgaaacttagttcatgtctgctgtaaaatattatttaaatgctgctgggcatttcacttaaagaacttaatgtcaacagctacaacaaagaccaaatctgaactgctaatgtggctgctttgtagggaatggactaatatcagtgtgttagatcttaaggtatcagtatttcagaatcctgcgacgattttatttctaaattcatgtactgtatgtccataagtgaaaataaaatgtcatattcttttct

SEQ ID NO: 1857 - DNA, 3532 bp, Homo sapiens
gttcgccgtggaggatgtcccgaaaggggccgcgagcggaggtgtgtgcggactgcagcgccccggaccctggctgggcatccatcagcaggggtgtgctggtgtgtgacgagtgctgcagcgtgcaccggagcctgggacgccacatctccattgtcaagcaccttcgccacagcgcctggcctcccacgctgctgcagatggtgcacacgcttgccagcaacggggccaactccatctgggagcactccctgctggaccccgcacaagtgcagagcggccggcgtaaagcaaacccccaagacaaagtccaccccatcaagtcagagttcatcagggccaagtaccagatgctggcatttgtgcacaagctttcctgccgggacgatgatggagtcaccgccaaagacctcagcaagcaactacactcgagcgtgcggacaggcaacctggagacatgtctgcgcctgctctccctgggtgcccaggccaacttcttccacccagagaagggcaccacacctctgcacgtggctgccaaggcaggacagacactgcaggccgagctgcttgtagtgtatggggctgaccctggctcccctgatgttaatggccgcacacccattgactatgccaggcaggcggggcaccatgagctggcggaaaggctggttgagtgccaatatgagctcactgaccggctggccttctacctctgtggacgcaagccggatcacaagaatgggcattacatcatcccacagatggctgacagccttgacttatccgaattggccaaagctgctaagaagaagctgcaggcgctcagcaaccggctttttgaggaactcgccatggacgtgtatgacgaggtggatcgaagagaaaatgatgcagtgtggctggctacccaaaaccacagcactctggtgacagagcgcagtgctgtgcccttcctgcctgttaacccggaatactcagccacgcggaatcaggggcgacaaaagctggcccgctttaatgcccgagagtttgccaccttgatcatcgacattctcagtgaggccaagcggagacagcagggcaagagcctgagcagccccacagacaacctcgagctgtctctgcggagccagagtgacctcgacgaccaacacgactacgacagcgtggcctctgacgaggacacagaccaggagcccctgcgcagcaccggcgccactcggagcaaccgggcccggagcatggactcctcggacttgtctgacggggctgtgacgctgcaggagtacctggagctgaagaaggccctggctacatcggaggcaaaggtgcagcagctcatgaaggtcaacagtagcctgagcgacgagctccggaggctgcagcgagagatccacaagctgcaggcggagaacctgcagctccggcagcctccagggccggtgcccacacctccactccccagtgaacgggcggaacacacacccatggcgccaggcgggagcacacaccgcagggatcgccaggccttttccatgtatgaacctggctctgccctgaagccctttgggggcccccctggggacgagctcactacgcggctgcagcctttccacagcactgagctagaggacgacgccatctattcagtgcacgtccctgctggcctttaccggatccggaaaggggtgtctgcctcagctgtgcccttcactccctcctccccgctgctgtcctgctcccaggagggaagccgccacacgagcaagctttcccgccacggcagtggagccgacagtgactatgagaacacgcaaagtggggacccactgctggggctggaagggaagaggtttctagagctgggcaaagaggaagacttccacccagagctggaaagcctggatggagacctagatcctgggcttcccagcacagaggatgtcatcttgaagacagagcaggtcaccaagaacattcaggaactgttgcgggcagcccaggagttcaagcatgacagcttcgtgccctgctcagagaagatccatttggctgtgaccgagatggcctccctcttcccaaagaggccagccctggagccagtgcggagctcactgcggctgctcaacgccagcgcctaccggctgcagagtgagtgccggaagacagtgcccccagagcccggcgccccagtggacttccagctgctgactcagcaggtgatccagtgcgcctatgacatcgccaaggctgccaagcagctggtcaccatcaccacccgagagaagaagcagtgacctctctccccacaccctcacctgcaccctaggacctcactggccataggagctgggccactccagacattaatccccaccccaacagagccactggcacaagtgcccttagtgctgccacactccctgggcagccaggtgccctggtgcccacccctgtcgagcccctaaggatggggaggttgggggggcaggagcttctgtcccccacattccatgcacctcccctctgtatatagcatctcccccctcctagtgagcaggggcctgcaaggattcactcccagcccctcgccttctagggcaccctcagcaaaggggcaggtggggacactccaagtggggcagctctccgtacatgcgccccacccccatgagccagttcagccctactgggggctgagcgggggcatcccctcctttgtacatagtctccatggatgtccctgccctgtagccaccagccccttgctgctctccctttaatgccatatggcccctgcctagggcacaggccccaacctgtgtgctggggtccccagcaggcaaacactggaaagtctgttttttttttttctttcttcttccccaccccttaattttaactttgtggtaactgagtgcccccgcgtgcctgcgtgttgagtgtgtgggcggcagtgctttccggaggcctggtccatctggagttttgaggggtgaggggaccagagcagtgggaccagcatggggatcagcttcccttccccacctgggagccagggactgtccgggtagccagttttggtcctgccagctgcctccctgatccctccccactctcgccccttctctatgaacttaaaatcaaaaaaccacttccctcccatctcctccctgctcctgcgtggagggggaatgtgtgctggccagggtggaggactgagcacctgagcctggggctggctccccggggtccccgactcagctggtggctgtggagctgagtcccctccccgtaacctctgcaaggccagcacccaccatcactacctgcacctgctgtggtcccaccctctggaggcctgggaacctggctgcagcctgggaaggctggagaggcagacggtgggacccaccagctctctccccatcccgcttcttccctggggccaggccctacctgtgtggtggtgggtgggctgtcaagacgtgtcatgtacatttgtatcaaaaataaagaagtgaccatg

SEQ ID NO: 1858 - DNA, 1705 bp, Homo sapiens
gtttttttcccttctgagcaatggagcttaccatctttatcctgagactggccatttacatcctgacatttcccttgtacctgctgaactttctgggcttgtggagctggatatgcaaaaaatggttcccctacttcttggtgaggttcactgtgatatacaacgaacagatggcaagcaagaagcgggagctcttcagtaacctgcaggagtttgcgggcccctccgggaaactctccctgctggaagtgggctgtggcacgggggccaacttcaagttctacccacctgggtgcagggtgacctgtattgaccccaaccccaactttgagaagtttttgatcaagagcattgcagagaaccgacacctgcagtttgagcgctttgtggtagctgccggggagaacatgcaccaggtggctgatggctctgtggatgtggtggtctgcaccctggtgctgtgctctgtgaagaaccaggagcggattctccgcgaggtgtgcagagtgctgagaccgggaggggctttctatttcatggagcatgtggcagctgagtgttcgacttggaattacttctggcaacaagtcctggatcctgcctggcaccttctgtttgatgggtgcaacctgaccagagagagctggaaggccctggagcgggccagcttctctaagctgaagctgcagcacatccaggccccactgtcctgggagttggtgcgccctcatatctatggatatgctgtgaaatagtgtgagctggcagttaagagctgaatggctcaaagaatttaaagcttcagttttacatttaaaatgctaagtgggagaagagaaaccttttttttggggggcggtttttttggtttgttgttggttttttttttttttttggcaagactccgtctcaaaaaaaaaaaaaaaaaaaaaaagaagtagagacagggagacagggtctcactgtgttgcctaggccggtcttgaactcctgggctcaagtgattctcccaccttgacctcctaaattgttgggattacaggtgtgagacagtgcacctggccgaaatagctcaagtttctgaaaaacaaatctgaatctatttgttattcttagcgtcactggtctggctttcagaattaacatacaaggttgccacacctagttctgcccagctttatgtcttttattccagtattccaccaaagtttgttttcctgcattccagttctcaagtcttaagataaagattgtacttgacagtttagtatatccataaaactatttgaggtggttaaggttcttgggttcattttccttaatactttgctgaatattgtagattgtaggcaatgaaaaagtctactaaattaggaaaaccttgaataattaggtatcctaggtaagagcccctaaacatcaagcaatctgtgagtctgtaaagaaataaatattttttggattattcttatctaattccacccctgttggaagatgatttctttgttctttgcaactatggaagctgtgaaaatcatcacaagtgcctctgaaagcgagtgttaggttggttagagggtttaatattttctgcaatggtttgtaggaattttaataaatgtagtatattttctgagatgattttgtaaaagtactattttaaatatcaaatcaaccaataaattcacatttgtgttaggaacag

SEQ ID NO: 1859 - DNA, 1093 bp, Homo sapiens
cggactctgggtgttttgctaccgtgaccgtttagaaactgttcatacttggtgcgctgtggactcttgtgataattaaccaagagtagctctatttgtccaacctcacacctaaagaagaaagaaaatggcttgtgctgagttttcttttcatgtaccaagtcttgaagagcttgctggagttatgcagaaggggttataagataactttgctgatgtccaggtctctgtagttgattgccctgatttgactaagaaaccctttacctttcctgtaaaaagtttttttcttaggcatctgtgggaaagctagaattgcggaagttggaggtgtgccttacttattgcctcttgtaaaccaaaaaaaagtttatgatctgaataaaattgcaaaagaaatcaagctgcctggagcctttattcttggagcaggagcaggtccatttcagactctcgggttcaattctgagtttatgccagttattcagacagaaagtgaacacaagcctcctgtaaatggaagttactttgcccatgtgaaccctgcagatggagggtgcctactggagaaatacagtgagaaatgtcatgattttcagtgtgcattactggctaatctttttgccagtgaaggccaacctggcaaggtaattgaggtgaaagccaaaagaagaactggaccacttaactttgtgacttgtatgagagagaccctggaaaaacattatggaaataagcctataggaatgggaggtactttcataattcagaagggaaaagtgaagtctcacattatgcctgcagaattttcttcctgccccctgaactctgatgaggaagtgaataaatggttgcatttttatgaaatgaaagctcctttggtttgtctaccagtttttgtctccagagacccagggtttgatttgcgactggagcacactcatttttttagtcgtcatggagaaggtggacactaccattatgacactactccagatatagtggaatatcttggatacttcttacctgcagagtttctctatcgcattggtcaaccaaaagagacgcattccattgggcgagattaatcagc

SEQ ID NO: 1860 - DNA, 798 bp, Homo sapiens
ccatcgctctcccgggcttagaaggccggctactgacgcgcagtgccagaccttagccctcacggtccttaagtctcggtcgccctcgcctcgcagcctgccacccgcgctcagctgcccgcctcctcagccagccatgctgagcatctgagctcgctgcccacgcagatggattacaagggccagaagctagctgaacagatgtttcagggaattattcttttttctgcaatagttggatttatctacgggtacgtggctgaacagttcgggtggactgtctatatagttatggccggatttgctttttcatgtttgctgacacttcctccatggcccatctatcgccggcatcctctcaagtggttacctgttcaagaatcaagcacagacgacaagaaaccaggggaaagaaaaattaagaggcatgctaaaaataattgaggttttcatgattcagcacctgcttttgtttctgtgagatgagctaaattgctttcataccccagataagagctaaaaccacctaatgctcttatggcacagctgtgtatagatttagttctctttatacttcatttctagcccagttgggttttgatttatataagtagtttagaccttctcttcataatcttgctctgagatggggaacagaacacacaagtatgaagtttctttcaggtgtaaataatgaaaaataaatgcctcataaatgatagtacaatgtaactatcaaagttttataattcattatgagttaaccattttaatgtttccaattaaacctcatagtgc

SEQ ID NO: 1861 - DNA, 1439 bp, Homo sapiens
gcctttccgtcaattcctgtcctgggcgtacgtcaagatggcggcgtctgtattaaacaccgtgctgaggcggcttcctatgctatctctcttccgaggttctcacagagttcaggttcccctccagactctttgcaccaaagctccctctgaggaagattctttgtcctcagttcccatttctccttataaggatgagccctggaaatatctggaatcagaagaataccaggagcgatatggttctcgccccgtctgggctgactaccgccgcaaccacaagggtggtgtacccccacagcggactcggaagacatgtattcgtcggaataaagttgttgggaatccctgccccatctgtcgagatcacaagttgcatgttgactttaggaacgtgaagctcttggagcaatttgtctgcgcccacacgggtatcatcttctatgctccatacacaggagtctgtgtgaagcagcacaagcggttgacccaggccatccagaaagccagggatcatggtctcctcatttaccacatcccccaggttgaaccacgggaccttgacttcagtacctctcatggggctgtgagtgctactccgccagcccccaccctggtctcaggtgacccctggtacccatggtacaactggaaacagccaccggagagagaactgtctcgccttcgccggctttaccagggtcatctccaagaagagagtggccccccacctgagtcaatgcccaagatgccccctagaacaccagcggaagcctcctccactgggcagacaggccctcagagtgctctgtaggagctgtagactgggaagagaggccaggcgtggtggctcactcctgtaatcccagcactttgggaagccaaggtgggctgatcacttgatcccaggagtttgagaccagcctgggcaccatggtgaaacctcgtctttaccaaaaaatacaaaaattagctgggtgtggtggtgcacacctgtagtctcaactattggggaggctaaggtaggatcacttgatcccaggaggcggaggttgcagtgagttgcagtcacacccctgcactccagcctgggtgacagctagaccctgtctcaaaaaaaaaaaaaaagactgggaagagagctagagggactaggagataatgtgtatgtaggtttatgtgatgggatatcaccctgaagagttgtgtcttttgtggccagtgacaaatccaggaaatgaatgttgctgatagggataaatcttgaggctgagggcgggtggtacagatgtgtatgggaaaccccaacccctatatattgtaaatagatgggctgggctaaacattgttgccgtttcatacttctaccaactcagcttttacacaataaagctctactgtctctgggtaaaaaaaaaaaaaaaaaaaaaaaaaaaaaa

SEQ ID NO: 1862 - DNA, 1123 bp, Homo sapiens
ggcacgagtcttcgagggaaccaatgagattctccggatgtacatcgccctgacgggtctgcagcatgcggccgcatcctgactaccaggatccatgagcttaaacaggccaaagtgagcacagtcatggataccgttggccggtcagggactccctgggccgaactgtggacctggggctgacaggcaaccatggagttgtgcaccccagtcttgcggacagtgccaacaagtttgaggagaacacctactgcttcggccggaccgtggagacactgctgctccgctttggcaagaccatcatggaggagcagctggtactgaagccgggtggccaacatcctcatcaacctgtatggcatgacggccgtgctgtcgcgggccagccgctccatccgcattgggctccgcaaccacgaccacgaggttctcttggccaacaccttctgcgtggaagcttacttgcagaatctcttcagcctctctcagctggacaagtatgctccagaaaacctagatcgagcagattaagaaagtgtcccagcagatccttgagaagcgagcctatatctgtgcccaccctctggacaggacatgctgaggctaggggacagtgtcccctgctaccgcccgcccctacccatggcccgttgctggatgactgttactcttttttcagaaggttgttgggattatcacaggttaagccttttgttccccgtctgcacctgaagggttgtcgcctggcctgggagagcctcttccaggttttgacctgcaggcagtgctctctaacaggaccatcacagcttctgaactgagccggagagagagaatggaattgctgacccctggaactggcgggtattctggtcattgaggagacaccatagtggaaactggggcttatgctgctgcctccagggtgtgaggtgggtggggacctgtgtcaggtgtggatagccatttctgctcaaccacacattctctaagaaacagcttgaaagctctgtctgggtcattcatttaaactagaagcagaggcacttaaaacatgtacaggaaccatttatacaaagaatataaaatgtcacaatctgtgtactgttaaaaaaaaaaaaaa

SEQ ID NO: 1863 - DNA, 2011 bp, Homo sapiens
tcgatttttcacagcctcagcctaggaaaaatggttcatgggataaacagctggtatttgtatctaaaactcagattggtcacataaatgccacggcattccgaagttttgattttgattaacattgacaggattactgtgtgtttaattttttaaaaactgaacactgtgattatggggttttgtaatttagcagaactcttactggtagaaaaaatagacctgaattatgtgtaactttttggaaggtttaatctgatatcaaaataatcattgaaatacaattccattgtaaagttgtacagaaagttatagagattatattgtgatgctggaacttggagtgagacacacatcatttggcatttgagttgaatggtaattcacagtaatgctgccgttgttcgggacttaaagacacttgacctgtttgggctgttgccacttaaaagttcatgaccacaaatgtccacagtgtcttcctctgaggaaactcgaatcctgaaatggaaattctttgtggcagataactggcttatgacaccttgaaaagttcaagtgctcatataacacaccacactgaaccccctttcctacagcaatatgttcactatgttaccaatttgcaacttgtgcttcaatagtggaatctactttcattgttaacactgagctaaagaaaaaaagccgtgtgttttatgaatgaccttatctgtttcctggataatacctttaagaataatgtcctgagtcaggcgtggtggtgcgtgcatctagtcccaactatttgggaggctgaggcaggaggatcgcttgagcccaggagtttaaagctgcagtgccctgtggttgcacctgtgaataactgcactccagcctgggcaacatagcgagacctcatctccaaaaaagaaaacaaaaaacaaaaaaaggaatgatgttctgtagagatggcctttcacttgaggagtactcagttttcaggttcttcctagctcggggcttttaaattttgaaatctaaacattctttcccaccatcctttttgactgttgaccttggttttctcttctaagtttctgtccctctgcttccttactttttttcctttttgaattctatctttatctgtcttttgttcactttttaatgctatatatgggcaggggtgagagacattactgagcaccttggtgagcaagcctggctttaaagattggagaagagcttctggcaccagaaccctgtcttcctccagttctcaacacggtgttgctcttcagtcataccggaatctgaatcaaaaaagtatttttaaatatccatgatttctccctgtattgaggttagccctgatcatgcttttttgtgccttgtaacccaggtcttcccaagtgcactcatccaggtccagtgctcagatgtgtttaaggagaccctatattcagggaagttgcgtgaacactgcagtggggagaattgagaatagtcaggcctatcagtctcacagaatcacccctctacctttgatattccacttagctgtagagtccatctgtttgtccatctgctgaaatgagaaaagaaaaatttatgcactgatttaaaacaaaccaaaaaaaaagaaaaaaacaaaaaaaaaatccctcctttctagctgaacaaaaatgtgcagttaatacttggcgcttgaaaatgcagtagtgaatgtggaaccaagcctgtctgtatatctggtagctccctttcttgctttgttttttcttaccagtattctgcctaacgtttgcttctgtgatggttatattgcctagcaagcacacccgtggttgtgaaaatagtatagcaaaaaagaaaaatccccggttattgatgtactagatttgtgtatgtcttttaaacagttctagtttcaccttacacagaataatcaggaaaagtgtaaaaattcaaaagtgaaataaaaattttatcagataaaaaaaaaaaaaaaaaaaaaaaaaaaaaaaaa

SEQ ID NO: 1864 - DNA, 1362 bp, Homo sapiens
gggggggaggactgggtgcgcctgcagggatcggaagccggttggggtgtgagaggttttctcgctctagggagattcttcaagcaatcactatgtcaacagacacaggtgtttcccttccttcatatgaggaagatcagggatcaaaactcattcgaaaagctaaagaggcaccattcgtacccgttggaatagcgggttttgcagcaattgttgcatatggattatataaactgaagagcaggggaaatactaaaatgtccattcatctgatccacatgcgtgtggcagcccaaggctttgttgtaggagcaatgactgttggtatgggctattccatgtatcgggaattctgggcaaaacctgagccttagaagaagagatgctgtcttggtcttgttggaggagcttgctttagttagatgtcttattattaaagttacctattattgttggaaataaactaatttgtatgggtttagatggtaacatggcattttgaatattggcttcctttcttgcaggcttgatttgcttggtgaccgaattactagtgactagtttactaactaggtcattcaaggaagtcaagttaacttaaacatgtcacctaaatgcacttgatggtgttgaaatgtccaccttcttaaatttttaagatgaacttagttctaaagaagataacaggccaatcctgaaggtactccctgtttgctgcagaatgtcagatattttggatgttgcataagagtcctatttgccccagttaattcaactttcgtctgcctgttttgtggactggctggctctgttagaactctgtccaaaaagtgcatggaatataacttgtaaagcttcccacaattgacaatatatatgcatgtgtttaaaccaaatccagaaagcttaaacaatagagctgcataatagtatttattaaagaatcaccaactgtaaacatgagaataacttaaggttctagtttagttttttgtaattgcaaattatatttttgctgctgatatattagaataattttaaaatgtcatcttgaaatagaaatatgtattttaagcactcacgcaaaggtaaatgaacacgttttaaatgtgtgtgttgctaattttttccataagaattgtaaacattgaactgaacaaattacctataatggatttggttaatgacttatgagcaagctggtttggccagacagtatacccaaacttttatataatatacagaaggctatcacacttgtgaaattctcttgtctaatctgaatttgcattccatggtgttaacatggtatatgtattgttattaaagtaagtgacccatgaaaaaaaaaaaaaaaaaaaa

SEQ ID NO: 1865 - DNA, 2696 bp, Homo sapiens
ggctaatgcacagacatgaacatctattgaggaaaaccacaaaaaacttcaaaacagctacaacgggaaaaagagagttttgtcccacagtcagcaggccactagtttattaacttccagtcaccttgatttttgctaaaatgaagactctgcagtctacacttctcctgttactgcttgtgcctctgataaagccagcaccaccaacccagcaggactcacgcattatctatgattatggaacagataattttgaagaatccatatttagccaagattatgaggataaatacctggatggaaaaaatattaaggaaaaagaaactgtgataatacccaatgagaaaagtcttcaattacaaaaagatgaggcaataacaccattacctcccaagaaagaaaatgatgaaatgcccacgtgtctgctgtgtgtttgtttaagtggctctgtatactgtgaagaagttgacattgatgctgtaccacccttaccaaaggaatcagcctatctttacgcacgattcaacaaaattaaaaagctgactgccaaagattttgcagacatacctaacttaagaagactcgattttacaggaaatttgatagaagatatagaagatggtactttttcaaaactttctctgttagaagaactttcacttgctgaaaatcaactactaaaacttccagttcttcctcccaagctcactttatttaatgcaaaatacaacaaaatcaagagtaggggaatcaaagcaaatgcattcaaaaaactgaataacctcaccttcctctacttggaccataatgccctggaatccgtgcctcttaatttaccagaaagtctacgtgtaattcatcttcagttcaacaacatagcttcaattacagatgacacattctgcaaggctaatgacaccagttacatccgggaccgcattgaagagatacgcctggagggcaatccaatcgtcctgggaaagcatccaaacagttttatttgcttaaaaagattaccgatagggtcatacttttaacctctattggtacaacatataaatgaaagtacacctacactaatagtctgtctcaacaatgagtaaaggaacttaagtattggtttaatattaaccttgtatctcattttgaaggaatttaatattttaagcaaggatgttcaaaatcttacatataataagtaaaaagtaagactgaatgtctacgttcgaaacaaagtaatatggaaaatatttaaacagcattacaaaatcctagtttatactatactaccatttaaatatcatgtttttatataaatgcccaaatttgagatgcattattcctattactaatgatgtaagtacgaggataaatccaagaaactttcaactctttgcctttcctggcctttactggatcccaaaagcatttaaggtacatgttccaaaaactttgaaaagctaaatgtttcccatgatcgctcattcttcttttattattcatacgttattccttataaagtaagaactttgttttcctcctatcaaggcagctattttattaaatttttcacttagtctgagaaatagcagatagtctcatatttaggaaaactttccaaataaaataaatgttattctctgataaagagctaatacagaaatgttcaagttattttactttctggtaatgtcttcagtaaaatattttctttatctaaatattaacattctaagtctaccaaaaaaagttttaaactcaagcaggccaaaaccaatatgcttataagaaataatgaaaagttcatccatttctgataaagttctctatggcaaagtctttcaaatacgagataactgcaaaatattttccttttatactacagaaatgagaatctcatcaataaattagttcaagcataagatgaaaacagaatattctgtggtgccagtgcacactaccttcccacccatacacatccatgttcactgtaacaaactgaatattcacaataaagcttctgagtaacactttctgattactcatgataaactgacatggctaactgcaagaattaaatcttctatctgagagtaataatttatgatgactcagtggtgccagagtaaagtttctaaaataacattcctctcacttgtaccccactaaaagtattagtctacacattacattgaagttaaacacaaaattatcagtgttttagaaacatgagtccggactgtgtaagtaaaagtacaaacattatttccaccataaagtatgtattgaaatcaagttgtctctgtgtacagaatacatacttattcccatttttaagcatttgcttctgttttccctacctagaatgtcagatgtttttcagttatctccccatttgtcaaagttgacctcaagataacatttttcattaaagcatctgagatctaagaacacaattattattctaacaatgattattagctcattcacttattttgataactaatgatcacagctattatactactttctcgttattttgtgtgcatgcctcatttccctgacttaaacctcactgagagcgcaaaatgcagctttatactttttactttcaattgcctagcacaatagtgagtacatttgaattgaatatataataaatattgcaaaataaaatccaaaaaaaaaaaaaaaaa

SEQ ID NO: 1866 - DNA, 1471 bp, Homo sapiens
tgacttggatgtagacctcgaccttcacaggactcttcattgctggttggcaatgatgtatcggccagatgtggtgagggctaggaaaagagtttgttgggaaccctgggttatcggcctcgtcatcttcatatccctgattgtcctggcagtgtgcattggactcactgttcattatgtgagatataatcaaaagaagacctacaattactatagcacattgtcatttacaactgacaaactatatgctgagtttggcagagaggcttctaacaattttacagaaatgagccagagacttgaatcaatggtgaaaaatgcattttataaatctccattaagggaagaatttgtcaagtctcaggttatcaagttcagtcaacagaagcatggagtgttggctcatatgctgttgatttgtagatttcactctactgaggatcctgaaactgtagataaaattgttcaacttgttttacatgaaaagctgcaagatgctgtaggaccccctaaagtagatcctcactcagttaaaattaaaaaaatcaacaagacagaaacagacagctatctaaaccattgctgcggaacacgaagaagtaaaactctaggtcagagtctcaggatcgttggtgggacagaagtagaagagggtgaatggccctggcaggctagcctgcagtgggatgggagtcatcgctgtggagcaaccttaattaatgccacatggcttgtgagtgctgctcactgttttacaacatataagaaccctgccagatggactgcttcctttggagtaacaataaaaccttcgaaaatgaaacggggtctccggagaataattgtccatgaaaaatacaaacacccatcacatgactatgatatttctcttgcagagctttctagccctgttccctacacaaatgcagtacatagagtttgtctccctgatgcatcctatgagtttcaaccaggtgatgtgatgtttgtgacaggatttggagcactgaaaaatgatggttacagtcaaaatcatcttcgacaagcacaggtgactctcatagacgctacaacttgcaatgaacctcaagcttacaatgacgccataactcctagaatgttatgtgctggctccttagaaggaaaaacagatgcatgccagggtgactctggaggaccactggttagttcagatgctagagatatctggtaccttgctggaatagtgagctggggagatgaatgtgcgaaacccaacaagcctggtgtttatactagagttacggccttgcgggactggattacttcaaaaactggtatctaagagagaaaagcctcatggaacagataacatttttttttgttttttgggtgtggaggccatttttagagatacagaattggagaagacttgcaaaacagctagatttgactgatctcaataaactgtttgcttgatgcaaaaaaaaaa

SEQ ID NO: 1867 - DNA, 895 bp, Homo sapiens
gcggccgcgtcgaccggcgcggctggagcgcagcgccgaagggactggcagggctgaagtgtgcgggacagcaagcccccgaatagccccggctgccacctcgcaggacccaaggccacgcgcgccgggcccagctgagccgcctcatgaagccgcccgcggaggacctgtcggacgcgctgtgcgagtttgacgcggtgctggccgacttcgcgtcgcccttccacgagcgccacttccactacgaggagcacctggagcgcatgaagcggcgcagcagcgccagtgtcagcgacagcagcggcttcagcgactcggagagtgcagattcactttataggaacagcttcagcttcagtgatgaaaaactgaattctccaacagactctaccccagctcttctctctgccactgtcactcctcagaaagctaaattaggagacacaaaagagctagaagccttcattgctgatcttgacaaaactttagcaagtatgtgaaacaagaagttctgggtcctttcatcataagggagaagcttcagaaagttccgaggacctgctaaaatcagctactagaatctgctgccagaggggacaaagacgtgcactcaaccttctaccaggccactctcaggctcaccttaaaatcagcccttgatcccatttctgggcaatttagacagtgaaactgactttgtttacctgcttgcagcatattagaacagacgatccatgctaatattgtattttctcttaaaacatagctttcctgtaatttaaagtgcttttatgaaaatatttgtaattaattatatatagttggaaatagcagtaagctttcccattataatatatttttgtatacaaataaaatttgaactgaacctcgtgcc

SEQ ID NO: 1868 - DNA, 2001 bp, Homo sapiens
gaagctacagcagcggcgcggagactgcggggcgggccatggcggcgaacctgagccggaacgggccagcgctgcaagaggcctacgtgcgggtggtcaccgagaagtccccgaccgactgggctctctttacctatgaaggcaacagcaatgacatccgcgtggctggcacaggggagggtggcctggaggagatggtggaggagctcaacagcgggaaggtgatgtacgccttctgcagagtgaaggaccccaactctggactgcccaaatttgtcctcatcaactggacaggcgagggcgtgaacgatgtgcggaagggagcctgtgccagccacgtcagcaccatggccagcttcctgaagggggcccatgtgaccatcaacgcacgggccgaggaggatgtggagcctgagtgcatcatggagaaggtggccaaggcttcaggtgccaactacagctttcacaaggagagtggccgcttccaggacgtgggaccccaggccccagtgggctctgtgtaccagaagaccaatgccgtgtctgagattaaaagggttggtaaagacagcttctgggccaaagcagagaaggaggaggagaaccgtcggctggaggaaaagcggcgggccgaggaggcacagcggcagctggagcaggagcgccgggagcgtgagctgcgtgaggctgcacgccgggagcagcgctatcaggagcagggtggcgaggccagcccccagaggacgtgggagcagcagcaagaagtggtttcaaggaaccgaaatgagcaggagtctgccgtgcacccgagggagattttcaagcagaaggagagggccatgtccaccacctccatctccagtcctcagcctggcaagctgaggagccccttcctgcagaagcagctcacccaaccagagacccactttggcagagagccagctgctgccatctcaaggcccagggcagatctccctgctgaggagccggcgcccagcactcctccatgtctggtgcaggcagaagaggaggctgtgtatgaggaacctccagagcaggagaccttctacgagcagcccccactggtgcagcagcaaggtgctggctctgagcacattgaccaccacattcagggccaggggctcagtgggcaagggctctgtgcccgtgccctgtacgactaccaggcagccgacgacacagagatctcctttgaccccgagaacctcatcacgggcatcgaggtgatcgacgaaggctggtggcgtggctatgggccggatggccattttggcatgttccctgccaactacgtggagctcattgagtgaggctgagggcacatcttgcccttcccctctcagacatggcttccttattgctggaagaggaggcctgggagttgacattcagcactcttccaggaataggacccccagtgaggatgaggcctcagggctccctccggcttggcagactcagcctgtcaccccaaatgcagcaatggcctggtgattcccacacatccttcctgcatcccccgaccctcccagacagcttggctcttgcccctgacaggatactgagccaagccctgcctgtggccaagccctgagtggccactgccaagctgcggggaagggtcctgagcaggggcatctgggaggctctggctgccttctgcatttatttgccttttttctttttctcttgcttctaaggggtggtggccaccactgtttagaatgacccttgggaacagtgaacgtagagaattgtttttagcagagtttgtgaccaaagtcagagtggatcatggtggtttggcagcagggaatttgtcttgttggagcctgctctgtgctccccactccatttctctgtccctctgcctgggctatgggaagtggggatgcagatggccaagctcccaccctgggtattcaaaaacggcagacacaacatgttcctccacgcggctcaaaaaaaaaaaaaaaaaaa

SEQ ID NO: 1869 - DNA, 1521 bp, Homo sapiens
gaaaaaaatgcaatacaagaagcaagaccaaacagatatctaaacactacaaccacttctactacgaaaggccaaaacagcagacttgattgtgacatcaggtgacctagtaatcagctgtgtattctagctggtgcctctaccagcttcccatgtgaccttgaacatgtcattgaatgctcgctaggcctctgtttctttatctgtgaaatgggcttgatattcctcctctaccccaaccgatagtgcagaatgaaaagtaactgaaagtccttcctccagggcaccatagtgtctgggtgaaaagtagaatataaactcggtagacttctggtcccttcattggtcatggaatggaccagtgcttgcttcattgagcaacagttctgttgttcagaattcctggatttcacctcacttctgctctccctgcaggtgaatgtgatgttcatgcttgccattcttctgacattcttccacccctttctggtatatcgggaatgccgtacttggaaagaaagtccctctgcaattgcatagttcagaagccctcacttttcagccccgaggatggttttgttcatcttccaccacctttgaggacctcgtgtcccaaaagactttgcctatcccagcaaaacacacacacacacacacacacacacacaataaagacacacaaggacgtctgcgcagcaagaaaagaatctcagttgccaagcagattgatatcacacagactcaaagcaaaggcatgtggaacttctatatttcaaaacagaagtgtctccttgcacttagccttggcagacccttgactccaggggagatgacctgggggaggaagtgtgtcaactatttctttaggcctgtttggctccgaagcctatatgtgcctggatcctctgccacgggttaaattttcaggtgaagagtgaggttgtcatggcctcagctatgcttcctggctctccctcaagagtgcagccttggctagagaactcacagctctgggaaaaagaggagcagacagggttccctgggcccagtctcagcccagccactgatgctggatgaccttggcctgaccctggtctggtctcagaatcacttttcccatctgtaaaattgagatgaattttggtgttgaaagttcttcctggagcagatgtcctagaaggttttaggaatagtgacagagtcaggccaccccaagggccatgggagccagctgacctgcttgaccgaaggatttctgacagactatctttggggatgttttcaagaagggatataagttatttactttgggcatttaaaagaaaatttctctcgggaataattttatagaaaaataaagcttctgtgtctaaggcaaaaaaaaaaaaaaaaaaaaaaaaaaaaaaaaaaaaaaaaaaaaaaaaaaaaaaaaaaaaaaaaaaaaaaaaaaaaaaaaaaaaaaaaaaaaaaaaaaaaaaaaaaaaaaaaaaaaaaaaaaaaaaaaaaaaaaaaaaaaaaaaa

SEQ ID NO: 1870 - DNA, 1440 bp, Homo sapiens
cggctgagtggcacttaagcgggccatgccatgcaaccttgggcgctgccaaccgtgggcgagctctgggtgtgcgggcggcctggcgcggcgctccgctgtgtcagcgtgttatgatgccgtcccgtaccaacctggctactggaatccccagtagtaaagtgaaatattcaaggctctccagcacagacgatggctacattgaccttcagtttaagaaaacccctcctaagatcccttataaggccatcgcacttgccactgtgctgtttttgattggcgcctttctcattattataggctccctcctgctgtcaggctacatcagcaaagggggggcagaccgggccgttccagtgctgatcattggcattctggtgttcctacccggattttaccacctgcgcatcgcttactatgcatccaaaggctaccgtgcttactcctatgatgacattccagactttgatgactagcacccaccccatagctgaggaggagtcacagtggaactgtcccagctttaagatatctagcagaaactatagctgaggactaaggaattctgcagcttgcagatgtttaagaaaataatggccagatttttttgggtccttcccaaagatgttaagtgaacctacagttagctaattaggacaagctctatttttcagccctgggccctgacaagtttttccacaggaatatgtatcatggaagaatagaggttattctgtaatggaaaagtgttgcctgccaccaccctctgtagagctgagcatttcttttaaatagtcttcattgccaatttgttcttgtagcaaatggaacaatgtggtatggctaatttcttattattaagtaatttattttaaaaatatctgagtatattatcctgtacacttatccctaccttcatgttccagtggaagaccttagtaaaatcaaagatcagtgagttcatctgtaatattttttttacttgctttcttactgacagcaaccaggaatttttttatcctgcagagcaagttttcaaaatgtaaatacttcctctgtttaacagtccttggaccattctgatccagttcaccagtaggttggacagcatataatttgcatcattttgtcccttgtaaatcaagatgttctgcagattattcctttaacggccggacttttggctgtttcctaatgaaacatgtagtggttattatttagagtttatagccgtattgctagcaccttgtagtatgtcatcattctgctcatgattccaaggatcagcctggatgcctagaggactagatcaccttagtttgattctattttttagcttgcaaaaagtgacttatattccaaagaaattaaaatgttgaaatccaaatcctagaaataaaatgagttaacttcaaacatttcagaaaacaaaaaaaaaaa

SEQ ID NO: 1871 - DNA, 2610 bp, Homo sapiens
ggctgcgatggcggaggccgtggagcgcactgacgagctggtccgggagtacctgctcttccgcgggttcacgcacacactgcggcagctggacgccgagatcaaggcggacaaggagaaggggttccgggtggataagattgtggaccagctgcagcagttaatgcaggtgtatgacttggctgcccttcgggattattggagctacttggagcgtcggctcttcagccgcttggaggatatatacagacccacaatccacaagctgaaaaccagcctgtttcgattttatcttgtctacacaatccagacaaacagaaatgacaaggctcaggagttctttgcaaagcaggccacggaactccagaaccaggctgagtggaaggattggtttgtcctgcccttcctgccatcccggacaccaaccccacctttgctacctacttttctcgacagtgggctgacaccttcattgtgtccctgcacacttcctgagcgtctgtttcagtgcatgccagtccctgtgatcctgaactttgatgcggagtgtcagaggactaaccaggttcaagaagaaaatgaagttctgcgtcagaagctttttgcattgcaagctgaaatccaccgactgaagaaagaggagcaacagccagaagaggaagaggccttggtccaacacaaattgcctccttatgtctccaacatggaccgcctgggggactcggaacttgccatggtgtgcagccaaaggaatgcctccctctcccagtcacttcgtgtgggcttcctgtcctcgctgctgcctcagagtaagaagagcccctcaaggttgtcgcctgctcagggccctcctcaacctcagagctcggccaagaaagagtccttcggtggtcagggcaccaagggaaaggacccgacgtccggagccaaggatgggaagagcctcctcagcgggctggccactggggagtccggttggtcacagcaccggcagcggcgcctgcaggaccatggcaaggagaggaaggagcttttctccacaaccacttcccagtgtgcagagaagaaaccagaagccagtggcccagaggctgagccctgcccagagcttcacacggagccagtggagccactgactcgggcatctcggcaggccctgagggtggaggagtccgcccgagcagccctttattgtgctggacaggaggagtacgggaacaccactcatccatcatgcactgcagagtggattgctctgggaggagagtcgcagcttagacgtagatggggtcatcaaagtgtggtccttcaaccccatcatgcaagaccaaagcatcttcatttcaaatcaccgctgctgtctttgaatggccaccaaacggacagactgctcttgctgggcagtggtgtgggaacagtgcgtctctatgacacggaagccaagaagaatctctgtgaaatcaatatcaacgacaacatgcccaggatcctgtctctgcgtgcagcccaacggggctctttagtctgttcggcagcagctccgagcctcacttcccaggtggacttctcagcaccagacatcggcagcaagggcatgaaccaggttcctggcaggctgctgctgtgggacacgaaaaccatgaagcagcagctccagttctccctggatccagaacccattgctatcaactgtacagccttcaatcacaacgggaacctgctggtcacaggggcagctgatggcgtcatccggctgtttgacatgcagcagcatgagtgcgcgatgagctggagggcccactacgggaggtctactctgtggagttcagctatgatgagaacaccgtgtacagcatcggcgaggacggaagttcatccagtggaacatccacaagagtggcctcaaggtatccgagtacagcctccctcagatgccacgggcccctttgtgctgtctggatacagcggctacaagcaggttcaagtccccaggggccgactcttcgcttttgactcagagggaaattacatgctgacatgttctgccacaggcggcgtcatctacaagctgggtggcgatgagaaggttctggagagctgcttgaagctaggtggccaccgagccctgtggtcaccgtggactggagcactgccatggactgtgggacctgcctcaccgcctccatggatggcaaagatcaagctgaccaccctcctggcccataaagcctgatgacttgccccaagggccacccgaggaagcagtattatctgcggtggggggaggagatataggacaggaaaaccacgtgctccactccagctccctgccagtgcagtgactctgcagggaaagactggcaaggaggctcaggtgcttccatctgtggtgactggaatgggacccacgtggagtaggtgacatatgcttcccagagactggtattgtggctgtgccaggagtacatgtgagactatgggaggaaagctccggaagaaggagaaacattgcagtggctactgtgttggcccagtagaaattgacagtattttgtatatatgtgcccatttatctttttcttttttaaaaaaagagaatactcttgtggc

SEQ ID NO: 1872 - DNA, 2879 bp, Homo sapiens
gcagcagccgggtgggaaggctcaagatggcgtgcttgttggagaccccaatccgcatgagcgtcctttcggaccaggaatgaaagttactgggagataacttcgaaggattttgcaacaaattcgagctgtccgactctgagaatggaagtaacagctagcagtcgccactatgttgacaggctatttgaccctgatccccagaaagttctacaaggtgtcatagacatgaaaaatgctgtaattggaaacaacaagcagaaagccaatctcattgttttaggagctgttccaagattgttgtacttgcttcagcaagaaacctcaagcacagagctgaaaactgaatgtgcagtggtgttgggaagtcttgctatgggtactgaaaacaatgtcaagtctctactggactgccatattatccctgccttattgcaaggactactgtccccagacctgaagtttattgaagcttgcctccgatgcctgcgtaccatctttttcaccagtcctgtcactccagaggagctactgtatacagatgccacagtgataccacacctcatggcactgcttagcaggtcccgctatacccaggagtacatctgtcagatcttctcacactgctgtaaagggccagatcatcaaacaattttatttaaccacggtgcagttcagaatattgctcacctactaacctcactgtcctacaaagttcgaatgcaagcactgaaatgtttctcagttttagcttttgaaaacccccaggtatcgatgaccctggtaaatgttttggttgatggagaattgttaccacagatttttgtgaagatgttacagagggataagcctattgagatgcagctcacatcagcaaaatgtttaacttacatgtgtagagctggagcaattcggacagatgataactgtattgtattaaagacataccctggttggtcgaatgtgcagtaaggagagattactagaggagagagttgaaggagctgagacactgcctatctgatgaaccagatgttgagctacagagaatcgctagcataactgatcacctcatgccatgcttgctgattatttcaagtatcccagctcagtgagtgccatcactgatattaaaaggcttgatcatgatttaaaacatgctcacgaactccgccaggctgcattcaagctctatgcctctcttggagcaaatgatgaagacatccggaagaaggtgagtctgggagaggggcgtccccagtcctgacagccagcagcaggagtgacgtcaacctgaagtcgtggtgaagagcactacagtgactgtgaatatataaagcagagtgactaagcatattgaagaatgaatggacccggatttgggggttgttgttgttttagaccatagagtggcatgccggtgcttgaatgcaaatactggcgtgctttttgtgtcattaatatgaattattatgttgcacattttggcatggtgttctgataaaaatccaattctagcactgtgaagcttcagaccccttgaaagtcctaccattagaattgtaaatgttatttatggaaataccttccaatgctattgagaaattcaaatctctattgtatattgttctttgatatgtggcttagttttatgtttgattttttttgctactggcaagtttaatgtgaataaatctttgtggaatgatgattttatgtttagtgagtggtcatctgaattttccagctcccagaaatgtatgcactggtatagcacctatgttactaagccttagtctacactgaactcatgttctgatgagaatacttctagatgaggagtatagtggtaagtaagctctgacttggctccttccacatatccaaaaagctggaacttaccactcaaaaacatgtataacctaataaattctacacaaggctttcaagaccatcagagagcaaaccacatgttctgtcttgaggagccatagcagaaagagcaaattagtcattatttactgaacatgatgatttactaaatctctccatctgcattagtattttaaggagcactgtgagagaaatcacaaagtattagagtttaccatgattcagagaagttcttcaggcctgtagaaagaggagtatggaacaaccttacatttgttgaaataacttgaaaaggaaccatttcttgaagaaactgaagtaatagcaataagatttgatgtgtgagtagctttgatttaaaatcaatgcaaaaagcacaactaataaattgaatgtttccatgtacctcactttatttcagttaacaagatactttgacttgaagtgtttttagtgtatccctatgaaaatcatttttggtacatctaagttttcacttataaactgttatttcaaagcaaacatactagtgatatatatatgatttatggatgttgacgccaatgttcagtttgggtacgttggtgtattgcaaggggagaggcttttataacaatagatttgaacatttttaaaaaattggactgtgtaacttaaatacacaattatttggtttaggatggttattagggcccattagaaacaggagaagtattttacccattcttaaagctctaaaaaaccatctcatggactgaaaggtagatagacagatggaccacaatgggaaataggatgtccatttgtacttctttgtacttttttgttaataaactgttttggaattaatggcttaatttgtgatatcatgttctagaaatacctgcaacatgacagtctaatcagtagtctattaaaacttgtattcataatgtgtataatttcctggtaaggctaactcctgatcgtttctgtagaaagatgac

SEQ ID NO: 1873 - DNA, 2081 bp, Homo sapiens
gggcctcttaaaaaaaggaggcaggaaatagagagtgattctgaaagtgatggtgagcttcaggacagaaagaaagttagagtggaggtagagcagggagagacatcagtgcccccaggttcagcactggttgggccctcctgtgtcatggatgacttcagggacccacagcgatggaaggaatgtgccaagcaagggaaaatgccatgttactttgatcttattgaagaaaatgtttatttaacagaaagaaagaagaataaatctcatcgagatattaagcgaatgcagtgtgagtgtacacctctttctaaagataaagagctcaagggtgaaatagcatgtggggaagattgtcttaatcgtcttctcatgattgaatgttcttctcggtgtccaaatggggattattgttccaatagacggtttcagagaaaacagcatgcagatgtggaagtcatactcacagaaaagaaaggctggggcttgagagctgccaaagaccttccttcgaacacctttgtcctagaatattgtggagaggtactcgatcataaagagtttaaagctcgagtgaaggagtatgcacgaaacaaaaacatccattactatttcatggccctgaagaatgatgagataatagatgccactcaaaaaggaaattgctctcgtttcatgaatcacagctgtgaaccaaattgtgaaacccaaaaatggactgtgaacggacaactgagggttgggttttttaccaccaaactggttccttcaggctcagagttaacgtttgactatcagttccagagatatggaaaagaagcccagaaatgtttctgcggatcagccaattgccggggttacctgggaggagaaaacagagtcagcatcagagcagcaggagggaaaatgaagaatgaacgatctcgcagaggattcaaggtggatggagagctagaagctctgatggaaaatggtgagggtctctctgataaaaaccaggtgctcagcttatcccggctaatggttagaattgaaactttggagcagaaacttacctgtctggaactcatacagaacacacactcacagtcctgcctgaagtcctttctggaacgtcatgggctgtctttgttgtggatctggatggcagagctaggtgacggccgggaaagtaaccagaagcttcaggaagagattataaagactttggaacacttgcccattcctactaaaaatatgttggaggaaagcaaagtacttccaattattcaacgctggtctcagactaagactgctgtccctccgttgagtgaaggagatgggtattctagtgagaatacatcgcgtgctcatacaccactcaacacacctgatccttccaccaagctgagcacagaagctgacacagacactcccaagaaactaatgtttcgcagactgaaaattataagtgaaaatagcatggacagtgcaatctctgatgcaaccagtgagctagaaggcaaaggatggcaagaggatcttgatcaattagaaaatgtccctgtagaggaagaggaagaattgcagtcacaacagctactcccacaacagctgcctgaatgcaaagttgatagtgaaaccaacatagaagctagtaagctacctacatctgaaccagaagctgacgctgaaatagagcccaaagagagcaacggcacaaaactagaagaacctattaatgaagaaacaccatcccaagatgaagaggagggtgtgtctgatgtggagagtgaaaggagccaagaacagccagataaaacagtggatataagtgatttggccaccaaactcctggacagttggaaagacctaaaggaggtatatcgaattccaaagaaaagtcaaactgaaaaggaaaacacaagaaatcagcctgaataaatggaatgacttgtctgcctcacatattctaaggtgcagagtcagaatatgaactgttgcaactgaacgaggaagggatgctgttggcttcagagatcaaacacctgccccgaagactcctaataggtcaagagagagagacccagacaagcaaactc

SEQ ID NO: 1874 - DNA, 862 bp, Homo sapiens
  misc_feature (21)..(21): n is a, c, g, or t
agccaccgccgcgtccctctntccacgaggctgccggcttaggacccccagctccgacatgtcgccctctggtcgcctgtgtcttctcaccatcgttggcctgattctccccaccagaggacagacgttgaaagataccacgtccagttcttcagcagactcaactatcatggacattcaggtcccgacacgagccccagatgcagtctacacagaactccagcccacctctccaaccccaacctggcctgctgatgaaacaccacaaccccagacccagacccagcaactggaaggaacggatgggcctctagtgacagatccagagacacacaagagcaccaaagcagctcatcccactgatgacaccacgacgctctctgagagaccatccccaagcacagacgtccagacagacccccagaccctcaagccatctggttttcatgaggatgaccccttcttctatgatgaacacaccctccggaaacgggggctgttggtcgcagctgtgctgttcatcacaggcatcatcatcctcaccagtggcaagtgcaggcagctgtcccggttatgccggaatcattgcaggtgagtccatcagaaacaggagctgacaacccgctgggcacccgaagaccaagccccctgccagctcaccgtgcccagcctcctgcatcccctcgaagagcctggccagagagggaagacacagatgatgaagctggagccagggctgccggtccgagtctcctacctcccccaaccctgcccgcccctgaaggctacctggcgccttgggggctgtccctcaagttatctcctctgttaagacaaaaagtaaagcactgtggtctttgca

SEQ ID NO: 1875 - DNA, 1323 bp, Homo sapiens
gaccgcagtcggagtctgcagagtgttgggtctgtagccagcaaattacttcatcatctagattatccattcagttgatcctaattagcaaggataacaaggtaacacaaggcttacttatattcacccaacaaaagtgtctctgtggagccacttcccagtgaactacatactgagataggggttcctggatgagaaggaccaaggacagaaccgagaagagtttaggggcaggttatgcgagatggaaatggcgcagataacggagggaaggatttgagggctcaaacgtaggcgtctgtgtttcgcaaaagttggagacgttctaggctgcctctcgttgcctccatctcgctctgcgcgggttttggaggacattagcattctttcttgtatctccgttgattccaagaatcgtccgcactaaagtcccctgcagcgtgaccatgtcgagaccccggaagaggctggctgggacttctggttcagacaagggactatcaggaaaacgcaccaaaactgagaactcaggtgaggcattagctaaagtggaggactccaaccctcagaagacttcagccactaaaaactgtttgaagaatctaagcagccactggctgatgaagtcagagccagagagccgcctagagaaaggtgtagatgtgaagttcagcattgaggatctcaaagcacagcccaaacagacaacatgctgggatggtgttcgtaactaccaggctcggaacttccttagagccatgaagctgggagaagaagccttcttctaccatagcaactgcaaagagccaggcatcgcaggactcatgaagatcgtgaaagaggcttacccagaccacacacagtttgagaaaaacaatccccattatgacccatctagcaaagaggacaaccctaagtggtccatggtggatgtacagtttgttcggatgatgaaacgtttcattcccctggctgagctcaaatcctatcatcaagctcacaaagctactggtggccccttaaaaaatatggttctcttcactcgccagagattatcaatccagcccctgacccaggaagagtttgattttgttttgagcctggaggaaaaggaaccaagttaactgagatactgctgctggaatgggcgagacattgctgcaaagaagtcaagcttttttcagacaaaaggtgtgagggggcttgcttggtatgcttacctgggcttgtgtacctcagtggtttttgtgtacttttttcaataaaatatcaaagttgaaaaaaaaaaaaaaaaaaaaaaaaaaagaaaaaaaaaaaaaaaaa

SEQ ID NO: 1876 - DNA, 609 bp, Homo sapiens
ggtgtggtagccggcgccgcgcccatagccggacggggatctgagctggcaggatgaatgtgggggtggcacacagcgaagtaaaccccaacacccgagtgatgaatagccgaggcatctggctggcctacatcatcttggtaggattgctgcatatggttctactcagcatccccttcttcagcattcctgttgtctggaccctgaccaacgtcatccataacctggctacgtatgtcttccttcatacggtgaaagggacaccctttgagactcctgaccaaggaaaggctcggctactgacacactgggagcaaatggactatgggctccagtttacctcttcccgcaagttcctcagcatctctcctattgtgctctatctcctggccagcttctataccaagtatgatgctgcgcacttcctcatcaacacagcctcattgctaagtgtactgctgccgaagttgccccagttccatggggttcgtgtctttggcatcaacaaatactgagggatgggttttgggacagctccatgggcatggggaaggcactgaaacagaggactataaaacaccaaaaaaaaaaaaaaaaaaaaaaaaaaaa

SEQ ID NO: 1877 - DNA, 849 bp, Homo sapiens
gacgacttcggtctgcgccggaagtgcatgagctgccgatgtggtgcttagtgattgcggtttcggtcgctctcccgtgtttcccgggctgggtatttgcctcgcaccatggcgcccaagggcaaagtgggcacgagagggaagaagcagatatttgaagagaacagagagactctgaagttctacctgcggatcatactgggggccaatgccatttactgccttgtgacgttggtcttcttttactcatctgcctcattttgggcctggttggccctgggctttagtctggcagtgtatggggccagctaccactctatgagctcgatggcacgagcagcgttctctgaggatggggccctgatggatgggtggcacggacctcaacatggacaggcatggcagagtgatgtcccccacgcagcccagcaccttaaggatgtgatcctactgacagccatcgtgcagtgctcagctgcttctctctctatgtctggtccttctggcttctggctccaggccgggccctttacctcctgtgggtgaatgtgctgggcccctggttcactgcagacagtggcaccccagcaccagagcacaatgagaaacggcagcgccgacaggagcggcggcagatgaagcggttatagccattgacattgtggccacaggccactggccctgggtggctctgtcagggtgcacagcccctcatgcctggagcaatgagggtctagtccaggggccaaaagcagtctgaggtattgggtatacttatactctatagggtcgttgaataaatggcttagaatgtgaaaaaaaaaaaaaaaaaaaaaaaaaaaaaaaaaa

SEQ ID NO: 1878 - DNA, 1059 bp, Homo sapiens
tcgcgcggaagccgcggtagggtgggaacccaagcgggagagccgcgggatttgcggccgccgccatgccgtcgtccccgctgcgggtggcggtggtgtgctcgagcaaccagaaccggagcatggaggcgcacaacatcctcagcaaacggggattcagcgtccgatcctttggaacagggactcacgtgaagcttccaggaccagctcccgacaagcccaatgtttatgatttcaaaaccacatatgaccagatgtacaatgatcttcttaggaaagacaaagaactctatacacagaatgggattttacatatgctggacagaaataagagaatcaagccccggccagaaagattccagaactgcaaagacctgtttgatctgatcctcacttgcgaagagagagtgtatgaccaggtggtggaagatctgaattccagagaacaggagacctgccagcccgtgcacgtggtcaatgtggacatccaggacaaccacgaggaggccaccctgggggcgtttctcatctgtgagctctgccagtgtatccagcacacggaagacatggagaacgagatcgacgagctgctgcaggagttcgaggagaagagtggccgcacctttctgcacaccgtctgcttctactgagcccagcgcccgcatggagccgcctctggagcttcctgttgttcatactttttccttcctgacatttgtttttacttacaggtgttctgctggtgacggtagcattacccaaataaactgtgcatatgaaatgggagaggagatgccaaaacgccagatgaaagcaatcaagtttcttcttttccacttttacttatgagcgggatattgattacaaagtttttcttctttaaccaaaaaggaaagacaacggtttgtgtgcacttcccgacatacctgtgtcttcgtgtgcctgccttccctccctcctccccaccgggccggactgtacagagccctgctgcggcgtgttaggaatgacctggaattgtcaataaacagatgctgctgtcaaaaaaaaaaaaaaaaa

SEQ ID NO: 1879 - DNA, 418 bp, Homo sapiens
gcctgtcgacgtgttcttccggtggcggacggcggattagccttcgcggggcaaaatggagctcgaggccatgagcagatataccagcccagtgaacccagctgtcttcccccatctgaccgtggtgcttttggccattggcatgttcttcaccgcctggttcttcgtttacgaggtcacctctaccaagtacactcgtgatatctataaagagctcctcatctccttagtggcctcactcttcatgggctttggagtcctcttcctgctgctctgggttggcatctacgtgtgagcacccaagggtaacaaccagatggcttcactgaaacctgcttttgtaaattacttttttttactgttgctggaagtgtcccacctgctgctcataataaatgcagatgtatacaaaaaaaaa

SEQ ID NO: 1880 - DNA, 1133 bp, Homo sapiens
agtgtaatgttgggtgggagtgcgggacgcctcaaaatgtcttccagtggcaccctcagcaactactacgtggactcgcttataggccatgagggcgacgaggtgttcgcggcgcgcttcgggccgccggggccaggcgcgcagggccggcctgcaggtgtggctgatggcccggccgccaccgccgccgagttcgcctcgtgtagttttgcccccagatcggccgtgttctctgcctcgtggtccgcggtgccctcccagcccccggcagcggcggcgatgagcggcctctaccacccgtacgttcccccgccgcccctggccgcctctgcctccgagcccggccgctacgtgcgctcctggatggagccgctgcccggcttcccgggcggtgcgggcggtggcggtggtggtggaggcggcggtccgggccgcggtcccagccctggccccagcggcccagccaacgggcgccactacgggattaagcctgaaacccgagcggccccggcccccgccacggccgcctccaccacctcctcctcctccacttccttatcctcctcctccaaacggactgagtgctccgtggcccgggagtcccaggggagcagcggccccgagttctcgtgcaactcgttcctgcaggagaaggcggcaggcggcgacggggggaacgggcctggggcagggatcggggccgcgactgggacgggcggctcgtcggagccctcagcttgcagcgaccacccgatcccaggctgttcgctgaaggaggaggagaagcagcattcgcagccgcagcagcagcaacttgacccaaacaaccccgaagcgaactggatccacgctcgctccacccggaaaaagcgctgtccctacaccaaataccagacgcttgagctggagaaagaattcctcttcaacatgtacctcacccgggaccggcgctacgaggtggccaggattctcaacctaacagagagacaggtcaaaatctggtttcagaaccgtaggatgaaaatgaaaaagatgagcaaggagaaatgccccaaaggagactgacccggcgcggtgctggcgggagcgctcaagggcagcggatttgttgttgttgctgtttcctttgtggg

SEQ ID NO: 1881 - DNA, 700 bp, Homo sapiens
ggggagttcaaggagacgggggcgacgcggctgagggcttctcgtcggggtcggggctgcagccgtcatgccggggatagtggagctgcccactctagaggagctgaaagtagatgaggtgaaaattagttctgctgtgcttaaagctgcggcccatcactatggagctcaatgtgataagcccaacaaggaatttatgctctgccgctgggaagagaaagatccgaggcggtgtttagaggaaggcaaactggtcaacaagtgtgctttggacttctttaggcagataaaacgtcactgtgcagagccttttacagaatattggacttgcattgattatactggccagcagttatttcgtcactgtcgcaaacagcaggcaaagtttgacgagtgtgtgctggacaaactgggctgggtgcggcctgacctgggagaactgtcaaaggtcaccaaagtgaaaacagatcgacctttaccggagaatccctatcactcaagaccaagaccggatcccagccctgagatcgagggagatctgcagcctgccacacatggcagccgcttttatttctggaccaagtaaagatgggtccgtggcccacactcggtcatgtgctcagacaacgactgatgaaaacgcccatgcggtttgcatcgactgatagtgtgttctttccgggatcacaaacattaacaa

SEQ ID NO: 1882 - DNA, 2248 bp, Homo sapiens
atgttccttctcctcgccctcctcactgagcttggaagactgcaagcccacgaaggttctgaaggaatatttctgcatgtcacagttccacggaagattaagtcaaatgacagtgaagtttcagagaggaagatgatttacatcattacaattgatggacaaccttacactctacatctcggaaaacaatcattcttaccccagaactttttggtttatacatataatgaaactggatctttgcattctgtgtctccatattttatgatgcattgccattaccaaggatatgctgccgaatttccaaattcatttgtgacactcagtatatgttctggtctcaggggatttctccagtttgaaaatatcagttatggaattgaaccagtagaatcttcagcaagatttgagcatataatttatcaaatgaaaaataatgatccaaatgtatccattttagcagtaaattacagtcatatttggcagaaagaccagccctacaaagttcctttaaactcacagataaaaaatctttcaaaactattaccccaatatctggaaatatacattatagtggaaaaagctttgtatgattatatgggatctgaaatgatggctgtaacacaaaaaattgtccaggttattgggcttgtcaacactatgtttacccagttcaaattgactgttatactgtcttccttggaattgtggtcaaatgaaaaccagatttccaccagtggggatgctgatgatatattacaaagatttttggcatggaaacgggactatctcatcctacggccccatgacatagcatacttacttgtttacaggaaacatcctaaatatgtgggagcaacatttcctggcaccgtatgcaataaaagctatgatgcaggtattgctatgtatccagatgcaataggtttggagggattttcggttattatagctcaactgcttggccttaatgtaggattaacatatgatgacatcactcagtgtttctgtctgagagctacatgcatcatgaatcatgaagcagtgagtgccagtggtagaaagatttttagcaactgcagcatgcacgactatagatattttgtttcaaaatttgagactaaatgccttcagaagctttcaaatttgcaaccattacatcaaaatcaaccagtgtgtggtaatgggattttggaatccaatgaagaatgtgactgtggtaataaaaatgaatgtcaatttaagaagtgctgtgattataacacatgtaaactgaagggctcagtaaaatgtggttctggaccatgttgtacatcaaagtgtgagttgtcaatagcaggcactccatgtagaaagagtattgatccagagtgtgattttacagagtactgcaatggaacctctagtaattgtgttcctgacacttatgcattgaatggccgtttgtgcaagttgggaactgcctattgctataacggacaatgtcaaactactgataaccagtgtgccaagatatttggaaaaggtgctcaaggtgctccatttgcctgttttaaagaagttaattctctgcatgaaagatctgaaaactgtggttttaaaaattcacaaccattaccttgtgaacggaaggatgttctctgtggaaaattagcttgtgttcagccacataaaaatgctaataaaagtgacgctcaatctacagtttattcatatattcaagaccatgtatgtgtatctatagccactggttcctccatgagatcagatggaacagacaatgcctatgtggctgatggcaccatgtgtggtccagaaatgtactgtgtaaataaaacctgcagaaaagttcatttaatgggatataactgtaatgccaccacaaaatgcaaagggaaagggatatgtaataattttggtaattgtcaatgcttccctggacatagacctccagattgtaaattccagtttggttccccagggggtagtattgatgatggaaattttcagaaatctggtgacttttatactgaaaaaggctacaatacacactggaacaactggtttattctgagtttctgcatttttctgccgtttttcatagttttcaccactgtgatctttaaaagaaatgaaataagtaaatcatgtaacagagagaatgcagagtataatcgtaattcatccgttgtatcagaaagcgatgacgtgggacattaatattgcacagaacttccatagcaaataa

SEQ ID NO: 1883 - DNA, 3636 bp, Homo sapiens
atggatccgccggcgggagccgctcgccgcctgctctgccccgcgctgctgctgctgctgctgctgctgccgccgccgctcctgccgccgccgccgccgcccgcgaacgccaggctcgccgccgccgccgaccccccaggcgggcccctggggcacggagcggagcgcatcctggcggtgcccgtgcgcactgacgcccagggccgcttggtgtcccacgtggtgtcggcagctacgtccagagcaggggtacgagcccgcagggccgccccggtccggaccccgagcttccccggaggcaacgaggaggagcctggcagtcacctcttctacaatgtcacggtctttggccgagacctgcacctgcggctgcggcccaacgcccgcctcgtggcgcccggggccactatggagtggcagggcgagaagggcaccacccgcgtggagcccctgctcgggagctgtctctacgtcggagacgtggccggcctagccgaagcctcctctgtggcgctcagcaactgcgatgggctggctggtctgatccggatggaggaggaggagttcttcatcgaacccttggagaaggggctggcggcgcaggaggctgagcaaggccgtgtgcatgtggtgtatcgccggccacccacgtcccctcctctcggggggccacaggccctggacacaggggcctccctggacagcctggacagcctcagccgcgccctgggcgtcctagaggagcacgccaacagctcgaggcggagggcacgcaggcatgctgcagacgatgactacaacatcgaggtcctgctgggcgtggatgactctgtggtgcagttccacgggaaggagcacgtacagaagtacctgctgacactcatgaacattgtcaatgaaatctaccatgacgagtccttgggtgcccacatcaacgtggtcctggtgcggatcatcctcctgagctatggaaagtccatgagcctcatcgagatcgggaacccctctcagagcctggagaatgtctgccgctgggcctacctccagcagaagccagacacgggccacgatgaataccacgatcacgccatcttcctcacacggcaggactttgggccttccggcatgcaaggctatgctcctgtcaccggcatgtgccatccggtccgcagctgcaccctgaaccatgaggacggcttctcctcagcgtttgtggtggcccatgagactggccacgtgctgggcatggagcacgacgggcagggcaaccgctgtggcgacgaggtgcggctgggcagcatcatggcgcccctggtgcaggccgccttccaccgcttccactggtcccgctgcagccagcaggagctgagccgctacctgcactcctatgactgcctgctggatgaccccttcgcccacgactggccggcgctgccccagctcccgggactgcactactccatgaacgagcaatgccgctttgacttcggcctgggctacatgatgtgcacggcgttccggacctttgacccctgcaagcagctgtggtgcagccatcctgacaacccctacttttgcaagaccaagaaggggccccccttggacgggactatgtgtgcacctggcaagcattgttttaaaggacactgcatctggctgacacctgacatcctcaaacgggacggcagctggggcgcttggagtccgtttggctcctgctcacgtacctgtggcacgggcgtgaagttcaggacccgccagtgtgacaacccacacccggccaacgggggccgcacctgctcgggccttgcctacgacttccagctctgcagccgccaggactgccccgactccctggctgacttccgcgaggagcagtgccgccagtgggacctgtacttcgagcacggcgacgcccagcaccactggctgccccacgagcaccgggatgccaaggagagatgccacctgtactgcgagtccagggagaccggggaggtggtgtccatgaagcgcatggtgcatgatgggacgcgctgctcctacaaggacgccttcagcctctgtgtgcgcggggactgcaggaaggtgggctgtgacggtgtgatcggctccagcaagcaggaagacaagtgtggcgtgtgcggaggggacaacagccactgcaaagtggtcaagggcacgttcacacggtcacccaagaagcatggttacatcaagatgtttgagatccctgcaggagccagacacctgctcattcaggaggtagacgccaccagccaccatctggccgtcaagaacctggagacaggcaagttcatcttaaatgaagagaatgacgtggatgccagttccaaaaccttcattgccatgggcgtggagtgggagtacagagacgaggacggccgggagacgctgcagaccatgggccccctccacggcaccatcaccgttctggtcatcccggtgggagacacccgggtctcactgacgtacaaatacatgatccatgaggactcactgaatgtcgatgacaacaacgtcctggaagaggactctgtggtctacgagtgggccctgaagaagtggtctccgtgctccaagccctgtggcggagggtcccagttcaccaagtatggctgccgccggaggctggaccacaagatggtacaccgtggcttctgtgccgccctctcgaagcccaaagccatccgcagagcgtgcaacccacaggaatgctcccagccagtgtgggtcacaggcgaatgggagccatgtagccagacctgtgggcggacaggcatgcaggtgcgctccgtgcgctgcattcagccgctacacgacaacaccacccgctccgtgcacgccaagcactgcaatgacgcccggcccgagagccgccgggcctgcagccgcgagctctgccctggtcgttggcgagccgggccctggtcccagtgctcagtaacctgtggcaacggcacccaggagcggccagtgccctgccgcaccgcggacgacagcttcggcatctgccaggaggagcgtcctgagacagcgaggacctgcaggcttggcccctgtccccgaaacatctcagatccctccaagaagagctacgtagttcagtggctgtcccgcccggaccccgactcgcccatccggaagatctcgtcaaagggccactgccaaggcgacaagtcaatattctgtaggatggaagtcttgtcccgctattgctccatcccaggctacaacaagctgtcctgcaagtcctgtaacctgtacaacaacctcaccaacgtggagggcaggatagagccaccgcctgggaagcacaacgacattgacgtgttcatgcctaccctcccagtgcccactgtagccatggaggtgcggccatcaccaagcacccccctggaggtccctctcaatgcctccagcaccaatgccacagaggatcacccagaaaccaatgccgtagatgaaccctacaaaatccatggcctggaagatgaagtccagccacccaacctaatccctcgacgaccgagcccctatgaaaagaccagaaaccaaagaatccaagagctcattgatgagatgcggaagaaagagatgctcggaaagttctaa

SEQ ID NO: 1884 - DNA, 6568 bp, Homo sapiens
cttgccatcgtgagagattggtacatgatgtgtaaattcagttcagcatatgtttcttcattatgaaaccactagcaatcccagctaaccatggagttatgggccagcaggagaaacactcacttcctgcagatttcacaaaactgcatcttactgacagtctccacccacaggtgacccacgtttcttctagccattcaggatgtagtatcactagtgattctgggagcagcagtctttctgatatctaccaggccacagaaagcgaggctggtgatatggacctgagtgggttgccagaaacagcagtggattccgaagacgacgacgatgaagaagacattgagagagcatcagatcctctgatgagcagggacattgtgagagactgcctagagaaggacccaattgaccggacagatgatgacattgaacaactcttggaatttatgcaccagttgcctgcttttgccaatatgacaatgtcagtgaggcgagaactctgtgctgtgatggtgttcgcagtggtggaaagagcagggaccatagtgttaaatgatggtgaagagctggactcctggtcagtgattctcaatggatctgtggaagtgacttatccagatggaaaagcagaaatactgtgcatgggaaatagttttggtgtctctcctaccatggacaaagaatacatgaaaggagtgatgagaacaaaggtggatgactgccagtttgtctgcatagcccagcaagattactgccgtattctcaatcaagtagaaaagaacatgcaaaaagttgaagaggaaggagagattgttatggtgaaagaacaccgagaacttgatcgaactggaacaagaaagggacacattgtcatcaagggtacctcagaaaggttaacaatgcatttggtggaagagcattcagtagtagatccaacattcatagaagactttctgttgacctataggacttttctttctagcccaatggaagtgggcaaaaagttattggagtggtttaatgacccgagcctcagggataaggttacacgggtagtattattgtgggtaaataatcacttcaatgactttgaaggagatcctgcaatgactcgatttttagaagaatttgaaaacaatctggaaagagagaaaatgggtggacacctaaggctgttgaatatcgcgtgtgctgctaaagcaaaaagaagattgatgacgttaacaaaaccatcccgagaagctcctttgccttttatcttacttggaggctctgagaagggatttggaatctttgttgacagtgtagattcaggtagcaaagcaactgaagcaggcttgaaacggggggatcagatattagaagtaaatggccaaaactttgaaaacattcagctgtcaaaagctatggaaattcttagaaataacacacatttatctatcactgtgaaaaccaatttatttgtatttaaagaacttctaacaagattgtcagaagagaaaagaaatggtgccccccaccttcctaaaattggtgacattaaaaaggccagtcgctactccattccagatcttgctgtagatgtagaacaggtgataggacttgaaaaagtgaacaaaaaaagtaaagccaacactgtgggaggaaggaacaagctgaaaaagatactcgacaagactcggatcagtatcttgccacagaaaccatacaatgatattgggattggtcagtctcaagatgacagcatagtaggattaaggcagacaaagcacatcccaactgcattgcctgtcagtggaaccttatcatccagtaatcctgatttattgcagtcacatcatcgcattttagacttcagtgctactcctgacttgccagatcaagtgctaagggtttttaaggctgatcagcaaagccgctacatcatgatcagtaaggacactacagcaaaggaagtggtcattcaggctatcagggagtttgctgttactgccaccccggatcaatattcactatgtgaggtctctgtcacacctgagggagtaatcaaacaaagaagacttccagatcagctttccaaacttgcagacagaatacaactgagtggaaggtattatctgaaaaacaacatggaaacagaaactctttgttcagatgaagatgctcaggagttgttgagagagagtcaaatttccctccttcagctcagcactgtggaagttgcaacacagctctctatgcgaaattttgaactctttcgcaacattgaacctactgaatatatagatgatttatttaaactcagatcaaaaaccagctgtgccaacctgaagagatttgaagaagtcattaaccaggaaacattttgggtagcatctgaaattctcagagaaacaaaccagctgaagaggatgaagatcattaagcatttcatcaagatagcactgcactgtagggaatgcaagaattttaactcaatgtttgcaatcatcagtggcctaaacctggcaccagtggcaagactgcgaacgacctgggagaaacttcccaataaatacgaaaaactatttcaagatctccaagacctgtttgatccttccagaaacatggcaaaatatcgtaatgttctcaatagtcaaaatctacaacctcccataatccctctattcccagttatcaaaaaggatctcaccttccttcacgaaggaaatgactcaaaagtagacgggctggtcaattttgagaagctaaggatgattgcaaaagaaattcgtcacgttggccgaatggcttcagtgaacatggaccctgccctcatgttcaggactcggaagaagaaatggcggagtttggggtctctcagccagggtagtacaaatgcaacagtgctagatgttgctcagacaggtggtcataaaaagcgggtacgtcgtagttcctttctcaatgccaaaaagctttatgaagatgcccaaatggctcgaaaagtgaagcagtacctttccaatttggagctagaaatggacgaggagagtcttcagacattatctctgcagtgtgagccagcaaccaacacattgcctaagaatcctggtgacaaaaagcctgtcaaatccgagacctctccagtagctccaagggcagggtcacaacagaaagctcagtccctgccacagccccagcagcagccaccaccagcacataaaatcaaccagggactacaggttcccgccgtgtccctttatccttcacggaagaaagtgcccgtaaaggatctcccaccttttggcataaactctccacaagctttaaaaaaaattctttctttgtctgaagaaggaagtttggaacgtcacaagaaacaggctgaagatacaatatcaaatgcatcttcgcagctttcttctcctcctacttctccacagagttctccaaggaaaggctatactttggctcccagtggtactgtggataatttttcagattctggtcacagtgaaatttcttcacgatccagtattgttagcaattcgtcttttgactcagtgccagtctcactgcacgatgagaggcgccagaggcattctgtcagcatcgtggaaacaaacctagggatgggcaggatggagaggcggaccatgattgaacctgatcagtatagcttggggtcctatgcaccaatgtccgagggccgaggcttatatgctacagctacagtaatttcttctccaagcacagaggaactttcccaggatcagggggatcgcgcgtcacttgatgctgctgacagtggccgtgggagctggacgtcatgctcaagtggctcccatgataatatacagacgatccagcaccagagaagctgggagactcttccattcgggcatactcactttgattattcaggggatcctgcaggtttatgggcatcaagcagccatatggaccaaattatgttttctgatcatagcacaaagtataacaggcaaaatcaaagtagagagagccttgaacaagcccagtcccgagcaagctgggcgtcttccacaggttactggggagaagactcagaaggtgacacaggcacaataaagcggaggggtggaaaggatgtttccattgaagccgaaagcagtagcctaacgtctgtgactacggaagaaaccaagcctgtccccatgcctgcccacatagctgtggcatcaagtactacaaaggggctcattgcacgaaaggagggcaggtatcgagagcccccgcccacccctcccggctacattggaattcccattactgactttccagaagggcactcccatccagccaggaaaccgccggactacaacgtggcccttcagagatcgcggatggtcgcacgatcctccgacacagctgggccttcatccgtacagcagccacatgggcatcccaccagcagcaggcctgtgaacaaacctcagtggcataaaccgaacgagtctgacccgcgcctcgccccttatcagtcccaagggttttccaccgaggaggatgaagatgaacaagtttctgctgtttgaggcacagacttttctggaagcagagcgagccacctgaaaggagagcacaagaagacgtcctgagcattggagccttggaactcacattctgaggacggtggaccagtttgcctccttccctgccttaaaagcagcatggggcttcttctccccttcttcctttcccctttgcatgtgaaatactgtgaagaaattgccctggcacttttcagactttgttgcttgaaatgcacagtgcagcaatcttcgagctcccactgttgctgcctgccacatcacacagtatcattccaaattccaagatcatcacaacaagatgattcactctggctgcacttctcaatgcctggaaggattttttttaatcttccttttagatttcaatccagtcctagcacttgatctcattgggataatgagaaaagctagccattgaactacttggggcctttaacccaccaaggaagacaaagaaaaacaatgaaatcctttgagtacagtgcttgtccacttgtttacaatgtcctccttttaaaaaaaaaaatgagtttaaagattttgttcagagagtaaatatatatccatttaatgattacagtattattttaaaccttaagtagggttgccagcctggtttctgaaaaaccaaatatgccggacagggtgtggccacaccaagaagacgggaagacctggcttgtgaccctggcttcccatgtccttctggtctcacccgcgaagtgccctatcctggaagtatgaaatgttagccaattaataccaagacacctcatctgctccttccccagtggatggggttcttctgtaaaactgtttgcacatggccaggggagggaactaggacccttgtgtcctgtctgagccttatggaggcaggacggtgtcattggcggatgtgtcctgctccattgagatggatggcaaaccccatttttaagttatatttctttgatttttgttaatttagaggtgtaggttttgttttttgttttttgtttttttttaagagaaacatttataactggatagcattgcagtgaaagcagcttgggatgttggagctaatgccagctgtttatactgctctttcaagacagcctccctttattgaattggcattagggaataaacaagcctttaaacgtgataaaagatcaaaaacctggttagacatgccagcctttgcaaggcaggttagtcaccaaagactaacctccaagtggctttatggacgctgcatatagagaaggcctaagtgtagcaaccatctgctcacagctgctattaaccctataatgactgaaatgacccctccactctatttttgtgttgttttgcacagactccggaaaagtgaaggctgccaatctgagtagtactcaaatgtgaggaactgctggtcttggattttttttccattaaattcagctgatcatattgatcagtagataaacgtaaatagcttcaaattttaaaagtggaattgcagtgttttttcactgtatcaaacaatgtcagtgctttatttaataattctcttctgtatcatggcatttgtctacttgcttattacattgtcaattatgcatttgtaattttacatgtaatatgcattatttgccagttttattatataggctatggacctcatgtgcatatagaaagacagaaatctagctctaccacaagttgcacaaatgttatctaagcattaagtaattgtagaacataggactgctaatctcagttcgctctgtgatgtcaagtgcagaatgtacaattaactggtgatttcctcatacttttgatactacttgtacctgtatgtcttttagaaagacattggtggagtctgtatcccttttgtatttttaatacaataattgtacatattggttatatttttgttgaagatggtagaaatgtactatgtttatgcttctacatccagtttgtacaagctggaaaataaataaatataacat

SEQ ID NO: 1885 - DNA, 3150 bp, Homo sapiens
ggccaggaacgcacgctgcctggccgtatcgccgcccccaccgacgccgccgccgggactagaagtgagccgcccgggtcccaaacgccagccagccagtcagtgggtcccgcagtcgcccgcaaccggggcgaatcatggcggccgccaaggtggctttaaccaagagagcagatccagctgagcttagaacaatatttttgaagtatgcaagcattgagaaaaacggtgaatttttcatgtcccccaatgactttgtcactcgatacttgaacatttttggagaaagccagcctaatccaaagactgtggaacttttaagtggagtggtggatcagaccaaagatggattaatatcttttcaagaatttgttgcctttgaatctgtcctgtgtgcccctgatgctttgtttatggtagcctttcagctgtttgacaaagctggcaaaggagaagtaacttttgaggatgttaagcaagtttttggacagaccacaattcatcaacatattccatttaactgggattcagaatttgtgcaactacattttggaaaagaaagaaaaagacacctgacatatgcggaatttactcagtttttattggaaatacaactggagcacgcaaagcaagcctttgtgcaacgggacaatgctaggactgggagagtcacagccatcgacttccgagacatcatggtcaccatccgcccccatgtcttgactccttttgtagaagaatgtctagtagctgctgctggaggtaccacatcccatcaagttagtttctcctattttaatggatttaattcgctccttaacaacatggaactcattagaaagatctatagcactctggctggcaccaggaaagatgttgaagtgactaaggaggagtttgttctggcagctcagaaatttggtcaggttacacccatggaagttgacatcttgtttcagttagcagatttatatgagccaaggggacgtatgaccttagcagacattgaacggattgctcctctggaagagggaactctgccctttaacttggctgaggcccagaggcagaaggcctcaggtgattcagctcgaccagttcttctacaagttgcagagtcggcctacaggtttggtctgggttctgttgctggagctgttggagccactgctgtgtatcctatcgatcttgtaaaaactcgaatgcagaaccaacgatcaactggctcttttgtgggagaactcatgtataaaaacagctttgactgttttaagaaagtgctacgctatgaaggcttctttggactgtatagaggtctgttgccacagttattgggagttgccccagagaaggccataaaacttacagtgaacgattttgtgagggataaatttatgcacaaagatggttcggtcccacttgcagcagaaattcttgctggaggctgcgctggaggctcccaggtgattttcacaaatcctttagaaatcgtcaagatccgtttgcaagtggcaggagaaatcaccactggtcctcgagtcagtgctctgtctgtcgtgcgggacctggggttttttgggatctacaagggtgccaaagcatgctttctgcgggacattcctttctcggccatctactttccgtgctatgctcatgtgaaggcttcctttgcaaatgaagatgggcaggttagcccaggaagcctgctcttagctggtgccatagctggtatgcctgcagcatctttagtgacccctgctgatgttatcaagacgagattacaggtggctgcccgggctggccaaaccacttacagcggagtgatagactgctttagaaagatactgcgtgaagaaggaccaaaagctctgtggaagggagctggtgctcgtgtatttcgatcctcaccccagtttggtgtaactttgctgacttacgaattgctacagcgatggttctacattgattttggaggagtaaaacccatgggatcagagccagttcctaaatccaggatcaacctgcctgccccgaatcctgatcacgttgggggctacaaactggcagttgctacatttgcagggattgaaaacaaatttggactttacctacctctcttcaagccatcagtatctacctcaaaggctattggtggaggcccataggaagatcagccctgggatagtgctgtctttttgtgggtactgcagtaaagaacatccctcctgggaatgaagcaatgcttcatcccttttacgtccatctcttgtttaaattcaagtccaggcttttttatcatgtgaaatcattcattttctgggtgttttcttaaccagatcattgtgaaattattcataattattatttggccctctgcccagaaacctttgtttgcatctgaaaattgatgggatttggtcaacactaacatgatttggggaaaggagcaagtcagaatagaaattagtactcccctccttgaactaggattgtagtcccaaagaggctactgtaaggcaatcatggtgctcagagcagtgtttcgtgtgtgttttaaactggtaggaaactaggtgcatatttataaaaataaaaaacactgggagaaatgaaaaaatatatatcaaatatattcagcctggcttcaaattgtaagcatgcacaaattctgtctctggattatattatgaagcttttatgtgaaacatgtttctttgtaatgaaaaccacattggagatgtttagtaatcatattgttactggtaccaagactactagggaaatgcctttgtactttagggaagtacttttggcattttactgtacagacagaaaaaactgagatgtagcccctctcctggaagtgctaattttgaaaaactgctcatatgatgtacatgtactgattactgcctattttaataaacactcttgaaaaatgcatgttgccctgttgctgcctgccctattctcctcatctccccatcattggtacccacttgcttttaaaatccactttatcttgaataatgtaagacaaatatgttctgacataagtatttaattcatgttgccttgcataatggtcagaggcgcatgaatttgtgaaggtggaaataaactatttgtaaagtgaaaaaaaaaaaaaaa

SEQ ID NO: 1886 - DNA, 1451 bp, Homo sapiens
actgcctggaaacgggctgggcctgcctcggacgccgccggtgtcgcggattctctttccgcccgctccatggcggtggatgcctgactggaagcccgagtgggatgcggctgacgcggaagcggctctgctcgtttcttatcgccctgtactgcctattctccctctacgctgcctaccacgtcttcttcgggcgccgccgccaggcgccggccgggtccccgcggggcctcaggaagggggcggcccccgcgcgggagagacgcggccgagaacagtccactttggaaagtgaagaatggaatccttgggaaggagatgaaaaaaatgagcaacaacacagatttaaaactagccttcaaatattagataaatccacgaaaggaaaaacagatctcagtgtacaaatctggggcaaagctgccattggcttgtatctctgggagcatatttttgaaggcttacttgatcccagcgatgtgactgctcaatggagagaaggaaagtcaatcgtaggaagaacacagtacagcttcatcactggtccagctgtaataccagggtacttctccgttgatgtgaataatgtggtactcattttaaatggaagagaaaaagcaaagatcttttatgccacccagtggttactttatgcacaaaatttagtgcaaattcaaaaactccagcatcttgctgttgttttgctcggaaatgaacattgtgataatgagtggataaacccattcctcaaaagaaatggaggcttcgtggagctgcttttcataatatatgacagcccctggattaatgacgtggatgtttttcagtggcctttaggagtagcaacatacaggaattttcctgtggtggaggcaagttggtcaatgctgcatgatgagaggccatatttatgtaatttcttaggaacgatttatgaaaattcatccagacaggcactaatgaacattttgaaaaaagatgggaacgataagctttgttgggtttcagcaagagaacactggcagcctcaggaaacaaatgaaagtcttaagaattaccaagatgccttgcttcagagtgatctcacattgtgcccggtcggagtaaacacagaatgctatcgaatctatgaggcttgctcctatggctccattcctgtggtggaagacgtgatgacagctggcaactgtgggaatacatctgtgcaccacggtgctcctctgcagttactcaagtccatgggtgctccctttatctttatcaagaactggaaggaactccctgctgttttagaaaaagagaaaactataattttacaagaaaaaattgaaagaagaaaaatgttacttcagtggtatcagcacttcaagacagagcttaaaatgaaatttactaatattttagaaagctcatttttaatgaataataaaagttaattatctttttgagct

SEQ ID NO: 1887 - DNA, 2129 bp, Homo sapiens
ctctgatgccctcctcccttcgcctcctcagttgaagaagctggatctggcagctgcggcagcacacaccttctttgtagcaaaccccatgcacctgcagatgcgggaggacatggctaagtacagacgaatgtcgggagttcggccccagagcttccgggacctggagacgcccccacactgggcagcctatgacactggcctggagctactggggcgccaggaggcaggactggcactgcccaggctagaggaggctcttcaggggagcctggcccagatggagagctgccgtgctgactgtgaggggcctgaggagcagcagggggctgaagaagaggaggatggggctgcgagccaggggggcctctatgaggccattgcaggacactggattcaggtcctgcagtgccggcaacgctgtgtgggggaagcagccacacgccctggtcgcagcttccctgtcccagacttccttcccaaccagctgaggcggctacatgaggcccatgctcaggtgggcaatctgtcccaggctatagaaaatgtcctgagtgtcctgctcttctacccggaggatgaggctgccaagagggctctgaaccagtaccaggcccagctgggagagccgagacctggcctcggacccagagaggacatccagcgcttcatcctccgatccctgggggagaagaggcagctctactatgccatggagcacctggggaccagcttcaaggatcctgacccctggacccctgcagctctcatccctgaggcacttagagaaaagctcagagaggatcaagagaagaggccttgggaccatgagcccgtgaagccaaagcccttgacctactggaaggatgtccttctcctggagggtgtgaccttgacccaggattccaggcagctgaatgggtcggagcgggcggtgttggatgggctgctcaccccagccgagtgtggggtgctgctgcagctggctaaggatgcagctggggctggagccaggtctggctatcgtggtcgccgctcccctcacaccccccatgaacgcttcgaggggctcacggtgcttaaggctgcgcagctggcccgggctgggacagtgggcagtcagggtgctaagctgcttctggaggtgagcgagcgggtgcggaccttgacccaggcctacttctccccggaacggcccctgcatctgtccttcacccacctggtgtgccgcagcgccatagaaggagagcaagagcagcgcatggacctgagtcacccagtgcacgcagacaactgcgtcctggaccctgacacgggagagtgctggcgggagcccccagcctacacctatcgggactacagcggactcctctacctcaacgatgacttccagggtggggacctgttcttcacggagcccaacgccctcactgtcacggctcgggtgcgtcctcgctgtgggcgccttgtggccttcagctccggtgtcgagaatccccatggggtgtgggccgtgactcggggacggcgctgtgccctggcactgtggcacacgtgggcacctgagcacagggagcaggagtggatagaagccaaagaactgctgcaggagtcacaggaggaggaggaagaggaagaggaagaaatgcccagcaaagacccttccccagagccccctagccgcaggcaccagagggtccaagacaagactggaagggcacctcgggttcgggaggagctgtgagtggctgagccagctccttgaggatgtggccacttgacttgtggaaggccatcttgatgccaggacacacaggaagcccctgtgtgacatcaggagcagaacagcaagctctctgtccctgcacccccaccatcttggggacctacaagggcctggactcagaggacagtgcacaggctagcctggagctcaccaggcctggggagctgggacggggccccgctgccggacctgcagccctggacagatggggaacactgtgcctccctgaacagaaatggcaggggaggaggctgatgctttaaatgaagaggatggtggggttgggaggtataaccctgctcctctctcccagtctgtgcaataaaggtcgtgaagatctctc

SEQ ID NO: 1888 - DNA, 3869 bp, Homo sapiens
aggcggattgtctgtcgttgcagtagctgtaggaaggggaggccattttccgtttctgggaggagtgaggggcaacgggtcggagaaaaaggaaaaaagaagggctcagcgcctccccgccgggccgtggacagaggggcacagtttcggcaggcgggtgaggtcgctgagggcccgccggagatgttttccttgtcgagcacggtgcaaccccaggttacagttcctctgagtcatctcatcaatgccttccatacaccaaaaaacacttctgtttctctcagtggagtgtcagtttctcaaaaccagcatcgagatgtagttcctgagcatgaggctcccagcagtgagccttcacttaacttaagggaccttggattatctgaactaaaaattggacagattgatcagctggtagaaaatctacttcctggattttgtaaaggcaaaaacatttcttcccattggcatacatcccatgtctctgcacaatccttctttgaaaataaatatggtaacttagatatatttagtacattacgttcctcttgcttgtatcgacatcattcaagagctcttcaaagcatttgttcagatcttcagtactggccagttttcatacagtctcggggttttaaaactttgaaatcaaggacacgacgtctccagtctacctccgagagattagctgaaacacagaatatagcgccatcattcgtgaaggggtttcttttgcgggacagaggatcagatgttgagagtttggacaaactcatgaaaaccaaaaatatacctgaagctcaccaagatgcatttaaaactggttttgcggaaggttttctgaaagctcaagcactcacacaaaaaaccaatgattccctaaggcgaacccgtctgattctcttcgttctgctgctattcggcatttatggacttctaaaaaacccatttttatctgtccgcttccggacaacaacagggcttgattctgcagtagatcctgtccagatgaaaaatgtcacctttgaacatgttaaaggggtggaggaagctaaacaagaattacaggaagttgttgaattcttgaaaaatccacaaaaatttactattcttggaggtaaacttccaaaaggaattcttttagttggacccccagggactggaaagacacttcttgcccgagctgtggcgggagaagctgatgttcctttttattatgcttctggatccgaatttgatgagatgtttgtgggtgtgggagccagccgtatcagaaatctttttagggaagcaaaggcgaatgctccttgtgttatatttattgatgaattagattctgttggtgggaagagaattgaatctccaatgcatccatattcaaggcagaccataaatcaacttcttgctgaaatggatggttttaaacccaatgaaggagttatcataataggagccacaaacttcccagaggcattagataatgccttaatacgtcctggtcgttttgacatgcaagttacagttccaaggccagatgtaaaaggtcgaacagaaattttgaaatggtatctcaataaaataaagtttgatcaatccgttgatccagaaattatagctcgaggtactgttggcttttccggagcagagttggagaatcttgtgaaccaggctgcattaaaagcagctgttgatggaaaagaaatggttaccatgaaggagctggagttttccaaagacaaaattctaatggggcctgaaagaagaagtgtggaaattgataacaaaaacaaaaccatcacagcatatcatgaatctggtcatgccattattgcatattacacaaaagatgcaatgcctatcaacaaagctacaatcatgccacgggggccaacacttggacatgtgtccctgttacctgagaatgacagatggaatgaaactagagcccagctgcttgcacaaatggatgttagtatgggaggaagagtggcagaggagcttatatttggaaccgaccatattacaacaggtgcttccagtgattttgataatgccactaaaatagcaaagcggatggttaccaaatttggaatgagtgaaaagcttggagttatgacctacagtgatacagggaaactaagtccagaaacccaatctgccatcgaacaagaaataagaatccttctaagggactcatatgaacgagcaaaacatatcttgaaaactcatgcaaaggagcataagaatctcgcagaagctttattgacctatgagactttggatgccaaagagattcaaattgttcttgaggggaaaaagttggaagtgagatgataactctcttgatatggatgcttgctggttttattgcaagaatacaagtagcattgcagtagtctacttttacaacgctttcccctcattcttgatgtggtgtaattgaagggtgtgaaatgctttgtcaatcatttgtcacatttatccagtttgggttattctcattatgacacctattgcaaattagcatcccatggcaaatatattttgaaaaaataaagaactatcaggattgaaaacagctcttttgaggaatgtcaattagttattaagttgaaagtaattaatgattttatgtttggttactctactagatttgataaaaattgtgcctttagccttctatatacatcagtggaaacttaagatgcagtaattatgttccagattgaccatgaataaaatattttttaatctaaatgtagagaagttgggattaaaagcagtctcggaaacacagagccaggaatatagccttttggcatgggtgccatggctcacatctgtaatcccagcacttttggaggctgaggcgggtggattgcttgaggccaggagttcgagaccagcctggcccaacgtggtgaaacgctggtccctactaaaataccaaaaaaatagggctgggcgcggttgctcacgcctgtaatcccagcacttttcagaggccaaggcgggcaaatcacctgaggtcaagagtttgagaccagcctggccaacatggtgaaaccccatctctactaaacatgcaaaaattacctgggcatggtggcaggtgcttataatcccagctactctgggggccaaggcaggagaattgcttgagcctgggagatggaggttgcagtgagctgagatcatgccactgcactccagcctgggcaacagagcaagactctgcctcaaaaaaaaattaaactaatttaaatacaaaacaaaatagccaggtttggggtgcatgcctggaatcccagctacttgagaggctgaggcacgagaattgcttgaacccaggaggtggaggttgcagtgagccaagatcacaggagccactgcactccagcctgggtgacagagtgagactctgtctcaaaaaaaaattaaataaattattataacctttcagaaatgctgtgtgcattttcatgttcttttttttagcattactgtcactctccctaatgaaatgtacttcagagaagcagtattttgttaaataaatacataacctcattctgaataatgtccctcattttgactataactgtgcttggtttcaaaagcaaaattaaacaaaaatctcagtcccctccgaagtgaactttgtgttaccctgcgtcagaaatgccaagttgtgtttacttttcattcagattttgtgaatatgaacatgctgttataggatctacagatgaatatttaactcaatagaaaaattattttagaacacattgtattggtattacaaccagattatattcttgacgttgacttcattaaaattatctacaatttcctaataaaaaaaaaaa

SEQ ID NO: 1889 - DNA, 1504 bp, Homo sapiens
ggggagagaaggcccggaggggctctgcgttctgtagtggcgctgcttgggcccgtggcggattgtaagctgctggttttgcggctgggaagagcggcgagagggttcggcatttttcgtcgggatccccgcaaggatgagtgctgccagagagtctcacccgcatggggtgaagcgttcagcctccccagacgacgatctgggatctagcaattgggaggcagcagacttgggtaatgaagagagaaaacaaaagttcttgagacttatgggtgcaggaaagaaagaacatactggtcgtcttgttataggagatcacaaatcaacatctcacttccgaaccggggaagaagacaagaaaattaatgaagaactggagtctcaatatcagcaaagtatggacagtaaattatcaggaagatatcggcgacattgtggacttggcttcagtgaggtagaagaccatgatggagaaggtgatgtggctggagatgatgatgatgacgatgatgattcacctgatcctgaaagtccagatgattctgaaagcgattcagagtcagagaaagaagaatctgctgaagaactccaagctgctgagcaccctgatgaagtggaggatcccaaaaacaaaaaagatgcaaaaagcaattataaaatgatgtttgttaaatccagtggttcataactcccaaacgcttagtctttgtattaaaagtaagccttattgttacaatgcacagtggaggactgcttatagagcacagacctttgtattataatttttaaaaaggcccttttaaataattacaaagagtgtttgctttcaaatgccatgggttacacttttatgggcatgactataaccatttttgtaaagagtaagagttgtataaaataagaaataaatacagtactcaacttcctttcatattagcatcatcaaccctctaattcaccttatgggggaaatgcttctttttgtttgtgatagctattttatcatttccttcatatttttctcttataaaaatgtatttgatactgtgatatgttcacgaaaagtattctttaattattctttgttatagtagagctgttcattatggatatttctgctgccagtcacaatctaaattaattttggcaaaagattgggtacttagttgcctgttactgagttagctctactcttttggaccaaagcaacatgagagcaagtacttttcacacttgttaagatggagttataactgtcatacatttggaatattatgatcccaagtagtctttttataatttggattgtatcgtatgttagatttttgataaaatttggccaatttttacagaagaaattctctgatcatttagttctatctatttagaaatatgtaaaactggatttttttttaagtaatatgtgaccaaagttaattttgtcccaaaggtctaaataaagagcagtttcccacaaaaaaaaaaaaaaaaaaaaaaaaaaaaa

SEQ ID NO: 1890 - DNA, 2578 bp, Homo sapiens
cgagcaggcggcaggcacggtccgtgcggagaggcgagcgagcgggaagacgcagccaccttcctcaccagccagcccacagcggtttgttccccttctcgggagtgcgccaatgcctgggccgacccaaaccctgtccccaaatggcgagaacaacaacgacatcatccaggataataacgggaccatcattcctttccggaagcacacagtgcgcggggagcgttcctacagttggggaatggcggtcaatgtgtattctacctcgataacccaagagactatgagcagacatgacatcattgcatgggttaatgacatagtatctttaaactacacaaaagtggaacagctttgttcaggagcggcctattgccaattcatggacatgctcttccctggctgcattagtttgaagaaagtaaaatttcaagcaaagctggaacatgaatatattcacaattttaaacttctgcaagcatcatttaagcgaatgaacgttgataaggtaattccagtggagaagctagtgaaaggacgtttccaggacaacctggattttattcaatggtttaagaaattctatgatgctaactacgatgggaaggagtatgatcctgtagaggcacgacaagggcaagatgcaattcctcctcctgaccctggtgaacagatcttcaacctgccaaaaaagtctcaccatgcaaactcccccacagcaggtgcagctaaatcaagtccagcagctaaaccaggatccacaccttctcgaccctcatcagccaaaagggcttcttccagtggctcagcatccaaatccgataaagatttagaaacgcaggtcatacagcttaatgaacaggtacattcattaaaacttgcccttgaaggcgtggaaaaggaaagggatttctactttgggaagttgagagagatcgagctactctgccaagaacacgggcaggaaaatgatgacctcgtgcagagactaatggacatcctgtatgcttcagaagaacacgagggccacacagaagagccggaagcagaggagcaagcccacgaacagcagcccccgcagcaggaagagtactgacccaccccggctgctcttgacacttccattgtgtgtgggaacgtttcttctggagaattggaacatgtgtggccccaagctcaacagaaaccagttgttcccaatctgccgttaccatcaacgcactgttgcatatgccagccactgcgcttggttcccattttctttgctaaggtgtattagcggacggccctctggccacctacccgagagatcgtagggtcacattcatccaacttcaccacttggctgcttgagattggttctgctcttttcttcattcctttccagaacaactctttcccaccccaacaccactgccaccacccctctttttatcctggtgtgaaacaatggtaatttgatatatggtatttatattggcatttttcaacccagtgtcactagatgtcacacacatttgtggtgctttgatgtttgcaagtctaacctctgaacataaatttggtcaaataattggaacaaagggaaacagatacttgatatgaaagccataatgacggtgacttgtgtcgtgggggaaaacataaggtcattttctccctctactcacaatactaaagggaaaaaatggattcaaagctaggatttcagggcccagcagtgttcctccatcagcatgttagacaactacacagtatgttgttagttttgaaagacattcactcaaggaaaacaccatctcaactttgcccgctcaccatgtcccttgcccccatgtagcccatttcccaggttatgctcttttctttctcagggtcctctttggtgggcagccactccccgagatgttgccatcagttttctgcagtccaaagagggtatggttaggtacgggtcttcctgcctcattcctcttcctctttgtgtaggtttcagccacaaaactgtcattcactctaggggacccctactaaagggtaacttcaggtgtgcagccctgagctccaaggctctgcaccatgccacacacttgctgtaaggctagaagtgaagaccttattaataggagcataattgcgagggagaatcatggttctgcagtctggtgtagacactggaataacagcacagaaaaatctatgactcccaatatcttctagaataaagaattttccctctttaacacaagggccctccttgtcattgaccttagctaaaccatggcaattcataaatagaggaaacattaatgaattaaaagcattccttattttttaactaatatttgtacattttcttagtctctttccaagtctttgcctcttttttttctttatttttattttttcctttgacagatggtatcccttcctggatcattcatttcaccttggtttctaactttaggtttactttcacttgttatttgacttagcaggtgcaacaaaaacaagaaacaaatgtgcccaccccactttccgcttaactgaaaagcttaaaataaatttccgaattatg

SEQ ID NO: 1891 - DNA, 2958 bp, Homo sapiens
caagcaggttagagtacaaaacatgttctccctgcagtctcacgaactgtgaacaaaaactgaagtgaaaactcatagtgcataacttgtcaatactcctgtgatcgtataaccatcagcaagaaaacaaatttgattgagcccccatccagtcctctttgcgtggaatcagacctcttttgcagtggaaaggagcagtgctgcagctctgatggttcaactctgccaaaagatggatctttaatgattagcactacacactgaccaactcagaagaaggagccacaccacctgtgactccagctctgacttctgctctggaccagtgtttccataacagggacttcaaaatcactgtgatttgaagcctttttgaacatgaagatgttactcctgctgcattgccttggggtgtttctgtcctgttctggacacatccaggatgagcacccccaatatcacagccctccggatgtggtgattcctgtgaggataactggcaccaccagaggcatgacacctccaggctggctctcctatatcctgccctttggaggccagaaacacattatccacataaaggtcaagaagcttttgttttccaaacacctccctgtgttcacctacacagaccagggtgctatccttgaggaccagccatttgtccagaataactgctactatcatggttatgtggaaggggacccagaatccctggtttccctcagtacctgttttgggggttttcaaggaatattacagataaatgactttgcttatgaaatcaagcccctagcattttctaccacgtttgaacatctggtatacaagatggacagtgaggagaaacaattttcaaccatgagatccggatttatgcaaaatgaaataacatgccgaatggaatttgaagaaattgataattccactcagaagcaaagttcttatgtgggctggtggatccattttaggattgttgaaattgtagtcgtcattgataattatctgtacattcgttatgaaaggaacgactcaaagttgctggaggatctatatgttattgttaatatagtggattccattttggatgtcattggtgttaaggtgttattatttggtttggagatctggaccaataaaaacctcattgtagtagatgatgtaaggaaatctgtgcacctgtattgcaagtggaagtcggagaacattacgccccggatgcaacatgacacctcacatcttttcacaactctaggattaagagggttaagtggcataggagcttttagaggaatgtgtacaccacaccgtagttgtgcaattgttactttcatgaacaaaactttgggcactttttcaattgcagtggctcatcatctaggtcataatttgggcatgaaccatgatgaggatacatgtcgttgttcacaacctagatgcataatgcatgaaggcaacccaccaataactaaatttagcaattgtagttatggtgatttttgggaatatactgtagagaggacaaagtgtttgcttgaaacagtacacacaaaggacatctttaatgtgaagcgctgtgggaatggtgttgttgaagaaggagaagagtgtgactgtggacctttaaagcattgtgcaaaagatccctgctgtctgtcaaattgcactctgactgatggttctacttgtgcttttgggctttgttgcaaagactgcaagttcctaccatcagggaaagtgtgtagaaaggaggtcaatgaatgtgatcttccagagtggtgcaatggtacttcccataagtgcccagatgacttttatgtggaagatggaattccctgtaaggagaggggctactgctatgaaaagagctgtcatgaccgcaatgaacagtgtaggaggatttttggtgcaggcgcaaatactgcaagtgagacttgctacaaagaattgaacaccttaggtgaccgtgttggtcactgtggtatcaaaaatgctacatatataaagtgtaatatctcagatgtccagtgtggaagaattcagtgtgagaatgtgacagaaattcccaatatgagtgatcatactactgtgcattgggctcgcttcaatgacataatgtgctggagtactgattaccatttggggatgaagggacctgatattggtgaagtgaaagatggaacagagtgtgggatagatcatatatgcatccacaggcactgtgtccatataaccatcttgaatagtaattgctcacctgcattttgtaacaagaggggcatctgcaacaataaacatcactgccattgcaattatctgtgggaccctcccaactgcctgataaaaggctatggaggtagtgttgacagtggcccaccccctaagagaaagaagaaaaagaagttctgttatctgtgtatattgttgcttattgttttgtttattttattatgttgtctttatcgactttgtaaaaaaagtaaaccaataaaaaagcagcaagatgttcaaactccatctgcaaaagaagaggaaaaaattcagcgtcgacctcatgagttacctccccagagtcaaccttgggtgatgccttcccagagtcaacctcctgtgacgccttcccagagtcatcctcgggtgatgccttctcagagtcaacctcctgtgatgccttcccagagtcatcctcagttgacgccttcccagagtcaacctcctgtgatgccttcccagagtcatcctcagttgacgccttcccagagtcaacctcctgtgacaccctcccagaggcaacctcagttgatgccttcccagagtcaacctcctgtgacgccctcctagagccagcctcagttgatgccttcccagagtcaacctcctgtgacgccctcccagagccaacctcgggtgacaccctcccagagtcaacctcatgtgacaccttaccggagtaaaagt

SEQ ID NO: 1892 - DNA, 3179 bp, Homo sapiens
ccggttcctgccatgcccggcggccccagtccccgcagccccgcgcctttgctgcgccccctcctcctgctcctctgcgctctggctcccggcgcccccggacccgcaccaggacgtgcaaccgagggccgggcggcactggacatcgtgcacccggttcgagtcgacgcggggggctccttcctgtcctacgagctgtggccccgcgcactgcgcaagcgggatgtatctgtgcgccgagacgcgcccgccttctacgagctacaataccgcgggcgcgagctgcgcttcaacctgaccgccaatcagcacctgctggcgcccggctttgtgagcgagacgcggcggcgcggcggcctgggccgcgcgcacatccgggcccacaccccggcctgccacctgcttggcgaggtgcaggaccctgagctcgagggtggcctggcggccatcagcgcctgcgacggcctgaaaggtgtgttccagctctccaacgaggactacttcattgagcccctggacagtgccccggcccggcctggccacgcccagccccatgtggtgtacaagcgtcaggccccggagaggctggcacagcggggtgattccagtgctccaagcacctgtggagtgcaagtgtacccagagctggagtctcgacgggagcgttgggagcagcggcagcagtggcggcggccacggctgaggcgtctacaccagcggtcggtcagcaaagagaagtgggtggagaccctggtagtagctgatgccaaaatggtggagtaccacggacagccgcaggttgagagctatgtgctgaccatcatgaacatggtggctggcctgtttcatgaccccagcattgggaaccccatccacatcaccattgtgcgcctggtcctgctggaagatgaggaggaggacctaaagatcacgcaccatgcagacaacaccctgaagagcttctgcaagtggcagaaaagcatcaacatgaagggggatgcccatcccctgcaccatgacactgccatcctgctcaccagaaaggacctgtgtgcagccatgaaccggccctgtgagaccctgggactgtcccatgtggcgggcatgtgccagccgcaccgcagctgcagcatcaacgaggacacgggcctgccgctggccttcactgtagcccacgagctcgggcacagttttggcattcagcatgacggaagcggcaatgactgtgagcccgttgggaaacgacctttcatcatgtctccacagctcctgtacgacgccgctcccctcacctggtcccgctgcagccgccagtatatcaccaggttccttgaccgtgggtggggcctgtgcctggacgaccctcctgccaaggacattatcgacttcccctcggtgccacctggcgtcctctatgatgtaagccaccagtgccgcctccagtacggggcctactctgccttctgcgaggacatggataatgtctgccacacactctggtgctctgtggggaccacctgtcactccaagctggatgcagctgtggacggcacccggtgtggggagaataagtggtgtctcagtggggagtgcgtacccgtgggcttccggcccgaggccgtggatggtggctggtctggctggagcgcctggtccatctgctcacggagctgtggcatgggcgtacagagcgccgagcggcagtgcacgcagcctacgcccaaatacaaaggcagatactgtgtgggtgagcgcaagcgcttccgcctctgcaacctgcaggcctgccctgctggccgcccctccttccgccacgtccagtgcagccactttgacgctatgctctacaagggccagctgcacacatgggtgcccgtggtcaatgacgtgaacccctgcgagctgcactgccggcccgcgaatgagtactttgccaagaagctgcgggacgccgtggtcgatggcaccccctgctaccaggtccgagccagccgggacctctgcatcaacggcatctgtaagaacgtgggctgtgacttcgagattgactccggtgctatggaggaccgctgtggtgtgtgccacggcaacggctccacctgccacaccgtgagcgggaccttcgaggaggccgagggtctggggtatgtggatgtggggctgatcccagcgggcgcacgcgagatccgcatccaagaggttgccgaggctgccaacttcctggcactgcggagcgaggacccggagaagtacttcctcaatggtggctggaccatccagtggaacggggactaccaggtggcagggaccaccttcacatacgcacgcaggggcaactgggagaacctcacgtccccgggtcccaccaaggagcctgtctggatccaggtgcctgcctcccgtggcccaggcggggggagcagaggcggagtccccaggcccagcaccctccatggcaggtctcgtcctggaggagtgagccctggttcagtcacagagcctggctctgagccaggccctcctgctgcggcctctacctcagtttccccatctttaaaatggcccaatcttgtagctgcagttcacagaggtggctggggtcaagctcctttaggactgggtggatggagaagacaccttgtgctcatgggcccccgcctgcccacccagctgctgttccaggagagcaaccctggggtgcactacgagtacaccatccacagggaggcaggtggccacgacgaggtcccgccgcccgtgttctcctggcattatgggccctggaccaagtgcacagtcacctgcggcagaggtgagaagtggggcaggcacagccccacctgcaggggcttagtgtctggacagggacactggcttcagctcccagctcactgctgggccaccacgggtttggaagtttgcttctctgagcctcagttctccatctgtgagatgaggctagcgattgccctgtgtcccaggcccgctgggagggtacatggatgaggcaggtgggtgctggctcgcggcgcatgttcagtgtgctccagctcttggcgttctccctccaggggacacagctccccctcgatagaccagtccagtggcccctcaccacactgacttatttccctaaactatttataaaaagtagggcaatttcattaactctgactctt

SEQ ID NO: 1893 - DNA, 2848 bp, Homo sapiens
  misc_feature (1369)..(1369): n is a, c, g, or t
  misc_feature (1611)..(1611): n is a, c, g, or t
aatcatccagttttctaaattatggaaattttgtggaagacgttgacctggattttgagcctcatcatggcttcatcggaatttcatagtgaccacaggctttcatacagttctcaagaggaattcctgacttatcttgaacactaccagctaactattccaataagggttgatcaaaatggagcatttctcagctttactgtgaaaaatgataaacactcaaggagaagacggagtatggaccctattgatccacagcaggcagtatctaagttattttttaaactttcagcctatggcaagcactttcatctaaacttgactctcaacacagattttgtgtccaaacattttacagtagaatattgggggaaagatggaccccagtggaaacatgattttttagacaactgtcattacacaggatatttgcaagatcaacgtagtacaactaaagtggctttaagcaactgtgttgggttgcatggtgttattgctacagaagatgaagagtattttatcgaacctttaaagaataccacagaggattccaagcattttagttatgaaaatggccaccctcatgttatttacaaaaagtctgcccttcaacaacgacatctgtatgatcactctcattgtggggtttcggatttcacaagaagtggcaaaccttggtggctgaatgacacatccactgtttcttattcactaccaattaacaacacacatatccaccacagacagaagagatcagtgagcattgaacggtttgtggagacattggtagtggcagacaaaatgatggtgggctaccatggccgcaaagacattgaacattacattttgagtgtgatgaatattgttgccaaactttaccgtgattccagcctaggaaacgttgtgaatattatagtggcccgcttaattgttctcacagaagatcagccaaacttggagataaaccaccatgcagacaagtccctcgatagcttctgtaaatggcagaaatccattctctcccaccaaagtgatggaaacaccattccagaaaatgggattgcccaccacgataatgcagttcttattactagatatgatatctgcacttataaaaataagccctgtggaacactgggcttggcctctgtggctggaatgtgtgagcctgaaaggagctgcagcattaatgaagacattggcctgggttcagcttttaccattgcacatgagattgttcacaattttggtatgaaccatgatggaattggaaattcttgtggacgaaaggtcatgaagcagcaaaattatggcagctcacattactgcgaataccaatcctttttcctggtctgcttgcagtcgagantacatcaccagctttttagagaagtgtgtagagagctctggtgtctcagcaaaagcaaccgctgtgtcaccaacagtattccagcagctgaggggacactgtgtcaaactgggaatattgaaaaagggtggtgttatcagggagattgtgttccttttggcacttggccccagagcatagatgggggctggggtccctggtcactatggggagagtgcagcaggacctgcgggggaggcgtntcctcatccctaagacactgtgacagtccagcaccttcaggaggtggaaaatattgccttggggaaaggaaacggtatcgctcctgtaacacagatccatgccctttgggttcccgagattttcgagagaaacagtgtgcagactttgacaatatgcctttccgaggaaagtattataactggaaaccctatactggaggtggggtaaaaccttgtgcattaaactgcttggctgaaggttataatttctacactgaacgtgctcctgcggtgatcgatgggacccagtgcaatgcggattcactggatatctgcatcaatggagaatgcaagcacgtaggctgtgataatattttgggatctgatgctagggaagatagatgtcgagtctgtggagggggcggaagcacatgtgatgccattgaagggttcttcaatgattcactgcccaggggaggctacatggaagtggtgcagataccaagaggctctgttcacattgaagttagagaagttgccatgtcaaagaactatattgctttaaaatctgaaggagatgattactatattaatggtgcctggactattgactggcctaggaaatttgatgttgctgggacagcttttcattacaagagaccaactgatgaaccagaatccttggaagctctaggtcctacctcagaaaatctcatcgtcatggttctgcttcaagaacagaatttgggaattaggtataagttcaatgttcccatcactcgaactggcagtggagataatgaagttggctttacatggaatcatcagccttggtcagaatgctcagctacttgtgctggaggtaagatgcccactaggcagcccacccagagggcaagatggagaacaaaacacattctgagctatgctttgtgtttgttaaaaaagctaattggaaacatttcttgcaggtttgcttcaagctgtaatttagcaaaagaaactttgctttaattatattatattccatttgttttcaacctcatgtaatttgtgcagatttgttggtaaaatacatcttggcacaatgagtgtctctgctggtgcttctcccaagactatcttgaaggtgggctgtttgcctttcgtgaacacattcttggtaaagaacatcaaaagttttaaaaaagaaaatgagcaagaatcagacatcacagatgcaacttcttgtaatgggagatgagaatgtacggctgtg

SEQ ID NO: 1894 - DNA, 2124 bp, Homo sapiens
tgcagcctcggccccgcgggcgcccgccgcgcacccgaggagatgaggctccgcaatggcaccttcctgacgctgctgctcttctgcctgtgcgccttcctctcgctgtcctggtacgcggcactcagcggccagaaaggcgacgttgtggacgtttaccagcgggagttcctggcgctgcgcgatcggttgcacgcagctgagcaggagagcctcaagcgctccaaggagctcaacctggtgctggacgagatcaagagggccgtgtcagaaaggcaggcgctgcgagacggagacggcaatcgcacctggggccgcctaacagaggacccccgattgaagccgtggaacggctcacaccggcacgtgctgcacctgcccaccgtcttccatcacctgccacacctgctggccaaggagagcagtctgcagcccgcggtgcgcgtgggccagggccgcaccggagtgtcggtggtgatgggcatcccgagcgtgcggcgcgaggtgcactcgtacctgactgacactctgcactcgctcatctccgagctgagcccgcaggagaaggaggactcggtcatcgtggtgctgatcgccgagactgactcacagtacacttcggcagtgacagagaacatcaaggccttgttccccacggagatccattctgggctcctggaggtcatctcaccctccccccacttctaccctgacttctcccgcctccgagagtcctttggggaccccaaggagagagtcaggtggaggaccaaacagaacctcgattactgcttcctcatgatgtacgcgcagtccaaaggcatctactacgtgcagctggaggatgacatcgtggccaagcccaactacctgagcaccatgaagaactttgcactgcagcagccttcagaggactggatgatcctggagttctcccagctgggcttcattggtaagatgttcaagtcgctggacctgagcctgattgtagagttcattctcatgttctaccgggacaagcccatcgactggctcctggaccatattctgtgggtgaaagtctgcaaccccgagaaggatgcgaagcactgtgaccggcagaaagccaacctgcggatccgcttcaaaccgtccctcttccagcacgtgggcactcactcctcgctggctggcaagatccagaaactgaaggacaaagactttggaaagcaggcgctgcggaaggagcatgtgaacccgccagcagaggtgagcacgagcctgaagacataccagcacttcaccctggagaaagcctacctgcgcgaggacttcttctgggccttcacccctgccgcgggggacttcatccgcttccgcttcttccaacctctaagactggagcggttcttcttccgcagtgggaacatcgagcacccggaggacaagctcttcaacacgtctgtggaggtgctgcccttcgacaaccctcagtcagacaaggaggccctgcaggagggccgcaccgccaccctccggtaccctcggagccccgacggctacctccagatcggctccttctacaagggagtggcagagggagaggtggacccagccttcggccctctggaagcactgcgcctctcgatccagacggactcccctgtgtgggtgattctgagcgagatcttcctgaaaaaggccgactaagctgcgggcttctgagggtaccctgtggccagccctgaagcccacatttctgggggtgtcgtcactgccgtccccggagggccagatacggccccgcccaaagggttctgcctggcgtcgggcttgggccggcctggggtccgccgctggcccggaggccctaggagctggtgctgcccccgcccgccgggccgcggaggaggcaggcggcccccacactgtgcctgaggcccggaaccgttcgcacccggcctgccccagtcaggccgttttagaagagcttttacttgggcgcccgccgtctctggcgcgaacactggaatgcatatactactttatgtgctgtgttttttattcttggatacatttgattttttcacgtaagtccacatatacttctataagagcgtgacttgtaataaagggttaatgaag

SEQ ID NO: 1895 - DNA, 1525 bp, Homo sapiens
attcggcatgagggggtcacgtggtggctgggccggggaaatggcggcttcaggagagagcgggacttcaggcggcggaggcagcaccgaggaagcatttatgaccttctacagtgaggtgaaacaaatagagaagagagactcggttctaacttcgaaaaatcagattgaaagactgacccgtcctggttcctcttacttcaatttgaacccatttgaggttcttcagatagatcctgaagttacagatgaagaaataaaaaagaggtttcggcagttatccatcttggtgcatcctgacaaaaatcaagatgatgctgacagagcacaaaaggcttttgaagctgtggacaaagcttacaagttgctactggatcaggagcaaaagaagagggccctggatgtaattcaggcaggaaaagaatacgtggaacacactgtgaaagagcgaaaaaaacaattaaagaaggaaggaaaacctacaattgtagaggaggatgatcctgagctgttcaaacaagctgtatataaacagacaatgaaactctttgcagagctggaaattaaaaggaaagagagagaagccaaagagatgcatgaaaggaaacgacaaagggaagaagagattgaagctcaagaaaaagccaaacgggaaagagagtggcagaaaaactttgaggaaagtcgagatggtcgtgtggacagctggcgaaacttccaagccaatacgaaggggaagaaagagaagaaaaatcggaccttcctgagaccaccgaaagtaaaaatggagcaacgtgagtgaccgcccaaggtcacaggcacagaacctttcccctgctatctcccttcctgcttcgaaggactcattctttcctcccacttccaccccaacatagagtagtatttgctttttagtccattttgttttcaatacgatttaatatcgatcagagtaattcttttgtacattgaaatgaggggcttggtttaaaaaaagacctttccctctccctgcccctagaacaaccagtattagaaggtgccaccattggtgctgccttctcttcccacagcctgtaactcagtgttttgtacttcactgaattgtgatggttagaaacttcgtggatagtttgtggaaatcatccaattaaacatactgcttaaaacagtgttgctgtgacttcagagacaagcctggaaggggcaccttaggaagccccttcgcttcagttgctcgcttctgggtgtgctcccttcgaaggcccagataagacagggaacacttgtgagcacacagagcagcatctgatgccctgtggtgtttggcatgtgccccctgtctactgaccaatcagtgtggcatgaggcccacgccacccaaacctttcactttccaaagagctagccgtcctccacccagtaccatgtcctagcctgtctgcatttgttagtggtaatattctttatgtataataaatttttatacccaaaaaaaaaaaaaaaaaaaaaaaaaaaaaaaaaa

SEQ ID NO: 1896 - DNA, 1853 bp, Homo sapiens
atcgcgcgagacagcggaaggagcaagagtgggaggcgcgcgcggaggccgcgacggacgcaagatggcgacggcgaccatagctctccaggtcaatggccagcaaggaggggggtccgagccggcggcggcggcggcagtggtggcagcgggagacaaatggaaacctccacagggcacagactccatcaagatggagaacgggcagagcacagccgccaagctggggctgcctcccctgacgcccgagcagcaggaggcccttcagaaggccaagaagtacgccatggagcagagcatcaagagtgtgctggtgaagcagaccatcgcgcaccagcagcagcagctcaccaacctgcagatggcggctcagcggcagcgggcgctggccatcatgtgccgcgtctacgtgggctctatctactatgagctgggggaggacaccatccgccaggcctttgccccctttggccccatcaagagcatcgacatgtcctgggactccgtcaccatgaagcacaagggctttgccttcgtggagtatgaggtccccgaagctgcacagctggccttggagcagatgaactcggtgatgctggggggcaggaacatcaaggtgggcagacccagcaacatagggcaggcccagcccatcatagaccagttggctgaggaggcacgggccttcaaccgcatctacgtggcctctgtgcaccaggacctctcagacgatgacatcaagagcgtgtttgaggcctttggcaagatcaagtcctgcacactggcccgggaccccacaactggcaagcacaagggctacggcttcattgagtacgagaaggcccagtcgtcccaagatgctgtgtcttccatgaacctctttgacctgggtggccagtacttgcgggtgggcaaggctgtcacaccgcccatgcccctactcacaccagccacgcctggaggcctcccacctgccgctgctgtggcagctgctgcagccactgccaagatcacagctcaggaagcagtggccggagcagcggtgctgggtaccctgggcacacctggactggtgtccccagcactgaccctggcccagcccctgggcactttgccccaggctgtcatggctgcccaggcacctggagtcatcacaggtgtgaccccagcccgtcctcctatcccggtcaccatcccctcggtgggagtggtgaaccccatcctggccagccctccaacgctgggtctcctggagcccaagaaggagaaggaagaagaggagctgtttcccgagtcagagcggccagagatgctgagcgagcaggagcacatgagcatctcgggcagtagcgcccgacacatggtgatgcagaagctgctccgcaagcaggagtctacagtgatggttctgcgcaacatggtggaccccaaggacatcgatgatgacctggaaggggaggtgacagaggagtgtggcaagttcggggccgtgaaccgcgtcatcatctaccaagagaaacaaggcgaggaggaggatgcagaaatcattgtcaagatctttgtggagttttccatagcctctgagactcataaggccatccaggccctcaatggccgctggtttgctggccgcaaggtggtggctgaagtgtacgaccaggagcgttttgataacagtgacctctctgcgtgacagtggtccctctccccggacttgcacttgttccttgtttcctctgggttttatagtgatacagtggtgtccccggggccaggcgcgctctgcccagcccagcctacagtgcggataaaggtgcggatgctgctggccctgaaaaaaaaaaaaaaaaaaa

SEQ ID NO: 1897 - DNA, 4182 bp, Homo sapiens
atgctggtgggccagggcgcggggccgctggggcccgcggtggtcaccgccgcggtggtgctgctgctgagcggcgtggggccggcgcacggctcgcgcgacctcgtggtgggctgcggtggcttcgtcaagtcggacgtggagatcaactactctctcatcgagataaagctgtacaccaagcatgggactttgaaataccagacagactgtgcccctaataatggttactttatgatccctttgtatgataagggggatttcattctgaagattgagcctcccctagggtggagttttgagccgacgaccgtggagctccatgtggatggagtcagtgacatctgcacaaagggtggggacatcaactttgtcttcactgggttctctgtgaatggcaaggtcctcagcaaagggcagcccctgggtcctgcgggagttcaggtgtctctgagaaacactgggaccgaagcaaagatccagtccacagttacacagcctggcggaaagtttgcattttttaaagttctgcctggagattatgaaatcctcgcaactcatccaacctgggcgttgaaagaggcaagcaccacagtgagtgtaaccaactccaatgccaatgcggccagtcccctcatagttgctggctacaatgtgtctggctctgtccgaagtgatggggagcccatgaaaggcgtgaagtttcttctcttttcttctttagtaactaaagaggatgtcctgggctgcaatgtctcaccagtgcctgggttccagccccaagacgagagtctggtgtatttgtgctacacggtctccagagaagatggctcgttctctttctattccttgccaagtgggggctacactgtgattccgttctatcgaggggagaggattacctttgatgtggcgccttccagacttgacttcacagtggagcatgacagcttgaaaatcgagcccgtgttccacgtcatgggattctccgtcaccgggagggtcttgaacggacccgaaggagatggtgttccagaagcagtagtcaccctgaataaccaaatcaaagttaaaacaaaagctgatggctcattccgccttgagaacataaccacagggacatacaccatccatgctcagaaagagcacctctactttgaaacggtcaccatcaaaattgcaccgaacacacctcagctggctgacattattgcaacagggttcagtgtctgtggtcagatatcaatcattcgcttccccgacaccgtcaagcagatgaataaatacaaagttgtcctgtcatctcaagacaaggacaagtctttggtcaccgtggagacagatgctcatggatcattttgttttaaagcaaaaccagggacttacaaagtgcaggtgatggttcctgaggcagaaaccagagcagggctgacgttgaaaccccagacatttcctcttactgtgaccaacaggcccatgatggatgtggcctttgtacagttcttggcatcagtttctgggaaagtctcttgcttgaacacctgtggtgacttgctggtgactctacagtccctgagccgccagggtgagaagcggagcctccagctctccggcaaggtcaacgccatgactttcacctttgacaacgtgctccctggaaaatacaaaataagcatcatgcatgaggattggtgctggaagaacaagagcctggaggtggaagtgctggaggatgacatgtctgcagttgagttcaggcagacgggctacatgctgagatgttccctgtctcacgccatcactctggaattttatcaggatggaaatgggcgtgagaatgtggggatttatagcctcttcaaaggagtcaaccgattctgcctgtccaagcctggtgtgtacaaagtgacccctcgctcctgccaccggtttgagcaagcgttctatatctatgacacgtcttcacctagtatctttacattgacagccattcgccaccatgtccttggaactatcaccaccgacaaaatgatggatgtcactgtgactatcaagtcttccatcgacagtgaacccgccttggtcttaggccctctgaagtctgtgcaggagctgcggagggagcagcagctggctgagatcgaggcccgcaggcaggagagggagaaaaacggcaatgaggaaggcgaagaaagaatgaccaagcctcccgtgcaggagatggtagatgagttacaaggccccttctcgtatgatttctcttactgggcgcggtctggagagaaaatcactgttacaccgtcatctaaagagctgctcttttatcccccttcaatggaagccgttgtcagtggagaaagctgcccagggaagctgatcgagatccatgggaaggcaggcctgtttttagaaggccagatccaccccgagttggaaggagtcgagattgtcatcagtgaaaagggggcaagttcaccgctgatcacagtctttactgatgacaaaggtgcctacagtgttggccccctgcacagtgacctggagtacacggtgacctcacagaaggagggctatgttctgactgcggtggaaggaaccatcggagacttcaaggcctatgccctggcaggcgtaagctttgagataaaagctgaggatgaccagcccctcccgggagtcctcttatccctgagcggtggcctgtttcgttccaacctcttgacccaggacaacggcattctgacattctcaaacctgagccctggccagtattacttcaaacccatgatgaaggagttccggtttgagccatcctcacagatgatcgaggtgcaggaaggccagaacctgaagatcaccatcacggggtaccgaaccgcttacagttgctatggcacagtgtcttccttaaacggagagcccgaacaaggggttgccatggaagcggtgggccagaacgactgcagcatttacggagaagacaccgtgacagacgaagagggcaagttcagattacgtggattgctgccgggatgtgtgtaccacgttcagctcaaggcagaaggcaacgaccacattgagcgggcgctcccccaccatagggtgattgaggttgggaataatgacatcgatgatgtaaacatcatagttttccggcagattaatcaatttgatttaagtggaaatgtgatcacttcctctgaataccttcctacattatgggtcaagctttacaaaagcgaaaacctcgacaatccaatccagacagtttcccttggccagtccctgttcttccatttccccccactgctcagagacggcgagaactatgttgtgcttctggactccacactccccagatcccagtatgactacatcttgcctcaagtttctttcaccgcagtgggctaccataaacacaccaccttgatttttaatcccacgaggaagctgcctgaacaggacatcgcacaaggatcctacattgccctgccattgacgctgctggttctgctggccggttacaaccatgacaagctcattcctttgctgctgcagttgacaagccggctacagggagtccgcgcgctcggccaggcagcctctgacaatagcggcccagaagatgcaaagagacaagccaagaaacagaagacaaggcggacttgaggaggaaggggacagttgcagtctcacttgggacaggccacagccaggggtccggccactacccgcccgtgggataaaagccaaaagcatgcgtcagctaacttcagcctgtgctgctgggcccgcaccccatgtcccttgtcactgtgacatcctgcacccatcctcacccctccgtagagcccctcgtgcaatgcaatgaatggaccctcctgtcactctgctgaacagaatttattttctgagtcaaatataatttattattattttcgtcaaagaagtatttaagctgtgctgtggtgtgagaatgtcattcttgatcttcagccttcgtttgcaaggagagttccagttgacgtggtgtttggttccatggcggggtaccctggggattcatctgttttcttcacttccctttgcatctgagatcctgttggaaaccacagcaacctgtattcattattaggaaataaaaatcgaaaaaaaggttcattcttttgtgttgtagttttg

SEQ ID NO: 1898 - DNA, 3568 bp, Homo sapiens
atagttttcaggttaagaaagccagaatctttgttcagccacactgactgaacagacttttagtggggttacctggctaacagcagcagcggcaacggcagcagcagcagcagcagcagcagcagcagcagcagggctcctgggataactcaggcatagttcaacactatgggtcctcctctgaagctcttcaaaaaccagaaataccaggaactgaagcaggaatgcatcaaagacagcagacttttctgtgatccaacatttctgcctgagaatgattctcttttctacaaccgactgcttcctggaaaggtggtgtggaaacgtccccaggacatctgtgatgacccccatctgattgtgggcaacattagcaaccaccagctgacccaagggagactggggcacaagccaatggtttctgcattttcctgtttggctgttcaggagtctcattggacaaagacaattcccaaccataaggaacaggaatgggaccctcaaaaaacagaaaaatacgctgggatatttcactttcgtttctggcattttggagaatggactgaagtggtgattgatgacttgttgcccaccattaacggagatctggtcttctctttctccacttccatgaatgagttttggaatgctctgctggaaaaagcttatgcaaagctgctaggctgttatgaggccctggatggtttgaccatcactgatattattgtggacttcacgggcacattggctgaaactgttgacatgcagaaaggaagatacactgagcttgttgaggagaagtacaagctattcggagaactgtacaaaacatttaccaaaggtggtctgatctgctgttccattgagtctcccaatcaggaggagcaagaagttgaaactgattggggtctgctgaagggccatacctataccatgactgatattcgcaaaattcgtcttggagagagacttgtggaagtcttcagtgctgagaaggtgtatatggttcgcctgagaaaccccttgggaagacaggaatggagtggcccctggagtgaaatttctgaagagtggcagcaactgactgcatcagatcgcaagaacctggggcttgttatgtctgatgatggagagttttggatgagcttggaggacttttgccgcaactttcacaaactgaatgtctgccgcaatgtgaacaaccctatttttggccgaaaggagctggaatcggtgttgggatgctggactgtggatgatgatcccctgatgaaccgctcaggaggctgctataacaaccgtgataccttcctgcagaatccccagtacatcttcactgtgcctgaggatgggcacaaggtcattatgtcactgcagcagaaggacctgcgcacttaccgccgaatgggaagacctgacaattacatcattggctttgagctcttcaaggtggagatgaaccgcaaattccgcctccaccacctctacatccaggagcgtgctgggacttccacctatattgacacccgcacagtgtttctgagcaagtacctgaagaagggcaactatgtgcttgtcccaaccatgttccagcatggtcgcaccagcgagtttctcctgagaatcttctctgaagtgcctgtccagctcagggaactgactctggacatgcccaaaatgtcctgctggaacctggctcgtggctacccgaaagtagttactcagatcactgttcacagtgctgaggacctggagaagaagtatgccaatgaaactgtaaacccatatttggtcatcaaatgtggaaaggaggaagtccgttctcctgtccagaagaatacagttcatgccatttttgacacccaggccattttctacagaaggaccactgacattcctattatagtacaggtctggaacagccgaaaattctgtgatcagttcttggggcaggttactctggatgctgaccccagcgactgccgtgatctgaagtctctgtacctgcgtaagaagggtggtccaactgccaaagtcaagcaaggccacatcagcttcaaggttatttccagcgatgatctcactgagctctaaatctgcaatcccagagaatcctgacaaagcgtgccacccttttattttccgtcaggtgccaggtcttagttaagattcacaatctttagaaagaatgagattcacaataattaactcttcctctcttctgataaattccccatacctcccaatccaagtagcatctgtagctacataacctatatacctccagcagctggacatggggaggcgacagtcctatctagacatcatacacatttgccaagaaaggatctctggggcttccgggggtgagattcaagcaggacaataacaagaggctggacaccctacagatgtctttgatgttttcagttgtttgatatatctcccctgtagggcatgttgaggaaggaggagggctgatcaaggccaagctggtctagcctgacatcctagctcctgactgaacactatagacttcccagcagcatttcacccagcagccagagccggctttaagtccccaacccttacagacaccactgccaccaccaccaaccacgaccaccaccaccaccaccactcaccaccatcatcacctccggaaagtgtagtcctgccctaacccaagtcacccccgacagtaaattttaccttcatgttgagaaagcttcctggtgcttaatcaagagctggagttcaatgagtcctagacagtgagaggggcctgagcttcagctcaatggaagcctgctgtgtgccacaagacggaaaagtggaagaagctgcagtgggagacaaagcctcggtcccccacccatccacacacacctacactcacacacgcgcacatgggcgcgcacgaactaccattcaggcagtcagtgggcaagaggaaagataagtaagtaccatacacacctaaaagatgagagaattcatccagacatattacagccagtttggggcccctgactgcaatgtgaaacctctcgctgctgctaggtttacaaacaagcccattgtcctgtgcctcctaatatcatttgtactgaagaccccatctggggacttgagactttggtcccagcccagactcctcagacttttctctcagttgggatgcttcactcgctgggggtgtttgtttgccctctcatttttcagtacttctacagaattttctctagagtcagtcattatgaaatgtacttccctccatcttaacctatcaactttctgcccctccttcaaggcccagtataaatgccacctcctccatgaagccttccctaattccaccccaaacccccaccttcaacaatatttcaacgcttctgcaatgatgaaaaagaaacatagttgtagtacttagcctacctagaccagcaagcattcatttttagctcgctcattttttaccatgttttccagtctgtttaacttctgcagtgccttcactacactgccttacataaaccaaatcacaataaagttcatattcagtaca

SEQ ID NO: 1899 - DNA, 1453 bp, Homo sapiens
gcgatgtggcctgggaacgcctggcgcgccgcactcttctgggtgccccgcggccgccgcgcacagtcagcgctggcccagctgcgtggcattctggagggggagctggaaggcatccgcggagctggcacttggaagagtgagcgggtcatcacgtcccgtcaggggccgcacatccgcgtggacggcgtctccggaggaatcctcaacttctgtgccaacaactacctgggcctgagcagccaccctgaggtgattcaggcaggtctgcaggctctggaggagtttggagctggccttagctcggtccgcttcatctgtggaacccagagcatccacaagaatctagaagcaaaaatagcccgcttccaccagcgggaggatgccatcctctatcccagctgttatgacgccaacgccggcctctttgaggccctgctgaccccagaggacgcagtcctgtcggacgagctgaaccatgcctccatcatcgacggcatccggctgtgcaaggcccacaagtaccgctatcgccacctggacatggccgacctagaagccaagctgcaggaggcccagaagcatcggctgcgcctggtggccaccgatggggccttttccatggatggcgacatcgcacccctgcaggagatctgctgcctcgcctctagatatggtgccctggtcttcatggatgaatgccatgccactggtttcctggggcccacaggacggggcacagatgagctgctgggtgtgatggaccaggtcaccatcatcaactccaccctggggaaggccctgggtggagcatcagggggctacacgacagggcctgggcccctggtgtcactgctgcggcagcgcgcccggccatacctcttctccaacagtctgccacctgctgtcgttggctgcgcctccaaggccctagatctgctgatggggagtaacaccattgtccagtctatggctgccaagacccagaggttccgtagtaagatggaagctgctggcttcactatctcaggagccagtcaccccatctgccctgtgatgctgggtgatgcccggctggcctctcgcatggcggatgacatgctgaagagaggcatctttgtcatcgggttcagctaccccgtggtccccaagggcaaggcccggatccgggtacagatctcagcagtgcatagcgaggaagacattgaccgctgcgtggaggccttcgtggaagtggggcgactgcacggggcactgccctgagctctgggtaaggacgagaagagccaaggtccgcctgctgccacagggtcaaaggaggttttcgatcagcccagaccagaggctctgagccctgaaccaaagtcccagagctgggctgggacgtgacctgtgctgagggctgtgagaatgtgaaacaacagtgtgaaaattggctgtgaaaaaaaaaaaa

SEQ ID NO: 1900 - DNA, 6014 bp, Homo sapiens
attatgggctgtgggtgccgctgagcaagatggagctgtctgcagtgggcgagcgggtcttcgcggccgaatccatcatcaaacggcggatccgaaagggacgcatcgagtacctggtgaaatggaaggggtgggcgatcaagtacagcacttgggagcccgaggagaacatcctggactcgcggctcattgcagccttcgaacaaaaggagagggagcgtgagctgtatgggcccaagaagaggggacccaaacccaaaactttcctcctgaaggcgcgggcccaggccgaggccctccgcatcagtgatgtgcatttctctgtcaagccgagcgccagtgcctcctcgcccaagctgcactccagcgcagccgtgcaccggctcaagaaggacatccgccgctgccaccgtatgtcccgccgtcccctgccccgcccggacccgcaggggggcagccccggactgcgcccgcccatttcgcccttctcggagacggtgcgcatcatcaaccgcaaggtgaagccgcgggagcccaagcggaaccgcatcatcctgaacctgaaggtgatcgacaagggcgctggcggcgggggcgccgggcagggggccggggcgctggcccgccccaaagtcccctcgcggaaccgcgttataggcaagagcaagaagttcagcgagagcgtcctgcgtacacagatccgccacatgaagttcggcgcctttgcgctgtacaagcctccgcccgcccccctggtagccccgtcccccggcaaggctgaggcctcagccccgggccctgggctacttctggccgcccccgccgccccctacgacgcccgcagctctggctcctccggctgcccctcgcctacaccacagtcctctgaccccgacgacacgccccccaagctcctccccgagaccgtgagcccatccgcccccagctggcgcgagccggaggtgctcgacctgtccctccctcccgagtcggcagccaccagcaagcgggcaccgcctgaggtcacagctgctgccggcccggcacctcccacggcccctgagcccgccggtgcctcctccgagcccgaggctggggactggcgccccgagatgtcaccctgctccaatgtggtcgtcaccgatgtcaccagcaacctcctgacggtcacaatcaaggaattctgcaaccctgaggatttcgagaaggtggctgctggggtagcaggcgccgctgggggcggtggcagcattggggcgagcaagtgagggggctccaccaaggaggggggcttgggggggccctcctgcccgaagtcatactcttgctcccaccccacccttgcccccagccctctctccctgtgctttgcttgtctcaaatggctcggtgttgacccagggatggggctgggtagttggggtcccagaaagccgggggtaggggccaccctggaatggggcaggggaagggcacaccccctgcccatgcatggtagcccactgggtggtttctggaaagccctagaaactagggttcctctgccccttccacatcccacctgtctctctagcttgcttcctgctctcctgtgcggcgtctgatttctcggtgctaacctggcagctgtggggcccttaggagccccccaccgagggtggacacagtccctttccttcctgcagatgcctaggcaggaggagggcttcctgcctgtttggcaaagtcccaggcagaggccaaggatgaggcctgactcggctcctccctccacatcagccagggcatcagaagttgggccagggcggggtcttccctgctcgattttggacgaggcctaagtagaccccctatgccctgccccagccctggctctttcctaaccccctcaacggtgggaggaactggcagagggtgcgcctggccacagcctccccgcatctaaaggccccttcagttcttgaccaaaggtgctacgagaacctgccgtggaaacttccagttgtgcgtctgccccactcgctgtgtttgtccgtgggttcatacatgcattgggtgctaggccccaggctgccgggtggcaccctttacagttcctttgaacaggggcattgaaggcctggactgcctctcgcctcagtaggcctggggaccaggcttgggtctggaggtttgctgtggaagtcaccaggcctcccctcctggcccaggtgtgctgggggcaccgtgccccccacccccctgccctcctcagggtggtcagcccaacctgtcggaccttcacttcacatcatggtggggaccgagatagagagggagaccccattccaagctccctcttcctccgggtgtttggggaggatgctgaagaatccattcccgagggcctcccggcttgtcccagcccctcttttgcttctgaccacggaggctttctcacagcccagcctgcctgaagcaaaggaggctcccgtgtcctgggcagcttctgtttccctctgctgcctgggagctgaggcacccgtgccagtggcagaggccacagccccagccttaggccaggccctgggagggcaggcaggcaaaggggagaccagagggtctgtgttctccaggagaatgagggtgttggtcccagaattgggaccggggccccgctggccagccctgggccacttcccgggtctccattgtgcgtgggtggcgtgttccaggcgtggctggagctggcttcctggctgtgctgccatgggcccctccctcagaagcacgttggcaggaggccgatcagaaccctagcgcctttggtcctaagaatgggaggctgccttccttcccaatctccctgccagggcccacagcgtggccctagccctcccctccccgggatgtagaacggggaccctcgcagggttggggcgggggctgatactcctcggcccctccctaccctgccctgtgtgttggctttgtggccgtccaagtgccaattggcttttcgcccaaataagggctggtatttctcctctgtccttggaggtgatttccccctgaccccctcccccaggtgagtgaccacctgggtgccagttacaggtgtttccagagaccatagaaatgtgttttcctgagagttcgtgtcattcgtgacttttttgtaaagaagttgtgttttcagaggtgattttatgacaggaaagtgaaagaattagttttgcaaaaaaacaaaaacaaaaaaagaggaaaaaaaaaagaaatagaaaaaaatattgtgggattcctatgggggggtggcgggggagaaagagctatttaagaaaaaatagtaacgcagtgattgcacaggtgaggtggcaatgtcaggatggggcggaggcctgggcccagctggcaggtcccctggcatcgcaggcactgtggagagggcctggacccagatctccacacccgtgcttgctcaaagggaaggacaacagcgggcccccgggagctaacccaagctgcaggtcccggcaagctgaggtttgggagggtgggggttgtcactggtgattttctccagggggctggtgagtgggcagtttggtttcttgcccccttctgttcctttcccagttgttgggccatctggtccccaccaccgccaccctatgggggagacctccctccccacgggtcaccctaaagcccacaacctctctgagcctccctggcctgaaaggggatgcaggcttcaggaggcaagaagctgggcccctgggggtggctggggagagggaatgcatttcccttgccacaggtggtctgcttctgctggcctgagctccaagtggagcagcccgggccagccttggtgcatgaagaggcaccaggcacaccgccttgaggtgggcagtgcccatgggggcccgagtggatgggaccgagggtgagtggagcctccttcctcccctctctagtacccccgcctcccacacacttgcacggatcggcctcccttgggagatcagcctccatgggcccctcgtccacccttgctgctttccatttgcctaattaccaagcagaagttgcaatctggtttgctttatttttgtatgtgaaataacccccaaagcccaatctcctcctacgttcaatattggttggggcatccgtcatctccccttaagtgcgccccctccccacccaagtatcataggaaaccggtgaggtctggtgtctctggtttgagacggtaagttgggacccatccctgtctgggtgcccactctgacctttagtttgcccttctgtgaaatgggtgtattgggtagcaagccctcttcagaaagcgctgctggtgtcagagcagctgcccagtaccaggtggggggtcaaggttgctggtactggggcccccagctgcccacaacccctctttgttctcaccctgcaaaggggtcaaggtcaaaatgagcctcatccttcctatgatctgggaagaggtgatgatcaagtccccaacttcagtgtgaggtggacagagttggggggatggcccctttttgaagaggtgaaaatggttttggagaagcgcagctgcttcactgggggaatgcggcagggactggggcccaggatgctttggcctatggggaaaagccctttaaaaggcagggcccaggccctggagccagcacaagactggcctcgagcccctgagccaggaggtcctggaggagagccaggccggtgggcccgcccaaggctggagggtcagccccaacagggagctgggttggccagggggctggactgctaccagcctctctggcctatggggacccaagaggacacatcccccttttgcccactcttctgtgtcattttgttgttttggtttgtggtggtttttcttttttcttttgtttttcttttttctttctttctttttttttttttttttttttttttttgcacttcgcccacacaggacagtggagccccacctggtcagttccacttccgggctcccatgcacttgcccaaggcggcctctttgggacggggatggtttgaggaaacacttttaaagaaaaaaggaagacattgaaaggttttagtttcttccctatctgcatgtcctctcatatagaaagcccagaattaggggctagaactccaggagagggtctccccgactcatctcttgctgacggtcaccaggatgcagaaatagggagatggttagtgggggccaaagatgccccctcccaggccttcgtggttccctcctccgccccctgcaatctttggaggagtcagtgcctcactccagcagtgagtgcctactgtatgcaggtagtcagccaggcaaagagagactaacggtctcatgggggaaccctcttgcgggaggccgggtagctggagcgaagcgttccggctgcccttgctgctgggtggagtggagagggagacttctttttgttggttttaatttaaaaacacaaaggcctaaagaaatacgtatcttataatttttttaatttttgagacgttcatttaatgaattgtgcacgaatgaattctatatatataaaatatacatatatagctctatatttggggaggggcactgtctcttttttctctcatttttaaaatgaagtgttgttgcctttgtatgtggttcaaccatccagctcccagctggctaaactttgcctccagtggtcaaagatgggaaaagagtggggttggcaggagatggaaaacggaggtgccgccccagcatggggggcaggtcccccagtccaccctgcccctccccctgtggagaagacgcttagttgggggtgtgggtttgggctccattctggattcggcggttccgggggaggggtgggtctgtgccgattactctgtcttgtacgtttgttctgctgctcttcaatattgtatcaacgccaggaaaggggggtgaaaagcctcttttaccccccaaataaattgtcacattccgaagctga

SEQ ID NO: 1901 - DNA, 2813 bp, Homo sapiens
gcgagggccgctggggccgcgaagtggggcggccgggtgggctacgagccgggtctgggctgaggggcgcggcttcgcggtggaccccagcccggcaacggaaggcgagctctcctccaccgtccaaagtaaactttgccgctccttccgcggcgctcccgagtcctcgccgccgccgggccgccgcagtccgcgaagagccgtcctgcgtcagggcctccttccctgccccggcgcggggccactgcgccatggacgccacagcactggagcgggacgctgtgcagttcgcccgtctggcggttcagcgcgaccacgaaggccgctactccgaggcggtgttttattacaaggaagctgcacaagccttaatttatgctgagatggcaggatcaagcctagaaaatattcaagaaaaaataactgagtatctggaaagagttcaagctctacattcagcagttcagtcaaagagtgctgatcctttgaagtcaaaacatcagttggacttagagcgtgctcatttccttgttacacaagcttttgatgaagatgaaaaagagaatgttgaagatgctatagaattgtacacagaagctgtggatctctgtctgaaaacatcttatgaaactgctgataaagtcctgcaaaataaactgaaacagttggctcgacaggcactagacagagcagaagcgctgagtgagcctttgaccaagccagttggcaaaatcagttcaacaagtgttaagccaaagccacctccagtgagagcacattttccactgggcgctaatcccttccttgaaagacctcagtcatttataagtcctcagtcatgtgatgcacaaggacagagatacacagcagaagaaatagaagtactcaggacaacatcaaaaataaatggtatagaatatgttcctttcatgaatgttgacctgagagaacgttttgcctatccaatgcctttctgtgatagatggggcaagctaccattatcacctaaacaaaaaactacattttccaagtgggtacgaccagaagacctcaccaacaatcctacaatgatatatactgtgtccagttttagcataaagcagacaatagtatcggattgctcctttgtggcatcactggccatcagtgcagcttatgaaagacgttttaataagaagttaattaccggcataatttaccctcaaaacaaggatggtgaaccagaatacaatccatgtgggaagtatatggtaaaacttcacctcaatggtgtcccaagaaaggtgataattgatgaccagttacctgttgatcacaagggagaattgctctgttcttattccaacaacaaaagtgaattatgggtttctctcatagaaaaagcatacatgaaagtcatgggaggatatgattttccaggatccaactccaatattgatcttcatgcactgactggctggataccagaaagaattgctatgcattcagatagccaaactttcagtaaggataattctttcagaatgctttatcaaagatttcacaagggagatgtcctcatcactgcgtcaactggaatgatgacagaagctgaaggagagaagtggggtctggttcccacacacgcatatgctgttttggatattagagagttcaaggggctgcgatttatccagttgaaaaatccttggagtcatttacgttggaaaggaagatacagtgaaaatgatgtaaaaaactggactccagagttgcaaaagtatttaaactttgatccccgaacagctcagaaaatagacaacggaatattttggatttcctgggatgatctctgccagtattatgatgtgatttatttgagttggaatccaggtctttttaaagaatcaacatgtattcacagtacttgggatgctaagcaaggacctgtgaaagatgcctatagcctggccaacaacccccagtacaaactggaggtgcagtgtccacaggggggtgctgcagtttgggttttgcttagtagacacataacagacaaggatgattttgcgaataatcgagaatttatcacaatggttgtatacaagactgatgggaaaaaagtttattacccagctgacccacctccatacattgatggaattcgaattaacagccctcattatttgactaagataaagctgaccacacctggcacccatacctttacattagtggtttctcaatatgaaaaacagaacacaatccattacacggttcgggtatattcagcatgcagctttactttttcaaagattccttcaccatacaccttatcaaaacggattaatggaaagtggagtggtcagagtgctggaggatgtggaaatttccaagagactcacaaaaataaccccatctaccaattccatatagaaaagactgggccgttactgattgagctacgaggaccaaggcaatatagcgttggatttgaggttgtaacagtttctactctaggagatcctggtccccatggctttctgaggaaatctagtggtgactataggtgtgggttttgctacctggaattagaaaatataccttctgggatcttcaatatcattcctagtacctttttgcctaaacaagaaggaccttttttcttggactttaatagtattatccccatcaagatcacacaacttcagtgatggagaaatctcaagttactggcttttatacttaccaaacatcagttcttcaaataaggacgcaaatcttcaggacagtaagcagaacaatcagaatggaattaaatctctaaaaacgtg

SEQ ID NO: 1902 - DNA, 1105 bp, Homo sapiens
ccgacccgagctccagtagtccgcccgctggtcatcgcgccctttcccctgccggtgtcctgctcgccgtccccgccatgctgtctctagactttttggacgatgtgcggcggatgaacaagcggcagctctattatcaagtcctaaattttggaatgattgtctcatcggcactaatgatctggaaggggttaatggtaataactggaagtgaaagtccgattgtagtggtgctcagtggcagcatggaacctgcatttcatagaggagatcttctctttctaacaaatcgagttgaagatcccatacgagtgggagaaattgttgtttttaggatagaaggaagagagattcctatagttcaccgagtcttgaagattcatgaaaagcaaaatgggcatatcaagtttttgaccaaaggagataataatgcggttgatgaccgaggcctctataaacaaggacaacattggctagagaaaaaagatgttgtggggagagccaggggatttgttccttatattggaattgtgacgatcctcatgaatgactatcctaaatttaagtatgcagttctctttttgctgggtttattcgtgctggttcatcgtgagtaagaagcctgccttgctgttcctgggaagatgccatagttttcgttactggatgtttggagtagatactggtctgtgattggtggaatggagaacacacgtgttggtgcttctgggtagcactggtttgcattagtttatgtttccatgccagagtttgtgtgggcgggcgcatgtgcaccacagagtgcactcgaggggactttcagtcacaggatttcataattgtcattgtcacactttcaaatttttgtacatcagtgaatttttttatattaaaaggttgagccaaaaagcccccagtgtttgtattttgaagccaagcttcacttctaaagtgcctacagagacttgtaaatgaaaatgcagctctgcacgagtttgaaaccgtcatacctccttctattaggaatggcatatactgaggtggtcgtaagtcttaacttctaaaattttaaataaaagactttgcacattgaaaaaaaaaaaaa

SEQ ID NO: 1903 - DNA, 2284 bp, Homo sapiens
gccgggtggatggtactgctgcatccgggtgtctggaggctgtggccgttttgttttcttggctaaaatcgggggagtgaggcgggccggcgcggcgcgacaccgggctccggaaccactgcacgacggggctggactgacctgaaaaaaatgtctggatttctagagggcttgagatgctcagaatgcattgactggggggaaaagcgcaatactattgcttccattgctgctggtgtactattttttacaggctggtggattatcatagatgcagctgttatttatcccaccatgaaagatttcaaccactcataccatgcctgtggtgttatagcaaccatagccttcctaatgattaatgcagtatcgaatggacaagtccgaggtgatagttacagtgaaggttgtctgggtcaaacaggtgctcgcatttggcttttcgttggtttcatgttggcctttggatctctgattgcatctatgtggattctttttggaggttatgttgctaaagaaaaagacatagtataccctggaattgctgtatttttccagaatgccttcatcttttttggagggctggtttttaagtttggccgcactgaagacttatggcagtgaacacatctgatttcccacagcacaacagccctgcatgggtttgtttgtttttttactgctcactcccaaccttttgtaatgccattttctaaacttatttctgagtgtagtctcagcttaaagttgtgtaatactaaaatcacgagaacacctaaacaacaaccaaaaatctattgtggtatgcacttgattaacttataaaatgttagaggaaactttcacatgaataatttttgtcaaattttatcatggtataatttgtaaaaataaaaagaaattacaaaagaaattatggatttgtcaatgtaagtatttgtcatatctgaggtccaaaaccacaatgaaagtgctctgaagatttaatgtgtttattcaaatgtggtctcttctgtgtcaaatgttaaatgaaatataaacattttttagtttttaaaatattccgtggtcaaaattcttcctcactataattggtatttacttttaccaaaaattctgtgaacatgtaatgtaactggcttttgagggtctcccaaggggtgagtggacgtgttggaagagagaagcaccatggtccagccaccaggctccctgtgtcccttccatgggaaggtcttccgctgtgcctctcattccaagggcaggaagatgtgactcagccatgacacgtggttctggtgggatgcacagtcactccacatccaccattgaaggaaaggaaaaaagggcagagacttgacactccagtcttagacaggggacaatttctttgtagttgttctgataataaactgggttccatgttgcatttcatctgtgtactgaaccactagcctaatagaccagcacggtcaactagaatgacaaacattagctactgggaactcttgttgtctcttcctcttcagaactcttgtccccccaggctccccacctctgcaagatgggatacactcttcaggaccacagtttgaaatgtctttcataaaatgtgctacaattagccttcggaatatttgctgggtgatttaaatgtgtgggtctcatttccatgctagccatggtcatctgacagtctctacgctgtgaatattgcctggtgatcaagactctcctcaaagaaatgacttgctgtcatcccacatgaactcctgatgttttttctacaaaagtccataaaatgtgaaaactggagaagatcttagaggttgaagcccaccttctcttttcacataggagggaacagaccatggaaatttaaacgacttcctcacggtcacagaactagttttttaatcctcaggcagtgcatccccccaccctacaactgagcacaacctctttccccacagtgcaattcagaatatgctcagggaatgccagccaccttgtaaaactgctgggagaaaagcatgattcccacaaggactaagtatcagtgatttgtaattttcctgttttgtattatctgctttgctgatgtagacaagagttaactgagtagcatgctttattaagcatgagaaagaatcttaagaattgtcaataaaattaacccaaaactttaataatgtgtctgtaaccaagaaaatattgatagcatcatcctaatgaaactaaacatttattttaaacttattaaattgactcttaaactaaaaaa

SEQ ID NO: 1904 - DNA, 1635 bp, Homo sapiens
ggcacgagcgcggcgttcacgggaattgttcgctttagtgccggcgccatggggtcggagctgatcgggcgcctagccccgcgcctgggcctcgccgagcccgacatgctgaggaaagcagaggagtacttgcgcctgtcccgggtgaagtgtgtcggcctctccgcacgcaccacggagaccagcagtgcagtcatgtgcctggaccttgcagcttcctggatgaagtgccccttggacagggcttatttaattaaactttctggtttgaacaaggagacatatcagagctgtcttaaatcttttgagtgtttactgggcctgaattcaaatattggaataagagacctagctgtacagtttagctgtatagaagcagtgaacatggcttcaaagatactaaaaagctatgagtccagtcttccccagacacagcaagtggatcttgacttatccaggccacttttcacttctgctgcactgctttcagcatgcaagattctaaagctgaaagtggataaaaacaaaatggtagccacatccggtgtaaaaaaagctatatttgatcgactgtgtaaacaactagagaagattggacagcaggtcgacagagaacctggagatgtagctactccaccacggaagagaaagaagatagtggttgaagccccagcaaaggaaatggagaaggtagaggagatgccacataaaccacagaaagatgaagatctgacacaggattatgaagaatggaaaagaaaaattttggaaaatgctgccagtgctcaaaaggctacagcagagtgatttcagcttccaaactggtatacattccaaactgatagtacattgccatctccaggaagacttgacggctttgggattttgtttaaacttttataataaggatcctaagactgttgcctttaaatagcaaagcagcctacctggaggctaagtctgggcagtgggctggcccctggtgtgagcattagaccagccacagtgcctgattggtatagccttatgtgctttcctacaaaatggaattggaggccgggcgcagtggctcacgcctgtaatcccagcactttgggaggccaaggtgggtggatcacctgaggtcaggagctcgagaccagcctggccaacatggtgaaaccccatctctactaaaaatacaaaaattagccaggtgtgatggtgcatgcctgtaatcccagctcctcagtaggctgagacaggagcatcacttgaacgtgggaggcagaggttgcagtgagccgagattgcaccaccgcactccagcctgggtgacagagcgagacttatctcataaataaatagatagatactccagcctgggtgacagagcgagacttatagatagatagatagatagatggatagatagatagatagatagatagatagataaacggaattggagccattttgctttaagtgaatggcagtcccttgtcttattcagaatataaaattcagtctgaatggcatcttacagattttacttcaatttttgtgtacggtattttttatttgactaaatcaatatattgtacagcctaagttaataaatgttatttatatatgcaaaaaaaaaaaaaaaaaaaa

SEQ ID NO: 1905 - DNA, 1719 bp, Homo sapiens
cgcacggccgcgcagatctgtcttgctggaagctttttcctagaggttgagcggtttgcacaatgtcggaaatggctgagttgtccgagctgtatgaagagagcagtgacctgcagatggatgtgatgcctggcgagggtgaccttccgcagatggaggtaggcagcgggagccgggagctatccctgcgtccctcccgcagcggggcccaacagctcgaggaggaaggcccaatggaggaggaggaggcccagccaatggcggcgccagaggggaaacggagccttgctaacgggcccaacgctggggagcagccaggccaggtggcgggcgcagacttcgagagcgaggacgagggcgaggaatttgatgactgggaggacgactacgactatcccgaagaggagcagctcagtggtgccggctacagagtatcagccgctcttgaagaagccgacaagatgtttctgagaacaagagaaccagccctggatggcgggtttcagatgcattatgagaagaccccgtttgatcagttagcttttatcgaagagcttttttcactgatggttgtcaatcgtctgaccgaagaactcggctgtgatgagattattgatagagagtagttagatgctgttaaaagaggaggaaactacttgaggagggacccaactttccgctatcttttgggttcattccaaatagttttgtgccattgaaaaacttgaccttcaaaaaaatttgtttttcagaatagaacacaataggacagtgactgcacagttgtgaaaaaggaagagaatcattaaagaaaaagaaaaaagattttaagaccgttgaaatcaattatcaagaacgtcctaaaacacctatggctttgactttgttattgatccagattattttccttgcattggggaaaatatctttcatatttgtttgctgtaaagatggttttgcaagaataagtcatgaccaagacaaactgccaatacaaaagcccactgatactaattatataatgagaaaaaaatgtatccaactaggacacatatcttttgagttatttggactgaaagcttaagaaaacttggaaaattctattttgtgatctagtcaagccacagttatcaaaggctacattttcagtgtaagataaatggatgagtaaactcaaatatgtatcacgtgtgctttgtatcttaagatgtgtttccaagagcatctgaaattttgtttgtacatgtatcttgatcatttataaagccactgtgatctataaatcaagaaaatccattgtcataaccatttttaaaagtcaaaaattaagacatccttaattaaaaagtttcaaatctagacactaaatgtgtgtgaatgtacaaagaaaacaaaccattgcttatgctgttatatactagagaaattttgttttgcttgctgttttaacttgacagatgaaggactttagttgaacttcatattgtaagaactgttaataaaagttgtcaagtaaaaagcgctatatctaaaaagactttatgaacagttattctatcaacttttaaaggttttaaacctgcccagaaattaccttggtatctgaagtttccctctgtctcctcctctaattaagcttgttatttgtcatgcaccagcattggagataataaaatttcttgttctgtgtaaaaaaaaaaaaaaaaaaaaaaaaaaaaa

SEQ ID NO: 1906 - DNA, 2059 bp, Homo sapiens
gcggccgccaagcgatccctgctccgcgcgacactgcgtgcccgcgcacgcagagaggcggtgacgcactttacggcggcacgtaagtgcgtgacgctcgtcagtggcttcagttcacasgtggcgccmgsasgmrggttgctgtgtttgtgcttccttctacagccaatatgaaaaggcctaagttaaagaaagcaagtaaacgcatgacctgccataagcggtataaaatccaaaaaaaggttcgagaacatcatcgaaaattaagaaaggaggctaaaaagcagggtcacaagaagcctaggaaagacccaggagttccaaacagtgctccctttaaggaggctcttcttagggaagctgagctaaggaaacagaggcttgaagaactaaaacagcagcagaaacttgacaggcagaaggaactagaaaagaaaagaaaacttgaaactaatcctgatattaagccatcaaatgtggaacctatggaaaaggagtttgggctttgcaaaactgagaacaaagccaagtcgggcaaacagaattcaaagaagctgtactgccaagaacttaaaaaggtgattgaagcctccgatgttgtcctagaggtgttggatgccagagatcctcttggttgcagatgtcctcaggtagaagaggccattgtccagagtggacagaaaaagctggtacttatattaaataaatcagatctggtaccaaaggagaatttggagagctggctaaattatttgaagaaagaattgccaacagtggtgttcagagcctcaacaaaaccaaaggataaagggaagataaccaagcgtgtgaaggcaaagaagaatgctgctccattcagaagtgaagtctgctttgggaaagagggcctttggaaacttcttggaggttttcaggaaacttgcagcaaagccattcgggttggagtaattggtttcccaaatgtggggaaaagcagcattatcaatagcttaaaacaagaacagatgtgtaatgttggtgtatccatggggcttacaaggagcatgcaagttgtccccttggacaaacagatcacaatcatagatagtccgagcttcatcgtatctccacttaattcctcctctgcgcttgctctgcgaagtccagcaagtattgaagtagtaaaaccgatggaggctgccagtgccatcctttcccaggctgatgctcgacaggtagtactgaaatatactgtcccaggctacaggaattctctggaattttttactatgcttgctcagagaagaggtatgcaccaaaaaggtggaatcccaaatgttgaaggtgctgccaaactgctgtggtctgagtggacaggtgcctcattagcttactattgccatccccctacatcttggactcctcctccatattttaatgagagtattgtggtagacatgaaaagcggcttcaatctggaagaactggaaaagaacaatgcacagagcataagagccatcaagggccctcatttggccaatagcatccttttccagtcttccggtctgacaaatggaataatagaagaaaaggacatacatgaagaattgccaaaacggaaagaaaggaagcaggaggagagggaggatgacaaagacagtgaccaggaaactgttgatgaagaagttgatgaaaacagctcaggcatgtttgctgcagaagagacaggggaggcacttctgaggagactacagcaggtgaacagtctacaaggtcttttatcttggataaaatcattgaagaggatgatgcttatgacttcagtacagattatgtgtaacagaacaatggctttttatgatttttttttttaacattttaagcagactgctaaactgttctctgtataagttatggtatgcatgagctgtgtaaattttgtgaatatgtattatattaaaaccaggcaacttggaatccctaaattctgtaaaaagacaattcatctcattgtgagtggaagtagttatctggaataaaaaaagaagatacctattgaaaaaaaaaaaaaaaaaaaaaa

SEQ ID NO: 1907 - DNA, 1623 bp, Homo sapiens
gttgtaacaaaaccgctcaagtctgccttaaagagccttacaagccagccagtccctgcagctccacaaactgacccatcctgggccttgttctccacagaatgggtctgctccttcccctggcactctgcatcctagtcctgtgctgcggcaaattgtctccaccccagctggccctcaacccctcggctctgctctcccggggctgcaatgactccgatgtgctggcagttgcaggctttgccctgcgggatattaacaaagacagaaaggatggctatgtgctgagactcaaccgagtgaacgacgcccaggaatacagacggggtggcctgggatctctgttctatcttacactggatgtgctagagactgactgccatgtgctcagaaagaaggcatggcaagactgtggaatgaggatattttttgaatcagtttatggtcaatgcaaagcaatattttatatgaacaacccaagtagagttctctatttagctgcttataactgtactcttcgcccagtttcaaaaaaaaagatttacatgacgtgccctgactgcccaagctccatacccactgactcttccaatcaccaagtgctggaggctgccaccgagtctcttgcgaaatacaacaatgagaacacatccaagcagtattctctcttcaaagtcaccagggcttctagccagtgggttgtcggcccttcttacttcgtggaatatttaattaaagaatcaccatgtactaaatcccaggccagcagctgttcacttcagtcctccgactctgtgcctgttggtctttgcaaaggttctctgactcgaacacactgggaaaagtttgtctctgtgacttgtgacttctttgaatcacaggctccagccactggaagtgaaaactctgctgttaaccagaaacctacaaaccttcccaaggtggaagaatcccagcagaaaaacacccccccaacagactccccctccaaagctgggccaagaggatctgtccaatatcttcctgacttggatgataaaaattcccaggaaaagggccctcaggaggcctttcctgtgcatctggacctaaccacgaatccccagggagaaaccctggatatttccttcctcttcctggagcctatggaggagaagctggtggtcctgcctttccccaaagaaaaagcacgcactgctgagtgcccagggccagcccagaatgccagccctcttgtccttccgccatgagaatcacacagagtcttctgtaggggtatggtgcgccgcatgacatgggaggcgatggggacgatggacagagacagagcgtgcacacgtagagtggctagtgaaggacgcctttttgactcttcttggtctcagcatgttgactgggattggaaataatgagactgaccctcggcttgggctgcactctaccctgtacactgccttgtaccctgagctgcatcacctcctaaactgagcagtctcataccatggagagatgcctctcttatgtcttcagccactcacttataaagatacttatcttttcagcagtatatatgtgctgaaatctcagcatgaaagcattgcatgagtaaagatactttcccta

SEQ ID NO: 1908 - DNA, 3121 bp, Homo sapiens
ccacgtgcttgtgttgactggacaacttcctggtggaaaaccgcgactcttgcaagtgggcaaacttgacgttttcgctatgggcaaacgcgggagccggagccagagccagctactcaacaccctaactaaaaagcagaagaaacatcttcgagatttcggcgaggagcatcccttctatgacagggtttccagaaaggaagcaaagccacagatttgtcaactgtcagagagttcagattcttcagattctgaaagcgactcagagagtgaaccacaacaagtttctggctaccacagactacttgctacattaaagaatgtttctgaggaagaagaggaagatgaggaggaggaagaggaagaagacagtattgtagatgatgcagaaatgaacgatgaagatggtggtagcgatgtcagtgtggaagaagagatggctgcagagtctactgaaagtccagagaatgtagctttatctgctgaccctgagggaaaagaagatggggaagagccaccgggcacatcacaaacatcccccgaagagttcacagatgcaaaacacgagtcactgttcagcctggaaaccaattttctggaagaggaaagtggagacaactcttctttgaaagcctctcaagatccatttcttcaacatgtgaacaaagaactgaaagaaaaagcaattcaggctgttgccacaaatcccaaaactacccacgagcttaaatggcctattctgggccagcttttcttttcctctaagtttcagaagttggaaacatttaaacccccaaaggatattgacttaaagtcacttcatctccagaagcctctggaatccacctggactaagaccaacagccagttcctatctggtccccaaaaatcaagcagcccattcacccccctccagaaagaactcttcttaattatgaattcttaccgggacctgttctacccggaaaggactgctctgaagaacggggaagagatccgccatgtgtattgcctgcatgtgataaatcacatcctcaaagccaatgcccaggtgcttggcaacaatagcagacgccgaagccagaagtttggagtgggtgatgatgatgacttcagagaccaagggttaacaaggcccaaggtactgatagtggtgccattccgggaagctgctttgcgggtggtgcagctcttcatcagcctcctcgagggtgacagcaagaagaaaatcattgtgagcaacaaaaagaggtttcagggagaatatggatcagatcccgaggagagaccacccaacttgaagaggcctgaggattatgaagccgtatttgtgggcaatattgatgaccacttcaggattggagtggcaatacttcagagaagcatccgactctatgccccgttttactcctcggatatcctcattgcttcccccctgggcttgaggaccatcattggtggagaaggagagaagaagagagattttgactttctgtcttctatcgagcttctcatcattgatcaagctgacatttacctgatgcagaactgggagcatgtcctgcatttgatgaatcacatgaacctactacccctggactcacatggggtagacttttctcgagtgcggatgtggagcctcaataattggtccaagtactatcgccagacactgctatttggggcccttcaggatgcccagatcaactcagtgttcaacaagtactgtgtcaacatgcaaggccaggtggccgtgaggaatgtcccaatgacaggctctatcagtcatgtcctggtgcagctcccacatgtcttccagaggatggaagctgaaaacctagcttcagtgattgatgccaggtttaacttttttgtgaacaagattttgccacagtatcgtgatgcagtcatgtctcacacgctcatctatatcccctcctactttgacttcgtgcgtcttcgaaattacttcaagaaggaggaattgaattttacccacatctgcgagtacacgcagaagtctggtgtctccagggccagacacttcttccttcaaggagagaaacagtttctacttttcacagagcgcttccatttctacaaaaggtatacaataaaaggcatcaggaacctgattttctatgaactgccgacatatccacacttttacagtgaaatctgtaatatgctgagagccaccaacagaggagaagaggccacgtggacctgcactgttctctactccaaatatgatgcccagaggttagctgccgtggttggtgtggagcgggcggcacagatgctacagtccaacaagaatgtccacctcttcattactggagaaaaatgaaattttgttgggcaggaagtggtatttggcatgatacataatgtttgattctatgccatttggacccaattctgattacttacagaagaaggactgatacaaagaaagtgcatgaggcaatgtcagtattatctgacatctttcttttcaggtcatgtgtccctgaaaagttaaatgtaaaccagattttggtaaatcccatctttcagaagtgaagagggggctagaaggactctgagaagttggtagaagaaaactcccacttgtgaatatttttgtgagacataaattcttttattacgatttacctctaatttattacacttagtaaattcttccagatttttctatttgtttgacacttccttaaagtaaggaatacacattgcttgcgagaactggttatgagacattggaatacttcttgctgctacatgtcatcttaattttggatggcatgggttttgtaaaacttattctgccccagccaaacttttttgaaaccttaaatagtctaccttaattcagcctagaagagtacattgatttactgatcttttttcatattcataatactaaatgttttagttttgttcaaatatatgcttaaaatcacgttatttaaaaaacacatcagctctgtctcaagaagtaattttgttgaaactccatgttaaaatatccatcttcaacagtagtgtcttcataataactagtcattttttcagtcataaacagatgcaaataaaaaggaaattacacttttaaaaa

SEQ ID NO: 1909 - DNA, 2374 bp, Homo sapiens
gtcatgcagtgcgccggagaactgtgctctttgaggccgacgctaggggcccggaaggaaactgcgaggcgaaggtgaccggggaccgagcatttcagatctgctcggtagacctggtgcaccaccaccatgttggctgcaaggctggtgtgtctccggacactaccttctagggttttccacccagctttcaccaaggcctcccctgttgtgaagaattccatcacgaagaatcaatggctgttaacacctagcagggaatatgccaccaaaacaagaattgggatccggcgtgggagaactggccaagaactcaaagaggcagcattggaaccatcgatggaaaaaatatttaaaattgatcagatgggaagatggtttgttgctggaggggctgctgttggtcttggagcattgtgctactatggcttgggactgtctaatgagattggagctattgaaaaggctgtaatttggcctcagtatgtcaaggatagaattcattccacctatatgtacttagcagggagtattggtttaacagctttgtctgccatagcaatcagcagaacgcctgttctcatgaacttcatgatgagaggctcttgggtgacaattggtgtgacctttgcagccatggttggagctggaatgctggtacgatcaataccatatgaccagagcccaggcccaaagcatcttgcttggttgctacattctggtgtgatgggtgcagtggtggctcctctgacaatattagggggtcctcttctcatcagagctgcatggtacacagctggcattgtgggaggcctctccactgtggccatgtgtgcgcccagtgaaaagtttctgaacatgggtgcacccctgggagtgggcctgggtctcgtctttgtgtcctcattgggatctatgtttcttccacctaccaccgtggctggtgccactctttactcagtggcaatgtacggtggattagttcttttcagcatgttccttctgtatgatacccagaaagtatcaagcgtgcagaagtatcaccaatgtatggagttcaaaaatatgatcccattaactcgatgctgagtatctacatggatacattaaatatatttatgcgagttgcaactatgctggcaactggaggcaacagaaagaaatgaagtgactcagcttctggcttctctgctacatcaaatatcttgtttaatggggcagatatgcattaaatagtttgtacaagcagctttcgttgaagtttagaagataagaaacatgtcatcatatttaaatgttccggtaatgtgatgcctcaggtctgcctttttttctggagaataaatgcagtaatcctctcccaaataagcacacacattttcaattctcatgtttgagtgattttaaaatgttttggtgaatgtgaaaactaaagtttgtgtcatgagaatgtaagtcttttttctactttaaaatttagtaggttcactgagtaactaaaatttagcaaacctgtgtttgcatatttttttggagtgcagaatattgtaattaatgtcataagtgatttggagctttggtaaagggaccagagagaaggagtcacctgcagtcttttgtttttttaaatacttagaacttagcacttgtgttattgattagtgaggagccagtaagaaacatctgggtatttggaaacaagtggtcattgttacattcatctgctgaacttaacaaaactgttcatcctgaaacaggcacaggtgatgcattctcctgctgttgcttctcagtgctctctttccaatatagatgtggtcatgtttgacttgtacagaatgttaatcatacagagaatccttgatggaattatatatgtgtgttttacttttgaatgttacaaaaggaaataactttaaaactattctcaagagaaaatattcaaagcatgaaatatgttgctttttccagaatacaaacagtatactcatgaattgctaagtgtttttttatttttgcatatttattgaactgtctaattgaatacagcttgctcttgtcacctcttcaagctttcaagcctttatagaaaagcttctttgtggcttacactggaaattatgaaagcagtttttctcctaagacttttggtttctcgcattgcctctcagactaagcactaaaaagcaaagcaaaacagaactagttctgtcttaatgaaatatatcaacccaaaagtgtaatgaggaaaatgcttcattagtttcccctagcagacttttacttctcttacactgctacaccattactttcttgagacatttgtaagtcctttgatacagaagagttatatttaggaggctttaatgaaggg

SEQ ID NO: 1910 - DNA, 428 bp, Homo sapiens
aaaaataagtaggaagtgctcaattttaatttggttcagttttccggagggcgagctgagccctggccgccgccacaatgggccgcgagtttgggaatctgacgcggatgcggcatgtgatcagctacagcttgtcaccgttcgagcagcgcgcctatccgcacgtcttcactaaaggaatccccaatgttctgcgccgcattcgggagtctttctttcgcgtggtgccgcagtttgtagtgttttatcttatctacacatgggggactgaagagttcgagagatccaagaggaggatccagctgcctatgaaaatgacaaatgagcaacgcatccggatgacggttccctgtctctgaaagacctttctctggaagaggagtctgcattgtagtgtctcaaagacacaataaacttcctatggtctg

SEQ ID NO: 1911 - DNA, 1897 bp, Homo sapiens
gtttgatttttgtgggccttacttttcccatttgctcatgtatgtctatattcctatatctaatgtttcttaaaagacaaatctgactgtgtaggtgcatttgtttaaaaaatataactccccattgcctctgggataaagtcttatctcagtttacatatattcttgataacctctccaactttatgtctcaccacccccactcacttcgtaattcgtgccttatcagaatggacctgttatactggcagttcaccatatataccattacattttgtttctcccatctctcaggtagacttacactttcggcccagcacatcagtcatcgcccttgcttgctttcctattcactcctgttctggaaggtgcaccaccttttcttggaaggcttcccttgctctcccaggctagatgagatgtccttccatcagttcccacagcaccctgtgcatgtatctgttgtgcacttaccaatagtatacaagggatctatgacccaagtctctccccactagcttgtaagctcctcacagacaggaaccatgttttgtctttgtactccagtgcctagtatataagagatactcaataaataaatatttgtcaaatcaactaattgattccttgtgacctaattctagagaatgggaagaaggcctgttattttgttgtcctttatggttctttaggaaagctctccaagcttggcatttgtcagggtgggaggaaaactgttgaagtattaagactggacacatggctgctaattcatcagcttatcattgaaaaagtccatagccaaaacctgactgtgcacttactataggaccctgacctgcctgggtctccctgtctctccagccagtatatttaaaggtaatgagataatgatgagtgttttgaaaaatgtttagtgttcaaatagaaaccattcgtgtcccttcactctctgaacatagtctgcaaatctctccctctctggtatgtttctgttttgtggattagactgctaaataagcgaagagttaattttgaagttcaggtcaacaaattcctgtttggagacgggctgttcctgaataccaggttgttatctgtctattacagccccttcacttctgggctcctggccctttgcgaagtacttcagaaagcctagagagaagagagggccctcaaatcccattccagcccctaaatgaaagtggcatcacaaggagaaaagtggaggtagaaatgtaccatgggggacgttgccccattgcctttcttcccctgactactgggcttcctctatcagcttttaacgcctggaagtagctgagtctccagtcactggtggccttccccaagtgagctcagcagcatgtgctaataggtgccaatactgtgctggctccagtgggattcctctctgcaaagctgctggcttagcttgactgtttccctattcctctccttagaactttcatagccagtcaagcatagaattgcatccattcttctgaaataggtactgtgcctaatttttcattggcttggccaagattctgttacctgtaattatgtcatatgggctgactggtgtaggtttggtaggcctcactgctctccagaggctagtgttcctatcccaggatggctgttgggattaggagtggaatgaggaatagtttaggaccacaagagatttggcctccttggaacatgtaggaaggcctcaaggatgtaattctagcccagggaagaaaatccttttcagcagacgcttcccttcccttcccctagggaatgtgtccctactatagtaaactcttccttaagagagttttatgttttctctgtcagatcaatttgtttttcttaatgttgttcctatcaaaaaaaaaaaaaa

SEQ ID NO: 1912 - DNA, 2435 bp, Homo sapiens
gcagcgccgcgactcgtgcgggtaggcgtctgcgctcggtttgagggctcggcgcggggtttcctgttcctccttctgcgcggctgcagctcgggacttcggcctgacccagcccccatggcttcagaagagctacagaaagatctagaagaggtaaaggtgttgctggaaaaggctactaggaaaagagtacgtgatgcccttacagctgaaaaatccaagattgagacagaaatcaagaacaagatgcaacagaaatcacagaagaaagcagaacttcttgataatgaaaaaccagctgctgtggttgctcccattacaacgggctatacggtgaaaatcagtaattatggatgggatcagtcagataagtttgtgaaaatctacattaccttaactggagttcatcaagttcccactgagaatgtgcaggtgcatttcacagagaggtcatttgatcttttggtaaagaatctaaatgggaagagttactccatgattgtgaacaatctcttgaaacccatctctgtggaaggcagttcaaaaaaagtcaagactgatacagttcttatattgtgtagaaagaaagtggaaaacacaaggtgggattacctgacccaggttgaaaaggagtgcaaagaaaaagagaagccctcctatgacactgaaacagatcctagtgagggattgatgaatgttctaaagaaaatttatgaagatggagacgatgatatgaagcgaaccattaataaagcctgggtggaatcaagagagaagcaagccaaaggagacacggaattttgagactttaaagtcgttttgggaactgtgatgtgatgtggaaatactgatgtttccagtaagggaatattggtgagctgcatatataaatttgacagatagctatttacatagccttctaagtaaaggcaatgaattctccatttcctactggaggatttatttaaataaaatatgcttattaaacactcctgcaaagatggttttattagtaccctggtcattttgttcaaggaagggttatattgcattctcacgtgaaatataaaaagcaagtcttgcccaataaaaacgctacattgtgtgtattttttgttcagctaagaattggaaaagtatttgcttgccttttaagttactgacatcagcttccaccagtgtaaaaattgagtaaaacctgaagttttgcataaaatgcaaatcggtgcctgtgcttgaaggttgctgtagagcatctgaccccttattaccaccttaagcaatgtatatgccatgcattaccatgcactaattcaatcacaggtgtttctatctagatttaaatatatttgtcaatgaatgtggaatagaaaatctaaacatgacaataatagacatatctttgtatggtaccagttagttttgccgtggatcagatggtttataaaagtaataaccataaagcaaaaaataatttgaaagcccgtctattcctatgctcaataaagttaagtttttcttcattagaacagttttatgatttatttgtctaggagtatgtcagaaaaatcaggcttttagtaggaattactcctattccccctgaagtcaggaccagtgcctgtgatctccattactttattttcctggaggtattagccaacacagttagatcagagaaagcaattgaagccaggcatgaaggctggcgcccgtaatcccagctactaaggctggaggatcacttcagcccaggagtttaaggctgcagtgagctatgatgatgccactgtactgcagcttgggtaacagattgagaacctgtctcattaaaaaaaaaaaaaaaaaaaaagccgttagacacacaggaaaaatccagaagggtaaactaaactaaagctacaattaatatgggaatttggaagaagtggtaggatttaaaatacagaaacagtttatgtataggatagctataagtaaatactgaaacacattatgcctctgtaattggggttgacacatgaacagaatagcagacacaatgcatatgaaagttacagaatatggtaaaagtggggtaaagatgggtttttaatgatactaagataactgaaaataggcatatagatatattccaagccgcctgacgatctaattgtaaaaagtaaagcatacaaatactagaagaaaatggaggaaaacgacattatatgtgacttaaaacctagaagaaataaataaaactattgatcaattttaactacataaaaatgtttataggacaagaaaaaccccaccataacccaaggcaaacaatgtattgacaggattccaataattaagaatacttcatacaaaaagaaatgtaaatgacctttaacatgtaaagatgctcaccttgttcagaagagaataaaccagtgtttttacctttc

SEQ ID NO: 1913 - DNA, 2813 bp, Homo sapiens
atcggagtgtggcagtgctgggctggccggcgggctgggctgcggcccgcgcgcggccggcgatgcaggggggcaactccggggtccgcaagcgcgaagaggagggcgacggggctggggctgtggctgcgccgccggccatcgactttcccgccgagggcccggaccccgaatatgacgaatctgatgttccagcagaaatccaggtgttaaaagaacccctacaacagccaaccttcccttttgcagttgcaaaccaactcttgctggtttctttgctggagcacttgagccacgtgcatgaaccaaacccacttcgttcaagacaggtgtttaagctactttgccagacgtttatcaaaatggggctgctgtcttctttcacttgtagtgacgagtttagctcattgagactacatcacaacagagctattactcacttaatgaggtctgctaaagagagagttcgtcaggatccttgtgaggatatttctcgtatccagaaaatcagatcaagggaagtagccttggaagcacaaacttcacgttacttaaatgaatttgaagaacttgccatcttaggaaaaggtggatacggaagagtatacaaggtcaggaataaattagatggtcagtattatgcaataaaaaaaatcctgattaagggtgcaactaaaacagtttgcatgaaggtcctacgggaagtgaaggtgctggcaggtcttcagcaccccaatattgttggctatcacaccgcgtggatagaacatgttcatgtgattcagccacgagcagacagagctgccattgagttgccatctctggaagtgctctccgaccaggaagaggacagagagcaatgtggtgttaaaaatgatgaaagtagcagctcatccattatctttgctgagcccaccccagaaaaagaaaaacgctttggagaatctgacactgaaaatcagaataacaagtcggtgaagtacaccaccaatttagtcataagagaatctggtgaacttgagtcgaccctggagctccaggaaaatggcttggctggtttgtctgccagttcaattgtggaacagcagctgccactcaggcgtaattcccacctagaggagagtttcacatccaccgaagaatcttccgaagaaaatgtcaactttttgggtcagacagaggcacagtaccacctgatgctgcacatccagatgcagctgtgtgagctctcgctgtgggattggatagtcgagagaaacaagcggggccgggagtatgtggacgagtctgcctgtccttatgttatggccaatgttgcaacaaaaatttttcaagaattggtagaaggtgtgttttacatacataacatgggaattgtgcaccgagatctgaagccaagaaatatttttcttcatggccctgatcagcaagtaaaaataggagactttggtctggcctgcacagacatcctacagaagaacacagactggaccaacagaaacgggaagagaacaccaacacatacgtccagagtgggtacttgtctgtacgcttcacccgaacagttggaaggatctgagtatgatgccaagtcagatatgtacagcttgggtgtggtcctgctagagctctttcagccgtttggaacagaaatggagcgagcagaagttctaacaggtttaagaactggtcagttgccggaatccctccgtaaaaggtgtccagtgcaagccaagtatatccagcacttaacgagaaggaactcatcgcagagaccatctgccattcagctgctgcagagtgaacttttccaaaattctggaaatgttaacctcaccctacagatgaagataatagagcaagaaaaagaaattgcagaactaaagaagcagctaaacctcctttctcaagacaaaggggtgagggatgacggaaaggatgggggcgtgggatgaaagtggacttaacttttaaggtagttaactggaatgtaaatttttaatctttattagggtatagttggtacaatgcttcgttgtatttagtaagcctttacaagacttgttaaagatgtcagagtgccccaagctgccgttccttcccttcctgccccacaagctccttttcctgaatttcctacctaaatattaaccatatgcctagtctctgaaactaaaaacttggacctcatcctcaattattttctcctttcaactctgttgaccctctgtctggtcttcctctagaaggttctaccgcagaaattgatgtgtgctccctgccctcgtcactgcccaagcccgggcctgcacatactcactggactgttccagttttgacagctgccagtcttcctgcccctttcacactgcagctgaagttcattacctgaaggacgcctcatcatttcattccttggctccaaaccttctgctgcctctaagataaaagctcaacttcttaacagtgtacagtgtgcaacttccaacctttttatctgttctctccaccttcagtttagcgtcattccaaaaccacacccttgcaaagctttgtactccgcaccccagatgatctccaggcagctcagatctctttcctgcctttgccctgcactgttccccggtacttcctcctttattgtagcactcagctccccagccaatctgtacatccctcagaggcagcgatctgatgaattggtttttgaatcccagaaagggtctgccatggagttggcagtcatcacggtagatggcgtatgattttgctgaattttaaataaaatgaaaaccataaaaaaaaaaaaaaaa

SEQ ID NO: 1914 - DNA, 2056 bp, Homo sapiens
gagaggcgcccaggcggcggcggcggcggcccagcttcttctttcctcgcacagccaggcggcccctgctcgagtcccgcgtcgccatggccgcggttcccgagttgctgcagcagcaggaggaggaccgcagcaagctgagatctgtatctgtggacctgaatgttgatccctcgcttcagattgacatacctgatgcgctcagtgagagagacaaagtcaaatttacagtgcacacaaagaccacactgcccacgtttcagagcccagagttttctgttacaaggcaacatgaagactttgtgtggctacatgacactcttattgaaacaacagactatgctgggcttattattccacctgctcctacgaagcccgactttgatggtcctcgagagaagatgcagaaactgggagaaggtgaagggtctatgaccaaagaagaatttgccaagatgaaacaagaactggaagctgagtatctcgctgtgtttaagaagactgtgtcctcccatgaagtctttcttcagcggctttcttctcaccctgttctcagtaaagatcgcaactttcatgttttcctggaatatgatcaggatctaagtgttaggcggaaaaatactaaagagatgtttggtggcttcttcaaaagtgtggtgaaaagtgctgatgaagtcctttttactggagttaaggaggtagatgacttctttgagcaagagaagaacttccttattaactattacaataggatcaaagattcttgtgtgaaagctgacaaaatgaccagatctcataaaaatgttgccgatgactatatccacaccgcagcctgcttacatagcctggctttagaagagcccacagtcatcaaaaagtacctattgaaggttgctgagctatttgaaaaactaaggaaagtagagggtcgagtttcatcagatgaagatttgaagctaacagagctcctccgatactacatgctcaacattgaagctgctaaggatctcttatacagacgcaccaaagccctcattgactatgagaactcaaacaaagctctggataaggcccggttaaagagcaaagacgtcaagttggctgaggcacaccagcaggagtgctgccagaaatttgaacaactttccgaatctgcaaaagaagaactgataaatttcaaacggaagagagtggcagcatttagaaagaatctaattgaaatgtctgaactggaaataaaacatgccaggaacaatgtctcccttttgcagagctgtattgacttgttcaagaataactgatatgccttcactcagaagaaaagaaatgaatgtgaaagaaagccaagcatcacttgcacttaaatcattaccacggaagatatattagcttcaactttagtttaaaattatgtgaataaatattttgatttctacaaatcttaacatttaaccatgttggtttaaaaatattattgcttgctacttggacataactaatttttccttgtgcatttaatacctctgggcagaatccaaatactgggttctcccgtagttcgtctttagttactaagaaagggtgtaggacacattagccttctggaaacaagtagaagccatcacctggcccatgtccctacaaacccatgattgtcagggaggtgccagttacagcaggtgattcagctacttgaggtcggtaacagaccttccattcctcactgaaggtggggtttgtgtttttgttttgccctgttactccactggtagtcatctggtgtttgtactataacaacagcaagaaaatctcatttatctttatatactctttgcacctcctttttttagtcgagatataaatatttgaggggagagaaatatctacaggtatatatggaaacaaataatgtggtctgctttataagatggccagatctacattaggaaaagtataagccccctccctaatggccgctggggggtgagggcggtgtgttgtatgtctttgggtgtttgtttttttataaagcatataataaaataatcgtgctact

SEQ ID NO: 1915 - DNA, 2289 bp, Homo sapiens
tcgcggccgcgtcracgcgtggtagggggcccagagcaagccgaaggcaagcacgatggcgctcaccagccggcccacccgcgccccgtgccgcccggagccccagcgggcgccccgcagccgtgccagcgtcacgctgtagcagccgagcatcagccgaaaggaagcacgaaagcggtcagagtctccaggctcaggtgggcggcggcgtggaccggcgacgggtggcacagctggcatacgcggtccctccacaggtggcggtagacggcggccgggacggcgagcaacagggcggccagccagaccgccagcagcaggcggcgggccagggccgggctgcgcagccgaggcgccaggaaggggcgggtgactgcgaggcagcgctgcaggctgagcaggccggtgagcagcacgcttggcgtacatgctgagcgcgcacacgtagtacaccgccttgcagcccgcctggcccagcggccaggcctgccggtcaggaaggccacaaagagcggcgtgagcagcagcaccgcgccgtcggccagcgccaggtgcagcacaagcgtggccgccagcggtcgcccccgtgcaggctgccagcccgccaagctccacaccacgaagccgttgccaggcagccccagcagcgccgccagcagcaggaaggctgtgcctgtggcccgcgaagtcttccagctcagcagtgtctcgttccctgggggacggtagcagaccgacatccttctgggcctacaggacacagaaaaaaagtggggaagctgggggaccctacaaggatccttggcaggaaagcagggattgtgttcattttgagggtttcactgtcagtgagagtctcagcttccatgcaactgtccatcacggctgcaactgaaatcagagctgggacacagcgcaccagaagctaaagtcttgatgccatcaaaggacatcccctgccccattcacayattcacatctctgtcacgtccactaatcggcaaaaggagaaaagtgagagaagatgacctaagtgtgactgcagcaggcagctctggaaaatgaagccagagcagtgagccagcccctcctccgaccaaggaggaaggaaagagcagccccagcacaggagagaaccacccagcccagaagttccagggaaggaactctccggtccaccatggagtacctctcagctctgaaccccagtgacttactcaggtcagtatctaatataagctcggagtttggacggagggtctggacctcagctccaccaccccagcgacctttccgtgtctgtgatcacaagcggaccatccggaaaggcctgacagctgccacccgccaggagctgctagccaaagcattggagaccctactgctgaatggagtgctaaccctggtgctagaggaggatggaactgcagtggacagtgaggacttcttccagctgctggaggatgacacgtgcctgatggtgttgcagtctggtcagagctggagccctacaaggagtggagtgctgtcatatgggcctggacgggagagccccaagcacagcaaggacatcggccgattcacctttgacgtgtacaagcaaaaccctcgagacctctttggcagcctgaatgtcaaagccacattctacgggctctactctatgagttgtgactttcaaggacttggcccaaagaaagtactcagggagctccttcgttggacctccacactgctgcaaggcctgggccatatgttgctgggaatttcctccacccttcgtcatgcagtggagggggctgagcagtggcagcagaagggccgcctccattcctactaaggggctctgagcttctgcccccagaatcattccaaccgacccactgcaaagactatgacagcatcaaatttcaggacctgcagacagtacaggctagataacccacccaatttccccactgtcctctgatcccctcgtgacagaacctttcagcataacgcctcacatcccaagtctatacccttacctgaagaatgctgttctttcctagccacctttctagcctcccacttgccctgaaaggccaagatcaagatgtcccccaggcatcttgatcccagcctgactgctgctacatctaatcccctaccaatgcctcctgtccctaaactccccagcatactgatgacagccctctctgactttaccttgagatctgtcttcatacccttcccctcaaactaacaaaaacatttccaataaaaatatcaaatatttaccgtcaaccc

SEQ ID NO: 1916 - DNA, 2488 bp, Homo sapiens
cttcctctttcactccgcgctcacggcggcggccaaagcggcggcgacggcggcgcgagaacgacccggcggccagttctcttcctcctgcgcacctgccccgctcggtcagtcagtcggcggccggcgcccggcttgtgctcagacctcgcgcttgcggcgcccaggcccagcggccgtagctagcgtctggcctgagaacctcggcgctccggcggcgcgggcaccacgagccgagcctcgcagcggctccagaggaggcaggcgagtgagcgagtccgaggggtggccggggcaggtggtggcgccgcgaagatggtcgccaagcaaaggatccgtatggccaacgagaagcacagcaagaacatcacccagcgcggcaacgtcgccaagacctcgagaaatgcccccgaagagaaggcgtctgtaggaccctggttattggctctcttcatttttgttgtctgtggttctgcaattttccagattattcaaagtatcaggatgggcatgtgaagtgactgaccttaagatgtttccattctcctgtgaattttaacttgaactcattcctgatgtttgataccctggttgaaaacaattcagtaaagcatcctgcctcagaatgactttcctatcatgcttcatgtgtcattccaaggtttcttcatgagtcattccaagttttctagtccataccacagtgccttgcaaaaaacaccacatgaataaagcaataaaatttgattgttaagatacagtagtggaccctacttattcagtcaattaagagtaagtttttttatgtggttattaaaacagtatgaacaattagtctaactctgcatagacagggtctagattttgttaacccaaatgtataactgcagttagcttaaattacaatttgaagtcttgtggtttttatatagctaggcactttattactcttttgaactgaaagcacactcccttataggttcatgtaactgtcctgtaataaggtgcttataaatggaacaactacacagcctagttttgccacaacctttagcatctaaaaagttttaaaagcttctaaatgtctaatataaagggagatgcttatagccacaacatctattttaccaatattgtttccattacactaccttggattttgcatgagtgagtatagtaacccaagatgccataaaaaaaaacttgatcgttttctgacttaattagttactgtggtttcactaaaagctaccgtggtggagtgaagtcagtcagggaaggtttgtttatgttacatttatttcaccagaactattttaatatatcaaaggggtttactatgccaaacaaaattctagggaaaaatactgctaaaaatggatgcctcatcagaacatgctgttgagtccaatgtgccataagacattttagcatgttaaatagcacttttaatagcaaaaaaaggcacatcaactgcgaagttatccttagtttgcaaatgctttttctagattaatgatttttcaatcattagggtactagacacatcagcctaaagtggcatctggaattgaatggatttactgataatgatcagtctttagtcttccctttgttatatgactttataggttatgattgatcaaatttacgttttactaatggtaagggtgagggtcatagggcaggttttgggttttctagtactgttgaaaactgcaagtattggctatttgtatacttagccataacttggtgaaaaaaaacctgagcagtgtctatgtattaatgcgttggaaagaaagctgcttgtgtttgctttgttaattgcctcaggatatttcttttaaaataagctgttttaagaggaacagaagggaaatctgctacctagtctatacacagcgtgaacctcacagggggcttctgataccctcaaacatggagaacagtaagggagcagagtggttaaggactttcaggaacttaactattctggaataaggaatgaatcaactgaccttgggccagcaggtttttaactaaattgttacttgcctttctcacccagttaatcagtctctgtacttgtttccctttttgaaacaagtgtcttggttaactaattctgttttatggttgtgctaaattcatagcaggtgccttattctttgcttttagtcaaaccattccatatcagaattttccttggtttactatagatatttggctttaagttgttgtttgtgttttttaatgtacaatgttctgataaatttgactgttaaattgctatagctagcaatcattttacatatgtaaaaaattgcattccctttgtatttcatgtgtaattcaccaattaagtgcagtttatattcaggttggattatgcatgtttaggtaaacgaaagctgtgtcttacttgatttattctttaaaaataaagttccctgaatatttgaaaaaaaaaaaaaaaaaaaaaaaa

SEQ ID NO: 1917 - DNA, 1234 bp, Homo sapiens
cgctgctcttggttctggttctggaggctgggttgagaggtcgccggtccgactgtcctcggcggttggtcagtgtgaatttgtgacagctgcagttgctccccgcccccgagcagccgaggagtctaccatggctcaagaatctcccaaaaattcagcagcagaaattccagtgactagtaatggagaagttgatgactctcgtgaacatagctttaatagggatttgaagcattcattaccatctggacttggtctctcagaaacccaaattacatctcatggctttgacaataccaaagagggtgttattgaagcaggagcatttcaaggtggccagagaacacagacaaaaagtggaccagttattctagcagatgaaattaaaaatcctgcaatggaaaagttagaacttgttagaaaatggagtctaaacacctataagtgtactcgacagattatctctgagaagctaggccgtggctcaagaactgtggaccttgaacttgaagctcagattgatatattaagggataacaagaaaaaatatgaaaatattttaaaactggctcaaacattgtcgacccagcttttccagatggtacatacccaaaggcaacttggagatgcatttgctgacctgagtttgaagtcactagaacttcatgaagaatttggctataatgccgatacccagaaactgctggctaaaaatggagagactcttcttggggccattaattttttcattgctagtgtgaacactttggtgaataaaaccattgaagatacattaatgactgtgaaacagtatgaaagtgccaggattgaatatgatgcatatcgcactgatttggaagaactgaatcttggaccacgtgacgcaaacactctgccaaagattgagcagtcacagcatctcttccaagcacataaggaaaaatatgataaaatgcgcaatgatgtttctgtcaaattgaaatttctagaagaaaataaggttaaagtattgcacaatcagctggtccttttccacaatgccattgccgcttactttgctgggaatcagaagcagcttgaacagacacttaaacagttccatatcaaattgaaaacccctggagtggatgccccatcttggcttgaagaacagtaaaatcacagcggaaaataaaaagaaagtcgcgttgttatatttctaaaccaacctaacaagaattaagcagagttgggc

SEQ ID NO: 1918 - DNA, 903 bp, Homo sapiens
cggcggcggcgacaggaccgaggggccttagttggtgggcaagtcggggatcccagaaagagaagcgtgacccggaagcggaaacgggtgtccgtcccagctccggcctgccagtgagcttctaccatcatggacctattgttcgggcgccggaagacgccagaggagctactgcggcagaaccagagggccctgaaccgtgccatgcgggagctggaccgcgagcgacagaaactagagacccaggagaagaaaatcattgcagacattaagaagatggccaagcaaggccagatggatgctgttcgcatcatggcaaaagacttggtgcgcacccggcgttatgtgcgcaagtttgtattgatgcgggccaacatccaggctgtgtccctcaagatccagacactcaagtccaacaactcgatggcacaagccatgaagggtgtcaccaaggccatgggcaccatgaacagacagctgaagttgccccagatccagaagatcatgatggagtttgagcggcaggcagagatcatggatatgaaggaggagatgatgaatgatgccattgatgatgccatgggtgatgaggaagatgaagaggagagtgatgctgtggtgtcccaggttctggatgagctgggacttagcctaacagatgagctgtcgaacctcccctcaactgggggctcgcttagtgtggctgctggtgggaaaaaagcagaggccgcagcctcagccctagctgatgctgatgcagacctggaggaacggcttaagaacctgcggagggactgagtgcccctgccactccgagataaccagtggatgcccaggatcttttaccacaacccctctgtaataaaagagatttgacactaaaaaaaaaaaaaaaaaaaaaaa

SEQ ID NO: 1919 - DNA, 1577 bp, Homo sapiens
tatgtggaccggatataagatcttaatcttctcttatcttactacagaaatctggatggagaagcagtatttatctcaaagagaagtggacctagaggcttatttcactaggaatcacaccgttttgcaaggtactcgattcaaaagagccattttccaagggcaatactgtagaaattttggctgttgtgaagacagagatgatggctgtgtcactgagttctatgcggcgaatgcgttgtgctactgtgataaattctgtgacagagaaaattctgattgctgtcctgactacaagtccttttgccgtgaagagaaagaatggcctcctcacacacagccttggtatccagaaggttgcttcaaagatggtcaacattatgaagagggatcagtaattaaagaaaactgcaactcctgcacatgctcaggacagcaatggaaatgttcccagcatgtatgccttgttcgtccagaattaattgaacaggtcaataaaggagactatggatggacagcacagaattacagccaattttggggaatgactttagaagatggttttaaatttcgccttggcactttgccacctagtctcatgctcctgagcatgaatgaaatgacagcttctttacctgcaacaactgatcttccagagttttttgttgcttcttataaatggcctggatggactcatggcccattggatcaaaaaaattgtgctgcatcctgggcattttccactgcaagtgtggctgctgaccgaatagcaattcagtctaagggtcgatacacggccaatctatcccctcagaatttgatctcttgctgtgccaagaaccgtcatggatgcaatagtggaagcatcgatagggcttggtggtacctgagaaaacgtggactggtatcccacgcatgctacccacttttcaaagaccaaaatgctaccaacaatggatgtgccatggcaagcaggtctgatgggcgaggaaaacggcatgccacgaagccatgtcccaacaacgtagaaaaatctaacaggatctatcaatgttctcctccatacagagtctcttccaacgaaactgagataatgaaagaaatcatgcaaaatggaccagttcaagccataatgcaagtccatgaagatttcttccattataagacagggatatacagacatgttaccagcacaaataaagaatcagaaaaatatcgaaagcttcagacacatgcagtcaaactcactggatggggcacactgagaggagcacaagggcagaaagaaaaattttggattgctgccaattcctggggaaagtcatggggagagaatggctatttcaggattcttcgaggagtaaatgagtccgacattgaaaagttgattatcgcagcttggggccaactgacgagttctgatgaaccataacatatcattaaatttccataaggtcatgcctttaagtaaccccctaaattgaagtttagcaatatgacattcttggtgacagtggaatctttgtctcttcaccgtgttaacataatctatctattttcttattttcccctctgga

SEQ ID NO: 1920 - DNA, 2133 bp, Homo sapiens
ctgagttcctctaatccctgtgttccttctcccccatctttctaaaacccttctctgagagaggaataactatagcttcagggataatatagctttaaggaaacttttggcagatgtggacgtcgtaacatctgggcagtgttaacagaatcccggaggccgggacagaccaggagccactcgttctaggaatgttaaagtagaaggttttttccaattgatgagaggagcagagaggaaggagaaagaggaggagagagaaaaagggcacaaaataccataaaacagatcccatatttctgcttcccctcacttttagaagttaattgatggctgacttctgaaagtcactttcctttgccctggtacttcaggccatatacatcttttcttgtctccataatcctccctttcaaggatggccagtcagctaactcaaagaggagctctctttctgctgttcttcctaactccggcagtgacaccaacatggtatgcaggttctggctactatccggatgaaagctacaatgaagtatatgcagaggaggtcccacaggctcctgccctggactaccgagtcccccgatggtgttatacattaaatatccaggatggagaagccacatgctactcaccgaagggaggaaattatcacagcagcctgggcacgcgttgtgagctctcctgtgaccggggctttcgattgattggaaggaggtcggtgcaatgcctgccaagccgtcgttggtctggaactgcctactgcaggcagatgagatgccacgcactaccattcatcactagtggcacttacacctgcacaaatggagtgcttcttgactctcgctgtgactacagctgttccagtggctaccacctggaaggtgatcgcagccgaatctgcatggaagatgggagatggagtggaggcgagcctgtatgtgtagacatagatccccccaagatccgctgtccccactcacgtgagaagatggcagagccagagaaattgactgctcgagtatactgggacccaccgttggtgaaagattctgctgatggtaccatcaccagggtgacacttcggggccctgagcctggctctcactttcccgaaggagagcatgtgattcgttacactgcctatgaccgagcctacaaccgggccagctgcaagttcattgtgaaagtacaagtgagacgctgcccaactctgaaacctccgcagcacggctacctcacctgcacctcagcgggggacaactatggtgccacctgtgaataccactgtgatggcggttatgatcgccaggggacaccctcccgggtctgtcagtccagccgccagtggtcaggttcaccaccaatctgtgctcctatgaagattaacgtcaacgtcaactcagctgctggtctcttggatcaattctatgagaaacagcgactcctcatcatctcagctcctgatccttccaaccgatattataaaatgcagatctctatgctacagcaatccacctgtggactggatttgcggcatgtgaccatcattgaactggtgggacagccacctcaggaggtggggcgcatccgggagcaacagctgtcagccaacatcatcgaggagctcaggcaatttcagcgcctcactcgctcctacttcaacatggtgttgattgacaagcagggtattgaccgagaccgctacatggaacctgtcacccccgaggaaatcttcacattcattgatgactacctactgagcaatcaggagttgacccagcgtcgggagcaaagggacatatgcgagtgaacttgagccagggcatggttaaagtcaagggaaaagctcctctagttagctgaaactgggacctaataaaaggaggaaatgttttcccacagttctagggacaggactctgaggtgggtgagtttgacaaatcctgcagtgtttccaggcatccttttaggactgtgtaatagtttccctagaagctaggtagggactgaggacaggccttgggcagtgggttgggggtagaagttcttcctttcctaacccgggcccctgcccagctctccaaagtctttcagaaaagtaaatcctaaattcagtgaaaaaaaaac

SEQ ID NO: 1921 - DNA, 386 bp, Homo sapiens
ccaggatcagcatggccgtccgccagtgggtaatcgccctggccttggctgccctccttgttgtggacagggaagtgccagtggcagcaggaaagctccctttctcaagaatgcccatctgtgaacacatggtagagtctccaacctgttcccagatgtccaacctggtctgcggcactgatgggctcacatatacgaatgaatgccagctctgcttggcccggataaaaaccaaacaggacatccagatcatgaaagatggcaaatgctgatcccacaggagcacctcaagccatgaagtgtcagctggagaacagtggtgggcatggagaggatatgacatgaaataaaagatccagcccaactgaaaaaaaaaaaaaaaaaaa

SEQ ID NO: 1922 - DNA, 1722 bp, Homo sapiens
gcggccggtcgaccggagtggctgccctgcgcggggacactcagagcccggtgggcgggaggaaggcggcatgccccagacggtgatcctcccgggccctgcgccctggggcttcaggctctcagggggcatagacttcaaccagcctttggtcatcaccaggattacaccaggaagcaaggcggcagctgccaacctgtgtcctggagatgtcatcctggctattgacggctttgggacagagtccatgactcatgctgatgcgcaggacaggattaaagcagcagctcaccagctgtgtctcaaaattgacaggggagaaactcacttatggtctccacaagtatctgaagatgggaaagcccatcctttcaaaatcaacttagaatcagaaccacaggacgggaactactttgaacacaagcataatattcggcccaaacctttcgtgatcccgggccgaagcagtggatgcagcactccctccgggattgactgtggcagtggacgcagcaccccttcttctgtcagtactgttagtaccatttgcccaggtgacttgaaagttgcggctaagctggcccctaacattcctttggaaatggaacttcctggtgtgaagattgtacatgctcagtttaatacacctatgcagttgtactcagatgacaatattatggaaacactccagggtcaggtttcaacagccctaggggaaacacctttgatgaacgagcccacagcctcggtgccccccgagtcggacgtgtaccggatgctccacgacaatcggaatgagcccacacagcctcgccagtcgggctccttcagagtgctccagggaatggtggacgatggctctgatgaccgtccggctggaacgcggagtgtgagagctccggtgacgaaagtccatggcggttcaggcggggcacagaggatgccgctctgtgacaaatgtgggagtggcatagttggtgctgtggtgaaggcgcgggataagtaccggcaccctgagtgcttcgtgtgtgccgactgcaacctcaacctcaagcaaaagggctacttcttcatagaaggggagctgtactgcgaaacccacgcaagagcccgcacaaagcccccagagggctatgacacggtcactctgtatcccaaagcttaagtctctgcaggcgtggcacgcacgcacgcacccacccacgcgcacttacacgagaagacattcatggctttgggcagaaggattgtgcagattgtcaactccaaatctaaagtcaaggctttagacctttatcctattgtttattgaggaaaaggaatgggaggcaaatgcctgctatgtgaaaaaaacatacacttagctatgttttgcaactctttttggggctagcaataatgatatttaaagcaataattttttgtatgtcatactccacaatttacatgtatattacagccatcaaacacataaacatcaagatatttgaaggactctaattgtctttccttgacaagttgattttgcaattgtggtaaatagcaaataacaatcttgtattctaacataatctgcagttgtctgtatgtgttttaactattacagtgcatgttagggagaaattccctgaatttctttagttttgtattcaaacaattatgccactcgatgcaacaaacataataaatacataaaggatttaaaaaaaaaaaaaaaaaaaa

SEQ ID NO: 1923 - DNA, 1722 bp, Homo sapiens; identical to SEQ ID NO: 1922

SEQ ID NO: 1924 - DNA, 2175 bp, Homo sapiens
gagaaattggagaagataaaactggacactggggagaccacaacttcatgctgcgtgggatctcccagctacctgcagtggccaccatgtcttgggtcctgctgcctgtactttggctcattgttcaaactcaagcaatagccataaagcaaacacctgaattaacgctccatgaaatagtttgtcctaaaaaacttcacattttacacaaaagagagatcaagaacaaccagacagaaaagcatggcaaagaggaaaggtatgaacctgaagttcaatatcagatgatcttaaatggagaagaaatcattctctccctacaaaaaaccaagcacctcctggggccagactacactgaaacattgtactcacccagaggagaggaaattaccacgaaacctgagaacatggaacactgttactataaaggaaacatcctaaatgaaaagaattctgttgccagcatcagtacttgtgacgggttgagaggatacttcacacatcatcaccaaagataccagataaaacctctgaaaagcacagacgagaaagaacatgccgtctttacatctaaccaggaggaacaagacccagctaaccacacatgtggtgtgaagagcactgacgggaaacaaggcccaattcgaatctctagatcactcaaaagcccagagaaagaagactttcttcgggcacagaaatacattgatctctatttggtgctggataatgccttttataagaactataatgagaatctaactctgataagaagctttgtgtttgatgtgatgaacctactcaatgtgatatataacaccatagatgttcaagtggccttggtaggtatggaaatctggtctgatggggataagataaaggtggtgcccagcgcaagcaccacgtttgacaacttcctgagatggcacagttctaacctggggaaaaagatccacgaccatgctcagcttctcagcgggattagcttcaacaatcgacgtgtgggactggcagcttcaaattccttgtgttccccatcttcggttgctgttattgaggctaaaaaaaagaataatgtggctcttgtaggagtgatgtcacatgagctgggccatgtccttggtatgcctgatgttccattcaacaccaagtgtccctctggcagttgtgtgatgaatcagtatctgagttcaaaattcccaaaggatttcagtacatcttgccgtgcacattttgaaagataccttttatctcagaaaccaaagtgcctgctgcaagcacctattcctacaaatataatgacaacaccagtgtgtgggaaccaccttctagaagtgggagaagactgtgattgtggctctcctaaggagtgtaccaatctctgctgtgaagccctaacgtgtaaactgaagcctggaactgattgcggaggagatgctccaaaccataccacagagtgaatccaaaagtctgcttcactgagatgctaccttgccaggacaagaaccaagaactctaactgtcccaggaatcttgtgaattttcacccataatggtctttcacttgtcattctactttctatattgttatcagtccaggaaacaggtaaacagatgtaattagagacattggctctttgtttaggcctaatctttctttttacttttttttttcttttttctttttttttaaagatcatgaatttgtgacttagttctgccctttggagaacaaaagaaagcagtcttccatcaaatcaccttaaaatgcacggctaaactattcagagttaacactccagaattgttaaattacaagtactatgctttaatgcttctttcatcttactagtatggcctataaaaaaaataataccacttgatgggtgaaggctttggcaatagaaagaagaatagaattcaggttttatgttattcctctgtgttcacttcgccttgctcttgaaagtgcagtatttttctacatcatgtcgagaatgattcaatgtaaatatttttcattttatcatgtatatcctatacacacatctccttcatcatcatatatgaagtttattttgagaagtctacattgcttacattttaattgagccagcaaagaaggcttaatgatttattgaaccataatgtcaataaaaacacaacttttgaggc

SEQ ID NO: 1925 - DNA, 2040 bp, Homo sapiens
ggccttaccaatcgcgaaaacccgccgttcgcgctctgaccagcccgcagagccagcccccgaccccgggccacctgggcccccgggttccgccggcactctcgccaccaccgcgtgggtctgacaagatgtaccaggtcccactaccactggatcgggatgggaccctggtacggctccgcttcaccatggtggccctggtcacggtctgctgtccacttgtcgccttcctcttctgcatcctctggtccctgctcttccacttcaaggagacaacggccacacactgtggggccacgccctgcaggatgttctctgcggcctcccagcctttggaccccgatgggaccttgttccggcttcgcttcacagccatggtctggtgggccatcacttttcctgtgttcggcttcttcttctgcatcatctggtccctggtgttccactttgagtacacggtggccactgactgtggggtgcccaattacctgccctcggtgagctcagccatcggcggggaggtgccccagcgctacgtgtggcgtttctgcatcggcctgcactcggcgcctcgcttcttggtggccttcgcctactggaaccactacctcagctgcacctccccgtgttcctgctatcgcccgctctgccgcctcaacttcggcctcaatgtcgtggagaacctcgcgttgctagtgctcacttatgtctcctcctccgaggacttcaccatccacgaaaatgctttcattgtgttcattgcctcatccctcgggcacatgctcctcacctgcattctctggcggttgaccaagaagcacacagtaagtcaggaggatcgcaagtcctacagctggaaacagcggctcttcatcatcaacttcatctccttcttctcggcgctggctgtctactttcggcacaacatgtattgtgaggctggagtgtacaccatctttgccatcctggagtacactgttgtcttaaccaacatggcgttccacatgacggcctggtgggacttcgggaacaaggagctgctcataacctctcagcctgaggaaaagcgattctgaacccttcagtcctgcttgggaggacgcagcccactgcccagaaacaagaaacacgataccattctggccttccccaccccacatcctctcttggccttactgaagatgggggaagggtaagaaggaagggtgtaggccaaggctcaccccagtgctgctggcttctcctctccacccctcatatgggcgtggggtcctcaaacatcacctttacctgagaggccccaagaagctgagctggcagagagctccaccatttggtgctaaaaaaaaaaacgtcctgaggttcatgaccaccatccagtttctggcctttacacagtcacctttcactgaggtcaggagcccctgagcagtggctgctccctgacaaccacagccatttctctgcacgggggtcattcataggactaatgtatttcatgatctactgtgcacatccaggcctgtggccacagtcccctgctaaagttgctcaggtgttctagtcctgacttcacctttttgatttggtgtgtgccctagggtatgtacccttccccatctgagcctcggtgtgtccatgtgtctggcgggggatgggtggactgtatgatttccaaggactctaccagtcagtggttctgatgtcatcgggtggaggtggtgttctatacctaaaggatgacctgctccagaaacagcaccagcacagcatgtattttcttctcttctgaaagttctggcttgtagacccctcccctcctttgcaaaggtatgggatagaggggtcagatgcagatctctactgtaaaatgggctccctggtatctcctgtcttccctactgctccaaaccctaaattttggttgtacattttattttgaaaggaaaataaattttttttttgggccaacaaaaaaaaaaaaaaaaaaaaaaaaaaaaaaaaaaaaaaaaaaaaaaaaaaaaaaaaaaaaaaaaaaaa

SEQ ID NO: 1926 - DNA, 945 bp, Homo sapiens
atgagtgagaacgccgcaccaggtctgatctcagagctgaagctggctgtgccctggggccacatcgcagccaaagcctggggctccctgcagggccctccagttctctgcctgcacggctggctggacaatgccagctccttcgacagactcatccctcttctcccgcaagacttttattacgttgccatggatttcggaggtcatgggctctcgtcccattacagcccaggtgtcccatattacctccagacttttgtgagtgagatccgaagagttgtggcagccttgaaatggaatcgattctccattctgggccacagcttcggtggcgtcgtgggcggaatgtttttctgtaccttccccgagatggtggataaacttatcttgctggacacgccgctctttctcctggaatcagatgaaatggagaacttgctgacctacaagcggagagccatagagcacgtgctgcaggtagaggcctcccaggagccctcgcacgtgttcagcctgaagcagctgctgcagaggttactgaagagcaatagccacttgagtgaggagtgcggggagcttctcctgcaaagaggaaccacgaaggtggccacaggtctggttctgaacagagaccagaggctcgcctgggcagagaacagcattgacttcatcagcagggagctgtgtgcgcattccatcaggaagctgcaggcccatgtcctgttgatcaaagcagtccacggatattttgattcaagacagaattactctgagaaggagtccctgtcgttcatgatagacacgatgaaatccaccctcaaagagcagttccagtttgtggaagtcccaggcaatcactgtgtccacatgagcgaaccccagcacgtggccagtatcatcagctccttcttacagtgcacacacatgctcccagcccagctgtag

SEQ ID NO: 1927 - DNA, 1759 bp, Homo sapiens
ggcacgagaaaattcatgcgagggagacgtggtgggcggtccttcctgtgacacgacccttgagtgacagttctatttgattgcctccggtactgtgaggaaaggacacgactctatggtgaggactgatggacatacattatctgagaaaagaaactaccaggtgacaaacagcatgtttggtgcttcaagaaagaagtttgtagagggggtcgacagtgactaccatgacgaaaacatgtactacagccagtcttctatgtttccacatcggtcagaaaaagatatgctggcatcaccatctacatcaggtcagctgtctcagtttggggcaagtttatacgggcaacaaagtgcactaggccttccaatgagggggatgagcaacaatacccctcagttaaatcgcagcttatcacaaggcactcagttaccgagccacgtcacgccaacaacaggggtaccaacaatgtcacttcacacgcctccatctccaagcaggggtattttgcctatgaatcctaggaatatgatgaaccactcccaggttggtcagggcattggaattcctagcaggacaaatagcatgagcagttcagggttaggtagccccaacagaagctcgccaagcataatatgtatgccaaagcagcagccttctcgacagccttttactgtgaacagtatgtctggatttggaatgaacaggaatcaggcatttggaatgaataactccttatcaagtaacatttttaatggaacagacggaagtgaaaatgtgacaggattggacctttcagatttcccagcattagcagaccgaaacaggagggaaggaagtggtaacccaactccattaataaaccccttggctggaagagctccttatgttggaatggtaacaaaaccagcaaatgaacaatcccaggacttctcaatacacaatgaagattttccagcattaccaggctccagctataaagatccaacatcaagtaatgatgacagtaaatctaatttgaatacatctggcaagacaacttcaagtacagatggacccaaattccctggagataaaagttcaacaacacaaaataataaccagcagaaaaaagggatccaggtgttacctgatggtcgggttactaacattcctcaagggatggtgacggaccaatttggaatgattggcctgttaacatttatcagggcagcagagacagacccaggaatggtacatcttgcattaggaagtgacttaacaacattaggcctcaatctgaactctcctgaaaatctctaccccaaatttgcgtcaccctgggcatcttcaccttgtcgacctcaagacatagacttccatgttccatctgagtacttaacgaacattcacattagggataagctggctgcaataaaacttggccgatatggtgaagaccttctcttctatctctattacatgaatggaggagacgtattacaacttttagctgcagtggagctttttaaccgtgattggagataccacaaagaagaacgagtatggattaccagggcaccaggcatggagccaacaatgaaaaccaatacctatgagaggggaacatattacttctttgactgtcttaactggaggaaagtagctaaggagttccatctggaatatgacaaattagaagaacggcctcacctgccatccaccttcaactacaaccctgctcagcaagccttctaaaaaaaaaaaaaaaaaaaaaaa

SEQ ID NO: 1928 - DNA, 1465 bp, Homo sapiens
ctggggtgagggctgtaagtggcgcgattcgcggcagcgccccgatggaacctcctggtcctgtgagggggcccttgcaagattccagctggtatgagccttctgcagagctagtgcagactaggatggctgtatcactaacagcagctgaaactctggcccttcagggtacacagggacaagagaagatgatgatgatgggaccaaaggaagaggaacagtcttgtgagtatgagaccaggctacctgggaaccactctaccagtcaagagatcttccgccaacgcttcaggcatctccgctaccaggagactcctggtccccgggaggccttgagccaactacgagtactctgctgtgagtggctgaggccagagaaacacacgaaggagcagatcctggagttcctggtgctggaacaattcttgaccatcctgcctgaggagctccaatcctgggtgcggggacatcaccctaagagtggagaggaggctgtgactgtgctggaggatttagagaaaggacttgaaccagagccgcaggtcccaggccctgcacatggacctgcacaggaagagccatgggagaagaaggaatctctgggagcagcccaggaagcactgagcatccagctccagcctaaggagacccagcctttcccaaagagtgaacaggtatatttacattttctgtcagttgttacagaagatggcccagagcccaaggacaaaggatcattgccacaaccacccattactgaagtggaatcacaggtgttctcagaaaaacttgctactgacacctctacatttgaagctacctctgagggtaccttagaactgcagcagagaaatcccaaagcggagagactgaggtggtcccctgcccaggaggaaagtttcaggcagatggttgtcatccataaggaaattcccacagggaagaaagaccatgaatgtagtgaatgtggtaaaaccttcatttataactcacatcttgttgtccaccagagagttcattctggagagaaaccctataagtgtagtgactgtgggaaaactttcaaacagagctcaaacctcggtcagcatcagagaattcatacaggagagaaacccttcgaatgtaatgaatgtgggaaggccttcagatggggtgctcatcttgttcagcatcagaggattcactcaggagagaagccctatgagtgtaatgagtgtgggaaggcctttagtcaaagctcatatctaagtcagcatcggagaattcacagtggagagaaaccttttatatgtaaagaatgtgggaaagcttatggatggtgctcagagctcattagacatcggagagttcatgccagaaaagagccttcccattgaattgaaggggagaacgtctccagacagaattctacatcggtctaatctactttaggactggatcccataaaagttataagttcctt

SEQ ID NO: 1929 - DNA, 4603 bp, Homo sapiens
ctggtggtccagtacctccaaagatatggaatacactcctgaaatatcctgaaaacttttttttttcagaatcctttaataagcagttatgtcaatctgaaagttgcttacttgtactttatattaatagctattcttgtttttcttatccaaagaaaaatcctctaatccccttttcacatgatagttgttaccatgtttaggcattagtcacatcaacccctctcctctcccaaacttctcttcttcaaatcaaactttattagtccctcctttataatgattccttgcctcgttttatccagatcaattttttttcactttgatgcccagagctgaagaaatggactactgtataaattattcattgccaagagaataattgcattttaaacccatattataacaaagaataatgattatattttgtgatttgtaacaaataccctttattttcccttaactattgaattaaatattttaattatttgtattctctttaactatcttggtatattaaagtattatcttttatatatttatcaatggtggacacttttataggtactctgtgtcatttttgatactgtaggtatcttatttcatttatctttattcttaatgtacgaattcataatatttgattcagaacaaatttatcactaattaacagagtgtcaattatgctaacatctcatttactgattttaatttaaaacagtttttgttaacatgcatgtttagggttggcttcttaataatttcttcttcctcttctctctctcctcttcttttggtcagtgttgtgcgggttaatacaacaaactgtaacaagtgtacctggtatggacttgttgtccgggacgtacattttcgcggtcctgctagcatgcgtggtgttccactctggcgcccaggagaaaaactacaccatccgagaagaaatgccagaaaacgtcctgataggcgacttgttgaaagaccttaacttgtcgctgattccaaacaagtccttgacaactgctatgcagttcaagctagtgtacaagaccggagatgtgccactgattcgaattgaagaggatactggtgagatcttcactactggcgctcgcattgatcgtgagaaattatgtgctggtatcccaagggatgagcattgcttttatgaagtggaggttgccattttgccggatgaaatatttagactggttaagatacgttttctgatagaagatataaatgataatgcaccattgttcccagcaacagttatcaacatatcaattccagagaactcggctataaactctaaatatactctcccagcggctgttgatcctgacgtaggaataaacggagttcaaaactacgaactaattaagagtcaaaacatttttggcctcgatgtcattgaaacaccagaaggagacaagatgccacaactgattgttcaaaaggagttagatagggaagagaaggatacctacgtgatgaaagtaaaggttgaagatggtggctttcctcaaagatccagtactgctattttgcaagtgagtgttactgatacaaatgacaaccacccagtctttaaggagacagagattgaagtcagtataccagaaaatgctcctgtaggcacttcagtgacacagctccatgccacagatgctgacataggtgaaaatgccaagatccacttctctttcagcaatctagtctccaacattgccaggagattatttcacctcaatgccaccactggacttatcacaatcaaagaaccactggatagggaagaaacaccaaaccacaagttactggttttggcaagtgatggtggattgatgccagcaagagcaatggtgctggtaaatgttacagatgtcaatgataatgtcccatccattgacataagatacatcgtcaatcctgtcaatgacacagttgttctttcagaaaatattccactcaacaccaaaattgctctcataactgtgacggataaggatgcggaccataatggcagggtgacatgcttcacagatcatgaaatccctttcagattaaggccagtattcagtaatcagttcctcctggagactgcagcatatcttgactatgagtccacaaaagaatatgccattaaattactggctgcagatgctggcaaacctcctttgaatcagtcagcaatgctcttcatcaaagtgaaagatgaaaatgacaatgctccagttttcacccagtctttcgtaactgtttctattcctgagaataactctcctggcatccagttgacgaaagtaagtgcaatggatgcagacagtgggcctaatgctaagatcaattacctgctaggccctgatgctccacctgaattcagcctggattgtcgtacaggcatgctgactgtagtgaagaaactagatagagaaaaagaggataaatatttattcacaattctggcaaaagataacggggtaccacccttaaccagcaatgtcacagtctttgtaagcattattgatcagaatgacaatagcccagttttcactcacaatgaatacaacttctatgtcccagaaaaccttccaaggcatggtacagtaggactaatcactgtaactgatcctgattatggagacaattctgcagttacgctctccattttagatgagaatgatgacttcaccattgattcacaaactggtgtcatccgaccaaatatttcatttgatagagaaaaacaagaatcttacactttctatgtaaaggctgaggatggtggtagagtatcacgttcttcaagtgccaaagtaaccataaatgtggttgatgtcaatgacaacaaaccagttttcattgtccctccttccaactgttcttatgaattggttctaccgtccactaatccaggcacagtggtctttcaggtaattgctgttgacaatgacactggcatgaatgcagaggttcgttacagcattgtaggaggaaacacaagagatctgtttgcaatcgaccaagaaacaggcaacataacattgatggagaaatgtgatgttacagaccttggtttacacagagtgttggtcaaagctaatgacttaggacagcctgattctctcttcagtgttgtaattgtcaatctgttcgtgaatgagtcggtgaccaatgctacactgattaatgaactggtgcgcaaaagcactgaagcaccagtgaccccaaatactgagatagctgatgtatcctcaccaactagtgactatgtcaagatcctggttgcagctgttgctggcaccataactgtcgttgtagttattttcatcactgctgtagtaagatgtcgccaggcaccacaccttaaggctgctcagaaaaacaagcagaattctgaatgggctaccccaaacccagaaaacaggcagatgataatgatgaagaaaaagaaaaagaagaagaagcattcccctaagaacttgctgcttaattttgtcactattgaagaaactaaggcagatgatgttgacagtgatggaaacagagtcacactagaccttcctattgatctagaagagcaaacaatgggaaagtacaattgggtaactacacctactactttcaagcccgacagccctgatttggcccgacactacaaatctgcctctccacagcctgccttccaaattcagcctgaaactcccctgaattcgaagcaccacatcatccaagaactgcctctcgataacacctttgtggcctgtgactctatctccaagtgttcctcaagcagttcagatccctacagcgtttctgactgtggctatccagtgacgaccttcgaggtacctgtgtccgtacacaccagaccggtaggtatccaagtttctaacacaactttctaactatttttttattattattttcagttgatgtagaactttacaaaatctattgacttcaaagagggatcaaaacaatcatattctacagatgtacccaatagatatatggattcaattaagtttggtagaagatgagaacaaaataactactgatttaggaaaattggatgcagaataataattatagtaggggcaattttgtctgtagatggcagtatgacaattcttgctagagaatatattgaaaaaaacttcaacacaaagggttgtagcactgtcctcagtaccattgtgtgcatgaggatcagaatagtctgggctagatacatcacattaaagcttttcagaatctgataaatagctctaaatactaatgatattgagaagcctagcttcacttgggaaaatctgtggctgttcacagaaattcagcaccaagttattccccccatactctaccaggccttcaggtcctcataaagaaaagtgtcgttttcagattaggaactcaaaattattttggtgcatcaaatctacagtcacacaatataacaagaatgggattagaaaaatgaaagcctactcattctcatctttaagccagagaatgaaatatatatgaggtctctggatagctatttaaatatttgcatatttatgcaaggtattttgagcccttcagaagacattct

SEQ ID NO: 1930 - DNA, 1932 bp, Homo sapiens
atggatgatattgctgataggatgaggatggatgctggagaagtgactttagtgaaccacaactccgtattcaaaacccacctcctgccacaaacaggttttccagaggaccagctttcgctttctgaccagcagattttatcttccaggcaaggacatttggaccgatcttttacatgttccacaagaagtgcagcttataatccaagctattactcagataatccttcctcagacagttttcttggctcaggcgatttaagaacctttggccagagtgcaaatggccaatggagaaattctaccccatcgtcaagctcatctttacaaaaatcaagaaacagccgaagtctttacctcgaaacccgaaagacctcaagtggattatcaaacagttttgcgggaaagtcaaaccatcactgccatgtatctgcatatgaaaaatcttttcctattaaacctgttccaagtccatcttggagtggttcatgtcgtcgaagtcttttgagccccaagaaaactcagaggcgacatgttagtacagcagaagagacagttcaagaagaagaaagagagatttacagacagctgctacagatggtcacagggaaacagtttactatagccaaacccaccacacattttcctttacacctgtctcgatgtcttagttccagtaaaaatactttgaaagactcactgtttaaaaatggaaactcttgtgcatctcagatcattggctctgatacttcatcatctggatctgccagcattttaactaaccaggaacagctgtcccacagtgtatattccctatcttcttataccccagatgttgcatttggatccaaagattctggtactcttcatcatccccatcatcaccactctgttccacatcagccagataacttagcagcttcaaatacacaatctgaaggatcagactctgtgattttactgaaagtgaaagattcccagactccaactcccagttctactttcttccaggcagagctgtggatcaaagaattaactagtgtttatgattctcgagcacgagaaagattgcgccagattgaagaacagaaggcattggccttacagcttcaaaaccagagattgcaggagcgggaacattcagtacatgattcagtagaactacatcttcgtgtacctcttgaaaaggagattcctgttactgttgtccaagaaacacaaaaaaaaggtcataaattaactgatagtgaagatgaatttcctgaaattacagaggaaatggagaaagaaataaagaatgtatttcgtaatgggaatcaggatgaagttctcagtgaagcatttcgcctgaccattacacgcaaagatattcaaactctaaaccatctgaattggctcaatgatgagatcatcaatttctacatgaatatgctgatggagcgaagtaaagagaagggcttgccaagtgtgcatgcatttaatacctttttcttcactaaattaaaaacggctggttatcaggcagtgaaacgttggacaaagaaagtagatgtattttctgttgacattcttttggtgcccattcacctgggagtacactggtgtctagctgttgtggactttagaaagaagaatattacctattacgactccatgggtgggataaacaatgaagcctgcagaatactcttgcaatacctaaagcaagaaagcattgacaagaaaaggaaagagtttgacaccaatggctggcagcttttcagcaagaaaagccagattcctcagcagatgaatggaagtgactgtgggatgtttgcctgcaaatatgctgactgtattaccaaagacagaccaatcaacttcacacagcaacacatgccatacttccggaagcggatggtctgggagatcctccaccgaaaactcttgtga

SEQ ID NO: 1931 - DNA, 3875 bp, Homo sapiens
ggggaagggcagatggaggagggattgtaatggcggcagccggcagctccctgctctgacccacggcaggcacacagcaacgaccccttccccgcccctctcccggccggcctccgccccgcagccagcgcggggccaccctctccggcccttcccccagctgtcggcgtctcgccctgcgccccggccggggccccacacacaatggacgagcttgccggaggcggtggtggcggcccggggatggcggcccctccccggcagcagcagggacctggggggaacctgggcctttcgcccggggggaacggagcggcgggcggcgggggtcctccggcctccgagggagcgggtcccgcggcaggccccgagctgtcccggccgcagcagaacactatcccggggatactgcactacatccagcacgagtgggctcggttcgagatggagcgggcgcactgggaggtggaacgggccgaactgcaggcccggattgcatttctacaaggcgaaagaaaaggtcaagagaacctgaagaaggacttagtaagaagaataaagatgttagagtatgcattaaaacaagaaagggcaaaatatcacaaattaaaatatggcacggaactgaaccaaggtgacttgaaaatgccaacctttgagtcagaagaaaccaaagacacagaggctcccacagcacctcagaatagccagttaacgtggaagcaaggcagacagcttttaagacagtatcttcaggaagtaggttatacagatacaatattagatgtccggtctcagcgggtaaggtcattacttggactatctaattcagaaccaaatggatcagtagaaacaaagaatttagaacagatcctgaatggaggtgaatctcctaagcaaaagggacaagaaataaaaaggtcctctggtgatgttcttgagacgttcaatttcttagaaaatgccgatgacagtgatgaagatgaggaaaatgacatgatcgaaggcatcccagaaggaaaagacaaacatcggatgaataaacataaaataggtaatgaaggtttagctgctgacctaactgacgatcctgatactgaggaagcactgaaagaatttgattttttagtgactgctgaagatggtgaaggagctggagaagcacggagttcgggggatggcacagaatgggctgaaccaataacgtttccatctggaggaggcaagtcatttattatgggttctgatgatgttttgttaagtgtactgggccttggagaccttgcagacttgacggtaacaaatgatgcagactatagttatgatttgcctgctaataaagatgcctttcgaaagacatggagtcccaagtatacactacgtagccattttgatggagtacgggcattagcttttcatcctgtagaacctgtgctggttactgcttctgaggaccataccctgaaactttggaacctgcaaaaaacagttcctgccaaaaagagtgcctctttagatgtagagcctatctacacatttagggcccacatcggccctgttctgtcattagctattagttctaatggagaacagtgttttagtggtggtattgatgcaaccatccagtggtggaatatgccgagtcccagtgtagatccatatgatacatatgagccaaatgttctagctggcactttagttggtcatacagatgcagtttggggtcttgcttatagtggcataaaaaatcaattactgtcttgttcagcagatggcactgttaggttatggaatccacaagaaaaattgccatgtatttgcacttacaatggagataaaaagcatggaatacctacatcagttgactttataggctgtgatccagctcatatggtaacctctttcaacactggtagtgcagtaatttatgatttagaaacatcacagtcattggtgatactttcatcacaggtagattctggtttacaatctaataatcatatcaacagagtagtaagtcatcccacacttcctgttacaataactgctcatgaagatagacacatcaaattttttgacaataaaacgggtaaaatgatccattctatggtagctcacttggatgctgttacaagtctagcagtagatcctaatggaatctatttgatgtctggaagccatgactgttccatcagattatggaatttagacagcaagacatgtgtgcaagaaataacagctcacagaaagaaattggatgaatcaatttatgatgttgctttccactcgtcaaaagcatatatagctagtgcaggagctgatgctcttgccaaagtatttgtatgaatcaacaaaaacttgcatcgtaacaagatttgcttggacagaaagagggtctgcatcactgccatcagaaaggttactgatatgacactacatgtgatctgcctggtgaaggctatctggggcaggcacaaattggtggaaatcacatcttaatgtcaagctcattaagttaactgtaattactgtattttgtgggacaaagaaaaaaggactccagtatttgtggcctgtactggatgtgaactgagcgtatatctgtttttaggtgtctttaagccaatgtggagtctgatctttcaaaaaagttttttttttctcttcttcttcttcttttttttttttttttttttttttttttggactctgtgtgctgccttaggggttaggaatgtggtgctcttgttgggggaagtgagctccaagagtagctttttttcatctcttagtgatcttctgtttatcggttgaatgccacagattcccttttaaacttattttgctttaaaaaaaaaaaaaaaagaaaaagaaaatttaacttaaaatattttagcattagttgcacaaaatgtttggataaaattctagtttttataagtctttttatatatttagcctgtcacaacagtgctcaagattgtattgaagtttttctgcattatacaaccctaaaacacagagatctcactgacccgttgccctgtaaccactttctttccttcttttgcctaatacagctcagctaagtccttccataaagatgctaaataactttcatcatcacataaatgtcttcataaaccaaggactattaagtgtattaaaatgaaacagtggggtttagtactccaaatgaactcttaaagaaaaaaactaatcttggcatcctatcactatgtgatattttgtacatcttactgtattcacaagtttatttatcaaggattatccatcttgctaatggcctattatttatttcactttttgttggtctttatatccttttattaatgtgctaaaggaacctgtatatctattttggaactctttgaatagtctaaaatagactaaaaatggagtattttatagtttaaattacaaaccaaggtggttccccctaagatatatatcttggtttaccatgattccaaacaaaactaacttgtttaaaaatatttggagtaaagttttatttgcattacaaataggatacaaaaatagttgaatcaggatacagaaatctgctgtgttttgactagttatccctgttttatttttttagatgtgcttaatttatggtgtaactaaagattttgtttgtgtaatgcatgattaagacaataaagtattttttctagtcttccgagaaacttttctgatcagtttgcgagttttgatgagttttgtaaggtttttgttttacaaactatgaatcagcaaatttttaagattgtaccacatagcaaacatacagctgttgaaaaataatgtatataaaatgcatataataaatattaaattgtgtacctgta

SEQ ID NO: 1932 - DNA, 970 bp, Homo sapiens
agcagcgctccctccgcttccggccgagcccgcgccccccagaccccgagagctcgcagctccggcccggcggcgatggcgcggagcgtgcgcgtgctggtggacatggacggcgtcctggccgacttcgaggccggcctcctgcggggcttccgccgccgcttccctgaggagccgcacgtgccgctggagcaacgccgcggcttcctggcccgcgagcagtaccgcgccctgcggcccgacctggcggataaagtggccagtgtgtacgaagccccgggctttttcctggacctggagcccatcccgggagccttggacgctgtgcgggagatgaacgacctaccggacacgcaggtcttcatctgcaccagccccctgctgaagtaccaccactgtgtgggtgagaagtaccgctgggtggagcagcacctggggccccagttcgtagaacgaattatcctgacaagggacaagacggtggtcttgggggacctgctcattgatgacaaggacacagttcgaggccaggaggagaccccaagctgggagcacatcttgttcacctgctgccacaatcggcacctggtcctgcccccgacaaggagacggctgctctcctggagtgacaactggagggagatcttagatagcaagcgcggagctgcgcagcgggaatgagcggggatgccgcgggcagcagctggagctaaaggaagggcaggcccacaggggccaccgcagagccgagtcggggcggcatcgtgctggtgcctctggccccgtggagtggagcaggcagacaccgttaagcgctgtgctaccgggccccaggcccagccacccggtacctcccgagaggctgtccctggaccctggctggcatggaaatacagtgggaaaaccagtcgggacctttaataaaagaccttggctttctaaaaaaaaaaaaaaaaaaaaaaaaaaaaaa

SEQ ID NO: 1933 - DNA, 2172 bp, Homo sapiens
cgtctctccgtgaaccccgtgagcggtgtgcagccaccatgttcagctggctgaagcggggcggggcacggggccagcagcccgaggccatccgcacggtgacctcggccctcaaggagctgtaccgcacgaagctgctgccgctggaggagcactaccgctttggggccttccactcgccggccctggaggacgcagacttcgacggcaagcccatggtgctggtggccggccagtacagcacgggcaagaccagcttcatccagtacctgctggagcaggaggtgcccggctcccgcgttgggcctgagcccaccaccgacttctttgtggccgtcatgcacggggacactgagggcaccgtgcccggcaacgccctcgtcgtggacccggacaagcccttccgcaaactcaaccctttcggaaacaccttcctcaacaggttcatgtgtgcccagctccctaatcaggtcctggagagcatcagcatcatcgacaccccgggtatcctgtcgggtgccaagcagggagtgagccgcggctacgacttcccggccgtgctgcgctggttcgcggagcgcgtggacctcatcatcctgctctttgatgcgcacaagctggagatctcggacgagttctcagaggccatcggcgcgttgcggggccatgaggacaagatccgcgtggtgctcaacaaggccgacatggtggagacgcagcagctgatgcgcgtctacggcgcgctcatgtgggcgctgggcaaggtggtgggcacgcccgaggtgctgcgcgtctacatcggctccttctggtcccagcccctcctcgtgcccgacaaccggcgcctcttcgagctggaggagcaggacctcttccgcgacatccagggcctgccccggcacgcagccttgcgcaagctcaacgacctggtgaagagggcccggctggtgcgagttcacgcttacatcatcagctacctgaagaaggagatgccctctgtgtttgggaaggagaacaagaagaagcagctgatcctcaaactgcccgtcatctttgcgaagattcagctggaacatcacatctcccctggggactttcctgattgccagaaaatgcaggagctgctgatggcgcacgacttcaccaagtttcactcgctgaagccgaagctgctagaggcactggacgagatgctgacgcacgacatcgccaagctcatgcccctgctgcggcaggaggagctggagagcaccgaggtgggcgtgcaggggggcgcttttgagggcacccacatgggcccgtttgtggagcggggacctgacgaggccatggaggacggcgaggagggctcggacgacgaggccgagtgggtggtgaccaaagacaagtccaaatacgacgagatcttctacaacctggcgcctgccgacggcaagctgagcggctccaaggccaagacctggatggtggggaccaagctccccaactcagtgctggggcgcatctggaagctcagcgatgtggaccgcgacggcatgctggatgatgaggagttcgcgctggccagccacctcatcgaggccaagctggaaggccacgggctgcccgccaacctgccccgtcgcctggtgccaccctccaagcgacgccacaagggctccgccgagtgagccgggcccccctcccatggccctgctgtggctccccagctccagtcggctgcacgcacacccctgctccggctcacacacgccctgcctgccctccctgcccagctgtaaggaccgggggtctccctcctcactaccgccagacaccccggtggaagcatttagaggggaccacgggagggacaaggcttctctgtccgcccttcacacctccagcctcacgttcacttaggcacatcacacacacactggcacacgcaggcatccatccatccgtcattcattcaaatattattgagcacctactatgtgcccagccctgttctaggcactgggcattaccatagagaacaaaatagacaaatacatctgccctcatggaaggtgacgttcccggagagggcacctacacagtcacgcaaacacacactaattcctggcaggcccccgcccctcccctggctgagcagccctgtggctgaaatgactagcagataaacag

SEQ ID NO: 1934 - DNA, 1451 bp, Homo sapiens
aggggcgctccggccagtgattggctggaggtttgttaactattcatgagggggcgggccgagcggggcggcctttgttaagcagcgagggcgcgaccgcgggtactctgctgccggcttctcggagcggcgctgggcgaccagagcagggtcgagatgtcctacatcccgggccagccggtcaccgccgtggtgcaaagagttgaaattcacaagctgcgtcaaggtgagaacttaatcctgggtttcagcattggaggtggaatcgaccaggacccttcccagaatcccttctctgaagacaagacggacaagggtatttatgtcacacgggtgtctgaaggaggccctgctgaaatcgctgggctgcagattggagacaagatcatgcaggtgaacggctgggacatgaccatggtcacacacgaccaggcccgcaagcggctcaccaagcgctcggaggaggtggtgcgtctgctggtgacgcggcagtcgctgcagaaggccgtgcagcagtccatgctgtcctagcagccaccaccatctgcgactcctgcctgccgcctctctgtacagtaacgccacttccacactctgtccccatctggcttctgctgaccgctgggccccagctcagaagggctatagctggtcccagaggcctggcctggccttccttcccttctcccatccctggcctggggcctctgggaccagctttctctcctggacaccgaggattggaaataagggcctggagctgagtagtagccagtctgctgtgaccacaggctcaggtccgaccctgctgcttggccacagcagtggctgggcaagtgggaaccactatctcttgggagcccccaaaagctgggaaatgctggaggaaccaggcctttcccgcttttgcctggctgcagggttcggctccgcccctgccccccagccctcgtgtgtccacaccgcagtgcctctgcccctcgggggactggacacacatcctgccagaggcgctacgaagctttgcccagatgaagccaggtgggctccgcgttcactcccactctcccgaggggtgctggcctccccagggtttgccttcttacggatttagacgaggttcgaggctcacctatcagggcagctctcaggattgtcattttcctctttgcctgtgggtttaacttttgtatttttttaatcacaagtttgatacaaaatgtttttatcgtactctttggagatgcccattctacttttgaatttagcttttactaattcgcatctggaagctcagcaagtgcacaagccttactttggttaccgtggaaaccactgccgcccctccccgatgtggtgcgctcaataaaaatgctggaattcaaaaaaaaaaaaaaaaaaaaaaaaaaaaaaaaaaaaaaaaaaaaaaaaaaaaaaaaaaaaaaaaaaaa

SEQ ID NO: 1935 - DNA, 832 bp, Homo sapiens
cgccgctgcagctggggccatttgaggggagcccatggggcctgaaaggcatctgtcaggcgcccctgcccggatggcaacagtagttctaggaggagacaccatgggccctgagcgtatcttccccaatcagactgaggaactgggacatcagggcccttcagaaggcactggggattggagcagtgaggagcctgaggaagagcaggaggaaacggggtcgggcccagctggctactcctaccagcccctgaaccaagatcctgaacaagaggaggtggaactggcaccagtgggggatggagatgtagttgctgacatccaggatcgaatccaggccctggggcttcatttgccagacccaccattagagagtgaagatgaagatgaggagggagctacagcgttgaacaaccacagctctattcccatggacccagaacatgtagagctggtgaaaaggacaatggctggagtaagcctgcctgcgccaggggttcctgcctgggctcgggagatatctgatgcccagtgggaagatgtggtacagaaagccctccaagcccggcaggcatcccctgcctggaagtgaccacagtgagagctgccttatattcctacattccaggccagaaccagcacaggactgaacacatccctggttgtaatgtccatttccatcttccccgtctccctttccacatcaaggcacatcagacttctcagagacccactttattcagttctgtacatatggggacatcggtccaagcccaaccaccttagcatgtatcactctgtggagaataaagcacctatgtactgagccaaa

SEQ ID NO: 1936 - DNA, 470 bp, Homo sapiens
gggaccgctataaggccagtcggactgcgacatagcccatcccctcgaccgctcgcgtcgcatttggccgcctccctaccgctccaagcccagccctcagccatggcatgccccctggatcaggccattggcctcctcgtggccatcttccacaagtactccggcagggagggtgacaagcacaccctgagcaagaaggagctgaaggagctgatccagaaggagctcaccattggctcgaagctgcaggatgctgaaattgcaaggctgatggaagacttggaccggaacaaggaccaggaggtgaacttccaggagtatgtcaccttcctgggggccttggctttgatctacaatgaagccctcaagggctgaaaataaatagggaagatggagacacctctgggggtcctctctgagtcaaatccagtggtgggtaattgtacaataaattttttttggtcaaattt

SEQ ID NO: 1937 - DNA, 5676 bp, Homo sapiens
ggatccttgagggcactggtgcgactttcaggtgaggtcttagcagatgaaagcggctggctgtggcccgcgccagtagtgctttctgctccgcactcgccgtgagccaggtgtgcaaccggatttggggcgagggtcgcgctggctacctcgcatgcgcagagccggaagcccgctgaccggactacagctcccagaagagccttgtggaggccgcagacgcgaagccgctggcgccatcttgaaatctgatcctccatccccgaggctttgcgtctgcgcggccggccgctgctgctccgggagcccagtctgctaaaaggggaggacgttgaggacgcggcggctggcgggagagacagctggggagagacatggcagggtcggagcgcggcctgcgcctctgtcactcagcatcctcttaggcgtttccacgcccgccccctgcccgaggggcggggctgacggctctggtacccggagtcggcgcgcggggcaggggcgcgcccctgcagagtggggaccccactgggctgtgccatgctgaccggagaccaccgaggcgggagacagagcgcggcgaagagccattgagtggtcacccagtagccgccgccgccgccgcctcgggaagcttgccacccgctaggagggaagatgaaggagatttgcaggatctgtgcccgagagctgtgtggaaaccagcggcgctggatcttccacacggcgtccaagctcaatctccaggttctgctttcgcacgtcttgggcaaggatgtcccccgcgatggcaaagccgagttcgcttgcagcaagtgtgctttcatgcttgatcgaatctatcgattcgacacagttattgcccggattgaagcgctttctattgagcgcttgcaaaagctgctactggagaaggatcgcctcaagttctgcattgccagtatgtatcggaagaataacgatgactctggcgcggagatcaaggcggggaatgggacggttgacatgtccgtcttacccgatgcgagatactctgcactgctccaggaggacttcgcctattcagggtttgagtgctgggtggagaatgaggatcagatccaggagccacacagctgccatggttcagaaggccctggaaaccgacccaggagatgccgtggttgtgccgctttgcgggttgctgattctgactatgaagccatttgtaaggtacctcgaaaggtggccagaagtatctcctgcggcccttctagcaggtggtcgaccagcatttgcactgaagaaccagcgttgtctgaggttgggccacccgacttagcaagcacaaaggtacccccagatggagaaagcatggaggaagagacgcctggttcctctgtggaatctttggatgcaagcgtccaggctagccctccacaacagaaagatgaggagactgagagaagtgcaaaggaacttggaaagtgtgactgttgttcagatgatcaggctccgcagcatgggtgtaatcacaagctggaattagctcttagcatgattaaaggtcttgattataagcccatccagagcccccgagggagcaggcttccgattccagtgaaatccagcctacctggagccaagcctggccctagcatgacagatggagttagttccggtttccttaacaggtctttgaaacccctttacaagacacctgtgagttatcccttggagctttcagacctgcaggagctgtgggatgatctctgtgaagattatttgccgctccgggtccagcccatgactgaagagttgctgaaacaacaaaagctgaattcacatgagaccactataactcagcagtctgtatctgattcccacttggcagaactccaggaaaaaatccagcaaacagaggccaccaacaagattcttcaagagaaacttaatgaaatgagctatgaactaaagtgtgctcaggagtcgtctcaaaagcaagatggtacaattcagaacctcaaggaaactctgaaaagcagggaacgtgagactgaggagttgtaccaggtaattgaaggtcaaaatgacacaatggcaaagcttcgagaaatgctgcaccaaagccagcttggacaacttcacagctcagagggtacttctccagctcagcaacaggtagctctgcttgatcttcagagtgctttattctgcagccaacttgaaatacagaagctccagagggtggtacgacagaaagagcgccaactggctgatgccaaacaatgtgtgcaatttgtagaggctgcagcacacgagagtgaacagcagaaagaggcttcttggaaacataaccaggaattgcgaaaagccttgcagcagctacaagaagaattgcagaataagagccaacagcttcgtgcctgggaggctgaaaaatacaatgagattcgaacccaggaacaaaacatccagcacctaaaccatagtctgagtcacaaggagcagttgcttcaggaatttcgggagctcctacagtatcgagataactcagacaaaacccttgaagcaaatgaaatgttgcttgagaaacttcgccagcgaatacatgataaagctgttgctctggagcgggctatagatgaaaaattctctgctctagaagagaaagaaaaagaactgcgccagcttcgtcttgctgtgagagagcgagatcatgacttagagagactgcgcgatgtcctctcctccaatgaagctactatgcaaagtatggagagtctcctgagggccaaaggcctggaagtggaacagttatctactacctgtcaaaacctccagtggctgaaagaagaaatggaaaccaaatttagccgttggcagaaggaacaagagagtatcattcagcagttacagacgtctcttcatgataggaacaaagaagtggaggatcttagtgcaacactgctctgcaaacttggaccagggcagagtgagatagcagaggagctgtgccagcgtctacagcgaaaggaaaggatgctgcaggaccttctaagtgatcgaaataaacaagtgctggaacatgaaatggagattcaaggcctgcttcagtctgtgagcaccagggagcaggaaagccaagctgctgcagagaagttggtgcaagccttaatggaaagaaattcagaattacaggccctgcgccaatatttaggagggagagactccctgatgtcccaagcacccatctctaaccaacaagctgaagttacccccactggccgtcttggaaaacagactgatcaaggttcaatgcagataccttccagagatgatagcacttcattgactgccaaagaggatgtcagcatacccagatccacattaggagacttggacacagttgcagggctggaaaaagaactgagtaatgccaaagaggaacttgaactcatggctaaaaaagaaagagaaagtcagatggaactttctgctctacagtccatgatggctgtgcaggaagaagagctgcaggtgcaggctgctgatatggagtctctgaccaggaacatacagattaaagaagatctcataaaggacctgcaaatgcaactggttgatcctgaagacataccagctatggaacgcctgacccaggaagtcttacttcttcgggaaaaagttgcttcagtagaatcccagggtcaagaaatttcaggaaaccgaagacaacagttgctgctgatgctagaaggactagtagatgaacggagtcggctcaatgaggccttacaagcagagagacagctctatagcagtctggtgaagttccatgcccatccagagagctctgagagagaccgaactctgcaggtggaactggaaggggctcaggtgttacgcagtcggctagaagaagttcttggaagaagcttggagcgcttaaacaggctggagaccctggccgccattggaggtgcagctgcaggggatgacaccgaagatacaagcactgagttcactgacagtattgaggaggaggctgcacaccatagtcaccagcaactatagcttcagaagcatttttacttgcaagacgatggacacattccccttgggctttttgtaactgaaacgcaccacagaagacagggagtcatcgaagggctgctcggggaggtggcagggcggaggacctgcttgggaagaaactccaagaagattggaatgcttccaaagcaagaatctttctcagtgaaatctcattatacaaagagaaccttatgcaacctgacaaaccactgaggtcatggtgactcagtgatcagcagatggtacttcaacagcaatcccctgtcaaacctcagaacttgaggctgaaacattgcttccacccaccatcagtgaagatgtaactagcatgttacaagagtgaataatctggacttcagagattaagtcaccaatagtgatctcacaagcactcaccggaactcctataatgtctccactttgtccatgccatttagcaatctcatctcctaaatggactgtgcctatgattcttaaggagaaagtgaatcattggtagatatcctgcacaagcagctggactttccagtaatagctttcttggggctattaggaaaattaaacaagaaatgaggctttctgggtctgcctgtatgtcttctgcataagacaaagaagagacatcgaatcaaccaataagaagagcccaaataagcatcctcaaatcttttgggatttggcacttggggacatgagtagttgtctgggatacgtcatattctcaacagtttctttgtagtagtaggatcaccttcttataataggatcaccttcttgttgctatagctgtacccgaccttcccttctcccttgagtgcttgcatgagctccacttttccttttgcttgaacagcttctcctgagtcctccttaccgatggttgtgactttaattatatacatctctgtccctccagacagatccctctgtcctcactctctgatttcattgaggatcttgggtgagagagagggacctgcaggatgaacaaatgtctactctaagacagctagattgggaggttggctggtcactgatggttataatgactgtgggacaggattaacttcagaataaatgaacaggagacacagatatgaagaaagtttctgattgatatggtctgaagtactcctggtattgcaagtcatttgctctaattctcaattgtaggcaaactgatttgtaaatttgcttcttcagccttctttcctgtagcctagcatggagaatctgaccagaccccattttgagaaggtcagcctacactggaatgaactttttacattagggcatttgtatttccctcacaatacttgccacattacttggcataggagagatgcttagtgtaattataagttaacaagcctttggatcagggcttgactcatgatagacaaagtatatgcctgctggatggaagaatctcttgggcgagcaccatttttctttccatcacctttccttgaaaatatatcttcagctttgggtaggaggaatcttggtgtatgaaatcattgcaaatttacttcatcttttctggagtttgaagttgtgactctcctgctaccaattaaataaagcttactttgccat

SEQ ID NO: 1938 - DNA, 4246 bp, Homo sapiens
gatgagattgatgattctttctcctggaaaacctttcatcacagagattcatctcagcattaaagggcagtatttaaagtcagttggcaagcagtggaataagatttttgtaaagaaaccttgtgcagcatggattctctaccagatgaattttttgtgaggcatcctgctgtggaggatcagaggaaggaagaaactgagaataagctagaaaaatcatctggtcaactgaacaaacaggaaaatgacatacctactgatcttgtccctgttaacctactattagaagtgaagaagttattaaatgcaattaatactctaccaaaaggtgtggttcctcacattaagaagttcttacaagaagatttttccttccaaactatgcagagagaagttgcagctaacagccagaatggtgaggaaattgttcctgctttgactttacgtttcttgattacacagctagaagcagcacttaggaacattcaagctggcaattataccgcacaccagattaatattggttattatttgacattactgtttttatatggagtagcactcactgaaagaggaaagaaagaggattatacagaagctgagaataaatttctggtgatgaagatgatgatccaagaaaatgaaatttgtgaaaactttatgtctttagtttattttggacgtggtttactgcgatgtgctcaaaagagatataatggaggactgctagaatttcataaaagcttacaagaaattggagacaaaaatgaccattggtttgacatagatcctacagaagatgaagatttacctacaacttttaaagatcttcttaataattttatcaagacaactgaaagcaatataatgaagcagacgatttgtagttacctagattgtgaacgatcttgtgaagctgacattttgaagaacaccagttataagggattttttcagttaatgtgcagtaaaagttgctgtgtttatttccataaaatttgctggaaaaagttcaagaatttaaagtatccaggtgaaaatgatcagagttttagtgggaaaaaatgtttgaaggaaggatgtacaggtgacatggtaaggatgctgcaatgtgatgtacctggaattgttaaaattttgtttgaagttgtgagaaaggatgaatatatcaccattgaaaatttaggagcaagttatagaaagttgatatctctgaaaataactgatactgatataagaccgaagatcagtttaaaatttaatacaaaagatgaaatgcctatcttcaagcttgattataattatttctatcatctgcttcatataattattatttctggtactgacattgttcgacaaatatttgatgaggctatgccacctcctcttttgaaaaaagagcttcttatacacaagaatgtgctggaatcctactacaaccatctttggaccaatcatcctttgggtggatcatggcatctgctttatcctcctaacaaggagttaccgcaatccaaacagtttgacttatgcctcctgttagctcttataaaacatttaaatgtgttccctgcacccaaaaaaggatggaatatggaaccgccatcttctgacatctctaaatctgcagacatcctgagactgtgcaaatacagggatatcctccttagtgagattttgatgaatggtctcactgagtcacagttcaattcaatttggaaaaaagtttcagatattcttctgcgccttgggatgatgcaagaggatattgacaaagtgaaggagaatcccattgagaatatctcccttgattaccatcagctatctgtctacctaggcataccagtaccagaaatcatacagaggatgttatcctgctatcaacaaggaattgctctacagtcaataacaggcagtcagcgtattgaaatagaagagttacagaatgaggaagaagaactaagtccacctctcatggagtacaatataaatgtgaaatcacaccctgagatacagtttgcagaaattaataaagatgggacctcaatacccagtgaatcttcaacagaatctcttaaagatctccaggaagttaagagtaaacaaaggaaaaagaagaagactaagaataaaaagaataaagactcaaaagaagaccaagtcccatatgtggtagaaaaggaagagcagttgaggaaagaacaagcaaatccacactcagtcagtagacttataaaagatgatgcaagtgatgttcaagaggattctgcaatggaagacaagttctatagcctggatgaattgcatattctggacatgatagagcagggctcagctggcaaagtaactacagactatggagaaactgaaaaggaaaggcttgctcgtcaaaggcagctttataaattgcactatcagtgtgaagatttcaaaagacagttgagaacagtgacttttcggtggcaagaaaaccaaatgcagattaaaaagaaagacaaaattatcgcatctcttaatcaacaagttgcttttggaatcaataaggtttccaaattacagcgtcaaatccatgctaaagataatgaaatcaagaaccttaaagagcaactttctatgaaaagatctcagtgggaaatggaaaaacataatctggaaagcacaatgaaaacatacgtaagcaaactgaacgcagaaactagcagagctttaacagccgaggtgtatttcttacagtgtcgtagggattttggtttgcttcatctagagcagactgaaaaggaatgtctcaatcagcttgccagggtgactcacatggcagcaagcaacctagaatcacttcaattaaaggctgcggtagacagttggaatgccattgtggcagatgttagaaacaagattgcattcctcaggacacagtacaatgaacaaataaacaaagtcaagcaaggatttgccttgagtaccttgcctccagtccagcttcctcctccaccacccagtcctgagatactgatgcagcagttcttaggaagaccccttgtgaaagaatctttctttagacccatacttactgttcctcaaatgcctgcagtttgcccgggagtcgtctctgcaactggccaacctagagcccccctgatgactggcatagcctgggctctgccagcgcctgtgggagacgctgtgcctcccagtgcaggtctgcggagtgatccctccatcatgaattgggagagaattacagacaggctgaaaactgcctttccacagcaaaccagaaaggaacttacagatttcttacggaaattgaaggatgcttatggaaaatccttgtctgaactgacatttgatgaaattgtttgcaagatttcccagtttattgaccccaaaaagtctcagagtcaaggaaaatcagtgtcaaatgttaattgtgtttcacctagtcattctccatcacagcctgatgctgcccagcccccaaaaccagcctggaggccactcacttcacagggtcctgccacatgggaaggagccagtaatccagatgaggaagaggaagaagaagagccttgtgtgatctgtcatgagaatctgtctccagaaaatctttcagttttgccttgcgctcacaaattccatgctcagtgcattagaccatggttgatgcaacaggggacatgtccaacgtgcagactccacgttttgctaccagaagaattccctggtcaccccagccggcagttgcccaagatctgatacaaggtcggggtgtctatgcaaaggaagctcagttttcttttattatgagctgcttgtttgagtggtgtaaaactatgtgctcttcaatatagtgctaaagaagccagctaattttatcaaagcagcagccaaagaagtcaggacaaatcttcaggacttgtgaaatgaactgaaagagcttgaagcagatggaattttaatagttacactatatatgctcttagtaggtttttttcttgtagtggaaacataactgttagcatatttcttaggatgttttttcttgtctttttaaattcttatttcactcatcctttactctcccctcaagtattctacactttaatttcctgaaataaatttaaggaaaagggaaatagtaaagaagtaggaatgggtgcagcacaccagcatggcacatgaatacacatgtaactaacctgcacattgtgcacatgtaccctaaaacttaaagtataataataat

SEQ ID NO: 1939 - DNA, 4480 bp, Homo sapiens
cactttcccgctggaggcgcagaggatgccccttgagccagacctggagaaatagccccagggcccggcaggaggagccttggtggcgagaaaggaaatccaggctcccctttccttaaagccactgcagcagctgggaaggcgcccacagagcgggcgcgccaagcgggacgcgggagtcgcagagagggaccccgggcgcctgctgagctcagctggcagagtttgcaagtggcggagacccttcaggtggcatccctgagtcctgatgcctgactggatggaggcccaccagcttctgttcccatgaggtagaaaggccaagcttggtcttcagctggggaagaggccagaaacaaggcccccagtgaaataacccagatccattggcctgaggagcagagaaagggcaagaagtgaactgcagctgctggtaaccctcagaaaccttctccaagtgctattctcacagttctttaggaacactctgaagtgaagaacaatatgtaggaaaatgggaccaacttatgtgtgttctgagcctcaaaacccccttgttggcccaaagaagctcaccttcagtttgggagggctggtaagctccatcctttctcatggcctcagccaagcattgaacttgccctccccttctggccttggtgatcactttttcaggaagagtgagactgaggacccccaagtgttccatccctaaggaaagcttgggaaaccaagccccttccatcctctcccaagcaccccagccaagccccagagagccagtccggaatgatcccactatggccaagctctggttcaaattccagcggtacttccgccggaaacctgtgcgcttctttaccttcctggcactctacctgactgctgggagccttgtcttccttcactctggctttgtgggccagcccgctgtctcggggaaccaggcgaaccccgctgctgcaggaggcccagctgagggtgctgagctgtccttcttgggtgacatgcatctgggcagaggtttccgggacacaggtgaagcctcaagcattgctcgcaggtacggaccctggttcaagggcaaggatgggaatgagagagccaagcttggcgactacggtggagcctggagccgagccctcaaggggagggttgtccgggagaaggaggaagagcgagccaagtacatcggctgctacctggatgacacccagagtcgggcccttcgaggagtgtccttttttgactacaaaaagatgaccatcttccgttgccaggacaactgtgctgaacggggttacctgtatggcgggctggagttcggcgccgagtgctactgcggccacaagatccaggcgacgaacgtgagcgaggcagagtgcgacatggagtgcaagggcgagcgaggcagcgtgtgcggcggcgccaaccgcctctctgtctaccggctgcagctggcccaggagtcggcccgcaggtatggaagtgcagtgttccggggctgcttccgcaggcccgacaacctttccctggccttacccgtgacagctgccatgctgaacatgtctgtggacaaatgcgtggacttctgcactgagaaggagtacccgctggcagctcttgcaggcaccgcctgccactgtgggtttcccaccacccgattcccgctccatgacagagaggatgagcagctctgtgcccagaagtgcagcgcggaggagtttgagagctgcgggactcctagttacttcattgtgtaccagacacaagtccaaggtgagctaggcccttccccagtggaccccagatgcactcccagtggcttccctcccagacgtgttcctgccagtccatcccacacagcctgcagcaaggagaaaaccatgcaagccagagggcagggctgatgaactccaccaggcttagagttcctggatgggcaacagaaggaattcccagggtgggaagcgttctgatgacccatctctatccctcatcactgaggacccttggtggctcctgtagtgagactgaatgagaagagagactgagtctcccactggctgcaacacagattcactgtgttatcccggacaagtcatttcccctttctgggcctcagtttttccatctgtaaaatgaagctgtagactgttggcctccagtgttccttccaattctaagattttgtcattttatctataagttcttccttcttctctctccctgtctcactcatcctttccacttctagtcttcttcctttgctagcggaatccacacttactgttatctcctcttctgtctcctggggctaccagacatgatgataatgatggtgatgatgatgatgatgatgatgatggtgatgattatgatgatggtgatgatcataatgatggtgatgattatgacgatggtgatgatgataatggtgatgatagtgataagagtgacgctgatagtgctgatgatagtgatgatgaaagtgatgatgacgatgatggtgatgagaaggaggaagaggaggaggcagcaacacttggagtttcttgaggtcttactctgtgccagactcagtgttgcatccttcatatacatgttttcattaaatcccctcaactctctatgagttgggaacagtcattatgccctctttactgtggggcgggggaggggattgagactcagaacagttgaggaacttaccttaagtcatactgtttataaactttcccaataaaacccgtttctcctgaccgaggtatcatgaagggtgggtggcacttggatggggattggggggcatcccttgctaggacactcagcccaaaggaagcccctgaaggatcacctcaatatctgaatatattgaccatctactatgtaccagtccttatgccgagcctcatctcattcagtgatgtgaagtccacagtaaacctatgatcagggcagtatcatccccactttacagatgacagaactaaaattcagagagattgggaactggccacagttatacatctacaaaagcaatttgttttcaggtgtctgactccaaagcccctgctagaaacctttgcccatgctccagtgacactccccacagtctggagagccaagaaaacaccacttggctagacctcctccttctcatttcccagtcaccaagctgccatatgtggtagagcaggttgagcattgcactggcacagccaacagaaaaagtggtgcctaaaagccagccacatgttgtgtgccctggatggcagaacatctgtccagaggaaggagtgggcacctttttctgatttgcacaaaagtgctgtatgagctagtggcagccccaccaatagcctgtccctgtttgactgatggggtaccagtggtgatcaactgtggctgtttctatggtagctaaagtccttctgagagcctagtgagcatgtggctcttggacctatttacagtccgatggggaaggatgggtttttgttagctttcggggaagtgctggttagtctgtgcagagctgtgctgccttagcctgcaggggaaagtcatacacagattaattaccctgtgatcatgaatggctttgaggtggccagaacagacactggagccttttcaacgcagataacaattccctaattgatgaatttgctcattcccagtgccctacccccaggccattactagggcttccattttgccacgtcactcttgcagtttctacacactggggaggtttgacagttatgtggctcatcagcctgccaagagcctggcccaccaggactgacatttattgagcacctactgtgtgctaagccctgatgccccttatgggataattattgaacacttgctctgtgccaggctctgtcaaatcttttacctgccttaaatcatctaatcatccaaacagtccagttgcataagcactgttattaccattttacaaatgaggtaacttggcacagggaggttgagtaacttggccaaagtcaaacagctctgacatggcagtgtagggatgcaaacccaggcaatctaggtcccaagactgcactgtcaaccctagcttctcaaaatacattgtgaaaaattcacactcattatcccacataattgtgtaaggtttattagccctgttttataggtgaggaaactgaggcttagtgaggggaaagccttgttccatgtcacacaggtaggccatgacagttctggatggaaacccaggtcggtctgattccaaaactgcatataatactgcctgcaacagttgcttaatgtatggggcttaggaaccaaatcaactttctttatagcattgaaaaccacaacttttaccttcgggttggccttggcctcccaggaaatatttgaatagagaattctgttttggggggacattaaggagcctggtctgccccacccgacctatcaacccaacattttgctctgg

SEQ ID NO: 1940 - DNA, 5285 bp, Homo sapiens
gatgtcttggacatgctctggctggctaatctccatgttctagccgactgaaaatacggtggccaagtggatggtgtgcttatttgcagtctaaagaaatttccttttgatgtggcagaaaatcgaggatgtggagtggagaccccagacttacttggagctggagggtctgccttgcatcctgatcttcagtgggatggacccgcatggggagtccttgccgaggtctttgaggtactgtgacctgcgattgataaactcctcctgcttggtgagaacagccttggagcaggagctgggcctggctgcctactttgtgagcaacgaggttcccttggagaagggggctaggaacgaggccttggagagtgatgctgagaagctgagcagcacagacaacgaggatgaggagctggggacagaaggctctacctcggagaagagaagccccatgaaaagggagaggtcccgctcccacgactcagcatcctcatccctctcctccaaggcttccggttcagcgctcggtggcgagtcctcggctcagcccacagcactcccccagggagagcatgccaggtcgccccagccccgtggccccgcagaggagggcagagcccctggtgagaaacagaggccccgggcaagtcaggggccaccctcggccatcagcaggcacagtcccgggccgacgccccagcccgactgtagcctcaggaccggccagaggagcgtccaggtgtcggtcacctcgtcgtgctcccagctgtcctcctcctcgggctcatcctcctcatccgtggcgcccgctgccggcacgtgggtcctgcaggcctcccagtgctccttgaccaaggcctgccgccagccacccattgtcttcttgcccaagctcgtgtacgacatggttgtgtccactgacagcagtggcctgcccaaggccgcctccctcctgccctccccctcggtcatgtgggccagctctttccgccccctgctcagcaagaccatgacatccaccgagcagtccctctactaccggcagtggacggtgccccggcccagccacatggactacggcaaccgggccgagggccgcgtggacggcttccacccccgcaggctgctgctcagcggcccccctcagatcgggaagacaggtgcctacctgcagttcctcagtgtcctgtccaggatgcttgttcggctcacagaagtggatgtctatgacgaggaggagatcaatatcaacctcagagaagaatctgactggcattatctccagcttagcgacccctggccagacctggagctgttcaagaagttgccctttgactacatcattcacgacccgaagtatgaagatgccagcctgatttgttcgcactatcagggtataaagagtgaagacagagggatgtcccggaagccggaggacctttatgtgcggcgtcagacggcacggatgagactgtccaagtacgcagcgtacaacacttaccaccactgtgagcagtgccaccagtacatgggcttccacccccgctaccagctgtatgagtccaccctgcacgcctttgccttctcttactccatgctaggagaggagatccagctgcacttcatcatccccaagtccaaggagcaccactttgtcttcagccaacctggaggccagctggagagcatgcgactacccctcgtgacagacaagagccatgaatatataaaaagtccgacattcactccaaccaccggccgtcacgaacatgggctctttaatctgtaccacgcaatggacggtgccagccatttgcacgtgctggttgtcaaggaatacgagatggcaatttataagaaatattggcccaaccacatcatgctggtgctccccagtatcttcaacagtgctggagttggtgctgctcatttcctcatcaaggagctgtcctaccataacctggagctcgagcggaaccggcaggaggagctgggaatcaagccgcaggacatctggcctttcattgtgatctctgatgactcctgcgtgatgtggaacgtggtggatgtcaactctgctggggagagaagcagggagttctcctggtcggaaaggaacgtgtctttgaagcacatcatgcagcacatcgaggcggcccccgacatcatgcactacgccctgctgggcctgcggaagtggtccagcaagacccgggccagcgaggtgcaagagcccttctcccgctgccacgtgcacaacttcatcatcctgaacgtggacctgacccagaacgtgcagtacaaccagaaccggttcctgtgtgacgatgtagacttcaacctgcgggtgcacagcgccggcctcctgctctgccggttcaaccgcttcagcgtgatgaagaagcagatcgtggtgggcggccacaggtccttccacatcacatccaaggtgtctgataactctgccgcggtcgtgccggcccagtacatctgtgccccggacagcaagcacacgttcctcgcagcgcccgcccagctcctgctggagaagttcctgcagcaccacagccacctcttcttcccgctgtccctgaagaaccatgaccacccagtgctgtctgtcgactgttacctgaacctgggatctcagatttctgtttgctatgtgagctccaggccccactctttaaacatcagctgctcggacttgctgttcagtgggctgctgctgtacctctgtgactcttttgtgggagctagctttttgaaaaagtttcattttctgaaaggtgcgacgttgtgtgtcatctgtcaggaccggagctcactgcgccagacggtcgtccgcctggagctcgaggacgagtggcagttccggctgcgcgatgagttccagaccgccaatgccagggaagaccggccgctcttttttctgacgggacgacacatctgaggaagacagcggcgagttttctgaagagatgagtgctcagagccctcatgctgttgaggctaaagggaggcctggaacggtggggcgtttgactggaatggaccccagggactgtccaggtgcagcccctcctagtacacatgggcccccgaggccgtggtcctgggagccaggaagactccgcagtgggtgagaatgaaaacttgagactcccaagttctgggccagcccattgctctgggctgttttaaagcccatttcacgaggaacaaagatttacttcctgtcctgccattcgtgtgcttccatggacaaacctgatttttttctcttagttctaaagaatcttgggttattttgtagcggtgccagtatttcagtagatgggatttcagccaagtaggttcccctgtaacctcctacaaagcaatattccaaaggaacattttaactgtaaaggctggagacaagaaaaaataagtagatcgttttaataacaattatttaattgcctataagtttgctgtttcagaggctagcccaaaggcatcaaatttaataaagttaaacaaattgatttacttcagagcaaatatgatcctattaaaataatatagggtaaataccctacctcttagaaagggcaaaaatgcaaagaagctttctttaaaactaaaagggttttttggggggggagttggcggggaggaaataaggctaacagaggttgacctaaaattagccttacaaaggagaaaggaccacattgcttacttgaaacagacaatgaaaacaaccaaagtgatatataaaatagttgatgagaactagacttatgactgtagtttactagagtttagttttcagttgctgaagtagctcattttctcttactaatgtttggttcctcagggaagaatctcacttgactagagaggaggtgggaacagaagagagaaggaggcagggagatgtatttcttagggctcaccccttcacagactgacagaatggttttgttttgttttgttttgttttgttttgtttttgagatggactctagctctgtcacccaggctggagtgcagtggtgcgatctcggctcactgcaagctccgcctcccgggttctcaccattctcctgcctcagcctcccgagtagctgggactacaggcgcccaccaccacgcccggctaattttttgtattttttagtagagacggggtttcaccatgttagccaggatggtctcgatctcctgacctcgtgatccgcccgcctcggcctcccaaagtgctgggattacaggcgtgagccaccgtgcctgccccagaatggtttttaaagccacagttgagaggccacccattgcccggcgcctggacagtgatcatcttgttcatcttgttcagtcctttcttgtgtgattggaattattcatcccctttgaaagatgagaaggttgagatgcaaagagtctacctttccaagttctcactgctggaaagagctagaagcacagttcaaagttctggcttctggactctgcagtccaggtctcccttctcccacttgcctaccctcaatgccacactgtttttgaagtggcccataacttgaaggaaaagtttaaagacagttcaatttaatcatcagaatgcattcttttttttttcggagacggagtttcactcttgctgcccaggctggagtgcaatggtgcaatgatctcggctcactgcaacctctgcctcctgggttcaagtgattctccagcctcagcctcccgagtagctgggattatgggcgcccaccaccatgcccagctaatttttgtattttttttttttagtagagatggggtttcgccaggttggccaggctggtcttgtgaactcctggcctcaggtgatctgcccacctcatcctccaaaagtgctgggattacaggcatgagccactgcgcctggcctcagaatgcattcttacacatctatcctagacatttataagcactctaatggataacaatccaagaataaatgattgtaaaagatgatgccgaagagttgatgtcaatctttttttcctaagaaaaaaagtccgcgagtattaaatatttagatcaatgtttataaaatgattactttgtatatctcattattcctattttggaataaaaactgaccttctttaatcatatacttgtcttttgtaaatagcagcttttgtgtcattctccccactttattagttaatttaaattggaaaaaaccctcaaactaatattcttgtctgttccagtcttataaataaaacttataatgcatg

SEQ ID NO: 1941 - DNA, 2998 bp, Homo sapiens
gagaggagacaccgccgcagttgccggtacatcggggatttctggctctttcctcttcgccttaaattcgggtgtcttttatgaataatcaaaagcagcaaaagccaacgctatcaggccagcgttttaaaactagaaaaagagatgaaaaagagaggtttgaccctactcagtttcaagactgtattattcaaggcttaactgaaaccggtactgatttggaagcagtagctaagtttcttgatgcttctggagcaaaacttgattaccgtcgatatgcagaaacactctttgacattctggtggctggtggaatgctggccccaggtggtacactggcagatgacatgatgcgtacagatgtctgcgtgtttgcagcccaagaagatctagagaccatgcaagcatttgctcaggtttttaacaagttaatcaggcgctacaaatacctggagaaaggttttgaagatgaagtaaaaaagctgctgctgttcttgaagggtttttcagagtcggagaggaacaagctagctatgttgactggtgttcttctggctaatggaacacttaatgcatccattcttaatagcctttataatgaaaatttggttaaagaaggagtttcagcagcttttgctgtgaagctctttaaatcatggataaatgaaaaagatatcaatgcagtagctgcaagtcttcggaaagtcagcatggataacagactgatggaactctttcctgccaataagcaaagtgttgaacacttcacaaaatattttactgaggcaggcttgaaagagctttcagaatatgttcggaatcagcaaaccatcggagctcgtaaggagctccagaaagaacttcaagaacagatgtcccgtggtgatccatttaaggatataattttatatgtcaaggaggagatgaaaaaaaacaacatcccagagccagttgtcatcggaatagtctggtcaagtgtaatgagcactgtggaatggaacaaaaaagaggagcttgtagcagagcaagccatcaagcacttgaagcaatacagccctctacttgctgcctttactactcaaggtcagtctgagctgactctgttactgaagattcaggagtattgctatgacaacattcatttcatgaaagccttccagaaaatagtggtgcttttttataaagctgaagtcctgagcgaggagcccattttgaagtggtataaagatgcacatgttgcaaaggggaagagtgttttccttgagcaaatgaaaaagtttgtagaatggctcaaaaatgctgaagaagaatctgaatctgaagctgaagaaggtgactgaattttgaaactacaccctcagtaaagcaaacaggagttgtagataaaatgtcatgtctcatgtgtcctggttcttacatcttcctacctccctgtatcaagcatgatataagggctttcatggcaaattttattttaactgtttctatggttgctggaaatgttgggtttagtttctaaaaccatgttttaagtagctacaggagctatagatttgaatctaatgttgcattagtcttttcagttatcttctacctcctgtattttctactgtaataatgtaatttaaggccttccacaatgaacagttcactttattccctgggttttctataaacagttttaaggatatgatttggttaaaaaataatttgttataaaaattctgtttgcaaattaaactggaaaagtatccagagtctcaaaaggcaatgatttgtgagataatatggcatgcccggagccctgctcatcaatgaaaaacccatatgtaataatcgaattcatttaacatgaatcttgagtacgtggaccattgcttgcatgttaactttttgttttgttttgttttgttttgttttgcatttttaactccagatatcctaaagctcaattgtttggtctctggttttcatccttagagaagccatggagaacagacttgaaaagtttaggaaatcataatgtggcagaggtggtgggaagaagaaagttgagctttttccccttgagaaacttctgcatttagtttctatctttccaggcaaaacaaatgggtattcttttcatacaaccattttcaaatgaaccttagaaaagtcttaacatttaaggtattttatgcacagaatacacttagattgataggaaagaactcgtaatggagtttgagtaaagaaaatgactgatgtactaaacccagtaaaaattgttgaaaatgttaaaggtcagcatgttctaattgggaatctagatatagcttagatttcctattggcttagagtatttgctataacaaatgaagtgcaatgacaattatatattcctactcggtcatactggactggcttcgttctcttaatatactcagtaatgactcaagcctctggctattaacataccctagttgccgttttttaattgccatgagccaaatacttcttggtatacaattgatccatttattttaatggctgccttttcattttcatcttttcttgctgctacccatctatgtatgtagtcattggggggaaaatgtagccacattttttatgggaagactttgtgttaaaagtgaacattttgaaggtttttaactggtgaaactagcctggaataatgccaccagagactgagtggaaatcgccccttttgaaggtgccattcttatgagccaaaagtttgtcatttaaaagttcattttgagggaataacatgtaatataatttgaaataaaggtatagtaaccttaaaaagaacattataactgattgttgtgaatggggtgaatttgttaaaatgagtaactttgataaagtttttcatgcacaggcaaaatgtattcactagatttctacgtagtgatctgcttttactttgtaatttgtagttctcaaaagacttttttttaaaaaaataaagtccatacttacactt

SEQ ID NO: 1942 - DNA, 5160 bp, Homo sapiens
gttccaggtgcaagcgccgggtttgctgcccgctgggcgcccctgcagcggcccgagctgtggccggcgtggatgaggggcaggcgaggcagggccgcccctccagtattgccgcccctcccgccccagggcagggctgggagggtacagcccgggggcgggctcgggtcgcctcccggccgccgcgtcctcgctgccccgggccgggcgggcgggcgccgagagcctcccagcccgccccgtgccccgcccgcccggctgcttccgcggcggcgctgcccgcacatgggctaggctgccaggatgttcagcttcgaaggcgacttcaagacgcggcccaaggtgtcccttggcggcgcgagcaggaaggaggaaaaggcttctcttttacatcgtactcaggaagaaagaagaaagagagaggaagaaaggcgaaggttgaaaaatgcaataattatccagtcatttattcgaggctatagagacagaaaacagcaatattccatccaaagaagtgcatttgatcgctgtgctaccttgtcacagtccgggggcgcttttcccattgctaatggccccaaccttacccttttggtaaggcagcttctgtttttttacaaacaaaatgaagactcaaaacgtttgatatggctgtatcagaacttaattaaacacagctctctgtttgtcaagcagttggatggatctgagagacttacatgcttatttcagataaaaagattgatgagcctctgttgcaggttgctgcaaaactgtaatgatgacagtttgaatgttgcacttccaatgagaatgcttgaagtattttcgtctgagaatacttacttgcctgttttacaagatgctagctatgtggtgtcagtgattgaacaaattttgcactacatgattcacaatgggtattataggtctctatatttgttgattaacagcaagcttccatcaagtattgaatattctgatttatctcgagttcctatagcaaaaattttgctagagaatgttctaaaaccattgcactttacttacaactcctgtccggaaggtgcgaggcaacaagtttttacagccttcacagaggagtttctggcagcaccttttacagatcagatttttcatttcatcattccggcgcttgcagatgcgcagaccgttttcccttacgagccctttctgaatgcactgttgttaatagagagtagatgttcaagaaagagtggtggagcaccctggcttttctatttcgttttaactgttggcgaaaattatttgggggccctctctgaggaagggctgctggtgtatttgcgggtgctgcagaccttcctctctcagttaccagtctctcctgccagcgcgagctgtcacgactcagccagtgactctgaggaggagagtgaagaagccgacaagccctcaagcccggaggatggcagactgtcagtatcatacataacagaggaatgcctgaagaagctggacacaaagcagcagaccaacaccctgctcaacctggtgtggagggactctgcgagcgaggaggtcttcaccaccatggcctccgtctgccacacgctgatggtgcagcaccgcatgatggtacccaaagtcaggcttctctacagtttagcctttaatgccaggtttctgagacatctttggtttctaatatcttccatgtcaacacggatgatcacagggtctatggtaccgttgcttcaggtgatatccaggggttctcctatgtcttttgaagattctagtcgaatcatcccactcttttacctttttagctccttgtttagtcattcactaatttccatacatgataacgaattcttcggtgatcccatagaagttgtaggtcaaagacaatcatcaatgatgccttttactttagaagagctgataatgttgtctcgatgccttcgagatgcatgcctggggatcatcaagttggcttatccagaaaccaagccagaagttcgagaagaatatattacagcatttcagagtattggagttactactagctctgaaatgcaacaatgcatacagatggaacagaaaagatggattcagttatttaaggttatcaccaatctagtgaaaatgttgaagtccagagacacgaggagaaatttttgtcctccaaaccactggctgtcagaacaagaagatattaaagcagataaggtcactcagctctatgtgccagcatccagacatgtgtggaggttccggcggatggggaggataggcccgctgcagtccaccctggacgtgggtttggagtccccgccgctgtctgtgtctgaggaaagacagcttgctgtcctgacagagttgccttttgtggttccatttgaggaacgagtaaagatctttcagaggttgatttatgcagataagcaagaagttcaaggagatggtccatttctggatggaattaatgtcacaataagaagaaattacatttatgaagatgcttatgacaaactttctccagaaaatgagcctgatttgaaaaagcggatccgtgtgcacttgctcaatgcccatggcctggatgaagctggcattgatggtggtggtattttcagagagtttttaaatgaactactgaagtcaggatttaaccccaaccaggggttctttaagactactaatgaagggcttctgtaccccaacccggctgctcagatgcttgtgggagattcttttgccagacattactacttcctagccagaatgcttggaaaggctctctatgagaacatgctggtggagctgccctttgcaggcttctttctttccaagttgcttggaaccagtgccgacgtggacattcaccacctcgcctccctagaccctgaggtgtataagaatttgctctttctgaagagctacgaagacgatgtggaggagcttgggctgaacttcactgtggtgaacaatgacctgggagaggcgcaggtagttgaactaaaattcggtgggaaagacatccctgtcaccagcgccaaccggattgcgtacatccacttggtggcagactacaggctgaacaggcagatccgccagcactgcctggctttccgccagggccttgccaatgtcgtcagcctcgagtggctccgaatgtttgatcagcaagaaattcaggtattaatttctggtgcacaagttcccataagcctagaggacctaaaatcctttacaaactattcaggaggctattctgcagaccatcctgttattaaggtcttctggagagttgtggaagggttcactgatgaagaaaagcgcaaactgctgaagtttgtaacaagctgctctcgaccccctctcttggggtttaaggagttgtatcccgcattttgtattcacaacggaggctccgaccttgagcggctccccacagccagcacctgcatgaacctgctgaagctccccgagttctatgacgagacacttttgcgaagtaaacttctctatgcgattgaatgtgccgctggctttgagctgagctgaagctgatgctggggtcagacccctacagagaaccagtgcttccttcgtcagcagcgcctccccagacccacgaggatactcacactgcacgcctgaggctctcctaagctccttctttcattctgccattcctccctcccttccttttttaaatgatttttattacggtgtggtcacttatttagatggacattgcttttcaaataacttaaaataacacgttatgtgccatgtggctactttagtaatattgccaagaagagcacagtttttacactagtggcatctcagtgaaattaaccaaagatgaagctttggctttgctggtgagatcagagccctcctgagcaggcagcgccactccagggttcagacagggctgcacaggcggcagagatacagggtctgagggctgagacgccatggggccgctgctgcttatgtggttggattgtttacaagcctcattattaaaactgaaggcattttttttttctgctgcctttcccaaagtggttaggtttggaaaagagatgatgatggtaatattttatttgtgctttttaagccatttccccaaatgggactagcatgcttgttttcagtataccgtggcctgcctcatgatggtttggagatactgtctgtggatgtgaggtggggacttcattcattgtcctatttctatctccactttgtgcctggagagctttcaggggaggtggaggaggagggtctgccaagctactgcaacatctgtcacccactatacccagttacttgggggaggacagacactgtggtgtcattaaagttgtttgaaccaaagtggcggctgcatctttgtcccgatgctagccgtgccggtctcccatcatccgctcgccctcctttcccctgggctgcgcccacttgtcttcctggatatttgggggtgactcgccatgcttggcaccctctgcttcctggtgctgctctgactcgaagacgggacagtccctggtgcacatccagggaagaggagtgtcggtagttcttgcagtaggcactttatcaggacctgacctgttgctgggtgattttagtctctacaaacagaaagcgtttcaaagcgtcagctgtgggagcagagtgaccctttgctgatgctggggggaggggatctaaatcctcatttatctcttctatgtctagtattttactgtcactggaggctctgtgggctgtcatagttaattgaccataattagcaatatacttttaaagtgggaaagctgaatgacacttttaagacaatgaacattatcaaaacaaaatgtataatttcttaatttgaataataagcgtttaaatgctatttgtagtcttgatatacagaaataaaataattagggttggtcttttttattttaggttttatgttgaatgttctatatcttattagttaatttgtatattttattagtattttggaaatagcatatctgagactgaggagaaattgacaattcacttatttgtggtttttttctcagctattctgagcttatttatttatttgtatgttctaatggctaaacatttacattaaatattttttttccc

SEQ ID NO: 1943 - DNA, 5390 bp, Homo sapiens
gggggtgaaaggtaagggggagcgagagcgccagagagagaagatcggggggctgaaatccatcttcatcctaccgctccgcccgtgttggtggaatgagcgttgcatgtgtcttgaagagaaaagcagtgctttggcaggactctttcagcccccacctgaaacatcaccctcaagaaccagctaatcccaacatgcctgttgttttgacatctggaacagggtcgcaagcgcagccacaaccagctgcaaatcaggctcttgcagctgggactcactccagccctgtcccaggatctataggagttgcaggccgttcccaggacgacgctatggtggactacttctttcagaggcagcatggtgagcagcttgggggaggaggaagtggaggaggcggctataataatagcaaacatcgatggcctactggggataacattcatgcagaacatcaggtgcgttccatggatgaactgaatcatgattttcaagcacttgctctggagggaagagcgatgggagagcagctcttgccaggtaaaaagttttgggaaacagatgaatccagcaaagatggaccaaaaggaatattcctgggtgatcaatggcgagacagtgcctggggaacatcagatcattcagtttcccagccaatcatggtgcagagaagacctggtcagagtttccatgtgaacagtgaggtcaattctgtactgtccccacgatcggagagtgggggactaggcgttagcatggtggagtatgtgttgagctcatccccgggcgattcctgtctaagaaaaggaggatttggcccaagggatgcagacagtgatgaaaacgacaaaggtgaaaagaagaacaagggtacgtttgatggagataagctaggagatttgaaggaggagggtgatgtgatggacaagaccaatggtttaccagtgcagaatgggattgatgcagacgtcaaagattttagccgtacccctggtaattgccagaactctgctaatgaagtggatcttctgggtccaaaccagaatggttctgagggcttagcccagctgaccagcaccaatggtgccaagcctgtggaggatttctccaacatggagtcccagagtgtccccttggaccccatggaacatgtgggcatggagcctcttcagtttgattattcaggcacgcaggtacctgtggactcagcagcagcaactgtgggactttttgactacaattctcaacaacagctgttccaaagacctaatgcgcttgctgtccagcagttgacagctgctcagcagcagcagtatgcactggcagctgctcatcagccgcacatcggtttagctcccgctgcgtttgtccccaatccatacatcatcagcgctgctcccccagggacggacccctacacagctggattggctgcagcagcgacactaggcccagctgtggtccctcaccagtattatggagttactccctggggagtctaccctgccagtcttttccagcagcaagctgccgctgccgctgcagcaactaattcagctaatcaacagaccaccccacaggctcagcaaggacagcagcaggttctccgtggaggagccagccaacgtcctttgaccccaaaccagaaccagcagggacagcaaacggatccccttgtggcagctgcagcagtgaattctgcccttgcatttggacaaggtctggcagcaggcatgccaggttatccggtgttggctcctgctgcttactatgaccaaactggtgcccttgtagtgaatgcaggcgcgagaaatggtcttggagctcctgttcgacttgtagctcctgccccagtcatcattagttcctcagctgcacaagcagctgttgcagcagccgcagcttcagcaaatggagcagctggtggtcttgctggaacaacaaatggaccatttcgccctttaggaacacagcagcctcagccccagccccagcagcagcccaataacaacctggcatccagttctttctacggcaacaactctctgaacagcaattcacagagcagctccctcttctcccagggctctgcccagcctgccaacacatccttgggattcggaagtagcagttctctcggcgccaccctgggatccgcccttggagggtttggaacagcagttgcaaactccaacactggcagtggctcccgccgtgactccctgactggcagcagtgacctttataagaggacatcgagcagcttgacccccattggacacagtttttataacggccttagcttttcctcctctcctggacccgtgggcatgcctctccctagtcagggaccaggacattcacagacaccacctccttccctctcttcacatggatcctcttcaagcttaaacctgggaggactcacgaatggcagtggaagatacatctctgctgctccaggcgctgaagccaagtaccgcagtgcaagcagcgcctccagcctcttcagcccgagcagcactcttttctcttcctctcgtttgcgatatggaatgtctgatgtcatgccttctggcaggagcaggcttttggaagattttcgaaacaaccggtaccccaatttacaactgcgggagattgctggacatataatggaattttcccaagaccagcatgggtccagattcattcagctgaaactggagcgtgccacaccagctgagcgccagcttgtcttcaatgaaatcctccaggctgcctaccaactcatggtggatgtgtttggtaattacgtcattcagaagttctttgaatttggcagtcttgaacagaagctggctttggcagaacggattcgaggccacgtcctgtcattggcactacagatgtatggctgccgtgttatccagaaagctcttgagtttattccttcagaccagcagaatgagatggttcgggaactagatggccatgtcttgaagtgtgtgaaagatcagaatggcaatcacgtggttcagaaatgcattgaatgtgtacagccccagtctttgcaatttatcatcgatgcgtttaagggacaggtatttgccttatccacacatccttatggctgccgagtgattcagagaatcctggagcactgtctccctgaccagacactccctattttagaggagcttcaccagcacacagagcagcttgtacaggatcaatatggaaattatgtaatccaacatgtactggagcacggtcgtcctgaggataaaagcaaaattgtagcagaaatccgaggcaatgtacttgtattgagtcagcacaaatttgcaagcaatgttgtggagaagtgtgttactcacgcctcacgtacggagcgcgctgtgctcatcgatgaggtgtgcaccatgaacgacggtccccacagtgccttatacaccatgatgaaggaccagtatgccaactacgtggtccagaagatgattgacgtggcggagccaggccagcggaagatcgtcatgcataagatccggccccacatcgcaactcttcgtaagtacacctatggcaagcacattctggccaagctggagaagtactacatgaagaacggtgttgacttagggcccatctgtggcccccctaatggtatcatctgaggcagtgtcacccgctgttccctcattcccgctgacctcactggcccactggcaaatccaaccagcaaccagaaatgttctagtgtagagtctgagacgggcaagtggttgctccaggattactccctcctccaaaaaaggaatcaaatccacgagtggaaaagcctttgtaaatttaattttattacacataacatgtactattttttttaattgactaattgccctgctgttttactggtgtataggatacttgtacataggtaaccaatgtacatgggaggccacatattttgttcactgttgtatctatatttcacatgtggaaactttcagggtggttggtttaacaaaaaaaaaaagctttaaaaaaaaaagaaaaaaaggaaaaggtttttagctcatttgcctggccggcaagttttgcaaatagctcttccccacctcctcattttagtaaaaaacaaacaaaaacaaaaaaacctgagaagtttgaattgtagttaaatgaccccaaactggcatttaacactgtttataaaaaatatatatatatatatatatatataatgaaaaaggtttcagagttgctaaagcttcagtttgtgacattaagtttatgaaattctaaaaaatgccttttttggagactatattatgctgaagaaggctgttcgtgaggaggagatgcgagcacccagaacgtcttttgaggctgggcgggtgtgattgtttactgcctactggatttttttctattaacattgaaaggtaaaatctgattatttagcatgagaaaaaaaaatccaactctgcttttggtcttgcttctataaatatatagtgtatacttggtgtagactttgcatatatacaaatttgtagtattttcttgttttgatgtctaatctgtatctataatgtaccctagtagtcgaacatacttttgattgtacaattgtacatttgtatacctgtaatgtaaatgtggagaagtttgaatcaacataaacacgttttttggtaagaaaagagaattagccagccctgtgcattcagtgtatattctcaccttttatggtcgtagcatatagtgttgtatattgtaaattgtaatttcaaccagaagtaaatttttttcttttgaaggaataaatgttctttatacagcctagttaatgtttaaaaagaaaaaaatagcttggttttatttgtcatctagtctcaagtatagcgagattctttctaaatgttattcaagattgagttctcactagtgtttttttaatcctaaaaaagtaatgttttgattttgtgacagtcaaaaggacgtgcaaaagtctagccttgcccgagctttccttacaatcagagcccctctcaccttgtaaagtgtgaatcgcccttcccttttgtacagaagatgaactgtattttgcattttgtctacttgtaagtgaatgtaacatactgtcaattttccttgtttgaatatagaattgtaacactacacggtgtacatttccagagccttgtgtatatttccaatgaacttttttgcaagcacacttgtaaccatatgtgtataattaacaaacctgtgtatgcttatgcctgggcaactattttttgtaactcttgtgtagattgtctctaaacaatgtgtgatctttattttgaaaaatacagaactttggaatctgaaaaaaaaaaaaaaaaaaaaaaaaaaaaaaa

SEQ ID NO: 1944 - DNA, 2913 bp, Homo sapiens
acgagaacctagaccgcccccgaagtgcggagaccccctgggcaggctgaaagatggcggcggcgtctgtctctgcggcttctggttctcacttgtcgaacagctttgctgagccatcaaggtctaatggaagcatggttcggcattcttcatctccatatgtagtatatccttcggataagcctttccttaatagtgatctacgacgctccccaagtaagcctacacttgcctatccagaaagcaacagcagagccatattttctgctcttaagaatcttcaagataagattcgacgcttggaacttgagaggattcaggcagaagaaagtgtgaaaaccttgtctagagaaacaattgaatataagaaagtactggatgaacagatacaagaaagggagaattcaaagaatgaggaatcaaagcacaatcaagaactgacatctcagttgttagctgcagaaaataaatgcaatctattagaaaaacaattggaatacatgcgaaatatgataaagcatgccgaaatggagaggacatctgtcttagagaaacaagtttccctagaaagagaacgacaacatgatcaaacacatgttcagagccaacttgaaaaattggatcttcttgaacaggagtataacaaacttaccacaatgcaggcccttgcagaaaaaaaaatgcaagagttggaagcaaaactccatgaagaagaacaggaaaggaaacgcatgcaagctaaggcagctgagttgcagactggtctagaaacaaatagacttatctttgaagataaggcaactccgtgtgttcccaatgcaagaagaattaaaaaaaagaagtcaaaaccaccagaaaagtccacaagccctagccatgccgtggtagccaatgttcagcttgtcttgcatctaatgaagcaacacagtaaagctttgtgcaatgatcgagtcatcaacagtattcctttggcaaagcaagtatcttcacgaggtggtaaaagtaagaagttgtcagtaacacctccctcctccaacggtattaatgaggagttgtcagaagtcttacagactttacaggatgaatttgggcaaatgagctttgatcaccagcagcttgcaaaacttatccaggagtcgccaaccgttgaactgaaagacaagttggagtgtgaattggaggcattagtgggaaggatggaagcaaaagccaaccaaataactaaagttcgaaaataccaagcccagctggagaaacagaagttagagaagcagaagaaggaattaaaagctaccaaaaagactcttgatgaagaaagaaacagcagcagccgttctggaatcacagggaccacaaataagaaagattttatgaaacagagacctggagaaaaaaggagaaaaaatcttcagttattgaaggacatgcaaagcatacagaattcattacaaagcagtagtttgtgttgggattactgactcataaccaggtcagaaattttattcagataatctgtacctcatcaatcagatgatgacaatttacttcccaggtctcatactcacttatgttggaattaattaatagcaggtgttaaaggacccaggcttcattacacaggcttttcatgtatgcaggatgactcaatgttaaagcatttaaatggaaaccaggggagttttaaagcccgagaaaccacacataatcttttgttgagatgagtttgctgtactgacgctgcactttgtaaacagattaccagttttttacttgtgggtgtgattttttaaaatagttctttatatataattaaaattaggtttaaattttcaaaatatgagactatgctataggcagtgcttgcttgaaaagtctcatttttaaatctccctggcatgaggtgcccacttcccctttccaaagcaaccattaaacatactttgtttctactattggtggagtttttctatatttaaaaatacatatatatttcagaggatttttattttgctttttggcatttcagactttgatcagtgttaagtgcacttgtattgctttttaatctgttaattttttaaagacccaagcagtcattttgagttatatctataaaaattataaaaggatttttgaaagtataaacaaattgtcagtgaaataaatgagattttggaataaagtgagaatgggagaagggatatgttgtgagcatataccttcacagttcttaatacctgttttgtaatcatgatattcagtcaaggcattatggtttttaatcttgaaacttagagaaccctttgaatatttgcttttactggtgtacagtatgagtggaatataaactgtacacataattatcatgttgatataaatcataatttcaactagatcaagacatgttaaccttttataaatttaaagtcaataaagcacctttttaaaggaaacactgcaactttccttaacagcctgttaataaaggctttgtgacaagctctcaaaaaatgcatttctaaataggaggacatcaatgtattgatgaagagaaaaaactagtacttagttgccacactcatgcttacatagaaagagagcccaagaatattagatttcctcatgatacaagatactacagtaacaggctttaatttaggatccttaagattttggggtattatttgtgactctcctgaaattgtaaacttgtgcttctgtgtccagttttctaatgagtaggttcgtagcttgattgaattaataattgtgagcccatagacacaagggaagtgagaaacagtgctctggtgacatgataaatatatgtgtcaaccaccatttcagctattaaaaactcctgttatctccttgtttgaatttcaggtcattaaattgtataaccatcatttg

SEQ ID NO: 1945 - DNA, 1884 bp, Homo sapiens
gacgtgaacggtcgttgcagagattgcgggcggctgagacgccgcctgcctggcacctaggagcgcagcggagccccgacaccgccgccgccgccatggagtccgagaccgaacccgagcccgtcacgctcctggtgaagagccccaaccagcgccaccgcgacttggagctgagtggcgaccgcggctggagtgtgggccacctcaaggcccacctgagccgcgtctaccccgagcgtccgcgtccagaggaccagaggttaatttattctgggaagctgttgttggatcaccaatgtctcagggacttgcttccaaagcaggaaaaacggcatgttttgcatctggtgtgcaatgtgaagagtccttcaaaaatgccagaaatcaacgccaaggtggctgaatccacagaggagcctgctggttctaatcggggacagtatcctgaggattcctcaagtgatggtttaaggcaaagggaagttcttcggaacctttcttcccctggatgggaaaacatctcaaggcctgaagctgcccagcaggcattccaaggcctgggtcctggtttctccggttacacaccctatgggtggcttcagctttcctggttccagcagatatatgcacgacagtactacatgcaatatttagcagccactgctgcatcaggggcttttgttccaccaccaagtgcacaagagatacctgtggtctctgcacctgctccagcccctattcacaaccagtttccagctgaaaaccagcctgccaatcagaatgctgctcctcaagtggttgttaatcctggagccaatcaaaatttgcggatgaatgcacaaggtggccctattgtggaagaagatgatgaaataaatcgagattggttggattggacctattcagcagctacattttctgtttttctcagtatcctctacttctactcctccctgagcagattcctcatggtcatgggggccaccgttgttatgtacctgcatcacgttgggtggtttccatttagaccgaggccggttcagaacttcccaaatgatggtcctcctcctgacgttgtaaatcaggaccccaacaataacttacaggaaggcactgatcctgaaactgaagaccccaaccacctccctccagacagggatgtactagatggcgagcagaccagcccctcctttatgagcacagcatggcttgtcttcaagactttctttgcctctcttcttccagaaggccccccagccatcgcaaactgatggtgtttgtgctgtagctgttggaggctttgacaggaatggactggatcacctgactccagctagattgcctctcctggacatggcaatgatgagtttttaaaaaacagtgtggatgatgatatgcttttgtgagcaagcaaaagcagaaacgtgaagccgtgatacaaattggtgaacaaaaaatgcccaaggcttctcatgtctttattctgaagagctttaatatatactctatgtagtttaataagcactgtacgtagaaggccttaggtgttgcatgtctatgcttgaggaacttttccaaatgtgtgtgtctgcatgtgtgtttgtacatagaagtcatagatgcagaagtggttctgctggtacgatttgattcctgttggaatgtttaaattacactaagtgtactactttatataatcaatgaaattgctagacatgttttagcaggacttttctaggaaagacttatgtataattgctttttaaaatgcagtgctttactttaaactaaggggaactttgcggaggtgaaaacctttgctgggttttctgttcaataaagttttactatgaatgaccctgaaaaaaaaaaaaaaaaaaaaaa

SEQ ID NO: 1946 - DNA, 1404 bp, Homo sapiens
cgcgaagaagctggcaggggcacgagccgggggcgggtttgaagacgcgtcgttgggttttggaggccgtgaaacagccgtttgagtttggctgcgggtggagaacgtttgtcaggggcccggccaagaaggaggcccgcctgttacgatggtgtccatgagtttcaagcggaaccgcagtgaccggttctacagcacccggtgctgcggctgttgccatgtccgcaccgggacgatcatcctggggacctggtacatggtagtaaacctattgatggcaattttgctgactgtggaagtgactcatccaaactccatgccagctgtcaacattcagtatgaagtcatcggtaattactattcgtctgagagaatggctgataatgcctgtgttctttttgccgtctctgttcttatgtttataatcagttcaatgctggtttatggagcaatttcttatcaagtgggttggctgattccattcttctgttaccgactttttgacttcgtcctcagttgcctggttgctattagttctctcacctatttgccaagaatcaaagaatatctggatcaactacctgattttccctacaaagatgacctcctggccttggactccagctgcctcctgttcattgttcttgtgttctttgccttattcatcatttttaaggcttatctaattaactgtgtttggaactgctataaatacatcaacaaccgaaacgtgccggagattgctgtgtaccctgcctttgaagcacctcctcagtacgttttgccaacctatgaaatggccgtgaaaatgcctgaaaaagaaccaccacctccttacttacctgcctgaagaaattctgcctttgacaataaatcctataccagctttttgtttgtttatgttacagaatgctgcaattcagggctcttcaaacttgtttgatataaaatatgttgtcttttgtttaagcatttattttcaaacactaaggagctttttgacatctgttaaacgtctttttgtttttttgttaagtcttttacattttaatagtttttgaagacaatctaggttaagcaagagcaaagtgccattgtttgcctttaattggggggtgggaagggaaagagggtacttgccacatagtttcctttttaactgcactttctttatataatcgtttgcattttgttacttgctaccctgagtactttcaggaagactgacttaaatattcggggtgagtaagtagttgggtataagatctgaacttttcatctgcagaggcaagaaaaatatttgacattgtgacttgactgtggaagatgatggttgcatgtttctagtttgtatatgtttccatctttgtgataagatgatttaataaatctctttaaatactt

SEQ ID NO: 1947 - DNA, 5538 bp, Homo sapiens
gccccagatcggaagtgacggagacgtgctagcgcgtcgaaggtagctctatggttttcctcgcgttcttgagtcgggaaatggccgctgtgtggttgcaacggagataaattcccggaaccgcgattcggcgtgtcaggaattcgaatttagagtttaatttctcagagcattctctccaggaagaatttttacagtatctcaaagacttcacttgacttcttgatcctgcataaaaccaaggagaaaagaaatgggtcgctccaattctagatcacattcttcaaggtcaaagtctagatcacagtctagttctcgatcaagatcaagatctcattctagaaagaagcgatacagttctaggtctcgttccagaacatattcaaggtctcgtagtagagatcgtatgtattctagagattatcgtcgcgattacagaaataatagaggaatgagacgaccttatgggtacagaggaaggggtagagggtattatcaaggaggaggaggtagatatcatcgaggtggttatagacctgtctggaatagaaggcactctaggagtcctagacgaggtcgttcacgttccaggagtccaaaaagaagatccgtttcttctcaaagatccagaagcagatctcgccggtcatatagatcttctaggtctccaagatcatcctcttctcgttcttcatccccatatagcaaatctcctgtttctaaaagacgagggtctcaggaaaaacaaaccaaaaaagctgaaggggaaccccaagaagagagtccgttgaaaagtaaatcacaggaggaaccgaaagatacatttgaacatgacccatctgagtctatcgatgaatttaataagtcatcagccacatccggtgatatttggcctggcctttcagcttatgataatagtcctagatcaccccatagtccttcacctattgctacaccacctagtcagagttcatcttgctctgatgctcccatgctcagtacagttcactctgcaaaaaatactccttctcagcattcacattccattcagcatagtcctgaaaggtctgggtctggttctgttggaaatggatctagtcgatacagtccttctcagaatagtccaattcatcacatcccttcacgaagaagtcctgcaaagacaatcgcaccacagaatgctccaagagatgagtctaggggccgttcctcgttttatcctgatggtggagatcaggaaactgcaaagactgggaagttcttaaaaaggttcacagatgaagagtctagagtattcctgcttgataggggtaataccagggataaagaggcttcaaaagagaaaggatcagagaaagggagggcagagggagaatgggaagatcaggaagctctagattacttcagtgataaagagtctggaaaacaaaagtttaatgattcagaaggggatgacacagaggagacagaggattatagacagttcaggaagtcagtcctcgcagatcagggtaaaagttttgctactgcatctcaccggaatactgaggaggaaggactcaagtacaagtccaaagtttcactgaaaggcaatagagaaagtgatggatttagagaagaaaaaaattataaacttaaagagactggatatgtagtggaaaggcctagcactacaaaagataagcacaaagaagaagacaaaaattctgaaagaataacagtaaagaaagaaactcagtcacctgagcaggtaaagtctgaaaagctcaaagacctctttgattacagtccccctctacacaagaatctggatgcacgagaaaagtctaccttcagagaggaaagcccacttaggatcaaaatgatagcgagtgattctcaccgtcctgaagtcaaactcaaaatggcacctgttcctcttgatgattctaacagacctgcttccttgactaaagacaggctgcttgctagtacacttgtccattctgtcaagaaggagcaagaattccgatccatctttgaccacattaagttgccacaggccagcaaaagcacttcagagtcatttattcaacacattgtgtccttggttcatcatgttaaagagcaatacttcaagtcagctgcaatgaccctaaacgagcggttcacttcgtatcagaaagccactgaagaacatagtactcggcaaaagagccctgaaatacacaggagaattgacatctcaccaagtaccctgaggaagcatacccgtttagcaggggaagagagagtttttaaagaagaaaatcaaaagggagataaaaaattaaggtgtgactctgctgaccttcggcatgacattgatcgccgtagaaaagaaagaagtaaagaacggggagattccaagggctccagggaatccagtggatcaagaaagcaggaaaaaactccaaaagattacaaggaatacaaatcttacaaagatgacagtaaacataaaagagagcaagatcattctcgatcttcatcctcttcagcatcaccttcttctcccagttctcgagaagaaaaggagagtaagaaggaaagagaagaagaatttaaaactcaccatgaaatgaaagaatactcaggctttgcaggagttagccgaccacgaggaaccttttttcgaattagaggcagaggaagagccagaggagtttttgctgggacaaatactggtccaaacaactcaaatactacttttcaaaagagaccgaaggaagaggaatgggatccagaatataccccaaagagcaagaagtacttcttgcatgacgacagagatgatggtgtggattattgggccaaaagaggaagaggtcgtggtacttttcaacgtggcagagggcgctttaacttcaaaaaatcaggtagcagtcctaaatggactcatgacaaataccaaggggatgggattgttgaagatgaagaagagaccatggaaaataatgaagaaaagaaggacagacgcaaggaagaaaaggaataataaatatgaagtaagattacaacagagcagaacttgcacccaccattttttttacctgatttttgttttcaaataagaatgtaagcattttacttaaattttactgtttgcaagtagtctatagaaattttgttttaagtcttcaaatatcttgagaaatagtagactgtatgttgaaaattgtactgaaataaagtagaaaattgttacgtaccatatttgtaactatcaacttttaaaacttttaacgtttttgttacatgcattgtaattctgctttgtctataagatatggtcaagtacagctctgtgaaagttctgattctcttccttccctgtttgtcaatgttttattctgaagtaaacgttagctctacatataaatcctggaacagaaattgtttatagagactacactaattattttaactgtatacatctgtttaatttgaacacactacatcgtagggtgactgatttttgaagtataccacagacaaaaagttgttactatggtaaactaagctagtttaacacttgagcaaatgcttaagaaggaattaaaaaaaaaaagctttgccaatagctaaaaagtacaagctattaaaaatcagattgaaaagttttgagaaaatgttatttttactgaaagcaagcagtggcctataaagaacattcttaggagccttttctatttgcgttcaaaactgtgtgttctctttctattcctatttgatagtttgagtcatggtcttagatattagctatttgtgagaggaaactggtttgtaacaatactgcaaatagaaaccccatttctactgaacatcctagttttaaacagaagaaaaactgtaatcctggggttggtatgtaggaggtctatcctgcagaataagttgatacattagtacctgatttcatatcttacatatttatttgagctgaacattagtttgtagtgtaactattagtaaaaatagagaaacacagcatactgttcattaatagtattttaaaaaaattgtttttcaaatgtcaccaataaaagttttggcaggaagcttgttgcggcattgatctaacctttttcccccccatttcagttgcagtttttgtagaatggctttttctttttcctcttaagagttctattcttcaggtagataatttttcaaatgtgaattatcttttgtgtctatattgatagctcttaaaggagtgaaaatctaaaatagtaaatttcaatgttaagtgtctgctttatgggcatatataaaagtagacacatttcatttgttaatttagttgtgtgtgtgtgttaaaaggagctaatgcttattctgttaatgtaaacttttgaagatcttaagtgtattgctctttcatcttaaacactttcgaggatttgcagtgcgtctagcacctagattacagccaggaacattggttaagaactgttggaaacaaaactaaaagcaaactcaacatatgtgatgtttatggccctcagatccttagtattgtgtgattttcccccgttaacatgtctttctaaaattgtctattaaagcagaggaaatacctgccaaaggaagtatgtattgcattaatcagggcataactaatattctcctgttcagaataatacttatttacgtgtgaaagcaacatggatgtgattcccaacacagaattttcatgacccttttattgtatacaaataaataccataacagttacttggttagacatcaaatctgtgtgcatgactatgtgcttatccacttaagacaataggtaaaaggggatctgagaaattatgtaatagggagtgggaataaaactacttaattcctgtgggcaggttatattttaagttcaaatgcattgctttaacctttggttacttttattctgttaaacagaattgaagaaagagtattataccagagtgtagtaggctagggtgattgtaagaactctgtaatagaatgtcattgtggatgttacctttttcagatccaagcatataaaaagcctgtatattttttaaaaacacatcttaactccacgctttacgatattataaaagttgaatggttcctcttggtaaggatatttgcttacaagtgctaggaaataactcactgatacctgcgttaacatactttgttttgcctagagaggggcaataaaaatgaaccaaaggatatttccagaaaggattaagaaagctgtttaagaaggccatgactctttaggtgtgtatgtgtacctttcagcatcctaggaatttttatactaaaagcaaaatgttttttccagttagtcttcttcaaggaattactattgttccttttgtcacaggtaaaatcagtgttgggaattataatttgagaaaaatattacccagtaacattgaatgtagatggctaaacgattcttactcagtgtgatgtataatgatgcaacagggacccttgtaaattgtcatacgccaataaaatgtcacaagtaat

SEQ ID NO: 1948 - DNA, 1682 bp, Homo sapiens
cagcggcacagcgaggtcggcagcggcacagcgaggtcggcagcggcacagcgaggtcggcagcggcacagcgaggtcggcagcggcacagcgaggtcggcagcggcacagcgaggtcggcagcggcagcgaggtcggcagcggcacagcgaggtcggcagcggcagcgaggtcggcagcggcgcgcgctgtgctcttccgcggactctgaatcatggcgaccacggccacgatggcgacctcgggctcggcgcgaaagcggctgctcaaagaggaagacatgactaaagtggaattcgagaccagcgaggaggtggatgtgacccccacgttcgacaccatgggcctgcgggaggacctgctgcggggcatctacgcttacggttttgaaaaaccatcagcaatccagcaacgagcaatcaagcagatcatcaaagggagagatgtcatcgcacagtctcagtccggcacaggaaaaacagccaccttcagtatctcagtcctccagtgtttggatattcaggttcgtgaaactcaagctttgatcttggctcccacaagagagttggctgtgcagatccagaaggggctgcttgctctcggtgactacatgaatgtccagtgccatgcctgcattggaggcaccaatgttggcgaggacatcaggaagctggattacggacagcatgttgtcgcgggcactccagggcgtgtttttgatatgattcgtcgcagaagcctaaggacacgtgctatcaaaatgttggttttggatgaagctgatgaaatgttgaataaaggtttcaaagagcagatttacgatgtatacaggtacctgcctccagccacacaggtggttctcatcagtgccacgctgccacacgagattctggagatgaccaacaagttcatgaccgacccaatccgcatcttggtgaaacgtgatgaattgactctggaaggcatcaagcaatttttcgtggcagtggagagggaagagtggaaatttgacactctgtgtgacctctacgacacactgaccatcactcaggcggtcatcttctgcaacaccaaaagaaaggtggactggctgacggagaaaatgagggaagccaacttcactgtatcctcaatgcatggagacatgccccagaaagagcgggagtccatcatgaaggagttccggtcgggcgccagccgagtgcttatttctacagatgtctgggccagggggttggatgtccctcaggtgtccctcatcattaactatgatctccctaataacagagaattgtacatacacagaattgggagatcaggtcgatacggccggaagggtgtggccattaactttgtaaagaatgacgacatccgcatcctcagagatatcgagcagtactattccactcagattgatgagatgccgatgaacgttgctgatcttatctgaagcagcagatcagtgggatgagggagactgttcacctgctgtgtactcctgtttggaagtatttagatccagattctacttaatggggtttatatggactttcttctcataaatggcctgccgtctcccttcctttgaagaggatatggggattctgctctcttttcttatttacatgtaaataatacattgttctaagtctttttcattaaaaatttaaaacttttcccat

SEQ ID NO: 1949 - DNA, 1370 bp, Homo sapiens
ggcggcggcagctgtacagggcgggagaagcggtggtagcggaggctgtagtggggctggtggtgcttccaactgcgggacaggaagtggccgtagcggcttgttggataagtggaagatagatgataagcctgtaaaaattgacaagtgggatggatcagctgtgaaaaactctttggatgattctgccaaaaaggtacttctggaaaaatacaaatatgtggagaattttggtctaattgatggtcgcctcaccatctgtacaatctcctgtttctttgccatagtggctttgatttgggattatatgcacccctttccagagtccaaacccgttttggctttgtgtgtcatatcctattttgtgatgatggggattctgaccatttatacctcatataaggagaagagcatctttctcgtggcccacaggaaagatcctacaggaatggatcctgatgatatttggcagctgtcctccagtcttaaaaggtttgatgacaaatacaccttgaagctgaccttcatcagtgggagaacaaagcagcagcgggaagccgagttcacaaagtccattgctaagttttttgaccacagtgggacactggtcatggatgcatatgagcctgaaatatccaggctccatgacagtcttgccatagaaagaaaaataaagtagccaattctaaaagtagccctctttctcctggatcttgctgaattagtggcttggggggtgggggagataaaaagaacttaaaatgggtaaagtaagaaatgttaaaaagtccctgttttgtcctgaaattttagtctattctgggtaaataggattttctgacacagatatgagaagttgtagctctgatgtctagctgtagtctccttgatctgctgattgcattattttaatttgcttttctgggaaagcagttttgctaaaagctgtacagactttttcttttgtacctagcagtactttatatagtatagctttgggccatgtagcattttaagactcaattttaaaaaattattaatctgttgctgactcttaattcctatttcaatatgtgtttccttgaagaattcaggatacaacttcttgtgtatgacagctttccttcacacactatttttgtgggtgtgtatatatctgatttgggaagaatttaaaaaacacatagctttttaatttgtttgaaacagactttctgcctgttacatttttgcttttaaccaattaaagaagccaatggcattttagttttatattgtgttttccactagtatatccctgttgatttgtttgtgccttttattaactgccattttctaaaatttttttcaataaaaggaaggaagatgtg

SEQ ID NO: 1950 - DNA, 4248 bp, Homo sapiens
cccgggctgtgggctacaggcgcagagcgggccaggcgcggagctggcggcagtgacaggaggcgcgaacccgcagcgcttaccgcgcggcgccgcaccatggagcccgccgtgtcgctggccgtgtgcgcgctgctcttcctgctgtgggtgcgcctgaaggggctggagttcgtgctcatccaccagcgctgggtgttcgtgtgcctcttcctcctgccgctctcgcttatcttcgatatctactactacgtgcgcgcctgggtggtgttcaagctcagcagcgctccgcgcctgcacgagcagcgcgtgcgggacatccagaagcaggtgcgggaatggaaggagcagggtagcaagaccttcatgtgcacggggcgccctggctggctcactgtctcactacgtgtcgggaagtacaagaagacacacaaaaacatcatgatcaacctgatggacattctggaagtggacaccaagaaacagattgtccgtgtggagcccttggtgaccatgggccaggtgactgccctgctgacctccattggctggactctccccgtgttgcctgagcttgatgacctcacagtggggggcttgatcatgggcacaggcatcgagtcatcatcccacaagtacggcctgttccaacacatctgcactgcttacgagctggtcctggctgatggcagctttgtgcgatgcactccgtccgaaaactcagacctgttctatgccgtaccctggtcctgtgggacgctgggtttcctggtggccgctgagatccgcatcatccctgccaagaagtacgtcaagctgcgtttcgagccagtgcggggcctggaggctatctgtgccaagttcacccacgagtcccagcggcaggagaaccacttcgtggaagggctgctctactccctggatgaggctgtcattatgacaggggtcatgacagatgaggcagagcccagcaagctgaatagcattggcaattactacaagccgtggttctttaagcatgtggagaactatctgaagacaaaccgagagggcctggagtacattcccttgagacactactaccaccgccacacgcgcagcatcttctgggagctccaggacatcatcccctttggcaacaaccccatcttccgctacctctttggctggatggtgcctcccaagatctccctcctgaagctgacccagggtgagaccctgcgcaagctgtacgagcagcaccacgtggtgcaggacatgctggtgcccatgaagtgcctgcagcaggccctgcacaccttccaaaacgacatccacgtctaccccatctggctgtgtccgttcatcctgcccagccagccaggcctagtgcaccccaaaggaaatgaggcagagctctacatcgacattggagcatatggggagccgcgtgtgaaacactttgaagccaggtcctgcatgaggcagctggagaagtttgtccgcagcgtgcatggcttccagatgctgtatgccgactgctacatgaaccgggaggagttctgggagatgtttgatggctccttgtaccacaagctgcgagagaagctgggttgccaggacgccttccccgaggtgtacgacaagatctgcaaggccgccaggcactgagctggagcccgcctggagagacagacacgtgtgagtggtcaggcatcttcccttcactcaagcttggctgctttcctagatccacactttcaaagagaaacccctccagaactcccaccctgacagcccaacaccaccttcctcctggcttccagggggcagcccagtggaatggaaagaatgtgggatttggagtcagacaagcctgagtccagttccccgtttagaactcattagctgtgtgactctgggtgagtcccttaacccctctgagcccgggtctcttcattagttgaaagggatagtaatacctacttgcaggttgttgtcatctgagttgagcactggtcacattgaaggtgctgggtaagtggtagctcttgttgcttcccgttcagcgtcacatctgcagtggagcctgaaaaggctccacattaggtcacctgtgcacagccatggctggaatgatgaaggggatacgctggagttgccctgccatcgcctccatcagccagacgaggtcctcacaggagaaggacagctcttccccaccctgggatctcaggagggcagccacggagtggggaggccccagatgcgctgtgccaaagccaggtccgaggccaaagttctccctgccatccttggtgccgtcctgccccttcctccttcatgcctgggcctgcaggcccaccccagccaccactgagtccactcggagtgccctgtgttcctggagaaggcattccagggttgaatcttgtcccagcctcagcctgggacacctaggtggagagagtggtctccgctctgaattggatccaggggacctgggctcattcttcttggctcaccaaccctgcaggcctcatctttcccaaaacccactttgtcttggtgggagtgggtccgcgctgctctgcagcaggggctggggagtggacagcatcaggtgggaaagtggagtccaccctcatgtttctgtaggattctcaccgtggggctggaagaaaagagcatcgacttgatttctccaaccactcatccctctttttctttcttccaccactccccaccccagctgtagttaatttcagtgccttacaaatcctaagctcagagaaagttccatttccgttccagagggaagggaacctccctaggtccttccctggcttgttataacgcaaagcttggttgtttatgcaactctatcttaagaactgcccagcctcagctgaaaacccgaatctgagaaggaattgcgtcatgtaagggaagctggaattaagggagctgagccagtcatggttgtggcgtgtgagtcaggagacctaggtttcagcccctctctactgtcagcgagctgtgcaacgtgggcaagtcattgtcctctgagctgcagtttcctcatctgtcacatcgctacagacaagacctccctggaacccttctgattgtcttagacactgtggttgcaaaacccacggaaagcctcatttgtgtggaaagtcagaggaaaaatgatccagtggacacttggggattatctgtcattcaagatccttccttcaaccccaaggccagctcccatctcatttccagaaaggctcatacctggcttgcagggaagcatctgtcttgtcattccaggtgccagaatcctctcagagtcattgaagggtgttcacccatcccacccaaggcttggcacactgccagtgtcttagcagggtcttgtgagggctgggggcatccaggcactcagaaggcaaaggaaccaccctacccatttggcctctggagggggcagaagaaagaaagaaacctcatcctatattttacaaagcatgtgaattctggcattagctctcataggagacccatgtgcttccttgctcagtgcaaaactgatgattctacttgctgtagatgaatggttaacacgagctagttaaacagtgccattgttttgccagtgaagcctccaaccctaagccactgggacggtggccagagatgccagcagcctctgtcgcccttagtcatataaccaaaatccagaccttatccacaacccggggcttggaaaggaaggtattttggaatcacaccctccggttatgttgctccagtaaaatcttgcctggaaagaggcagtcttcttagcatggtgagctgagttcatggcttttttttgtagccagtcctgtccctggccatccatgtgatggttttggatggagttaaacttgatgccagtgggcagtgcatgtggaaagtatcagagtaagcctctcccctccagagccctgagtttcttggctgcatgaaggttttctttagaatcagaattgtagccagtttctttggccagaaggatgaatacttggatattactgaaagggaggggtggagatgggtgtggcagtgtatggtgtgtgatttttattttcttctttggtcatgggggccaaggagaaaggcatgaatcttccctgtcaggctcttacagccacaggcactgtgtctactgtctggaagacatgtccccgtggctgtggggccgctgcttctgtttaaataaaagtggcctgg

SEQ ID NO: 1951 - DNA, 1322 bp, Homo sapiens
ggcggcctgcattgcagcggggcactgggctgcaatgggcctaggccggagtttccaagccgccaggactctgctccccccgccggcctctatcgcctgcagggtccacgcggggcctgtccggcagcagagcactgggccttccgagcccggtgcgttccaaccgccgccgaaaccggtcatcgtggacaagcaccgccccgtggaaccggaacgcaggttcttgagtcctgaattcattcctcgaaggggaagaacagatcctctgaaatttcaaatagaaagaaaagatatgttagaaaggagaaaagtactccacattccagagttctatgttggaagtattcttcgtgttactacagctgacccatatgccagtggaaaaatcagccagtttctggggatttgcattcagagatcaggaagaggacttggagctactttcatccttaggaatgttatcgaaggacaaggtgtcgagatttgctttgaactttataatcctcgggtccaggagattcaggtggtcaaattagagaaacggctggatgatagcttgctatacttacgagatgcccttcctgaatatagcacttttgatgtgaatatgaagccagtagtacaagagcctaaccaaaaagttcctgttaatgagctgaaagtaaaaatgaagcctaagccctggtctaaacgctgggaacgtccaaattttaatattaaaggaatcagatttgatctttgtttaactgaacagcaaatgaaagaagctcagaagtggaatcagccatggcttgaatttgatatgatgagggaatatgatacttcaaaaattgaagctgcaatatggaaggaaattgaagcgtcgaaaaggtcttgattctgagaatgaatttggttagttgcagaagatacattggctctaagaggatatattttgagaccaatttaatttcatttataagaacatagtaattaagtgaactaagcattcattgttttattaatactttttttctaaaataaaacttgtacaccagtttattactctaaaaagagaattacacatgccaaatggaccaatgtccatttgcttattggaggcaaagctacaatagaagtcagagcatcaccagaatggtctttaatgagcatggaacctgagcaaagggaataggtgggatgaattttttttttaattgtgaaacaattcataagcacaatatgatttacagaataataaacattcatgtacccactatcaggttaagaaatagaacatttattaatatgtaggaatgttaagaaataaaacatttaataag

SEQ ID NO: 1952 - DNA, 1897 bp, Homo sapiens
ctccgaacaggaagaggacgaaaaaaataaccgtccgcgacgccgagacaaaccggacccgcaaccaccatgaacagcaaaggtcaatatccaacacagccaacctaccctgtgcagcctcctgggaatccagtataccctcagaccttgcatcttcctcaggctccaccctataccgatgctccacctgcctactcagagctctatcgtccgagctttgtgcacccaggggctgccacagtccccaccatgtcagccgcatttcctggagcctctctgtatcttcccatggcccagtctgtggctgttgggcctttaggttccacaatccccatggcttattatccagtcggtcccatctatccacctggctccacagtgctggtggaaggagggtatgatgcaggtgccagatttggagctggggctactgctggcaacattcctcctccacctcctggatgccctcccaatgctgctcagcttgcagtcatgcagggagccaacgtcctcgtaactcagcggaaggggaacttcttcatgggtggttcagatggtggctacaccatctggtgaggaaccaaggccacctctgtgccgggaaagacatcacataccttcagcacttctcacaatgtaactgctttagtcatattaacctgaagttgcagtttagacacatgttgttggggtgtctttctggtgcccaaactttcaggcacttttcaaatttaataaggaaccatgtaatggtagcagtacctccctaaagcattttgaggtaggggaggtatccattcataaaatgaatgtgggtgaagccgccctaaggattttcctttaatttctctggagtaatactgtaccatactggtctttgcttttagtaataaaacatcaaattaggtttggagggaactttgatcttcctaagaattaaagttgccaaattattctgattggtctttaatctcctttaagtctttgatatatattacttgttataaatggaacgcattagttgtctgccttttcctttccatcccttgccccacccatcccatctccaaccctagtcttccatttcctcccgccagtctccattgaatcaatggtgcaggacagaaagccagtcagactaatttccttctttcctcgcacttctccccactcgtcatcttttaactagtgtttcacaaggatcctctgaaaccctctctgtgccccaagtacagatgccattacttctgctttcgtatctcctcaggcaaaagtggagggtgccttatgggccctcctcataggttgtctctgcatacacgaacctaacccaaatttgctttggtgccagaaaaactgagctatgtttgaacaaagatgtcgtgcaaactgtactgtgaacaacagttggtttaaaatatgaggggcaaggaggaggatgcatttcaaaagcttgattgatgtgttcagagctaaattaagaggagttttcagatcaaaaactggttaccattttttgtcagagtgtctgatgcggccactcattcggctccccagaattcctagactgggttaatagggtcatattgtgaatgtctcactacaaaatgacttgagtccagtgaaatctcattagggtttaagaatatttcagggatccttaatgttttgatttttgttttctgaaattggattttattttattttatcttataatttcagttcatctaaattgtgtgttctgtacatgtgatgtttgactgtaccattgactgttatggaagttcagcgttgtatgtctctctctacactgtggtgcacttaacttgtggaatttttatactaaaaatgtagaataaagactattttgaagatttgaataaagtgatgaagttgc

SEQ ID NO: 1953 - DNA, 3259 bp, Homo sapiens
ggccgtcgggtgtgagctgcgccgaccgctctgagggttcgtggcccaccgctccttcgcggtccctgccgccaccgtccacgctcagcgttgtagagaagatggtgggtcggaacagcgccatcgccgccggtgtatgcggggcccttttcattgggtactgcatctacttcgaccgcaaaagacgaagtgaccccaacttcaagaacaggcttcgagaacgaagaaagaaacagaagcttgccaaggagagagctgggctttccaagttacctgaccttaaagatgctgaagctgttcagaagttcttccttgaagaaatacagcttggtgaagagttactagctcaaggtgaatatgagaagggcgtagaccatctgacaaatgcaattgctgtgtgtggacagccacagcagttactgcaggtcttacagcaaactcttccaccaccagtgttccagatgcttctgactaagctcccaacaattagtcagagaattgtaagtgctcagagcttggctgaagatgatgtggaatgagaaacaaatgtcaacataataaaatctcagttaaaaatattttaaaaattcttggtagttgagcagctctgggggaataagggcaaatatgcttgttatgaactacactgaaatctaccaaagttaatgtttactttgtgtagatccatttgtctattttatttatttttcccagtgaaaagtgtattttgatagagaacttttcattctataaatacactatgagttactaaaatatcatggattttgtttattcctgaaacatagttacatagttaaactgtacatatgacatggcttatgttaaaaatacccagtgctcagttttgaaagataggcaaaaaaaaaaaaagtataggagaaactgaagaatgtacacttttttagagggcacattttgctgtaaatctggaaatttgatagacttgactgtgtttgtgaaaactgagcattaaaggttttgattgatcctttctttccatttaatctctgagacgtaaatatgtgaggtgtgctgctgtgctgggttaacagcttccttccctttctgtgtagcagtcttgaaatgttctgtttaaatcagtaggcttaatgtgttctgggtatttatctccttgtattttaaatatatgtagttgcaaatagcaccaggaattagatttctgtacacccctaatctagccttgtgagcttcgctagttaatgtgtgctcactttccctccatttgttacgtgagagaatgcgtctgctgatcactgaagtgtcccttttagcttctgattcattgggttctgttgggcatctttaaatccaccttaacctgaggaatgtatgtgggcaaccaggccctgcatttttttatattctgaattttgcatgcttgcctgacttagtatttctgaattgatgttttttttaatggtataactatcttgattttcactgaaattatatggttctgtcactactctgtaaattaatccgaaacttttaaggtaactgggatgatctgcttgtaaaaatgcttgttgccttttgctttatcttcagtgtacctccttaatcctgcttcaacttgattatcttgtgaaacgatgagagtaagttgcaaccttgtgactgaaaacttgaaaagagtggagcaggtgggacctcttattctcaaatagtgacatattctccgtagtcacagtttcagaactgagtaaggatccttggtacttggtggcatctgttgaactgaggagcatttctcattgtaaagattgcctttgttctgtctaaaagtctggagaaatcccaaagacttttcctatgtactaggcattttattttgattgacttacaaactcttcttaatcattatcaatctcggtttttttgtggtgcagtggaaggagaaataggtctagtttctgcctctgattagccgcacagccttgaacaaatcacatttcatctttgaacttacctctactgttagactaggcgactcacatttgaggacttttctcgggtatcttgagggtttgtgatcctgaacccttaaacagtgcttttttgttacacaggagggcttttttggggggatgaccagtacagacatgccagttagttttactagtgggatcccaaatccaaagcagtgtagtggtgattggtcagtgactaaccaggcagctaagaagtcttaggcagcagcccagacatgtatagaggggcagttagagggagaacaggggtgggaaagggagcaaggggcagatagctcagcaaggaaagaatgggctcagaaaaaggagggctggctggaggagtgaggggcagcttaagtttggggagggtagaaacgccgtttccttgggaactggagtgcagtatgagctgggtgtcacttggctctgaacatactggctttgctgtaatgcttgaaaaggcgttggtatcttcattttacagttcattaacccaagtacgttttcttatttaaatgacaactttggtgctttaaaatgaggtaccactttttaaagctagctgtgtcgagttaaagaaaaaatcagcagttttttctcccagaaatgtaattgccaaacacttttcatccccatcttaagttttacaaggtgatgtaatcagcttgttgtagtgatgctggccaaatggtgctcagcaggtgagaacaaaaaaaccccagatttcagtgaactaatacacagcttgagcgtttccatgtgctaatgttgcacacttactaaaaaactttggaaatggaaaataatgtattagtgcaacagttgatgtgcttctttgggcaaagatatagttttgttccacaatttgtacttaaaagcgaaagaacattgaaaacatagacttactggctgtagcaatgctggcctgttaactgataactagaacttaggttcacgtttatgtaaagtgtgtaaaacctagtagagcttgcatagtcggcactcagtaaatgtttggttccttttgccccttggtaagtttattttaccatcctcccacctgccattctgactttattaaatcaacatgtggaccagagtgttaatgagatgttattgcagaagagattgagaaaattggtatatcatgcagataacatacaaaatctttttgtaacgtaaaaaatgcagttttattattgcttgtgcctcaactgtttaagtgaatattaaagggcttggag

SEQ ID NO: 1954 - DNA, 5316 bp, Homo sapiens
cggacgcgtgggaacgaagccacccattacggtatgatgatgtcaaacgtgatgctgatgctacagttacagcccctgctggcgcagcctctctgattctctctccctctccgcgtccagtgctgggctttttcagacaagtgcatctcctaaccaggtcacatttcagccgcgacccactctccgccagtcaccggaggcagaccgcgggaggagagctgaggacagccgcgtgcgcttcgccagcagcggggtgggaggaaggacattaaaatactgcagaagtcaagaccccccaggtcgaacccagaccacgatgcgcgccccgggctgcgggcggctggtgctgccgctgctgctcctggccgcggcagccctggccgaaggcgacgccaaggggctcaaggagggcgagacccccggcaatttcatggaggacgagcaatggctgtcgtccatctcgcagtacagcggcaagatcaagcactggaaccgcttccgagacgaagtggaggatgactatatcaagagctgggaggacaatcagcaaggagatgaagccctggataccaccaaggacccctgccagaaggtgaagtgcagccgccacaaggtgtgcattgcccagggctaccagcgggccatgtgcatcagtcgcaagaagctggagcacaggatcaagcagccgaccgtgaaactccatggaaacaaagactccatctgcaagccctgccacatggcccagcttgcctctgtctgcggctcagatggccacacttacagctctgtgtgtaagctggagcaacaggcgtgcctgagcagcaagcagctggcggtgcgatgcgagggcccctgcccctgccccacggagcaggctgccacctccaccgccgatggcaaaccagagacttgcaccggtcaggacctggctgacctgggagatcggctgcgggactggttccagctccttcatgagaactccaagcagaatggctcagccagcagtgtagccggcccggccagcgggctggacaagagcctgggggccagctgcaaggactccattggctggatgttctccaagctggacaccagtgctgacctcttcctggaccagacggagctggccgccatcaacctggacaagtacgaggtctgcatccgtcccttcttcaactcctgtgacacctacaaggatggccgggtctctactgctgagtggtgcttctgcttctggagggagaagcccccctgcctggcagagctggagcgcatccagatccaggaggccgccaagaagaagccaggcatcttcatcccgagctgcgacgaggatggctactaccggaagatgcagtgtgaccagagcagcggtgactgctggtgtgtggaccagctgggcctggagctgactggcacgcgcacgcatgggagccccgactgcgatgacatcgtgggcttctcgggggactttggaagcggtgtcggctgggaggatgaggaggagaaggagacggaggaagcaggcgaggaggccgaggaggaggagggcgaggcaggcgaggctgacgacgggggctacatctggtagacgccctcagaagccggctgccgggggggactcaacagcagagctctgagcagcagcaggcaacttcgagaacggatccagaaatgcagtcagaaggaccctgctccacctggggggactgggagtgtgagtgtgcatggcatgtgtgtggcacagatggctgggacgggtgacagtgtgagtgcatgtgtgcatgcatgtgtgtatgtgtgtgtgtgtgtggcatgcgctgacaaatgtgtccttgatccacactgctcctggcagagtgagtaacccaaaggccccttcggcctccttgtagctgttttctttccttttgttgttggttttaaaatacattcacacacaaatacaaattgacaggtcaaaatccatgaaatgagatcccccagccgtgtcctccagcccagccctgaccccttggtttctaccctggctccccttggtttctaccctggctcaaccgacccctgtctgcccttctccctcctgcttctgaggtcaagctctggcctgcgagcctgtccccattgcaaaggggagggaggggcagggagctgtctaccagctgaggtcctcccaaaactgggccgatgtggtgtgacatccccaccagcctcagatgagacgggccaggacgcccagccacagcaagccctgtccctttgccggatccccaaacactagagaagctctcctaacccaaggcggagaatgaaggtggtggcggcagaggaggagggcagcagctgagaggccagggacagggtgcctcgccaagctgtctgaggtctgtcccaggtggcccaggtggtgcaggtagaacagggtgaggagagggggtcggctcaacaggaggaggctgtggctgcagagcctggaggagcttttaggtgttgagatggggcagctctgaatcctagaccctggaatagcctgtcccttttctctgggtctcgtggtggagccatgatctgggctgctctcttggggacactgggtggtggttacacagttgacctctgcctggctcccccttggtgcaactcctgcctccatcccccttgctggggtcccctcatccacttgagggcgcctgagggccaggagcagcaggcaaggagcctgggtctaggctaagggggtgtgtgcccacctcctccctgacccttaacactcctgtcctgcccagaccaacagagagagctgtccctgagaccccggagagaagcagctgccgaaagctgcagcctttccgcactctgagaccatgatcttcctcctgccaggggagagccacccacaggccatgtccagccccacttccctcagcccccagggcttccttctggcccctctgaggattccctagggctgccccgcagaggggcttccccaagctctgttttgaagcctgcaatgtggaaaagtgagaagtcagagggaacaggacaggtgcagccgggctctgaggccacacctcacacctcgctgttccccaacatcccctgagcagtgtgagctcatctcaccagatgagaagaggccctgtgcatttcttttgtttgtttgttgctgttttcccccacccatccagttctcctcagcaaagcaaattccttaacacctttggtggagaatttcttacccagacttggggctgtgatgcccttcagtgcgtggtgagtgcagcgtgtgtgcgtgtgcctgtgtgtgaacctgggggccatcctggtggcctgggagcgtgaggagaggccccctgtgtgctgggtgagtggtgggtgtggggtcaatgcagtgaggctctctgggtgaggctcccaacctggcagtccccagcctcccagcatctgtgagcgtctgttggactttacagaagagcctcatcccgtctgcccctcactctgccctggaatcaacatcttccgagtccttcttgggggaaatagcagagccccacttaactccataaactgcttcccattccgcagcccagttctgattgttgaggtgtcgcgtcgttccaggtcccccagtcccctctttctcctgtcctctctctgtccttcacctccccactccagccccggctcagttcagggaaatgctgttccatatcagccctctgctctctgaggcagccgcgcctctgactcggagctacttgaaacttctgctcttgctaggattggagtctacctatctcttccatttgtcccagctggagttctggaactttcctcctcggggtgggggtgggggttgttaaggatgctggggggcctggggaaggaaggagttcagaggaagggtgtcccctgtcctcttgatgtcaccctccgctcctgggacacgtgctctctctgtctctgggtcttctggctgtgcacgtttgtgtgtccttgtaaatatgttttaggaagaaagcaaaagggactgaactagcctctggtaggattgcaggggtccagccttgcctgtttccgaagcccccacactgcctttcgccccactgagactggtcccctcaaaaggtagacaaaacagcagctccctgtggagctgaagggcggcctcaaagtggctttttgttagacaaggttaaggtttcctcatgagcaaggttgcagatcggtccttcctcagctccttgatttgtgaccttgaccaaggggcctgccacccagcccctccagtgccctctcctcgatgcctcgctccttcctgcccccactcccctggcttaggcaggtaggggaattagggccatgctggaagaagcttaaccatgtgttcaaagaacggtttcttgcttgcttggtcctggaactccccttggctgccccaggcctccttggcccatgggtgctgggggaggtggatgtcagatctggtaggttgcagcagagaaaataaatgtgccttgagagaccactcagagagggtccaagggtgatggagaaggaagcatggcctgggagcttggaagggaggggtggtgggtggcggcatcttgactgccccctgttgtcccacacgtggggggtggtcaccccccttcactccagcccgcctgccttcagccttccatgagcttcacctgcttccaacttcactttggagggggtggggtccgttggcatcaacacggggaccctctgcttcaccaaagcccgagccctcagcccctggggagaacaaatggctgagctttgatacctggggtcgtcgagaggctgcgggctggcggcagtcccaggggagagacaccacagaaggagacccagacatcccgaggaagttcccagcagagcaaactgctttccagcctgaagcctgcttaaactgtgtgatgtgcaataactgagcttagagttaggaattgtgttcaagtgcttggatttccgtctgtagatttaactgctgaaattgtatctctcagtaattttagatgtcttttaaaaaattgaaaaacaaagtgttagactgtgtgcgtgtgcgttgatgggcactcaagagtcccgtgagtcatccagccctgcctttcccctgcgcccccatcctctcacgtcccgccctgcctccacttggggaccctgcctcgtgtcgtctttatctgcctattactcagcctaaggaaacaagtacactccacacatgcataaaggaaatcaaatgttatttttaagaaaatggaaaataaaaactttataaacacc

SEQ ID NO: 1955 - DNA, 5766 bp, Homo sapiens
cgccgccgcagccgccgccaccaacgccaacaacaacgtgtcgggagcagccgcggccgaagccggagcaggggccggagtcgcggctggagtggggcctgcgcgtgtgagtggccgagagttgcccgtgccggagacctcaaactccgggcgggagcgctttcggtgggccgagccgccgtcgcccgcggcaccgtgtccccaaggcccagacagcggggcgggggtctatcaggcgcgggactggcttctctcaggccgacccttctagccgggctccggatcttcctcggcctcgggcccccttcacgttcaggacggaggccggagaacggtgatcatcacacaccccagccggcttcctggccagggcattttctctgcggccaagcagtgttgggattgtagctgctgggagccccctcctgccgccacctctcctgcaaggaagggactgacgcgttcccactttcttactctgcacctccccactctcttcccattcaagaacgagtttctcttccctctccattggaaatcctgctccggaggtccaaaacacgtattttaagcgtgcccttcctcacctcctggagcacccttagaagtattgcctacttatccgggctgagaatccttcatttttgacctggcttttttttcgccctttgggagataaaggtccctctccaccctctactaacactctgcacccaaggccttatcctttggggtcaccagctccttggccatttctatgtgatttcccccacccatctgagttccagtttcctctgggctccaatctccagtccctggcggatctggtcagtcccacccctaggtgggagtgaccagggggctctggcccaggattcccaaccctggaaggcagctccaaggcaggaagagaattgggcatcgggtacgaacctggcagctcaggagtcggggctccactcaccccacacaaaaagatgaaaaagcgcaaagagctcaatgcattgattggtttggctggggacagccggagaaagaagcccaagaaaggcccaagcagtcaccgcctgcttcgcactgagcctcccgactcagactctgagtccagctccgaagaggaagaggaattcggtgtggttggaaatcgctctcgctttgccaagggagactatttacgatgctgcaagatctgttatccgctctgtggttttgtcatccttgctgcctgtgttgtggcctgtgttggcttggtgtggatgcaggttgctctcaaggaggatctggatgccctcaaggaaaaatttcgaacaatggaatctaatcagaaaagctcattccaagaaatccccaaacttaatgaagaactactcagcaagcaaaaacaacttgagaagattgaatctggagagatgggtttgaacaaagtctggataaacatcacagaaatgaataagcagatttctctgttgacttctgcagtgaaccacctcaaagccaatgttaagtcagctgcagacttgattagcctgcctaccactgtagagggacttcagaagagtgtagcttccattggcaatactttaaacagcgtccatcttgctgtggaagcactacagaaaactgtggatgaacacaagaaaacgatggaattactgcagagtgatatgaatcagcacttcttgaaggagactcctggaagcaaccagatcattccgtcaccttcagccacatcagaacttgacaataaaacccacagtgagaatttgaaacaggatatcctgtaccttcacaactctttagaggaggtaaacagtgccctagtggggtaccagagacagaatgatcttaaactcgagggaatgaacgagacagtcagtaatcttacccagagagtcaacctgatagaaagcgatgtggttgctatgagcaaggtagaaaagaaagcaaacctgtccttcagcatgatgggtgatagatctgccactctgaaaagacagtctttggatcaagtcaccaacagaacagatacagtaaaaatccaaagcataaagaaagaagatagttcaaattctcaggtatccaagctaagagagaaactccagctgatcagtgctcttacaaacaaacctgagagcaacaggcctccagagaccgccgatgaagagcaagtagagagtttcacatcaaagccatcagcattgccaaaattttcacagtttcttggagacccagttgagaaagctgcccaactaagacctatctccctaccaggagtttctagcactgaagatcttcaggatttattccgcaagactggccaggacgtggatgggaagctgacctaccaggaaatctggacctccctaggttctgctatgccagaaccagagagcttgagagcatttgattccgatggagatggaagatactcattcctggagctaagggtagctttaggtatctagcttcatcaggcatattttagaaatggactgcctaatatctatttacctaacaacaaaacaacccttacttacccatcagtcctctagtcctccaaactactgtagcagatactttgccaccttttaacttgtttgaagaagctatataaaagttatttttttaaagaagaagaccattttacttatgatgttcagaaatctatgatttcctacaaccagtaagatcttacattttaaaattgccagaaaaaaaattaaagccctctttttttctctttcctttttttgaggggaggagaccttatcttttaaagctgggaaatgtatatagagagagaataagccacttttatatttcacttaaatttgccttaaattagctgcactttatagagactcagaaaatgtcttttctttaaaagataggccttttctgtttgtaaatatttaaatgaaagaaagcattgtgcatattgtgtggaaagtaggaagaatggttttgaacaggatatgaacaaatgacttattaaaaattgctgatctggtgtaggtggcagctgaaactacatccatgtctccataaggcatccctcaaaggcccaggcgctgccagggggtttgtcctggtagctggaggaaccgatttcagggaatagacactggagacaatactgactccaggcatggctcatggaagtaggattctggttctttgttcctattccctcagctaatcccaacctgggaatcagagaagtcttggggatttttctcatttttagtactatttcagggtttatgagcataaaaagttatccattggggagctccattttccctgctgagtgagctagattgccttccccacccacccacttaagtctgtcttaaagccgtagctggctcccaccaccagtaccatctccatttgaatggcagggctaaattcccccagccattatctcacactgaccacccagagctttagaagagagctgtgcttctaattttgacccagaaaaccataccccttgagattttacctagaggctaaccaagagcctaatatgtttctctgggggatgactaaagccaaaaaggctgtgagatgaaacatgtgaaataatattcagtttccttaccattaccagctcagaagtagctagaggctttctacccaaaggatgccaaagtatagcagggcaggcctggagctagggccttcacatggtggtagcaagtttttcaaatctaatacaatcaagtacaatacttcctttaaatgcttctgtggacctggcatgaaagatccctagattgaaaggaataatacctccatgtctcctgtatgttgagtctagaattgctgtgttgttcttagaagcagtctttgggcaacaacttgaaaggggaaaaaaaaactacaaaaacttaactttggtataggccaagtcagggagaaagtagagaaagctgtcatgccacagacttctttagtggagatcatttcctttttaactttgttcaggttgcccttcaccatggatacagtccggtacccttaaacatttaagggctgtttttttttttctttatatgatgttcagcttggtattaaccaaacttaaattttttttccagaagtattaaaatttagttaaagcaagatgaagtcttttcccatgaatgtgtccccttatctcattatagcttatgctcagtttcactttcttggaaaggttaaaacaaattagcctggcactttaggtaacttgaaaataactctcacccttctgactgccttccatccactctcaccccacacctttttttaatatatatacacccttacagattttctaacaaccaaataaaattctagcaataaattgaattatactgctatatttgtatatactgtaccataaatagtatgtctgtacctggaaggtatttttttgagaactgatttatatgaaatatacttgagggtaatgtagcttgtcctttttagtttcaaattcttattcataggcagatactttgaagacaccttaactctttgttgtgtgtattttcccttgcatcagataactatacatggagaaatccattttgttttttggtttatcttctgttcttcctaccttgtgcttgtctgactagtatcacccctgagccagtatacagtaccatcctctccccctaccaagtttggcagaggtgtttatactgcattctcagatctatgaatatttttgtcatcctgcctgagaaagtacatcttccaggcaaaagtagggtatcttgaactcctttcttctgagttgagcagactcactggcttaagcatcccataagcctattatttagtgtgaatttgggacttttatttgtatgttgtcttaacttactgagcctgtgacttgtatttagctgtagtcaagcctcaccagccatatctcatctctgagaggaagactggatagtgagtttggttttggttttggttttaaacccttttaccttttcagtctggcagctcctactgctgctttcctaagttactcaaagcactgcttcttggtccttgttttcttttgccttgtactatcttgtataatgtttactaaaagagcctccccataaatcagagaggcaaaaaggtagcatataaaaagaagaaccaaaagaagagaaaacctgacttctagatgactgtggtgtcatctaaaaggcagaggtgcctgaccctcaggaatgtgtatgatgcaacagagctgaagaatgggttcccttcacctactgctggccattgtcccttctgttggagattcctttctttatggttgctgttcataaccccttcaacacccccccttgctggtcctgccggtcacagttgaggattttggctgtgatgggctcatactcataatggcctgttgagttgtttttagtgacaggttttgtttgctgcacacctcattggcttgcttaccaacaccagctagaagtggtccctctttcatatccaaaccagaacacatttgggtattcctgagactttatagagcgtgtattgtttgttatacgaacctaacctaccttgttgttttctcatattaagaaatttaaatctactttgttttagtgaagctattttggtaatgtataagcaattttggttctgtttagggagaattcagggtttccatgacttgatttgagctttgcatatttcaaataagtaacacagccattttaatttagctaaataaaaaaatttcttttttctctc

SEQ ID NO: 1956 - DNA, 5253 bp, Homo sapiens
gtcgccgccagcgtctgtgccgcgtcccttgctctgtgaaggacaggcctcgcgccaggaccccggtggacttctgaggtgccaggatggtgggagaactccgctacagggaattcagggtgcccctggggcccggcttacatgcctatcctgatgagctgatccgccagcgcgtgggccatgatgggcatcctgagtaccagatccgttggctcatcctgcggcgtggcgatgagggggacgggggctctggccaagtggactgcaaggctgagcacatcctgctgtggatgtccaaggatgagatctatgccaactgccacaagatgctgggcgaggatggccaggtcatcgggccctcccaggagtctgcaggggaggttggggccctggacaaatctgtgctggaggagatggaaaccgatgtgaagtccctcattcagagagcccttcggcagctggaggagtgtgtgggcactatccctcctgctcctctacttcacactgtccacgtgctcagcgcctatgccagcattgagcccctcactggagtattcaaggacccaagggtcctggacttgctcatgcacatgttgagtagtcctgattatcagattcgctggagtgcaggccggatgatacaagccctgtcctcccatgacgctgggacccggactcagatccttctgtcactgagccaacaagaagccattgagaaacacctggattttgacagccgctgtgctctgctagcactgtttgcacaggccacgctctctgaacaccccatgtctttcgagggcattcagctaccacaggtcccaggaagggtgctcttctccctggtgaagcggtatttgcatgtcacctcgctcctggatcagctgaacgacagtgctgcggagccaggagcccagaacacctctgctcctgaggagttgagtggggagaggggtcaactggagctggagttcagtatggccatgggcaccctgatctcggagctggtgcaagccatgcgctgggaccaggcctcagacagaccaaggagctcagcacggtcccccggttccatcttccagcctcagctggcagatgtgagcccagggctccccgctgcccaggctcagccctccttcaggaggtcaagacgttttcgccctcgttctgagttcgcaagtggcaatacctatgctttgtatgtgcgggacacactgcagccggggatgcgagtgcggatgctggatgattatgaggagatcagtgccggggatgagggcgagtttcggcagagcaacaacggtgtgcctcctgtgcaggtattttgggagtcaacaggccgcacctattgggtgcactggcacatgctggagatcttgggctttgaggaagacattgaggacatggttgaggctgatgagtaccaaggggcagtggccagtagagtcctgggtagagccctgcctgcctggcgctggaggcccatgacagaactctatgctgtgccttatgtgctgcctgaggatgaggacactgaggagtgtgaacacctgaccctggctgagtggtgggaactcctcttcttcatcaagaagctggatggacctgaccatcaggaggttctccagatcctccaggagaacctagatggggagattctggatgatgagatcctagctgaactggccgtgcccatagaattggcccaggacttgctgctgactctgccacagcgactcaatgacagtgccctcagggacctgatcaactgccatgtctacaagaagtatgggcctgaagccctagcagggaaccaagcctacccatcccttctagaagcccaagaagatgtcctcctgctagacgcgcaggcccaggctaaggactcagaagatgcagccaaagtggaagcaaaagaacccccatctcagagtcccaacactcccctgcagcgtctggtggagggttatggtccagctgggaaaatcctcctggatctagagcaagccctcagctcagaggggacccaggagaacaaggtcaagccactcctgctgcagctgcagcggcagccgcagcccttcctggcactgatgcagagcctggacactccggagactaacaggaccctgcacctgactgtgctgagaatcctgaagcagctggtggacttccccgaggcactgctgctcccctggcacgaggccgtggatgcctgcatggcctgcctgcggtccccaaacactgatcgagaggtgctccaggaactgattttcttcctgcaccgcctgacctcagtgagcagggactatgccgtggtgctgaatcagctgggagcaagagacgctatctccaaggccctggaaaagcacctgggaaagctggagctggctcaggagctgcgggacatggtgttcaagtgtgagaagcatgcccacctctaccgcaaactcatcaccaacatcctgggaggctgcatccagatggtgctgggccagatcgaagaccacagacgaacccaccggcccatcaacatccctttctttgatgtgttcctcagatacctgtgccagggctccagtgtggaagtgaaggaggacaagtgctgggagaaggtggaggtgtcctccaacccgcaccgggccagcaagctgacggaccacaaccccaagacctattgggagtccaacggcagcgccggctcccactacatcaccctgcacatgcgccggggcatcctcatcaggcaactgactctgcttgtggctagtgaggactcgagttacatgccggcccgagtggtggtgtgcgggggtgatagcactagctctcttcacacggaactcaactcggtgaatgtgatgccctctgccagccgggtgatcctcctggagaacctgacccgcttctggcccatcatccagatccgcataaagcgctgccagcagggtggcattgatacgcgcattcgggggttagagatcctaggccccaagcccacgttctggccagtgttccgggagcagctctgtcgtcacacacgcctcttctacatggttcgggcacaggcctggagccaggacatggcagaggaccgcaggagcctcctgcacctgagttctagactcaacggtgctctgcgccaggagcagaattttgctgaccgcttcctccctgatgacgaggctgcccaagctctgggcaagacctgctgggaggccctggtcagccccgtggtgcagaacatcacctcccctgatgaggatggcattagccccctgggttggctgctggaccagtacctggagtgtcaggaagctgtcttcaacccccagagccgcggcccagctttcttctcgcgggtgcgccgtctcactcacctgctggtgcatgtcgagccctgtgaggcaccccctcctgtggtggccactcctcggcccaaaggcagaaacagaagccacgactggagctccttggctacccggggccttccaagcagcatcatgagaaacctgacgcgctgttggcgggccgtggtggagaagcaggtgaacaattttctgacctcatcctggcgggatgatgactttgtgccacgctactgtgagcactttaatattctgcagaactcaagctctgaactgtttgggcctcgggcagccttcttgctggcgctgcaaaatggctgtgcgggagccttgctgaagctcccttttctcaaagctgcccacgtgagtgagcagttcgcccggcacattgaccagcagatccagggcagccggatcggtggagcccaggaaatggagaggctggcacagctgcagcaatgcctgcaagctgtcctgattttctccggcttggagatagccaccacttttgagcattattaccagcactacatggcggaccgtctcctgggcgtggtctcgagctggctggagggggccgtgctggagcagatcggtccctgcttccccaaccgcctcccccagcagatgttgcagagcctgagcacctctaaggagctgcagcgccagttccacgtctaccagctccagcagctggatcaggaactcctaaagctggaggatacagagaagaaaatacaggtgggccttggggccagtggcaaggagcacaagagcgagaaggaagaggaagctggggcagcagcagtggtggatgtggcggagggagaggaggaagaggaggagaatgaggacctctactatgaaggggcaatgccagaagtgtctgtgcttgtcctgtcccgacactcctggcctgttgcctcaatctgccacacactgaaccccagaacctgcctgccctcctacctgaggggcactttgaacagatactccaacttctacaacaagagtcagagccaccctgcccttgagcgaggctcacagaggcgactgcagtggacgtggctgggctgggctgagctgcagtttgggaaccagaccctgcatgtgtccaccgtgcagatgtggctactgctgtatctcaacgacctgaaggcggtctctgtggagagtctgctggcgttctcagggctctccgcagacatgctcaatcaggcgattgggcccctcacctcttcaagaggccccctggaccttcacgagcaaaaggatataccaggaggggtcctcaagattcgagatggcagcaaggaacccaggtcgagatgggacattgtgcggctcatcccacctcagacgtacctgcaagctgagggtgaagacggccagaacttggagaagagacggaatcttctgaactgcctcatcgtccgaatcctcaaggcccatggagatgaggggctgcacattgaccagcttgtctgtctggtgctggaggcttggcagaagggcccgtgtcctcccaggggtttggtcagcagccttggtaaggggtctgcatgcagcagcactgacgtcctctcctgcatcctacacctcctgggcaagggcacgctgagacgccatgacgaccggccccaggtgctgtcctatgcagtccctgtgactgtcatggagcctcacactgagtccctgaacccaggctcctcaggccccaacccacccctcaccttccataccctacagattcgctcccggggtgtgccctatgcctcctgcactgccacccagagcttctctaccttccggtagccctagacttggggtcaggggaaggtagagctggagcttttacagaaattaaacccaagagtttgattat

SEQ ID NO: 1957 - DNA, 5658 bp, Homo sapiens
cacaaccgtgacagactgccattcctgagtctcttctggccatgggcccccggagccgtgagcgtcgggcaggcgcggtacagaacaccaacgacagcagcgccctcagcaagcgttccctggccgcgcgcgggtacgtgcaggacccctttgccgcgttgctggttccgggcgcggcgcgccgcgcaccgctcattcaccgaggctactacgtccgcgcacgcgccgtgaggcactgcgtgcgcgcttttttggagcagattggcgcgccccaggccgcgcttcgcgcgcagatcttgtctctcggcgctggcttcgactcgctctattttcgcttaaaaaccgcgggccgcctggcccgggctgcagtctgggaggtggattttccggacgtggcgcggcgcaaagcagaaaggattggagagacgccagagctgtgcgcgttaaccgggcctttcgagaggggggagcccgcgtccgcgctgtgctttgagagcgcagactactgcatcctgggtctggacttgcggcagctccagcgagtggaggaggccctgggcgccgcggggctcgacgcagcctcacccactctgctcctggccgaggcggtgctgacctacctcgagccggagagtgccgcggccctcatcgcctgggcagcccagcgttttcctaatgcccttttcgtggtctatgagcagatgaggcctcaagacgcctttggccagttcatgctgcaacattttcggcagctaaactcccccctgcatggcctggagcgttttcctgacgtggaggcgcagcggcgccgcttccttcaagctggctggaccgcctgcggtgccgtggacataaatgaattctatcactgctttcttcccgcagaagaacgccggcgggtggaaaatattgaaccctttgacgaatttgaggagtggcatctgaagtgcgcccattatttcattctggcagcttctaggggagacaccctctcccacaccctagtgtttccatcctcagaggcatttcctcgcgtaaatcctgcttcgccttcaggggtattccctgccagcgtagtcagtagcgagggccaggtcccaaacctgaagagatatggccacgcctctgtcttcttgagcccagacgttattctcagtgcaggaggatttggagagcaggaggggcggcactgccgagtgagccagtttcacttgctctcaagagattgtgactctgaatggaaaggcagccaaataggcagttgtgggactggagttcagtgggatggacgcctttatcacaccatgacaagactctcagagagtcgggttctggttctgggagggagactgtccccagtaagtccagccttgggggttctccagcttcatttttttaagagtgaggataataacactgaggacctgaaagtgacaataacaaaggctggccgaaaggatgattccactttgtgttgttggcggcattcaacaacagaagtgtcctgtcagaatcaggaatatttgtttgtgtatgggggtcgaagcgtggtggaacctgtactaagtgactggcatttcctccatgtagggacaatggcttgggtcaggatcccagtggagggagaagtacctgaagcccggcattctcacagtgcctgcacttggcaagggggagcccttattgctggaggtctcggggcttctgaggagccattgaactctgtgctctttctgagaccaatctcttgtggattcctctgggagtcagtagacatccagcctcccattaccccaaggtactcccacacagctcatgtgctcaatggaaagctgttactggttggagggatctggattcattcctcctcatttcctggagtgactgtgatcaatttgactacaggattgagctctgagtatcagattgacacaacatatgtgccatggccattaatgttacacaaccatactagtatccttcttcctgaagagcaacagctcctgctccttggaggtggtgggaactgcttttcctttggtacctacttcaacccccatacagtcacattagacctttcttccttaagtgctgggcagtaaggactggactaatattcaggacccactaaagtagacaataaagttttccacaaataggatgaccctctagctatagatactgccactcctcctttccccatcctttttttcccttagcactattcagtgcaaaaagtgaaaaaggttggtaaaataggtaaaatacctagaaacaatcactacagaaaacagctgaagacagtggccatgcagtccgagaggagtagtggtctgcctctaattttctaatctaagttcgtttattgagttacagtggtctttagtaaagtaaaacaatttcccaatcccaggccttgtgatttgagatggtaccttagaaaaagttacacgcagttccgtggttgaatatatttgagatggtaccttagaaaaagtttcacgcagatccttggttgaatatagttgagggagcgtagtattgacaattcttcatgtaggaaacctgaaatgaacacagtcacagtttgattaaaacattgtcctgtttgttgcaacagaaaactcggatagttttaacaacaggaaacacttgtaggacttcctttaccaacatactttttaaatgttttgctattggttccatatttatttagatttataagtgtcaataaagcaaacttttgatgcctcaattcattttgcacggggtataataatgttttgttccagatatactctccacctttcactgttctgtgctccaagaggctgacctttatgggctgcatcaaggagctctctttactttttggttgagttccaccagtcagaggcaccagaggggaatgggggcaaaaagaagagtgagagtgagttggtatttattcccaattcttcccctgttggtttgcaagttggcagtggcagcattcttctgtcaaaggctacagctcctgccgtgtaatcctttcctgaagacagagttctaattctgcatcatcccaggtttcagtaattgttcctttacttcaccttttcaggcctaggagttgtgatggctctttgctagacctgaactgtactgtccaatgtggtagctattgacaacatgtgactatttaaacgaattaataaattcagtggcttagtcacattgaccacattttaagtgcttaataactatgtgtggctttggctactgtattagacaatgtagatgtagaacatttcatcgttacagaaatttctactggacactgctgactggatatcttgacttggtttcccttaaccctactcagccccttatagttagcatcccattaaactcaattatcccttttaaatgggaatctgttgcctagtgagccatgtgagatcaatgaaatagctattcatccttaaaatttgagccttaatttgtcatctaaattatgcataccttgtgaaatatacacctcaaaaaatgtagtggctttggtggtaataagtgtattactttagtatttcttcttagtcctagaaaccttagtagttttcattctacaagtgcctaaatgattattatgaaccatcattgatgacaaattgcatcctttatttctattaattttgcatataaatggatgtgaaaggtgattaatataaaaaccaagtagcaaacacaaacctaagtgtatggagaggacagtcttggctctgttagatgaagcctccccgggggagaccagctgaatgagggttgtggtataggctgggcatggtggctcacgcctataattccagcactttgggaggccaagacagaaggatcacttaaagccaggagtttaagaccagcccaggcaacaaagtcagatccccatctctacaaaaaaataagtaggcacggtggtgtgtgcttgtagtcttggatactctggaggctgaggtgatagtgagctgtgattgtgccactgcactcctgcctggttgacagagtgagaccccgtctcttaaaaagaaaaaaaaaaaaggttgttgtccaacttcagctttcctgagactttgtaagagccatttctagggaaagcattggttatggctatgactgagtcctgggaaacagggcttattacagctgggaagacatctggcaaggcgatcagtgggccaggtagtagaaaactggcagggaatatgatcagcaggagaaaatggctgttctgtatttcctgtttctaagtttactacagcacaccccagctttcaggagcagataaaagcagaacactgtgatgaggccaggcgcagtggcacatgccttgatcccagcactttgggaggccaaggctggcagatcacttgaactcaggagttggagaccagcctggccaatatggtgaaactccgtctctacccaaaaaaaaaaaaaaaaggaagttaatgaaaaatatcatcaaacaaaagggtaaacaagtcttagtgaaaaagggcaaactattggtgcaataatataccctttaaagacatcatcatttcaaatagggctgtacaaatatagaaagatgtaggatgaattcaaaacctatgactaaataatttaaaccaaacgcaataatgatgagaaagaaagaagatccatgttcaattggggatttatagtttctttataaagatgaagtacagtgactctagtgtagtggttctcaatgggggacaatttcatcccccacatttagcaatgtctggagacattttggttgtcaatactgaggggtgctactaatgttaggagtcaggtatgccactaaatatcctccaatgcacaggacaactttaacaaagaattacttatacagtctaaactgtctatactgccatttttgacaaatcctgcttcagcctatgtctgtcattatgttgataattaactgagtaattttgaggccatacctcacagtattaaacagttggatgtgtagttgtgtgggtgtattattgaaagacagtaggcttttaaggacttgagtgactttgaggccttaccttatgaagcagtgagcagcagtgataagccagctgttactaagccatgtggctccgcgtcggtagacattgttctgtggaaggctagcttgccagggccattctccttcctcagcatccagaccctctgctattctgttgccagagggagttattgtgcattgtccacaacctgctcaaaatacagttctgcttatgcacgtatattggtatagtagaacctaccacagagaatctatcccataaaaggaactcaagaaatatttgtagaaatgaagtccatattgggccaggtgcggtggctcccgcctgtgtaatgccagcattttgggaggccaaggtgggcagatcacaaggttaggagatcgagaccatcctggtcaacatggtgaaagccagtctctactaaaaatacaaaaattagctgggtgtggtggtgtgtgcttgtaatcccagctactcaggaggctgaggcaagagaatcacttgaaccagggagtcagaggttgcagtgagccgagattacaccactgcactccagcctggcaacagagcaagactctgtctc

SEQ ID NO: 1958 - DNA, 2109 bp, Homo sapiens
ctgttcacatggctcaactggaaacctgtttcatgaacaagcttactcaggaaccatctggtggtattccagcacattgttcttcagggggacgactctaagtcgctttgtggtggcagcagcttagaatcagtatttgtggttgggaaagatggacttacgggagcttggtaatgcaggtggtgaaggagcaggttatgagagcacttacaaccaagcctagctccctggaccagttcaagagcaaactgcagaacctgagctacactgagatcctgaaaatccgccagtccgagaggatgaaccaggaagatttccagtcccgcccgattttggaactaaaggagaagattcagccagaaatcttagagctgatcaaacagcaacgcctgaaccgccttgtggaagggacctgctttaggaaactcaatgcccggcggaggcaagacaagttttggtattgtcggctttcgccaaatcacaaagtcctgcattacggagacttagaagagagtcctcagggagaagtgccccacgattccttgcaggacaaactgccggtggcagatatcaaagccgtggtgacgggaaaggactgccctcatatgaaagagaaaggtgcccttaaacaaaacaaggaggtgcttgaactcgctttctccatcttgtatgactcaaactgccaactgaacttcatcgctcctgacaagcatgagtactgtatctggacagatggactgaatgcgctactcgggaaggacatgatgagcgacctgacgcggaatgacctggacaccctgctcagcatggaaatcaagctccgcctcctggacctggaaaacatccagatccctgacgcacctccgccgattcccaaggagcccagcaactatgacttcgtctatgactgtaactgaagtggccgggcccagacatgccccttccaaaactggaacacctagctaacaggagagaggaatgaaaacacacccacgccttggaaccgtcctttggtaaagggaagctgtgggtccacattcccttcagcatcacctctagccctggcaactttcagcccctagctggcatcttgctcaccgccctgattctgttcctcggctccactgcttcaggtcacttcccatggctgcagtccactggtgggacaagagcaaagcccactgccagtaagaaggccaaagggcccttccatcctagccctctgcaggcatgcccttccttcccttgggcaggaaagccagcagccccagactgcccaaaaacttgcccaccagaccaagggcagtgccccaaggcccctgtctggaggaaatggcctagctatttgatgagaagaccaaaccccacatcctcctttcccctctctctagaatcatctcgcaccaccagttacacttgaattaagatctgcgctcaaatctcctcccacctctctccctgcttttgccttgctctgttcctctttggtcccaagagcagcagccgcagcctcctcgtgatcctccctagcataaatttcccaaacagtccacaggtcccatgcccactttgcgtctgcactgtgatcgtgacaaatcttccctcctcaccagctagtctggggtttcctctccctgccccaggccagaactgccttcttcatttccacccacgctcccagcctcttagctgaaagcacaaatggtgaaatcagtagtctcgctccatctctaatagactaaacctaaatgcctctaggacggactgttgctatccaagcgtttggtgttaccttctcctgggaggtcctgctgcaactcaagttccacaggatggtcaagctgtcagacatccaagtttacatcattgtaattattactggtatttacaatttgcaagagttttgggttagtttttttttttttttttttgctttgtttttgtacaaaagagtctaacattttttgccaaacagatatatatttaatgaaaagaagagatacataaatgtgtgaatttccagttttttttttaattattttaatcccaaacatcttcctgaaaataacattcccttaaacatgctgtggaataaaatggattgtgatg

SEQ ID NO: 1959 - DNA, 4933 bp, Homo sapiens
cagaaatgcaacaagtagtacccggggtctgcagagcgccccgcgccgcctgacttggccgggcgaagcccgcctgcagagacccgggccggcctccggacaaaggacggaggaggggctggacggcgctgcgaagtccgaaagaggccatttagcgactctggccaggctaaggggaatgcagaggagacacagagccggcgggccaagaggacgatccggccgctgcacgcagggcgggaggcgatggaggctgcccgcgccttgcgcctcctgctcgtggtgtgcggctgcctcgcgctcccgccgctggccgagcccgtgtgcccggagcgctgcgactgccagcatccccagcatctcctgtgcaccaacagggggctccgcgtagtgcccaagaccagctcgctgccgagcccccacgacgtgctcacctacagcctcggcggcaacttcataaccaacatcacggccttcgacttccaccgtctggggcagctcagacggctggacctgcagtacaaccagatccgctctctgcaccccaagaccttcgagaagctctcgcggctggaagagctgtacctggggaacaacctcttgcaggcgctcgccccgggcacgctggccccgctgcgcaagctgcgcatcctctacgccaacgggaacgagatcagccgcctaagccgcggctccttcgagggcctggagagtctagtcaagctgcggctggacgggaacgccctgggggcgctgccggacgcggtcttcgctcccttgggcaacctgctctacctacatctggagtccaaccggatccgctttctgggcaagaacgccttcgcccagctaggcaagctgcgcttcctcaacctctctgccaacgagctacagccctccctgcgccacgcggccaccttcgcaccgctgcgctccctctcctccctcatcctctcggccaacagcctgcagcacctcgggccgcgcatcttccagcacctgccacgtctcggcctgctctcgctcaggggcaaccagctcacgcacctcgcgcctgaggccttttggggcttggaggccctgcgcgagctgcgcctggagggtaatcggctgagccagctgccaactgcgctgctggagcctctgcacagcctggaggcgctggacctgagcggcaatgagctgtccgccctgcacccggccaccttcggccacctgggccggctgcgcgagctcagcctgcgcaacaacgcgctcagcgccctatccggggacatcttcgccgccagcccagccctttatcggctggatctagacggcaacggctggacctgcgactgccggctgcgaggcctgaagcgctggatgggcgactggcactcgcagggccggctcctcactgtcttcgtgcagtgtcgccaccccccggccctgcgaggcaaatacctggattacctggatgaccagcagctgcaaaatggatcctgcgcggatccctcgccctcagcttccctgaccgctgaccgcaggcggcagcccctacccacggccgcaggggaggagatgacgccacctgcaggtctcgcggaggagctgccgccgcagccgcagctccagcagcaggggcgatttctagctggggtggcctgggatggggccgccagggagctggtaggcaaccgcagcgctctaaggctgagtcggcggggcccgggcctccagcagcccagcccctccgtcgctgccgccgcgggcccggctccacagtccctagacctgcacaagaagccccagcggggccgtccgactcgggcagatcccgccctcgcggagcccaccccaacggcctctcctggctctgcgccatcgcccgccggcgacccctggcagcgcgcgacgaagcatcgtctgggcacggagcaccaggagcgtgccgcccagtccgacggtggggccgggctgccgccgctggtgtccgacccatgcgacttcaacaagttcattctgtgcaacctgacggtggaggcggtgggcgcagacagcgcctcggtgcgctgggccgtgcgcgagcaccgcagtccccggccgctgggcggcgcgcgcttccgcctgctctttgaccgctttggccagcagcccaagttccaccgcttcgtctacctgcctgagagcagcgactcggccacgctgcgcgagctgcgcggggacaccccctacctggtgtgcgtggagggcgtgcttgggggccgtgtctgccctgtggctccccgggaccactgcgcggggctggtcaccctaccggaggccgggagccggggcggcgtcgactaccagctgctgaccttggccctgctgacggtcaacgcgctgctggtgctcctggccttggcggcctgggcgtctcgctggctgcgtaggaaactgcgggctaggcggaagggcggggccccggtccacgttcggcacatgtactccacccgacggcccctgcgctccatgggcaccggcgtgtccgccgacttctcgggattccagtcgcaccggccacgcaccaccgtgtgcgcgctcagtgaggcggacctcatcgaattcccctgcgaccgcttcatggacagtgcgggcggcggcgcgggcggcagcctgagacgggaggaccgtctcctgcagcgatttgccgactaggtccagggcatatagagaccatctcattggccctaaggagccgcctctccgtgaggcccaccagcccacctcaggggaagtgccgttttgtgcacttgccagagaggccggtggggacagagggccaattcgggcaccatcccccaattcccaatactcgagaagtaaatggatggtacttggtggtcagagccagagtaggggacaaatggatggtgggatgctgaggtcggaggcttcgcttggaggctttgacacagctatgcgaatggcttttgtagcactgcaatgcagaagccaggctttgggggtagaaagggggtgcttgtgcccccaacatggccagaaatatttgggtgcatgctttttgtttgctcagtgtcaaacagagaagttttgtttctatttaaggaaggaacttattaccattacaaaggaggcttggccagggactccactggtttggtgatctctgccaagaagggggatgtaaacaggtggtaaagtttaacatacccgccaaggaactcgtttatgttggctgatagagcattcaggataccttaaagtttaataagagacgcatttttttttttcaaaaatgtgaaaagctctgacatttaacgaactgaccaatagactcaaggactgttttagttggactgggccattttattatgttccttttaatattaacagtacaagagcgcttgctgacttcgaggataactaagattacatactttctcaggagaaggctgcatgcaagacttctctgtcagggttgctcctgtggcttttttaattttatttttttaaacctatatatggaaaaggaaatttcaatgccagatttgataaaagaatgtgatgtatatgtagctgatgacccactggggaacaccagtgttccagttcacttaccacatctgtgacagtgtgtttagattggaataaatgtgatgcattacttcttatgtttttatcagtgacatggttgactgtgccctaattctcttgagttgcagttaagcaatgaaggttatttcctaatagggaagcaaaaggtgattgtcaattgatagtttaatgtttgaccacattagtgtctttatatgaaatagtagaggggaagaaattatagaaaacaaatgtgaaaaaaatacaccagtgggtatctgttctactaaaaccagaagattgttatgagtacttaaacctcactgtgaaataatgatatattttgcaattaatccctccccaactgagtgtcttactgtgttattaaatcttatcttttagttaatagttgcagtatttcttttaaatgtttttgttttaaacttaggggtaggatcctttatttgttcagttgtttccaactatttgggatactttcattccctgctatttatgaagtacatgtttatcactaagtgtagtggtttggtttacattaataattttatgtgtggtctaaaaatgcagtcactaagagaatgtacactgtggttatggtcacagtggttatggatttattggcagtggagtaccatggaggtcactgcaatggtgctaaggctgacagtggaatcttctgtttagggccttaagcccctgagggtcctggtgactcagggaatccatcacagccccgggtctttcaccccagttcactccttttatgtttggcctagattgacccatgcctgccctcttctcaacagctgagtagggaaccagccatctgaatgagctgatcgttgtttatgttcaaatgagtaaatgtccagaccacttaaaactacagctgcttttctggcagtctcgtctgcggggccaaaacttaataaaccacaggaaatagactgtcattcttagtttgctgccagggcttattttagattgagagcatactggtacatgagagcagtagtgttgtttgctcttattttcaaccagggagctatctggcaccttttgtgctcctggcttttttcaatcatagcactattgcatctcctagctatttcttttgcccagcagggtaatattgagtcccattgcaagtatggacaaggcctctggttctcctcaccacccaccttttcagccatagaacatcactgaaaatgcctaatgcctggatctgtgttctactttagtttcactgggaagtctttcagtgggagatgaataaatgttatacattgttatgtccagttatgtcaataaacccactaatagagat

SEQ ID NO: 1960 - DNA, 7011 bp, Homo sapiens
cgcttcctgcgcctcttcaggtcaccgcttgctctagttcccaggctttggcctctagtggatgagaatcaccgagtctgcggggctggacgctgaccgcccgggccagcacctaggcgggcgggagctgtgcggcccagggttcgcgcgggccgggtagaggctcgagccgggacccccgagcgtgaaccccggagccagcggcgctggggccagaggggccgggcgggaggtggtggcggaggcgaaggggcgacgggacctgggcctggcccgtgtgtgtcctcggcggcctggcgccggccgtcgctgtacggtgagccccagggaggcggatctgggccccgagaaggacacccgcctggatttgccccgtaggcccggcccgggcccctcgggagcagaacagccttggtgaggtggacaggaggggacttcgcgagcagacgcgcgcgccagcgacagcagcccgccccggcctctcgggagccgtggggcagaggctgcagagccccaggagggggccagtgtcattcaaagatgtggctgtggatttcacccaggaggagtggtggcaactggaccctgatgagaagataacatacggggatgtgatgttggagaactacagccatctagtttccctggcttatgaggtggcaacatcttgtacttcggagatctgaagccgagcaacttgcccaagtccttcttcttttcccattaacaagatatgatatcaccaagccaaacgtcatcattaagttggagcagggagaggagctgtggataacgggaggtgaatttccatgtcaacatagtccagcccttcacatcctcagccgaagatctcacttcctcccagaggcctttgctgactgacccctcagggattgtgggactttaccaaatcggtttgtaataacacctagaagacgctatccgatccatcaggcccagtattcctgtctgggggtacttcccaccgtgtgctggaatggttatcacaagaaggctgtgctgtcccctcgcaactccaggatggtgtgtagcccagtgactgtgaggatcgcccctcctgacagaagattttcgcgttctgcgataccagagcagataatcagctcaacactgtcctcaccatcaagtaacgccccagacccatgtgcaaaggagacagtactgagtgccctcaaagagaaggagaagaaaaggacagtggaggaagaagaccaaatattccttgatggccaggaaaataaaagaaggcgccatgatagcagtggcagtggacattcagcatttgagcccctggtggccaatggagtccccgcttcttttgtgcctaagcctgggtctctgaagagaggcctcaattctcagagctcagatgaccacttgaataagagatcccgaagctcttccatgagctccttgacaggcgcttacgcaagtggcatccctagctccagccgcaatgccattaccagttcctacagctccactcgaggcatctcacagctctggaagagaaatggccccagttcatcacccttctctagcccagcctcctcccgctcccagacaccggagaggccagcaaagaaaataagagaagaggagctgtgtcatcattccagttcttcaactccattggcagcagacagggagtcccagggagaaaaggctgcagatacaaccccaaggaagaaacaaaactcgaattctcagtctacacctggcagctctgggcagcgtaagcggaaagttcagctgctgccttctcggcgaggggaacagctgaccttgcctccacctccccagcttggctattcgatcactgccgaggacctagacttagagaagaaggcttcattacagtggttcaaccaggccttggaggacaagagcgatgctgcctcgaactctgtcactgagaccccacctatcactcagccttcatttacctttaccctgcctgctgctgcacctgcctccccacccacctccctcctggccccaagcaccaacccactgttagagagcttgaagaagatgcagactcccccgagcctgccaccctgcccagaatctgctggagcagcaaccactgaggccctctcacctccaaagacacccagcctcctacccccgctgggtttatcacagtcagggccgccagggctgctccccagcccctcctttgactccaaacccccgaccactttgctggggctgatccctgctccatccatggtaccagccactgacaccaaggcacctccaacccttcaggcagagacggctaccaaaccccaagccacatctgccccgtcccccgcccccaagcaaagcttcctgtttggaacacagaacacctcaccttccagccctgccgcccctgctgcatcttcagcacctcccatgttcaagcccattttcacggctccacccaagagtgagaaggaaggccccacaccgcctggcccttcagtcacagccacagcgccctccagctcctccctccccacgaccaccagcaccacagccccgaccttccagcctgtctttagcagcatggggccacctgcatctgtgcccttgcctgctcccttcttcaagcagacaactactcccgccactgctcccaccacaactgccccgctcttcactggcctggccagcgccacctctgctgtggctcccatcacctctgccagtccatccacagactctgcttcgaagcctgcgtttggctttggcataaacagtgtgagcagcagcagtgtgagtaccacgaccagcaccgccactgccgcctcacagcctttcctcttcggggcgccccaggcctctgctgccagcttcaccccggccatgggctccatattccagtttggcaaacctcctgccttgcccacaaccaccacagtcaccaccttcagccagtccctgcacactgccgtgccaacggccaccagcagcagcgctgccgactttagtggttttggcagcaccctcgccacctccgccccggccaccagcagccagcccactctgacgttcagtaacacgagcacccccacgttcaacattccctttggctcaagcgccaagtccccgctcccatcatatccgggagccaacccccagcccgcatttggggccgctgaggggcagccaccgggggccgccaagccggcccttgcccccagctttggcagctctttcacttttggaaactctgcagccccggctgctgcacccacacctgcacctccgtccatgatcaaggtcgtgcctgcgtacgtgcctacgcccatccatcctatctttggcggtgccacgcactcggcgtttgggttgaaagccacggcttcggccttcggcgctcccgccagctcacagcccgcctttggcggctccactgctgtcttcttcggtgcagccaccagctccggctttggagccaccacccagaccgccagcagcgggagcagcagctcggtgtttggcagcacaacaccatcacccttcacgtttgggggttcggcagcccccgctggcagtgggagctttgggatcaacgtggccaccccaggctccagcaccaccaccggagctttcagctttggagcaggacagagtgggagcacagccacctccacccccttcgcagggggcttaggtcagaacgccctgggcaccaccggccagagcacaccgtttgccttcaacgtgagcagcacaactgagagcaaacctgtgtttggaggcaccgccacccccacctttggtctgaacacccctgcgcctggagtgggcacatcaggcagcagcctctcctttggggcatcctcagcacccgcccaaggctttgttggtgttgcacctttcggcaacacttttgctcaccagcaagaacacagcccgaggaagggacccaataacctttcaaaacgcaaactgctgcctgcggtgagggcccagggtcctccacggagaggacaggcatcttcctttcccaccaggaaggagtgagcccggagcctctgctatgtgcaaggcggtgtgcaagcaccggctgcagctttttgctctcttctttctctttggggctgggctgggtgtgcgttctggtgctgatgctttggcctgtgaggctgagctagagaaatgtagatgttagatgtgccagtaccatcctgcgcctcccaagcatgcccccactcactcacgtcggcatctcgacccgttcaattacagcaacgaagaagccaccgctaagcgtggtcttgggggaagcccggaggcagtgctcggcacccgggaacgtgctcaggcctcggtggggccgggcaggcagggcgggagctagcctgcaagagaaacagccccaatgctgggtaagagagcagttcaccccatccccccctccacgaccctggcgcacgccctgtacctgaaggcgcccgggttctgctgcagcgcatcttgtaccatgtcttcattctcctcctggcagagggagcacatggagtagacgagccgctgcagggaagggaaagtgagcgcgtggcacagggctcgctgctggaaccctgccagggcatgcagacgcaccgggctaggtgtccctgccccgggctcctccagctgtctgctcggcatacctaaggaaaagcgtgtctcggttacacagcttcacaggctgcctcagtcctgaaatcctcgctcctgaaatcctcgcttcacagaggagaacttttgctccagggtcccaagcccattaaagtgtcagaactaagaccaaaacagatgactccaggtctaagctgctgtggacctctgagtccctcagccacgccttctcaccatctcacccgagccactgcaggaaggatccagcaggacatagtggacctcacgatagcgcggatctaagggggagaccgccaggaagtcctcctcagccagctcacagcaggagacgccagcccaggccagcagcgtggccatggatgccagccgcctggcatccaggtcaaaggcaaagatcttcctagggcagagggcagagcaggggtgagctgagcatgcatggagcagctaagggcctgtcacagctgacacagacaaccagaacatgcaggttaagccaggacacacaatattgaaacagcctatatttaaagggcccagggtcagaggtaactggcctggggtctctgccccaagggctaagggatccacatctcacacctgcagtggggaaagcttagcttggggcaaataccgtgaactactttggtgcagcaggaaagagttaagcgaaagtcatcctttcagccttcattacccactgaaaggcacaaaatcaaaccccatgtcctcctcctcctcctgtggcactcacccttggttcttcagaagagcagccaagtgactggtctttattgcctggggtggcacaggcatccatgacatgggagcctggcgggggtccagcagcatggctgggagacagctggcctggcaggcagaacacaggggccgggtaaacagagaccccaggctaggcccttcccgtgcctacacattcttcccttttctattcctcttgcctaccctgtcctgcagaatgaggtgtccggcccggtacagtgggtgttcatgcagatctgtctgggcgggaaacaccagcagctccggcatcaaggggtccaggagaaaatgcttccccttgagggctcgtaagtcatcgaggctgccagggaagaaccattcattcatcatttcctgaatttctccctgccaggccctatttcaacggtccattcatgcaacaaatgttaccacagctatggagaaatcaacagggtgataagggaatccgggatccgcagttgagggaatgggttgtcaagccagacttatgggtcaggagccccctctactgtttaccagcagtgggagcctgggcaagtgattcaatctcaagccccactggcatctctgtaaaatagtaggtgtgaggattcaatgagccaatatatccaagatacttacgtgccacaatttaataaatgttagctattcctgttgaagcataaccttggagaaaggttactttacaggggggtgaggagtggggaagtgagagctgagctcattcttgatggatgaggagttagtcatgtgaggcgcttaggttaaaactacattcactataactcagtaaagcagtcccgcccactctccgacccatgcagaaataggcctagagagtcacatgtctcagttcagaaatctatcgaagtggcagagctggaattcaaacacaagcagccgttctctgctattccaccctggtgtccaagcaacatggtagggcagaaggaagaggatcttacaaagagtaagggaaagggagaggggcagaggctgcttctcagagccaccaaaggacaaaataagacaggtgtgagcccagtggaggaggcacggggcagagaccagccactgttgctggcacgctggtgcacgtagcactgtggcagatggacctggagaggaagcaggagggacagcacaatggagccaagaaaggacttagcatggccgggcgcggtggttcatgcctgtaatcccagcattttgggaggccaaggtgggcagatcacctgaggtcaggagtttgagaccagcctggccaacatggagaaatcccgtctctactaaaaatacaaaattagccaggcatggtgctgcatgcctgcaatcctgtagggaaaagaaagagagatcagactgttactgtgtctgtgtagaaagggaagacataagaaattccattttgacctgtaccttgaacaattggttggctgagatgctgttaatttgtgactttgccccaaatttgagctcacaaaaacatgtgttgtatggaatcaaggtttaaaggatctagggctgtgcaggacatgccttgttaataaaacgtttacaagc

SEQ ID NO: 1961 - DNA, 5403 bp, Homo sapiens
gccattctgtgacagttgcctttagtattcagtacagtaacatacagtacaggtttgtagcctaggagtcctaagccataccgtgtaccctaggtatggtggctacaccacctaggtttgtgtaagtatacgctatgatattagcacaatggtgaaataacctagtgacccatttctcaagctcctcacgtggcaagcaatgcatgactgcatatgaaagctcttaaatagggattgtttctaaattaatctcaaaacagtcattatttactatttatggaattttttttaaaaaaaggagcaaaagtatcatttcagtgggaacttaacttggggctacagtgttttatttaacttttaccccaaagttgcaaagtgttttgaaatttttccctgtaaaataattattttaattcaatttaaataaaacccaccaaggagacttcaagctttaagaagtctagcttcctgtgaaatgtgagaggaagtcagcactcatttcagaaatctgattataataatagctccatccctaaatgaggtgaatcttggaatctcttccattttattttattttatttttttgagatggagtttctctcttgttgcccaggctgaagtgcagtgttgtgatctcggctcactgcaacctctgcctcccgggttcaagcgattctcctgctttggcctcctgagtagctggggttgcaggtgtgcaccaccgcgcctggctaattttgtatttttagtagaggcggagtttcgccatgttggtcaggctggtctcgaacttctgacctcagtgatccccccgcctcggcctcccaaagttctgggattatgggtgtgagccaccacacccggccccccttcaattttaaagccatcactatgcaccctatgtctatgccaggcactaaaataagatgaagcaccttcttggagtttacatgctggtaattatgccagacagtaataaaataggtaagaacggctgtgggggaagtcagctgggttctagttacagtcgcatttcaggaaatgatttaacatgctgactttaacaacctaagcctcttctccatgtgtgcacacagggtagatctctgaacacaggtgaccctagaagtgctgtaacttctaggggaatggctgtgttgagtcaaggcaggatgacagttcagcctcctcccaggctagtgcaaagggctcttcactcggattaaaaccttctctcccagaccgaattgccaactcccaacacccctcctacagaaaatttggagtcctcgcttattccctggcagcccctacctaatagggtggtgaattaattatcaaacatgcgacagtttagcgaaaatggcaacactttggaataaatgactgtaatgtacatcctggcgcccattttgcaggtcagttgctctccctggaaggaagagtgttctcggatttcaccttaaaggaggaaggctgccagaactgaactagcacttctgaatatcctgaggcgaggtccggtgacttccttgggaagctctgccgcgcccccatcccaccctaccccaccctaccccaccacagcaggcgctggagtcctgggaccaccaggatctgaggcccaaatccttcctcactaaggggaggagaggggtgctccggcagggcaggatgggaaggcgtgcttgggcgggattgtgacatgagtgccctggtgacatggagcagttctgtggcataaataaaggtgtcataaagacagggcgggactcatgcttacaaggggcacgagcgtctcggagctgccagaatgacttccgctcagtgcccggcactagcgtgtgtcatgtccccgctgcgtttctggggcccatggcccctccttatgtggcaactattgtggctactagtcaaggaggctcagcctctggagtgggtcaaggacccgctccagctgacctctaaccccctggggccgcctgagccctggtcttcccactcctcccatttcccacgggaatctccccatgcgcctactctcccagcagacccgtgggactttgatcacctggggccctctgcttcctcagagatgccagccccaccccaggaatcgactgaaaatttggttccattcctggacacctgggattcagctggagagctgcccctggagccagagcagttcttggcttcacagcaggatttaaaggacaagctgagtccacaggaaaggctccctgtttcgcccaagaagctgaagaaagatccagctcagcgttggagccttgctgagattattggaattatacgccaattatccacacctcagagtcagaaacagactttgcagaatgaatattccagtacagatacaccgtatcccggtagcctgcctccagaactccgggtgaagtcagatgagcctccagggccctctgagcaagttggaccttctcaattccatctagagcccgaaactcaaaatccagagacccttgaagacatccagtcctcttcactccagcaagaagccccagcacagcttccacagctccttgaggaagaaccttcttcaatgcagcaggaggccccagctctgcctccagagtcctctatggagagtctaactctaccgaatcatgaggtgtcagttcaacctccaggtgaggatcaagcttattatcacttgcccaacattacagttaaacctgcagatgtggaggttaccataacttcagaggctaccaatgagacagaatcttcccaagctcagcaggagaccccaattcagtttccagaggaggtggaaccttctgcaacccaacaggaggccccaattgagcctccagttcctcctatggagcatgaactttccatcagtgagcagcagcagccagttcagccttctgagacttctagggaggtcgaatcttctccgacccagcaggagaccccaggtcagcctccagaacatcatgaagtcacagtttcacctccaggtcaccatcaaactcatcatttagattcacccagtgtctctgtgaagcctccagacgtgcagctcaccatagcagcagagcctagtgcagaggtgggaacttctctagtccagcaggaggctacaactcggctctcagggtcaggtaatgatatagaacctcccgccatccagcacgggggcccacctctgctttcagagtcatcagaagaagctggacctttagcagttcaacaggagacttcatttcaatctccggaacctattaataatgagaacccctctccaacccagcaggaggctgcagctgagcatccacagaccgctgaggagggtgagtcttccctaacccatcaggaggccccagctcagactccagagttccctaatgtagttgtagctcaacctccagagcattcacacctgactcaagccacagttcaacctttggatctggggtttaccatcactccagaatccatgacagaggttgaactttctccaaccatgaaggagaccccaactcagcctcctaagaaagttgtaccccaacttcgagtatatcaaggggtaacaaatccaacaccaggtcaggatcaagctcagcatccagtgtcacccagcgttacagttcaacttttggacctgggacttaccatcactccagaacccactacggaggttggacattctacagccccgaagaggactatagtttctccaaagcatcctgaggtgacacttccacatccagaccaggttcagactcagcattcacacctgactcgagccacagttcaacctttggacctggggtttaccatcactccaaaatccatgacagaggttgaaccttctacagccctgatgactacagctcctcctccaggacaccctgaggtgacacttccaccttcagacaagggtcaggctcagcattcacacctgactcaagccaccgttcaacctctggacctggagcttaccataactacaaaacctactacagaggttaaaccgtctccaaccacggaggagacctcaactcagcctccagacctgggacttgccatcattccagaacccactacagagactggacattctacagccctggagaagactacagctcctcgtccagaccgggttcagactctgcatcgaagcctgactgaagtcacaggtccacctactgaactagaacctgctcaggattcactggtgcagtctgaaagttacacccaaaataaggctttaactgcaccagaggaacacaaggcctccacaagcaccaacatatgtgagctctgtacctgcggagatgagatgttgtcatgtattgatctcaacccagagcagaggctccgccaagtgcctgtgccagagcccaacacccacaatggcaccttcaccatcttgtaagaatcacttttcctcaattgtcctctgtgtcctgcctgacatggcagccttttcctggaggccttcctgggccttctttatctccccaagccatatggacaactgactttctgctttcacctttgcttgtcaactctcccttctcctcattctcttttaatgttaggccccttctccagtcttttccttttactctggtcttttactcgtttttgtatccatttttatttagccccatcacatcattgcttaaccgctgctctcctcccattttcgcttcaccctctttacagcagcctgtccctctcccgatctcagtgatgatgctctaagtggttaagagttgattccggagccaggctgcctgggtttgaacccagatctatttattagcttggtgacccagagcaagttattctgcctgtgactcaatttcctcacctttaaactggggatcatgctagttagcatttcataggattgttgtgaaatttaggtgagtgaatatatgaaacacttcatcagtgcttagcatatgtaggagagttggctgttcacatgattattcagtcctttagttttgtccagaactcatttttgtccctagctttctatatgtagaactagttttatgtcaaacccagggccaagtatgctactgtctccagaacacgaaaatgataggagggaagaggctgggtgtggtggctcacgcctgtaatcccagcactttgggaggccgaggcgggcggatcatgaggtcaggagatcaagaccatcctggctaacatggtgaaaccccatctctactaaaaatacagaaaaaaattagccaggcatggtggtgggtgcctggagtcccagctactcgggaggctgaggcaggagaatggcatgaacctgggaggcagagcttgcagtgagccgagattgcaccactgcactccagcctgggcgacagagcaagactccatctc

SEQ ID NO: 1962 - DNA, 5082 bp, Homo sapiens
gccaggcagagtcctactataggcatgcagctcagcttgtcccctccaatgaagcattgctgtgaagttccctttcccagctgcctccactaatctgcaaaaagcactttctaaagcactggaaagccgagatgaggtgaaaaccaagtggggtgtttctgacttcatcaaggcctttattaaattccacggtcatgtgtacctgagtaagagcttggaaaagttgagccctcttcgagagaaattggaagaacagtttaagaggctgctattccaaaaagctttcaactctcagcagttagttcatgtcactgtcattaacctgtttcaacttcatcaccttcgtgactttagcaatgaaaccgagcagcacacttatagccaagatgagcagctatgttggacacagttgctggccctctttatgtcttttcttggcatcctgtgcaagtgtcctctacagaatgagtctcaggaggagtcctacaatgcctatcctcttccagcagtcaaggtctccatggactggctaagactcagacccagggtctttcaggaggcagtggtggatgaaagacagtacatttggccctggttgatttctcttctgaatagtttccatccccatgaagaggacctctcaagtattagtgcgacaccacttccagaggagtttgaattacaaggatttttggcattgagaccttctttcaggaacttggatttttccaaaggtcaccagggtattacaggggacaaagaaggccagcaacgacgaatacgacagcaacgcttgatctctataggcaaatggattgctgataatcagccaaggctgattcagtgtgaaaatgaggtagggaaattgttgtttatcacagaaatcccagaattaatactggaagaccccagtgaagccaaagagaacctcattctgcaagaaacatctgtgatagagtcgctggctgcagatgggagcccagggctaaaatcagtgctatctacaagccgaaatttaagcaacaactgtgacacaggagagaagccagtggttaccttcaaagaaaacattaagacacgagaagtgaacagagaccaaggaagaagttttcctcccaaagaggtgagaagggactatagcaaaggaataactgtaactaagaatgatggaaagaaggacaacaacaagaggaaaactgaaaccaagaaatgcaccttagaaaagttacaggaaacaggaaagcagaatgtggcagtgcaggtaaaatcccagacagaactaagaaagactccagtgtctgaagccagaaaaacacctgtaactcaaaccccaactcaagcaagtaactcccagttcatccccattcatcaccctggagccttccctcctcttcccagcaggccagggtttccgcccccaacatatgttatccccccgcctgtggcattttctatgggctcaggttacaccttcccagctggtgtttctgtcccaggaacctttcttcagcctacagctcactctccagcaggaaaccaggtgcaagctgggaaacagtcccacattccttacagccagcaacggccctctggaccagggccaatgaaccagggacctcaacaatcacagccaccttcccagcaaccccttacatctttaccagctcagccaacagcacagtctacaagccagctgcaggttcaagctctaactcagcaacaacaatcccctacaaaagctgtgccggctttggggaaaagcccgcctcaccactctggattccagcagtatcaacaggcagatgcctccaaacagctgtggaatccccctcaggttcaaggcccattagggaaaattatgcctgtgaaacagccctactaccttcagacccaagaccccataaaactgtttgagccgtcattgcaacctcctgtaatgcagcagcagcctctagaaaaaaaaatgaagccttttcccatggagccatataaccataatccctcagaagtcaaggtcccagaattctactgggattcttcctacagcatggctgataacagatctgtaatggcacagcaagcaaacatagaccgcaggggcaaacggtcaccaggaatcttccgtccagagcaggatcctgtacccagaatgccgtttgagaaatccttattggagaagccctcagagctcatgtcacattcatcctctttcctgtccctcaccggattctctctcaatcaggaaagatacccaaataatagtatgttcaatgaggtatatgggaaaaacctgacatccagctccaaagcagaactcagtccctcaatggccccccaggaaacatctctgtattccctttttgaagggactccgtggtctccatcacttcctgccagttcagatcattcaacaccagccagccagtctcctcattcctctaacccaagcagcctacccagctctcctccaacacacaaccataattctgttccattctccaattttggacccattgggactccagataacagggatagaaggactgcagatcggtggaaaactgataagccagccatgggtgggtttggcattgattatctctcagcaacgtcatcctctgagagcagttggcatcaggccagcactccgagtggcacctggacaggccatggcccttccatggaggattcctctgctgtcctcatggaaagcctaaagtctatctggtccagttccatgatgcatcctggaccttctgctctggagcagctgttaatgcagcagaagcagaaacagcaacggggacaaggcaccatgaaccctccacactgaggccaaagtggcaacctgggaatgaaggctccataaaccatggcatgttgggtttgcaggactggcccacacagtcccctgcaggtggcagccctcttttctgtttctcgctgtcaagagggtgtaagtattccaccagcccgctgagtgtgcacgaaatgttcgcagtgcaacaaaaagaaaaatccatcaggaactctccgtccccccggggccttccggagggagagagagaggaactgctgtttatctcactcagttacttggtatcaccgcctctcaccttctccatcgtgcatgtccccagccacatgggaagtgaaagctgagaagggaaggcagatgggagaagccaatgggaacttctcagtccttttttcctctttggggaataaaataggaatccattaatgattgctttgctgactgagaatgtagttgaaattaaacatcttttattattattactctcagtagtaaaatatcacactgaattcttccatacacaggtgtgcttctagtcagtgtgtagcaaggaaagccccgttcactgctcctgtgagaggttggtggtgacaggatggggaaccgacctcttcagccagtggaaatgttccataagggagagttcaaggcctgtcagaaggctctggtaggccttcctctggccaggagactccagcagggaatgcccttcactctgtaggtgctcgagccccaatcgaggatacagtgtgggtggtggtgctgggctggactagcaggtagactgctgtaggatttcaaattacgtttttgattcctgtacattttacagtcgcacagcaagcagtctcacagaaggcaggctagtccattcacagcctgacacgttctaataggtagaagctttcagtgtggttattttttctttggttggtttttgtgcccccattctacttcccaccctcctgccccatctccatcccttcttttacccaatgctgtatgctagtaattgtttttattcctaatgtgtgcaacatcacatctccccaagaagcaacagcatggggtccagcagttggggcccaaaagacagtctgaagaggaaggaagcagcagtatctgcgtagcccacagagggcccaggcccctgcccagctgcagtctcccagcctccactttcagagtgaaattcaaggcagcacggacatgtgcccatcaggcacagaagaaaacacgacgtcgtccattttggaagagacgaaagaaaggaaaataaactctttgtatgatatttattaggaggaaagaggactgaaaatgttcttgtgtagaaacagaaggacagcatttctgttagtcatttcctggaaaagtaatattttaaggggaaattatggaaacaatctaattgttcaattgctgtgctagtggtagggtttattttctgggaggtctctcctttgtgtgtctgtatgtttgtgtacacacacgtgcccatctgctgtcccagaggggaggggttgtgtgtgcgagtgtatggagttagtgtggaacttaagagctggaagacagctgtagagcaaagcacatccaggagccccagttgtcactgcagtctgggcaaccccagcaatgaaaaggggtgagataacgctcattgctcttcagagagagtggttggagccccccccgccccgtatgcttacattattgctcttttagtttgacatggtgtttgggttttgtttttttgaaaggtctgaaaaggtgaagccccctacccaatggcaatatgaaaccttttgtgcttctcttcagccccttccctgtgtccacctttctctcctcttcccaagcctttttcctactacctttacccagtttgtgtgtttgagctctgcattcaggcagctgcaacattccagtgtttgaactgtcactgattcttgcgccctagacaagctaaccaggtttaccatctcactcccagtaatacccagctcctatctaaagccccattctgcatgagaatttggtgtttggaatgttttctgactcttggggcgggattcctcgccttatcatcctcactgtggagtaatgagggggaggagaatctttatcagaaactggttttgtgtagtaaactttcttttgtggttttttgttttgttttctgggttttgttttttgtttttgtctgtgcaagacctgcagctgctgaaaatcagctttgcctttaattaaaccatgttctctcc

SEQ ID NO: 1963 - DNA, 4353 bp, Homo sapiens
gccgggagcagtcgccgctgccgcctccgcccgcggccgggacccccgtcctcgcccgggactccttacccggggaacctagaccaggtctccagaggcttgtggaagagaagcaggcgacccttcctgagttatcctggcttagcctcccaatctggctccccttccccttcccattcccctgctccccctgtcccttccccatccacccaactgaactgggtataggtcaaagctcctctccttccttttccttcctaggcactcattggctaggacctgtttgctcttttttttgtgcccagagatactggaacacgcttcatctaagtaactgtggggaggggtctttttgactctacaagtccttgagcaaaaagctgaaaaagaagcaggaggtggagaagacccagtgaagtgccccaagccccatcatggaagagggcttccgagaccgggcagctttcatccgtggggccaaagacattgctaaggaagtcaaaaagcatgcggccaagaaggtggtgaagggcctggacagagtccaggacgaatattcccgaagatcgtactcccgctttgaggaggaggatgatgatgatgacttccctgctcccagtgatggttattaccgaggagaagggacccaggatgaggaggaaggtggtgcatccagtgatgctactgagggccatgacgaggatgatgagatctatgaaggggaatatcagggcattccccgggcagagtctgggggcaaaggcgagcggatggcagatggggcgcccctggctggagtaagggggggcttgagtgatggggagggtccccctgggggccggggggaggcacaacgacggaaagaacgagaagaactggcccaacagtatgaagccatcctacgggagtgtggccacggccgcttccagtggacactgtattttgtgcttggtctggcgctgatggctgacggtgtggaggtctttgtggtgggcttcgtgctgcccagcgctgagaaagacatgtgcctgtccgactccaacaaaggcatgctaggcctcatcgtctacctgggcatgatggtgggagccttcctctggggaggtctggctgaccggctgggtcggaggcagtgtctgctcatctcgctctcagtcaacagcgtcttcgccttcttctcatcttttgtccagggttacggcactttcctcttctgccgcctactttctggggttgggattggagggtccatccccattgtcttctcctatttctccgagtttctggcccaggagaaacgaggggagcatttgagctggctctgcatgttttggatgattggtggcgtgtacgcagctgctatggcctgggccatcatcccccactatgggtggagttttcagatgggttctgcctaccagttccacagctggagggtcttcgtcctcgtctgcgcctttccttctgtgtttgccattggggctctgaccacgcagcctgagagcccccgtttcttcctagagaatggaaagcatgatgaggcctggatggtgctgaagcaggtccatgataccaacatgcgagccaaaggacatcctgagcgagtgttctcagtaacccacattaagacgattcatcaggaggatgaattgattgagatccagtcggacacagggacctggtaccagcgctggggggtccgggccttgagcctaggggggcaggtttgggggaattttctctcctgttttggtcccgaatatcggcgcatcactctgatgatgatgggtgtgtggttcaccatgtcattcagctactatggcctgaccgtctggtttcctgacatgatccgccatctccaggcagtggactacgcatcccgcaccaaagtgttccccggggagcgcgtagagcatgtaacttttaacttcacgttggagaatcagatccaccgaggcgggcagtacttcaatgacaagttcattgggctgcggctcaagtcagtgtcctttgaggattccctgtttgaagagtgttattttgaggatgtcacatccagcaacacgtttttccgcaactgcacattcatcaacactgtgttctataacactgacctgttcgagtacaagtttgtgaacagccgtctgataaacagtacattcctgcacaacaaggagggctgcccgctagacgtgacagggacgggcgaaggtgcctacatggtatactttgtgagcttcctggggacactggcagtgcttcctgggaatatcgtgtctgccctgctcatggacaagatcggcaggctcagaatgcttgctggctccagcgtgatgtcctgtgtctcctgcttcttcctgtcttttgggaacagtgagtcggccatgatcgctctgctctgcctttttggcggggtcagcattgcatcctggaatgcgctggacgtgttgactgttgaactctacccctcagacaagaggaccacagcttttggcttcctgaatgccctgtgtaagctggcagctgtgctggggatcagcatcttcacatccttcgtgggaatcaccaaggctgcacccatcctctttgcctcagctgcccttgcccttggcagctctctggccctgaagctgcctgagacccgggggcaggtgctgcagtgaaggggtctctagggctttgggattggcaggcacactgtgagaccaacaactccttccttcccctccctgccctgccatcctgacctccagagccctcactccccactccccgtgtttggtgtcttagctgtgtgtgcgtgtgcgtgtgcatgtgtgtaaaccccgtgggcagggactacagggaaggctccttcatcccagttttgagatgaagctgtactccccatttcccactgcccttgactttgcacaagagaaggctgagccccatccttctccccctgttagagaggggcccttgcttccctgttccaggggttccagaataggcttcctgccttccccatcattccctctgcctaggccctggtgaaaccacaggtatgcaattatgctaggggctggggctctggtgtagaccatggaccaaaagaacttcttagagtctgaagagtgggcctcgggtgccctctcacatctcctgttggatgctgggggagaagcaataaacctcagccctctggcctccactttcctctcaatttgggctgcaaatatgaagcctgaattttatgaaattagctttctgattcttatttattaatagattaagttctgaggcagctccgcaggactgtgtgtgaatgtgtatgtatacttacatatgtgtgtgcatgtgccatggggcggggggtatcactatactgtcctcaaatataagccaagggtaatttcagcggatgcacacacaaccctgcctcccacagttcctcccctaatctggtttctgtgttgagcctgggatggaggagccctaggccagcctgggataagagtcccacagtctagggagatctgagggcatccgacaaggcccatctccttccctcctcaagaagcagaggcctcctctggagtgagaggctccacccactacagcacaggcgggaatagcacagctgccctcccatgctccctacctgtcccctcacagggaggggagcaggggagggaaagaaaccaggcatctggtcaaaccagcagatcaaaaagcacaaagagctggggcagaggcaggaagcaggggccctcctggcagctcctctgagtggggagaggttgggcagtgagtgagggacccctaatgcagggactagaagcctcagtttccccattttacccttccacacaatagcctctgtaggttaggctgccccatcccaccctactctgtgtggctgctttctttggtgccctcccctcaccccactgtagctgtgacgtgttgtagtttttagatgtttgtaaaatgtttaaaaaaatgttaaaaggaaaaaagtgaaaataacaaaaaagaaaatcaaaattcaccttcgtcatgctgcgtccagtgccccaaccctgtggtcactctccccattttgtaacactgtaccaggtggtgactgtttaactctttggtgtctgtgctcaaaagactgccttctccagtgcccagtgtatgagtgtgtgccctgtgcccttgtccctcactccccacatgctggacgtagccctcttcctcgcacccctgggagggacccatccatctcccttgctctcctggggaaccctaaacccaactctgttgatgtgaaaaatgcagtgaaaaatattgacgaaaaataaaacggaaacaaatcctcaaaat

SEQ ID NO: 1964 - DNA, 6450 bp, Homo sapiens
cgcgctcgcggggggcggtggcgcccggcacagaggggttaagggggcggtgcagacgtctccccgcccatcccgcccctcgagagccgcggcgccccgccctatttatagcagcggtgcctagcgcgccgcgtctctccgcaggccccggccgcggcgtcctcgacaacctatcgaaggcgccatggagcgaccggcgcccctggccgtgcttcccttctcggaccccgcgcacgccctgagcctgctgcgcggcctgagccagctgcgcgccgagcgcaagttcctggacgtgaccctggaggcggcgggcgggcgcgacttcccggcgcaccgtgcggtgctggccgccgccagcccctacttccgcgccatgttcgcggggcagctgcgcgagagccgcgccgagcgggtgcgcctgcacggagtgcctcccgacatgctgcagctgctgctggacttcagctacacgggccgcgtggcggtaagcggcgacaacgctgagccgctgctgcgcgccgccgacctgctgcagttcccggccgtgaaggaggcgtgcggggccttcctgcagcagcagctcgacctggccaactgcctggacatgcaggacttcgctgaggccttcagctgctcgggactggcgagcgcggcgcagcggttcattctgcgccacgtgggcgagctgggcgccgagcagctggagcggctgccactggcgcgcctgctgcgctacctgcgggacgacgggctgtgtgtgcccaaggaggaggccgcctaccagctggcgctgcgctgggtccgcgctgacccgccgcgccgcgccgcgcactggccgcagctgctggaggccgtgcgcctgcccttcgtgcgccgcttctacctgttggcgcacgtcgaggccgagccgctggtggcgcgctgcccaccctgcctgcgcctgctgcgcgaggcgcgcgacttccaggcggcgcgctacgaccgccacgaccgcgggccctgtccccgaatgcgtcctcgcccgtccaccggtctcgccgagatcctcgtgctcgtgggcggctgcgaccaggactgtgacgagctggtcactgtcgactgctacaacccgcagacgggtcagtggcgctacctggccgagttcccagaccacctgggcggaggctacagcatcgtggcgctgggcaatgacatctacgtgacgggtgggtccgatggctcccggctctatgactgcgtgtggaggtacaactcaagcgtgaatgagtgggcggaggtggcgcccatgctgaaggcccgcgagtaccacagctcctctgtgctggacggactgctgtacgtggtggccgccgacagcaccgagcgctatgaccacaccactgactcctgggaggccctgcagcccatgacctaccccatggacaactgctccaccactgcgtgccgtggccggctctatgccatcggctccctggctggcaaggagaccatggtgatgcagtgctacgacccggacaccgacctgtggtcgctggtggactgcggccagctcccgccctggtccttcgcccccaagactgcgactctaaacggactcatgtactttgtcagggatgactccgctgaggtggacgtgtacaacccgacgaggaacgaatgggacaagatcccgtccatgaatcaggtaaattttcaggcgggccagcattggaagcacaggctggtcctgattttgcaacccaagtgtcatcgtgatgagtgtttgggatccacagccatgatggatgggtctcatctcaattaatagaaggctgctcttacccttattttgcacttaaggctcactgagacacagatgttaagtaataccctatgattacacagcttagtacacatttgagcagtgtttattgagtatctgctgtgagccagagagcagaaggaagtgagggagcaaggcatacagtcatctggggacacctgttccagagagggacagcaggtacagaggccctgcagcagggcaccctggcgtgttcttagatacaccagcagcccatgtggccggagcagagtcagcatgaggtctgtgacctaccttttttatttttgagacagggtcttgctctgtcacccaggctggagtgcagtggtacaatcatggctcactgcagcctccacctccttgactcgcagtcctcccaccgcaccttcctgaatagctgagactacaggcgtgtgccaccacacccagtaattttttttctcatatgtagatacaaaaggatattcttaaaatttttatagagacagggtcttgctgtgttacccaggctggtctcacactcctggcctcaagtgaccctcctgtctcagcctcccaaagtgctaggattataggcgtgaaccaccacgcccagctggttcctgaggaagtcagtgtgggaatactttttttttttttatacggagtctcgctctgtcacccaggctggagtgcagtggcacgatctcggctcactgcaagctccatctcccaggttcacgccattctcccgcctcaacctcccgagtagctgggactacaggtacccaccaccacgcccagctaattttgtttgtgtatttttagtagagacgggatttcactgtgttagccaggatggtctggatctcctgaccttgtgatctgcctggctcagcctcccaaagtgctgggattacaggcatgagccaccatgcccagcccactgtgggaatacttgtgttgagcacttgctgtgtgttctgaataggacaaccagggtccaccccttctctctgggcttgttgagaagaggggtgcccagcctgacagtgatgggacagggaggcttcagtgccatttggccatgtgagcagtgttagtctgaggtacacatcatattgcctacagccttctttcctgtgtgtctgttaacatttccaaacctacactccgtgacatccagcctcacagcttacatcacagcttaatgtcctggcatttaagagacccagcgttctgttttccccgcagtaagctgcacatagtcatagcgaatttgggaaagatggaaggaatcatccagcctcgcggttcagagcccagctctgccactgtcagccatgcaagcctcagttttcccatctgtaacatggggagaacagcactgctcagcccagagggccactgcagagattctgagagagaacgtaggaagcgctgctcggcacgacctgcacacggggaggcctggcgctgcagcgggcaccctcatcaccatagggaaggcccagctgcctccggggaggcccgttctcctaggcagggtgttggaaaggggttggcctctctgctgctttctgggagagccaaggccacccctctggggtactgacagggcatgccttgtctccagtggttccccaggtggggccctgccctaccctctcctctgacctccactcactcatccctttggcccacaggtacatgtggggggcagcctggccgtccttggggggaagctgtacgtctctgggggatacgacaatacatttgaactctcggacgtggtagaggcctatgacccagagactcgcgcgtggagcgtggtggggcggctcccagaacccaccttctggcatggcagtgtcagcatcttccgccagttcatgccccagaccttctcgggtgggcgtggcttcgagttggacagtggcagcgatgacatggacccaggccgaccccggccgccgcgggaccccgatgagctgcactagccccagtctggcccggcacgggcctcggtgcaggtaactggcacctctgcggggcagtgccccactcctttgtgcacaaggacacgttgggctcacaggaggagcacaggctcttgggtggcgaagccagcccaggatccattacctggaaggtttctgtaccttgagagcctgaatcagaggccgtcgggaacgccctccctgcagttgaggaagagccactttcctgccagcacatgtttctgggtcttggaggtcacccccaccccgcggatcacagctcacccacgcggcgcacacccctcctgccgttgtcatctgcacctacttgttcccaccttgggagaggacgatgacttgggagggacgcgtgaagggagaaggggtcctcccatgaggctgaggatggcctgaacctggagcagcggaccaggcagacgggctgaagtggggtcccaaattccatgtccagaggtgtggggagcctgcctccctagctcctggcccctgccaggggcttacatcaaaacacctcagagggctgccctccagaggctgcacccagaacagtgggacatgagcaggggtgtgggcttggagggtgaagaggatgtggtcctatcagatgctgggcctcctcagccatagccccctgctcctaccccctgactggctcttgcgtcctcacctctcaccctctccttcccgggaggccctgggaggtgatcattgacacccagccaagcagacagctgcgggtgcccaagcccttgctgggcctgcgcgtgaggagtcccactgcttctaaaggaagtcctgggcaggaggtggctttggtggttggttccaaagttgaaaatgcttgcagtttgaccttagaagaagtgggaagaagaaggagctctacagggtcagctttgtttgatttgtccagtctaagaagtcccattgccaaagctttctgcaggagggtgaatgccgcagcttggcagcccctgggtttctcttggaaatggtcagtttcccctcaaagtacccaaagtagccttggcttgagtttttgtccttgcctcctttttagagaagagggcatttagactgcattttcctggttaaagaaggttaaagcaaatgtttattgccttttctagtgaactaactcgtagagatgttctcagcaggaagacagtcttagcactgtcacttagcagattgcacttaagtcccttgtgctggccagatggcgtggctggttgccttaatatgtcccaggacccctgacagggctgcctggcctctccctcgtgctcctcaagagcccagtccatacactgtggatgtcattgctgtcgggttaggaagtcttgtcctagaacgccctggctggtatgaccacagttcatggcggctcttctcgcttgggtcatggtcatcttccagcacctgctgtgctgggaaggccgaggatgggggcccagcactgtccaggcctgctggggcctggctgggagtcctgtgggcagcatggaacatgcagctgggcttcctgtgaccaggcaccctctggcactgttgcttgccctgtgccctggaccttttcctgcccttctccttcctctgctcccttggggctaccccttggcccctcctggtctgtgcaaactccctcagggagcccccctgccctgtagctctcgcttaacttcctaggggctgctgagcccacccagaggttgttggagttcagcggggcagcttgtctcccttgtcagcaggggcgtaagggctgggtttggccatacaaggttggctacgccctcaatccctgaccgttccaggcactgagctgggcacccacggaaggacatgctgtccagactgtgatgactgccagcacagggcatctcgggcttggctggtctgcgaggccttgcccctgtggaactctgggttcctgttttctcagtcttttttgcggctttgctgtggttggcagctgccgtactccaggcttgtgtcggccactcagatgagggctgtggtgcgagccagtgcaggagagctgcgcttgggattgtgccctctcctgtgtctgtcctccggacctacccaggtctccaccatcaggaccctgtctttgggtttagaagaccaagtatggggaaaaccaggcaccagcctctgcagcaatgggtccctctagcctgtggacaccagctgggggatccagggtcaggccccctcctctccccagtttccctctgctgtgggttctgggctgtcatgtctccaccacttaaggatgtctttacactgacttcaggatagatgttgggatgcctgggcatggccacatgttacatgtacagaactttgtctacagcacaaattaagttatataaacacagtgactggtatttaatgctgatctactataaggtattctatatttatatgacttcagagacgcgtatgtaataaaggacgccctccctccagtgtccacatccagttcaccccagagggtcgggcaggttgacatatttatttttgtctattctgtaggcttccatgtccagaatcctgcttaaggttttagggtaccttcagtactttttgcaataaaagtatttcctatccatttgg

SEQ ID NO: 1965 - DNA, 4422 bp, Homo sapiens
cgcccagggcggtagcgtgaaacttggtggaagacgctgaccagtcgtgttggaatcaaaacagcggggaccctgcgccatgtcgcgactgatcgtgaagaatctcccgaatgggatgaaggaggagcgtttcaggcagctgtttgccgccttcggcacgctgacagactgcagcctgaagttcaccaaagatggcaagttccgcaagtttggttttattggcttcaagtccgaggaagaggcccagaaggcacagaagcatttcaacaagagcttcatcgacacatcccggatcacagtggagttctgcaagtcattcggggacccggccaaacccagagcctggagcaaacatgcccagaaaccaagccagcccaagcagcctccaaaagactctactactccagaaattaagaaagatgagaagaagaaaaaggtggcaggtcaactggagaagctgaaggaggatacagagttccaggagtttctgtcagttcatcggaggcgggcgcaggcagccacttgggcgaatgatggcctggatgctgagccctcgaaagggaagagcaagccggccagtgactacctgaacttcgactccgattctgggcaggagagtgaggaggagggagccggggaggacctggaagaagaggcaagcctcgaaccaaaggcagctgtgcagaaggagctgtcggacatggattacctgaaatccaagatggtgaaggctgggtcgtcctcttcctcggaggaagaggaaagtgaagatgaagccgtgcactgtgatgaagggagtgaggccgaggaagaggattcctccgccaccccagtcctgcaggaaagagacagcaggggtgcaggccaagagcaagggatgccagctgggaaaaagagaccaccggaggccagagccgagacagagaaaccagcaaaccagaaggaacccaccacctgccacaccgtgaagctgcggggagccccgttcaatgtcacagagaaaaatgttatggaattcctggcacccctgaaaccagtggccattcgaattgtgagaaacgctcatgggaataaaacaggatacatctttgtggatttcagcaatgaagaggaagtgaagcaagctctgaaatgcaaccgggagtacatgggtgggcgctacatcgaggtgttcagggaaaagaacgtccccaccaccaagggtgcaccaaagaataccaccaaatcctggcaaggccggatactcggggagaacgaagaggaggaggacctggccgaatccggaaggctctttgtacggaacctgccctacaccagcaccgaggaggatctggagaagctcttctccaaatacggtcccctgtctgagctccactaccccatcgacagcctgaccaagaaacccaagggttttgcattcatcaccttcatgttccctgagcacgctgtgaaggcctactcggaggtggacgggcaggtattccagggcaggatgctccacgtgttaccatctaccatcaagaaggaagccagcgaggatgccagtgccctgggatcgtcgtcctacaagaagaagaaggaggcccaggacaaagccaacagtgccagctctcacaactggaacacactattcatggggccgaatgccgtggccgatgccatcgcacagaagtacaacgccaccaaaagtcaagtgtttgaccacgagaccaagggcagcgtggccgtgcgcgtggctctgggggaaacccagctcgtccaggaagtgcggcgttttctcatagacaacggggtcagcctggattccttcagccaggctgcagcagagcgaagcaagactgtgattctggtcaagaacctcccggcaggcaccctggcggccgagctgcaggagaccttcggccgttttggcagcctgggccgcgtgctgctgccagagggcggaaccactgccatcgtggagttcctggagcccctggaggcccgcaaggccttcaggcatctggcctattccaagttccatcatgtccccctctatctggagtgggctccagttggcgtcttctccagcgcagccccacagaagaaaaagctccaagacacaccttcagaacccatggaaaaggacccagcagagccagaaacagtgcctgatggcgaaaccccagaagatgaaaatccaacagaggaaggagcagacaactcttcagcaaagatggaagaggaggaggaggaagaggaagaagaagaagagagcctcccaggatgtactctgtttattaagaatctcaattttgacacaacagaagagaagctgaaggaagtgttttcaaaagtggggacagtgaagagctgctccatctccaagaagaagaacaaagcaggagtgctcctttccatggggtttggatttgtggaatacaggaagccggagcaagcccagaaagctctcaagcagctccagggtcacgtcgtggacggccacaagctggaagtgaggatctcggaacgagccactaagccagccgtgacattggctcggaagaaacaagttcccagaaagcagaccacctccaagatcctggtgcggaacatccccttccaggcccacagccgggagatccgagagctcttcagcacctttggggagttgaagacggtccgcctgccaaagaagatgactgggacaggcacacacagaggcttcggctttgtggacttcctcaccaagcaggatgcgaagagagccttcaacgccctgtgtcacagcacccacttgtacgggcggaggctggtgctggagtgggccgactccgaggtgaccctgcaggccctgcggcggaagacggccgctcactttcacgagcccccgaagaaaaagcggtctgtggtgttggacgagatcctggagcagctggaaggcagtgacagcgacagcgaggagcagacccttcagctgtgagctggcaccgagagggctggagtgcagtggcgtgatctgggctcacctccctggttcaagcgattgtcccgcctcagcctcccaaggctgggattacaggtatgcaccaccacgcccggctaattttgtatttttcatagagactgggtttcaccatgtagaccaggctggtctcgaattcctgacctcaagtgatccacctacctcggcctcccaaagtgtggggattacgggtgtgagccaccacgcctggctaattttttgtatttttggtagacggggtttcaccatgtgggccaggctggtcttgaactcccaacctcaagtgatccacccaccttgttctcccaaagtgctgagattacaggtgtgagccaccatgcccagcctgttcctaaccctttcaactggggggtctcaagtgggtgaggactccatggccacggcagcagaactgtctcttctgaaaaccagactccggggcccctgggtcagcacctctaggtcattccacagacttacacagtttaaagaaagagccagcgaacatggggtgatcctggggtgccactgggatcccaagccaggcccggaggtctgcctgtttcgtccccagaaacttgagctggcatcctccgctggtttgcactgggcacggggactggagagccaccaggccactgagcacagcatgctatcacttctcaggaagttgtgagggtgaggagaatagccgggcccactctgcagaggggaggaacaggcacaggctagaggcacgggctgatagagtgagtcctctccctcattcattcattcattcattcattcatccatcagacacctgctgggcatctgctgtgtgcgagacactgtgctgggtgccccagacacaagacagaaactcgggtcgctctgtgtgcctccacactggccttccctgctgcgtggacgcaggctctgtctcctaggctttaagccccatgcatcaggtggaagacaatttccagcggcctctgcccgcttgtttttcctcctctccttttcctgccgccttggtcttttttgtcttttgtgcagggccgtctctcgcagcgcccgtctgtgctccgcagcgtctaggaaaggattagtgtgagcagagcatgcaggctttggtgaacagagccgagcttggtttcaacatctaattcaatttgttctgccgagattgaaatatgaaatggttgccagtcaaacgttcaaaggacggggaagggagagtgagcgcatgctgaaatttaaattttaatgaaaatgactttaaccctttggtacaccttgcaaaatgtaacccatcctcccatcctgtgaaagcggcctctcgggttagagcttttccacccacttctcttccactgagcttcactaataatatgtaatcatttttttcagccgtcttaataataaaagattaatag

SEQ ID NO: 1966 - DNA, 5547 bp, Homo sapiens
aagttttggagcgccggacaagctgaggtccgcgactcgtcgctaagattccccaaaactgagatttcaagaaaattcaccctttccgctttctttggcgcccttcaaccgtgaaggaaatgaaggttgagaacctggaacccgcttccaaagaccaagccctttctctgtgcctcacaacagtcttgcgctgtagctgtttttattacccctattttactactggggaggagatttgaggtcctgaaagtgaagtgacttgctggacgtcacttagcagaggagatggcgaaacctggattagaggcgatgccttctaactcccagcgtggacttgcctcctttcctgggggtgactgaatgcccagccagggacgcgacgtctctggccagcagaaatacggcctcctccccgccgactgggcaaagggggaccttgcggccaaggagggattcgcaggcgggccgggggtgggagcgggggccggagccggagccttggcccgcccccgggcggcgctgtgattggccggccgctccggcgggcgtcgcgattggccgtcctgcagccgttgagatttgaactcggtatttgtggctttgcccgcgcgttgccagactcagaggcggccctttgcctctgcctgccggggattggccggattctccgccgacttgaaaactgccttgctaattggtgcgtgttgtgcacgcgtgttttttccttttcatttcagcctgactgccggaatcagagccgcgggtgagatccccagccctgtgagcctgtaggagtagaatggctccccaaatgtatgagttccatctgccattatccccagaggagttgttgaaaagtggaggggtgaatcagtatgttgtgcaagaggtactgtccatcaaacatcttccaccacagcttagagcttttcaggctgcctttcgagctcaggggcccctggctatgctgcagcactttgatactatctacagcattttgcatcactttcgaagtatagatcctggcctcaaagaagatactctggaattcctgataaaagtggtatcccgccactcccaggagcttccagctatcctggatgatacaactttgagtggatcagatagaaacgcccatctaaatgccctcaaaatgaactgttatgctctgatacgtctcctggaatcctttgagaccatggccagccagacaaaccttgtggacctggaccttggtgggaagggtaagaaagctcggaccaaggcagcccatggctttgactgggaagaagagaggcaaccaattcttcagcttttaacacagctacttcagttggacatccgtcacctgtggaaccactcaataattgaagaagaatttgtcagtttggttactggctgttgctaccgccttctggagaatcccaccattaatcaccagaagaaccgccccactcgggaagccataacacacctgcttggtgtagccttgacccgttataaccatatgctcagtgctacagtgaagatcatccagatgctgcagcactttgaacacctggcacctgtactggttgcagccgtgagtctatgggcaactgactatggaatgaagagcatagtgggagagattgtaagagagattggacaaaagtgtccccaagagctgagtcgagacccttcagggacaaagggctttgcagcattcctgacagaactagcagaacgtgtcccagctatcctgatgtccagcatgtgcattttgctagatcacctggatggagaaaattacatgatgcgtaatgctgtgctggcagccatggcggagatggtgctgcaggttctcagtggcgatcaactggaagcagcagcccgagacaccagagaccagttcttggatactttacaagcccatggccatgatgtcaactcctttgtgcggagccgtgttttgcagctcttcacccgaattgtccagcagaaggctctccccctgacacgtttccaggcagtggtggctttagctgtgggacgtctggcagacaagtcagtgctagtatgtaaaaatgccatccagctgctggccagttttctagccaataatcctttctcctgcaagcttagtgatgctgaccttgccggaccactgcagaaggagacccagaaattacaagagatgagggcccagaggcgaactgcagcagcttctgcagtgctggacccagaggaggagtgggaagccatgctgccagagttgaagtctaccctgcagcagcttctacagcttccccagggagaggaggagattcctgagcaaattgccaatacagagacaactgaagatgtgaaaggacgcatctatcaactgcttgccaaagctagttacaaaaaggccatcattctcactcgagaagccacaggccacttccaggagtccgaacccttcagtcatatagacccagaggagtcagaggagaccaggctcttgaatatattaggacttatcttcaaaggcccagcagcttccacacaagaaaagaatccccgggagtctacaggaaacatggtcacaggacagactgtctgtaaaaataaacccaatatgtcggatcctgaggaatccaggggaaatgatgaactagtgaagcaggagatgctggtacagtatctgcaggatgcctacagcttctcccggaagattacagaggccattggcatcatcagcaagatgatgtatgaaaacacaactacagtggtgcaggaggtgattgaattctttgtgatggtcttccaatttggggtaccccaggccctgtttggggtgcgccgtatgctgcctctcatctggtctaaggagcctggtgtccgggaagccgtgcttaatgcctaccgccaactctacctcaaccccaaaggggactctgccagagccaaggcccaggctttgattcagaatctctctctgctgctagtggatgcctcggttgggaccattcagtgtcttgaggaaattctctgtgagtttgtgcagaaggatgagttgaaaccagcagtgacccagctgctgtgggagcgggccaccgagaaggtcgcctgctgtcctctggagcgctgttcctctgtcatgcttcttggcatgatggcacgaggaaagccagaaattgtgggaagcaatttagacacactggtgagcatagggctggatgagaagtttccacaggactacaggctggcccagcaggtgtgccatgccattgccaacatctcggacaggagaaagccttctctgggcaaacgtcacccccccttccggctgcctcaggaacacaggttgtttgagcgactgcgggagacagtcacaaaaggctttgtccacccagacccactctggatcccattcaaagaggtggcagtgaccctcatttaccaactggcagagggccccgaagtgatctgtgcccagatattgcagggctgtgcaaaacaggccctggagaagctagaagagaagagaaccagtcaggaggacccgaaggagtcccccgcaatgctccccactttcctgttgatgaacctgctgtccctggctggggatgtggctctgcagcagctggtccacttggagcaggcagtgagtggagagctctgccggcgccgagttctccgggaagaacaggagcacaagaccaaagatcccaaggagaagaatacgagctctgagaccaccatggaggaggagctggggctggttggggcaacagcagatgacacagaggcagaactaatccgtggcatctgcgagatggaactgttggatggcaaacagacactggctgcctttgttccactcttgcttaaagtctgtaacaacccaggcctctatagcaacccagacctctctgcagctgcttcacttgcccttggcaagttctgcatgatcagtgccactttctgcgactcccagcttcgtcttctgttcaccatcctggaaaagtctccacttcccattgtccggtctaacctcatggttgccactggggatctggccatccgctttcccaatctggtggacccctggactcctcatctgtatgctcgcctccgggaccctgctcagcaagtgcggaaaacagcggggctggtgatgacccacctgatcctcaaggacatggtgaaggtgaaggggcaggtcagcgagatggcggtgctgctcatcgaccccgagcctcagattgctgccctggccaagaacttcttcaatgagctctcccacaagggcaacgcaatctataatctccttccagatatcatcagccgcctgtcagaccccgagctgggggtggaggaagagcctttccacaccatcatgaaacagctcctctcctacatcaccaaggacaagcagacagagagcctggtggaaaagctgtgtcagcggttccgcacatccctaactgagcggcagcagcgagacctggcctactgtgtgtcacagctgcccctcacagagcgaggcctccgtaagatgcttgacaattttgactgttttggagacaaactgtcagatgagtccatcttcagtgcttttttgtcagttgtaggcaagctgcgacgtggggccaagcctgagggcaaggctataatagatgaatttgagcagaagcttcgggcctgtcataccagaggtttggatggaatcaaggagcttgagattggccaagcaggtagccagagagcgccatcagccaagaaaccatccactggttctaggtaccagcctctggcttctacagcctcagacaatgactttgtcacaccagagccccgccgtactacccgtcggcatccaaacacccagcagcgagcttccaaaaagaaacccaaagttgtcttctcaagtgatgagtccagtgaggaagatctttcagcagagatgacagaagacgagacacccaagaaaacaactcccattctcagagcatcggctcgcaggcacagatcctaggaagtctgttcctgtcctccctgtgcagggtatcctgtagggtgacctggaattcgaattctgtttcccttgtaaaatatttgtctgtctcttttttttaaaaaaaaaaaaggccgggcactgtggctcacgcctgtaatcccagcactttgcgataccaaggcgggtggataacctgaggtagggagttcgagaccagcctgaccaacatggagaaaccccatctctactaaaaataaaaaattagccgggcgtattggcgtgcgcctgtaatcccagctactcaagaggctgaggcaggagaatcgcctgaacccagaggcggaggttgtagtgagccgaaatcacaccattgcactccagcttgggcaacaatagcgaacctccatctcaaattaaaaaaaaaatgcctacacgctctttaaaatgcaaggctttctcttaaattagcctaactgaactgcgttgagctgcttcaactttggaatatatgtttgccaatctccttgttttctaatgaataaatgtttttatatactttt

SEQ ID NO: 1967 - DNA, 6706 bp, Homo sapiens
agcccacccgcctggctgcgcgtcccgggcccggcggctgaagaggagccgcggcgaggaacaagagtgtggtgagaggacgcggaaacacctgatatcccagcaaaggaagctgcagaggaagggtcctgccccgtgagcgaggacagcctccaggagcacagcggcttctcctaacatccccctggcagtgaattacggatgaccccgtatatgaggaggtgtggatgccgacacacggggagagctcctgagaccagcacacaggaccagtgtcctccccgtgaccttgcagttgtgtagccacaagtgggagccacagagaaggagagcccataaggggactcttttcaagacacggtgttaaatcaaggctctgaagttggggccacagccggtctcagctttctgtgttctgggggcgcggtgatatgacagcatgtgaagtgagtgggtgagcacggactcctgagagcgagggcgcacccaatacctagttatccggtactgcagagagacacctggtcagccagcgttgcaaagagggatagctagtcactcaggctgcagagagagacacctggtcacccaggctgcagaaacaaccgcagtcaactgcagctccagtcattgctggatgttggctgacgcggtcctggcgccagctggagatccattcaccaagactttctgggcagatttaaagtggctggggttcagaagttcagcaagttggacacacccctcctcgctggagaggagagggcaaaggcgaggcgggggagcagcgtgtgagattccccccttcacacacacaacaaagcgtggacacacagaagtgaaatctgatcgcgtgccaggaaaagctgtgaggctggaaaccccggagtaaggctcgaccttggccagacctgcaggctgcggaaccgggggcgcgcgggcgcagcgcagcacagcccggccatggagcacgcggtggccccctgcgtcctctacccagggactgagcccggggctgccggggagagcgagagcgagggcgccgcgtccccggcgcagacaccctgcagtctcggcgcgtccctgtgcttcagctccggggaagagtccccgccgcagtccctcgcctcagcggcggaaggcgcggccacctccccgccctccagcggtggcccgcgggtggtggagcggcagtgggaggccggcagcgcgggcgccgcgtccccggaggagctcgcgtcccctgaggagcgcgcgtgcccggaagagcccgcggcgccgtcccccgaaccgcgcgtttggcttgaggaccccgcgtcccccgaggagcccggggagcccgcgcccgtacccccggggttcggggcggtgtacggggagccggacctggtgctggaggtgtcggggcgccggctgcgcgcgcacaaggcggtgctggcggcgcgcagcgactacttccgcgcgcgcgcgtcgcgggacgtgctgcgggtgcagggagtgagcctgacggcgctgcggctgctcctcgccgacgcctacagcgggcgcatggcgggcgtgcggcccgacaacgtggccgaggtggtggccggcgcgcgccgcctgcagctgcccggcgccgcgcagcgcgccaccgacgccgtggggccgcagctgagcctggccaactgctacgaggtcctgagcgcggccaagcggcagcggctgaacgagctgcgcgacgccgcctactgcttcatgagcgaccactatctggaggtgctgcgcgagcccgccgtgttcggccgcctgtcgggcgcagagcgggacctgctgctgcgccgccgcctgcgcgccggccgcgcccacctcttggccgcggcgctcgggccggcgggggagcgcgcgggcagccggcctcagagcccctcgggggacgcggacgcgcgcggggacgcggccgtctactgcttccacgcggcggccggagagtggcgcgagctgacgcggctgcccgagggcgcgccggcgcggggctgcggcctgtgcgtcctctacaactacctcttcgtggcgggcggcgtggcgcccgcgggccccgacggccgcgcgcgcccgtccgaccaggtcttctgctacaacccggccacggacagctggagcgccgtgaggcccctgcgccaggcgcgctcgcagctgcggctgctggccctggacggtcacctctacgccgtgggcggcgagtgcctgctcagcgtggagcgctacgacccgcgcgccgaccgctgggcccccgtggcgccgctgccccggggcgccttcgccgtggcgcatgaggccaccacctgccacggcgagatctacgtgtccgggggctccctcttctatcgcctgctcaagtatgacccgcggcgcgacgagtggcaggagtgcccgtgcagcagcagccgcgagcgctcggccgacatggtggctctcgacggcttcatctaccgcttcgatctgagcggcagccgcggcgaggcgcaggcggcggggccgagcggggtcagcgtgtcccgataccactgcctggccaagcagtggagcccgtgcgtcgcgcccctgcgcctccccggcggccccacgggcctgcagcccttccgctgcgccgccctggacggcgccatctactgcgtgagccgcgcgggcacctggcgcttccagcctgcccgggaaggcgaggccggcggcgacgcaggccagggcggcggcttcgaggcgctgggcgcccccttggacgtccggggtgtgctcatcccgttcgctctcagcctgcctgagaagccgccccgaggggagcagggcgccccgtaggccggcggggtcggcgggcgtctccctcggcaggggtttgcggggcccaggtccctttgggcccgcggaggaggacgtggtggggagtcggggccgctggccacgctggtggtttggacacttcgaaggagccccgaggacgctctcagggccgctttcgctttgctttccttttgcttgtctttgcttctgggggtggatgccttgagacccaggaggtgtgcggatgggtcccttgacagacaggacacagagaaggctgtgggatccaaagggtcagcctcagggtacagtgggggttcctgaggcagcctgcagccggccccggggtgtcccgaaccccgcagagcaccgaggctgtgcgcaggagcctgggaccctcaagtaggtcgccgcgaactatcgggggaagcacgcagagaggggtcacgccttttatttttggcttgagatttaaaattataactgataagtaaagctctttctgatttagttgaaaatttcgtaccatgtgctcgctttggttggctcaactccaaaaagagtaatttaataagcattaaaggtaaaatctttgattaccagtaaggtttcttgttcaatatgcattggaagtatttccttccccacaccattgctactcaaactcacatgcctagagcagctccgtctcactgttggaccgagggggctttcatattttcagttgaaaggatgttaactgatgtagcgatgatttaccattatttaaattttaagtcttcagtggctaaatgtgaccaaacagcacatcataagtaggaaaaacttaccagggtgcttgtctatctaaaaagcaatttttgatagtccactctgtatgcccagccgctttcataatctggaacgagataaaatattcctaaaaagcggggaaaatcattttgctttgacagttctataaaaaaaagtgtaggcacattttaaacccactgtatatgatgttttcaatgtggatcgtgtagttctgatgagggagattaatttttacaatcagtattctaagtgtggccgagtgacagtgggcatagatttataacaaggaagtgacgtgcttatcaccatagatttgcaagtaaactgcatgtatttaattgtattgaattgagttccaaaataccctaatagaattaacacgaggctcactgcattgacagggtatgaggattaaaaacaaatcagttgggtcgtttctcatttaacattttacttttcaagtgtgtatacagaggacttactattatgactttgaggatgagatccatgctcacaaatagaggcgaacatttgaactccgaatccaacccattttcttactgtaagaggaaaagttactggaacgtaactagttgaaatcctgcctactttaatattatttgtttgttaatccagtaatgggaactgccatctctgtagaaatcagtgggtaattgaaaaataggttatgctttttaaagagtctgtggttatgagaggtctcagttaagtgtgtttagaagtgatcagcttgaaccttatgcatgactcgggggctggaatttatgatctgggttacggtatgttctggggacgtgtctgcttgcccatggttactcatgaactgaggggatagcttggcaacttggttaatcatcttgggaaagaaaaacagacttcatatcgcctgacttgattggccttttataggagtatactggagaaatggttgtagaaacagtatttacagcaaaaggaaacaaataatgttcattttaagcaatgtaccattcacactgtcctgccttttcctctagaattttattaatggtagaaatttttatatgaaatgggaccaggaccaggctaatattttcagtccttaaatatcaaactcatatgctgttatcactgtgattttacttgtgaaatcattcctgtaatgtttagtgtttgaaaatgaaatattgaaattaggtttccagagtaacactgtccccggaaaaggatatgagaagtggtggatgttggatgggggtggttgcacagtcctgtgcggttcccatggctttccagcgtttcatttagtgaaggaatgctcacactagatgtagcacagcttcctgtggggcccggcagcaaagccccaggtgctccctgtcacctcacaacaaaatgcactaagaaacgtaaagaataagaggaattaatacccaccattaaaggatgtccggccaacctattgtggaaatttatagaatagtatacaccacagttctgaatagtgatatcacataaaaatacatactagaggacctgccaagccatgagcagtgtttttgctttttgggggccagtccctggggtgtggagccgctagggtttgcacccatgaaacagaaaagccacaccctccaaggtgtggctttcattttgggactgctgcagggagggcagaggcattgctgagactgcctggcaacggctgatgccccaggtaggaccttttccatttcaaagtggtgttctaagtctgcgtccaacactgtgtaggaaaaaggttggtgcaaaaatattcctggtcatccacccattaaaatagttagatgaggctattgccttgatgacagctgtccacactcctcatgaaattaacccgtatgccggggcatttccaaatgtctgactcgtgaaattaacccatacgcaggggcctttccaaatgtctgaaaaggcagtggtgtcttttggggaaaatgttatgcatggaagcctgaccttttgcttagttgacagcaatcccttctgtattgccaatcaaggttcatttgagatgcagaggaatgagcttgagccttcctccttttccttccggttttattcttcctcttgggaacatccctccactccgcactgcttcctgcagctttgtagagctggatttggaacttcgggatttggtttctgagtctgtggaggcaccgacttctcctgtaagaaaatgaatgttgtggaaattctttggctacttaactaaaactcgtgactgtataagtttggctacaaataagtaagaaattaatcatctgctctgtttctgctaatttctggtgtcacttcagtaattctggtagcagccgttgaatctgtcagtctcttaggtaacttcctgtaaacgatttggaaataggatgttttcaacgttcttttgtcttttgctgaagtcaggatagattcaagacataatctcttgtaagatctaaatagagcaaatgtaaacaaaagtgcatttttgtattcttgttaattttagatgctttcctagcttacaaaaagttctatttttgggttaaaaatcaatcaactttctgatatttccccttctgcaatgttattgttcataagaaaacacgagctgaaaatggaaatctgcagttgtttcagttgtcttgaatttctttcagtggccacatcatttccacgttttccacatccgggaggaagcctggactgtgcagccttcgggcacccggcacagacactgtgctggcaggagcttcagacacgccaagtggatggatttggattgaacgcatatgaaacaggagacgggttctcatgtgagatcaaagctcctccaaagcctgttcaagctctaagcgattctcaaatgttaccatttattaaaggtaaactacacctgttgaaggccaagttcagggcagctgttgtgatctgtgtagttaatgtatttattaatgcttgacttttaaaatcctgggcataaatagtgcagagcctcgtatgtttgtcagttcatgccgagatgaaataaatcacgcagaaagtgccagtc

SEQ ID NO: 1968 - DNA, 3205 bp, Homo sapiens
cgactcgtcgccattcccggagcaggtcggcctcggcccaggggcgagtatccgttgctgtgtcggagacactagtccccgacaccgagacagccagccctctcccctgcctcgcggcgggagagcgtgtccggccggccggccggcggggctcgcgcaacctccctcgcctccccttcccccgcagcctccgccccgccaggcccggcccggactcccgagccccggcctcctcgtcctcggtcgccgctgccgccgggcttaacagccccgtccgccgcttctcttcctagtttgagaagccaaggaaggaaacagggaaaaatgtcgccatgaaggccgagaaccgctgccgccgccgacccccgccggccctgaacgccatgagcctgggtccccgccgcgcccgctccgctccgactgccgtcgccgccgaggcccccgttgatgccgctgagctcccccaacgccgccgccaccgcctccgacatggacaagaacagcggctccaacagctcctccgcctcttcgggcagcagcaaagggcaacagccgccccgctccgcctcggcggggccagccggcgagtctaaacccaagagcgaattactaatttcagctggattcaatttgttgtcagttgattctgtagtaaggccatatgttgcccctctggaggtgcttgtcaactactctggatgatggatggaaagaactccagtggatccaagcgttataatcgcaaacgtgaactttcctaccccaaaaatgaaagttttaacaaccagtcccgtcgctccagttcacagaaaagcaagacttttaacaagatgcctcctcaaaggggcggcggcagcagcaaactctttagctcttcttttaatggtggaagacgagatgaggtagcagaggctcaacgggcagagtttagccctgcccagttctctggtcctaagaagatcaacctgaaccacttgttgaatttcacttttgaaccccgtggccagacgggtcactttgaaggcagtggacatggtagctggggaaagaggaacaagtggggacataagccttttaacaaggaactctttttacaggccaactgccaatttgtggtgtctgaagaccaagactacacagctcattttgctgatcctgatacattagttaactgggactttgtggaacaagtgcgcatttgtagccatgaagtgccatcttgcccaatatgcctctatccacctactgcagccaagataacccgttgtggacacatcttctgctgggcatgcatcctgcactatctttcactgagtgagaagacgtggagtaaatgtcccatctgttacagttctgtgcataagaaggatctcaagagtgttgttgccacagagtcacatcagtatgttgttggtgataccattacgatgcagctgatgaagagggagaaaggggtgttggtggctttgcccaaatccaaatggatgaatgtagaccatcccattcatctaggagatgaacagcacagccagtactccaagttgctgctggcctctaaggagcaggtgctgcaccgggtagttctggaggagaaagtagcactagagcagcagctggcagaggagaagcacactcccgagtcctgctttattgaggcagctatccaggagctcaagactcgggaagaggctctgtcgggattggccggaagcagaagggaggtcactggtgttgtggctgctctggaacaactggtgctgatggctcccttggcgaaggagtctgtttttcaacccaggaagggtgtgctggagtatctgtctgccttcgatgaagaaaccacggaagtttgttctctggacactccttctagacctcttgctctccctctggtagaagaggaggaagcagtgtctgaaccagagcctgaggggttgccagaggcctgtgatgacttggagttagcagatgacaatcttaaagaggggaccatttgcactgagtccagccagcaggaacccatcaccaagtcaggcttcacacgcctcagcagctctccttgttactacttttaccaagcggaagatggacagcatatgttcctgcaccctgtgaatgtgcgctgcctcgtgcgggagtacggcagcctggagaggagccccgagaagatctcagcaactgtggtggagattgctggctactccatgtctgaggatgttcgacagcgtcacagatatctctctcacttgccactcacctgtgagttcagcatctgtgaactggctttgcaacctcctgtggtctctaaggaaaccctagagatgttctcagatgacattgagaagaggaaacgtcagcgccaaaagaaggctcgggaggaacgccgccgagagcgcaggattgagatagaggagaacaagaaacagggcaagtacccagaagtccacattcccctcgagaatctacagcagtttcctgccttcaattcttatacctgctcctctgattctgctttgggtcccaccagcaccgagggccatggggccctctccatttctcctctcagcagaagtccaggttcccatgcagactttctgctgacccctctgtcacccactgccagtcagggcagtccctcattctgcgttgggagtctggaagaagactctcccttcccttcctttgcccagatgctgagggttggaaaagcaaaagcagatgtgtggcccaaaactgctccaaagaaagatgagaacagcttagttcctcctgcccctgtggacagcgacggggagagtgataattcagaccgtgttcctgtgcccagttttcaaaattccttcagccaagctattgaagcagccttcatgaaactggacacaccagctacttcagatcccctctctgaagagaaaggaggaaagaaaagaaaaaaacagaaacagaagctcctgttcagcacctcagtcgtccacaccaagtgacactactggcccaggctaccttctccatctggtttttgtttttgtttttttttcccccatgcttttgtttggctgctgtaatttttaagtatttgagtttgaacagattagctctggggggagggggtttccacaatgtgagggggaaccaagaaaattttaaatacagtgtattttccagcttcctgtctttacaccaaaataaagtattgacacaagag

SEQ ID NO: 1969 - DNA, 4491 bp, Homo sapiens
aaatgtagagaagcagccgataaaatagcattgcctgaagaagtttggaggctgagagcagcagtagactggccaactgcagagcaagttgtttctccagccgtgcggtgcagcctcatgcccccaacccagcttagccactgtaagaagacgttcactgtacagacgaccaaacttgccgtggaagagacagttgtgagattcccttgcaaatttacatacgagaatggcttgtgaaatcatgcctctgcaaagttcacaggaagatgaaagacctctgtcacctttctatttgagtgctcatgtaccccaagtcagcaatgtgtctgcaaccggagaactcttagaaagaaccatccgatcagctgtagaacaacatctttttgatgttaataactctggaggtcaaagttcagaggactcagaatctggaacactatcagcatcttctgccacatctgccagacagcgccgccgccagtccaaggagcaggatgaagttcgacatgggagagacaagggacttatcaacaaagaaaatactccttctgggttcaaccaccttgatgattgtattttgaatactcaggaagtcgaaaaggtacacaaaaatacttttggttgtgctggagaaaggagcaagcctaaacgtcagaaatccagtactaaactttctgagcttcatgacaatcaggacggtcttgtgaatatggaaagtctcaattccacacgatctcatgagagaactggacctgatgattttgaatggatgtctgatgaaaggaaaggaaatgaaaaagatggtggacacactcagcattttgagagccccacaatgaagatccaggagcatcccagcctatctgacaccaaacagcagagaaatcaagatgccggtgaccaggaggagagctttgtctccgaagtgccccagtcggacctgactgcattgtgtgatgaaaagaactgggaagagcctatccctgctttctcctcctggcagcgggagaacagtgactctgatgaagcccacctctcgccgcaggctgggcgcctgatccgtcagctgctggacgaagacagcgaccccatgctctctcctcggttctacgcttatgggcagagcaggcaatacctggatgacacagaagtgcctccttccccaccaaactcccattctttcatgaggcggcgaagctcctctctggggtcctatgatgatgagcaagaggacctgacacctgcccagctcacacgaaggattcagagccttaaaaagaagatccggaagtttgaagatagattcgaagaagagaagaagtacagaccttcccacagtgacaaagcagccaatccggaggttctgaaatggacaaatgaccttgccaaattccggagacaacttaaagaatcaaaactaaagatatctgaagaggacctaactcccaggatgcggcagcgaagcaacacactccccaagagttttggttcccaacttgagaaagaagatgagaagaagcaagagctggtggataaagcaataaagcccagtgttgaagccacattggaatctattcagaggaagctccaggagaagcgagcggaaagcagccgccctgaggacattaaggatatgaccaaagaccagattgctaatgagaaagtggctctgcagaaagctctgttatattatgaaagcattcatggacggccggtaacaaagaacgaacggcaggtgatgaagccactatacgacaggtaccggctggtcaaacagatcctctcccgagctaacaccatacccatcattggttccccctccagcaagcggagaagccctttgctgcagccaattatcgagggcgaaactgcttccttcttcaaggagataaaggaagaagaggaggggtcagaagacgatagcaatgtgaagccagacttcatggtcactctgaaaaccgatttcagtgcacgatgctttctggaccaattcgaagatgacgctgatggatttatttccccaatggatgataaaataccatcaaaatgcagccaggacacagggctttcaaatctccatgctgcctcaatacctgaactcctggaacacctccaggaaatgagagaagaaaagaaaaggattcgaaagaaacttcgggattttgaagacaactttttcagacagaatggaagaaatgtccagaaggaagaccgcactcctatggctgaagaatacagtgaatataagcacataaaggcgaaactgaggctcctggaggtgctcatcagcaagagagacactgattccaagtccatgtgaggggcatggccaagcacagggggctggcagctgcggtgagagtttactgtccccagagaaagtgcagctctggaaggcagccttggggctggccctgcaaagcatgcagcccttctgcctctagaccatttggcatcggctcctgtttccattgcctgccttagaaactggctggaagaagacaatgtgacctgacttaggcattttgtaattggaaagtcaagactgcagtatgtgcacatgcgcacgcgcatgcacgcacacacacacacagtagtggagctttcctaacactagcagagattaatcactacattagacaacactcatctacagagaatatacactgttcttccctggataactgagaaacaagagaccattctctgtctaactgtgataaaaacaagctcaggactttattctatagagcaaacttgctgtggagggccatgctctccttggacccagttaactgcaaacgtgcattggagccctatttgctgccgctgccattctagtgacctttccacagagctgcgccttcctcacgtgtgtgaaaggttttccccttcagccctcaggtagatggaagctgcatctgcccacgatggcagtgcagtcatcatcttcaggatgtttcttcaggacttcctcagctgacaaggaattttggtccctgcctaggaccgggtcatctgcagaggacagagagatggtaagcagctgtatgaatgctgattttaaaaccaggtcatgggagaagagcctggagattctttcctgaacactgactgcacttaccagtctgattttatcgtcaaacaccaagccaggctagcatgctcatggcaatctgtttggggctgttttgttgtggcactagccaaacataaaggggcttaagtcagcctgcatacagaggatcggggagagaaggggcctgtgttctcagcctcctgagtacttaccagagtttaatttttttaaaaaaaatctgcactaaaatccccaaactgacaggtaaatgtagccctcagagctcagcccaaggcagaatctaaatcacactattttcgagatcatgtataaaaagaaaaaaaagaagtcatgctgtgtggccaattataatttttttcaaagactttgtcacaaaactgtctatattagacattttggagggaccaggaaatgtaagacaccaaatcctccatctcttcagtgtgcctgatgtcacctcatgatttgctgttacttttttaactcctgcgccaaggacagtgggttctgtgtccacctttgtgctttgcgaggccgagcccaggcatctgctcgcctgccacggctgaccagagaaggtgcttcaggagctctgccttagacgacgtgttacagtatgaacacacagcagaggcaccctcgtatgttttgaaagttgccttctgaaagggcacagttttaaggaaaagaaaaagaatgtaaaactatactgacccgttttcagttttaaagggtcgtgagaaactggctggtccaatgggatttacagcaacattttccattgctgaagtgaggtagcagctctcttctgtcagctgaatgttaaggatggggaaaaagaatgcctttaagtttgctcttaatcgtatggaagcttgagctatgtgttggaagtgccctggttaatccatacacaaagacggtacataatcctacaggtttaaatgtacataaaaatatagtttggaattctttgctctactgtttacattgcagattgctataatttcaaggagtgagattataaataaaatgatgcactttaggatgtttcctatttttgaaatctgaacatgaatcattcacatgaccaaaaattgtgtttttttaaaaatacatgtctagtctgtcctttaatagctctcttaaataagctatgatattaatcagatcattaccagttagcttttaaagcacatttgtttaagactatgtttttggaaaaatacgctacagaatttttttttaagctacaaataaatgagatgctactaattgttttggaatctgttgtttctgccaaaggtaaattaactaaagatttattcaggaatccccatttgaatttgtatgattcaataaaagaaaacaccaagtaagttatataaaat

SEQ ID NO: 1970 - DNA, 1024 bp, Homo sapiens
ggcttgtgggtctttgagacccgaaaattgagagcgttttcgcactccagcggctgctcctggcggctctgcggccgtcaccatgccacagaatgaatatattgaattacaccgtaaacgctatggataccgtttggattaccatgagaaaaagagaaagaaggaaagtcgagaggctcatgaacgttcaaagaaggcaaagaaaatgattggtctgaaggctaagctttaccataaacagcgtcatgctgagaaaatacaaatgaaaaagactatcaagatgcatgaaaagagaaacaccaaacaaaagaatgatgaaaagacaccacagggagcagtacctgcctatctgctggacagagagggacaatctcgagctaaagtactttccaatatgattaaacagaaaagaaaagagaaggcgggaaaatgggaagtccctctgcctaaagtacgtgcccagggagaaacagaagtattaaaagttattcgaacaggaaagagaaagaagaaggcatggaagagaatggttactaaagtgtgctttgttggagatggctttacaagaaaaccacctaaatatgaaagattcatcaggccaatgggcttgcgtttcaagaaagcccatgtaacacatcctgaactgaaagccaccttttgcctaccaatacttggtgtaaagaagaatccctcatccccactgtatacaactttgggtgttattaccaaaggtactgtcattgaagtaaatgtgagcgaattgggccttgtgacacaaggaggcaaagttatttggggaaaatatgcccaggttaccaacaatcctgaaaatgatggatgtataaatgcagtcttactggtttgacagcaatttcatatataattattgaggactacacaccaattgaagaaactgccattactgtgatgtttctgaatactaccaaacagccatacatgtctgcaatgaagagatttattaaattgtaaacattaaagtggaaaaaaaaaaaaaaaaaaaaaa

SEQ ID NO: 1971 - DNA, 2475 bp, Homo sapiens
ccggaggagtccgagaggaagcggaggcgcgagctggaggcggcggctcccgtcggcctccggcaggactgagcgctgggaggccggaaggcgggcgcgcacggcggagaggcgggcgggaggccggagcatattaatgaaaagtgccataaactgaaaaaccaaacatgagggtagcaggtgctgcaaagttggtggtagctgtggcagtgtttttactgacattttatgttatttctcaagtatttgaaataaaaatggatgcaagtttaggaaatctatttgcaagatcagcattggacacagctgcacgttctacaaagcctcccagatataagtgtgggatctcaaaagcttgccctgagaagcattttgcttttaaaatggcaagtggagcagccaacgtggtgggacccaaaatctgcctggaagataatgttttaatgagtggtgttaagaataatgttggaagagggatcaatgttgccttggcaaatggaaaaacaggagaagtattagacactaaatattttgacatgtggggaggagatgtggcaccatttattgagtttctgaaggccatacaagatggaacaatagttttaatgggaacatacgatgatggagcaaccaaactcaatgatgaggcacggcggctcattgctgatttggggagcacatctattactaatcttggttttagagacaactgggtcttctgtggtgggaagggcattaagacaaaaagcccttttgaacagcacataaagaacaataaggatacaaacaaatatgaaggatggcctgaagttgtagaaatggaaggatgcatcccccagaagcaagactaatggaaatgtggagagaattgaagaaagcgcactttcactcttaatgggagagctataaatggcagagctatgtgtaaatattttaagagcatgcagccatcttggtgtgtgcatgagtattgtctcttttgatatcaggattatttattgctaacgtaaatagatagcattgtaaataatcatcacaatgatcaaatcactgaaccatgtctccgcacatttccctaaaagtacaatgtttagactgctatggtaatacatattttaaattctaaaagcatacacaatgtgtaactgaatggtttgtgaaaaatatattgatatatatactagttgctatgaaaatatcatggaataatagggattttagggtggatactttattttcttttatgtttctatatgttgcgttgtgatgacattatcttttaaattaaaaagagatttggctagttgtgtgtgtaatgttactttacagtccgactctcctgatgtacctcttttcatgatctttttctttccttcccaagaaactgaggaatgtttaatatgaaaacatacatcggatatgtgaaaagcacaacaaaattcttaatgtacacagtaaaaaagtaaatatataaatgtagatggcatttaggaccacagcttgctggatttgtgttagctatgggaataacttgattttgtataagctatttagagtgaggctggaggtggcagcttcacagaactggagaaccaggccaagtcccctccccaacctaattaggtcattcaggacagctaagtcagtatatttagagcaatactagcatacgtttttcttaattgttatcagcattgaccaagtggtttggaaggaggcatgctttaatatcacaataattttgatttgtaaaccaagaaattaatcctgtgtttatctaacttcataatagcaattattgcccgaagctatagtggcatatttacaaaagttcttattactgggcggactgataacatttaaaaaataattgtgtttgaccccaaatgactttatacccaattctacataaaaatatagaagatctatctttttttgttaccttcagatgttcactaaataactcagtttttaagcagaagttttcagggcattaaatatatgttgtgtatgaagtatctcaaactggaacataaatttagtgatcaaactgccattcacagtgtaaggcagcacttaaatttcgaacctaaagtttagatgcattgtataaaaaaacctaaaagcagtatctgttatttagctgtaaaccaagttggaagctattcggataatttcttaaatattgatgaactttggagtactgtttcttccttcaaactgaatgtaattaattcatgaataaatgcaccttatatgtttaaacaatctttgtatacttttgggatttttggtgcttatatgctaaatcacattcagcatgtgtattttgacatttaaaatacttccctcaattctgtaaattaaaagaatagttattttacagttccagggattgtgaaataaatgttgcagttttttaaaataatgaaaataaatactcttggttttgctttgtgaaaaaaaaaaaaaaaa

SEQ ID NO: 1972 - DNA, 3432 bp, Homo sapiens
  misc_feature (2741)..(2741): n is a, c, g, or t
ctcgtcatgcgcaatgtggcgctgcggcgggcggcagggcctgtgtgtgctgaggcggctgagcggcggacatgcacaccacagagcgtggcgatggaacagtaaccgggcttgtgagagggctctgcagtataaactaggagacaagatccatggattcaccgtaaaccaggtgacatctgttcccgagctgttcctgactgcagtgaagctcacccatgatgacacaggagccaggtatttacacctggccagagaagacacgaataatctgttcagcgtgcagttccgtaccactcccatggacagtactggtgttcctcacattcttgagcataccgtcctttgtgggtctcaaaaatatccgtgcagaaaccctttcttcaaaatgttgaaccggtccctctccacgttcatgaacgccttcacagctagtgattatactctgtatccattttccacacaaaatcccaaggactttcagaatctcctctcggtgtatttggatgccaccttttccccatgtttacgcgagctggatttctggcaggaaggatggcggctggaacatgagaatccgagcgacccccagacgcccttggtctttaaaggagtcgtctttaatgagatgaagggagcgtttacagacaatgagaggatattctcccagcaccttcagaacagacttcttcccgaccacacgtactcagtggtctccgggggtgacccactgtgcatcccggagcttacatgggagcagcttaagcagtttcatgccactcactatcacccaagcaatgctaggttcttcacgtacggtaattttccattagaacagcatctgaaacaaattcacgaggaagcactgagcaaattccagaaaattgaaccaagcaccgtggtgccagctcagacaccctgggacaagcctagggaattccagataacatgtggcccggattcatttgctacagatccctctaaacaaacaaccgtcagcgttagcttcctcttaccggacatcaccgacacatttgaagccttcacattaagtcttctgtcttcactcttgacttctgggcccaattctcccttttacaaagccttgattgaatctggccttggcacagaattttctcctgatgttggatataatggctacacgagggaggcctactttagtgtcggcctccaagggattgtggagaaagacattgagaccgtcagaagcctcatagacagaacgattgatgaagtagttgagacaaggattgaagatgatcgaattgaggctttacttcataaaattgaaatacagatgaaacatcagtctaccagctttgggctgatgctgacatcatacatagcttcttgctggaaccatgatggggaccctgtggagctcttgaagttgggaaatcagttagctaaattcagacagtgcctgcaggaaaatccaaaatttttgcaagaaaaagtaaaacagtattttaagaataaccagcataagctgactttatcgatgaggccagatgacaagtatcacgagaagcaggcacaggtggaagccacgaagctcaagcagaaggtcgaggctctgtcccccggagacaggcagcagatctacgagaaaggtctagaattacggagtcaacaaagcaaacctcaagatgcctcttgtctgccagcgttgaaagtttccgatattgaacccaccatacctgtcacagagttggacgtggtcctgacagctggagatatccctgttcagtactgcgcccagcccaccaatggcatggtgtatttccgggccttctccagcctgaacacactccccgaggagctgaggccctatgtgcccctcttctgcagcatcctcaccaagctgggctgcggccttcttgactaccgggagcaggctcagcagatagaattgaagaccggagggatgagtgcttctccccacgtgctccccgacgactcacacatggacacctacgagcaggtaggtgtgcttttctcctctctctgcctggatcgaaacctgccagacatgatgcagctatggagtgaaatatttaacaacccgtgctttgaagaagaggagcacttcaaggtgctggtgaagatgaccgcccaggagctcgccaatggaattcctgactctgggcacctgtacgcatccatcagggcaggccggaccctcacgcccgcaggggacctgcaggagaccttcagcgggatggatcaggtgcggctgatgaagaggattgcagaaatgacagatatcaaacccatcctgaggaagctcccgcgtatcaagaaacacttgttaaatggtgataatatgaggtgttcagtgaatgcgactcctcagcagatgcctcagacagaaaaagcggtcgaagacttccttagaagcatcggtcggagtaaaaaggaacggaggcctgtgcgcccacacacggtcgagaaacctgtgcccagcagctctggtggagatgcccacgttccccatggctcccaggtcattaggaagctggtcatggaacccaccttcaagccctggcagatgaagactcacttcctgatgcccttcccggtgaattacgtgggtgaatgcatccgaactgtcccctacacggacccagatcatgccagtcttaaaatccttgcacgtttgatgactgccaaattcttgcatacagaaattcgagaaaaaggcggtgcttatggtggangcgcaaaactcagccacaatgggattttcaccctttactcttacagggacccaaatacaatagagacgctccagtcttttgggaaggctgtcgactgggctaagtctggaaaattcacacagcaagacatcgacgaagccaaactttctgtcttctcaaccgtagatgctcctgtcgctccttcagacaaaggaatggaccacttcttgtacggcctctcggatgagatgaagcaggcccacagagagcagctctttgctgtcagccacgacaagctcctggccgtgagcgataggtacctcggcactgggaagagcacacacggcctggccatcctcggacccgagaacccgaaaattgccaaggacccatcctggatcatccgatgagcagccgtggcgctcgactgcacaggagcccgagacaatacacctccaagctgaatatgaaaagtcagaaatgctactgctttttccaagaatattatgtcattgagtgtcgccaaagcccttgactggcgagtcaaaaactcagatctatcttaagagtgaccaggaagaggttcattgaaataatcatgcatgaagcgccaaagatgcaccatgtagaattttcactttgtactggcaggctcgttttacctgattctagaatatttaagaatctaaaaataaagggcaactctgactta

SEQ ID NO: 1973 - DNA, 4664 bp, Homo sapiens
gccgctgagggagcccttccccgccagcgcgtgcccttccactccgccccgaggtcgcagcggcccgctctcccgccagcgccccctcctcgcggccacgcagcagcccgcgtctcgctctccccacccagtgcagtggccgccgcctcttccgccgccgggctcggggcctccgcagcgacaacatggaggccgtgaagaccttcaatagcgagttgtattccctgaatgactataaaccacccatttcgaaagcgaaaatgacccaaattactaaggcagccatcaaagctattaagttctataaacatgtggtacagagtgttgagaagtttattcagaaatgtaaaccagaatacaaagtacctggactttatgttattgactccattgtgcgacaatcccgacatcagtttggtcaagaaaaggatgtgtttgcacccagatttagtaataacatcattagcactttccagaatttatatcgttgccctggggatgacaagagtaaaatagtgagagtactaaacttatggcagaagaataatgtatttaagagtgagattattcagccccttttggatatggcagccgggattccgcctccagttgtcacacctgttttggccagcactaccactgctatgagcaatactccaggaactcctgtgacacctgttactccggccaatgtggtccaaggcttacctgatccgtgggtatctcagataacaaatacagatacacttgcggctgtagctcagatcttgcaaagtcctcaaggccagcagcttcaacaattaatacaaaccttacagatacaacaacagaagccccagccttccattctgcaggccctagatgctggtcttgttgttcagttgcaagctcttacggcacaacttacagctgcagctgcagctgccaacactcttactcccttagaacagggagtctcctttaacaagaagttgatggataggtttgattttggggaagactctgagcatagtgaagaacccaaaaaggaaattccagcttcacaactttctcacgtttcagaatctgtgaacaattccatttttcatcagatagcagaacaactacaacagcaaaacctagaacatctcagacagcagctcttggagcagcaacagcctcaaaaggccactcctcaggatagtcaggaaggaacctttgggtcagagcattcagcgtcaccatcacaagggagtagtcagcagcattttcttgaacctgaagtcaatttggatgattccatagatattcagcaacaggatatggatatagatgaagggcaagatggagtggaagaggaggtctttgaacaagaagctaagaaagtggcggttcgctcaagatcaagaacacattcacgatctcgttcaagatcaccaagaaaacgaaggtctaggtcacggtctggctctagaaagcgtaaacacagaaagcgatcacgctcccgctcaagagaaagaaagaggaaatcatcacggtcgtattcaagtgaaaggagagccagagaaagggagaaagaacgacagaaaaagggattacctccaattagatctaaaacactaagtgtatgtagtactactctctgggttgggcaagtggacaagaaggcaacacagcaagacttaaccaacctgtttgaagagtttggacagattgaatccattaatatgattcctccccggggctgtgcttatgtctgcatggttcatcgacaagatgcatttcgagctcttcagaaactcagttctggatcatataaaattgggtccaaggtcattaagattgcttgggctttaaacaaaggtgtaaaaacagaatacaaacaattctgggatgtggatcttggagttacatatataccatgggaaaaagttaaagtggatgacttggaaggttttgcagaaggaggcatgattgatcaggagactgtaaatactgagtgggaaactgtgaaaagctcagaacctgttaaagagacggtccagacaactcagagcccaactccagttgaaaaggagacagtggtcacaacccaggcagaggttttccctcctcctgttgctatgttgcagattccagtggcgccagccgtgcctacagttagtttagtcccaccagcatttcctgtgtcgatgccggttcctcctcctggattcagtccaatccctccacctccttttttaagagcaagttttaacccttcacaaccaccacctggtttcatgccgcctccagttcccccacctgttgtgccaccccctacgattccaccagtagtaccaacatctttagtgcagccgtcattatccatgacaccggaaactgtgaaagatgttggatttggtagccttgttataccaggcggttctgttgccagcaatcttgctacttccgctctgccagctggaaatgtttttaatgctccaactaaacaggcagagcctgaagaaaaagtacctcatcttatagaccaccagatttcttctggtgaaaacaccagatcagtgattccaaatgatatttcaagtaatgctgcaattttaggaggacagccgccaaatgtgacaagcaattctggaattctgggagtccaaagaccaaatgtatcaagtaattctgaaattcttggggtccggccatctaatgtttccagtagttctgggattattgcagcccaaccaccaaatattctaaataactctggaatattgggaatacagccacccagtgtgtcaaatagttctggacttttgggagtgctacccccaaatatacctaacaattctggacttgtaggagtacagccaccaaatgttccaaatactcctggacttctgggaacacagccaccagctggacctcaaaacttaccccctttaagtatccctaatcaaaggatgcccacaatgccaatgttagacattcgtccgggactaataccacaggcacctgggccaagattccctttaatacagcctggaattccaccccaacggggaatcccacccccatcggtacttgattcagctcttcatccaccaccccgtggaccttttcctccaggagatatttttagtcaaccagaaagaccttttttagctcctggaagacaaagcgtagacaatgttactaacccagaaaaaaggataccacttgggaatgataacattcaacaggaaggagatagagattaccggtttcctcctatagaaaccagggaaagcattagtagacctccccctgtggatgttagagatgtggttgggcggcctatagatccaagagaaggtcctggacggcctccactagatggtagggatcattttggaagacctcctgtagatataagagagaatcttgtgaggccaggtatagatcatcttggtcgaagagaccactttggctttaatccagagaagccctgggggcatagaggagattttgatgagagagagcatcgggttctaccggtctatggtggtccaaaaggcttacatgaagaaagaggtagatttcggtctggaaactatcgatttgatcctagaagtggtccttggaaccgaggatttggacaagaagttcacagagattttgatgaccgcagaagaccctgggagaggcaaagggatagggatgacagagattttgatttctgcagagaaatgaatggaaatcgtcttggacgagacagaattcaaaacacttgggttccccctcctcatgctcgggtttttgattattttgaaggggccacttctcaacgaaaaggtgataatgtgcctcaggttaatggtgaaaatacagagagacatgctcagccaccacctataccagtacagaatgatcctgaactttatgaaaaactgacatcttcaaatgaaataaacaaggagaagagtgacacagttgctgatatagaaagtgaaccagtggtagaaagcacagaaactgaggggacataatcatcactcagtaggtaaaagataccttttgtaaagttgtcatctctctgtaatagataatggctgactggaccatagttgttcacttttgtctgccagaattaagttaatctgatgttcatgttcacctttctcttaaaataattgtacaactgacttgtatagacattgttcttaatatgaacatggtaggtaaactttttttttatttttttctgataaaatacaaatgttggccccagattcttttaacgtcaaggaaatgaataacagcttgtcagagacttcctatggaagaaagaattttttagatactatcattaggttggatatggtaatagatatatttcagaatagcaagtggtggtatatcttatccatatctttaggctgctgcagaattttaaggttatagataaagctgtgatattttatgcaaagactggctctaggtatttgaggagcacaatacagagattttaaaaagtgattttgtaaaatctacactatggtctctgtttctccaaagtaagtgtttgtgatttgttcctcatactgcagtgagtaaaaaagaaacaagaaaacaacaacataaatattaaagtacgtttcaatgttgggtgaattttgtttttagatgccaataaaacttatttgtttgat

SEQ ID NO: 1974 - DNA, 4565 bp, Homo sapiens
ggcgagctaagccggaggatgtgcagctgcggcggcggcgccggctacgaagaggacggggacaggcgccgtgcgaaccgagcccagccagccggaggacgcgggcagggcgggacgggagcccggactcgtctgccgccgccgtcgtcgccgtcgtgccggccccgcgtccccgcgcgcgagcgggaggagccgccgccacctcgcgcccgagccgccgctagcgcgcgccgggcatggtcccctcttaaaggcgcaggccgcggcggcgggggcgggcgtgcggaacaaagcgccggcgcggggcctgcgggcggctcgggggccgcgatgggcgcggcgggcccgcggcggcggcggcgctgcccgggccgggcctcgcggcgctagggcgggctggcctccgcgggcgggggcagcgggctgagggcgcgcggggcctgcggcggcggcggcggcggcggcggcggcccggcgggcggagcggcgcgggcatggccgcgcgcggccggcgcgcctggctcagcgtgctgctcgggctcgtcctgggcttcgtgctggcctcgcggctcgtcctgccccgggcttccgagctgaagcgagcgggcccacggcgccgcgccagccccgagggctgccggtccgggcaggcggcggcttcccaggccggcggggcgcgcggcgatgcgcgcggggcgcagctctggccgcccggctcggacccagatggcggcccgcgcgacaggaactttctcttcgtgggagtcatgaccgcccagaaatacctgcagactcgggccgtggccgcctacagaacatggtccaagacaattcctgggaaagttcagttcttctcaagtgagggttctgacacatctgtaccaattccagtagtgccactacggggtgtggacgactcctacccgccccagaagaagtccttcatgatgctcaagtacatgcacgaccactacttggacaagtatgaatggtttatgagagcagatgatgacgtgtacatcaaaggagaccgtctggagaacttcctgaggagtttgaacagcagcgagcccctctttcttgggcagacaggcctgggcaccacggaagaaatgggaaaactggccctggagcctggtgagaacttctgcatgggggggcctggcgtgatcatgagccgggaggtgcttcggagaatggtgccgcacattggcaagtgtctccgggagatgtacaccacccatgaggacgtggaggtgggaaggtgtgtccggaggtttgcaggggtgcagtgtgtctggtcttatgagatgcagcagcttttttatgagaattacgagcagaacaaaaaggggtacattagagatctccataacagtaaaattcaccaagctatcacattacaccccaacaaaaacccaccctaccagtacaggctccacagctacatgctgagccgcaagatatccgagctccgccatcgcacaatacagctgcaccgcgaaattgtcctgatgagcaaatacagcaacacagaaattcataaagaggacctccagctgggaatccctccctccttcatgaggtttcagccccgccagcgagaggagattctggaatgggagtttctgactggaaaatacttgtattcggcagttgacggccagccccctcgaagaggaatggactccgcccagagggaagccttggacgacattgtcatgcaggtcatggagatgatcaatgccaacgccaagaccagagggcgcatcattgacttcaaagagatccagtacggctaccgccgggtgaaccccatgtatggggctgagtacatcctggacctgctgcttctgtacaaaaagcacaaagggaagaaaatgacggtccctgtgaggaggcacgcgtatttacagcagactttcagcaaaatccagtttgtggagcatgaggagctggatgcacaagagttggccaagagaatcaatcaggaatctggatccttgtcctttctctcaaactccctgaagaagctcgtcccctttcagctccctgggtcgaagagtgagcacaaagaacccaaagataaaaagataaacatactgattcctttgtctgggcgtttcgacatgtttgtgagatttatgggaaactttgagaagacgtgtcttatccccaatcagaacgtcaagctcgtggttctgcttttcaattctgactccaaccctgacaaggccaaacaagttgaactgatgacagattaccgcattaagtaccctaaagccgacatgcagattttgcctgtgtctggagagttttcaagagccctggccctggaagtaggatcctcccagtttaacaatgaatctttgctcttcttctgcgacgtcgacctcgtctttactacagaattccttcagcgatgtcgagcaaatacagttctgggccaacaaatatattttccaatcatcttcagccagtatgacccaaagattgtttatagtgggaaagttcccagtgacaaccattttgcctttactcagaaaactggcttctggagaaactatgggtttggcatcacgtgtatttataagggagatcttgtccgagtgggtggctttgatgtttccatccaaggctgggggctggaggatgtggaccttttcaacaaggttgtccaggcaggtttgaagacgtttaggagccaggaagtaggagtagtccacgtccaccatcctgtcttttgtgatcccaatcttgaccccaaacagtacaaaatgtgcttggggtccaaagcatcgacctatgggtccacacagcagctggctgagatgtggctggaaaaaaatgatccaagttacagtaaaagcagcaataataatggctcagtgaggacagcctaatgtccagctttgctggaaaagacgtttttaattatctaatttatttttcaaaaattttttgtatgatcagtttttgaagtccgtatacaaggatatattttacaagtggttttcttacataggactcctttaagattgagctttctgaacaagaaggtgatcagtgtttgcctttgaacacatcttcttgctgaacattatgtagcagacctgcttaactttgacttgaaatgtacctgatgaacaaaacttttttaaaaaaatgttttcttttgagaccctttgctccagtcctatggcagaaaacgtgaacattcctgcaaagtattattgtaacaaaacactgtaactctggtaaatgttctgttgtgattgttaacattccacagattctaccttttgtgttttgtttttttttttttacaattgttttaaagccatttcatgttccagttgtaagataaggaaatgtgataatagctgtttcatcattgtcttcaggagagctttccagagttgatcatttcccctcatggtactctgctcagcatggccacgtaggttttttgtttgttttgttttgttctttttttgagacggagtctcactctgttacccaggctggaatgcagtggcgcaatcttggctcactttaacctccacttccctggttcaagcaattcccctgcctttgcctcccgagtagctgggattacaggcacacaccaccacgcccagctagtttttttgtatttttagtagagacggggtttcaccatgcaagcccagctggccacgtaggttttaaagcaaggggcgtgaagaaggcacagtgaggtatgtggctgttctcgtggtagttcattcggcctaaatagacctggcattaaatttcaagaaggatttggcattttctcttcttgacccttctctttaaagggtaaaatattaatgtttagaatgacaaagatgaattattacaataaatctgatgtacacagactgaaacacacacacatacaccctaatcaaaacgttggggaaaaatgtatttggttttgttcctttcatcctgtctgtgttatgtgggtggagatggttttcattctttcattactgttttgttttatcctttgtatctgaaatacctttaatttatttaatatctgttgttcagagctctgccatttcttgagtacctgttagttagtattatttatgtgtatcgggagtgtgtttagtctgttttatttgcagtaaaccgatctccaaagatttccttttggaaacgctttttcccctccttaatttttatattccttactgttttactaaatattaagtgttctttgacaattttggtgctcatgtgttttggggacaaaagtgaaatgaatctgtcattataccagaaagttaaattctcagatcaaatgtgccttaataaatttgttttcatttagatttcaaacagtgatagacttgccattttaatacacgtcattggagggctgcgtatttgtaaatagcctgatgctcatttggaaaaataaaccagtgaacaatatttttctattgtacttttcagaaccattttgtctcattattcctgttttagctgaagaattgtattacatttggagagtaaaaaacttaaacacg

SEQ ID NO: 1975 - DNA, 6014 bp, Homo sapiens
cccatttccagctccggagcgggcggctgcgccccgctcgtcgaggagctgcgctcacctcaggggcgggcccccgcctgcgttcgcggcgccagcagaagactgatttttggaaatatgtatttgggagacagtcacgtcctattgaataccttgtgctggtgctgccatcgaaaaatctggttacactctggggaggactgctaccactgcagaactgaaccacttcggccgtgagatgagtgtccggcctgagcaggcacaccatgaatagatacacaacaatcaggcagctcggggatggaacctacggttccgtcctgctgggaagaagcattgagtctggggagctgatcgctattaaaaaaatgaaaagaaaattttattcctgggaggaatgcatgaaccttcgggaggttaagtctttaaagaagctcaaccatgccaatgtagtcaaattaaaagaagttatcagggaaaatgatcatctttattttatcttcgagtacatgaaggaaaatctttaccagctcattaaagagagaaataagttgtttcctgagtctgctataaggaatatcatgtatcagatattacaaggactcgcatttattcacaaacacggcttctttcatcgagacttaaagcctgagaacctcctctgcatgggaccagaacttgtgaaaattgcagactttggtttggcccgagaaatacgatcaaaacctccatatacagattatgtatctaccagatggtacagggctccagaagtactcctgaggtctaccaactacagctcccccattgacgtctgggcggtgggctgcatcatggcagaagtttacaccctcaggccactcttccctggagccagtgaaattgacacaatattcaaaatttgccaagtgctggggacaccaaaaaagactgactggcctgaaggctatcaactttcaagtgcaatgaacttccgttggccacagtgtgtacccaataacttaaagaccttgattcccaatgctagcagtgaagcagtccagctcctgagagacatgcttcagtgggatcccaagaaacgaccaacagctagtcaggcacttcgatatccttacttccaagttggacacccactaggcagcaccacacaaaaccttcaggattcagaaaaaccacagaaaggcatcctggaaaaggcaggcccacctccttatattaagccagtcccacctgcccagccaccagccaagccacacacacgaatttcttcacgacagcatcaagccagccagccccctctgcatctcacgtacccctacaaagcagaggtctccaggacagatcacccaagccatctccaggaggacaagccaagcccgttgcttttcccatccctccacaacaagcatccacagtcgaaaatcacagctggcctggagcacaaaaatggtgagataaagccaaagagtaggagaaggtggggtcttatttccaggtcaacaaaggattcagatgattgggctgacttggatgacttggatttcagtccatccctcagcaggattgacctgaaaaacaagaaaagacagagtgatgacactctctgcaggtttgagagtgttttggacctgaagccctctgagcctgtgggcacaggaaacagtgcccccacccagacgtcatatcagcggcgagacacgcccaccctgagatctgcagccaagcagcactatttgaagcactctcgatacttgcctgggatcagtataagaaatggcatactctcgaatccaggcaaggaatttattccacctaatccatggtctagttctggcttgtctggaaaatcttcagggacaatgtcagtaatcagcaaagtaaattcagttggttccagctctacaagttctagtggactgactggaaactatgtcccttcctttctgaaaaaagaaatcggttctgctatgcagagggtacacctagcacctattccagacccttcccctggttattcctccctgaaggccatgagacctcatcctgggcgaccattcttccacacccagcctagaagcactcctgggttgataccacggcctccagccgcccagccagtgcatggccggacagactgggcttccaagtacgcatctcggcgatgactgtctgccttggtgatgaatctcttcctagggagaagcaggatactttccctcagctgactggtgttctacctgcaagatgtgcagagggcataaaagcaaatcaacactttatagttattcttctgaactaagacatgtcaatattcttttttaaagtttttttttaaaatattgatttgaatgcagtaggcttttttgtataaaattattttattctaaaactgggtcccattattttcttaaacaacagcattttgtatatatggattatgttttagcattttatacagtcaactttgtaatgaactttttaaaaattaattgattttcctttggggttccagataatattttctacagattttgaaaaatgtaataatattaatgcagtattgcaacaggggtgcaatttaaggctatgtgatagagggttatttactcagtgtgtgcagatatttatgaagtggtgaaatttcaagtgtggctcactaggtacttcaggccttcttggactgttgttagaaaagtgatcctctgcttttcttagtaggtcattggtttgatttttggataccactctgctgttctaaaaggactattatattatataattcactttgttttacttttgttccccagatgaaagaactctaagtaaatacattttaaaaaatttttctgacaccctttaatgtggttgcagatctcagatgaaaccaagcttaattatactatgccattatattctaatttattccatttttgaaatcaagttgtatgtgtaccaataaaagagatttctgcttcaaaaggctctcaacatgaaggttaacacagtcaatcaaacttacattcctgccaagatgcatggccaaaaaactaagtatcaaagcagcagaaggtttttgattatagtaactgagatggaattttgtgcctagctcagttctccagatctggctaggagcagtcaatgactaatgttctgtcctagccaaattctcaggacaatttggggagcagaaagagttatggcagaggttccactcatctacaaagtcacagtcacatgccacatttgatctcctaaccctggtgtagtttctttcaagagtgagaactttatttgttgggcagaggctgttccattgagaggaatgtttacagcagtttcaaaaatgacaaagtcagtttggagacagaaaaagacaaaaggtccagtctcatccatctctatatggtacatttgcctcacttatggttgccttaaaggcaagagggaaggtcaccatcagtgaacgcaatgcaatctcaacagtgtattgattcatattctcctagggctcaaactactctctattggttccaggataatgacaaattgaaccatatgtaagtaatcttttattttttattttttttttgagacagagtctcactctgtcacccaggctggagtgcagtggcgcgatcttagctctctgcaacctctgcctcccaggttcaagcctcctgagtaactgggactacaggcgcccgccaccacgcccagctaattttttgtatttttagtagagacggggtttcactgtgttagccaggacggcctcgatctcctgacctcgtgatccaccctcctccacctcccaaagtactgggattacaggcatgagccactgcacccagccaagtgatcatttttataggttaaaatgataggtgaaatgaatatagacactttcatatggttcaacctaatgacttggtaaattattgccttggtgtattaataatatgttgcattctgaacaaataaccatggcttccaaagggccctaacctaaaatcggagagtaatttatgctttggagaatttgactcaaatatatacttgaccaagcaccatgatccctaggggcatgagaaaagcacataatggatgtggatgtgataggtggtcttttcctgttaacaagctggcagcaaagcttcagaaaatatatatgcaagcacaacttgaagctgaattcatttctgtattatattctcaactcgttatctaaagcatcagaacatgtgttttcagagatgagtcctttactataaggttaatatttattttcattttctgtattatatatgaaaagtaaattaatgtgaaacctggcccagcttgctggaaagcaggttttaaattgtaaatattccttagaggagcaaatggattgtttaataccatagtctcagtaatctagcttatataaggtcattacattttttaactgaaaaacctagttacctgattattgcacattataaaattgtttttctaatactttatagggcccaacttcagaaaatacttcgcttttttctttttatgctttcgtttgtttaccagcaagcaacttccctggggaagccaaacacatattcataaaaaaaatcaagtagctgatgtgcagttgagaaaactagaggactgaaaaaacaaattttaactagcaaatgctgtgaattactcttcctccccttctctgaaatgggtaaaggacaaattgtgtaaaaaaacctatgcactatagaagggaatagtaaccatttcttttgtctctctgtttctgttctgactgagaacctgcagccatttcttgttacatgaaaacaaaatgctacttgttacctctattttttgttactatacaattatgaaatgtaatgtaagacaccaacagaaatgatatacctgtaactgtacctatcaggactatacctcatttacagtcagaaagcttactgggatgtcaggaaatgatacagggttggttctcatttcgtgccgaaatgagacagaaattcagtgacgaaggtgcgttgtaggggtattgatgtgccccaggtagtgccagcagagtagggaaaactgcatttgcataaaaactactcttgacatgattgttcattttacaaaaaaattccattaattaccaagccctcacccagcccatgtgtgataggatttatgtaggaagaaacttgattttcaaataattttttaaatgtatctcttgcctaaaggactatatacatctaataaagtaacactgtgtcatcttctggagttatcaaaaattgtatacaatcaagacaacacaagaattattttatttttgagtgcaaatacaggtactgttggagttgatgggcaccatgctttctcatgaagtagcatttccctaccatcaagccattgttttgtgccattcaggagaggaaaaaaaggaatttatgctgtacatttcagttcagtgtatgaccaaaagcaatatgtttataagaagatgtttgacatactaattattttatatcatttaaaccatactgtagcaacataatatatggagctaatttgtagaattatttttacgatttccaaacaaatgtactgtactgttatataatttattgtgaggaccttctcatggaagccattaggaaaacaaactagaggtaaatatcacattaatctgtattatcaatttctcatagacactgtgctaatgtgaattttaaatgacctgcatcaagtcttctgatctcagataactcagtacagatagcaattagtcagctgatttgattacaatggagtaaccgacaatatatttatttataaagcacatattcataataacgagaagaattcagaaaaccacttaagcaagacccttctgaaataaaaaatgttgctttttaaatagtttgtcctaaggtgtttaaaacatgtcaaccttatgtaaggaaaaatttcctggtccaaataaagttgaagtttaagaaaaattg

SEQ ID NO: 1976 - DNA, 4863 bp, Homo sapiens
agaacttttagtggacaccttcctaatctgcaagtacttaaaggtgacactattgaaaacaggatacagtgattatgaaaggtaaaactatttattttatcaccatagagtccaggcagaatataattctataaagggaactccttcagaggctgaaatctttaccaccttgagctgtgaacctgatatacctaatccaccaaggatagccaatcggaccaaaaattcactcactttgcaatggaaggcacctagtgacaatggttctaaaatccaaaactttgtattagaatgggatgaaggaaaaggaaatggagaattttgtcagtgttacatgggctcacagaaacaatttaaaattactaaactttcaccagcaatgggctgtaaattcagactatcggccagaaatgactatggtacaagtggttttagtgaagaagtcttatattacacctcaggctgtgctccttctatgccagcaagtcctgtattaaccaaggctggaattacttggttatccttacaatggagtaagccctcaggaacaccatcagatgaaggaatttcttacattttagagatggaggaagaaacttcaggatatggttttaagcctaaatatgatggagaagatcttgcttacacagtgaaaaatctcagacgtagtactaagtataaatttaaggttattgcttacaactcagaaggtaaaagtaatccaagtgaagtagtagaatttactacttgccctgataaaccaggcatacctgtaaagccttcagtgaaaggaaagatacattcacacagttttaaaataacctgggatccaccaaaagacaatggcggagcaaccatcaataaatatgtagtggagatggcagaaggttctaacggaaacaaatgggaaatgatatacagtggtgctaccagggaacatctttgtgatcgactgaatccaggctgtttctatcgtttacgagtttactgcatcagtgatggaggacagagtgcggtctctgaatctttacttgtgcagactccagctgtgcctcctggcccatgcctccctcccagattacagggtagacccaaagcaaaagaaatacagttacgatggggaccccctctggttgatggtggatcacccatttcctgttacagtgtggaaatgtctcctatagaaaaagatgaacctagagaagtttaccaaggttctgaagtagaatgtacagtgagcagccttcttcctggaaagacatacagcttcagactacgtgcagctaacaaaatggggtttggaccattttcagaaaaatgtgatattactacagcccctgggccaccagatcagtgcaagccccctcaagtgacatgtagatctgcaacttgtgcacaagtgaattgggaggttcctttgagtaatggaacagatgtcactgaatatcgactggagtggggaggagttgaaggaagtatgcagatatgttactgtgggcctggtctcagttatgaaataaaaggactttcaccagcaactacctattattgcagggtccaggctctgagtgttgtgggtgcaggccctttcagtgaagtagtagcctgtgtgactccaccatcagttcctggcattgtgacctgtcttcaagaaataagcgatgatgagatagaaaatccccattattcaccttctacatgccttgcaataagctgggaaaagccttgtgatcatggttcggaaatccttgcctacagcatagactttggagataaacaatccctaacagtgggaaaggttacaagctatattatcaacaatttgcaaccagatacaacatacagaatacgaattcaagccttgaatagccttggagctggtcctttcagccatatgataaaattaaaaactaagcctctccctcctgatccacctcgtctggaatgtgttgcctttagccaccagaaccttaagctgaaatggggagaaggaactccaaagacattgtcaaccgattctattcagtaccaccttcagatggaggataagaatggacggtttgtatccctatacagaggaccatgtcatacatacaaagtacaaagacttaatgagtcaacatcctataaattctgtattcaagcttgtaatgaagctggggaaggtcccctctcccaagaatatattttcactactccaaaatctgtcccagctgccttgaaagcccccaaaatagagaaagtaaatgatcacatttgtgaaattacatgggagtgtttacagccaatgaaaggtgatccagttatttacagtcttcaagttatgttgggaaaagattcagaattcaaacagatttacaagggtcccgactcttccttccggtattccagccttcagctgaactgtgaatatcgcttccgtgtatgtgccattcgccagtgccaagactctctgggacaccaggacctcgtaggtccctacagcaccacagtgctcttcatctctcagaggactgaaccaccagccagcaccaacagagacactgtggaaagcacaaggacccgacgggcactgagtgacgagcagtgtgctgccgtcatccttgtgctgtttgctttcttttccattttgattgcctttatcattcagtactttgtaatcaagtgaaaataactttattttttaactctattacattttattttgtcatgtactaaaattatttctgtattgcttttataaaaaacagtggcatttagcactggcattgagactatagcacatcatttttgccattttcagtgcttatattgttaggtagaggctggcactttattagaatgcaagccacaaaaatatcaattttgttttttttgttagggtgggtcttctttttttctttccctctctctttttttaacaaatgccttcttatagaaaaactttctaagaggcaacaatttagaatggatattttgacgaatcggcatgagtgtaacagtgataacctgatctgtttgttttaaagattattaccaagtgaaaaattcagaatgaatagaatttacactaacatgctatataaaatgttaaagtctgatgctgtgaaagcaatctagtgctatatttctacctcctcatttgtcttaattatttggtaagtgggattatgatgagtaactggaggggcttagaaacaaaaactggatgaaagagtatgcatgaagaaaagcttctttgataaatgtggagttcttcattataaatatatattcatgaattcacagataagtacttaaagaacagacagtttacttggcctaaaaatattttgatgtttactcaaaaagtacctcttcaggtcttgagaacatggaaaagaattgagtgcttttaaatactttttagaaagtaatcataaaagtaaattgaatttcaaacctatttggcttctgttttgtgaacctttgaactatatgtatgtgtataagggtatacacatacatatatggcatataacaagtgtacacatatacacataacaagtgtagaagtatatattacatacatacactcactctgtctggtataggctaattttgaagaactcccataagtttctgctgcttctcccataactgctgccaccaccatcagaattcataatcaaacctaacctttttgtttggggcaccaaatctgaagacaaaattaatttgcaccagtaaacttcaagctgctttctttcttgaaaactaaacgtttaacgtataatgtctgtttggatactgttccaaattgttgattgcatgtggttaatgttgcattagagcactttgcaattgcataattcattaatgttttgtgagcttgcatttgtgagttattggatgatcagactgaattttgtcaagtatcacattgtacatcttgcctagatgtcgatgactgcaagtaataatacagtttataatgaaactatctacaattcttgttttagcacatctgttatccgtaaaacacctgtaactagcttttttaatttattatttgaattttaggatagcgaatcactaatttttagttgctgaggttggcattttagtgattattaagcacttctgtcagtctttgaaaaaagaacgtattttttgtgctttgaagatctctgaagaatttcttttataatagaatgggcatgtattgtaacagttttatgtcaaatgatctgtgctgtagaaaaacattaacccttgttcaaaaaagaaatggataaacttggcctttctaagtggtaagaatgacctgtcactataatatactgtatgtttacattttatttaaatttaatctcttatgtatagggtgataaccttccccagaaacaacagtgattgcgattgttttctagaaacttctttaaagtgccacatttggcagtacaaatgagtctgagtgtaatagcccagagatttatatatagttgaatgtctaaaatggtaaaatgtgccactgtgtcaagttacagtggcttatgtttttcatagtaattcaaatgaacttcctatttttgatagtaaatgtcatttaatagtatacttgccatttgagcctcactgcaaaattagtgcagaggagaaaacaatttttaatgtaatcttgattttacctcatatactgtacattccaaaaactctaaactttttaaagattatagatacactaccaaacatatcaccttaaaattgtataaggctgaatgaacttcatacaaatgaaaaaaatctcataaaaatacataaactatgtagcaaaagtatctgtaaaatccatggaaaataaaagttgtatcattctttttg

SEQ ID NO: 1977 - DNA, 5154 bp, Homo sapiens
gttcgcagctcaggaaggagggagccccaggaacaggagtcccaccgaagaactgctctctgacagaacagagacctcctcaccagggcttccaaacagatgcagaagaacccagaaaggagcaggtcttgatttgcccaaccagcggcacttcttcatccccttgcccagagagcaccagacttggtgatgtcgccacatccagaagccatcacagattgtgtgacactgaacactgtgggccaacttgcagaaggtggttatcctttacggttctccacactctttcaggagcagcagaaaatgaacatatctcaggcatcagtgtcattcaaggacgtgactatagaattcacccaggaggagtggcagcaaatggcccctgttcagaagaatctgtacagagatgtgatgctggagaactacagcaacctcgtctcagtggggtactgctgtttcaaaccagaggtgatcttcaagttggagcaaggagaggagccttggttctcagaggaggaattctcaaaccagagtcacccaaaagattacagaggtgatgacctgatcaagcagaacaagaaaatcaaagacaaacacttggagcaagcaatatgtatcaataataaaacattgactacagaggaagagaaagttttggggaaaccatttactctgcatgtagctgctgttgcttcaacaaaaatgtcctgcaaatgcaactcatgggaagtgaatttgcaaagtatttctgaatttatcattaataatagaaactattcaacaaagaaaataggttgcggtaatgtatgtgagaattcacctttcaaaattaactttgagaaaactcagactggagagaaattttatgaacataataaaaacatgaaagctctcaattataatgaaaatcttcccaagcatccaaagtttcaaactttggagcaagcttttgaatgtaataaaattggaaaagcctttaatgataaggctaactgtgttaaacataacagttctcacacaggagaaacatcctctaaagatgatgaatttaggaaaaattgtgataagaaaactctctttgaccacaggagaactggcacagggaagaaacacctgcatcttaatcaatgtgggaaatcctttgagaagtcaactgtggaggaatataataaacttaatatgggtataaaacattatgaattaaatccaagtggaaataatttcaacagaaaggcacacctcactgatcctcaaacagctgtcatagaagagaacccattggtaagtaatgacagaacacagacttgggttaaatcctctgaatatcatgaaaataagaaatcctaccagacgtcggttcacagagttcgccgaagaagtcactcaatgatgaaaccctataaatgtaatgaatgtgggaaatccttctgtcagaaaggacatctcattcaacatcagagaactcacacaggagagaaaccatttgaatgtagtgaatgtggaaaaactttctcccagaagtcacacctcagtactcatcagagaattcatacagcagaaaaaccctataaatgtaatgaatgtggaaaaacatttgtccagaagtcaaccctcaggggacatcaaagaattcacacaggagaaaaaccctatgaatgtagtgaatgtgggaaaacttttgttcagaagtccaccctcagagatcatcacagaattcacacaggggagaaatcctttcaatgcaatcaatgtggaaaaacatttggccagaagtcaaacctcagaatacatcagagaactcacactggggagaaaacttaccagtgtaatgaatgtgaaaaatccttctggcgaaaagatcatctcattcaacatcagaaaactcacacgggagagaaaccattcaaatgtaacgaatgtgggaaaacttttgcccggacatcaaccctcagagtgcatcaaagaattcacactggggagaaaccatttaaatgtaatgaatgtgggaagaaatttgtccggaaagcaatccttagtgatcatcagagaattcacacaggggagaaaccctttcagtgtaataaatgtgggaaaacttttggccagaaatcaaacctcagaatacatcaaaggactcacagtggggagaaatcttatgaatgcaatgaatatgggaaattatgtaagaagtctaccctaagcttataccagaaaattcagggagaggggaatccctattgatgtaataactagaaaatccttttgacaaaaggaataccccatttgatatcagagatacacaaaaaaccaattgagggtagtgaatgtaagaagacagtcccagaagtaaaccctcactgtgaatcagagaattcacataggaaagaaaccagatgaagatgaatgcaggaagaattgtgtccaaaatgcaaccttcagagtgtatcaaagaattcagacaggcttctgttttcagagtactatggataggcctgaatgaagtcataccctattagatagctcccacacatcacacaggctggtaatctcttcaccagcaccaatttcattttactccaggcacatagtccagatttcccaatctccttttcatccaggttggtctttgtgactggctactaagatgtggatgtccatgatgtatatcacatcccagtctgaaacataagagacttccctaataaattaccagggccctgtcacaacaaaatggatatcatttctaggacaagcttggtgccgtgctttaatgtggcatggtacaagataaagaagtctgtgcctgaatgaatacacgcagcaaaattctcctcttctgtgtctttcccagttgaacattatgtgagcaaaatttaagcttatacagtagtccccccttatctgtattttcactttacgcaatttccattaaccatggtcaactgtactttaaagttattaaatggatccagaaataaacaattcctacattttaaactgcacccgattctgagtagtgggatgaagtctcatgccctcctgctctcccatgagggttattgaatcattccttagtctagcatatccacagtgtatacactatctgccagttagtcacttacttgacattttagttatcagatcacctgtcagggtatgacagtgcttgtattcaagtaacccttgttttactaaataatggcctgaaattgcaagagcatttctggcatgttgttgtaattattccattattagtccttaatttataaattaggcacagcaagagattaaactatcataggcatgtgtatatgtaggaaaaaaatatagtatatacagggttcagtatacccgtggtttcaaacatcaacttggaattcttggagagcattccttgtagttaagcagggactactgtattctgttgagctttcacatgtttgagtctatttgtttctacacataatttagttatcttctgctaggaaggcagaaagcttctgtgtaagccaggcttaagtcaatcagagggcacaaaccttattaggaggctagagagtcaaggagaacctcaaatatgatcagagaattgtggaaaagacatcctttcaatgtaatgaaattgatagtaccacctgatacagggctttgcatgaacctaaaagtcttttggctgaatggtgagcagccactgtgcagttcaacgtaagtgtgccttaattgcacagaggtactgcccccacacctcctgacacctccatataccccagctatatctgctttaaggagttttccctggctccaaaggccattggcacccacccaagtattatgggaaacctccagagaggggagggactcagatttatatggctttattgaatccatgcccaaggcaacatcttactagttcctgtgggggtacaggacacctagatttagctaatggggtttggcaatgggaaggcaaacaaatttaataactttatgggtgaggtactttgggccagtagagtatactacagttatgtttacatctgaaagtgtagtagggattaattcccataagttatagagagaattctaattccctgtaattcgcataagtcatagaattctaatcaggaataattgtatgtaaagatacctctgaggtccaacagctctgatcattttgggcttcaagtctctctctgtgactggtgattttgtgggttgaaacttctggcaaaagggggcagcccttgggagctgggggccaggggattgacttggttccctgacaagggtaccaggtccaccccttctgaaaagcagctgttagtttactcttgggctcttttacacattggatatctcttccttgggtagagggttctgacctaaaattccactttaggagtttgtcgtcttggactcaacaactaacaaaatgaaaaggacccagcaagcctcacttgtggaatgaaaatggggcattcaggaaagcacctgtcctggccccacagtatgtcagctgtataggcaatagtagtagctgtctcttagaagggaaataatgtatcacctctttccagaacgaagcaaagttgctggcttagtagagccctcaattcatagaggttactgtaattgggcctggctcactgatgctttcgccaactgaaactactaggatcctgtgtgtgttcaaactcagtgccattaacaaacccaaagtgaagcggtcactcctctcagtggaaagagcacgaggatgttctcagctctggccaatactccatttcataaaccatgttacatttttgttaagccttggctctggatgtggcctagatatttgatattctaattggaaattacagattaaaaagcaccctttctttgtacagtgggggtaaaagtcacagctgcttagtacaaccatctgggttgctcaagtagatgcccataataagagactattttctgataagactgactggaatcaagctgccgacagctttctccatccagattgtgacggttgctacctggatccatcattttactggtatggcaaaaaatcacccatgtgacactgggtgacatggtaaaagtacatggtacttttacagtaccatgtactgtacaaaataaaggtctctttatctg

SEQ ID NO: 1978 - DNA, 4502 bp, Homo sapiens
cgagggaagaggccggagggagatcgcggaggggagggggcgggaggggggtggggtatcctgagtcgtccgtggtccggagtctggaaggccctagagcggcgccagtcgacccgcctcgccacaacttgcccagaccagacacgtttcatcctgcgccctgcaagaaggagccggcctgcctctctccgctttgctgctcctcggcctccgcgggcccggcccgcgtcagcagcgaccctggggtctgggtcccctgtgtcgcccccgcccgcctgcagcgcccggcacccgcccaggagcgcgcagctggggttctagggacgtatacttgagcaagagagaccacagctcttgttcccgctgatcctgcagcccagtggatggagtccagaatctacagacctgccaggaaagaaaaaaaattcctgatgtctggtccaagcaggaattccccggtggattggggaatgtctggcttttcctcagcttattgatctctgtggtaaccactggaggcccccagaagacccatagaaatgagaggcctgaggtctacaagtcgctgctagaaatattttagcctctccaaagcccagaatgcagccccgacccaagtttgtaagggttctgggtgcacgctgaccctgcgcgggcagacgcgccctttgctccaggtccggacctgggcgctgctatagcaacgtcctggacgcccagaccttaggccgccgccgccgcggaagcgaggaacccggccttctcccgctcctgagggctgtggcggcggcggcccgggaggcggcccaggctgggtaaagaccgcccggctcctcctatgcaagctgaggcagcggattggttttcaagcatgcccttccagaagcatgtctactacccgctcgccagcggcccagaggggcccgacgtcgctgtggccgccgccgccgcgggtgcggcctccatggcctgtgcgccccccagcgcggcttcggggcccctgcccttcttccagttcaggccgcggctggagagtgtggactggcggcggctgagcgccatcgacgtggacaaggtggcgggggctgtggacgtgctgacgctgcaggagaacatcatgaacatcaccttctgcaagctggaagacgagaagtgcccacactgccagtcgggggtggacccggtgctgctgaagctcatccgtctggcgcagttcaccatcgagtacttgctgcactcacaagagttcctcacctcgcagctgcacaccctggaggagcggctgcgcctgagccactgcgacggcgagcagagcaagaagctgctcaccaagcaggcgggggagatcaagacgctcaaggaagagtgcaaacgccggaagaagatgatctccacccagcagctgatgatcgaggccaaagccaactattaccagtgccatttttgtgacaaggcctttatgaaccaagcttttctacaaagtcacattcaacgccgccacactgaagaaaattctcattttgagtatcagaaaaatgcacagattgagaagctccggagtgagatcgtcgtattgaaggaagagctgcagctcaccaggtctgagctagaggctgcacaccatgccagtgcagtcagattctccaaggaatatgaaatgcagaaaacaaaagaggaagactttttgaagttatttgacaggtggaaagaagaagaaaaggagaaactagttgatgaaatggaaaaagtcaaggagatgtttatgaaggaatttaaagaattaacttcgaagaattcagcattagaatatcaactgtcagaaatccagaagtccaatatgcagatcaagtccaacataggcacattaaaagatgcacacgagtttaaagaagaccgttctccatatccccaggatttccataatgtcatgcagcttcttgatagtcaggaaagcaaatggacagctcgagttcaagctattcatcaagaacacaagaaagagaagggtcggctcctgtcacatatagagaaacttcgaacctcaatgatagatgatctaaatgcaagcaatgttttctataagaaaaggatagaagagctagggcagagactccaggagcagaatgagctgattataactcagagacagcagattaaagactttacctgtaatccattaaacagtatcagtgaacccaaagtgaatgccccagccctgcacactttggaaactaaatcaagtctgccaatggtgcatgaacaggcattctcgtcgcacatactggaaccaatagaagaactttcagaggaagaaaaaggaagggaaaatgaacagaaattaaataacaacaaaatgcatttaaggaaagctttgaagagtaactcctccctcactaagggactaagaacaatggtggagcagaacttgatggagaaactggaaaccttggggattaatgcagatatacgtggcatttcaagtgatcagttgcatagagtactaaaaagtgtggaatcagaaagacataagcaagaaagagaaatacctaactttcatcaaattcgagaattccttgaacatcaagtcagctgtaaaattgaggagaaagcactactctcttcagatcagtgcagtgtttctcaaatggataccctttcaactggagaagtacccaaaatgatacaacttccttccaaaaacagacaactgattagacaaaaagctgtttctactgataggacatctgttccaaaaattaagaaaaatgtcatggaagatccttttcccagaaagtcttcaactattacgacccctccttttagttcagaggaggagcaggaggacgacgacctcatccgggcatacgcatccccaggcccacttcctgtgccgccaccacaaaacaagggcagcttcgggaagaacacagtgaaaagtgacgcggacgggaccgagggaagcgaaatcgaggacactgatgattctcccaagcccgcaggagtcgccgttaaaacacctactgaaaaagttgaaaagatgtttccacatcgcaaaaatgtgaacaaaccagtcggtggaactaatgtccctgagatgtttatcaaaaaagaagaattacaagaactaaagtgtgcggatgtggaggatgaagactgggacatatcatccctagaggaagagatatctttgggaaaaaaatctgggaaagaacagaaggaacctccacctgcgaaaaatgaaccacattttgctcatgtgctaaatgcctggggcgcatttaatcctaaggggccaaagggagaaggacttcaagaaaatgaatcaagcacattaaaaagcagcttagtaactgtgactgattggagcgacacttcagatgtctaattccacatgtcagaagattattccagaagccagcagtatttcagtatcacagtgtttcagtaatttgcctccatgattctagtgcttctgccttaccgtgtttcccacagcaacacagagactgattcaaagaacaatggtctctttaatggcacccaatacagtattgaaaatcagatcatcaacagtatttcgaagcatgtaaaggtgtttaagacttccgctgctgcttaaaaataacatgtcattgaagtcataaaaagttttttcttcagaaaggtactctagtgttaagtgtatttttttcaactaattttttagtgaattttttttaaacttacagcatgttttggtttgaattactaaaactttaaaaaatatttttcttatgtatgctgtcgtatcgtaggcgtttatattataaaattctgttagtagtcttaaaattgaattggtggaaccactaatccttaaaagttagtctggttatttttcatatagaagtaagtttaatccgagtgtggtggtgttcacctttaatcccagctacttgggaggctgaggtgggaggataacttgagcacaggagttcaagaccagcgtgggcaatatagcaagactccacccctccacaccccaaaaaagtaagtttaggattagaatatagctaggtccaatgttaaatacattttcctggagtacatttgtcacattcagctttgagccactgtaagcatgttactattaaatggttggttattttatatagcatattctttatcttggatattttatgaataaagtatagttattttaagtgccaattaatttatcagactaaatagaaaatatttgagccattactgaattcacatatgtatgtttttttttactatttaaaatacccaacatgtattatgaaatacctcaaaagtaatttagttacattcttaaacaatgacattgtcgaaagaaagttcttataagctgttttttgcatttttataacttggttatactatattctgtttccaagtaaccttttaactaaaagatttgttgggttttagatctcttttcatttgtcaaccttttcagtaaagccctctgttacatc

SEQ ID NO: 1979 - DNA, 2267 bp, Homo sapiens
gcataggctaggtagcgaggccgcgtgtgaatcggccgaggccgagtttctgcgcttccttctccctctctccagacgtcgtggtcgttcggtcctatgtcgcgccgggccctccggaggctgaggggggaacagcgcggccaggagcccctcgggcccggcgccttgcatttcgatctccgtgatgacgatgacgcggaagaagaagggcccaagcgggagcttggtgtccggcgtcccgggggcgcagggaaggagggcgtccgagtcaacaaccgcttcgagctgataaacattgacgatcttgaggatgaccctgtggtgaacggggagaggtctggctgtgcgctcacagacgctgtggcaccagggaacaaaggaaggggtcagcgtggaaacacagagagcaagacggatggagatgacaccgagacagtgccctcagagcagtctcatgcaagtggcaaactccggaagaagaaaaaaaaacagaaaaacaagaaaagcagcacgggagaagcatcggaaaacggactagaagatatcgatcgcatcctagagaggattgaggacagcactgggttgaaccgtcccggcccagctcccctgagctccaggaagcacgttctctacgtggagcacagacacttgaatccagacacagaactgaaaaggtattttggtgcccgggcaatcctgggggagcaaaggccacggcagagacaacgtgtgtaccccaagtgcacatggctgaccacccctaaaagcacctggccccgctacagcaaaccaggtctgtccatgcggctgctggaatcaaaaaaaggcctctccttctttgcgtttgagcacagtgaggagtaccagcaggctcagcacaagttcctggtggccgtggagtctatggagccgaacaacatcgtggttctgctccagacgagcccttaccacgttgactcactcctgcagctcagcgatgcctgccgctttcaagaggatcaggagatggctcgagacctcgtagagagagcgctgtacagcatggaatgtgcgttccaccccctgttcagtctcaccagtggggcctgccggctggattaccgcagacccgagaacaggagcttctacctggccctctacaagcagatgagcttcctggagaagcgaggctgcccgcgcacggcgctggagtactgcaagctcatcctgagtctcgagccggatgaggaccccctctgcatgctgctgctcatcgaccacctggccttgcgggcccggaactacgagtacctgatccgcctcttccaggagtgggaggctcatcggaacctgtcccagctccctaattttgccttctctgttccactggcgtatttcctgctgagccagcagacagacctccctgagtgtgagcagagctctgccaggcagaaggcctctctcctgatacagcaggcgctcaccatgttccctggagtcctcctgcccctgctcgagtcttgcagtgtgcggcccgacgccagcgtttccagtcaccgcttctttggacccaatgctgaaataagccagccccctgccctgagccagctggtgaacctgtaccttgggaggtcacactttctctggaaagagcccgccaccatgagctggctggaggagaacgtccacgaggttctgcaagcagtggacgccggggacccagccgtggaagcctgtgagaaccggcggaaggtgctctaccagcgtgcacccaggaatatccaccgccatgtgatcctctctgagatcaaggaagccgtcgctgccctgcccccggacgtgaccacgcagtctgtgatggggtttgatcctctgcctccttcggacacaatctactcctacgtcaggccagagaggctaagtcctatcagccatggaaacaccattgctctcttcttccggtcactgttgccaaactataccatggagggggagaggcccgaggaaggagtggctgggggtctgaaccgcaaccagggcctgaacaggctgatgctggctgtgcgcgacatgatggccaacttccacctcaacgacctggaggcgccgcacgaggacgacgctgagggggagggggagtgggactgagcgtccgcagaggtgaccgaaaagccgtatgatgatgttcccgatttctctgttggtcggagtcggccagttgcctgaagtagggaagctgagtgtgtcgctccctggtccactgtttctcctataaatgtaaatgggtc

SEQ ID NO: 1980 - DNA, 4935 bp, Homo sapiens
cttttctctcgaagggcacccgaagattgtcacgagtccttagactccaactactgcggcagcttccaaatttcctaaaaccctaagctgggccagcccggcagcccacgcacttccggcctcggacccgccccaaacacccaagcgccccagcgcctcatctctaggtccggaaataaacgaacatctccgattatggttataccagggtcgagggtttccgaatatattcgattcaaagcttcggcaagacgaagaaaaccgagcctgaaagcagggcgagaaaaggggcgctgcagggcggatggaaagaattgattggtaacgatgtggagacggaaacatccgaggacatccggaggaacccggggagttctgagtggtaatcgaggggtagagtatggcagtgggcggggtcatctcggtacgttcgaagggcgttggcggaaattaccgaagatgcccgaagccgtcgggacggacccgagtacctcacgcaagatggcggagctggaggaggtgactctggacgggaagcctcttcaggcgctgcgggtgaccgacctgaaggccgcactggagcagcgaggcctagccaagagcgggcagaagagtgccctggtcaagcggctcaaaggggctctaatgctagaaaatttacagaaacactcaacaccccatgctgcattccagccaaattcccagattggtgaggaaatgagccagaacagtttcataaaacagtatctggaaaagcagcaggagctacttaggcagcgtctggaacgtgaagctcgagaagctgcagaacttgaagaagcttcagctgagtcggaggacgagatgatccatcctgagggagtggcttccctgctgcctcctgactttcagagcagcctggagagaccagagctggagctcagcagacattcgcccagaaaaagctcctcaatttctgaagagaaaggtgactctgatgatgagaaaccaaggaaaggagaaagacgatcatctagggtcagacaggcaagagcagctaaactgtctgagggcagccaacctgctgaggaggaagaggatcaagaaacaccttccagaaacctaagggtcagagcagatcgaaatttgaaaacagaggaggaagaagaggaggaggaggaggaggaagaagatgatgaagaagaggaaggtgatgatgagggacaaaaatctagggaggcaccaatcctgaaagagtttaaggaagaaggggaagagatacctagagtaaaaccagaggagatgatggatgagagacccaaaacaagatcccaggaacaggaggtgttagagagaggagggagatttacaagatcccaggaagaggctagaaaaagtcatctggccagacagcagcaggagaaggaaatgaaaacaacatctccccttgaggaggaagaaagagaaataaaatcttcacaaggcttaaaggaaaaatcgaagtctccttcccctcctcgactgactgaagatcgaaagaaggcctcacttgtagcgctgccagagcaaactgccagcgaggaggagactcctccacctttactaacaaaggaagcatcttctccaccacctcatccacagctccatagcgaagaagaaatagagcccatggaaggcccagccccccctgtcctcattcagttatctcctcctaatacagatgctgacaccagggagctattagtatctcagcatactgtccagttggtaggaggcctgtctcctttgtcaagtccttcagacaccaaagcagaatctccagcagagaaagtgccagaggagagtgtcctgcctctggttcagaaaagcacactggctgactactcagcccagaaggatcttgaacctgagtcagacagatctgctcagcccctccctctaaaaattgaggaattagcactggccaaaggaatcactgaagaatgtctgaaacagccatctttggaacagaaggaaggcagaagagcttctcatacccttctcccaagccacagattgaaacagtcagctgattcatcctctagccggtcctcctcatcttcctcctccagttctagatcaagatctcgctctcctgacagttcaggttctcggtctcattcaccgctcagatccaagcagagagatgtagcccaggcacgtactcatgccaaccctcgtggtagacccaagatgggctccagatcaacatcagagtccagatcaaggtcacgttcacgttctcgttcagcatcaagcaacagcagaaaatctctgagccctggagtctccagggacagcagcaccagctatactgaaaccaaagatccctcttctggtcaggaggttgcaactccaccagtgccacaactgcaggtctgtgagccaaaggagaggacttccacctcctcatcctctgtccaagcaaggcgtctgagtcagcctgaatcagctgaaaagcatgtgacccagaggttacagcctgagcgggggagcccaaagaagtgtgaagctgaagaggcagagccaccagctgccacacagccccaaacctcagagactcagacctctcatctgccagaatcagaaagaattcatcacactgttgaggagaaggaggaagtgaccatggacacaagtgaaaacagacctgaaaatgatgttccagaacctcccatgcctattgcagaccaagtcagcaatgatgaccgcccggagggcagtgttgaagatgaggagaagaaagagagctcgctgcccaaatcattcaagaggaagatctccgttgtctcagctaccaagggggtgccagctggaaacagtgacacagaggggggccagcctggtcggaaacgacgctggggagccagcacagccaccacacagaagaaaccttccatcagtatcaccactgaatcactaaagagcctcatccccgacatcaaacccctggcggggcaggaggctgttgtggatcttcatgctgatgactctcgcatctctgaggatgagacagagcgtaatggcgatgatgggacccatgacaaggggctgaaaatatgccggacagtcactcaggtagtacctgcagagggccaggagaatgggcagagggaagaagaggaagaagagaaggaacctgaagcagaacctcctgtacctccccaggtgtcagtagaggtggccttgcccccacctgcagagcatgaagtaaagaaagtgactttaggagataccttaactcgacgttccattagccagcagaagtccggagtttccattaccattgatgacccagtccgaactgcccaggtgccctccccaccccggggcaagattagcaacattgtccatatctccaatttggtccgtcctttcactttaggccagctaaaggagttgttggggcgcacaggaaccttggtggaagaggccttctggattgacaagatcaaatctcattgctttgtaacgtactcaacagtagaggaagctgttgccacccgcacagctctgcacggggtcaaatggccccagtccaatcccaaattcctttgtgctgactatgccgagcaagatgagctggattatcaccgaggcctcttggtggaccgtccctctgaaactaagacagaggagcagggaataccacggcccctgcaccccccacccccacccccggtccagccaccacagcacccccgggcagagcagcgggagcaggaacgggcagtgcgggaacagtgggcagaacgggaacgggaaatggagcggcgggagcggactcgatcagagcgtgaatgggatcgggacaaagttcgagaagggccccgttcccgatcaaggtcccgtgaccgccgccgcaaggaacgtgcgaagtctaaagaaaagaagagtgagaagaaagagaaagcccaggaggaaccacctgccaagctgctggatgaccttttccgaaagaccaaggcagctccctgcatctattggctcccactgactgacagccagatcgttcagaaagaggcagagcgggccgaacgggccaaggagcgggagaagcggcgaaaggagcaagaagaagaagagcaaaaggagcgggagaaggaagccgagcgggaacggaaccgacagctggagcgagagaaacgtcgggagcacagtcgggagagggacagggagagagagagagaaagggagcgggacaggggggaccgagatcgggatagggaaagggaccgagaacgaggcagggaaagggatcgcagggacaccaagcgccacagcagaagccggagtcggagcacacctgtgcgggaccggggtgggcgccgctagctgggaaaacactagagctgcaggtaccagccactcggccccagggggttatggccacagagggataggcacagtctccaccaccctggagccaagggtctttcacatcacctatccctacatacataccaaatggaaaagtggccatccttttccccccaaacacacccccttaacctatctcttgggacttagcccgaccctccctctcatttcccattaagtctgagaggcaagagctaggttaggcaaggaggtggttggccagagatggggaacagccaggtgccccagtcctctgatttttcctccatcctgcttaccacctccctgggtacttacagccttctcttgggaacagccggggccaggactgggtcacctatgagctgaatcagcatctcctcctgagtcccagggcccctgcagttcccagtctcttctgtcctgcagcccttgcctctttcccacaggttccactttatatccaccttttccttttgttcaatttttatttttattttttttattattaaatgatgtggtctatggaaaaaaaaataaaaatctgacttagttttt

SEQ ID NO: 1981 - DNA, 2630 bp, Homo sapiens
ttccgccattagagggaggcagagagggatcgttcttcgcttttcctccggtgcctgacgtggtgggctggggcccttcattctcggactttccctcagcccttccaggcctcgcccgaggagggcgtggggacagcgcccgggtcggcggggccggggcggtgggggctgagccggccgtggctgtgaaggcgctgccgcggctgtcgggagggcggcgcgacactcgggctcgggcggccgggaagcgacgggatggctgcggccggcggcggcggcggcggggcggcggcggcgggccgagcctactcgttcaaggtggtgctgctgggggaaggctgcgtggggaagacgtcgctggtgctgcgctactgcgagaacaagtttaacgacaagcacatcaccactctgcaggcatcattcttaacaaagaagttaaatattggtgggaaaagagtaaaccttgccatatgggatacggcaggtcaagagagattccatgcattgggtccaatttactacagagattcaaatggagcgattttagtttatgacataacagatgaagattcttttcagaaggtaaaaaactgggtcaaagaattacggaaaatgttgggaaatgaaatctgtttatgtatagttggtaataaaatagacttggaaaaggagagacatgtttccattcaagaagcagagtcgtatgcagaatctgtgggagcaaaacattatcatacttcagccaaacagaacaaaggaattgaggaactctttcttgacctttgtaaaaggatgatagaaacagcacaagtggatgagagagcaaaaggcaatggctctagtcagccgggaactgcaaggcgaggtgtacagattattgatgatgaacctcaagcccagaccagtggtggagggtgctgttcttctggataactgttcacgcctaagaaattaaaagacagaacaaaactgtggatcattgccctcaacatgaagactgccatattccaagtcacattattttaccaatggaattatagaattaacagtattttaaattacgtttataacactgcagagaccttaagtgctaaacttagtggagtttgtgaccagagaattggcattttctacaaatgtttttttttgttttttttttgtttttttttgtttttttttgagacggagtctcgctctgtcacccaggctggagtgcactggcttgatctcggctcactgcaagctccacctcccaggttcacgccattctcctgcctcagcctcccgagtagctgggactataggcgcccaccacgacgcccggctaattttttgtatttttagtagagacggggtttcaccaggttagccaggatggtctcgatctcctgaccttgtgatccgcccgcctcggcctcccaaagtgctgggattacaggcgtgagccaccgtgcccggcctacaaatgttaacaaagcaattaccaatggcctttttacatattttttctttaatgaggaataatatgcatgtagaaaagacctacttaaagtcttcatttatattctttcaaatcaaatctttatttaataacttatatatgttgttggaatggttacatttttgcagccctttgtattttgtggtagttgaaattgtatcacttctaaacagcaaactgtttttgtttttaattagcagatatctgaagtactatttttgcagggtttgcacaggcccgtaactgtctactactttgatataatctgtatacatcctgtatgctgagctggtaaaatacattgtaaattacatattaaatattttatctgcttttacaagcgcaaggtgcaaaaatatatacaatagtctcattgatgactgtaaagtgaattaacatttggtgattatgcctagcttttttgactaatataaagatcatagctccccttcacttctgtcttaacttgaacatggcgtgtttaaattttcatacatactttacttgaattattgctgttgtcacatatttttgcctctgtgagttcatctgatgattgagcagtagcatttgccttttgggttttttgtttgttattatagaagagatgacttctgctgattttgctttagaatggttaccttagaagaatttgggtggctcatgttgaatttcacttctgcaatagctttcattttctcataggctttataagagatgggttcagtggtatgagcagaggaagagatcccagatagtagccagttaaccaagactcattcatatagcacgtagtttatgttcctgaggcagcacttttagatcctttgtgagcaagttctatttgttcattgcttgccagagatgaacacagaatgttctgtttcattttacaagaactatcctgagtttctgtggatggaaacattacatgtaatgcagatatagtgaacactggaaagatttattaaagaattatatttgtgtatactttataaattagtccctcattagatttttttttcttaagcataagactgaacttaaatgtgttaattttagtagaatcaggcactgctcgcagaaggaacacagattgtagagattaacataaattgttcttgttcta

SEQ ID NO: 1982 - DNA, 6470 bp, Homo sapiens
cgcagaaccgaggtcgccgagtgatgatgttgtgaagtcgcccgcctgtccctgccacgcccgggcggttgctggcagtgggagcagcggcagcagcttcggctgctgctttcaggctgccgctgcattaggggcttcctgaggaaacgcgggcggacgacagaggatgccgaaccactccagtcatgactgtccaaagtatgataatcacatgagagtgctcgttgctacggatgtcatttgactcatcagagaaaatctgtctaaaagaaaatatccatgtgaccaaatccatttcattattgaatggcttgatggatttcctttactctgattcataccaaagctgtccttctcaaccaaagcaagaaaggatcctgcatgagtcaatcccagaatgcaatttttacatcaccaacaggtgaagaaaacctcatgaatagcaatcacagagactcggagagcatcactgatgtctgctccaatgaggatctccctgaagttgagctggtgagtctgctagaagaacaactaccacagtataggctaaaagtagacactctctttctatatgaaaatcaagactggactcagtctccacaccagcggcagcatgcatctgatgctctctctccagtccttgctgaagagactttccgttacatgattctaggcacagacagggtggagcagatgaccaaaacttacaatgacatcgacatggttacacatctcctggcagagagggatcgtgatctggaactcgctgctcgaattggacaagctctcttaaagcggaaccatatcttatctgagcagaacgaatccctggaggagcaattgggacaagcctttgatcaagttaatcagctgcagcatgagctatgcaagaaagatgagttacttcgaatcgtctccattgcttctgaagaaagtgaaactgattccagctgttctacacctcttcggttcaatgagtcctttagcttatctcaagggttgctgcagttggaaatgctgcaagaaaagctcaaggaactggaagaagagaatatggctcttcgatccaaggcttgtcacataaagacagaaactgttacctatgaagaaaaggaacaacagcttgtcagcgactgtgttaaagaacttcgtgaaacaaatgctcagatgtccagaatgactgaagaattgtcagggaagagtgatgagctgattcgataccaagaagagctttcctctcttttgtcacagattgtagaccttcagcataaacttaaagaacatgtgattgagaaggaagaactaaaacttcacctgcaagcttccaaagatgcccaacggcaactgacaatggagctgcacgagttacaagacaggaatatggagtgtctaggaatgttacatgaatcccaagaagaaataaaggaacttcgtagtagatctggccctactgctcatctctacttctcccaatcatatggagcttttactggggaatctttggcagctgagattgaggggactatgcgtaaaaagctgagtttggatgaggaatcttctctctttaaacaaaaagcccaacagaagcgggtatttgataccgtcaggattgccaatgacacacggggccgctctatctcattcccagctctgttacccattccaggctccaaccgttcaagtgtcatcatgacagcaaaaccttttgagtctggtcttcagcaaacagaggacaaatcactcctgaaccaggggagcagctcagaggaggttgcagggagctcccagaagatgggccaaccaggaccctcaggagatagtgatttggctacagcactgcatcgccttagcttgcgtcgacaaaactatttaagtgagaagcagttctttgctgaagaatggcagcggaagatccaggttctggcagaccagaaggaaggagttagtggctgtgtcaccccgacagagagccttgcctctctctgcaccacccagtcagagatcacagacctcagcagtgccagttgccttcgaggttttatgccagaaaaattacaaattgtcaagccccttgaaggatcacaaactctgtatcactggcagcagcttgctcaaccaaacttgggaaccatccttgatccacgaccaggtgtcattactaaaggctttacccagttgcccggggatgctatttatcacatctcagatttagaagaggatgaagaggagggtattacttttcaggttcagcaacctcttgaagtggaagagaaactttcaacatccaagccagtaacagggatcttcctgccacccattacttcagcaggtggaccagttacagttgcaaccgccaacccaggaaagtgcctgtcgtgcacaaactcaacattcactttcaccacctgtagaatattacatccctctgacatcactcaggttacccccagctctgggttcccttcattatcctgtggaagtagcggtagcagttcatccaacacggctgtgaattctcctgccttgtcctatagactcagcattggtgagtccatcaccaaccgacgagattccactacaaccttcagtagcaccatgagcttggccaaacttctacaagagcgaggcatctctgccaaagtgtaccacagcccaatttcagagaaccccctccagcctctccctaaatccctggctatcccttccacaccaccaaattcaccatctcactcaccttgcccttctcctttaccctttgagcctcgagtgcatctctctgaaaattttttggcctctcgaccagctgagacattcctccaggagatgtatggcttgagaccctcccggaaccctcctgatgttggccagttgaagatgaacttagtggacaggctgaagagactggggatagccagagtggtcaagaaccctggtgcccaagagaatggaagatgccaggaggcagaaattggtcctcaaaaaccagattctgctgtttatttaaattcaggtagcagtttattaggtggactaaggaggaatcagagtcttccagtcataatgggtagctttgctgccccagtttgcacatcctcacccaaaatgggtgtcctgaaggaggactgaggttcagcagttaactgaccttttatacaagttagcacatgaaggatagatatgcactgaaacatgtggtctggtctgacttgagagaaaaggaatgttgcacaagggttgtgaatgtgaaagggggaatggaggaatggaaataaaattgggatgagccctaatggaggaagtcgggcaaattgaaagtataaatgaatgggccatgagtgttcagagggagaaaagaaaggtttaatatactccttcagttgagttttcttgtcttgaacataaaaagtgaatacaaataaattcagtaatactaaaacatacagagatactgaacttgctggcacatttacttctggtaagcataaagcagagagaacccaggttagaaggatgggaagagaaaaggagcagttttattgcttatagaaagccgttctgaggggttggtggggtaagctcagtctattactgagacaatagtgagatggcttatatgtttcccctgttaatatctggttaaattatgtatccatcaaatggtatgctcgcagcattagcaaaattaggagtttcatctttttcattgaatcacaggtggagactcctattttcctttctgttttcaggcctttgagcccctgggagcccaaataccactcaattattttgtatttatgattaataaaagttcattttttaaatttgtatttttatacaacctccaaaaaaaaaaacaactgggtagagggtgggagggatttacttttaagaggcaaaatgtgagtaaattgaaaccaagaaaacttgtttttagaatatttcgtctgaataagtacagtagccaaggaatacaaacctaattgcatgtttttaaaaattccttggaggctggaaggggttaagccagaagtgcaatcaataggaattagggaatgttgtatatttatatatgtaaactttttttgtaagaaaagttggtgacaactaaaccaactttttccaaagtgcgctatgcatatttttaatgaaagatgacatgtatttgcacaaaaattctcaggcacattaaattattgtaaactgaagtaaaacccgggtgcttgctttgagattgtggttttttcttcctaatgtaaaataaaataaaacacatctgccttcttgatatttatagaattagagaataaactttttaatgggggagtcaaagctttttctttttctctaaggttcttttttttattcaaactgtatgaaatggcaaagtgaggctctggggttagatttcagcattcagcagttgacacaggctaagaaatggaaagaagtagatctgttttttctcaatgttgctgagcaaagtctgcttctcatcagatgacgtggctttgtctagacagcacgcagttcagaaagaaatgtctttatacaaaagacatgatagagaaaagatgagagaggggactaattattttgtttatgaaaatggcaagtaaattacttgatctttttggtgcttaatttgcaaatgttttgttcctttgtcctgacttaaaggcagttttctgaagaactcttgactcttgctcctatggttcccataggcacacctattcccaggccaaggagagtccttcctctccccttttgaggcatccccgccatccccccacttagagctatgtgctcaaaaagccaacatgaatgcagtggtaaaaatttgttagtttcttatactttttagaatctctcaataaaatttttctaaataaattccacaaaaacaaagggtgaagatggtctctccctttcgttccccttcactcagttgtgctgaggtcaatagagtgtagagtttcagaaaggattccagcaggtttatatgtgaatataagtgtccctgaatggggcaggcattaaatagaagaatccctgctgtttaaatttcccgcatattccaattcacttttaaaaaataccatttgaatttgtatttcataaagtgactctggggtgcttactttagtcaattcttaaaattttttatttgttccctaagaaagtaattactgtttctgttgcctggacagttacagtttccaggaaacatcaggaagtaggaaactgtagggccagagagtagtacaacgttaaattgtccgatttatgtgtattacttaaagctataaattgaactagatcttgccgtgctctgtattgagtataatttgtatacttttttataattaatgactaaatgatcactttggaggcagggtggtgggggtgtattagcagccaaataagcatatctgatcaaaaagaaccaggcttagattttttttaagtacattgatgttgatgttccaccagaaacaccttaagtgtatactgttgtgtaatgtctctagaaaggaatcctgtcttaaaactgggttttgctgttttttgaagtttctacctaaaatcatttttggtatatcctgataatctctataatactagaattgtctgcaaaatatagtaagaagaattggagcctaatagctgattcctcccaatttatctgttatgttttgtcactattcacattttagtcttttctacgataaaaattgtatgtgtactttcatgccagtataggaaacctcaatcttttttttttttcgcctttaagaaggttttcagtgattatacctcaggtatttctgagtgtcctattgtctaataggagaaatatcttcccgagctcagaattaaaagttctcctaaattatgaagatcccaaatcttatgtaaataaccttaggcatgagtccttagggagaagttaatgaccattgttaaagtgcttttttagaaaatgttgtgctgtatgttcttgatttgacataaatgaatagactttggcaagggaggaaataagttaaaaggcagcttacaagagcctattccctataaagggtataattttacacagtactcaaagcttgttatcttttctgaccattttagtacagaattagtacttggtggttactaacatcaacttgtgacatctagaactagggctcttagtgtttagtgggccacttctctgatgtcagatgcatgcagacctgtactccacatgcaacccaacagcagtgcagtgtgataactgagcggtcgcatggcagaggacatccccctcagagtgggcacaagtgccctctagggcagccaggggaatactattgttcgatacctgggatttgactttgtcaaacagctctttgtgcccctatctttgttttgtcaaatgtagatcagttaataaacatgagtagcttgaattttcaaaaaaaaaa

SEQ ID NO: 1983 - DNA, 5469 bp, Homo sapiens
aaggacagaggacgagattttgaacgacaaagagaaaagagagacaagccaaggtctacttccccagcaggacagcatcattctcctatatcttctagacatcactcatcttcctcacaatcaggatcatctattcaaagacattctccttctcctcgtcgaaaaagaactccttcaccatcttatcagcggacactaactccacctttacgacgctctgcctctccttatccttcacattctttgtcgtctccccagagaaagcagagtcctccaagacatcgctctccaatgcgagagaaagggagacatgatcatgaacgaacttcacagtctcatgatcgacgccacgaaaggagggaagatactaggggcaaacgagacagagaaaaggactcaagagaagaacgagaatatgaacaggatcagagctcttctagagaccacagagatgacagagaacctcgagatggtcgggatcggagagatgccagagatactagggaccgaagggaactaagagactccagagacatgcgggactcaagggagatgagagattatagcagagataccaaagagagccgtgatcccagagattctcggtccactcgtgatgcccatgactacagggaccgtgaaggtcgagatactcatcgaaaggaggatacatatccagaagaatcccggagttatggccgaaaccatttgagagaagaaagttctcgtacggaaataaggaatgagtccagaaatgagtctcgaagtgaaattagaaatgaccgaatgggccgaagtagggggagggttcctgagttacctgaaaagggaagtcgaggctcaagaggttctcaaattgatagtcacagtagtaatagcaactatcatgacagctgggaaactcgaagtagctatcctgaaagagatagatatcctgaaagagacaacagagatcaagcaagggattcttcctttgagagaagacatggagagcgagaccgtcgtgacaacagagagagagatcaaagaccaagctcaccaattcgacatcagggaaggaatgacgagcttgagcgtgatgaaagaagagaggaacgaagagtagacagagtggatgataggagagatgaaagggctagagagagagatcgggaacgagaacgagacagggagcgggagagagagagggaacgtgaacgggatcgggaaagagaaaaagagagagaactagaaagagagcgtgctagggaacgggagagagaaagagaaaaagagagagatcgtgaaagggatagagaccgagaccacgatcgagagcgggaaagagagagggaacgagacagggaaaaagaacgggaacgagaaagagaagagagagagagggagagagagcgagaacgggagagagagcgagagcgagaacgggaacgagaaagagcgagagaaagggataaagaacgagaacgccaaagggattgggaagacaaagacaaaggacgagatgaccgcagagaaaagcgagaagagatccgagaagataggaatccaagagatggacatgatgaaagaaaatcaaagaagcgctatagaaatgaagggagtcccagccctagacagtccccgaagcgccggcgtgaacattctccggacagtgatgcctacaacagtggagatgataaaaatgaaaaacacagactcttgagccaagttgtacgacctcaagaatctcgttctcttagtccctcgcacctcacagaagacagacagggtagatggaaagaggaggatcgtaaaccagaaaggaaagagagttcaaggcgctacgaagaacaggaactcaaggagaaagtttcttctgtagataaacagagagaacagacagaaatcctggaaagctcaagaatgcgtgcacaggacattataggacaccaccagtctgaagatcgagagacatctgatcgagctcatgatgaaaacaagaagaaagcaaaaattcaaaagaaaccaattaagaaaaagaaagaggatgatgttggaatagagaggggtaacatagagacaacatctgaagatggtcaagtattttcaccaaaaaaaggacagaaaaagaaaagcattgaaaaaaaacgtaaaaaatccaaaggtgattctgatatttctgatgaagaagcagcccagcaaagtaagaagaaaagaggcccacggactccccctataacaactaaagaggaattggttgaaatgtgcaatggtaagaatggtattctagaggactcccagaaaaaagaagatacagcattcagtgactggtctgatgaggatgtccctgaccgtacagaggtgacagaagcagagcatactgccaccgccacgactcctggtagtaccccttctcctctatcttctcttcttcctcctccaccgcctgtggctactgccactgctacaactgtgcctgcaactcttgctgccactactgctgctgccgccacctctttcagcacatctgccatcactatttccacctctgccacccccaccaataccaccaataatacttttgccaatgaagactcacacagaaaatgccacagaacacgagtagaaaaagtagagacgcctcacgtgactatagaagatgcacagcatcgcaagcctatggatcaaaagaggagcagcagcctcgggagcaatcggagtaaccgtagtcatacgtctggtcgtcttcgctccccatccaatgattcagcccatcgaagtggagatgaccaaagtggtcgaaagagagtactgcacagtggctcaagagatagagaaaaaacaaaaagcctggaaatcacaggagagagaaaatctaggattgatcagttaaagcgtggagaacccagtcgaagtacttcttcagatcgccaggattcaagaagccatagttcaagaagaagttctccagagtcagatcgacaggtccattcaagatctgggtcatttgatagcagagacaggcttcaagaacgagatcgatatgaacacgacagagagcgcgagagagagaggagagatacgaggcagagagaatgggaccgagatgctgataaagattggccacgcaacagggatcgagatagattgcgagaacgagaacgagagagagaacgagacaaaaggagagacttggatagggaaagagagagactaatttctgattctgttgaaagggacagggacagagacagagacagaacttttgagagttctcaaatagagtctgtgaaacgctgtgaagcaaaactggaaggtgaacatgaaagggatctagaaagcacttcccgagactctctagccttggataaagagagaatggataaagatctgggatctgtgcagggatttgaagatacaaataaatccgagagaactgagagtctggaagcaggagatgacgagtccaagttagatgatgcacattcattaggctctggtgctggagaaggatacgagccaatcagtgatgacgaactagatgaaattctggcaggtgatgcagaaaagagggaggaccaacaggatgaggagaagatgccagatcccttagatgtgatagatgtggattggtctggtcttatgccaaagcatccaaaagaaccacgagagcctggggctgcactcttaaaattcacacctggagctgttatgctaagagttgggatttctaaaaagttggcaggttctgaactctttgccaaagtcaaagaaacatgtcagagacttttagaaaaacccaaaggtagtttcattttactttaactatataatgtctgttaaccatttaagatgccatctgaaggggattctgatctgttcttatgtagcacttaacactgtgtagaaactattttttgagaaatcattttataatcattatttaaccctcatggtcaaagtttctctttaaaatttattttgagaagaagagttatcccacagaaaagttgggaaaagagtacaatgacctttttgtatgaaaattacttattaacaggccaggcgtggtgttgcatgtctgtagtcacagctactcagggaggttgaggcagcaggattgctggagcccaggaaattgaggctgcagtgagccatgattgagccaccacactccaacctaggtgacagagcaagaccctgtctcaaaaaaaaaaaaacaaattaaccaataagttctaatatcaaagtgctcagtggtttgcccttggctaaatgaagcagagccaggaaaaacagactacatatttttcatgtctaaagaaattgggtattttggcagccctttcccctagacatctacccaaatgcaggtgtgtaggttgagtctttaacaaagtgattaagagcttggtctgtaaggccggatgatctggatttcagtaggcacaccacttactggctattacttaatctgtgtgttagtgtcatcatctgtaagtcaggaataatcataccaccaacttcctatggtaattaggagcaaatgagttattacaggcaaaacacttagaacagttcctggcatatagtaatacccaataaatattaactgctactttgaaaatatcctatcacgctgatttttgacctcactgcagcaattttcagttattccagattatctagcttatggattctggtggtaggggttgtttggttttggttttcactgtctctgtctcatctagtacctaccttagtttattttgcaacttactaatactttattaatggggagggacgagtagatggtaaaaagaaggaaaaggaggtaaaaggtgaaaggaacaacattaattaacaattttacgtcatgtccctggacataaaagtttagttagtattaaatttttcactaatacaaaataaaaaaatattgttttatgagttttatgaattcatgcccttcctttactctattagcataagcagtaaatttttttattttaatatagcccaataaacctagagtatacatgtacaaaatacatataattgttaacgtgtattaaccgaaaaatgacccaagacttagttcttgccctactgtatctgccttgtttggttggttctgtgaccttaagcaaataactcctgtgagcctcaattttatttgtaaagtgatggaataaaacccctaaaatcttacccacctctaaagatatttgtttctgtgaccttttgctagtagcatttcaagttaaaatctggtttgattttgctacccatgaaatacagttcggcccttacttattgatgacttaacctaaacagtgaaaatatgcactgtaaagggtggggtgatgtggcttaacaatcagacttcttctatttttgctgctatggtggttgtattagagaactgatgtattatcttgaataaagactttgtcttgtttactgccctaaaaaaaaaaaaaaaaaaaa

SEQ ID NO: 1984 - DNA, 2271 bp, Homo sapiens
ggcacgagggcacgctgaaaccctgggcggcggcaagctgtgcgacctcttctgcggccggcctgggcaggtgtcttcctcgagaggcaggcaggggatcccggacccttatacaggatgctgtgttctttgctcctttgtgaatgtctgttgctggtagctggttatgctcatgatgatgactggattgaccccacagacatgcttaactatgatgctgcttcaggaacaatgagaaaatctcaggcaaaatatggtatttcaggggaaaaggatgtcagtcctgacttgtcatgtgctgatgaaatatcagaatgttatcacaaacttgattctttaacttataagattgatgagtgtgaaaagaaaaagagggaagactatgaaagtcaaagcaatcctgtttttaggagatacttaaataagattttaattgaagctggaaagcttggactttttcatgattttgaaacatggaagtggcgattcgaagattcctttggagtggatccatataatgtgttaatggtacttctttgtctgctctgcatcgtggttttagtggctaccgagctgtggacatatgtacgttggtacactcagttgagacgtgttttaatcatcagctttctgttcagtttgggatggaattggatgtatttatataagctagcttttgcacagcatcaggctgaagtcgccaagatggagccattaaacaatgtgtgtgccaaaaagatggactggactggaagtatctgggaatggtttagaagttcatggacctataaggatgacccatgccaaaaatactatgagctcttactagtcaaccctatttggttggtcccaccaacaaaggcacttgcagttacattcaccacatttgtaacggagccattgaagcatattggaaaaggaactggggaatttattaaagcactcatgaaggaaattccagcgctgcttcatcttccagtgctgataattatggcattagccatcctgagtttctgctatggtgctggaaaatcagttcatgtgctgagacatataggcggtcctgagagcgaacctccccaggcacttcggccacgggatagaagacggcaggaggaaattgattatagacctgatggtggagcaggtgatgccgatttccattataggggccaaatgggccccactgagcaaggcccttatgccaaaacgtatgagggtagaagagagattttgagagagagagatgttgacttgagatttcagactggcaacaagagccctgaagtgctccgggcatttgatgtaccagacgcagaggcacgagagcatcccacggtggtacccagtcataaatcacctgttttggatacaaagcccaaggagacaggtggaatcctgggggaaggcacaccgaaagaaagcagtactgaaagcagccagtcggccaagcctgtctctggccaagacacatcagggaatacagaaggttcacccgcagcggaaaaggcccagctcaagtctgaagccgcaggcagcccagaccaaggcagcacatacagccccgcaagaggtgtggctggaccacgtggacaggatccggtcagcagcccctgtggctagaggaacaccagcacaaacgacagcctcaagtctccttcgagctttatatccatttggggatgaagtctactttgacagctagcaaggcgacatgcaactgttgttgaatgatgacagcaattcaggaaagacttaaatatgaaagcaaattgaacacatcgggtgtttgttatcagaaaagagatgagatgagataagacttgtttattgactagccaatatgtcattaaaattaaggtttatattgtgaagcttttttgaaattttacttttttttgagagttttgctctgtcacccaggctggagtgaggtggtacaatctcggctcactgcaacctccacctcccaggttcaagagattctcctgcctcagtctcccgagtagctaggattacagatgtgcatcaccatgcctggctaatttttgtattttttagtagagatggggtttcaccatgttggtcaggctggtctcgaactcctgacctcaagtgacccgcccttgtcggcctcccaaagtgctgggattacaggcatgagccattgtgcccagcctatatctacttgagcctgtgtgcccactgaagagatgaagaataaaagcctaagctctcatcaaaaaaaaaaaaaaaaaaaaaaaaaaaaaa

SEQ ID NO: 1985 - DNA, 6948 bp, Homo sapiens
ggggctgaaagacacacagaagtcttcatggatatagttgatacatttaatcatttaattcctactgaacacttagatgatgccctatttctaggatccaacctggagaatgaagtctgtgaggattttagtgcaagtcaaaatgtcttagaggactcgctgaagaacatgctcagcgataaggatcctatgctaggatctgcaagtaaccagttctgtttgcctgttttggatagcaatgatcccaatttccagatgccttgttcaacagttgttggtcttgacgatattatggatgaaggagttgttaaagaaagtggcaatgataccattgatgaagaagaactgattttacctaacaggaacttaagggacaaggtagaagaaaattcagtgagatctccaagaaaatcacctcgtttaatggcacaagaacaagtaagaagtttgcgacagagcactattgccaagcgttcaaatgcagcaccattaagtaacacaaaaaaagcatctgggaagactgtatctactgctaaagcaggagtgaaacaaccagaaaggagtcaggttaaagaagaagtatgtatgtcactgaaacctgagtaccataaggagaatagaaggtgcagccgaaatagcggacaaattgaagtggtacctgaagtatcagtgtcttcaagtcattcttcagtgtcatcttgtcttgaaatgaaggatgaagatggattagattctaagcataagtgtaataatccgggagaaatagatgtgccatctcatgaattaaattgttcacttctttcagagacttgtgttactattggagaaaagaaaaatgaagctttgatggaatgtaaagccaagcctgttggtagtccattgtttaagttttcagataaagaagaacatgaacaaaatgattccatttcaggtaaaacgggtgagactgttgttgaagaaatgatagcaacaagaaaagttgaacaagattcaaaggagacagtaaaattatcccatgaagatgaccatattcttgaggacgctggatcttctgatatttctagtgatgctgcttgtacaaatccaaataagacagaaaacagccttgtaggtttgcctagttgtgtagatgaagtgactgaatgtaatttggaattgaaggataccatgggtattgctgataaaactgagaacacccttgaaagaaataaaattgaaccgttgggttattgtgaagatgcggagtctaataggcagttggagagcactgagtttaataaatcaaacttagaggtggttgatactagtacttttggaccggaaagtaatatcttggaaaatgctatttgtgatgtgcctgaccaaaattcaaaacagttgaatgctatagaaagtactaaaatagagtcccatgaaacagcaaaccttcaggatgacagaaacagccagtcaagtagcgtttcttacttagagtcaaaaagtgtaaaatccaaacatacaaaacctgtaattcattctaagcaaaacatgaccacagatgctccgaagaaaattgttgcagcaaagtatgaagtaatacatagcaaaactaaagttaatgtcaaaagtgtgaaacgaaatactgatgtaccagaatctcagcaaaattttcataggccagtcaaagtcagaaaaaaacaaattgataaggagccaaagattcagagttgcaattctggggttaaatctgtgaaaaaccaagctcattctgtactgaaaaaaacattacaggatcaaactttagtacaaattttcaagcccttaactcattctttgagtgataagtcacacgctcatcctggttgcttgaaagaacctcatcatcctgcacaaactggacatgtatcacattctagccagaaacagtgtcataagcctcagcaacaggccccagcaatgaaaaccaatagtcacgtgaaggaagagcttgaacacccaggcgttgagcattttaaggaagaggataaactgaaactgaaaaaacctgagaagaacctacaaccccgccaaagaagaagcagcaaaagtttttctttagatgagccaccattgttcattccagataacatagctaccataagaagagaaggctctgatcatagctcctcatttgaaagcaaatatatgtggactcccagcaagcagtgtgggttttgcaaaaaaccacatggcaacaggtttatggttggctgtgggagatgtgatgactggtttcatggtgattgtgttgggttaagtctttctcaagcacagcagatgggcgaggaagacaaagaatatgtctgtgtaaaatgttgtgctgaagaagacaaaaagactgaaatactagatccagatactttggaaaaccaagctacagttgaattccatagtggagataaaacaatggagtgtgaaaagcttggattatcaaaacacacaacaaatgatagaaccaaatatatagatgatacagtgaagcacaaggtcaaaattttaaaacgggagtctggtgaaggcagaaattcatcagactgtagagataatgaaattaaaaaatggcagctagctcctcttcgtaagatgggacaaccagttttacctcggagatcctcagaagaaaaaagtgaaaaaataccgaaagagtctacaactgttacttgcacaggagaaaaagcttcaaaaccaggtactcatgagaagcaagagatgaaaaagaagaaagttgaaaaaggagtgcttaatgtacatcctgctgcttctgcttccaagccttctgcagatcagatcaggcaaagtgtcagacattctctcaaagacattcttatgaagagacttacagactcaaatttgaaggtaccagaggaaaaggcagcaaaagttgccacaaaaattgagaaagagcttttctctttttttcgggacacagatgctaaatataagaacaaatatagaagtttgatgtttaatttgaaagatcctaaaaacaatatattatttaaaaaagtactgaaaggagaagtaactcctgatcatcttatcagaatgagtccagaagaactagcttctaaagagttagctgcttggagacgaagagaaaacagacataccatagaaatgattgagaaagagcagagagaagtggaacgacggccaatcaccaaaataactcataaaggtgaaatagaaattgagagtgatgccccaatgaaagaacaggaagcagccatggagattcaggaaccagccgccaataagtcattggagaagccagaaggatctgaaaaacaaaaagaggaggttgactctatgtctaaagataccactagtcaacacagacagcatctttttgatctcaactgcaaaatctgcataggtcgaatggcaccacctgtagatgatctttctccaaaaaaagtaaaagttgttgtaggagtagctcgcaaacattcagacaatgaagcagaaagtatagcagatgcattatcttcaacctcaaatattttggcttctgaattctttgaggaggagaaacaggagtctccaaagtcaacgttctctcctgctccacgtccagagatgcctggaactgttgaagttgagtctacctttctggctcgattgaacttcatctggaaaggttttatcaacatgccttctgtggcaaaatttgttaccaaagcctatccagtatctggctccccagaatacctgacagaggacctaccagatagtattcaagtaggtggcaggatatcacctcagacagtttgggattatgtggaaaaaataaaagcatcaggaaccaaggaaatttgtgtggttcgcttcacaccagtaactgaagaagatcaaatttcttatactttgctctttgcatacttcagtagcagaaagcgctatggagtagctgctaacaacatgaagcaggttaaagatatgtaccttattcctttgggtgccacagataaaattccacaccctcttgtgccttttgatggacctgggcttgaactgcatagacctaatctattgttgggcttaattattcgtcagaaactgaagcgacagcacagtgcctgtgctagtactagtcatatagctgagactcctgaaagtgcaccaccaatagcattgccacctgataaaaaaagtaaaatagaagtttctacagaagaagcaccagaggaagaaaatgacttttttaattcttttacaactgtattacacaagcagagaaataaacctcagcagaatcttcaggaagaccttccaacagcagttgaacctttaatggaagtcaccaaacaggagccaccaaaacctttaagatttcttcctggcgtgttgattggctgggagaatcaacctactactctggaattagcaaataaacctcttcctgtggatgatatacttcaaagccttttgggcaccactggtcaagtatatgaccaggcccagtcagtgatggaacaaaacactgttaaagaaattccatttttaaatgagcagaccaactcaaaaatagagaaaacagataatgtggaagtaactgatggtgaaaacaaggagataaaagttaaagtagataatatttcagaatctacagataagtcagcagaaatagaaacatcagtagtagggtcctcttccatttctgcagggtctttgacgagtcttagtctcagaggtaagccaccagatgtttctacagaagcatttttaacaaatttatcaattcagtcaaaacaagaggaaactgtggagagtaaagagaaaacattaaaaagacagcttcaggaagatcaagagaataatttgcaagataaccagacttcaaatagttctccatgcagatctaatgtaggaaaaggaaacatagatggtaatgtgagctgtagtgaaaaccttgttgctaatacagcgaggtctccacagtttatcaacctgaaaagggatcctaggcaagcagcaggacgaagtcagcctgtaactacttcagaaagcaaagatggagatagttgccggaatggagaaaaacacatgctgcctggcctgtcacacaacaaggagcacttaacagaacaaatcaatgtagaggaaaagttgtgttctgcagagaaaaactcgtgtgttcagcagagtgacaatttaaaagttgcacaaaactcaccatcagtagaaaacatacagacttctcaagcagaacaagcaaaacccttacaggaggatattttaatgcaaaatattgaaactgtgcacccatttcgaagaggatcagcagtagcgacatctcattttgaagttggaaacacatgtccatcagaatttccttctaaaagcatcacctttacttccagaagcaccagccccagaacaagtacaaacttttcacccatgaggccacagcagcccaaccttcagcatctcaagtctagcccacctggatttccatttccagggcctcctaattttcccccacaaagcatgtttggatttccaccacatttgccacctccattacttccccctccaggctttggctttgctcaaaatcccatggttccctggccacctgttgttcatctcccaggtcagccacagcgtatgatgggtcctctctcacaagcatcaaggtatataggcccgcagaatttttaccaggttaaagacattcggaggccagaaaggcgccatagtgacccttggggtaggcaagaccaacagcaactggataggccatttaataggggtaaaggggaccgccagagattttatagtgattcacaccatttgaaaagagagcgacatgaaaaggaatgggagcaagaatctgaaaggcatagacgcagagacagaagccaagacaaggacagagacagaaaaagcagggaggaagggcacaaagataaagagagggcacggttatcacatggtgatcgaggaacagatggaaaagcaagcagagatagtaggaatgtagacaagaagccagataaacctaaaagtgaagactatgagaaggacaaagaacgagagaaaagtaaacacagagaaggagaaaaggacagggataggtaccacaaagatagggaccacactgacagaactaaaagcaaaaggtaaaatttgcaggctgcttcaggattacatttaaataactgttaaaatgttgtatcttgtaaacaaaagaaagattgcctgctaggattgtgccatctttaaaatttttactattggtcatttgcagaacagtaaattctgtgtgttggtacagagtgctctgtaccagtgctcatcatcccttcttcataccaacggtccctagttataggaatttaatatttttaaaagttttacattgctgtatattcaaagatttgttttattaatatgcaataaaggcttagaaattttagttttattccttaattggtaaatatggttaactatggaatatatttacttcctctagtgaatgtcctttatataatgactaatttgggagtaatgtgtgctctgtaagtttgttttaaattgcactgtttttaaagaaactgtagaggagcaacaaaaatccaagcaacttcataatcagattatgctaatcatttagttgagcagtttttgaccaagaatcagaagcccaaggggtacatttattgctttaatctgcactcattgaagtcatttattaccatatactacagctttgtggtaggccattattttcattttcatttttggctcttcagaaacttgaatacttaagcttgtacatgatcttgtgttttgctatcctttttactgtaaaatgtaaatattttaagggatattttgattctaaatatgataaaataatttctcacctattttgtgtgtgtgacttgaaattcagtagtaaaagaatttcttctttaaagcttt

SEQ ID NO: 1986 - DNA, 1512 bp, Homo sapiens
ggccgcccggggccatggcgacactcagcttcgtcttcctgctgctgggggcagtgtcctggcctccggcttctgcctccggccaggagttctggcccggacaatcggcggccgatattctgtcgggggcggcttcccgcagacggtatcttctgtatgacgtcaaccccccggaaggcttcaacctgcgcagggatgtctatatccgaatcgcctctctcctgaagactctgctgaagacggaggagtgggtgcttgtcctgcctccatggggccgcctctatcactggcagagtcctgacatccaccaggtccggattccctggtctgagttttttgatcttccaagtctcaataaaaacatccccgtcatcgagtatgagcagttcatcgcagaatctggtgggccctttattgaccaggtttacgtcctgcaaagttacgcagaggggtggaaagaagggacctgggaagagaaggtggacgagcggccgtgtattgatcagctcctgtactcccaggacaagcacgagtactacagaggatggttttggggttatgaggagaccaggggtctaaacgtctcctgtctgtccgtccagggctcagcctccatcgtggcgcccctgctgctgagaaacacatcagcccggtccgtgatgttagacagagccgagaacctacttcacgaccactatggagggaaagaatactgggatacccgtcgcagcatggtgtttgccaggcacctgcgggaggtgggagacgagttcaggagcagacatctcaactccacggacgacgcagacaggatccccttccaggaggactggatgaagatgaaggtcaagctgggctccgcgctagggggcccctacctgggagtccacctgagaagaaaagatttcatctggggtcacagacaggatgtacccagtctggaaggggccgtgaggaagatccgcagcctcatgaagacccaccggctggacaaggtgtttgtggccacagatgccgtcagaaaggaatatgaagagctaaaaaagctgttacccgagatggtgaggtttgaacccacgtgggaggagctggagctctacaaggacggaggcgttgcgattattgaccagtggatctgcgcacacgccaggtgcctgcccacgtcactgtcggccgagagcgggtcgggtggctttcaaaggttcttctgtcccaagtactcggtgtcagagcagatggtcgcctgtgttcacagtggtcatttccatactgtttgcctcctcgtctgagtctcctgtagcatctggttcagtgtttccctgggctgaagttaattgttcatcttgcccctttagttctcatgcacagaattcctccatagcaggctgttggcatagctggcctcgtctcagaacctcttcttgtgtcgcattttcccatcattcccggtttctgcccctgtctgccccctgccctgagagttgcccgtgccctggacttgggcatgtcctt

SEQ ID NO: 1987 - DNA, 6111 bp, Homo sapiens
aacaggtttgatctgtggatgaaatgaatcatgattttcaagctcttgcattagaatctcggggaatgggagagcttttgcctaccaaaaagttttgggaacctgatgattcaacaaaagatggacaaaaaggcatatttcttggggatgatgaatggagagagactgcatggggagcttctcaccattcaatgtcccagcctattatggtacagagaagatctggacagggttttcatggaaacagtgaagtaaatgcaatactgtctccgcgatcagaaagtggaggccttggtgtgagcatggtagaatatgtattaagttcttctcctgctgataaattggattctcgatttaggaagggaaattttggcactagagatgctgaaacagatggacctgagaaaggagatcaaaaaggcaaggcttctccatttgaggaggaccaaaacagagatcttaaacaaggagatgatgatgattctaaaataaatggcagaggtttgccaaatggaatggatgccgattgcaaagattttaatcgtactcctggaagtcgtcaagcctctccaactgaagtagttgagcgcttgggccccaatactaatccctcagaaggactggggcctcttcctaatcctacagctaataaaccacttgttgaagaattttcaaatcctgaaactcagaatctggatgccatggaacaagttggtctggaatccttacagtttgactatcctggtaatcaggtaccaatggactcttcaggagctactgtaggcctttttgactacaattcccagcagcagctctttcagaggactaatgcactaacagttcaacagttaactgcagctcaacagcagcaatatgcattagcagcagctcagcagccacatatagctggtgtattctcagcaggccttgctccagctgcatttgtgccaaatccatacattattagtgctgctcctccagggaccgatccgtatactgcagcaggattggctgcagcagctacattagcaggtccagcagtggttccacctcagtattacggcgttccatggggggtgtatccagccaacttatttcagcagcaagctgcagctgcggcaaataacacagccagtcagcaagcagcatcacaagctcagcctggacagcaacaggttctccgtgctggagcaggtcagcgtcctcttactcccaatcagggtcagcaagggcagcaagcagaatcacttgcggcagctgcagcagcaaatccaacattggcttttggtcagggtcttgctactggcatgccaggctatcaagtactagctccaactgcctattatgatcagactggtgccttagtggttggccctggagcaaggactggccttggagctccagttcggttaatggctccaacacctgttttaattagttcagcagcagcacaagctgcagcagcagcagcagctggaggaactgcaagtagccttacaggcagcacaaatggtctgtttcggccaattggcactcagccaccacagcagcagcaacagcagccaagcactaatctgcaatctaattcattttatggaagcagttctttgactaatagctcccagagtagttctttattttctcatggacctggtcaacctggaagtacatctcttggctttggaagtggtaactctttgggtgctgctataggctcagccctcagtggatttggttcatcagttggcagttctgcaagtagtagtgccacaaggagagagtctctatctactagctctgacttgtacaaaagatctagtagcagcctagcacccatagggcaaccattttacaatagtctgggattttcctcctctccaagtccaataggcatgcctctgccaagccaaactccaggacattcacttacgccaccgccatcactttcatcacatggatcctcatccagtttgcatttaggaggactgacaaatggtagtggtcgatatatctctgcagcacctggagcagaagcaaaatatcgaagtgcttcaagcacttccagtctatttagctccagcagccagctctttcctccttcccggcttcggtataataggtctgatattatgccttctggccgcagtagattattggaagatttcagaaacaaccgcttcccaaaccttcagcttagagacttgattggacatatagttgagttttctcaagaccagcatggttctagattcatacagcaaaaactagagagagctactccagctgagcgacagatggtatttaatgaaattctgcaagcagcctatcaattaatgactgatgtttttggcaactatgttatacagaagttttttgagtttgggagtctggatcaaaaattagccctggctactcgtattcgtggtcatgttctacccttagccttgcagatgtatggctgccgcgttattcagaaagcattagaatctatttcttctgaccagcagagtgaaatggtaaaggagctggatggtcatgtgctcaaatgtgtgaaagatcagaatggaaaccatgttgtacaaaaatgtatcgaatgtgttcagccacagtcactacagttcatcattgatgctttcaagggacaagtatttgtgctttcaactcatccttatggctgcagagtaattcagcgcatcctagagcattgcactgcagaacagaccttacctatcttagaagaactccaccaacatacagagcagttggtacaggatcagtatggcaattatgttattcagcatgtactggaacacggtcgacctgaagacaagagcaaaattgtttccgaaatcaggggaaaggttttagccctgagtcaacacaaatttgccagcaatgtagtagaaaagtgtgttactcatgcctcccgtgctgagagagctttactgattgacgaggtttgctgccagaatgatggtcctcacagtgccttatacaccatgatgaaggaccagtatgccaattacgtggttcaaaagatgattgatatggctgaacctgctcagagaaagataatcatgcacaagattcgacctcacattactactttgcgcaaatacacatacgggaagcatatactggccaagttggaaaagtattatttgaagaatagcccggacctaggacctattggaggaccaccaaatggaatgctgtaaattacaggagcaagagaaagaagataatttaaccatgtgaaaagaatttttttgtgtgtgaattatcaaaacacaactcaactatgaatcttcaatttttttttaaagcaaaactatttattgactttattcatccatttgtaaattttttaaggttcttgtgtatatttggggggtgggggatgaattataaattatattcagccctgagtggagacctatcagattggattgctggcaaagcacagaatgcctgtatatgatgtaactgtatcaaaaataaaaagctgtcacatattttgtaaatttttaccttgtaaagtcacaaaaatagtttttaaaggaaaaagtacagtattcttttaataaactggctcacagtctggtaggtctacaaccccatagcacaacaggtttatagagatgtatatagaattatagtccttatttttttcctttgcgtgaaaccttttataacagattaacaatcaactgcataaatattattaatattttaaaaagagttaagttgtattttgataattcacaaactatcatgcaaataacgagtaagtagacaagaataaagtggtttgagatgaaaagaacctaacattatttacagtagatgtggttttaatacaattactgccctaaaatgtctctggcaatgtacagaaatattgtatatacttacatatgtaattgttgtaagagttaaatacaaaatcatggtgacacttccaattaagtgcactaaatgaaaagttaagtcacttattaacttttcagtttggtttgcaatgagaaagagtggaaatttgtattttgttttgcttatagaattacagacatgttgaggaagtgttgagctttattttgctttttcatagaggcagaaagtaggaaccagatagagatgaaaaggggccactgaaaagtgaatttgatagctcagcatttaagcatgattacatattcagatagctctttttgctttctataaatatatgcattgtgtgtgtagtaatagatgtaagtttacactttgaaaggaaatcttgtttcaatgtttattataaaagccttgctaatttagtagtgatgctttccttggttgtacaggtgtacatttgtaaaccttcatgctgtaaatggaatttgttttatctctttgggatacatttgcattttagtgtacatttacgtccctgccctctttgacctggcaatatagtgttgtataatgtaaatttatttctccaaatcgagagtgattttttaaaaattttttatctttatatggtttcagaagtatgaaccagctttctttttattattgtgagatcattttgttttataacatagttgttgactgttaatatggacctgctagaatttggatcactttcaattgaagtcagggtattgtgcataatagaaagtattggactgagatatttggttaccatggaggccaatgcttttttcatcttattaaatgtgatgtgacttttttctttgtacagaagagtactgtatttttgaatagcctactcccaagtaagagcaaatctgtatgataacattttttcctctggacataagacataacagtaacacgatgtacatttacaagcggccttatgtacatttcccaacaatctttttaaggcaaaattgtgaccatatgtgtataattaaaatcgtttttaatcctttgcctatgaaaatattttggaaaaaaacttgctgtgtatattcagtttctgaaagataaagaaagtgctttgtattttgttgaagtcagtattttgtataaacatttatgttgacccacttatgttcagtgctgaaaactaaaatgaacatgctattctgtcagctgaatatggaagagatctttttttactagagatctgcagaagaaacgcaatcttctgagcacaatatggaatctaaaggttttatcacttagttgttcatattatgaacctaaaaataatggcataaagtttggggatgccaggcatactttttcatgtttggtgttgagttattttacttttctaacccaacattccttggtgagaccattaaatccaaacacttgtcaccgttccttctcatagtcactctgggtcatcagcatgtcccagtcactgcagcaacgccttgtgtttgtttcatttttttaaaacccacacaaagccgctgtctcactttttcctactttaccaacctcagagtatttcggcccgtatcgaacttttgttctcagtatcagcccatggtttcaggatcaaagctgtcatgttggagattggtaatggctttcctgtctttgtacagttgaattcctagtcttccttcatccttgccctctgttggcacaggcattatctctgcaattttagaaaatgacaagtagagaatactacattgagaaactaaaccctcttcttggggtcctgatactcattcccatttgtcccagtgctgacaacccaatcttcccaatactttcaggcctgctctacaaaagtacctgttcttgtagaaattttacagtctgccattttgggtgcccaccccaatttttaccttttagtaagttggcatgaaattttggtaaaatctgaaaatcacatttcagaataaaacaattgggcaaaactacctaggctttactcttgagtgtctccttttgatagggattgtttctggaccagtttgtctaagtcctggctcttattggttcatatgaaataatgttaacttcacttctttgtatattatgtataaattagaaaatgaaaaatgtgtgaataacattgtatgaaataaacctggtcttgtgtttttctctagataaaataaaaatctgtacctc

SEQ ID NO: 1988 - DNA, 6111 bp, Homo sapiens; identical to SEQ ID NO: 1987

SEQ ID NO: 1989 - DNA, 1708 bp, Homo sapiens
ggcacgaggctgagcgctccgacttccagaggagcgctgtgcacgtggagaagagcggggactcggcgaccctgccctcccgaccctcatgttcgaagagcctgagtgggccgaggcggccccagtagccgcgggccttgggcccgtaatctcacgacctccgcctgcggcctcctcgcaaaacaagggctccaagcgccgccagctcttggccacattacgggccctagaggcagcatctctttcccagcatccccccagcctatgtataagtgactctgaggaggaggaggaggaaaggaagaagaaatgccccaaaaaggcatcatttgccagtgcctctgctgaagtagggaagaaagggaagaagaaatgtcaaaaacagggcccaccttgcagtgactctgaggaagaagtagaaaggaagaagaaatgccacaaacaggctcttgttggcagtgactctgctgaagatgagaaaagaaagaggaaatgccagaaacatgcccctataaattcagcccagcacctggacaatgttgaccaaacaggtcccaaagcctggaagggtagtactacaaatgatccaccaaagcaaagccctgggtccacttcccctaaaccccctcatacattaagccgcaagcagtggcggaaccggcaaaagaataagagaagatgtaagaacaagtttcagccacctcaggtgccagaccaggccccagctgaggcccccacagagaagacagaggtgtctcctgttcccaggacagacagccatgaggctcgggcaggggctttgcgagcccgcatggcacagcggctggatggggcccgatttcgctacctcaatgaacagttgtactcagggcccagcagtgctgcacagcgtctcttccaggaagaccctgaggcttttcttctctaccaccgcggcttccagagccaagtgaagaagtggccactgcagccagtggaccgcatcgccagggatcttcgccagcggcctgcatccctagtggtggctgacttcggctgtggggattgccgcttggcttcaagtatccggaaccctgtgcattgctttgacttggcttctctggaccctagggtcactgtgtgtgacatggcccaggttcctctggaggatgagtctgtggatgtggctgtgttttgcctttcactgatgggaaccaacatcagggacttcctagaggaggcaaatagagtactgaagccagggggtctcctgaaagtggctgaggtcagcagccgctttgaggatgttcgaacctttctgcgggctgtgaccaagctaggcttcaagattgtctccaaggacctgaccaacagccatttcttcttgtttgatttccaaaagactgggccccctctggtagggcccaaggctcagctttcaggcctgcagcttcagccatgtctctacaagcgcaggtgacctctggatcttccttgaaaggggaggcagatctcaaactccaggctcagaactgtgaagactgtttccagcctggctgtgagccaagacctggttcctggtggaccctgaggacaaagtgtgataaaacctctggctcagacttgctctactgaaggcttcttggttataagatgcataaagtcactggggctagctaaacaataaagagtttattgtgagaaaaaaaaaaaaaaaaaaaaaaaaaaa

SEQ ID NO: 1990 - DNA, 3584 bp, Homo sapiens
cggacgcgtgggctgaggcggcgctgtgtgtgtgaagcgtacctagggcgggaggcgacatggagacaggggcggccgagctgtatgaccaggcccttttgggcatcctgcagcacgtgggcaacgtccaggatttcctgcgcgttctctttggcttcctctaccgcaagacagacttctatcgcttgctgcgccacccatcggaccgcatgggcttcccgcccggggccgcgcaggccttggtgctgcaggtattcaaaacctttgaccacatggcccgtcaggatgatgagaagagaaggcaggaacttgaagagaaaatcagaagaaaggaagaggaagaggccaagactgtgtcagctgctgcagctgagaaggagccagtcccagttccagtccaggaaatagagattgactccaccacagaattggatgggcatcaggaagtagagaaagtgcagcctccaggccctgtgaaggaaatggcccatggttcacaggaggcagaagctccaggagcagttgctggtgctgctgaagtccctagggaaccaccaattcttcccaggattcaggagcagttccagaaaaatcccgacagttacaatggtgctgtccgagagaactacacctggtcacaggactatactgacctggaggtcagggtgccagtacccaagcacgtggtgaagggaaagcaggtctcagtggcccttagcagcagctccattcgtgtggccatgctggaggaaaatggggagcgcgtcctcatggaagggaagctcacccacaagatcaacactgagagttctctctggagtctcgagcccgggaagtgcgttttggtgaacctgagcaaggtgggcgagtattggtggaacgccatcctggagggagaagagcccatcgacattgacaagatcaacaaggagcgctccatggccaccgtggatgaggaggaacaggcggtgttggacaggcttacctttgactaccaccagaagctgcagggcaagccacagagccatgagctgaaagtccatgagatgctgaagaaggggtgggatgctgaaggttctcccttccgaggccagcgattcgaccctgccatgttcaacatctccccgggggctgtgcagttttaatgaccagaaggaaaggaaaccctcgccggtggggaggcagagccttatcctcggctgcccttcttggctccctgcattccagggacttgctcgtcttgtttacccctagccatcctttctttcaagggtgaaccaggccttccaccctgaccttgcatctccagactgttccagagaaggtgcggggccagctgctatgtggtggccgctgtggctgacactgagtgaaggtgtttgaaatgcaggagaggatatcccagcaaattgggatcacatgcttttgtctccacagcaaccagccactgcaggcagcatgtctttcctcccctgctctctgcttgctgttgttttgacgctattctgcttgcatgtcttctggttgggatgtggagttgttgctggactctcaggcgaagctgaagtcattgaagtgtgtgaagctctgtgcttgcatgagggcaagcaaggaatggctgtgcctgaggctgctctgggaaactccttgccccttgacctcttttgagagcattcacgtggtcttcttgctcatccccttataaatgtgctttgcctgcctcagcctcatggtcagagcagtggagactggagccctgtttgcacgttctagttgttcggagaaagcctaggttctgggctcaggtccagatgcagcggggattctgttctctgactgtggcgaccttgctttggttcttgttgaagtgaaccaagcccggccaccacgcatggcatgctgtgcttggctccccataagacgtcctctttgggtgcacggtgtcaaagtgtgggcaggagtggagagctggtgccctcaggaggagaccacagcatgtccatcagctcagcagagctcgacagccacaagtcctgagaagctttgaccttgaagggcttctgggagaggaggaatttctgcatggggcgtgaaggcacactgtcccaccacaactgaaccagaagagagtgaagactcccctcttcccatcctctgtgccaggtgccagactgtgctccttggaacttatggcccaatcttacctgttctccagggactggtcactgcctcaggacccccaagcctatgccctgagccatggctgctgactgactccagccaaggtgcaaagacgagattatgagacaggtcctcaggcctgtgttccaagtactcacaggggctctgggtgcccatcgccgggagtatggttcagctgccaccggcactgtccatttgcctgtctgtcaagctcagagcatggataagccacacagcagggcagtgcaccctggcaccatgcacggccagcaagaatcaaggcccgcagatgctaagagggcctattgtcaggggaaggtccccgctcctgcacactctctatggatacttgggttgtgggggctctcttggagagtaagtttgtggtttgtttctggtttacagtggtggctgacaccccttgtaagaaagcattcctgggaagtcttctgtgggtccaaacatgttgctccgatcatcacaggagagcaaaaggccctagataccccctttggaatgtgagagtcttgttgtctgatatttgccactgagctggtgaagcccctctaaagagatctcgaccctggggagcagaattcttgtcatctatgaggggtcctgagaaagacttgtcattttttttcctggagttcttcccattgaggtcctaggatttgcacaccactgtcccacaagagctttcctgcctaatgaaaggaggtcttgtggtgtgtgtctcctctcttctctatagttcccgagttggcccccattgcagcccccaccctgtgggtagtcttccagaagtgatgcagtggtgtgagatgccctgcaccttgttatttgggagactttgagagtcattcacttccatggtgactagtgtttgttttgcctgattttatattctgtgttgcatttctccccactccctgccctgctttaataaacagcaaaccaatatctaggaagaatgactgagggatagtattgggtattggccccatggcaggaacagccacttgcatctggtcccggtgccacactgcggtgcttggtgtggttgtggagcctgtccctgcgcgccttgctcccgttgagccacgctgtctggtgggtgattctctgccctgagccaccaccctggactggcccagtctccagagctggcacaccctgcctgttttctctttttagacacaacagccgcagtttggccagccactaagtcccaccagctgaggtccgaggaaagcggggtgactcatttcccttgtccagggcccgaggagagtgaggtgtccagcctgcaaagctattccagctccttggtgttggtttgcaataaattggtatttaagcaaaaaaaaaaaaaaaaaaaa

SEQ ID NO: 1991 - DNA, 2738 bp, Homo sapiens
  misc_feature (29)..(29): n is a, c, g, or t
  misc_feature (38)..(39): n is a, c, g, or t
  misc_feature (47)..(47): n is a, c, g, or t
  misc_feature (55)..(55): n is a, c, g, or t
  misc_feature (59)..(59): n is a, c, g, or t
  misc_feature (66)..(69): n is a, c, g, or t
  misc_feature (75)..(75): n is a, c, g, or t
  misc_feature (77)..(77): n is a, c, g, or t
  misc_feature (79)..(79): n is a, c, g, or t
  misc_feature (82)..(82): n is a, c, g, or t
  misc_feature (84)..(85): n is a, c, g, or t
  misc_feature (99)..(99): n is a, c, g, or t
  misc_feature (101)..(101): n is a, c, g, or t
  misc_feature (104)..(104): n is a, c, g, or t
  misc_feature (115)..(115): n is a, c, g, or t
  misc_feature (117)..(117): n is a, c, g, or t
  misc_feature (2055)..(2055): n is a, c, g, or t
  misc_feature (2232)..(2232): n is a, c, g, or t
gaattcccgcgcctgggggtgcgcatgancattcgcgnntccctctncggcccgngggnctgggannnncacagncntnctncnnggaacctcacgaancngancttttgggttncngccccgccccgccccgccccgccccgccggcggcggaggcagcgagcgcgagagcccagcggagtcgctgggagcctgaggcaccgagacacaaaggcaggcgggatgcgggagcaggcaaagggaaagcgaaagccgcgcgcccggccggtgactgggtgaaggcgccgcgcagctttcccgacgccggctgtaccgggacctcctggtcgagcctggcgcgccgcagccatggccatcgctcacctggccacggagtacgtgttctcggatttcttgctgaaggagcccacggagcccaagttcaaggggctgcgactggagctggctgtggacaagatggtcacgtgcattgcggtggggctgcccctgctgctcatctcgctggccttcgcgcaggagatctcgattggtacacagataagctgtttctctccaagttctttctcctggcgtcaggctgcctttgtggattcatattgctgggcggctgttcagcagaagaactcactgcagagcgagtctggaaacctcccactgtggctgcataagtttttcccctacatcctgctgctctttgcgatcctcctgtacctgcccccgctgttctggcgtttcgcagctgctcctcatatttgctcagacttgaagtttatcatggaagaacttgacaaagtttacaaccgtgcaattaaggctgcaaagagtgcgcgtgaccttgacatgagagatggagcctgctcagttccaggtgttaccgagaacttagggcaaagtttgtgggaggtatctgaaagccacttcaagtacccaattgtggagcagtacttgaagacaaagaaaaattctaataatttaatcatcaagtacattagctgccgcctgctgacactcatcattatactgttagcgtgtatctacctgggctattacttcagcctctcctcactctcagacgagtttgtgtgcagcatcaaatcagggatcctgagaaacgacagcaccgtgcccgatcagtttcagtgcaaactcattgccgtgggcatcttccagttgctcagtgtcattaaccttgtggtttatgtcctgctggctcccgtggttgtctacacgctgtttgttccattccgacagaagacagatgttctcaaagtgtacgaaatcctccccacttttgatgttctgcatttcaaatctgaagggtacaacgatttgagcctctacaatctcttcttggaggaaaatataagtgaggtcaagtcatacaagtgtcttaaggtactggagaatattaagagcagtggtcaggggatcgacccaatgctactcctgacaaaccttggcatgatcaagatggatgttgttgatggcaaaactcccatgtctgcagagatgagagaggagcaggggaaccagacggcagagctccaagacagtgaaactaaagcaaataatggagagaagaatgcccgacagagacttctggattcttcttgctgatgatttttttccttgagctgtaaatctgtgacttctgcgacatgggatttaatttggctaaagcacccctgttggtttcacagctggtttgcaataaatggttcttggtggagatactgagcatgtcttattgagtccctaatggaaatggtgatcaacaaaaggttatggaagaatggtttatgaacttcccataggaagcacctgagagatagtaaactgcagcaagtaactatgtgtaaagtcctcatcaaatgaaaagcagaaagacaaagaacaattagtcaagagcagtagccctgtcagagcctcggagcaatacctttctgtacccgtggtgagacaagacccagagctactggaaaacaagcactttggaagatttgttttgttttcatggaataataatatgtcaggatataatttaacgtgagtttnttatgtgcccttaaagactgttagacaagaaaagcattcactggctaataatccataggtcgacctatgtcctaagttaggtgtaaggtccgatgccttggcccacactcgagctctctttacattgttagttgtcaaccttggctgatggaaatcccgtaaccactatttgttgcnctgtgccttgaagggcagcaggcccaagtgctgctctgactgaaaactgagttaacaagacgaaatctaaaggatattcacagtgacttcaattcaggaagaatgcttccaaaagagcccagtggggaaatctgacatcacagaagacattaattcagtcactttcaaagagtttgtctacaggcggtttctctgttatcaaaggcatttgaaataggattttacttaaacaataatggaacacaggagtatttaaagtgaagaacactttgcctgaatgtgatcagggcacataagtgacattggcgtgcttcatatggcgtgcttggagccagaaaaacttagcggtttattttgtttatatttaagcacagctttaaaaaattcattatcgtttattcagtgtccgaattgaggccatttgggaagaaaattctagcactggtggagaattatagaataaagattataaatggttggataaaaaaaaaaaaaaaaaaaaaaaa

SEQ ID NO: 1992 - DNA, 1674 bp, Homo sapiens
agttgccttgacctgcagctccggcaccgcggacccgccttctgccctcagcagcagacgctctgtcccgcccgggcagctctgcgaggcagcggctggagagggaaccatggggactgtgcacgcccggagtttggagcctcttccatcaagtggacctgattttggaggattaggagaagaagctgaatttgttgaagttgagcctgaagctaaacaggaaattcttgaaaacaaagatgtggttgttcaacatgttcattttgatggacttggaaggactaaagatgatatcatcatttgtgaaattggagatgttttcaaggccaaaaacctaattgaggtaatgcggaaatctcatgaagcccgtgaaaaattgctccgtcttggaatttttagacaagtggatgttttgattgacacatgtcaaggtgatgacgcacttccaaatgggttagacgttacctttgaagtaactgaattgaggagattaacgggcagttataacaccatggttggaaacaatgaaggcagtatggtacttggcctcaagcttcctaatcttcttggtcgtgcagaaaaggtgacctttcagttttcctatggaacaaaagaaacttcgtatggcctgtccttcttcaaaccacggcccggaaacttcgaaagaaatttctctgtaaacttatataaagttactggacagttcccttggagctcactgcgggagacggacagaggaatgtcagctgagtacagttttcccatatggaagaccagccacactgtcaagtgggaaggcgtatggcgagaactgggctgcctctcaaggacggcgtcatttgctgttcgaaaagaaagcggacattcactgaaatcatctctttcgcacgccatggtcatcgattctcggaattcttccatcttaccaaggagaggtgctttgctgaaagttaaccaggaactggcaggctacactggcggggatgtgagcttcatcaaagaagattttgaacttcagttgaacaagcaactcatatttgattcagttttttcagcgtctttctggggcggaatgttggtacccattggtgataagccgtcaagcattgctgataggttttaccttgggggacccacaagcatccgcggattcagcatgcacagcatcgggccacagagcgaaggagactacctaggtggagaagcgtacttgggccggcgctggcacctctacaccccattacctttccggccaggccagggtggctttggagaacttttccgaacacacttctttctcaacgcaggaaacctctgcaacctcaactatggggagggccccaaagctcatattcgtaagctggctgagtgcatccgctggtcgtacggggccgggattgtcctcaggcttggcaacatcgctcggttggaacttaattactgcgtccccatgggagtacagacaggcgacaggatatgtgatggcgtccagtttggagctgggataaggttcctgtagccgacacccctacaggagaagctctgggactggggcagcagcaaggcgcccatgccacacaccgtctctcgaggaaacgcggttcagcgattctttgactgcggaccctgtgggaaaccccgtcaataaatgttaaagacacactcaaaaaaaaa

SEQ ID NO: 1993 - DNA, 1505 bp, Homo sapiens
gtgttccggccgatcccacctcttctcgaccctggacgtctaccttccggaggcccacatcttgcccactccgcgcgcggggctagcgcgggtttcagcgacgggagccctcaagggacatggcaactacagcggcgccggcgggcggcgcccgaaatggagctggcccggaatggggagggttcgaagaaaacatccagggcggaggctcagctgtgattgacatggagaacatggatgatacctcaggctctagcttcgaggatatgggtgagctgcatcagcgcctgcgcgaggaagaagtagacgctgatgcagctgatgcagctgctgctgaagaggaggatggagagttcctgggcatgaagggctttaagggacagctgagccggcaggtggcagatcagatgtggcaggctgggaaaagacaagcctccagggccttcagcttgtacgccaacatcgacatcctcagaccctactttgatgtggagcctgctcaggtgcgaagcaggctcctggagtccatgatccctatcaaggtggtcaacttcccccagaaaattgcaggtgaactctatggacctctcatgctggtcttcactctggttgctatcctactccatgggatgaagacgtctgacactattatccgggagggcaccctgatgggcacagccattggcacctgcttcggctactggctgggagtctcatccttcatttacttccttgcctacctgtgcaacgcccagatcaccatgctgcagatgttggcactgctgggctatggcctctttgggcattgcattgtcctgttcatcacctataatatccacctccacgccctcttctacctcttctggctgttggtgggtggactgtccacactgcgcatggtagcagtgttggtgtctcggaccgtgggccccacacagcggctgctcctctgtggcaccctggctgccctacacatgctcttcctgctctatctgcattttgcctaccacaaagtggtagaggggatcctggacacactggagggccccaacatcccgcccatccagagggtccccagagacatccctgccatgctccctgctgctcggcttcccaccaccgtcctcaacgccacagccaaagctgttgcggtgaccctgcagtcacactgaccccacctgaaattcttggccagtcctctttcccgcagctgcagagaggaggaagactattaaaggacagtcctgatgacatgtttcgtagatggggtttgcagctgccactgagctgtagctgcgtgagtacctccttgatgcctgtcggcacttctgaaaggcacaaggccaagaactcctggccaggactgcaaggctctgcagccaatgcagaaaatgggtcagctcctttgagaacccctccccacctaccccttccttcctctttatctctcccacattgtcttgctaaatatagacttggtaattaaaatgttgattgaagtctgg

SEQ ID NO: 1994 - DNA, 3926 bp, Homo sapiens
gataacctgccccttacgcctgtcattcagcctggcaggtccttagtgggctagacctacctttctgatgagctgcccgcccccagcgcaagatgattgtttgagaggtaaaaactcttgccaaaaacaacgttaaacttttaatggatgttaacatacttgcatttacaagcagtgaagtttgtcaccttcatgttgttatttatgcagcattaacctttttctccagatcattgagactgaaaatatgatggaccgaattgtgactggcttgtctgagtctagtgtcaaggtgcggttagctgccgtcaggtatgagctttaaatggtctgaataaaaaccttttgccatatatttaacctgttgcctttctggtccttcactgagtaaacacagactacaaatgttcctcaaaaatctgctcaggtgaattcatagagtatataacattgtctaacagagagcctggcctccaaaccccataaagtggtctgatgtagttcacttaacaatgtagatatgcttgaagtgtacattagtcattgtaaaatgccagccagtttgtttgaaaagtaaaagttttgatttcttgtgaagctaattttgattattctttgtagatgtttgcacagtttatccagatctgtgcagcagcttcgaaccagtttccaggatcatgctgtttggaaacctttaatgaaggttttacaaaatgcaccagatgaaatcctagtggtagcatcttccatgctgtgtaatcttcttcttgaattttctccaagcaaagagccaattttggaatcaggagccgtagagctactttgtggattaactcagagtgaaaatcctgctttacgagtgaatggaatttgggctttaatgaatatggcatttcaggctgaacaaaaaataaaagcagatattttacgaagcttgagtactgaacagctattccggttattatcagattcagatttgaatgtgctgatgaagacattgggacttcttagaaatctcctctccactcgtcctcatatagataaaataatgagtactcatggaaagcaaattatgcaagccgtcactcttattctagaaggggaacataacattgaggtcaaagagcagacactgtgcatcttagccaacatagcggatgggacaacagcaaaagatcttattatgaccaatgatgatatcctacagaaaatcaagtattacatgggccattcacatgttaaactgcagcttgcagccatgttttgtatatcaaacctcatatggaatgaagaggaaggttcacaagaacgccaggataaattacgagacatgggcatcgtagatattctacacaaactgagtcagtcaccagattcaaacctttgtgacaaggcaaagatggcactgcagcagtacctggcatgatgggagtgcccctgggcacctgcgagcatcccacctccttgtttaaggaagtacaggaaccagcctcatttgattccttctatttgcacaagtcaccttggactgcagggagctgttttgcaaaagcagtttagtaggcttagatctcaaattcatcttgagaacatttttttgaggtagtaatttcctcagaagactcttgtgttttgttttggtttttttttctgagctactcggactctttattagaacaatcaatcattttcctttggacctacaatttttgcctatgctgcagccactttgtgagtgagaatgaatatgtctgtgtgaacacacaggcatgcgtgtgtatgtgcacgtacatgggccagaatgaatggatgtgtgtgtgtgagggatacctcagatttttcttttcttattttgtgtgaaaatctcttttctacagattttccagggtttaagcattgcttgctgtataaaaaactttactgaattatatacagtttgaatgaaatgttattttaaaaacaaaacaattgttaagtgttccataaaggttatgttgaattttggtcagatgaatatttgtaagtaaaaaatatatgcatttctgaacctcaacttacatagattttctttatataaaaaaaaagaaaaaaaaagaaaaagttggctatagttggcctgattaacaggcactatacatggtgctgtgcaaaatagtaagctagcatcttactgccgtcaatattagcaggtacagagccttttttcatcctaattcagtaagttctcaggcttccaagtcaaatggagaagtaaagtgaggcaacagattcaccataggctttttgaagcatcaaagggaaatataactactgatagtgaaagcccagccatgacccagatgggcttacccttgacaggaactggggaccaagagcctcccaattgccctaactcctgtcattggtattagcaatatctggccagatttagaaccagtcatggaaacttgtgctcaaactaaaagtaggtcatcacttcccagaaacagaataccttgtgcttcctgaaacagcatatatcactgtgaaactaaagaatattctacagacacccctgtagaaagaaacaaagaacaggatagtttagaaagctttctgttagctgtattcagcaaatttcatactagttgctcaggactgctagttggtatgcttttgtaaaacgagattgaaatttaataaaagatgcaactaaaatctttcctgcatgaagctaaaagcactcaagttgagagaggggcaagggaatctccccaggatgactgaagatgacttctttttacagcaagtactgttagcctttctgcaccccttagcttggcccctgctccaacttctgggtcagcagcaaggtgaactcaacagaagttgctcttgactgtttgaaggtagaagcagcctaccttttctctttgctaaaagaaggtcaaaggcttcgcaaccaggatgcaaggtctgcggtccagaagcttgcggtgagtgtgtgccactgatggagctccaagcccacccaccagccactcctgatggggttgctcacactgcagctgccctatcaccaccctgcacgttccttggaagatttaaatgtttggttgcaaatgaatgttttaaaaatgtatttaatgcaatttttcctgctctcaacatgaccacccaagattcaaacacagagacttccaagttactattttttcagaacatcaccgattttaaaatctgtcacaacaggacttggttttgtgcagatatcagagtgctaatgtgagaaacccagttaaaagaaaacttagtttattgggaagaaagcctcaggcccactcgtttctagaactgtgaaaatatccttggttggcatttttaacacaaaacactatagtgttggtattaaatagtactaggtaaatataaagaaaccaataatgaattgctgagacaatcttgaacccaaatagcattagaaagctgaaggcccaatgaaataacactttcacacttaaactctgtggataaattttgcctgtgggtataaacagatggtcaaattaaaaatgctttactataattaacttttctgatttgaatgaagggaaatgtatttattgaaacaaagctgtttgctgctttatgcaggtgcagtgttcagtcagcaaggaagtgggaagagtggacatggtattgtgtctacacccaagttcttaactaagcttctcgctctaatactgcattctgtttctccttttgtgccctgattgtaatccaaaatttatgaactagaaaagaatgtccaatttaataagttgcattttttttttctttaagcactttattcagaacaatacatgttcttctggtagtgtttggataatatgattttaacacatgctaataaaagccaagaaaaatcaaaaaaaaaaaaaaaaaaa

SEQ ID NO: 1995 - DNA, 545 bp, Homo sapiens
cgccgccatccggactcccgggtcctctgtgcaggttggaggatggttggttgtggcgagcgaggctgaaggagccgggacgcggggctctgggcctcgggaactgagccggtactcacctccgccccttctccccgtcgctgtccgcagccatggccctacgctaccctatggccgtgggcctcaacaagggccacaaagtgaccaagaacgtgagcaagcccaggcacagccgacgccgcgggcgtctgaccaaacacaccaagttcgtgcgggacatgattcgggaggtgtgtggctttgccccgtacgagcggcgcgccatggagttactgaaggtctccaaggacaaacgggccctcaaatttatcaagaaaagggtggggacgcacatccgcgccaagaggaagcgggaggagctgagcaacgtactggccgccatgaggaaagctgctgccaagaaagactgagcccctcccctgccctctccctgaaataaagaacagcttgacaggaaaaaaaaaaaaaaaaaaaaaaaaaaaaaa

SEQ ID NO: 1996 - DNA, 3023 bp, Homo sapiens
ccatttaatgtatagtttatttctaggttttccttctgtgtttttagacactgaaatgcctaaatattgatttgtttattattttgtttctttatttttccagctcccggtaaaacacaatttatttctctgaaacctaaaatccctctcagcccagaagtgacacacaccaaacctgctcccaagcagacaccacgtgctcctcctaagccaaaaacatcaccacgcccaagaatcccacaaacacaaccagttcctaaggtgccccagcgtgttactgcaaaaccaaaaacgtcaccaagtccagaagtgtcatacaccacacctgctcctctagagacacgaggcatcccttttatacccatgatttccccaagtcctagtcaagaggaactacagaccactctggaagaaacagaccaatccacccaagaacctttcacaactaagattccacgaacaactgaactagcaaagacaactcaggcgccacacagattttatactactgtgaggcccagaacatctgacaagccacacatcagacctgttctgaataggacaactacaagacctactaggcccaaacccagtgggatgcccagtgggaatggagtgggaacaggggtcaagcaagcacccaggccatcaggtgctgatagaaatgtatcagtggactctacccaccccactaaaaagccagggactcgccgcccacccttgccacccagacctacacacccacgaagaaaacctttaccaccaaataatgtcactggaaagccaggaagtgcaggaatcatttcatcaggcccaataactacaccacccctgaggtcaacacccaggcctactggaactcccttggagagaatagagacagatataaagcaaccaacagttcctgcctctggagaagaactggaaaatataactgactttagctcaagcccaacaagagaaactgatcctcttgggaagccaagattcaaaggacctcatgtgcgatacatccaaaagcctgacaacagtccctgctccattactgactctgtcaaacggttccccaaagaggaggccacagaggggaatgccaccagcccaccacagaacccacccaccaacctcactgtggtcaccgtggaagggtgcccctcatttgtcatcttggactgggaaaagccactaaatgacactgtcactgaatatgaagttatatccagagaaaatgggtcattcagtgggaagaacaagtccattcaaatgacaaatcagacattttccacagtagaaaatctgaaaccaaacacgagttatgaattccaggtgaaacccaaaaacccacttggtgaaggcccggtcagcaacacagtggcattcagtactgaatcagcggacccaagagtgagtgagccagtttctgcaggaagagatgccatctggactgaaagaccctttaattcagactcttactcagagtgtaagggcaaacaatatgtcaaaaggacatggtataaaaaatttgtaggagtgcagctgtgcaactctctcagatacaagatttacttgagcgactccctcacaggaaaattttataacataggtgatcagaggggccatggagaagatcactgccagtttgtggattcatttttagatggacgcactgggcagcaactcacttctgaccagttaccaatcaaagaaggttatttcagagcagttcgccaggaacctgtccaatttggagaaataggtggtcacacccaaatcaattatgttcagtggtatgaatgtgggactacaattcctggaaaatggtagatgctgcacaaagttaccttctgtttcatcattgcaaacaaaaatcattgaaaatactatgccgcattcatttaaagctattttgtttactatgtataaaagtctacaatctaattaatagcaatactagatgtttattattagaaaagattgctgagagtatttatcaggttttacaaagtcattttaagaaagcaagatactgatgttaacagaataacatttttggggaagctggctccctattcatggtattttaagagatcatttgtatattatttatcacactgttgtaatgatgttttgagatacttttataacaaaattaacatcaaaaaggtatatactttttaaaaaaaatttacttttattgatgtgtactcttcctattgatgagttaattccataaatctctacttagtttaacttattggatcaaattatcttcagcatgtatatctggggaaaaaaggtccgaattttcacatttatatttaaacttcaattttttatatttaaacttcaattttttagcaacagctgaatagctttgcggaggagtttaatagttacacattcatgctaatatacatttcctttaaacatccacaaattcttaaaaagattgaatcagtaaatttcatttcagctaaaaatggagtctaatatattgtttcaaaagatacatttttacccaccataaatgttacaatatctgaatatgctttgtcaaactatccctttatgcaatcgtcttcatattgtttttatgattctaatcaagctgtatgtagagactgaatgtgaagtcaagtctgagcacaaaaagataatgcacgatgagattgcctaccattttataggatatttactatgtatttatacgttaagacctctatgaatgaatgtatcagagaatgtctttgtaactgtttaattcaatctgtaataaaaatctaactaactaactcatttatttctattaaaaaggtattgtcctttaggcggggaatgggaatccttgctgcactgttgcagtcattctgaaaggacctttccctgtacttacctttcaacatgcttcaatcttatcaacgctacattttgtatttttcaaacaagtataaattctgcaataaagagatgtagttttttttaaaaaaaaaaaaaaaaaaaaaaaaaaaaaaaaaaaaaaaaaa

SEQ ID NO: 1997 - DNA, 1636 bp, Homo sapiens
gtcagcggggaagctggaaggcgtcgttctcctttcccagctctcctgcctgtccgccatgttttcaggccgggtctggcttggtcttcccccgtaaggaaatggccggggagctccaggggacccaggcgccgtcgcttcggcggagctgggctgaccagccaggacagcggggtaaacccgaacaattctgcgcgaggtagggaggccatggcgtccggcagtaactggctctccggggtgaatgtcgtgctggtgatggcctacgggagcctggacttgaaagaggagattgatattcgactctccagggttcaggatatcaagtatgagccccagctccttgcagatgatgatgctagactactacaactggaaacccagggaaatcaaagttgctacaactatctgtataggatgaaagctctggatgccattcgtacctctgagatcccatttcattctgaaggccggcatccccgttccttaatgggcaagaatttccgctcctacctgctggatctgcgaaacactagtacgcctttcaagggtgtacgcaaagcactcattgatacccttttggatggctatgaaacagcccgctatgggacaggggtctttggccagaatgagtacctacgctatcaggaggccctgagtgagctggccactgcggttaaagcacgaattgggagctctcagcgacatcaccagtcagcagccaaagacctaactcagtcccctgaggtctccccaacaaccatccaggtgacatacctcccctccagtcagaagagtaaacgtgccaagcacttccttgaattgaagagctttaaggataactataacacattggagagtactctgtgacggagctgaaggactcttgccgtagattaagccagtcagttgcaatgtgcaagacaggctgcttgccgggccgccctcggaacatctggcccagcaggcccagactgtatccatccaagttcccgttgtatccagagttcttagagcttgtgtctaaagggtaattccccaacccttccttatgagcatttttagaacattggctaagactattttcccccagtagcgcttttttctggatttgcattcgggtgttattcttaatgtttctgtcaaagcttcttaaaaatcttcacttggtttcagccatagttcaccttccctgttccaggtttatttaattccaaaggtgagagttggagtgagatgtcttccatatctatacctttgtgcacagttgaatgggaactgtttgggtttagggcatcttagagttgattgatggaaaaagcagacaggaactggtgggaggtcaagtggggaagttggtgaatgtggaataacttacctttgtgctccacttaaaccagatgtgttgcagctttcctgacatgcaaggatctactttaattccacactctcattaataaattgaataaaagggaatgttttggcacctgatataatctgccaggctatgtgacagtaggaaggaatggtttcccctaacaagcccaatgcactggtctgactttataaattatttaataaaatgaactattatcaaataaaacgtatgaatcagtaaaaaaaaaaaaaaaaaaaa

SEQ ID NO: 1998 - DNA, 2283 bp, Homo sapiens
cccacgcgtccgcccacgcgtccgagcctgcgcaggaggccaataggctgccaatactccttggactccccgccagggccctgctgtcagtgcgcctgcgcgcgggtccggcgccgaggttcttgactgctgtgccggacgccaggtgtagccatgcagcgagccgattccgagcagccctccaagcgtccccgttgcgatgacagcccgagaaccccctcaaacaccccttccgcagaggcagactggtccccgggcctggaactccatcccgactacaagacatggggtccggagcaggtgtgctccttcctcaggcgcggtggctttgaagagccggtgctgctgaagaacatccgagaaaatgaaatcacaggcgcattactgccttgtcttgatgagtctcgttttgaaaatcttggggtaagttccttgggggagaggaagaagctgcttagttatatccagcgattggttcaaatccacgttgatacaatgaaggtaattaatgatcctatccatggccacattgagctccatcctctcctcgtccgaatcattgatacacctcaatttcaacgtcttcgatacatcaaacagctgggaggtggttactatgtttttccaggagcttcacacaatcgatttgagcatagtctaggggtggggtatctagcaggatgtctagttcacgcactgggtgaaaaacaaccagagctgcagataagtgaacgagatgttctctgtgttcagattgctggactttgtcatgatctcggtcatgggccattttctcacatgtttgatggacgatttattccacttgctcgcccggaggtgaaatggacgcatgaacaaggctcagttatgatgtttgagcaccttattaattctaatggaattaagcctgtcatggaacaatatggtctcatccctgaagaagatatttgctttataaaggaacaaattgtaggaccacttgaatcacctgtcgaagattcattgtggccatataaagggcgtcctgaaaacaaaagcttcctttatgagatagtatctaataaaagaaatggcattgatgtggacaaatgggattattttgccagggactgccatcatcttgggatccaaaataattttgattacaagcgctttattaagtttgcccgtgtctgtgaagtagacaatgagttgcgtatttgtgctagagataaggaagttggaaatctgtatgacatgttccacactcgcaactctttacaccgtagagcttatcaacacaaagttggcaacattattgatacaatgattacagatgctttcctcaaagcaggtgactacatagagattacaggtgctggaggaaaaaagtatcgcatttctacagcaattgacgacatggaagcctatactaagctgacagataacatttttctggagattttatactctactgatcccaaattgaaagacgcacgagagattttaaaacaaattgaataccgtaatctattcaagtatgtgggtgagacgcagccaacaggacaaataaagattaaaagggaggactatgaatctcttccaaaagaggttgccagtgctaaacccaaagtattgctagacgtgaaactggaggctgaagattttatagtggatgttatcaacatggattatggaatgcaagaaaagaatccaattgatcatgttagcttctattgtaagactgcccccaacagagcaatcaggattactaaaaaccaggtttcacaacttctgccagagaaatttgcagagcagctgattcgagtatattgtaagaaggtggacagaaagagtttgtatgccgcaagacaatattttgttcagtggtgtgcagacagaaatttcaccaagccgcaggatggcgatgttatagccccactcataacgcctcaaaaaaaggaatggaacgacagtacttcagtccaaaatccaactcgcctccgagaagcatccaaaagcagagtccagctttttaaagatgacccaatgtgaatgtctgtagtcagttgtttacaaactccctctcctgcacaattcatttagaggcttcaatcatagaattctgcaaattaatgacaactcatgccttaattttgtattttgaatgtacacgcatgctgaagctaagtaacttttaatcaaagaaataagatggtattaggcaaatcttactatactatgaaaagcattaccttgcctatttttaatattattaaagcctttctccttcgaaaaaaaaaa

SEQ ID NO: 1999 - DNA, 1344 bp, Homo sapiens
agagagaaaggttgtgatggcggctatagctgcatccgaggtgctggtggacagcgcggaggaggggtccctcgctgcggcggcggagctggccgctcagaagcgcgaacagagactgcgcaaattccgggagctgcacctgatgcggaatgaagctcgtaaattaaatcaccaggaagttgtggaagaagataaaagactaaaattacctgcaaattgggaagccaaaaaagctcgtttggagtgggaactaaaggaagaggaaaagaaaaaggaatgtgcggcaagaggagaagactatgagaaagtgaagttgctggagatcagtgcagaagatgcagaaagatgggagaggaaaaagaagaggaaaaaccctgatctgggattttcagattatgctgctgcccagttacgccagtatcatcggttgaccaagcagatcaaacctgacatggaaacatatgagagactgagagaaaaacatggagaagagtttttcccaacatccaatagtcttcttcatggaacacatgtgccttccacagaggaaattgacaggatggtcatagatctggaaaaacagattgaaaaacgagacaaatatagccggagacgtccttataatgatgatgcagatatcgactacattaatgaaaggaatgccaaattcaacaagaaagctgaaagattctatgggaaatacacagctgaaattaaacagaatttggaaagaggaacagctgtctaatcccttcaagaactgtttatagaagcttgagaatggggtaaaaatttctgctagcaaaatcaagttctttttgaaattttatcagtaatccagaatttagtagtccatgccttctcactcagcatttagaaataaaaatgtggtttcttaaacgtatatcctttcatgtatatttccacatttttgtgcttggatataagatgtatttcttgtagtgaagttgttttgtaatctactttgtatacattctaattatattatttttctatgtattttaaatgtatatggctgtttaatctttgaagcattttgggcttaagattgccagcagcacacatcagatgcagtcattgttgctatcagtgtggaatttgatagagtctagactcgggccacttggagttgtgtactccaaagctaaggacagtgatgaggaagatggcagtggccaccggaggactggagcagtccctcctcatggcggcctgtgaccaaggtcggggaggagtggagctatccttccatgatctgatcatgtacagttccctttttaaaaagcaataaatgcttgggattagaatttctaaaaaaaaaaa

SEQ ID NO: 2000 - DNA, 1093 bp, Homo sapiens
aggcggtggggcccacagccatggcggagcctgtgcaggaggagctctcggtcctggccgcgattttctgcaggccccacgagtgggaggtgctgagccgctcagagacagatgggaccgtgttcagaattcacacaaaagctgaaggatttatggatgcggatatacctctggaattggtgttccatttgccagtcaattatccttcatgtctacctggtatctcgattaactctgaacagttgaccagggcccagtgtgtgactgtgaaagagaagttacttgagcaagcagagagccttttgtcggagcctatggttcatgagctggttctctggattcagcagaatctcaggcatatcctcagccaaccagaaactggcagtggcagtgaaaagtgtactttttcaacaagcacgaccatggatgatggattgtggataactcttttgcatttagatcacatgagagcaaagactaaatatgtcaaaattgtggagaagtgggcttcagatttaaggctgacaggaagactgatgttcatgggtaaaataatactgattttactacagggagacagaaacaacctcaaggtgccaaaaagttaaatgtttctggcatttgaagtcaaagagtattcagcgttggatgaattacaaaaggaatttgaaactgcaggacttaagaagcttttctccgaatttgtacttgctctggtaaaatgaaatggaagacaggaatcttttagtaaaatagcagtgttttttgttgtttttgcattggatttggggagtggttaattgaaatagtcaattttaaagtttctctgaagcaaaatgataggcatcattctaacttcaggaacaaaagccagttctgttttatgaaatattaaacatgaagaaaacttgtatattctaatgtttgccaggaaaggctaggttcagtagatgagacattatttaaaagataaatttaaaaagatggtaaatgaacacttgtttttatagacaatatttgtttgaaactatgtaattttctggctaattttcttgtaattaaatgattttttaaaaaaaaaaaaaaaaaaaaa

SEQ ID NO: 2001 - DNA, 3802 bp, Homo sapiens
ggaatcctcaaatataagtgaaggggaaatagaaaggcttattaacctcctagaagaagtttttcatttaatggaaactgcccctcatacaatgatccaacaacctgttaagtctttcccaacgatggcacgaattactggacctccagagagggatgatccgtaccctgttctctttagatatcttcacagtcatcacttcttggagttggttaccttgcttctgtcaattccagtaacaagtgctcaccctggtgtgctgcaagccacaaaagatgttttgaagtttcttgcacagtcacagaagggtcttcttttttttatgtcggaatatgaagcaacaaatttattgatccgagctctgtgtcacttttatgatcaagatgaggaggaaggtctccaatctgatggtgttattgatgatgcatttgccttgtggctacaggactcaacacagacattgcagtgtattacagaactgttcagccattttcagcgttgtacagccagtgaagaaacagaccattcagatctcttgggaaccctgcacaatctttatttgattacttttaatcctgtgggaagatcagctgttggccatgtttttagtctggagaaaaatctccaaagtcttattactctaatggagtactattccaaagaagccttgggtgattccaaatctaagaagtcagtagcttataattacgcatgcatacttattttggtggtggttcagtcttccagtgatgttcaaatgctagaacaacatgcagcatctctcttgaagctttgtaaagcagatgaaaataatgctaaattgcaagaacttggcaagtggcttgaacctctgaaaaaccttagatttgaaattaactgcatcccaaacttaattgagtatgttaagcagaatatcgataacttgatgaccccagaaggagttggccttaccactgccttacgtgttctctgtaatgttgcatgcccaccacctcctgttgaaggtcaacagaaagatctgaaatggaatcttgccgttattcagcttttttctgctgaaggaatggacacgtttattcgagttctgcaaaaattgaacagtattctgactcagccttggaggctccatgtcaacatggggactacccttcacagagttactactatttcaatggctcgctgcacactcactcttcttaaaactatgttaacggaactcctgagaggtggatcctttgagtttaaggacatgcgtgttccttcagcgcttgttactttacatatgctcctgtgctctatccccctctcaggtcgtttggatagtgatgaacagaaaattcagaatgatatcattgatattttactgacttttacacaaggagttaatgaaaaactcacaatctcagaagagactctggccaataatacttggtctttaatgttaaaagaagttctttcttcaatcttgaaggttcctgaaggatttttttctggactcatactcctttcagagctgctgcctcttccattgcccatgcaaacaactcaggttattgagccacatgatatatcagtggcactcaacacccgaaaattgtggagcatgcaccttcatgttcaagcaaagttgctccaagaaatagttcgctctttctctggcacaacctgccagcccattcaacatatgttacggcgtatttgtgttcaattgtgtgaccttgcctcaccaactgcacttctgattatgagaactgtgttggatttgattgtagaagacttgcaaagcacttcagaagataaagaaaaacagtatactagccaaaccaccaggttgcttgctcttcttgatgctctggcttcacacaaagcttgtaaattagctattttgcatctaattaatggaactattaaaggtgatgaaagatatgcagagatattccaggatcttttagctttggtgcggtctcctggagacagtgttattcgccaacagtgtgttgaatatgtcacatccattttgcagtctctctgtgatcaggacattgcacttatcttaccaagctcttctgaaggttctatttctgaactggagcagctctccaattctctaccaaataaagaattgatgacctcaatctgtgactgtctgttggctacgctagctaactctgagagcagttacaactgtttactgacatgtgtcagaacaatgatgtttcttgcagagcatgattatggattatttcatttaaaaagttctttaaggaaaaacagtagtgctctgcatagtttactgaaacgagtggtcagcacatttagtaaggacacaggagagcttgcatcttcatttttagaatttatgagacaaattcttaactctgacacaattggatgctgtggagatgataatggtctcatggaagtagagggagctcatacatcacggacgatgagtattaatgctgcagagttaaaacagcttctacaaagcaaagaagaaagtccagaaaatttgttccttgaactagagaagcttgttttggaacattcaaaagatgatgacaatctggattctttgttggacagtgtagttggacttaagcagatgctggagtcatcaggtgaccctttacctctcagtgaccaggatgtagaaccagtactttcagctccagaatctcttcagaatctgtttaacaataggactgcctatgtgcttgctgatgtcatggatgatcagttgaaatctatgtggttcactccatttcaggctgaagagatagatacagatctggatttggtaaaggttgacttaattgaactctctgaaaaatgctgtagtgactttgatttgcactcagaattagagcgctcatttttgtcagaaccatcatctccaggaagaaccaagactactaaaggattcaaacttgggaagcacaagcatgagacctttataacgtcaagtggaaaatctgaatacattgaacctgccaaaagagctcatgttgtgccaccaccaagaggaaggggcaggggaggatttggacagggtatacgacctcatgatatttttcgtcagagaaaacagaacacaagtagaccaccatctatgcatgtggatgactttgttgctgctgaaagtaaagaagtggttcctcaagatggaatacctccaccaaaacggccactcaaagtatcacagaagatttcttcccgtggtgggttttcaggcaatagaggaggacggggtgctttccacagtcagaataggtttttcacaccacctgcttcaaaaggaaactacagtcgtcgggaaggaacaagaggctccagttggagtgctcagaatactcctcgaggaaattacaatgaaagtcgtggaggccagagcaattttaacagaggccctcttccaccattacgaccccttagttctacaggttaccgcccaagtcctcgggaccgtgcttctagaggtcgtgggggacttggaccttcctgggctagtgcaaatagcggcagtggaggctcaagaggaaagtttgttagtggaggcagtggtagaggtcgtcatgtacgctcctttacacgataaaaatccttttgggaacatcttaactgtatatgaacatttcacgaggacaataaaaataagacattgaaggaccaatttagacttagcagttatctggagacatctgagagaatatttttatctgaagaaagcagaatttgtttgatacctaacaagatttcaataaaaatccaaactttgtatgtaaaaaaaaaaaaaaaaaaa

SEQ ID NO: 2002 - DNA, 1287 bp, Homo sapiens
cccacgcgtccggatgaagttgattgactatggtctctccggctaccaggaagagtctgccgaaggtgaaggccatggacttcatcacctccacagccatcctgcccctgctgttcggctgcctgggcgtcttcggcctcttccggctgctgcagtgggtgcgcgggaaggcctacctgcggaatgctgtggtggtgatcacaggcgccacctcagggctgggcaaagaatgtgcaaaagtcttctatgctgcgggtgctaaactggtgctctgtggccggaatggtggggccctagaagagctcatcagagaactcaccgcttctcatgccaccaaggtgcagacacacaagccttacttggtgaccttcgacctcacagactctggggccatagttgcagcagcagctgagatcctgcagtgctttggctatgtcgacatacttgtcaacaatgctgggatcagctaccgtggtaccatcatggacaccacagtggatgtggacaagagggtcatggagacaaactactttggcccagttgctctaacgaaagcactcctgccctccatgatcaagaggaggcaaggccacattgtcgccatcagcagcatccagggcaagatgagcattccttttcgatcagcatatgcagcctccaagcacgcaacccaggctttctttgactgtctgcgtgccgagatggaacagtatgaaattgaggtgaccgtcatcagccccggctacatccacaccaacctctctgtaaatgccatcaccgcggatggatctaggtatggagttatggacaccaccacagcccagggccgaagccctgtggaggtggcccaggatgttcttgctgctgtggggaagaagaagaaagatgtgatcctggctgacttactgccttccttggctgtttatcttcgaactctggctcctgggctcttcttcagcctcatggcctccagggccagaaaagagcggaaatccaagaactcctagtactctgaccagccagggccagggcagagaagcagcactcttaggcttgcttactctacaagggacagttgcatttgttgagactttaatggagatttgtctcacaagtgggaaagactgaagaaacacatctcgtgcagatctgctggcagaggacaatcaaaaacgacaacaagcttcttcccagggtgaggggaaacacttaaggaataaatatggagctggggtttaacactaaaaactagaaataaacatctcaaacagtaaaaaaaaaaaaaaa

SEQ ID NO: 2003 - DNA, 2331 bp, Homo sapiens
tggcagcgacgcggtgaggagacggcccacggcgcccgcgggctggggcggtcgcttcttccttctccgtggcctacgagggtctggatccttccctgccggctcgtgggccgtgcctttgcccttctgcgaggccctgaatctgatcccttcccttcatatccggatccgggctcctccctccaagcccggggttccggacacctcccccaagacaacccctctggcctcctctccttcagtacttggaatctgatctcttctccctaattctgcggatccggcccctaatattctttatcagaccctcagacaagaggctgacttctgcccccttgtcaaggagcgaggccactttcctctccaccccatgctagcgaggataacttatttctcttctggaattgcatcttatgcgcctttccccacccatccccacagcccctgcaatacccagtttggcctcttttgcttgtaataacgcagatcccagcgccacggcaccttagaacagacctttttctttctcgcgtggggcctgactccttcagtgaagcctctccacgccctctatctgcaggtccccagcctgggtaaagatggccccatggcccccgaagggcctagtcccagctgtgctctggggcctcagcctcttcctcaacctcccaggacctatctggctccagccctctccacctccccagtcttctcccccgcctcagccccatccgtgtcatacctgccggggactggttgacagctttaacaagggcctggagagaaccatccgggacaactttggaggtggaaacactgcctgggaggaagagaatttgtccaaatacaaagacagtgagacccgcctggtagaggtgctggagggtgtgtgcagcaagtcagacttcgagtgccaccgcctgctggagctgagtgaggagctggtggagagctggtggtttcacaagcagcagggggccccggacctcttccagtggctgtgctcagattccctgaagctctgctgccccgcaggcaccttcgggccctcctgccttccctgtcctgggggaacagagaggccctgcggtggctacgggcagtgtgaaggagaagggacacgagggggcagcgggcactgtgactgccaagccggctacgggggtgaggcctgtggccagtgtggccttggctactttgaggcagaacgcaacgccagccatctggtatgttcggcttgttttggcccctgtgcccgatgctcaggacctgaggaatcaaactgtttgcaatgcaagaagggctgggccctgcatcacctcaagtgtgtagacattgatgagtgtggcacagagggagccaactgtggagctgaccaattctgcgtgaacactgagggctcctatgagtgccgagactgtgccaaggcctgcctaggctgcatgggggcagggccaggtcgctgtaagaagtgtagccctggctatcagcaggtgggctccaagtgtctcgatgtggatgagtgtgagacagaggtgtgtccgggagagaacaagcagtgtgaaaacaccgagggcggttatcgctgcatctgtgccgagggctgcaagcagatggaaggcatctgtgtgaaggagcagatcccagagtcagcaggcttcttctcagagatgacagaagacgagttggtggtgctgcagcagatgttctttggcatcatcatctgtgcactggccacgctggctgctaagggcgacttggtgttcaccgccatcttcattggggctgtggcggccatgactggctactggttgtcagagcgcagtgaccgtgtgctggagggcttcatctagggcagataatcgcggccaccacctgtaggacctcctcccacccacgctgcccccagagcttgggctgccctcctgctggacactcaggacagcttggtttatttttgagagtggggtaagcacccctacctgccttacagagcagcccaggtacccaggcccgggcagacaaggcccctggggtaaaaagtagccctgaaggtggataccatgagctcttcacctggcggggactggcaggcttcacaatgtgtgaatttcaaaagtttttccttaatggtggctgctagagctttggcccctgcttaggattaggtggtcctcacaggggtggggccatcacagctccctcctgccagctgcatgctgccagttcctgttctgtgttcaccacatccccacaccccattgccacttatttattcatctcaggaaataaagaaaggtcttggaaagttaaaaaaaaaaaaaaaaaaaa

SEQ ID NO: 2004 - DNA, 1113 bp, Homo sapiens
ggggcgacgtttagcgactattgcgcctgcgccagcgccggctgcgagactggggccgtggctgctggtcccgggtgatgctaggcggctccctgggctccaggctgttgcggggtgtaggtgggagtcacggacggttcggggcccgaggtgtccgcgaaggtggcgcagccatggcggcaggggagagcatggctcagcggatggtctgggtggacctggagatgacaggattggacattgagaaggaccagattattgagatggcctgtctgataactgactctgatctcaacattttggctgaaggtcctaacctgattataaaacaaccagatgagttgctggacagcatgtcagattggtgtaaggagcatcacgggaggtctggccttaccaaggcagtgaaggagagtacaattacattgcagcaggcagagtatgaatttctgtcctttgtacgacagcagactcctccagggctctgtccacttgcaggaaattcagttcatgaagataagaagtttcttgacaaatacatgccccagttcatgaaacatcttcattatagaataattgatgtgagcactgttaaagaactgtgcagacgctggtatccagaagaatatgaatttgcaccaaagaaggctgcttctcatagggcacttgatgacattagtgaaagcatcaaagagcttcagttttaccgaaataacatcttcaagaaaaaaatagatgaaaagaagaggaaaattatagaaaatggggaaaatgagaagaccgtgagttgatgccagttatcatgctgccactacatcgttatctggaggcaacttctggtggtttttttttctcacgctgatggcttggcagagcaccttcggttaacttgcatctccagattgattactcaagcagacagcacacgaaatactatttttctcctaatatgctgtttccattatgacacagcagctcctttgtaagtaccaggtcatgtccatcccttggtacatatatgcatttgcttttaaaccatttcttttgtttaaataaataaataagtaaataaagctagttctattgaaatgcaaaaaaaaaaaaaaaaaaaaa

SEQ ID NO: 2005 - DNA, 4943 bp, Homo sapiens
gcgaaaacaaaaatgccgcctaattggtcactggccctttctcatgaatgaaggaggtttctgttttaagaaataaagtgactcctcagccgttgattcactgcccacagggagattttgagcagaggcttcctaggctccgtagaaatttgcatacagcttccacttcctgcttcagagcctgttcttctacttacctgggcccggagaaggtggagggagacgagaagccgccgagagccgactaccctccgggcccagtctgtctgtccgtggtggatctaagaaactagaatgaaccgaagcattcctgtggaggttgatgaatcagaaccatacccaagtcagttgctgaaaccaatcccagaatattccccggaagaggaatcagaaccacctgctccaaatataaggaacatggcacccaacagcttgtctgcacccacaatgcttcacaattcctccggagacttttctcaagctcactcaaccctgaaacttgcaaatcaccagcggcctgtatcccggcaggtcacctgcctgcgcactcaagttctggaggacagtgaagacagtttctgcaggagacacccaggcctgggcaaagctttcccttctgggtgctctgcagtcagcgagcctgcgtctgagtctgtggttggagccctccctgcagagcatcagttttcatttatggaaaaacgtaatcaatggctggtatctcagctttcagcggcttctcctgacactggccatgactcagacaaatcagaccaaagtttacctaatgcctcagcagactccttgggcggtagccaggagatggtgcaacggccccagcctcacaggaaccgagcaggcctggatctgccaaccatagacacgggatatgattcccagccccaggatgtcctgggcatcaggcagctggaaaggcccctgcccctcacctccgtgtgttacccccaggacctccccagacctctcaggtccagggagttccctcagtttgaacctcagaggtatccagcatgtgcacagatgctgcctcccaatctttccccacatgctccatggaactatcattaccattgtcctggaagtcccgatcaccaggtgccatatggccatgactaccctcgagcagcctaccagcaagtgatccagccggctctgcctgggcagcccctgcctggagccagtgtgagaggcctgcaccctgtgcagaaggttatcctgaattatcccagcccctgggaccaagaagagaggcccgcacagagagactgctcctttccggggctttcaaggcaccaggaccagccacatcaccagccacctaatagagctggtgctcctggggagtccttggagtgccctgcagagctgagaccacaggttccccagcctccgtccccagctgctgtgcctagaccccctagcaaccctccagccagaggaactctaaaaacaagcaatttgccagaagaattgcggaaagtctttatcacttattcgatggacacagctatggaggtggtgaaattcgtgaactttttgttggtaaatggcttccaaactgcaattgacatatttgaggatagaatccgaggcattgatatcattaaatggatggagcgctaccttagggataagaccgtgatgataatcgtagcaatcagccccaaatacaaacaggacgtggaaggcgctgagtcgcagctggacgaggatgagcatggcttacatactaagtacattcatcgaatgatgcagattgagttcataaaacaaggaagcatgaatttcagattcatccctgtgctcttcccaaatgctaagaaggagcatgtgcccacctggcttcagaacactcatgtctacagctggcccaagaataaaaaaaacatcctgctgcggctgctgagagaggaagagtatgtggctcctccacgggggcctctgcccacccttcaggtggttcccttgtgacaccgttcatccccagatcactgaggccaggccatgtttggggcccttgttctgacagcattctggctgaggctggtcggtagcactcctggctggtttttttctgttcctccccgagaggccctctggcccccaggaaacctgttgtgcagagctcttccccggagacctccacacaccctggctttgaagtggagtctgtgactgctctgcattctctgcttttaaaaaaaccattgcaggtgccagtgtcccatatgttcctcctgacagtttgatgtgtccattctgggcctctcagtgcttagcaagtagataatgtaagggatgtggcagcaaaaggaaatgactacaaacactctcctatcaatcacttcaggctacttttatgagttagccagatgcttgtgtatcctcagaccaaactgattcatgtacaaataataaaatgtttactcttttgtaagattatgttttacttatctcaaaggagatacatataatttataatgatatgggcagttgcttccagggacatcaacaaagctgcttagatataatattagataaatataacagaccactctgtattaatggattaaagccagctagttaaacaaccctttttaaccataatcatggaagctttattcttgcaataaagatttttaggctgggcgcagtggctcacacctgtaatcccagcactttgggaagctaaggcaggcagatcatttgaggtcaggagtttgagaccagcctggccaacatggtgaaaccccatctctgctaaaattacaagaaagttagccgggcatggtggtgtgcacctgtaatcccagctactcgggaggctgaggcaggagaatcacttgaacccgggaggcagaggttgcagtgagccgagatcatgtcactgcactctagcttgggagacagagcgagactccgtctcaaaaaacaaacaaacaaataaaacacccatttttaacaaaacaactttatatagcatacagccatgattctaaatagtatgattatggttctcaggatctgactacataggtaaaaatatttgcatatgtgtatgaagtgttgggggatgtaggctagaattgtagtctgtgttctaattttggttctaccaccaattagctgtatgacctttagcaagtcctttaacttttcttagattccagggactcatttataaaatgacatggacaaaagcatctctaatcactctaaaagatttgaagtctaggacctaaattctaaatactcttttgaggagtgactgagttttcattttcataattatgtctctcagaggacaaatttacattttcttaacagagacattttcttcttctttttttttgtttgagacagagtctcgctctgtcgtccaggctggagtgcagtgctgcaatcttggctcactgcaacctgcgcctcctgggttcaagtgattcttctgcctcaacctcccaagtagctagacctataggcgcctgccaccatgcccagctaatttttgtatttttagtagagacagggtttcatattggccagactggtctcgaactcctgaccttgtgatccgcccacctcggcctcccaaagtgctgggattacaggtgtgagccaccacacccagccaacattttcctcttttaaaaaatatcttctcacgcctgtaatcccagcactttgggaggctgaggcaggcggatcatgaggtcaggagatcaagaccatcctggctaacacggtgaaactccatctctactaaaaatacaaaaaaaatagccgggcgtggtggcaggcgcctgtagtcccagctactggggaggctgaggcaggaaaatggtgtcaacccgggaggcggagcttgcagtgagccgagattgcgccactgcactccagcctgggcaatagagtgagactccgtctcaaaaaaaaaaaaaaaaaaaaaaacttcaacaataccctcaggttgataattttggatatctatctgtatctatatatcttgtttacctggtctccagaaaaagaacacatacacatatccatatataaaatatgtatacatgtatcaaatctacgtaaactataaaggtgggatggctttaattatggcccaagctactaagacaatgaagactttttggggctgcaagctactgcttcccttctttatctactagcctcttaaacaaggctcacttgtgctacaagacagtccaccgttttgttttttttttcttttttttgagacagggtctcactctttcccaggctgcagtacagtgacacagtctcagctcactgcagctttgaccttgccgggctcaggtgacccttacacttcagcctcccaagtagcagggactataggtgtgcaccaacatgcttggttaatttttgtattttttgtagagacagggttttgccatgttgtccaggctagtctcgaattcctgggctcaagtgattcacctgccttggcctcccaaagtgctaggattacagatgggagccaccacgcccagcccagtccagctcttatatgtagcacagggaaaggacaaatacttgtcaactataaataagaaacattgctaatgcattgcaaagaacactagtttcatttactttataacttagatgtctactgggtgagacgaatgtctttgttctttaaaaaataggaaaagagaagaaaaactagcataacataagtactcatttgtaagactttctgacatgtaacattagttccgtagttttgagacctggtagaactgactttcatatttggataacctggaaaacacccaaacacaaacttcaagtcttctttctcttttttcattatcttttttagtctgaggtgacaccatcattaaggattcgacacccgtttgtaaataaaatgacatcag

SEQ ID NO: 2006 - DNA, 1723 bp, Homo sapiens
agcggcggaggccagagggaggagaggaccggaagtccttcatctcaagcatccaatgctgaaagcggcctgattttctctaccggaagcccttttccagaggctgggaacacggcccacctagcaggaagtcccacctccttgagctccgccacccttcccgaagtttttctgtcacctgtgttaggctccgtcccctttccgcgttttatccccgtaccagaaaaggatacatttagtgcctcccacccagctccactaaacgggttggatatctcattctttgagttggtgttccttccccggcgcccccatgtagctgggaagtgggacctgggggtggttggacccctgggatcctaaaggaggggcagggagggcgcagaactccgcttctgctccttgctaccaggacgcgcggcctcctcagcctctttcctcccgctgccatgcaccctgcagccttcccgcttcctgtggttgtggccgctgtgctgtggggagcggccccgacccgggggctcattcgagcgacctcggaccacaatgccagcatggactttgcagaccttccagctctgtttggggctaccttgagccaggagggcctccaggggttccttgtggaggctcacccagacaatgcctgcagccccattgccccaccacccccagccccggtcaatgggtcagtctttattgcgctgcttcgaagattcgactgcaactttgacctcaaggtcctaaatgcccagaaggctggatatggtgccgctgtagtacacaatgtgaattccaatgaacttctgaacatggtgtggaatagtgaggaaatccagcagcagatctggatcccgtctgtatttattggggagagaagctccgagtacctgcgtgccctctttgtctacgagaagggggctcgggtgcttctggttccagacaataccttccccttgggctattacctcatccctttcacagggattgtgggactgctggttttggccatgggagcagtaatgatagctcgttgtatccagcaccggaaacggctccagcggaatcgacttaccaaagagcaactgaaacagattcctacacatgactatcagaagggagaccagtatgatgtctgtgccatttgcctggatgaatatgaggatggggacaagctgcgggtactcccctgtgctcatgcctaccacagccgctgcgtggacccctggctcactcagacccggaagacctgccccatttgcaagcagcctgttcatcggggtcctggggacgaagaccaagaggaagaaactcaagggcaagaggagggtgatgaaggggagccaagggaccaccctgcctcagaaaggaccccacttttgggttctagccccactcttcccacctcctttggttccttagccccagctccccttgtttttcctgggccttcaacagatcccccactgtcccctccctcttcccctgttatcctggtctaataaccccccacacatacacctctggtgacctatttgcacagaccgtcgtcttccctccagtcttctgagggataggggacattccatcccaagcttctcccttacccacacctatccttttgaggggctttggggtggagctggggcaagcagagggactgggtcttcacttcttgggctaataaaattgtttctttgtggactaaaaaaaaaaaaaaaaa

SEQ ID NO: 2007 - DNA, 1723 bp, Homo sapiens; identical to SEQ ID NO: 2006

SEQ ID NO: 2008 - DNA, 1560 bp, Homo sapiens
ggcaggcccgcgcccgcgcccggactttgccatcggcggggcagtcgcgggatgcgcccgggagccacagcctgaggccctcaggtctctgcaggtgtcgtggaggaacctagcacctgccatcctcttccccaatttgccacttccagcagctttagcccatgaggaggatgtgaccgggactgagtcaggagccctctggaagcatggagactgtggtgattgttgccataggtgtcctggccaccatctttctggcttcgtttgcagccttggtgctggtttgcaggcagcgctactgccggccgcgagacctgctgcagcgctatgattctaagcccattgtggacctcattggtgccatggagacccagtctgagccctctgagttagaactggacgatgtcgttatcaccaacccccacattgaggccattctggagaatgaagactggatcgaagatgcctcgggtctcatgtcccactgcattgccatcttgaagatttgtcacactccgacagagaagcttgttgccatgacaatgggctctggggccaagatgaagacttcagccagtgtcagcgacatcattgtggtggccaagcggatcagccccagggtggatgatgttgtgaagtcgatgtaccctccgttggaccccaaactcctggacgcacggacgactgccctgctcctgtctgtcagtcacctggtgctggtgacaaggaatgcctgccatctgacgggaggcctggactggattgaccagtctctgtcggctgctgaggagcgtttggaagtccttcgagaagcagccctagcttctgagccagataaaggcctcccaggccctgaaggcttcctgcaggagcagtctgcaatttagtgcctacaggccagcagctagccatgaaggcccctgccgccatccctggatggctcagcttagccttctactttttcctatagagttagttgttctccacggctggagagttcagctgtgtgtgcatagtaaagcaggagatccccgtcagtttatgcctcttttgcagttgcaaactgtggctggtgagtggcagtctaatactacagttaggggagatgccattcactctctgcaagaggagtattgaaaactggtggactgtcagctttatttagctcacctagtgttttcaagaaaattgagccaccgtctaagaaatcaagaggtttcacattaaaattagaatttctggcctctctcgatcggtcagaatgtgtggcaattctgatctgcattttcagaagaggacaatcaattgaaactaagtaggggtttcttcttttggcaagacttgtactctctcacctggcctgtttcatttatttgtattatctgcctggtccctgaggcgtctgggtctctcctctcccttgcaggtttgggtttgaagctgaggaactacaaagttgatgatttcttttttatctttatgcctgcaattttacctagctaccactaggtggatagtaaatttatacttatgtttccctaaaaaaaaaaaaaaaaaaaa

SEQ ID NO: 2009 - DNA, 4210 bp, Homo sapiens
atggcggccggcaagagcggcggtagcgcaggggagattacttttctggaagctttggctagatcagagtctaagagagatggaggttttaaaaataattggagctttgatcatgaagaagaaagtgaaggagatacagataaagatgggacaaatctgctcagtgtggatgaagatgaggattctgaaacctcaaaaggaaaaaagttaaatcgtcgatctgaaattgttgctaatagctctggtgaattcatcttgaagacatatgtaagacgaaacaagtctgaaagttttaaaactttgaaaggcaacccaattggacttaacatgttgagcaacaataagaaattgagtgaaaatatgcaaaatacgtcattatgttctggaactgtagttcatggtagacgttttcatcatgctcatgcacagataccagtagtaaaaacagcagcccaaagcagtctggaccgaaaagaaaggaaagaatacccacctcatgtccaaaaagttgaaattaatcctgtaaggttaagtcggctccaaggtgttgaacgtataatgaagaaaacagaagagtccgaatcacaagtggagcctgaaattaagaggaaagtacaacagaaacggcactgtagtacctatcagcctactcctcctctatctcctgcttcaaaaaaatgtttaacccatttagaggatttgcaaagaaattgcagacaagctattactttgaatgagtctactggaccattattaagaacgtcaattcatcagaattctggaggacagaagtcacaaaacacaggattaacaaccaagaagttttatggcaacaatgtggaaaaggttccaattgatattattgtgaattgtgatgacagtaaacacacttatttacagactaatggaaaagtcattttacctggggcaaaaatacccaaaatcacaaacttgaaagaaaggaaaacaagtttgtcagacctaaatgatccaatcattttgtccagtgatgatgatgatgacaacgacagaactaacagaagagaaagcatatctcctcagcctgctgattcagcatgttcttcccctgcaccatccactggaaaagtagaagcagcactaaatgaaaatacttgcagagcagagcgtgaactacgaagcattccagaagactcagagttaaatacagttacattgccaagaaaagcaagaatgaaagaccagtttggcaattctattatcaacacacctctgaaacgtcgtaaagtgttttctcaagaacctccagatgctttagctttaagctgccaaagttcctttgacagtgtcattttaaactgtcgaagtatacgagtaggaacactcttccggctgttaatagagcctgtaattttttgtttagattttatcaagatacagctagacgaaccagaccatgatcctgtagagattatattaaatacctctgatctaactaaatgtgaatggtgtaatgtccgaaaattacctgtagtgtttcttcaagcaattccagcagtttatcaaaagctgagcatccaactgcaaatgaataaggaggataaagtttggaatgattgtaaaggagtaaataaattaacaaatttagaagaacaatatataattttaatttttcaaaatggccttgatcctccggcaaatatggtatttgaaagtatcattaatgaaattggtataaagaataacatctccaatttttttgcgaaaattccctttgaagaagctaatggcagacttgttgcctgtacaagaacctatgaagagagcatcaaaggaagttgtgggcaaaaggaaaacaaaattaaaactgtatcatttgaatctaaaatacaacttagaagcaaacaagaatttcagttttttgatgaagaagaagaaactggagaaaaccacaccatcttcattggcccagtagaaaagttgatagtatatccaccacctccagctaagggaggcatctctgttaccaatgaggacctgcactgtctaaatgaaggagaatttttaaatgatgttattatagacttttatttgaaatacttggtgcttgaaaaactgaagaaggaagacgctgaccgaattcatatattcagttcttttttctataaacgccttaatcagagagagaggagaaatcatgaaacaactaatctgtcaatacagcaaaaacggcatgggagagtaaaaacatggacccggcacgtagatatttttgagaaggattttatttttgtaccccttaatgaagctgcacactggtttttggctgttgtttgtttccccggtttggaaaaaccaaagtatgaacctaatcctcattaccatgaaaatgctgtcatacagaaatgttcaactgtagaggacagttgtatttcttcttcagccagtgaaatggagagttgttcacaaaactcttctgccaagcctgtaattaagaagatgctaaacaaaaaacattgcatagctgtaattgattccaatcctgggcaggaagaaagtgaccctcgttataagagaaacatatgcagtgtaaaatacagtgtgaaaaaaataaatcatactgcgagtgaaaatgaagaattcaataaaggagaatctacatcccagaaagttgctgataggactaaaagtgagaatggcctacagaatgaaagtttaagttccacacatcatacagatggcttaagcaaaatcagactaaactatagcgatgaatcacctgaagctggtaaaatgcttgaagatgaactcgtcgacttctcagaagatcaggataaccaggatgatagcagtgacgatggattcctcgctgatgacaactgcagttcagaaataggacagtggcatttaaagcctactatctgtaaacaaccttgtatcctacttatggactcactccgaggcccttctcggtcaaatgttgtcaaaattttaagagagtatttagaagtggaatgggaagttaaaaaaggaagcaaaagaagtttttccaaagatgttatgaagggctctaatccaaaagtaccacagcaaaacaacttcagtgactgtggtgtatatgtattgcagtatgtagagagcttttttgagaatccaattctcagttttgaactacctatgaatttggcaaactggtttcctccaccaagaatgagaacaaaaagagaagaaatccgaaacataattctgaagctacaggaagatcagagcaaagagaaaagaaagcataaggacacttactcaacagaagcacctttaggcgaaggaacagaacaatgtgtcaatagtatctcagattgaccatttctgttacttgtcatttctactttcagaaactaaatgactttcaaatttgggtatagacaataaagaactgaagtgctcactactcagtgatttggaaattttgatgcttgtataaatgtcagataattaatttccaaaggcgtatgtattaagtaaaagtctgtaaatatgttaatgaggccaatttttccagcatttataattatttttttcacttgttaggaagcttttgttatgtattttctgttaatagtacctaaaattgcaacttctaaacccaaataaaaagaaaatatttataggaggaaatgattaatttgatattctttagtgaacttgtttaattcctcagtgggtgtgacatatttcatgggaatattcaaatatctatggtaatattttgaccctttatatttgttctaaaataagtcaaaatgtgaaaataatattaaatctaagatattttgaactaagcatctttatatgcttgtgtaacaggaacaaagtaacagcctttcaattcatatactgccttgtgttcagtgaacccaagaaatgtaataaatatttgtaattttacacaaatatttaagaggaaagagtattaagagcaattcaaaaaaagtaaccttatactactaaaaaaaaaattcttgcatatattatcatcaaatgcatttttgaagacatcaaagactcaggttaaaactattttggtaagtgcagcttgaatttcaaatatcccgtgttacctttctctattacagcttaaagtatgctacaatctgtgtcatatagttaattgataagcatttttaatctgtgtaaacacaggaatttaaataggaatttactatttttttat

SEQ ID NO: 2010 - DNA, 2100 bp, Homo sapiens
ccgcgggtcgggctctgtgtcagcagccgggcgggcgctcgggcgggacatggcagcctgtacagcccggcgggccctggccgtgggcagccgctggtggtcccggtcgctgactggggcccggtggccaaggccgctctgtgcggcggccggagctggagccttctcgccagcgtcgaccacgacgacgcggaggcacctctcgtcccgaaaccgaccagagggcaaagtgttggagacagttggtgtgtttgaggtgccaaaacagaatggaaaatatgagaccgggcagcttttccttcatagcatttttggctaccgaggtgtcgtcctgtttccctggcaggccagactgtatgaccgggatgtggcttctgcagctccagaaaaagcagagaaccctgctggccatggctccaaggaggtgaaaggcaaaactcacacttactatcaggtgctgattgatgctcgtgactgcccacatatatctcagagatctcagacagaagctgtgaccttcttggctaaccatgatgacagtcgggccctctatgccatcccaggcttggactatgtcagccatgaagacatcctcccctacacctccactgatcaggttcccatccaacatgaactctttgaaagatttcttctgtatgaccagacaaaagcacctccttttgtggctcgggagacgctaagggcctggcaagagaagaatcacccctggctggagctctccgatgttcatcgggaaacaactgagaacatacgtgtcactgtcatccccttctacatgggcatgagggaagcccagaattcccacgtgtactggtggcgctactgtatccgtttggagaaccttgacagtgatgtggtacagctccgggagcggcactggaggatattcagtctctctggcaccttggagacagtgcgaggccgaggggtagtgggcagggaaccagtgttatccaaggagcagcctgcgttccagtatagcagccacgtctcactgcaggcttccagtgggcacatgtggggcacgttccgctttgaaagacctgatggctcccactttgatgttcggattcctcccttctccctggaaagcaataaagatgagaagacaccaccctcaggccttcactggtaggccagctgaggccccaagtgcccaggcttggtcaccgggaagaacaactctcatcccacaattgctgcagaactcttctctccccatcatgggccacagtgggtctcttaatttgattgtggggttctttttgtggggaggggtggtataacttttcttcagaagacccatgtgggacacctccaaggctggcctcctcataagccctgcctacaccatgttccagtaaacctctccaccaaggaactgtgttcagctgccacaggcctggaggagtttcctggcctgtcacgtgaggtttgatcagtaaaccagtgcacgcttggccacccttgccatttctgctcccagagtctcaggctccccttctgacccagtgtgcgcccttgactgctttctttgctgcccttccagggagctgcccccctggtagggcatgtgcctgtttccctctcagcctggaggctggctggacatctcctagggtcactgtgcctctcagctagttggcgggggtgctggactggactcttgttcactttaccttctgccaaatgcagagagggaggccagtgtcagggtcggagtggcctggctcttagcactgaccgaccattgccatttctggcctcgctaggcccaggagaggagggaggcaagccagtcgggtttcctggagcaatgggtgtgccagccctcagcatgactctgccaagcatccagaccacaaatgcaggaatttggctgaggagcagctttaggtatggattgatgactaagtcaagctacttcctgagcttctctcagatttccaagagccagagatgaattgtgctgcatcttgccccaattcttaggatttcttttcctccgccactgcagtgattgttagaggtagttttcttgaattaatattaaatcacagttccagccctgtaaaaaaa

SEQ ID NO: 2011 - DNA, 2013 bp, Homo sapiens
ctccgctgcgtgtaggtgaagggggcttcctgaccgagacatggatttaggtgctattacaaaatactcagcattacacgccaagcccaatggactgatccttcaatacgggactgctggatttcgaacgaaggcagaacatcttgatcatgtcatgtttcgcatgggattattagctgtcctgaggtcaaaacagacaaaatccactataggagtcatggtaacagcgtcccacaatcctgaggaagacaatggtgtaaaattggttgatcctttgggtgaaatgttggcaccatcctgggaggaacatgccacctgtttagcaaatgctgaggaacaagatatgcagagagtgcttattgacatcagcgagaaagaagctgtgaatctgcaacaagatgcctttgtagttattggtagagataccaggcccagcagtgagaaactttcacaatctgtaatagatggtgtgactgttctaggaggtcaattccatgattatggcttgttaacaacaccccagctgcactacatggtgtattgtcgaaacacgggtggccgatatggaaaggcaactatagaaggttactaccagaaactctctaaggcttttgtggaactcaccaaacaggcttcttgcagtggagatgaatacagatcacttaaggttgactgtgcaaatggcataggggccctgaagctaagggaaatggaacactacttctcacagggcctgtcagttcagctgtttaatgatgggtccaagggcaaactcaatcatttatgtggagctgactttgtgaaaagtcatcagaaacctccacagggaatggaaattaagtccaatgaaagatgctgttcttttgatggagatgcagacagaattgtttattactaccatgatgcagatggccactttcatctcatagatggagacaagatagcaacgttaattagcagtttccttaaagagctcctggtggagattggagaaagtttgaatattggtgttgtacaaactgcatatgcaaatggaagttcaacacggtatcttgaagaagttatgaaggtacctgtctattgcactaagactggtgtaaaacatttgcaccacaaggctcaagagtttgacattggagtttattttgaagcaaatgggcatggcactgcactgtttagtacagctgttgaaatgaagataaaacaatcagcagaacaactggaagataagaaaagaaaagctgctaagatgcttgaaaacattattgacttgtttaaccaggcagctggtgatgctatttctgacatgctggtgattgaagcaatcttggctctgaagggcttgactgtacaacagtgggatgctctctatacagatcttccaaacagacaacttaaagttcaggttgcagacaggagagttattagcactaccgatgctgaaagacaagcagttacacccccaggattacaggaggcaatcaatgacctggtgaagaagtacaagctttctcgagcttttgtccggccctctggtacagaagatgtcgtccgagtatatgcagaagcagactcacaagaaagtgcagatcaccttgcacatgaagtgagcttggcagtatttcagctggctggaggaattggagaaaggccccaaccaggtttctgaagataattttcatattcctgagaaactggactttttacaagtctttacaaaactgtcaataataatggcagtactaagagatttataatcataatgtttacaatgcagcctactggattgtctctagatctgtttttcttaaacactaacagaataattctttataaataggtaagccttacacttgttaaagaaatttacctctaatttcagtctcactaatgtaaaatactgggacttaagtatacaattcagtcactaactgtacagttttatgtggggaacaattcatgcaggctactggaaaattaaatcttattaccaaaaaaaaaaaaaaaaaaaaa

SEQ ID NO: 2012 - DNA, 1837 bp, Homo sapiens
ctaggacaactcaaaatattttttcaaatctcccctacattgttcctgtgtcagaaaaactcagtctcctgacacatgaggtcagctagctcattagacttgataagtttaaggacaggtgagatgactttccagaagggtctccaataaacttaatttgaaaactgtcttgtcttcacacccctgatgctctgtgctcttgttaccacctccctatcttaccaaatggggttatctgtcatgtattttaattatgaacttagtgaatctcaaatgttaggtaattttatcttaggattgattaaggttttttaaaattatagttgccagttaattattttcctttattgatagaataaaatttgttaaaatagcatttagagatgatcatgtgatagaggattcattatgtgtgctttccatgtgttgctttctacccattgtgtttcctttttttccagatttctcctctttgccctgcccttcagcttttctcagctaggccccactgctctaaggggcatttactacagcacctattaaacttacttgtaactgtctctttttttttttttttcccctttgggccaggtcggggtatgataggtcggggaagagggggctttggaggccgaggccgaggccgtggacgagggagaggtgcccttgctcgccctgtattgaccaaggagcagctggacaaccaattggatgcatatatgtcgaaaacaaaaggacacctggatgctgagttggatgcccacatggcgcagacagatcccgaaaccaatgattgaagcttgcccatcctcccatgagagactcttgttagtcaacacatctgtaaataaccttgagataacagatgagaagaaatctgattgatgctggatggacctatcacaataggctgtggacttacttgccaccagcttgtgcatttagtgtgttccttttactttttgatactgtgttgtatgaaacccttttgtcctttgatttggttttttgtttttgtttttttaggggggagggggggtttcccctcctttgcccagacttctctttgaacacaaacgcattagccttgtggctagaacaccctcttcctacctctgtctcccctcacttgtcatatgctctgacatgctaacatttcttttgttcatccctgttgcccccacagaaacatcccagaaaaaccggtcagtgttccttcctccctgatccttaggtttctgaaatagggttctgttacatcctcttcgatagcctgtttaaaatgtttagaaggtctggagctcaaaaatgcgttcttccacattgataatttagtaaactgagaacattgacatcactacagggcagcataagaggttgcttacatgtggtagcagctctggtttgattcaagttgctaccatgtacattgacagcacatataccataaccagcgtgttgggttgaattgcactttctacctttgtatgagatttacagactttccttctgggtttgtatcatgaccagaggggtactatagggttggtttatactgcaatatagaggatcagaagccatttgatttggtaggtgtgtcagaagggagaatgatggcagacgaactgctggaagaggtcagaagatagccatgctaaaatgcaattatatcctcatgtttatcccaaactaatcttggacttttccactcattagctttgttttgcccttgtttcccttgaaggtttaagttcaaccatattctgtcaactgttcagtttcagtggaatcttgtatttctggttcattataacaaactgttcgcttaaaaaaaaaa

SEQ ID NO: 2013 - DNA, 2457 bp, Homo sapiens
tttaaaataaaatacatttataactggcaatgtttaaaaagagaaacaaactgagttccactgaaattaagagattttctcggtctctgggcgggccgtgggaggcttcctgaggtgggggccgggccaggatggctgcagcgcagcgacggccggggccgggagcgggcctgggcggccaggagaagcagttcccgccggcgctgctgagtttcttcatctacaacccgcgcttcgggccgcgcgaaggacaggaggaaaataagattttattttatcatccaaatgaggtagaaaagaatgagaagattagaaatgtcggattgtgtgaagctattgtacagtttacaaggacatttagcccatcaaaacctgcaaaatctttacatacacagaagaacagacagttcttcaatgaaccagaagaaaatttctggatggtcatggttgttcggtgtcctataattgaaaaacagagtaaagatggaaaaccagttattgaatatcaagaggaggagttgttggacaaggtttatagctcggtgctgcggcagtgctacagcatgtacaagctttttaatggtacatttcctgaaagccatggaagacggagggtccaacttctgaaagaaagattagagaaattcttccatcggtatttgcaaacgctacatttgcagtcatgtgacctacttgacatttttggtggaatcagcttcttcccgttggataaaatgacttatttgaaaatccagtcctttattaatagaatggaggaaagcctgaatatagtcaaatacactgcttttctctataacgatcagctcatctggagtggattagaacaagatgacatgagaattttatacaaataccttaccacctcccttttcccaaggcacatcgaacctgagttagcaggaagggattctccaataagagcagaaatgccaggaaatcttcaacactatggaagatttcttaccggacccttgaacctcaatgatccagatgcaaaatgcagattccccaaaatttttgtaaatacagatgacacttatgaagagctccatttaatcgtttataaggccatgagtgcggctgtgtgctttatgatcgacgcctctgtccacccaacgttggatttttgccgaagactggacagcatcgttgggccccagctcacagtgctggcctctgacatctgtgaacagtttaacatcaacaagaggatgtccgggtctgagaaagaaccccagtttaagtttatctacttcaaccacatgaatctcgccgagaagagcacagttcacatgaggaaaacgcccagcgtgtcgctcacttccgtgcacccggatttaatgaagattctcggtgacatcaacagtgactttaccagagtggatgaagatgaggagatcattgtgaaggccatgagtgattactgggttgttggaaagaagtctgatcggcgggactcctatgttattttgaatcaaaaaaatgcaaacctgattgaagtaaatgaagaggtcaagaaactttgtgcaacgcagttcaacaacatcttcttcttggattgacggatgacggctcaccgagagcatatctaaaaaacactctgcaaacatttggtcacatgcaagttagtggtcatatgacggactgcattcaggacaagggtaaagcaatacttgctttgaagaatcacatttcgactcggtctgctgatctgaggtttttagattttaaatatttatgtggaattaattaaaggtagttggctatatcgctatcatttcattcttttgacattatgtgaatattttactggaaaataagactaataaattgttaaaagtttttaaaattctggtttggtgttgagtctctctcctgctgcctatttatagattacactggccaccagctccgtgacccaggctggaatgcaatggctcactgcagcctcaacctcctgagctcaagcaatcctcccacctcagcctcccaagaagctagaaccacatgtacacaccaccacggtcggctgatgttttaattttgcagagatgggggggtctcactatgttgcccaggctggtctcgaactcccgtaatccagccatgtaggaaacctgagatgcagtgggccaaggggtatgttaaaacactgtgacgagttcagtgctaagaactgtaatgctcaggaaatcttacagcacgtgccatcctaagcctgtgtgtgtgtcctcgtgtctctctactttttcttcttcttgctggtgatggtcttgctggatggggacacggtcacatcctccttgggagggtccagtatgaggtgagaggatgacacgtctgccggctcctttagcactgtgatgtccacctcataagtcatgtctcttgggcctcttcctctctcaagatgaagatgttcagccttgcttccag

SEQ ID NO: 2014 - DNA, 1660 bp, Homo sapiens
gatggctgctgtggccgtggctgttcgcgaggactcgggatccgggatgaaggcggagcttccccctgggcctggggcagtggggagggaaatgaccaaagaagaaaagctgcagcttcggaaggaaaagaaacagcagaagaagaaacggaaggaagaaaagggggcagaaccagagactggctctgctgtatctgcagcccaatgtcaagtaggcccaaccagagaactgccagaatcgggcattcagttgggcactcctcgggagaaagttccagctggtcggagtaaggccgaacttcgggctgagcgtcgagccaagcaggaggccgagcgggccctgaaacaggcaagaaaaggggaacaaggaggaccacctcctaaggccagccccagcacagctggagaaaccccctcaggagtgaagcgtctccctgagtaccctcaggttgatgacctacttctgagaaggcttgttaaaaaaccagagcgtcaacaggttcctacacgaaaggattatggatccaaagtcagtctcttctctcacctaccccagtacagcagacaaaactctctgacccagtttatgagcatcccatcctctgtgatccacccagccatggtgcgactcggcctgcagtactcccagggcctggtcagtggctccaatgcccggtgtattgccctgcttcgtgccttgcagcaggtgattcaggattacacaacaccgcctaatgaagaactctccagggatctagtgaataaactaaaaccctacatgagcttcctgactcagtgccgtcccctgtcagcgagcatgcacaacgccatcaagttccttaacaaggaaatcaccagtgtgggcagttccaagcgggaagaggaggccaagtcagaacttcgagcagccattgatcggtatgtgcaagagaagattgtgctagcagctcaggcaatttcacgctttgcttaccagaagatcagtaatggagatgtgatcctggtatatggatgctcatctctggtatcacgaattcttcaggaggcttggacagagggccggcggtttcgggtggtagtggtggacagccggccatggctggaaggaaggcacacactacgttctctagtccatgctggtgtcccagcctcctacctgctgattcctgcagcctcctatgtgctcccagaggtttccaaggtgctattgggagctcatgcactcttggccaacgggtctgtgatgtcacgggtagggacagcacagttagccctggtggctcgagcccataatgtaccagtgctggtttgctgtgaaacatacaagttctgtgagcgtgtgcagactgatgcctttgtctctaatgagctagatgaccctgatgatctgcaatgtaagcggggagaacatgttgcgctggctaactggcagaaccacgcatccctacggttgttgaatctagtctatgatgtgactcccccagagcttgtggatctggtgatcacggagctggggatgatcccttgcagttctgtacctgttgttctacgagtcaagagcagtgaccagtgacgggggaaacacagggttaataaatgccatactccctaccctcaaaaaaaaaaaaaaaaaaaaaaaaaaaaaaaaaaaaaaaaaaac

SEQ ID NO: 2015 - DNA, 2201 bp, Homo sapiens
gggggtgggaagagctgaagcaggcgctcttggctcggcgcggcccgctgcaatccgtggaggaacgcgccgccgagccaccatcatgcctgggcacttacaggaaggcttcggctgcgtggtcaccaaccgattcgaccagttatttgacgacgaatcggaccccttcgaggtgctgaaggcagcagagaacaagaaaaaagaagccggcgggggcggcgttgggggccctggggccaagagcgcagctcaggccgcggcccagaccaactccaacgcggcaggcaaacagctgcgcaaggagtcccagaaagaccgcaagaacccgctgccccccagcgttggcgtggttgacaagaaagaggagacgcagccgcccgtggcgcttaagaaagaaggaataagacgagttggaagaagacctgatcaacaacttcagggtgaagggaaaataattgatagaagaccagaaaggcgaccacctcgtgaacgaagattcgaaaagccacttgaagaaaagggtgaaggaggcgaattttcagttgatagaccgattattgaccgacctattcgaggtcgtggtggtcttggaagaggtcgagggggccgtggacgtggaatgggccgaggagatggatttgattctcgtggcaaacgtgaatttgataggcatagtggaagtgatagatctggcctgaagcacgaggacaaacgtggaggtagcggatctcacaactggggaactgtcaaagacgaattaactgacttggatcaatcaaatgtgactgaggaaacacctgaaggtgaagaacatcatccagtggcagacactgaaaataaggagaatgaagttgaagaggtaaaagaggagggtccaaaagagatgactttggatgagtggaaggctattcaaaataaggaccgggcaaaagtagaatttaatatccgaaaaccaaatgaaggtgctgatgggcagtggaagaagggatttgttcttcataaatcaaagagtgaagaggctcatgctgaagattcggttatggaccatcatttccggaagccagcaaatgatataacgtctcagctggagatcaattttggagaccttggccgcccaggacgtggcggcaggggaggacgaggtggacgtgggcgtggtgggcgcccaaaccgtggcagcaggaccgacaagtcaagtgcttctgctcctgatgtggatgacccagaggcattcccagctctggcttaactggatgccataagacaaccctggttcctttgtgaacccttctgttcaaagcttttgcatgcttaaggattccaaacgactaagaaattaaaaaaaaaaagactgtcattcataccattcacacctaaagactgaattttatctgttttaaaaatgaacttctcccgctacacagaagtaacaaatatggtagtcagttttgtatttagaaatgtattggtagcagggatgttttcataattttcagagattatgcattcttcatgaatacttttgtattgctgcttgcaaatatgcatttccaaacttgaaatataggtgtgaacagtgtgtaccagtttaaagctttcacttcatttgtgttttttaattaaggacttagaagttcccccaattacaaactggttttaaatattggacatactggttttaatacctgctttgcatattcacacatggtcaactgggacatgttaaactttgatttgtcaaattttatgctgtgtggaatactaactatatgtattttaacttagttttaatattttcattttgggggaaaaatcttttttcacttctcatgatagctgttatatatatatgctaaatctttatatacagaaatatcagtacttgaacaaattcaaagcacatttggtttattaacccttgctccttgcatggctcattaggttcaaattataactaatttacattttcagctatatttactttttaaatgcttgagtttcccattttaaaatctaaactagacatcttaattggtgaaagttgtttaaactacttattgttggtaggcacatcgtgtcaagtgaagtagttttataggtatgggttttttctcccccttcaccagggtgggtggaataagttgatttggccaatgtgtaatatttaaactgttctgtaaaataaaaaaaaaaaaaaaaaa

SEQ ID NO: 2016 - DNA, 2553 bp, Homo sapiens
gcctgcctcttccagagagactcccccattgctgtctcttgtgtgtgtcatgcacaaggaaggcttggttgtgtgccaggataaggggcacaagggcctcgggtgtggccagagaccccatgcttaagcttttatggtataggtcaggctgcaggggtttgagggcctcagttgtatatcagaatcttcagagcactgcgatgttcaggggtgagtcaggtctgtagatgtgcacggggtcttctgaagggtcagtttctgtaatcactttcaggtgtgtcagggccttgtgcagtaacagtgcacacagaagttagtgtttctgtgggctaagggttgtagctctgtatcaggattctgggagtgggtctggatttctggtgtgtggacttaagaagctgtgtcagacttgggggaggggcgttcatgtataactgggttcacataggccaagactcccaggtgcattttaggcagagcctcaggtgtgttagaggtcccaggggcagagaggctataggtgctgtcagaggccttggggacatttagggcagagcctcgagtgacaggtcctgggacagtgggagccaagggcaagtgctagagttgcagtgaatttagagcaaagcctcagctaagtgacacatcccagggcagtaggggatctatctaggttcgtgctgggcctcaggtaagtgacaggccttaggacaatgggggctgtggcatgcgtcaggttacctgccttgatatgggatcgtgacaggcccctccctatgtgcaggagacaagcagcccaagaaacaggagaaaaacccagtgttggtgtccccagagtttgtggatgaagctctgtgtgcgtgcgaggagtaccttagcaacttggcccacatggacatcgacaaggacctggaggccccgctgtacctcacccccgagggctggtccctcttcctccagcgctactaccaagtggtccacgaaggggcagaactcaggcacctcgacactcaggtccagcgctgtgaggacatcctgcagcagctgcaggccgtggtaccccagatagacatggaaggggatcgcaacatctggatcgtgaagccaggagccaagtcccgcggacgaggcatcatgtgcatggaccacctggaggagatgctgaagctggtgaacggcaaccccgtggtgatgaaggacggcaagtgggtggtgcagaagtatattgagcggcccctcctcatctttggcaccaagtttgacctcagacagtggttcctggtaactgactggaacccacttaccgtgtggttctaccgcgacagctatatccgcttttccacgcagcccttctccctgaagaacctggacaactcagtgcacctgtgcaacaactccatccagaagcacctggagaactcatgccatcggcatccactgcttccgccagacaacatgtggtctagccagaggttccaggcccacctgcaggagatgggtgccccaaatgcttggtccaccatcatcgtgcctggcatgaaggatgctgtgatccacgcacttcagacctcccaggacaccgtgcagtgtcggaaggccagctttgagctctatggcgctgacttcgtgttcggggaggacttccagccctggctgattgagatcaacgccagccccacgatggcaccctccacagcagtcactgcccggctctgtgctggcgtgcaagctgacaccctgcgcgtggtcattgaccggatgctggaccgcaactgtgacacaggagcctttgagctcatctataagcagcccgtcaccacttccccagcctccacaccaaggcccagctgccttctccccatgtactccgacaccagggccaggtcctcagacgacagcacagcaagctggtgggcactaaggccctgtcgaccacaggcaaggccttgaggactctacccacggctaaggtcttcatttccctcccaccgaaccttgatttcaaggtggcacccagcatcctgaagccaagaaaggtgggcctcgacctgtgactcacacccagtggacagtgctgagcacggggtcagggctggagggcacaggcagagggcagctcccaggctggctggcaccccaagggaagagctggtctccctcagaagccccttcctccacagacttctgatcatctccctcttctcccctcctttcacaccgaggctcctgctctcctgtgcctccgaggcccccagctggaagtgccttgttgcctctgccctttgaagtcggaacaattcctagcacctgtcggaaggtcaaggccaaaggcaaattcaaggccagactgtgacaaacccagggctgaggcctgccccatgaagaggctgagccccctgaaacccctgccccttgttggtacattccagaggcgcaggggcctgggggatatgaagctagggaagcccctgcttcgattccccactgcccttgtcctggatccaacaccaaataaaaagaaacaagtgaagtaaaaaaaaaaaaaaaaaaaaa

SEQ ID NO: 2017 - DNA, 1927 bp, Homo sapiens
gtaaaccagccggagcggcgcggcagcggcaggaccgccgtggcgcctagagtagcgacccggggggagcgcggggcgacgctggctgcagggacccggtgacagcgtgagaggttcgcagagtactaggttttgacaagcttgcatcatgcgtgagtataagctagtcgttcttggctcaggaggcgttggaaagtctgctttgactgtacaatttgttcaaggaatttttgtagaaaaatacgatcctacgatagaagattcttatagaaagcaagttgaagtagatgcacaacagtgtatgcttgaaatcttggatactgcaggaacggagcaatttacagcaatgagggatttatacatgaaaaatggacaaggatttgcattagtttattccatcacagcacagtccacatttaacgatttacaagacctgagagaacagattcttcgagttaaagacactgatgatgttccaatgattcttgttggtaataagtgtgacttggaagatgaaagagttgtagggaaggaacaaggtcaaaatctagcaagacaatggaacaactgtgcattcttagaatcttctgcaaaatcaaaaataaatgttaatgagatcttttatgacctagtgcggcaaattaacagaaaaactccagtgcctgggaaggctcgcaaaaagtcatcatgtcagctgctttaatatactaaatgcattgtagctctgagccaggtctgaagaactgttgcccaattcaacagtgccagcattccaactttgttaaacctaccaacatcttaaatggactttcctgtggtggtaccctttaagaggcggatgaaagctactatatcagtttgcacattctaatcactttccagtatcacaagagagatttttacttatataatagtcctagagtttgcagctggtaaaaccagaggctacatccagtattactgctaagagacattcttcatccaccaatgttgtacatgtatgaaaatggtgtactgtatactttaacatgccccatactttgtattggagagtacaataatgtaaatcctaaaagcaccactattttagcataataaaagaaagtccaaagagctcctatatagactactccagataacttcgcttctttgatacttgtagcttattgtaattttttttaagaaattcaaggtcattattattgtacaaaataagcgctttgattaacacagctatatagtttttttaatttttaaaaaacctgtggagacggtgatcttgtctttaaaacatgatagtcctttcagtataatgtcttagattaaagacgttgcctttaatatctgttgggaaggaaatgtccagacttttcaaatctcttattatatgtttcctttttttgtttacatagggaacaatgtttatagtcgtgtgtacagtgggggtctacaacaagaagtgtatattttcaaacaattttttaatgatttaacaatttttgtaaatcattttcaggcttctgcagctgtagattctcactgtgaatcccttgcttgctcatgcataagtgtatttgcaataccaaatatacaggtttagtatttttgcctgttagtgattgtttcacatgtgtaacgttttggttgagatgttaaatggtggacgagtactgtggatgtgaatgtgggaagtaattttaatcatatgtaattggtcacaaggcctaatttgcagtaactattgctgttttatttaacaatgccttgttgctttgtatgcattaatgtttggatgtaaagattgtgtgtctatccaacagggagccacagtatttaaattgaccaacctaatgttacaactactttgaggtggccaaatgtaaactaaaagccttaattaaagtggtgcaattttgtaaaaaaaaaa

SEQ ID NO: 2018 - DNA, 2762 bp, Homo sapiens
gggggggttggtgtcatggcagctgcggggagccgcaagaggcgcctggcggagctgacggtggacgagttcctagcttcgggctttgactccgagtccgaatccgagtccgaaaattctccacaagcggagacacgggaagcacgcgaggctgcccggagtccggataagccgggcgggagcccctcggccagccggcgtaaaggccgtgcctctgagcacaaagaccagctctctcggctgaaggacagagaccccgagttctacaagttcctgcaggagaatgaccagagcctgctaaacttcagcgactcggacagctctgaggaggaagaggggccgttccactccctgccagatgtgctggaggaagccagtgaggaggaggatggagcggaggaaggagaagatggggacagagtccccagagggctgaaggggaagaagaattctgttcctgtgaccgtcgccatggttgagagatggaagcaggcagcaaagcaacgcctcactccaaagctgttccatgaagtggtacaggcgttccaagcagctgtggccaccacccgaggggaccaggaaagtgctgaggccaacaaattccaggtcacggacagtgctgcattcaatgctctggttaccttctgcatcagagacctcattggctgtctccagaagctgctgtttggaaaggtggcaaaggatagcagcaggatgctgcagccgtccagcagcccgctctgggggaagcttcgtgtggacatcaaggcttacctgggctcggccatacagctggtgtcctgtctgtcggagacgacggtgttggcggccgtgctgcggcacatcagcgtgctggtgccctgcttcctgaccttccccaagcagtgccgcatgctgctcaagagaatggtggtcgtatggagcactggggaggagtctctgcgggtgctggctttcctggtcctcagcagagtctgccggcacaagaaggacactttccttggccccgtcctcaagcaaatgtacatcacgtatgtgaggaactgcgagttcacctcgcctggtgccctccccttcatcagtttcatgcagtggaccttgacggagctgctggccctggagccgggtgtggcctaccagcacgccttcctctacatccgccagctcgccatacacctgcgcaacgccatgaccacccgcaagaaggaaacataccagtctgtgtacaactggcagtatgtgcactgcctcttcctgtggtgccgggtcctgagcactgcgggccccagcgaagccctccagcccttggtctacccccttgcccaagtcatcattggctgtatcaagctcatccccactgcccgcttctacccgctgcgaatgcactgcatccgtgccctgacgctgctctcggggagctcgggggccttcatcccggtgctgcctttcatcctggagatgttccagcaggtcgacttcaacaggaagccagggcgcatgagctccaagcccatcaacttctccgtgatcctgaagctgtccaatgtcaacctgcaggagaaggcgtaccgggacggcctggtggagcagctgtacgacctcaccctggagtacctgcacagccaggcacactgcatcggcttcccggagctggtgctgcctgtggtcctgcagctgaagtcgttcctccgggagtgcaaggtggccaactactgccggcaggtgcagcagctgcttgggaaggttcaggagaactcggcatacatctgcagccgccgccagagggtttccttcggcgtctctgagcagcaggcagtggaagcctgggagaagctgacccgggaagaggggacacccttgaccttgtactacagccactggcgcaagctgcgtgaccgggagatccagctggagatcagtggcaaagagcggctggaagacctgaacttccctgagatcaaacgaaggaagatggctgacaggaaggatgaggacaggaagcaatttaaagacctctttgacctgaacagctctgaagaggacgacactgagggattctcggagagagggatactgaggcccctgagcactcggcatggggtggaagacgatgaagaggacgaggaggagggcgaggaggacagcagcaactcggaggatggagacccagacgcagaggcggggctggcccctggggagctgcagcagctggcccaggggccggaggacgagctggaggatctgcagctctcagaggacgactgaggcagcccatctggggggcctgtaggggctgccgggctggtggccagtgtttccacctccctggcagtcaggcctagaggctggcgtctgtgcagttgggggaggcagtagacacgggacaggctttattatttatttttcagcatgaaagaccaaacgtatcgagagctgggctgggctgggctggtgtggctgctgaagccccacagctgtgggctgctgaagtcagctccgcgggggagctgaccctgacgtcagcagaccgagaccagtcccagttccagggggaggcctgcaggcccctggccccttccaccacctctgccctccgtctgcagacctcgtccatctgcaccaggctctgccttcactcccccaagtctttggaaatttgttcttttcctttgaagtcacattttcttttaaaattttttgttttgcatccgaaaccgaaagaaataaagcggtgggaggcaggaaaaaaaaaaaaaaaaaaa

SEQ ID NO: 2019 - DNA, 1782 bp, Homo sapiens
gcgacgcgtggaaaagcacctcgctgacattccactggaagctttgggggcgccaccggggccggcggcggggcctcgcacaccccaagaaccatctttcaccccagcaagggggtgcgacgccacaggtgccatccccctgttgtcgttttgactccccccgggggccacctccaccccggctgggtctgctaggtgctctcatggctgaggatggggtgagagggtctccaccagtgccctctgggccccccatggaggaagatggactcaggtggactccaaagtctcctctggaccctgactcgggcctcctttcatgtactctgcccaacggttttgggggacaatctgggccagaaggggagcgcagcttggcaccccctgatgccagcatcctcatcagcaatgtgtgcagcatcggggaccatgtggcccaggagctttttcagggctcagatttgggcatggcagaagaggcagagaggcctggggagaaagccggccagcacagccccctgcgagaggagcatgtgacctgcgtacagagcatcttggacgaattccttcaaacgtatggcagcctcatacccctcagcactgatgaggtagtagagaagctggaggacattttccagcaggagttttccaccccttccaggaagggcctggtgttgcagctgatccagtcttaccagcggatgccaggcaatgccatggtgaggggcttccgagtggcttataagcggcacgtgctgaccatggatgacttggggaccttgtatggacagaactggctcaatgaccaggtgatgaacatgtatggagacctggtcatggacacagtccctgaaaaggtgcatttcttcaatagtttcttctatgataaactccgtaccaagggttatgatggggtgaaaaggtggaccaaaaacgtggacatcttcaataaggagctactgctaatccccatccacctggaggtgcattggtccctcatctctgttgatgtgaggcgacgcaccatcacctattttgactcgcagcgtaccctaaaccgccgctgccctaagcatattgccaagtatctacaggcagaggcggtaaagaaagaccgactggatttccaccagggctggaaaggttacttcaaaatgaatgtggccaggcagaataatgacagtgactgtggtgcttttgtgttgcagtactgcaagcatctggccctgtctcagccattcagcttcacccagcaggacatgcccaaacttcgtcggcagatctacaaggagctgtgtcactgcaaactcactgtgtgagcctcgtaccccagaccccaagcccataaatgggaagggagacatgggagtcccttcccaagaaactccagttcctttcctctcttgcctcttcccactcacttccctttggtttttcatatttaaatgtttcaatttctgtatttttttttctttgagagaatacttgttgatttctgatgtgcagggggtggctacagaaaagcccctttcttcctctgtttgcaggggagtgtggccctgtggcctgggtggagcagtcatcctcccccttccccgtgcagggagcaggaaatcagtgctgggggtggtgggcggacaataggatcactgcctgccagatcttcaaacttttatatatatatatatatatatatatatatatataaaaatatataaatgccacggtcctgctctggtcaataaaggatcctttgttgatacgtaaaaaaaaaaaaaaaaa

SEQ ID NO: 2020 - DNA, 2412 bp, Homo sapiens
ggcggcggttgggccggtgatacccgggcgctttatagtcccgccgcctcctcctccacctcctcctcctcctcctctcctcctggagcagaggaggttgtggcggtggctggagaaagcggcggcggaggatggaggaaggaggcggcggcgtacggagtctggtcccgggcgggccggtgttactggtcctctgcggcctcctggaggcgtccggcggcggccgagcccttcctcaactcagcgatgacatccctttccgagtcaactggcccggcaccgagttctctctgcccacaactggagttttatataaagaagataattatgtcatcatgacaactgcacataaagaaaaatataaatgcatacttccccttgtgacaagtggggatgaggaagaagaaaaggattataaaggccctaatccaagagagcttttggagccactatttaaacaaagcagttgttcctacagaattgagtcttattggacttacgaagtatgtcatggaaaacacattcggcagtaccatgaagagaaagaaactggtcagaaaataaatattcacgagtactaccttgggaatatgttggccaagaaccttctatttgaaaaagaacgagaagcagaagaaaaggaaaaatcaaatgagattcccactaaaaatatcgaaggtcagatgacaccatactatcctgtgggaatgggaaatggtacaccttgtagtttgaaacagaaccggcccagatcaagtactgtgatgtacatatgtcatcctgaatctaagcatgaaattctttcagtagctgaagttacaacttgtgaatatgaagttgtcattttgacaccactcttgtgcagtcatcctaaatataggttcagagcatctcctgtgaatgacatattttgtcaatcactgccaggatctccatttaagcccctcaccctgaggcagctggagcagcaggaagaaatactaagggtgccttttaggagaaataaagaggaagatttgcaatcaactaaagaagagagatttccagcgatccacaagtcgattgctattggctctcagccagtgctcactgttgggacaacccacatatccaaattgacagatgaccaactcataaaagagtttcttagtggttcttactgctttcgtgggggtgtcggttggtggaaatatgaattctgctatggcaaacatgtacatcaataccatgaggacaaggatagtgggaaaacctctgtggttgtcgggacatggaaccaagaagagcatattgaatgggctaagaagaatactgctagagcttatcatcttcaagacgatggtacccagacagtcaggatggtgtcacatttttatggaaatggagatatttgtgatataactgacaaaccaagacaggtgactgtaaaactaaagtgcaaagaatcagattcacctcatgctgttactgtatatatgctagagcctcactcctgtcaatatattcttggggttgaatctccagtgatctgtaaaatcttagatacagcagatgaaaatggacttctttctctccccaactaaaggatattaaagttaggggaaagaaaagatcattgaaagtcatgataatttctgtcccactgtgtctcattatagagttctcagccattggacctcttctaaaggatggtataaaatgactctcaaccactttgtgaatacatatgtgtatataagaggttattgataaacttctgaggcagacatttgtctcgctttttttcatttttgttgtgtcttataaactgactgtttttctttgcttggatactgtgattccaaaataaatctcatccaagcaagttagagtccagcctaatcaaatgtcataattgttgtacctattgaaagtttttaaataatagatttattatgtaaattatagtatatgtaagtagctaatgaagtaaagatcatgaagaaagaaattgataggtgtaaatgagagaccatgtaaaatatgtaaattctagtacctgaaatcctttcaacagatttttatatagcaactgctctctgcaagtagttaaactagaaactgggcacatggtagaggctcacatgggagttgtcctcacccttgttaatctcaagaaactcttatttataataggttgcttctctctcagaacttttatctattacttttttcttcttatgagtatgtttactctcagagtatctatctgatgtagacagttggtgatgcttctgagactcagaatggtttactctaacaaaacactgtgctgtctatcccttgtacttgcctactgtaatatggatttcacttctgaacagtttacagcacaatatttattttaaagtgaataaaatgtccacaagcaaa

SEQ ID NO: 2021 - DNA, 1416 bp, Homo sapiens
attcggcaccgcagcgtaggtgctaccaccgctgccgtcgccgccgccattttgatggcaggaagagtccggttctgggacagctggagacagtggtggtgactgaaataactttaccaaaggaaagctattttgcgaactatcttctccagcggagatggccaatgtgctttgtaacagagccagactggtttcctatctcccaggattttgctctttagttaaaagggttgtcaatcccaaagccttttcgactgcaggatcatcaggttcggatgagtctcatgtggctgctgcacctccagatatatgctctcgaacagtgtggcctgatgaaactatgggaccctttggacctcaagatcagaggttccagcttcctgggaacataggttttgattgtcacctcaatgggactgcttcacagaagaaaagcctggttcataaaactttgcctgatgttctagcagaacctttatcaagtgaaagacatgagtttgtgatggcacaatatgtgaatgaatttcagggtaatgatgcacctgttgaacaagaaattaacagtgcagaaacttactttgaaagtgccagagtagagtgtgcaatacaaacatgtccagaattgctgcgaaaagattttgaatcactgtttccagaagtagctaatggcaaactaatgattctgactgtaacacaaaaaactaagaatgatatgactgtttggagtgaagaagtagaaattgaaagagaagtgctcttagaaaagttcatcaatggtgctaaggaaatttgctatgctcttcgagctgagggttattgggctgactttattgacccatcatctggtttggcattttttggaccatatacaaacaacactctttttgaaactgatgaacgctaccgacatttaggattctctgttgatgaccttggatgctgtaaagtgattcgtcatagtctctggggtacccatgtagttgtagggagtatcttcactaatgcaacaccagacagccatattatgaagaaattaagtggaaattagcagaaatatccattcatttgctgtactatttgtatgtaatatttgggttgatctataaacactgtcagactaaagtttttaaaatatacttatttctaagtatttatttcagcatttatgaatttgcaacattggcaagtgatttgggattttaaaattgcaaatgttcatttattcatatcattgaatacacgttgaacacatccacattgtataggatgtggtaattagcttgtaaccagggtatgatctgctattgttatttctcctctttattggaaaaaggcctcagttttaattattttcttcccaaaataaatcacacatttggttacaaaaaaaaaaaaaaaaaaaaaaaaaaaaaaaaa

SEQ ID NO: 2022 - DNA, 2244 bp, Homo sapiens
acaccatcctcttagttgctcagactgaaaagctagcagccatcctggatttctctcacactgcctattcaacgtgtgaatgcatgagtggaaagctgagttcgcactcgtgactggccggggtcgactctgacattcactcccactttggcgcgctgatttgcctctgagcggatgaaggttgagccatggcgggcggggccggggaggcgggcttggagcgagggggcggggcaggcgccacaaaaacgcgctcgcgccggcgccgaaccgcaactcccggcgacccccgcgctcccgggtggcaagatggtggcgcgcaggaggaagtgcgcgcgcgggacccggagaccgtatcccgagcccactgcgtacgcagctattccaatcaagttctctgaaaagcaacaggcttctcactacctctatgtgagagcacacggcgttcgacaaggcaccaagtccacctggcctcagaagaggactctttttgtcctcaatgtgcccccatactgcacagaggagagcctgtcccgcctcctgtccacctgtggcctcgtccagtctgtagagttgcaggagaagccggacctggctgagagcccaaaggagtcaaggtcgaagttttttcatcccaagccagttccgggtttccaggtagcctatgtggtgttccagaagccaagtggggtgtcagcggccttggccctgaagggccccctgctggtgtccacagagagccaccctgtgaagagtggcattcacaagtggatcagtgactacgcagactctgtgcccgaccctgaggccctgagggtggaagtggacacgttcatggaggcatatgaccagaagatcgctgaggaagaagctaaggccaagggggaggagggggtccctgacgaggagggctgggtgaaggtgacccgccggggccggcgcctgtgctcccccggactgaggcagccagcttgcgggtgctggagagggagagacggaagcgcagcgaaaagagctgctcaacttctacgcctggcagcatcgagagagcaagatggagcatctagcgcagctcgcaagaagttcgaggaggacaagcagaggatcgagctgctgcgggcccagcgcaaattccgaccgtactgagctgtgagagccgcagtgaatggctggaggtgcagggccaggaggaggcgaggcagggcctgcagcggtctctgagaggccgagctctggccaacgggccccaggttgaaggccaccgcgtccaacagccccatcagagtccacacaggccaggagggaaggaccaggccacccctcgggtcttgtgcttcagcagtcctggggacccaggcgtgccgagaggaggacttgtccttcctgcttcttgcctccacaccctcctctccaggaccctggatgaatccgttctgtgcttccttttccctcaatgcaaaagcccttgctggcaacgaaaaagcctcaaaagcagtgagaatacaagaaccttttattttccatccagttgggcagcagggaaaggctaggtgggcccagcctgcccttccttcctccagctggctggatatttattattagccaggagaaagcagccctggaacccagactctgtctccctcttgaggtcacagatgttgaagttggaatctcgctccttcccctgactaccatcctaggctgggctcaagactagtgaggcctgtccccaccatccctggccttgttgtggggctcaggaactcagagtcccagtgttgagtctgggagcactaggtcttcatagttccaggcccagagctacagctgggctgggagcatgtgtgtgcactgtaagaaggagctgatgatactggccacgtgctggggttcgctcatgtggacacagtgattgcctgggacttccacaaactggaactgctctttgagggtggatttcatcgtgtctatcatgaacgacagggactccttctcagagtaattctgtcttgaatcaaaatatccgtggactgctttgatcaacaggacatggcctgcagcttcctgatggaatgcgcacacagctccctgctgatgaagtcaatgctgttctctgcccaggcgagcctctggtctctgttcagaaccagacctgtgggcaccttcgtggttcctctttgcaggagaactccccgcactcctcactcaagtggctattgctcttcagtaacctctgcagcagct

SEQ ID NO: 2023 - DNA, 1516 bp, Homo sapiens
tgacaagatggcggcaggaggcagtggcgttggtgggaagcgcagctcgaaaagcgatgccgattctggtttcctggggctgcggcccacttcggtggacccagcgctgaggcgaaggcggcgaggcccaagaaataagaagcggggctggcggcggcttgctcaggagccgctggggctggaggttgaccagttcctggaagacgtgcggctacaggagcgcacgagcggtggcttgttgtcagaggccccaaatgaaaaactcttcttcgtggacactggctccaaggaaaaagggctgacaaagaagagaaccaaagtccagaagaagtcactgcttctcaagaaaccccttcgggttgacctcatcctcgagaacacatccaaagtccctgcccccaaagacgtcctcgcccaccaggtccccaacgccaagaagctcaggcggaaggagcagctatgggagaagctggccaagcagggcgagctgccccgggaggtgcgcagggcccaggcccggctcctcaacccttctgcaacaagggccaagcccgggccccaggacaccgtagagcggcccttctacgacctctgggcctcagacaaccccctggacaggccgttggttggccaggatgagtttttcctggagcagaccaagaagaaaggagtgaagcggccagcacgcctgcacaccaagccgtcccaggcgcccgccgtggaggtggcgcctgccggagcttcctacaatccatcctttgaagaccaccagaccctgctctcagcggcccacgaggtggagttgcagcggcagaaggaggcggagaagctggagcggcagctggccctgcccgccacggagcaggccgccacccaggagtccacattccaggagctgtgcgaggggctgctggaggagtcggatggtgagggggagccaggccagggcgaggggccggaggctggggatgccgaggtctgtcccacgcccgcccgcctggccaccacagagaagaagacggagcagcagcggcggcgggagaaggctgtgcacaggctgcgggtacagcaggccgcgttgcgggccgcccggctccggcaccaggagctgttccggctgcgcgggatcaaggcccaggtggccctgaggctggcggagctggcgcggcggcggaggcggcggcaggcgcggcgggaggctgaggctgacaagccccgaaggctgggacggctcaagtaccaggcacctgacatcgacgtgcagctgagctcggagctgacagactcgctcaggaccctgaagcccgagggcaacatccttcgagaccggttcaagagcttccagaggaggaatatgatcgagcctcgagagagagccaagttcaaacgcaagtacaaggtgaagctggtggagaagcgggcgttccgtgagatccagttgtagctgccatcagatgccggagactcgcccttcaataaaaaatctcttctagctgaaaaaaaaaaaaaaaaaaaa

SEQ ID NO: 2024 - DNA, 3828 bp, Homo sapiens
  misc_feature (2448)..(2448): n is a, c, g, or t
  misc_feature (2454)..(2456): n is a, c, g, or t
  misc_feature (3490)..(3490): n is a, c, g, or t
  misc_feature (3610)..(3610): n is a, c, g, or t
ctcttagcgctcaggtcttttccttccgccgacccgaagtcatcgctgggagtactggttgccctttcctcagtccttcagtgaatctacagagcctatttcctcaggagcctcagcctggtccttacttcagtgataaaaggaggaaaggctggctacagcaaacatcattcaagatgtccagcaaagggagcagcacagatggcagaacagacttagctaatggaagcctgtctagcagtccagaggagatgtctggagctgaagaggggagggagacatcctcaggcattgaagtggaggcctcagacctgagtttgagcttgactggggatgatggtggccccaaccgcaccagcacagaaagtcgaggcacagacacagagagctcaggtgaagataaggactctgacagcatggaggacactggtcattactccattaatgatgaaaatcgagtccatgaccgctcagaggaagaggaagaggaggaagaagaggaggaagaagagcagcctcggggcgcgtgtacagcgcaagcggctaaccgtgaccaggactcatcagatgatgagcgggccctagaggactgggtgtcctcagaaacatcagctctaccccgacctcgctggcaagccctccctgcccttcgggagcgggagctgggttcaagtgcccgctttgtctatgaggcctgtggggcaagagtctttgtgcacggtttccgcctgcagcatgggcttgagggccatactggttgtgtcaataccctgcactttaaccagcgcggcacctggctggccagtggcagcgatgacctgaaggtggtggtgtgggattgggtacggcggcagccagtactggactttgagagtggccacaaaagtaatgtgttccaggccaagtttcttcctaacagtggtgattctactctggccatgtgtgcccgtgacgggcaggttcgagtagcagaactgtctgccacacagtgttgcaagaatacaaaacgtgtggcccagcacaagggagcgtcccacaagttggcactggaaccagactctccctgtacgttcttatctgcaggtgaagatgcagttgttttcaccattgacctgagacaagaccgcccagcgtcgaaactggtggtgacaaaagagaaagagaagaaagtggggctgtatacgatctatgtgaatcctgccaatacccaccagtttgcagtgggtggacgagatcagtttgtaaggatttatgaccagaggaaaattgatgagaatgagaacaatggagtactcaagaagttctgtcctcatcacctggtgaacagtgagtccaaagcaaacatcacctgtcttgtgtacagccacgacggcacagagctcctggccagttacaatgatgaagacatttacctcttcaactcctctcacagtgatggggcccagtatgttaagagatacaagggccacagaaataatgccacagtaaaaggcgtcaatttctatggccccaagagtgagtttgtggtgagcggtagtgactgtgggcacatcttcctctgggagaaatcatcctgccagattattcagttcatggagggggacaagggaggcgtggtaaactgtcttgagccccaccctcacctgcctgtgctggcaaccagtggcctagaccatgatgtgaagatctgggcacccacagctgaagcttccactgagctgacagggttaaaagatgtgattaagaagaacaagcgggagcgggatgaagatagcttgcaccaaactgacctgtttgatagtcacatgctgtggttccttatgcatcacctgagacagagacgccatcaccggcgctggcgagaacctggggttggggccacagacgcggactctgatgagtctcccagctcctcagacacatcggacgaggaggagggccctgaccgggtgcagtgcatgccatcttgaggcctcatacctaggtggggcaggctggggctgccaacctgatcctgcctgggcaaccctttcctgtcccaggccctacattcagcagaaacgcactttggactttttgctttagataaaagaaagacatcccaggagaaggacaaaccagaggagtgaaccaacaaagagtacctaggaatgggagttgagcctggaatgggctccatggagaggtgcataggactcggcagaaatggcctctccccaaagcctctttttgagaggagagggaagcctatttgttaactggtttgggatagggaatggggtttctttttctttaatctcccttgtttcttgggctgggggaggggtggggggaacaactggctattcagtaccaaggggccagagtggagggtaggagtgccactctctctttggtttaggtttttgaccttttcttcctttgttttttaaaagtttatgacagttnctcccnnnaccccacaaccccatcccagaatcctattttcctgggaagtccttaaagcccctaaccatcccacactcttcactttcctttccaccttattcattctctgtacttaccacagtattttgcacttgattacatatccttcatctcttctcttcatcccatcaccccctaaataggtcaggtgagggaggctgggaagaggtgggaggaggggagaagtgaaggaagataggaaggatattacctcttctgttatttttttaagaaacattgtttggtggcagcaatctccctgtccctatcactgttagaggcctaattttatatctataaatatattaaaaagcaagtcaaacttggatgtatcaaggtaaaattattgtcaaagtttaaatacctatatattctctgaatgcaataaagggacttaagagtgaacaagagtaatggtgtggaagtgacacctggggtcagtttacctctgtgtatggtcactagagattgggacttaccctttaggttttaggaggcttgagaatggaaggatcctcatttctgcccttcctggttccctgctttggtgtaggggttgggaaaaacaggaaattcctctcagctctgcctcagatctcctacctctccttaagtcttgtagggggttccaaggatggctcttctaaccagaggctggcctgtctttaaaacttaactactttagggtggtgccaccactgcagactattgtggtactttgtgacagaagacatgtacacacacaccacacacatacatacacactctctcactctgtctctcttacctttagctgcttgatcattaagccatccaacttcatgccagttcccttctttatagaagagtgaagggaaagacttcctgggtttgacttaaaccttgtccaccttcttgatattttaggattgaggaataaagtcattaatctaaggaactgattacagtggctggagcttgggcacttgtcttatcactggtcactgagtctgaaagtcccagntgaattcttgcccttaagtgcttttgctgctatttttttgcccccagttccacaagatccaaccaagaattctgtatcctggcaacagtcagattcttctaaatcagccagcaagagggnaaagagtgagagatggtattcccagatcattcttcctcctgcccctttcccagcagctctagaccagatgttggctgctgtacttactccctgaggtagggaatgtgtggtgatcgagtggtctgtgttcctattgctggtggggtgatagggtgggctaaaaaccatgcactctggaatttgttgtattttctcccagtaaagcttttcttctcccg

SEQ ID NO: 2025 - DNA, 1353 bp, Homo sapiens
gatctcaagatggcgctgcactcaatgcggaaagcgcgtgagcgctggagcttcatccgggcacttcataagggatccgcagctgctcccgctctccagaaagacagcaagaagcgagtattttccggcattcaacctacaggaatcctccacctgggcaattacctgggagccattgagagctgggtgaggttacaggatgaatatgactctgtattatacagcattgttgacctccactccattactgtcccccaagacccagctgtccttcggcagagcatcctggacatgactgctgttcttcttgcctgtggcataaacccggaaaaaagcatccttttccaacaatctcaggtgtctgaacacacacaattaagttggatcctttcctgcatggtcagactacctcgattacaacatttacatcagtggaaggcaaagactaccaagcagaagcacgatggcacggtgggcctgctcacatacccagtactccaggcagccgacattctgttgtacaagtccacacacgttcctgttggggaggatcaagtccagcacatggaactagttcaggatctagcacaaggtttcaacaagaagtatggggagttctttccagtgcccgagtccattctcacatccatgaagaaggtaaaatccctacgtgatccttctgccaaaatgtcgaaatcagaccctgacaaactggccaccgtccgaataacagacagcccagaggagatagtgcagaaattccgcaaggctgtgacagacttcacctcggaggtcacctatgacccggctggccgcgctggcgtgtccaacatagtggcggtgcatgccgcggtgacggggctctccgtggaggaagtggtgcgccgcagcgcgggcatgaacactgctcgctacaagctggccgtggcagatgctgtgattgagaagtttgccccaattaagcgtgaaattgaaaaactgaagctggacaaggaccatttagagaaggttttacaaattggatcagcaaaagccaaagaattagcatacactgtgtgccaggaggtgaagaaattggtgggttttctataggaagtttcaacgaatcacagcaaggcttttgtgccttgcactccatgcattctgataacggcagctttcctaaaaagaaaaagttatagttttgggacatttaatttggtatagctgattattggctttatttgatgaatattgctttgtagctttgaaatacgacagtgttccaaatcccatcaacaaaatgctgtgaacaacaacaacaaaaaataaatcaagaaggcatagcaaaaaaaaaaaaaaaaaaaaaaaaaa

SEQ ID NO: 2026 - DNA, 922 bp, Homo sapiens
cttacagaactcccacggacacaccatgattaggaccctgctgctgtccactttggtggctggagccctcagttgtggggtctccacttacgcgcctgatatgtctaggatgcttggaggtgaagaagcgaggcccaacagctggccctggcaggtctccctgcagtacagctccaatggccagtggtaccacacctgcggagggtccctgatagccaacagctgggtcctgacggctgcccactgcatcagctcctccaggatctaccgcgtgatgctgggccagcataacctctacgttgcagagtccggctcgctggccgtcagtgtctctaagattgtggtgcacaaggactggaactccaaccaggtctccaaagggaacgacattgccctgctcaaactggctaaccccgtctccctcaccgacaagatccagctggcctgcctccctcctgccggcaccattctacccaacaactacccctgctacgtcacaggctggggaaggctgcagaccaacggggctctccctgatgacctgaagcagggccggttgctggttgtggactatgccacctgctccagctctggctggtggggcagcaccgtgaagacgaatatgatctgtgctgggggtgatggcgtgatatgcacctgcaacggagactccggtgggccgctgaactgtcaggcatctgacggccggtgggaggtgcatggcatcggcagcctcacgtcggtccttggttgcaactactactacaagccctccatcttcacgcgggtctccaactacaacgactggatcaattcggtgattgcaaataactaaccaaaagaagtccctgggactgtttcagacttggaaaggtcacagaaggaaaataatattatataaagtgacaactatgcaaatcac

SEQ ID NO: 2027 - DNA, 2725 bp, Homo sapiens
agtaagcactctcccttgtcgtggaggtgggcaaatctttatcagccactgccttctgctgccaggaagccagctagagtggtctttaaagaaaactgggcatctcctgctacttaaaatcaaaaactacctaaaataaagattatagagccagaggaagagatagccatggaggacagccccactatggttagagtggacagccccactatggttaggggtgaaaaccaggtttcgccatgtcaagggagaaggtgcttccccaaagctcttggctatgtcaccggtgacatgaaagaacttgccaaccagcttaaagacaaacccgtggtgctccagttcattgactggattctccggggcatatcccaagtggtgttcgtcaacaaccccgtcagtggaatcctgattctggtaggacttcttgttcagaacccctggtgggctctcactggctggctgggaacagtggtctccactctgatggccctcttgctcagccaggacaggtcattaatagcatctgggctctatggctacaatgccaccctggtgggagtactcatggctgtcttttcggacaagggagactatttctggtggctgttactccctgtatgtgctatgtccatgacttgcccaattttctcaagtgcattgaattccatgctcagcaaatgggacctccccgtcttcaccctccctttcaacatggcgttgtcaatgtacctttcagccacaggacattacaatccgttctttccagccaaactggtcatacctataactacagctccaaatatctcctggtctgacctcagtgccctggagttgttgaaatctataccagtgggagttggtcagatctatggctgtgataatccatggacagggggcattttcctgggagccatcctactctcctccccactcatgtgcctgcatgctgccataggatcattgctgggcatagcagcgggactcagtctttcagccccatttgagaacatctactttggactctggggtttcaacagctctctggcctgcattgcaatgggaggaatgttcatggcgctcacctggcaaacccacctcctggctcttggctgtgccctgttcacggcctatcttggagtcggcatggcaaactttatggctgaggttggattgccagcttgtacctggcccttctgtttggccacgctattgttcctcatcatgaccacaaaaaattccaacatctacaagatgcccctcagtaaagttacttatcctgaagaaaaccgcatcttctacctgcaagccaagaaaagaatggtggaaagccctttgtgagaacaagccccatttgcagccatggtcacgagtcatttctgcctgactgctccagctaacttccagggtctcagcaaactgctgtttttcacgagtatcaactttcatactgacgcgtctgtaatctgttcttatgctcattttgtattttcctttcaactccaggaatatccttgagcatatgagagtcacatccaggtgatgtgctctggtatggaatttgaaaccccaatggggccttggcactaagactggaatgtatataaagtcaaagtgctccaacagaaggaggaagtgaaaacaaactattagtatttattgatattcttggtgtttagctggctcgatgatgttaacagtattaaaaattaaacccccataaacccaacctaagcctatggaatccacagtcacaaaatcgaagttaacccagaatctgtgataagcagcttggctttttttttaaatcaatgcaagtacaccattatagccagaatctgtatcacagaggtgcaagctgacagcagagctcagtccccacttcctgcaaacaatggcctgcaccctatcccttgtgtgtgtgacattctctcatgggacaatgttggggtttttcagactgacaggactgcaagagggagaaaggaattttgtcaatcaaaattattctgtattgcaacttttctcagagattgcaaaggattttttaggtagagattatttttccttatgaaaaatgatctgttttaaatgagataaaataggagaagttcctggcttaacctgttcttacatattaaagaaaagttacttactgtatttatgaaatactcagcttaggcatttttactttaacccctaaattgattttgtaaatgccacaaatgcatagaattgttaccaacctccaaagggctctttaaaatcatatttttttattcatttgaggatgtcttataaagactgaaggcaaaggtcagaatgcttacgggtgttatttttataagttgttgaattccttaatttagaaaagctcattattttttgcacactcacaatattctctctcagaaatcaatggcatttgaaccaccaaaaagaaataaagggctgagtgtggtgctcacgcctgtaatcccagcactttggggagcccaggcgggcagattgcttgaacccaggagttcaagaccagcctgggcagcatggtgaaaccctgtatctacaaaaaatacaaaaattagccaggcatggtggtgggtgcctgtagttccagctacttgggaggctgaggtgggaaaatgacttgagcccaggaggaggaggctgcagtgagctaagattgcaccactgcactccaacctgggtgacaagagtgaaactgaat

SEQ ID NO: 2028 - DNA, 5360 bp, Homo sapiens
ttgaggtgcattgaaatgttccaagctgttacttaccttaacatgttcttgaggtaccatggcatggattaaaaggaaatttggtaagtggcctccacttaaacgacttactagggaagctatgtgaaattatttaaaagggcgaggggatcaaatagtacttatccttcatgcaaaagttgtacagaagtcatatggaatgaaaaaggttttttgccctcccccttgtgtatatcttatgggcagtggatggaagaaaataaaattacaaatgaaatgcgatggttgttctgaacaaggctctcatccatgtgcatttattgggataggaaatagtgaccaagaaatgcagcagctaaacttggaaggaaagaactattgcacagccaaaacattgtacatatctgattcagacaagcaaaagcacttcatgttgtctgtaaaggtgttctatggcaacggtgatgacattggtgtgttcctcagcaagtcgtccaaaccttccaaaaagaagcagtcattgaaaaatgctgacttatgcattggctcaggaacaaaggtggctctgtttaatcgactacgatcccagacagttagtaccagatacttgcatgtagaaggagggaattttcatgccagttcacagcagtggggagcatttacattattcttggatgatgatggatcagaaggagaagaattcacagtcagagatggctacattcattatggacaaacagtcaagcttgtgtgctcagttactggcatggcactcccaagattgataattaggaaagttgataagcagaccacattattggatgcagatgatcctgtgtcacaactccataaatgtgcatttgaccttgaggatacagaaagaatgtacttatgcctttctcaagaaagaataattcaatttcaggccactccatgcccaacagaaccaaataaagagatgataaatgatggtgcttcctgggcaatcattagcacacataaggcgaagtatacattttatgagagaatgggccctgtccttgccctggtcatgcctatgcctgtcgtagagagccttaagttgaatggcggtggggacgaagcaatgcttgaacttacaggacagaatttcactccaaatttacgagtgtggtttggggatgtagaagctgaaactatgtacaggtgtggagagagtatgctccgtgttgtcccagacgttctgcattctgagaaggttggagatagttcccagcaaccagtccaggtttcagtaactttggtccgaaatgatggaatcatatattccaccagccttacctttacctacacaccagaagcagggccgcggccacattgcagtgtagcaggcgcaatccttaaggccagttcaagccacgtgccccctaatgaattaaacacaaacagcgatggaagttacacaaatgccagcacaaattcaaccagtgtcacatcatctacaccaacagtggtatcctgaactaccgtctttttgctaagactcaaacggcttgagtgcagcaaaaagttgacaaaaaaggaaaaaaaaatgaacagtcttttgtggtttattgggaaacttttcataccaggtgatactattctaaaaccccgttgtctccctgcaagtgctgatttgaaatgcagaagccacagtaaaaaaaaaaaaaaaaaaaaaaaaaaaagaaaaaaaaatcaaaatgtataaatattggaaatcaagtttttcagctgttttgttggttggttggttggtttttgtttggttttgtttaaagggacaagaagtaaataatgtggctggaatacaagttgaacaaactagaagacacaaatctaacatagtttttatggaccaaggaacttgtatattgtataagctttagtaaaaggtacattttcaccatacctttttttatatcacggtattatagtacaccttgttaccaataggttgttctcttccccaccctcctttgagctttgctctaaaatacattctggttccaagcctgaccatccttgtttaatctatcatactcttccaggtttttttttttggtctaaggctggaacttttttctttttttttcagctgaagtcttatgactttttcatgagtcaaaattgtttggatttcacgaagtcaaatcttgcaaaggcctgcatattttttttaagattatatgaagtctgtgcaaaaagctttaaaaaattgcctctgccttgcctgcatacatgcaatgtatgtaacttagtctctcttctcagacactgttgggtagttatttctgtgttttctttttttaaaaaaaaatatggacttattgtggtttatctgagaggttctaacattcacatgcaatttggtgtggcatttagctattatgagttattggcgcgaacttgtttgatatttgaagtgtctctccccttttcccatgacgtaatacataggtgtgttccaggatttgttcaggtttttccccccctcctaatcttgtacataacttgtattttgtgtaagttaaacattttatttgaacttggaatgttcccagtgatttcattcagcagggtattttctgccttgttggcaagtagcaaaaaatatgggaagtatttgctaccagttgttagatggtgccccttattggtagaatcaggaaaatgtccgcaaaagcatgttttattatctttacttttttggggggttggagggggtagcctagccagacatcatgtaatcttaaaacataagatgcttttattagatgatcaactaaaaatagctggaagacagtactttagaaacaaaatagttagtaagatatataatgcaaatgtaacttatgttttcatttttttctctgccttttttttttgttttttttctttttttccagtactgagcatctccacaaatgtctcctactcagaaaatgtttcttttctttcagttgagatttggtgcattcagggttgtaggttggccttgcttgctaacccgccggttttaccgtgctttattcctgaactttgtttatgcctttgtttggttcttctgaaattgcagcagactcattgggctacatttagtacaggaaccacgtgtgtaatgttatacaacacagtcagtaatacaatcatccctcttagagtaaaaactacctctagattgtgtaagctttttactgtccataaaacaggagccacagtaccttatgaatgcaaaactgtaacttcctacagtgtttccccacagaacattgtctttctggtgtctgggctgtttttgaaaaagtttccattaatagactttttagaaattattattagtagcattttttttccagctttgcgtcttcatcactcactcaagtgtcagactatgcactgtaaatatcttcctaacatctttaaatcgccttttcctcagttttcaaggggaaggtcatttgtaaagcacgttaggtggttaaatcagttattgcggttttctcttacagcaagcctttttaatcacccccaggctgcattttattctatatcgccttttttcttcaaatctgctccaatcatccacttctctcttataagctattcctgcctcacacctaaatctgtttcagtgatcaagggcagaactcattgtggccttatctttctttgttgtaattgttcactgtctctttcttacagaccacttattctgagtagtagttattcctccctatggagtcatggcaggaatcattacacagtgcttttgttcagagcatggacatgttccaggtgctgctttgctttaacggccacaagtttcctccacttctcaggtttggtatttagtaaggaatcaattaaattaaccaataacaaaagagatacttttgaagaacaaactattctttacccattttgtagctcaaaaataatttttcaagttcatgaccttattaaaatgaacttgtgtttttttaacaaacgtctattttattttgatagtttctttccgaagataattgaaatattatactgtaacccttttcttttcttttttgaaaagtccaagaatgtacttatacaggatttttccccacctatttttggccattctcataccacagacaaaagagtgaatgattgtcattgtagcttattgtttatcagtagttcttttgtagctgcttacattttttctttcatggtttgtgaatcatttcagtatgtaatttataggaaccttgtcctctggtatagtagactgtgtgccctcctccaggatggcattattagacatgctggtcatttaccctcagaaagactctcttatagaatggtgagtgcttcagttatagtatgtttgaattttaaaaaattcctgtttagaatgtatctatgctctcatgactatgcagtttctaacatacacatagaagctgagtctctgatccaatatgtttttatttgttccattaatttatcacatagattgggaaggcaagctaaaagccttaaaaatgccctttatattttgagtgatttcagcgttgaacacagtatactatctaaatttgctgctcactttcttaaactgttgcaattaaaggcatgtttatacatgactaatcgtgaaatgtttgtcactcttactgcacagacttatctgcaatcaaactggttagtttttttgttttgttttgttttattgtttttaatgaatctggtaccatctgtgctttcacaaaaaacttccaatgccatttttgagaactaacctaacagtcatgctaaccagaaaatccactggggaggaggttcctttgaaacaaaatgctgttcagttagtaaccaagttactttgattgcaaaagcagctgtgtttctgataagtactgaacaaatgtgtgtaattttctgtgccagacttatgactttgttttcaagcactgtaatgtgggatggatggttagaaacaataatatatagggtttctgttaaccctttcaggactcaactgtatctccttttgttaattttcccctgtgttgtgataaattgtttgccagcattcagtactgtgttggtgcagatgaggtttatatctcattttagcttatttcttgtacctttcagcatgcctacgcattcagtccttaaggggtttattttacaaactgtgcgcctgaagtttattagcaataagatagaaaatgagcaagtttataccataattttgagaaaaaaagaatctgctcagttccatatttcatccgtgaaaaacttgcaatacgagcagtttcaaggaataaataaaaaggaaatgaaaccattgt

SEQ ID NO: 2029 - DNA, 2619 bp, Homo sapiens
agtttttccttttttcttctgccgtcgccttctctgcctcttctcatcctttctcgctctgctgctctgcagtgtgacgagtccgaatcctcttcccacccagcccgcgcctttcttcttttgcctgcgctgttctatttctccttcggccgccgccgccactgctgcacacagctggtgtcggtgccgcgcttttacccccaagtcgttcccgcagcctatggcccaggccgccttgggtatttctgctcaaggtaaccacatccctctttaaaaattccgccgaaaaagagaagacgctttacccgactctttgggccgttatctcacggcgaactttctgaccaagtatacaactacccagagggcctaggagaagtgctgtatagagagcagttcgacttcaacgctgagccaccttgggaacctagctgatgataggggggttccatctcccaacttgtccatggaggtcttcacttcagaaatccaagactcatattcatccagcttggtgtcaagtgggctgttgctgccagaattatcttgtgattatttgagagatgtatcagtttcttctgaagtacaatcaactgtagaagcctttgtagcagtttgttgcatattctaaggacccagacataggcttggtggcccgtctcttgtctttcctggtttatgactttcggctttgtggaatacggctgagatgaaaggatttattgatgatgcaaactactccgttggcctgttggatgaaggaacagaccttggaaatgttattgataactatgtttatgaacataccctgacagggaaaaatgcattttttgtgggagatcttggaaagattgtgaagaaacacagtcaatggcagaatgtagtggctcagataaagccattctacacagtgaagtgcaactctgctccagctgtacttgagattttggcagctcttggaaccggatttgcttgttccagtaaaaatgaaatggctttagtgcaagagttgggtgtacctccagaaaacattatttacataagtccttgcaagcaagtgtctcagataaagtatgcagcaaaagttggagtgaatatcctgacatgtgacaatgaaattgaattgaagaaaattgcacgtaatcacccaaatgccaaggtcttactacatattgcaacagaagataatattggaggtgaagagggtaacatgaagtttggcactaccctgaagaactgtaggcatctcttggaatgtgctaaggaacttgatgtccaaataattggggttaaatttcatgtttcgagtgcttgcaaagaatctcaagtatatgtacatgctctatctgatgctcgatgtgtgtttgacatggctggagaaattggctttacgatgaacatgttagacattggtggaggattcacgggaactgaatttcaattggaagaggttaatcatgttatcagccctctgttggatatctactttcctgaaggatctggtgttaagataatttcagaacccggaagctactatgtgtcttctgcatttacactcgcagttaatatcatagcaaagaaagttgttgaaaatgataaatttccctctggagtagaaaaaaccggaagtgatgaaccagccttcatgtattatatgaatgatggtgtttatggttcttttgcaagtaaactgtctgaggacttaaataccattccagaggttcacaagaaatacaaggaagatgagcctctgtttacaagcagcctttggggtccatcctgtgatgagcttgatcaaattgtggaaagctgtcttcttcctgagctgaatgtgggagattggcttatctttgataacatgggagcagattctttccatgaaccatctgcttttaatgattttcagaggccagccatttattacatgatgtcattcagtgattggtatgagatgcaagatgctggaattacttcagactcaatgatgaagaacttcttctttgtgccttcttgcattcagctgagccaagaagacagcttttccgctgaagcttaaacaggcattaacgcttctttagatctgaagttgcaggttaagcttgtctggtcaacattccagtgtggaaaaataatttaaacaatcttattctcttaattcttttggcaacaaaaactattagtaatagctatttgggaccagacaaaatcagctttcatctataattcattggggataatgggagatttagataatgtatccagatttaaacctaccagtttgtcctaccccttaagcgtttaaaataaaatatgcaacaaaatggatgacttagtggagatggaagcccattaattgggttccccattaaatcgtttacatacaagaacacagtttttatactaaggatttgtgtttaaagtcttgtaaagttcatgtctttcacccagatatatcaaatgttagaagaccagtgtgacttcattagataacgtttagtgtatttagaatgtgtaaatttgtgctttgaactgtagtttaataaatgtaaaattgcatcatagtatttgttgacctaatgtaacccttgtatgattgcaataaaattttgtgtagatttt

SEQ ID NO: 2030 - DNA, 1519 bp, Homo sapiens
  misc_feature (973)..(973): n is a, c, g, or t
  misc_feature (1090)..(1093): n is a, c, g, or t
  misc_feature (1160)..(1160): n is a, c, g, or t
  misc_feature (1364)..(1365): n is a, c, g, or t
  misc_feature (1501)..(1502): n is a, c, g, or t
cacacacagccctgctcggtttgattttctccacgtggttgatattgtcttcagttgctaaggttgcttttgctaaatttcatttatcatccccttggtacgttcagttgctggctaagttgattttgcaaatttcatttatcaaacctcggcctacgattacctaagtacgtttctgcaggttaactgtatctacgctcagtcatatccttcaaagttactaatgcaactgccaaagagggacagtgtcaatatcattgtcttcattagaaggacggctgccccacactgtgagaacactgctgttcctaacagtagtttacttttagagggatgtgagaattagtttgaccttaattccagatgtgcattagccctcaaaagaaaaatcccattctccttccttttggggagcacttttggtggcaccaaggctggtgtggggtagtggagagagcactgagcttagagtcacaaccagatgaactgctctggtcttactcagctgtgtgacttgggctgctctggtcttactctagctgtgtgacttgggcaagcagcttgcagtctctgagcctctgagactccctgatggacgaggagaacaatgaccccctccccaggctgtgctgagagagggaattgatcttggatatgaaaatgctgccctggcacagaggtaggagctgagcaacactgctggatgaataaacacatgtaatgcagggtgaacagaacatttcatctcgaacagctgaaggcacacgttacctatgcccatggaaagaactgcgtggaaaattcatttgttgcatttttgccaggttgatgtttgcaaagcagggcactctccccacatttccccaaaaccaatcagagggagactccacattgtttccatctcctcccctcaaacaattatcaaaccatgtagaacaaacggctgtctgccaactggtagaggcaaagcagncaataatctggaattccgatcaacaaaatggtatttgttctcatactatgataaagacatacttgagaccgcattatttatggggaaaagaagtttaattgactcacagttccacannnngtacaggaggtcatggctagggaggcctcaggaaacttagaatcatggtggaaggtgaagaggaagnatgcaccatcttcacatggcagagcaggagagagagagcaaagttggaagtgctacacacttttaaacaaccagatctcttgagaactcactcactatcacaagatagcaagggagaaatccacccccatggtccaatcatcttccaccaagcccctcttccaaccttgggtattacaattgaatcatgagatttgggtggggnnagaaaagcaaaccatatcagagattgaatcaataatccaaagcctttcagcaaagaaaagcctgcaaccagatgttttactagtgaattccacaaacatttaaaaaatataaatgccaatacttttcaagctcctnnaaaaaattgaaaagggc

SEQ ID NO: 2031 - DNA, 1759 bp, Homo sapiens
agcggatgctggggctgtaaggcgcgcgcggtcagctgttggcggtgcagggaggaggacgccggggctcgccttccctcctctgccgccgctgccgccatgattccggtgtcgctggtggtggtggtggtgggtggctggactgtcgtctacctgaccgacttggtgctgaagtcatctgtctattttaaacattcttatgaagactggctggaaaacaacggactgagcatctcccctttccacataagatggcaaactgctgttttcaatcgtgccttttacagttggggacggcggaaagcaaggatgctttaccaatggttcaattttggaatggtgtttggcgtaattgccatgtttagctcattttttctccttggaaaaacgctgatgcagactttggcacaaatgatggctgactctccctcttcttattcttcctcctcttcttcctcttcctcctcttcttcctcttcctcttcttcatcttcttcctcttcctcgcttcacaatgaacaggtgttacaagttgtggttcctggtataaatttacccgtcaatcaactgacctatttcttcacggcagttctcattagtggtgttgtacatgaaattggacatgggatagcagctattagggaacaagttcgatttaatggctttgggatttttctcttcattatttatcctggagcatttgttgatctgttcaccactcatttgcaacttatatcgccagtccagcagctaaggatattttgtgcaggtatctggcataattttgtccttgcactcttgggtattttagctcttgttctcctcccagtaattctcttgccattttactacactggagttggggtgctcatcactgaagttgctgaggactctcctgccattggacccagaggcctttttgtgggagaccttgtcacccatctacaggattgtcctgttactaatgtgcaagattggaatgaatgtttagataccatcgcctatgagccccaaattggttactgtataagtgcatcaactttacagcagttaagtttcccagttagagcatacaaacgactagatggttcaactgaatgctgtaacaatcacagcctcacagatgtgtgcttttcctacagaaataattttaataagcgtttgcatacatgtcttcctgcccggaaagcagttgaagcaactcaagtttgcagaaccaataaagactgtaaaaaaagctcaagttcaagtttctgtataataccttctttggaaactcacactcgcttaataaaagtaaaacacccacctcagattgatatgttatacgtaggacatcctctgcatcttcactacacagtgagcatcaccagttttatcccacgttttaactttctaagcatagatctgccagtggttgtggagacatttgtcaagtacctgatttccctctcaggagctctggctattgttaatgcagtaccctgctttgctttggatggacaatggattctaaactctttcttggatgccacccttacctcagtgattggagacaatgatgtcaaagatctaatagggtttttcatcttgctgggtggcagtgtacttttggctgccaatgtgaccctgggactctggatggttacagcacggtaatgtttgcactcatctgacagaatccctgagttacagtatacagctatgtggtaatattcattgccattgaaattcttacttggtatgaaatataaagtgt

SEQ ID NO: 2032 - DNA, 2675 bp, Homo sapiens
ggttgggaacacagacattttcggagctggagccgccactgccgccgccattttgtgtctgtggagaaagaagcttctgtggcggctggaagtggacggagatcacccgcgagacggcggcgtttcatacccgaggttccccctgtgtcgtcccccatcccccctccgcggtcagcatgtggtgaagccggagccgcgagagagccggggagaggaagaggagtcggaagggaggcggggtatccagagcggcttcagcttcagctgcagcggacctcggaggggggccgcggcgcaatgtcagagcagacgccggccgaggccggtgctgcgggggcccgggaggacgcctgtcgggattatcagtcatcgctcgaagacctgaccttcaatagcaagccgcacatcaatatgctgaccattctagccgaggagaacctgcccttcgccaaggagatcgtctctctcatcgaggcccaaaccgccaaggctccttcctcagagaagcttcctgttatgtaccttatggattctattgtgaaaaacgttggaagagagtatctcactgcctttactaaaaatctagttgcaacatttatttgtgtgtttgaaaaggtggatgaaaatactaggaaaagtttatttaagttacgttctacatgggatgaaatattccctttgaagaaactttatgccctggatgtcagagtcaattcattagatcctgcttggcctattaaacctctaccccccaatgtgaatacgtctagcatccatgtgaatcctaaatttttaaataaatcgcccgaggagccttcaacacctggtacagtggtcagttcccctagcatctccactcctccaattgttcctgatatacaaaagaatcttacacaagaacaactaataaggcaacagttactggcaaagcaaaaacagttgttagaacttcagcagaaaaagctggagcttgagctagagcaagctaaggcacagttggcagtttctcttagtgttcagcaggaaacatccaatttaggtcctggatctgcaccatccaaattacatgtttcacagattccccctatggcagttaaagctcctcatcaggttcctgtgcaatctgagaaaagccgtccaggaccatccttacaaattcaggatttaaaaggaactaaccgggatcctcgtctgaacaggataagccaacattctcatggaaaagatcagagtcacaggaaagaatttctaatgaacacattaaaccagtctgatactaagacaagtaaaactataccctctgaaaaactaaattcatccaagcaagaaaaaagtaaatcaggtgaaaaaataaccaagaaagaacttgaccaattagattctaaatcgaaatcgaaatcgaaatcaccctcacctttgaaaaacaaattatctcacacaaaagacttgaaaaatcaagaatcggaaagtatgaggttgtctgatatgaacaagagagatccaagattaaaaaaacatcttcaggataagaccgatggcaaagatgatgatgtgaaagagaagagaaaaactgcagaaaaaaaggataaagatgagcacatgaagtcatccgaacacagactggctggaagtagaaataaaatcataaatggcattgtacaaaaacaggatacaataacagaagagtcagaaaaacaggggacaaaaccagggagatcgagtactagaaagcgatcaagatctcgatcacccaagtctaggtcaccaattatacattccccaaagagaagagataggcggtcacccaaacgaaggcaaagaagtatgtctccaacatcgacacctaaagctggaaagattcgccaatctggagctaagcagtcacatatggaagagtttacaccaccttctagggaagacagaaatgctaagagaagtactaaacaggatattcgggatccaaggcgaatgaaaaagactgaagaggagcgaccacaagaaactacaaatcagcattctacaaagtcaggcactgaaccaaaggagaatgtagaaaactggcaaagttccaagtctgccaaaagatggaaatctggttgggaagaaaataaaagcttacaacaggttgatgaacatagtaaacctcctcatctgaggcatagggagagctggtcaagcactaaaggaattttatcacctcgagccccaaagcagcaacagcatcgattaagtgtagatgccaatcttcagattcctaaagagttaactcttgcaagcaaaagagaattacttcaaaagacgagtgaacgtttagcatctggtgaaattacacaggatgacttccttgttgttgtgcatcaaattcgacagctatttcagtatcaagaaggtgtgcgagaagagcagagatctccattcaatgatcgtttccacttaagcgacctcgatatgaagattcagataaaccatttgtagatagtccagcatcaagatccgccggcctggatacaaatcagcgacttacagctttagctgaagacagaccgttatttgatggacctagtaggccatcagtagcaagagatggcccaacgaagatgatttttgaaggacccaataaattaagccctcgaattgatggactccggaaaaaaaaaaaaaaaaaaaaaaaaaaa

SEQ ID NO: 2033 - DNA, 1440 bp, Homo sapiens
gaattccccccccccccccctcacttggtgtgtctatatgtctggcagacattatcagcacattctctgttgttacctgtgattcattttttcttcactctccaggtgaatttcaattgctgaaaatttcccactgaaaatatgcagtaatatattttgtggttcagacatttggggcaaatggttcacattcattttagggttagtggtcatgctgtttatttttctctgctatacaaagttcctcttaggggtctgcctcatgacactaaaaaatgaatagagattctactgtaggttatctcctaggcttgagttcaacatttgtttggatttttgaagaaagtcaaatcaagcaatgctcccaaatgatgtctttgtaaattcataccctctggccctattttttttcatagaccctaactctacctttctgctttaaagcaaagtaaactcggtggcctcttcttctccacccctcaaaatgatagcaatctctgccgtcagcagtgcactcctgttctcccttctctgtgaagcaagtaccgtcgtcctactcaattccactgactcatccccgccaaccaataatttcactgatattgaagcagctctgaaagcacaattagattcagcggatatccccaaagccaggcggaagcgctacatttcgcagaatgacatgatcgccattcttgattatcataatcaagttcggggcaaagtgttcccaccggcagcaaatatggaatatatggtttgggatgaaaatcttgcaaaatcggcagaggcttgggcggctacttgcatttgggaccatggaccttcttacttactgagatttttgggccaaaatctatctgtacgcactggaagatatcgctctattctccagttggtcaagccatggtatgatgaagtgaaagattatgcttttccatatccccaggattgcaaccccagatgtcctatgagatgttttggtcccatgtgcacacattatacgcagatggtttgggccacttccaatcggataggatgcgcaattcatacttgccaaaacatgaatgtttggggatctgtgtggcgacgtgcagtttacttggtatgcaactatgccccaaagggcaattggattggagaagcaccatataaagtaggggtaccatgttcatcttgtcctccaagttatgggggatcttgtactgacaatctgtgttttccaggagttacgtcaaactacctgtactggtttaaataagtttaccttttcctccaggaaatataatgatttctgggaacatgggcatgtatatatatatatggagagagaattttgcacatattatacatattttgtgctaatcttgttttcctcttagtattcctttgtataaattagtgtttgtctagcatgtttgtttaatcctttgggaattc

SEQ ID NO: 2034 - DNA, 1890 bp, Homo sapiens
tatgttgccaagctttatttaggctgtaatggttacagataacacacatctaaccctatattctctgcgtcccatgcagtcccctgagcaggctcagctaccctttccctccagtctcacttcttgtcttcctccttcttgtccttcttgccatccttggtggcctggcaggccagggagcccacagcgtttcaaatggcttcattgttgggatccacacctgggaggttctccaggacactctgaaggaactcaggatcctgcatcacgtcgtaatcatcctcctccttggctggctggcaagtgtccatggctgagctggcatcaatgtctactgattccgcctggccaaactctgctcctgcagggacatcttcatgacataagcaatcccctcttccttaggtcaggaagtccggtatggccaaactcttgttggctaatggtcatcttcagcaggacctcgtctgagccttcagtcccagttgtagcaatcctggcctcagcagcagaggctgcagctgctcgtctgggctcctcatcctgccgctgctgctgctcctccatagaaacccgagggccaaggccagctgaggatcagcactgggatctactccaaattcaaagtcactggcaccgagacccagcatggcacccccttccccagccaaaatcggagaactgatgagagcatcagccaagctgggcccaggaggcactgccaccagatgagaaccgcttccatctttgccattcaacgtgtttacaaaggctgtcagcttttctctgttcacctcctcttcccccaaatttatcatgtcaacatttactttctccttcttgaggaatttagccagtttcaccagatccttctcattgcctttgggcttcccacgaaggcaatgatatgcgtcttgtgattcttgccccgtcagcgcttcagagccagatgggccatgtggatgccagtgtagaaggtgatcttgcccttgggttggacggtgtgtagcttggacaggatgcggccggtgtctagagtgagtgtggtcagcacttcacagtcattagccagtgtgatgagggccatgttgttctcagggttgctgtggattttgtttaattttttttttttttttgagactgagtcttgctctgtcacctaggctggtgtgcaatggcgcaatctcagctcactgcaacctctgcctctcgggttcaagggattctcctgtctcagcctcccaagtagctggaactacaggcgcctgccaccacacccggctaatttttgtatttttagtagggacggggttttaccatgttggtcaggctggtcttgaactcctgacctcatggtctgcctgcctcggcctctcaaagtgctgggattacaggcgtgaaccactgcgcccggcctgttgtgggttttgaatgacatactatgttgacagcgtcttgctgggcctgcagctgggtggggaagaagtcctcattccgcacatactgttgtccacacacaccatagcgctttccgacaccatcctgccaccctcctccctcccatttcttgaaataatccttcatgtataacttaggttaatagtgcctcatagtctacttagaaagaatcagatagaattttctttagtaaggaaatttccaaatagagaatagaaaagttaattgatggcaatgtatttaatagcgaggatcagtgaggaaatgaattaaagaggttccttttacacttttcttctctgaagctaggtacaccttagttcatgttgcagcttctttggtgctgtcagatcatagttggtatgaaatgggaagtttctgaaagtcagatgacacatttgtgaaatgcaacctcactgttatctacccggc

SEQ ID NO: 2035 - DNA, 3334 bp, Homo sapiens
ccggcgcgacttgggcctggctctgtgactgaggcggcggcggtggcggccaagcgggatacgggcggcgggagctggggaacaggcatggacgtttccgggcaagagaccgactggcggagaccgccttccggcagaagctggtcagtcaaatcgaggatgccatgaggaaagctggtgtggcacacagtaaatccagcaaggatatggagagccatgttttcctgaaggccaagacccgggacgaatacctttctctcgtggccaggctcattatccattttcgagacattcataacaagaaatctcaagcttccgtcagtgatcctatgaatgcactccagagcctgactggcggacctgctgcgggagccgctggaattggcatgcctcctcggggcccgggacagtctctgggcgggatgggtagctttggtgccatgggacagccaatgtctctctcagggcagccgcctcctgggacctcggggatggcccctcacagcatggctgtcgtgtctacggcaactccacagacccagctgcagctccagcaggtggcgctgcagcagcagcagcaacagcagcagttccagcagcagcagcaggcggcgctacagcagcagcagcagcagcagcaacagcagcagttccaggctcagcagagtgccatgcagcagcagttccaagcagtagtgcagcagcagcagcagctccagcagcagcagcagcagcagcagcatctaattaaattgcatcatcaaaatcagcaacagatacagcagcagcaacagcagctgcagcgaatagcacagctgcagctccaacaacagcaacagcagcagcagcagcagcagcagcagcagcagcaggctttggaggcccagccaccaattcagcagccaccgatgcagcagccacagcctccgccctcccaggctctgccccagcagctgcagcagatgcatcacacacagcaccaccagccgccaccacagccccagcagcctccagttgctcagaaccaaccatcacaactcccgccacagtcgcagacccagcctttggtgtcacaggcgcaagctctccctggacaaatgttgtatacccaaccaccactgaaatttgtccgagctccgatggtggtgcagcagcccccagtgcagccccaggtgcagcagcagcagacagcagtacagacagctcaggctgcccagatggtggctcccggagtccaggtcagccagagcagcctccccatgctgtcctcgccgtcaccgggccagcaggtgcagaccccgcagtcgatgccccctcccccccagccgtccccgcagcccggccagcccagctcacagcccaactccaacgtcagctctggccctgccccatctcccagtagcttcctgcccagcccctcaccgcagccctcccagagcccagtgacggcgcggaccccacagaacttcagtgtcccctcacctggacctttaaacacacctgtgaaccccagctctgtcatgagcccagctggctccagccaggctgaggagcagcagtacctggacaagctgaagcagctgtcgaagtacatcgagcccctgcgccgcatgatcaacaagatcgacaagaacgaagacagaaaaaaggacctgagtaagatgaagagccttctggacattctgacagacccctcgaagcggtgtcccctgaagaccttgcaaaagtgtgagatcgccctggagaaactcaagaatgacatgcggtgcccactcccccaccgcccccggtgccaccgaccaaacagcagtacctatgccagccgctcctggatgccgtcctggccaacatccgctcacctgtcttcaaccattccctgtaccgcacattcgttccagccatgaccgccattcacggcccacccatcacggccccagtggtgtgcacccggaagcgcaggcttgaggatgatgagcggcagagcatccccagtgtgctccagggtgaggtggccaggctggaccccaagttcctggtaaacctggacccttctcactgcagcaacaatggcactgtccacctgatctgcaagctggatgacaaggacctcccaagtgtgccaccactggagctcagtgtgcccgctgactatcctgcccaaagcccgctgtggatagaccggcagtggcagtacgacgccaacccctttcctccagtcggtgcaccgctgcatgacctccaggctgctgcagctcccggacaagcactcggtcaccgccttgctcaacacctgggcccagagcgtccaccaggcctgcctctcagccgcctagccaagactgcagggatggcccgcagcctcatcggggccaaggacacacgcctcctgtcagacacttctaggtgttggcttccttagagagcctggggttaggttagctttcctgcttttatcttctgccttggggacctgccaaacgaaatcccacacctgtacagaactgggataggcgcagtggagcgggttgcttggggggcgttggccgacttcttagagaaggccctccatgtgacttcctcccaggagccagatgcgatcctcaggctgctctcaccgtggcctgtccacggtccaggtccatctcagcagcgtgagggtgcactcagggtgttgttagagcgtctcgtgtgtgctagacgcacccctactcgttcctatagaacacagaggacataggaaacccttaaaacacacatgggattctctggtcacagttttgggttcaggctatgctgctttgggcaggtggagcaccccccgaggaagcctgcaagtccagggcacaggctgccttttggagggagggctggcccataggtgctgctggctccccgccaccagctgggcctcagccctcacggcattcctgctgagcaccgtggggcacccagggagcaggggcgtcagggatcctgctgccggcacccctgtgccgctggcatgagggccgtgtccccactgtgaaggatgaagagcaaggccctcaggacccgtgtcctcagagcaccacacactgagcacccagagacagcgggcttggcagcgggccgggccatgcagggagcgcctccctatgttgcctgccactctgggcaccggccagcaccctctggtgagaagaggtcccccctttttatgtgcactaccccaccatctgtgattataataaatttattattcctgtggaaaaaaaaaaaaaaaaaaaaaaaaaaaaaaaaaaaaaaaaaaaaaaaaaaaaaaaaaaaaaaaaaaaaaaaaaaaaaaaaaaaaaaa

SEQ ID NO: 2036 - DNA, 3509 bp, Homo sapiens
cctgcggctggggctgggggcggcggcggcggcgacggggcggcgggcggcgcggggcggtccggcgggttcaaagaggaaaacatggcggaaaacaaaggcggcggcgaggctgagagcggcggcgggggcagcggcagcgcgccggtaactgccggggccgccgggcccgccgcgcaggaggcggagccgcctctcaccgcggtgctggtggaggaggaggaggaggaaggcggcagggccggcgctgagggcggcgcggccgggcccgacgacgggggggtggccgcggcctcctcgggctcggcccaggctgcttcatctcctgcggcctcagtgggcactggagttgccgggggcgcagtatcgacgccggctccagctccagcctcggctcccgctccgggtccctcggcagggccgcctcctggaccgccagcctcgctcctggacacctgcgccgtgtgtcagcagagcttgcagagccggcgtgaggcggagcccaagctgctgccctgtcttcactccttctgcctgcgctgcctgcccgagccggagcgccagctcagcgtgcccatcccggggggcagcaacggcgacatccagcaagttggtgtaatacggtgcccagtatgccgccaagaatgcagacagatagaccttgtggataattattttgtgaaagacacatctgaagctcctagcagttctgatgaaaaatcagaacaggtatgtactagttgtgaagacaatgcaagtgcagttggcttttgtgtagaatgtggagagtggctatgtaagacatgtatcgaagcacatcaaagagtaaaatttactaaagatcacttgatcaggaagaaagaagatgtctcagagtctgttggagcatctggtcaacgccctgttttctgccctgtacacaaacaagaacagttgaaacttttctgtgaaacatgtgatagattgacatgtagagactgtcagctattggaacacaaagaacataggtatcagtttttggaagaagcttttcaaaatcagaagggtgcaattgagaatctactggcgaaacttcttgagaagaagaattatgttcattttgcagctactcaggtgcagaataggataaaagaagtaaatgagactaacaaacgtgtagaacaggaaattaaagtggccattttcacccttatcaatgaaattaataagaaaggaaaatctctcttacaacagctagagaatgttacaaaggaaagacagatgaagttactacagcagcagaatgacatcacaggcctttcccggcaggtgaagcatgttatgaacttcacaaattgggcaattgcaagtggcagcagcacagcactactatacagcaagcgactgattactttccagttgcgtcatattttgaaagcacggtgtgatcctgtccctgctgctaatggagcaatacgtttccattgtgatcccaccttctgggcaaagaatgtagtcaatttaggtaatctagtaatagagagtaaaccagctcctggttatactcctaatgttgtagttgggcaagttcctccagggacaaaccacattagtaaaacccctggacagattaacttagcacagcttcgactccagcacatgcaacaacaagtatatgcacagaaacatcagcagttgcaacagatgaggatgcagcaaccaccagcacctgtaccaactacaacaacaacaacacaacagcatcctagacaagcagcccctcagatgttacaacaacagcctcctcgattgatcagtgtgcaaacaatgcaaagaggcaacatgaactgtggagcttttcaagcccatcagatgagactggctcagaatgctgccagaataccagggatacccaggcacagcggccctcaatattccatgatgcagccacacctccaaagacaacactcaaacccagggcatgctggaccctttcccgtagtatcggtacacaacaccacaatcaacccaacgagccctactacagcaactatggcaaatgcaaaccgaggtcccaccagcccatctgttacagcaatagagctaatcccctcagttaccaatccagaaaaccttccatcgctgccagatattccacccatacagttggaagatgctggctcaagtagtttagataatctactaagtagatacatctcaggcagtcacctacccccacagcctacaagcaccatgaatccttctccaggtccctctgccctttctccgggatcatcaggtttatccaattctcacacacctgtgagacccccaagtacttctagtactggcagtcgaggcagctgtgggtcatcaggaagaactgctgagaagacaagtcttagtttcaaatctgatcaggtgaaggtcaagcaagaacctgggactgaagatgaaatatgtagcttttcaggaggtgtaaaacaagaaaaaacagaggatggcaggaggagtgcttgcatgttgagcagtcctgagagtagcttgacaccacctctctcaaccaacctgcatctagaaagtgaattggatgcattggcaagcctggaaaaccatgtgaaaactgaacctgcagatatgaatgaaagctgcaaacagtcagggctcagcagccttgttaatggaaagtccccaattcgaagcctcatgcacaggtcggcaaggattggaggagatggcaacaataaagatgatgacccaaatgaagactggtgtgctgtctgccaaaacggaggagatctcttgtgctgcgaaaaatgtccaaaggtctttcatctaacttgtcatgttccaacactacttagctttccaagtggggactggatatgcacattttgtagagatattggaaagccagaagttgaatatgattgtgataatttgcaacatagtaagaaggggaaaactgcgcaggggttaagccccgtggaccaaaggaaatgtgaacgtcttctgctttacctctattgccatgaattaagtattgaattccaggagcctgttcctgcttcgataccaaactactataaaattataaagaaaccaatggatttatccaccgtgaaaaagaagcttcagaaaaaacattcccaacactaccaaatcccggatgactttgtggccgatgtccgtttgatcttcaagaactgtgaaaggtttaatgaaatgatgaaagttgttcaagtttatgcagacacacaagagattaatttgaaggctgattcagaagtagctcaggcagggaaagcagttgcattgtactttgaagataaactcacagagatctactcagacaggaccttcgcacctttgccagagtttgagcaggaagaggatgatggtgaggtaactgaggactctgatgaagactttatacagccccgcagaaaacgcctaaagtcagatgagagaccagtacatataaagtaaaatgacatggatttaaatgaattgtttaaaaaaaaaaaaaa

SEQ ID NO: 2037 - DNA, 993 bp, Homo sapiens
atgaagctcaccctagagtcttttattcaaaacttcagcgttctctatagtcccttgaaaaggcatctcattggaagtggctctgcccagttcccgtctcagcatttaatcactgaagtgacaactgataccttttgggaagtagtccttcaaaaacaggacgttctcctgctctattacgctccgtggtgcggcttctgtccatccctcaatcacatcttcatccagctagctcggaacctgcccatggacacattcactgtggcaaggattgacgtgtctcagaatgaccttccttgggaatttatggtcgatcgtcttcctactgtcttgttttttccctgcaacagaaaggacctaagtgtgaaataccccgaagacgtccctatcacccttccaaacctgttgaggttcattttgcatcactcagaccctgcttccagcccccagaatgtggctaactctcctaccaaggagtgtcttcagagcgaggcagtcttacagcgggggcacatctcccacttggagagagagatccagaaactgagagcagaaataagcagcctccagcgagcacaagtgcaggtggagtcccagctctccagtgcccgcagagatgagcaccggctgcggcagcagcagcgggccctggaagagcagcacagcctgctccacgcacacagtgagcagctgcaggccctctatgagcagaagacacgtgagctgcaggagctggcccgcaagctgcaggagctggccgatgcctcagaaaacctccttaccgagaacacgtggctcaagatcctggtggcgaccatggagaggaaactggagggcagggatggagctgaaagcctggcggcccagagagaggtccaccccaagcagcctgagccctcagccaccccccagctccctggcagctcccctccacctgccaatgtcagcgccacactggtgtctgaaaggaataaggagaacaggacagactaa

SEQ ID NO: 2038 - DNA, 2762 bp, Homo sapiens
ggggctctgtggcggagacagccaggttggcagctgacgggacagccggggtctattttgttgcgggttttcagcaaatccagggctggtctggaggcgcgaaaacttaaggcatacagaacgatggagtatatggcagaatccaccgaccgcagccctggacacatcttgtgctgtgagtgtggtgttccgataagtccaaatcctgccaatatttgtgtggcctgtttgcgaagtaaagtggacatcagccaaggtattccgaaacaagtctcgatttcgttctgcaaacaatgtcaaaggtattttcaaccaccaggaacttggatacagtgtgctttagaatccagggaacttcttgctttgtgcttgaaaaaaatcaaagcccctctgagtaaggtacggcttgtagatgcaggctttgtttggactgagcctcattctaagagacttaaagttaaactgactattcagaaagaggtgatgaatggtgctatccttcaacaagtgtttgtggtggattatgttgttcagtcccaaatgtgtggagattgccatagagtagaagctaaggatttctggaaggctgtgattcaagtgaggcaaaagactttgcataaaaaaactttctactatctggaacagttaattctgaaatatggaatgcatcagaatacacttcgtatcaaagagattcatgatggtctggatttttattattcctcaaaacaacatgctcagaagatggtcgaatttcttcagtgtacagttccctgtagatacaaagcatcacaaagactgatctctcaagatatccatagtaacacatacaattacaaaagcactttttctgtggaaattgttccaatatgcaaggataatgttgtctgtctgtctccaaaactggcacaaagcctgggaaatatgaaccagatttgtgtgtgtattcgagtaaccagtgccattcacctcattgatccaaacaccctacaagtggcagatattgatgggagcactttctggagtcaccctttcaatagtttatgtcatcccaaacagctagaggagtttattgtgatggaatgcagcatagtccaagatataaaacgtgctgcaggtgctggaatgatatcaaaaaagcataccctcggggaagtctgggtacagaagacatctgaaatgaatacagataaacagtatttttgtcgtactcatttgggacatcttctaaatcccggagacctggtgttagggtttgatttggccaactgtaacttaaatgatgagcatgtcaacaaaatgaactcagatagagttccagatgtggtattaatcaagaagagctatgaccggaccaaacgtcagcgtcgtagaaactggaaattgaaagagcttgcaagagagagagaaaacatggatacagatgatgaaaggcaataccaagattttcttgaagatcttgaagaagatgaggcaattcgaaaaaatgtcaacatttacagagattcagccatccctgtggaaagtgacaccgatgatgaaggagcacctcgaattagtctggctgagatgcttgaagaccttcatatttcccaagatgccactggtgaagaaggtgcatcaatgctgacataatgagatgttgtagactgtttccatacatgggcttaagaagttggacagagttaccttaagtgtctctactatctttgcctccagatttcaagaggagaaatttagttttaaacctgaataaacatgtttgttttcagtgctcactcaaaccactaaaacagatggatagctttgaggttttagataaggaaagattatggagaatgtagttgttattgatttttggcaattttacatttggaattttatcactgtgcttttttatatgaggcactgtagtattttcacatagtatagtactctggatgtaaaagctcaaaaattgtgattccttgaacgttcactaaatcttcaagcaaaaacacatttttacattatttttacgttgattattttagtgaaagaccatatgaagaagcatttttaatattaacttgttacatactttgatccactttacatcatttttatgttgttgaggtagggaaattagggttcagtttatcactggacattcaggaggcaagtcaatcttttttatttccttataaaattaactcttcaaaagccgttaaacagagagttatcttaatttttattgcagtaggaggaaatatatttaaaatatttgtagatttatagcaaatagagactcgttatttaaaggttaaataacaatttgttcttttgttgtttttgccagtttagggcagtagctgcttttgtcataaatatcttcctaccacatcaaaaatgctgcttttaaaatttttgtttataaattgagaaggaattttctctctataagtttctgtcattgaacagatcaccattaaaaagaatattagaatccagcatgaagataatggctaataaaaatgaggtacatactttataaaaccattaatcagatttgaatgaggaatgcttcccacatccttgaaagaaaaactgtggcttacgttttgaagtattctgagaatgaagtattaagatccaatttctataagcaagatcagacttgttaagtatgccgcaagtaagagctaattcattcattccatgtgtgccactaaataaagagattgagcaagtgcaaaaaaaaaaaaaaaaaaaaaaaaaaaaaa

SEQ ID NO: 2039 - DNA, 2093 bp, Homo sapiens
tacctgtgcggccctcaacgtctccttggtgcgggacccgttcactttcggctcccggagtctccctccactgctcagacctctggacctgacaggagacgcctacttggctctgacgcggcgccccagcccggctgtgtccccggcgccccggaccaccctccctgccggctttgggtgcgttgtggggtcccgaggatttgttgaaagacattcaagattacgaagtttagatgaccaaaatggatatccgaggtgctgtggatgctgctgtccccaccaatattattgctgccaaggctgcagaagttcgtgcaaacaaagtcaactggcaatcctatcttcagggacagatgatttctgctgaagattgtgagtttattcagaggtttgaaatgaaacgaagccctgaagagaagcaagagatgcttcaaactgaaggcagccagtgtgctaaaacatttataaatctgatgactcatatctgcaaagaacagaccgttcagtatatactaactatggtggatgatatgctgcaggaaaatcatcagcgtgttagcattttctttgactatgcaagatgtagcaagaacactgcgtggccctactttctgccaatattgaatcgccaggatcccttcactgttcatatggcagcaagaattattgccaagttagcagcttggggaaaagaactgatggaaggcagtgacttaaattactatttcaattggataaaaactcagctgagttcacagaaactgcgtggtagcggtgttgctgttgaaacaggaacagtctcttcaagtgatagttcgcagtatgtgcagtgcgtggccgggtgtttgcagctgatgctccgggtcaatgagtaccgctttgcttgggtggaagcagatggggtaaattgcataatgggagtattgagtaacaagtgtggctttcagctccagtatcaaatgattttttcaatatggctcctggcattcagtcctcaaatgtgtgaacacctgcggcgctataatatcattccagttctgtctgatatccttcaggagtctgtcaaagagaaagtaacaagaatcattcttgcagcatttcgtaactttttagaaaaatcaactgaaagagaaactcgccaagaatatgccctggctatgattcagtgcaaagttctgaaacagttggagaacttggaacagcagaagtacgatgatgaagatatcagcgaagatatcaaatttcttttggaaaaacttggagagagtgtccaggaccttagttcatttgatgaatacagttcagaacttaaatctggaaggttggaatggagtcctgtgcacaaatctgagaaattttggagagagaatgctgtgaggttaaatgagaagaattatgaactcttgaaaatcttgacaaaacttttggaagtgtcagatgatccccaagtcttagctgttgctgctcacgatgttggagaatatgtgcggcattatccacgaggcaaacgggtcatcgagcagctcggtgggaagcagctggtcatgaaccacatgcatcatgaagaccagcaggtccgctataatgctctgctggccgtgcagaagctcatggtgcacaactgggaataccttggcaagcagctccagtccgagcagccccagaccgctgccgcccgaagctaagcctgcctctggccttcccctccgcctcaatgcagaaccagtagtgggagcactgtgtttagagttaagagtgaacactgtttgattttacttggaatttcctctgttatatagcttttcccaatgctaatttccaaacaacaacaacaaaataacatgtttgcctgttaagttgtataaaagtaggtgattctgtatttaaagaaaatattactgttacatatactgcttgcaatttctgtatttattgttctctggaaataaatatagttattaaaggattctcactccaaacatggcctctctctttacttggactttgaacaaaagtcaactgttgtctcttttcaaaccaaattgggagaattgttgcaaagtagtgaatggcaaataaatgttttaaaatct

SEQ ID NO: 2040 - DNA, 982 bp, Homo sapiens
taccattctgatgttggcgcggacgtgtctgggctgtgcggccgcctaggtgtctgggcgatctatgggcaagagcaagggccacgatgacagattacggcgaggagcagcgcaacgagctggaggccctggagtccatctaccctgactccttcacagtattatcagaaaatccacccagcttcaccattactgtgacgtctgaggctggagaaaatgatgaaactgtccagactaccctcaagtttacatacagtgaaaaatacccagatgaagctcccctttatgaaatattctcccaggaaaatctagaagataatgatgtctcagacattttaaaattactagcattacaggctgaagaaaatcttggtatggtgatgatttttactctagtgacagctgtgcaagaaaaattaaatgaaatagtagatcagataaaactagaagagagaagaaagaacaaaagaaaagaagcagaagaagctgaaaagcaattattccatggtactccagttacaattgagaatttcttaaattggaaagccaagtttgatgcagaactcttggaaattaaaaagaaaaggatgaaagaagaagaacaagcaggaaaaaataaattaagtgggaaacaactatttgaaacagatcataatcttgacacatctgatatccagttcttggaggatgctggaaacaacgtggaggtagatgagtctttgttccaagaaatggatgacttggagctggaggatgatgaagatgatccagactataatcctgctgacccagagagtgactcagctgactaatggactgtccccatctgcagagaggcttgactgccacagcatctgtggctatgctcagagggttatgattttcctttctttttttctaagaaaaaattattttcaggagaatattcttctgatagctttcatcattgaacttaataaactgaccttaaaatttcaaatat

SEQ ID NO: 2041 - DNA, 1561 bp, Homo sapiens
ggcccgctccaacatcagaatggtaacagctttcaggagcctaccacgcggcagctccggagctgccgcgtccatgtccgcgcacaatcggggcaccgagctcgaccttagctggatctccaaaatacaagtgaatcacccggcagttctgaggcgtgcggaacaaatccaggctcgcagaaccgtgaaaaaggagtggcaggctgcttggctcctgaaagctgttacctttatagatcttactacactttcaggtgatgatacatcttccaacattcaaaggctctgttataaagccaaatacccaatccgggaagatctcttaaaagctttaaatatgcatgataaaggcattactacagccgccgtttgtgtttatcccgcccgggtgtgtgatgctgtaaaagcactcaaggctgcaggctgtaatatccctgtggcatcagtggccgctggatttccagctggacagactcatttgaagacacgattagaagagatcagattggctgtggaagatggagctacagaaatcgacgtggtaattaacagaagcttggtgctgacaggccagtgggaagccctgtatgatgagattcgtcagtttcgcaaggcctgtggggaggctcatcttaaaactatattagcgacaggagaacttggaactcttactaatgtctataaagccagtatgatagcaatgatggcaggatcagattttattaagacctctactggaaaagaaacagtaaatgccaccttcccggtagctatagtaatgctgcgggccattagagatttcttctggaaaactggaaacaagatagggtttaaaccagcaggaggcatccgcagtgcaaaggattcccttgcttggctctctcttgtaaaggaggagcttggagatgagtggctgaagccagaactctttcgaataggtgccagtactctgctctcggacattgagaggcagatttaccatcatgtgactggaagatatgcagcttatcatgatcttccaatgtcttaaatcagtcaccagttccagaaaagttctttacgacaatgtttaaaaattatttttctacgtaattgctaaaattatttaattaaaaaattgggcagtaggtaactggcattcctctctttaaaatttctaccgaacttaatggaatggaaaaagcaaactcatccacatgtggtactcatttcaggcacatctgaaatgatcttaattactagaagatctgcactattaactttgtgaagagtttctcctaaaaactttaagtaaaatgttaatggtagctttgataacatcaaattctaagggagaaaaaaacaatattaaaccgcccaagcagtgtgccctagcagaggaaaatgcaacatctcgcaagcgctgctgtaacgacttcaggagtcactgattcagcactaatttcctgctgtgaaaactcatctttcatttttgccgtggataggcgcttttattaattgttgtcctaatgaaatttctgacattgtcatatacaacgatgaatatcattaaaatttttaa

SEQ ID NO: 2042 - DNA, 979 bp, Homo sapiens
ctggtctcccgcgtccatcggtccattcctgcgtcgttctgtccttccgaacgcacacttcaggagcagccgcgagggtggcatggcagcgagcacagacatggctgggctggaggagagcttccgcaagtttgccatccatggtgaccccaaggccagtgggcaagagatgaatggcaagaactgggccaagctgtgcaaggactgcaaggtggctgacggaaagtccgtgacagggaccgatgtggacatcgtcttctccaaagtcaaggggaagtctgctcgggtcatcaactatgaggagttcaagaaggccctggaagagctggcgaccaagagattccagggcaagagcaaggaggaggccttcgatgccatctgccagctggtggcaggcaaagagccagccaatgtgggcgtcactaaagcaaaaacagggggtgctgtagaccggctgacggacaccagcagatacacgggctcccacaaggagcgcttcgatgagagcggcaagggcaagggcattgcgggacggcaggacatcctggacgacagtggctacgtgagcgcctacaagaatgcaggcacctacgatgccaaggtgaagaagtgaggcttgggaagaccgccctgccaagtgcggctgcccctgccagaggctcaggcctgggtctaaggggcacgtggagcaagagatcctggtcccctccctgctggacctgccacccagagcttcctgcctagtcccactgggctggcccaccaggcctctgacccaggctgctctgcggccccttcctcctcctcttcctgctccaacttctgtccacctggggacagtctgtgcctgtagcctcatgaccccaacccagcccaggcatggctaacccctgactgcttgcctcatatttaagctgctgctctggccaagtgcctaattttaacccagacctcaataaagacaccttttgtaccaaaa

SEQ ID NO: 2043 - DNA, 1337 bp, Homo sapiens
ctggcgtcccctttccggccggtccccatggaggcgctggggaagctgaagcagttcgatgcctaccccaagactttggaggacttccgggtcaagacctgcgggggcgccaccgtgaccattgtcagtggccttctcatgctgctactgttcctgtccgagctgcagtattacctcaccacggaggtgcatcctgagctctacgtggacaagtcgcggggagataaactgaagatcaacatcgatgtactttttccgcacatgccttgtgcctatctgagtattgatgccatggatgtggccggagaacagcagctggatgtggaacacaacctgttcaagcaacgactagataaagatggcatccccgtgagctcagaggctgagcggcatgagcttgggaaagtcgaggtgacggtgtttgaccctgactccctggaccctgatcgctgtgagagctgctatggtgctgaggcagaagatatcaagtgctgtaacacctgtgaagatgtgcgggaggcatatcgccgtagaggctgggccttcaagaacccagatactattgagcagtgccggcgagagggcttcagccagaagatgcaggagcagaagaatgaaggctgccaggtgtatggcttcttggaagtcaataaggtggccggaaacttccactttgcccctgggaagagcttccagcagtcccatgtgcacgtccatgacttgcagagctttggccttgacaacatcaacatgacccactacatccagcacctgtcatttggggaggactatccaggcattgtgaaccccctggaccacaccaatgtcactgcgccccaagcctccatgatgttccagtactttgtgaaggtggtgcccactgtgtacatgaaggtggacggagaggtactgaggacaaatcagttctctgtgaccagacatgagaaggttgccaatgggctgttgggcgaccaaggccttcccggagtcttcgtcctctatgagctctcgcccatgatggtgaagctgacggagaagcacaggtccttcacccacttcctgacaggtgtgtgcgccatcattgggggcatgttcacagtggctggactcatcgattcgctcatctaccactcagcacgagccatccagaagaaaattgatctagggaagacaacgtagtcaccctcggtgcttcctctgtctcctctttctccctggcctgtggttgtcccccagcctctgccaccctccacctcctcggtcagccccagccccaggttgataaatctattgattgattgtgatagtaaaaaaaaaaaaaaaaaaaaaaaaaaaaa

SEQ ID NO: 2044 - DNA, 1531 bp, Homo sapiens
cggcccaaccatggcgtcctccgcggccggctgcgtggtgatcgttggcagaattaaaactctgtacccattgaacaacagctgctcatttcccccagccccagcccctggcatccacccttctagctttctgtctctatgggtacctcagtggagtcattgggcgactgggccatgctgtttgccagtggaggcttccaggtgaaactctatgacattgagcaacagcagataaggaacgccctggaaaacatcagaaaggagatgaagttgctggagcaggcaggttctctgaaaggctccctgagtgtggaagagcagctgtcactcatcagtggttgtcccaatatccaagaagcagtagagggtgccatgcacattcaggaatgtgttccagaagatctagaactgaagaagaagatttttgctcagttagattccatcattgatgatcgagtgatcttaagcagttccacttcttgtctcatgccttccaagttgtttgctggcttggtccatgtgaagcaatgcatcgtggctcatcctgtgaatccgccatactacatcccgctggttgagctggtcccccacccggagacggcccctacgacagtggacagaacccacgccctgatgaagaagattgggacagtgccccatgcgagtccagaaggaggtggccggcttcgttctgaaccgcctgcaatatgcaatcatcagcgaggcctggcggctagtggaggaaggaattcgtgtctcctagtgacctgggaccttgtcatgtcagaagggttgggcatgcggtatgcattcattggacccctggaaaccatgcatctcaatgcagaaggtatgttaagctactgcgacagatacagcgaaggcataaaacatgtcctacagacttttggacccattccagagttttccagggccactgctgagaaggttaaccaggacatgtgcatgaaggtccctgatgacccggagcacttagctgccaggaggcagtggagggacgagtgcctcatgagactcgccaagttgaagagtcaagtgcagccccagtgaatttcttgtaatgcagcttccactcctctcattggaggccctatttgggaacactgcaagcccttaatcagccctctgtgacataggtagcagcccacggagatcctaagctggctgtcttgtgtgcagcctgagtggggtggtgcaggccggtagtctgcccgtcactttggatcatagccctggcctggcggcacagcagcacttgcgttctcggggctgtcgatttcctgccacctgggcagataacctggagatttccaccttttcttttcagcttgattgcatttgactatattttacagccagtgattgtagtttcatgttaatatgtggcaaaatatttttgtaattattttctaatccctttctgagtactctggggccctgcatttatgaggcacctaccttcatttttaacgcttattctgaataaaagtttttgattccttaaaaaaaa

SEQ ID NO: 2045 - DNA, 1728 bp, Homo sapiens
cgggaagtaggcggggtgacgtgtggttgacgagctcggcggcgggtttgctgagatctgtggccggcggcagctggtgcggggggcagctgagagcgagaggtggatcggggcggtgtgtggccagggccatgacgggcaacgccggggagtggtgcctcatggaaagcgaccccggggtcttcaccgagctcattaaaggattcggttgccgaggagcccaagtagaagaaatatggagtttagagcctgagaattttgaaaaattaaagccagttcatgggttaatttttcttttcaagtggcagccaggagaagaaccagcaggctctgtggttcaggactcccgacttgacacgatattttttgctaagcaggtaattaataatgcttgtgctactcaagccatagtgagtgtgttactgaactgtacccaccaggatgtccatttaggcgagacattatcagagtttaaagaattttcacaaagttttgatgcagctatgaaaggcttggcactgagcaattcagatgtgattcgacaagtacacaacagtttcgccagacagcaaatgtttgaatttgatacgaagacatcagcaaaagaagaagatgcttttcactttgtcagttatgttcctgttaatgggagactgtatgaattagatggattaagagaaggaccgattgatttaggtgcatgcaatcaagatgattggatcagtgcagtaaggcctgtcatagaaaaaaggatacaaaagtacagtgaaggtgaaattcgatttaatttaatggccattgtgtctgacagaaaaatgatatatgagcagaagatagcagagttacaaagacaacttgcagaggaggaacccatggatacagatcaaggtaatagtatgttaagtgctattcagtcagaagttgccaaaaatcagatgcttattgaagaagaagtacagaaattaaaaagatacaagattgagaatatcagaaggaagcataattatctgcctttcattatggaattgttaaagactttagcagaacaccagcagttaataccactagtagaaaaggcaaaagaaaaacagaacgcaaagaaagctcaggaaaccaaatgaagatgttttcagatatgtacacatttctgcttctgcacatattttcatggaaaccattatgtataaagaacttagagcaacatcctaattggctcagtgcacgtttggcaatagtgccagcctgtcttgtctttaatgcatggattcataaacttcttccctacctgcatcatgtgcatgtagtgcatattaaatgaaagtgatattaagaatgctttcccaaattccattatttgacattgagtctgacaactgttagttttctggttgtccaactaccatatgaagctagaaaatgcacaaacgatattccttatctgtaatttaaatacttaaaatttgcaattgtcagatcttgattaaactggttgtcttatttcttctcatcattaacggaaaaaaaatcagtatttctatctttgatatctaagtgttttgaggattttaaaactgaattttatctgctataccagttatttgagaaagtatgattttaatgtaaatcatttaaaaaggacaaaagtataatttccagtgattttcactgctgtcagtagaaaagtaataaacatctcaattttaaaaaaaaaaaaaaaaaaaaaaaaaa

SEQ ID NO: 2046 - DNA, 2619 bp, Homo sapiens
gcttggggacgcacggagaggtgcagctgggccgtccagcatcaaacactagcctccacacgtggaaaagaccctgactcccacagtagactagtcttatgggagtcctggctcttgggccaggctgcattaggaaaatggaaaccagactgtcttcaaattcttctgcctagccttagccattagagagaggtcctgctaaagatggactgcaaatgcgcttgatggaaggagatgtcaattccactgaagtcctcatttctgctgagctacctgtgcaccctgcctccggctctcctgagcagagagatcctgatggctgactcagaagcactcccctcccttgctggggacccagtggctgtggaagccttgctccgggccgtgtttggggttgttgtggatgaggccattcagaaaggaaccagtgtctcccagaaggtctgtgagtggaaggagcctgaggagctgaagcagctgctggatttggagctgcggagccagggcgagtcacagaagcagatcctggagcggtgtcgggctgtgattcgctacagtgtcaagactggtcaccctcggttcttcaaccagctcttctctgggttggatccccatgctctggccgggcgcattatcactgagagcctcaacaccagccagtacacatatgaaatcgcccccgtgtttgtgctcatggaagaggaggtgctgaggaaactgcgggccctggtgggctggagctctggggacggaatcttctgccctggtggctccatctccaacatgtatgctgtaaatctggcccgctatcagcgctacccggattgcaagcagaggggcctccgcacactgccgcccctggccctattcacatcgaaggagtgtcactactccatccagaagggagctgcgtttctgggacttggcaccgacagtgtccgagtggtcaaggctgatgagagagggaaaatggtccccgaggatctggagaggcagattggtatggccgaggctgagggtgctgtgccgttcctggtcagtgccacctctggcaccactgtgctaggggcctttgaccccctggaggcaattgctgatgtgtgccagcgtcatgggctatggctgcatgtggatgctgcctggggtgggagcgtcctgctgtcacagacacacaggcatctcctggatgggatccagagggctgactctgtggcctggaatccccacaagctcctcgcagcaggcctgcaatgctctgcacttcttctccaggatacctcgaacctgctcaagcgctgccatgggtcccaggccagctaccttttccagcaggacaagttctacgatgtggctctggacacgggagacaaggtggtgcagtgtggccgccgtgtggactgtctgaagctgtggctcatgtggaaggcacagggcgatcaagggccggagcggcgcatcgaccaggcctttgtccttgcccggtacctggtggaggaaatgaagaagcgggaagggtttgagctagtcatggagcctgagtttgtcaatgtgtgtttctggttcgtaccccccagcctgcgagggaagcaggagagtccagattaccacgaaaggctgtcaaaggtggcccccgtgctcaaggagcgcatggtgaaggagggctccatgatgattggctaccagccccacgggacccggggcaacttcttccgtgtggttgtggccaactctgcactgacctgtgctgatatggacttcctcctcaacgagctggagcggctaggccaggacctgtgagccttctctgtcttgctgccggccttgataccacccctcacccgcagagtcactgcattccctcccagcctttgaggccgggtgcagtggctcacgcctgtaatcccagcactttgggaggccgaggcgggtggatcacttgaggtcaggagttcgagaccagcctggccaataaggtgaaaccctgtctctactaaaaatacaaaaattagccgagcatggtggcctgtgcctgtaaacccagctactcaggaggttggggcagaattgcttgaacccagggggcagaggttgcagtgagccgagattgcacccctgcactccaggctgggcaacagtacgagactctgttccaaaaaaaataaaaaagaacagcctttttaggccacagtgacctgcgcaatgtttatatgctttgacctactaactttctcctaactaaatatttgattttaggagagtgtttaaataaattacagtatgtctatatgatgaaatgttattttgccattaaaattttgtttacaaagataatttttattgacataaaaataactttaatgtaatttatgttgaaaaagctgaatacaagtctttatatagagtaatatttgagctgtgttcaaaaatacataggaaaagactgataaaatgaaatatggcaaaatgttaatagttttccctggaataggataataggcaattttaaaacagactcctttaaaaaaacaaacaaacaaaaaaaacatagacttctttatatcttttgagctccctcccttttattatgtaatgaatatgtgttgcttttgtaataggaaa

SEQ ID NO: 2047 - DNA, 1842 bp, Homo sapiens
cgctgaagatcggggccgctcgcgcacgctccagcgccgcgcgatgtagcgcgggggaccgcccccagcagagcccgcctgcccggcttgtctaccatcagagggagatctctgccccctggggctgagagaccccaacctttccccaagctgaagctgcagggtattgaggtaccagccagatgtcttcccacaaaggatctgtggtggcacaggggaatggggctcctgccagtaacagggaagctgacacggtggaactggctgaactgggacccctgctagaagagaagggcaaacgggtaatcgccaacccacccaaagctgaagaagagcaaacatgcccagtgccccaggaagaagaggaggaggtgcgggtactgacacttcccctgcaagcccaccacgccatggagaagatggaagagtttgtgtacaaggtctgggagggacgttggagggtcatcccatatgatgtgctccctgactggctaaaggacaacgactatctgctacatggtcatagacctcccatgccctcctttcgggcttgcttcaagagcatcttccgcattcatacagaaactggcaacatctggacccatctgcttggtttcgtgctgtttctctttttgggaatcttgaccatgctcagaccaaatatgtacttcatggcccctctacaggagaaggtggtttttgggatgttctttttgggtgcagtgctctgcctcagcttctcctggctctttcacaccgtctattgtcattcagagaaagtctctcggactttttccaaactggactattcagggattgctcttctaattatggggagctttgtcccctggctctattattccttctactgctccccacagccacggctcatctacctctccatcgtctgtgtcctgggcatttctgccatcattgtggcgcagtgggaccggtttgccactcctaagcaccggcagacaagagcaggcgtgttcctgggacttggcttgagtggcgtcgtgcccaccatgcactttactatcgctgagggctttgtcaaggccaccacagtgggccagatgggctggttcttcctcatggctgtgatgtacatcactggagctggcctttatgctgctcgaattcctgagcgcttctttcctggaaaatttgacatatggttccagtctcatcagattttccatgtcctggtggtggcagcagcctttgtccacttctatggagtctccaaccttcaggaattccgttacggcctagaaggcgggctgtactgatgacacccttctctgagccttcccacctgcggggtggaggaggaacttcccaagtgcttttaaaaataacttctttgctgaagtgagaggaagagtctgagttgtctgtttctagaagaaacctcttagagaattcagtaccaaccaagcttcagcccactttcacacccactgggcaataaactttccatttccattctcctagctggggatggggcatggtcaaacttagccatcccctcctcagcaaggcatctaccggcccctcacagagacagtactttgaaactcatgttgagattttaccctctcctccaaccattttgggaaaattatggactgggactcttcagaaattctgtcttttcttctggaagaaaatgtccctcccttacccccatccttaactttgtatcctggcttataacaggccatccatttttgtagcacacttttcaaaaacaattatataccctggtcccatctttctagggcctggatctgcttatagagcaggaagaatcaagccaccaacttttacctaaaa

SEQ ID NO: 2048 - DNA, 991 bp, Homo sapiens
gcacgaggtcgtcatggaggcggtattgaccgaagagcttgatgaggaagagcagctgctgagaaggcatcgcaaagagaagaaggagttgcaagccaaaattcagggcatgaagaatgctgttcccaagaatgacaagaagaggaggaagcagctcaccgaagatgtggccaagttggaaaaagaaatggaacagaaacatagagaggaactggagcaattgaagctgactactaaggagaataagatagattctgttgctgttaacatttcaaacttggtgcttgagaatcagccacctcggatatcaaaagcacaaaagagacgggaaaagaaagctgcattggaaaaggagcgagaagaacggatagctgaagctgaaattgaaaacttaacaggagccagacatatggaaagtgagaaacttgctcaaatattggcagctagacagttagaaattaaacagattccatctgatggccactgtatgtataaagccattgaagatcaactgaaagaaaaggattgtgctctgactgtggttgccttgagaagtcagaccgctgagtatatgcaaagccatgtggaagactttctgccatttttaacaaaccctaatacaggagatatgtatactccagaagaatttcagaagtactgtgaagatattgtaaacacagctgcatggggaggtcagcttgagctaagagctctgtctcacattttacaaacaccaatagagataatacaggcagattctcctcccattatagttggtgaagaatattcaaaaaaaccactaatacttgtatatatgagacatgcatatggcttaggagaacattataattcggttacacggttgggtaaacatagttactgaaaattgcaggctaatttattacaatgttgtacaattatgtttttaatacagtgtggctggaactgagtattttctacccagtgttggggttgtttcttaaatgctact

SEQ ID NO: 2049 - DNA, 3163 bp, Homo sapiens
cctttgccctgaagggggctggatgggcaaggcggccgcgatggctcgagctcgggcggtggcggcggtggccggaggcggcggtgcctcctcctcctcgccccggcgccggcggtgatccgagcgagcggccgcggcccccgatgagactgctggcgggctggctgtgcctgagcctggcgtccgtgtggctggcgcggaggatgtggacgctgcggagcccgctcacccgctccctgtacgtgaacatgactagcggcccgggtgggccggcggcggccgcgggcggcaggaaggagaaccaccagtggtatgtgtgcaacagagagaaattatgcgaatcactccaggctgtctttgttcagagttaccttgatcaaggaacacagatcttcttaaacaacagcattgagaaatcgggctggctatttatccaattatatcattcttttgtgtcatctgtttttagcctgtttatgtctagaacatctatcaatgggttgctaggaagaggctcaatgtttgtgttttcaccagatcagtttcagagactgcttaaaattaatccagactggaaaacccacagacttcttgatttaggtgctggagatggagaagtcacaaaaatcatgagccctcattttgaagaaatctatgccactgagctttctgaaactatgatatggcagcttcagaaaaagaaatacagagtccttggtataaatgaatggcagaatacggggttccagtatgatgtcatcagctgcctgaacttgctggaccgctgtgatcagcccctgactttgttaaaagatatcagaagtgtcttggagccaactagaggcagggtcatccttgcccttgtcctcccctttcatccctatgtggaaaacgtaggtggcaagtgggagaaaccatcagaaattttggaaatcaaaggacagaactgggaagaacaagtgaatagtctgcctgaagttttcagaaaagctggttttgttatcgaagctttcaccagactaccatacctgtgtgaaggcgacatgtataatgactactacgttctggatgacgctgtctttgttctcaaaccagtataaacacgtggaggtcgaagtcttcagagtccgcaccctccgggatgtgcccttggaagagggtctgtgttcacaattacgtgaagggaggacccttggggaccgccattctaaatatcatgtaggaatttaaaaagccaaaatactaattatttctttgtagtgtgtaaaggaatgtttttaaaagacaaaaacccaactctttgtggatttttatcaactctttactcagagccactctccaatgcaggtcacactccaattatgatggaagatattttttatacttaattgcagtagggactcattcccagacaaagcaatagtcacgacttcatggaaccaatcaatggattgttttttgaagactggcaataaagctgtccattcaattccaaatactggttttaaggtatagccactgatattctttcatgtttagaaattctttctgttattattcaagaaaatgtttttaatcatgctaataaacttttttggagatgactttggcatcatgtttgaattcatataaagctcccctagcattttttattggtttggcttcaggagtacccaaatagtagcattatgagaatgacgcagacaatttgaataggggggaaggaaggcttcagacttgggggaaggggagattattgcaaattgcagtgaacactgagtcagtaaaaaaaaaaaacagaaacaaaaacccagcctcattcagatacagaacttcagggacccctccccccacccccccagttaatgctgctgtgaaaaatgcaaaataacctggttctgactttgtgatcactcatgtcccatacactgaactttgtttttttctggacaatctcaggttctcagaattgaaacattcagttttgtctactgacaaaatgcaactaaaaatgttttaattcaacttcttactctacacttatatacctctctcccagagcttggctcttccctgaaatccttaaaggagtttattatttgccaagaatatggtttgatgaagaccgtgtcagactcatgcattctggaatccgtgagtgcctccaaccataaacccagaaatgctgccatagaggaacccattagcaagatcaataaccatcgtggatattccaaagagcagagcatttaacccagaatctgaaatctcagtaataacagaaatgtcaatatgagattgtggttattaacaatatgttatcctcactactttatttcttttttcatccaggtgtttcattaagtattctcatttatatgctcatagaagtcatcagatcaacacattcactccaacacctgggtataaaggcgaattaaaacctgaagaattactttattattcattaagaactgcattcccacatcctcacaccaatatcttccactgttactgtgcagtcataataagagttgggttatgtgatttatgcaaaattgttattggtgtgttctaatgatttttttccaggaattcaagtaagtgaagtacaaatacttagcaccatagattgtaaaaatagaaagaggaaatgagaaaacttaatgtcgttcttgtacagttgagttttgcttctttataaactgtctgttaaaatcaggggttgctgttagactgtcaagcagaagtgatggatgttcaaggaggcaggttgccccaaagtgttttctaactttcaagtagagaactttatgctctaataagaaaaatacaactcattcttaaccacccccccaaaacagagaaaacacatacatttatgcattttaaagataaaaagtagtttctcaaaaaaatctgaagttctctgaaaaccagcttattaaaagtgctgttttgtggtgaaaattgaaaccaaatccactcacatttcctatcgggtcttgaaattcttggtggtgtgtcaccattccactagatggcagtgttgcttactgagtgtcaatggcttttttccccgtaaatggaatcatgtttttctcccccaaagtacaataaagctgccttgtctgcaccaaaaacaaaaaaaaaaaaaaaaaaa

SEQ ID NO: 2050 - DNA, 1506 bp, Homo sapiens
cagataggcgacacgcggcgggcgctgaggcgggaatggctgctgtactgcagcgcgtcgagcggctgtccaatcgagtcgtgcgtgtgttgggctgtaacccgggtcccatgaccctccaaggcaccaacacctacctagtggggaccggccccaggagaatcctcattgacactggagaaccagcaattccagaatacatcagctgtttaaagcaggctctaactgaatttaacacagcaatccaggaaattgtagtgactcactggcaccgagatcattctggaggcataggagatatttgtaaaagcatcaataatgacactacctattgcattaaaaaactcccacggaatcctcagagagaagaaattataggaaatggagagcaacaatatgtttatctgaaagatggagatgtgattaagactgagggagccactctaagagttctatatacccctggccacactgatgatcacatggctctactcttagaagaggaaaatgctatcttttctggagattgcatcctaggggaaggaacaacggtatttgaagacctctatgattatatgaactctttaaaagagttattgaaaatcaaagctgatattatatatccaggacatggcccagtaattcataatgctgaagctaaaattcaacaatacatttctcacagaaatattcgagagcagcaaattcttacattatttcgtgagaactttgagaaatcatttacagtaatggagcttgtaaaaattatttacaagaatactcctgagaatttacatgaaatggctaaacataatctcttacttcatttgaaaaaactagaaaaagaaggaaaaatatttagcaacacagatcctgacaagaaatggaaagctcatctttagtttcagattaaagaaagctttgttttattttgctttgagagaatggtatgttttcttaactataggttattttatagagaatataaaagtataaaacattaaaaataaccctagatatactttaaaataatgttatatttatgctaaaatatgtaaattacactatacaaccatatgataggttatttctctaaccttgtcttctaacgttttaccaaaaattcataatctaatagtttatcagttttcaatagattaaataaaatgattactttaaaaataataaaatttatctaatttaaagttgatattatttttggccgttagttatctattactagtgatcagttatactgttttctatagctactttatttaacagcacagatttctatgcacctttactctttcctcaacccttgtctctatctgtacataattgctttgtcttgatgtttctatcaactatatcatgactatctattggttccataactctgtatcatgtgtattttcttattctggtataccacaaatgattcatgcaaatgaatttttggtgattgaaaaatattaaattcccaatttaaagtattatatgata

SEQ ID NO: 2051 - DNA, 1282 bp, Homo sapiens
ctgcgatcccgcagggcagcgacgcgactctggtgcgggccgtcttcttccccccgagctgggcgtgcgcggccgcaatgaactgggagctgctgctgtggctgctggtgctgtgcgcgctgctcctgctcttggtgcagctgctgcgcttcctgagggctgacggcgacctgacgctactatgggccgagtggcagggacgacgcccagaatgggagctgactgatatggtggtgtgggtgactggagcctcgagtggaattggtgaggagctggcttaccagttgtctaaactaggagtttctcttgtgctgtcagccagaagagtgcatgagctggaaagggtgaaaagaagatgcctagagaatggcaatttaaaagaaaaagatatacttgttttgccccttgacctgaccgacactggttcccatgaagcggctaccaaagctgttctccaggagtttggtagaatcgacattctggtcaacaatggtggaatgtcccagcgttctctgtgcatggataccagcttggatgtctacagaaagctaatagagcttaactacttagggacggtgtccttgacaaaatgtgttctgcctcacatgatcgagaggaagcaaggaaagattgttactgtgaatagcatcctgggtatcatatctgtacctctttccattggatactgtgctagcaagcatgctctccggggtttttttaatggccttcgaacagaacttgccacatacccaggtataatagtttctaacatttgcccaggacctgtgcaatcaaatattgtggagaattccctagctggagaagtcacaaagactataggcaataatggagaccagtcccacaagatgacaaccagtcgttgtgtgcggctgatgttaatcagcatggccaatgatttgaaagaagtttggatctcagaacaacctttcttgttagtaacatatttgtggcaatacatgccaacctgggcctggtggataaccaacaagatggggaagaaaaggattgagaactttaagagtggtgtggatgcagactcttcttattttaaaatctttaagacaaaacatgactgaaaagagcacctgtacttttcaagccactggagggagaaatggaaaacatgaaaacagcaatcttcttatgcttctgaataatcaaagactaatttgtgattttactttttaatagatatgactttgcttccaacatggaatgaaataaaaaataaataataaaagattgccatgaatcttgcaaa

SEQ ID NO: 2052 - DNA, 1698 bp, Homo sapiens
acaggaggagacagcctcccggcccggggaggacaagtcgctgccacctttggctgccgacgtgattccctgggacggtccgtttcctgccgtcaactgccggccgagttgggtctccgtggttcaggccggctcccccttcctggtctcccttctcccgctgggccggtttatcgggaggagattgtcttccagggctagcaattggacttttgatgatgtttgacccagcggcaggaatagcaggcaacgtgatttcaaagctgggctcagctcatgtttcttctctcgtgtaatcgcaaaacccattttggagcaggaattccaatcatgtctgtgatggtggtgagaaagaaggtgacacggaaatgggagaaactcccaggcaggaacaccttttgctgtgatggccgcgtcatgatggcccggcaaaagggcattttctacctgacccttttcctcatcctggggacatgtacactcttcttcgcctttgagtgccgctacctggctgttcagctgtctcctgccatccctgtatttgctgccatgctcttccttttctccatggctacactgttgaggaccagcttcagtgaccctggagtgattcctcgggcgctaccagatgaagcagctttcatagaaatggagatagaagctaccaatggtgcggtgccgggctaccagcgaccaccgcctcgtatcaagaatttccagataaacaaccagattgtgaaactgaaatactgttacacatgcaagatcttccggcctccccgggcctcccattgcagcatctgtgacaactgtgtggagcgcttcgaccatcactgcccctgggtggggaattgtgttggaaagaggaactaccgctacttctacctcttcatcctttctctctccctcctcacaatctatgtcttcgccttcaacatcgtctatgtggccctcaaatctttgaaaattggcttcttggagacattgaaagaaactcctggaactgttctagaagtcctcatttgcttctttacactctggtccgtcgtgggactgactggatttcatactttcctcgtggctctcaaccagacaaccaatgaagacatcaaaggatcatggacagggaagaatcgcgtccagaatccctacagccatggcaatattgtgaagaactgctgtgaagtgctgtgtggccccttgccccccagtgtgctggatcgaaggggtattttgccactggaggaaagtggaagtcgacctcccagtactcaagagaccagtagcagcctcttgccacagagcccagcccccacagaacacctgaactcaaatgagatgccggaggacagcagcactcccgaagagatgccacctccagagcccccagagccaccacaggaggcagctgaagctgagaagtagcctatctatggaagagacttttgtttgtgtttaattagggctatgagagatttcaggtgagaagttaaacctgagacagagagcaagtaagctgtcccttttaattgtttttctttggtctttagtcacccagttgcacactgggcattttcttggctggcaagctttttttaaaatttgctgaaacttcaagggcagtggccaggaaggatgttcagttcacctctggataaactgggaaaaatggggtctcttggggccgggcactggttt

SEQ ID NO: 2053 - DNA, 1548 bp, Homo sapiens
ggcaagggaaaaccggctgtggagaaggaaatagggcccggcgctgagtgagcgtggttgcgtgtcctttgcagacactttctggggcgaggtgacatggcgagagtcttggatcggtggacgtagacggtagacagttcgcgtgcgtttccttcgcctacttggcctacatgccttctgcccgtgaagcgatgtttcccctcgaaaggccgtagacgccgtcagaatcggtttttcagtgagttttgacccctccgacgctccgtctctgacagaatcgcggcgttcttcgtacccgcccatcctccgcggacgccgtgccatggcgactctgctgcgccctgtcctccgtcggctctgcgggctcccgggcctacagcggcctgcggcagaaatgcccctccgggctaggagcgacggcgccggcccgctatactcgcaccacctccccacctccccgctgcagaaagcgctgttggccgccggctccgcggcgatggcgctctataacccctaccgccacgacatggtcgcagttctaggggagaccacaggacaccgcaccctgaaggtcctcagggaccagatgaggagggatccagagggtgcccagatcctgcaggagcgtccccggatttcgacatccaccctcgacctgggcaagctccagagcctgccggaaggctccctcggtcgcgagtatctccgtttcctggatgtgaacagggtctccccagacacccgagcacccacccgcttcgtggatgatgaggagctagcgtatgtaattcagcggtaccgggaggtgcacgacatgcttcacaccctgctggggatgcccaccaacatcctgggggagatcgtggtgaaatggtttgaggctgtccagactggcctgcccatgtgcatcctgggtgcattctttggaccgatccgacttggcgctcagagcctgcaagtgctggtctcggagttgatcccatgggccgttcagaacgggcgcagagcccattgtgtcctcaacctgtactatgagcggcgctgggagcagtccctgagggctctgcgggaggagctgggcattacagcaccacccatgcacgtccagggcttggcctgagctcctgagccagcggggcctggcctacctcccccatcccctgcttcccttggaggcagagggctcccttgactacctttgttcctcttctttgaacactgacccttggacaacatttatcataatttgtcataaccactgctgagtggccttgaggacgaaccccgcagggagcaagcagtacagtggcattcccagggggaccagcagctacccaaggagaaccatgcatgaacagtatcagtcgtctgggctcatgctgggattgtgcagtgctcctgttgcaactcctcccagccagccaggtttgctgggggccaggctgggtgtcctcacaggagtgagggctacacccaattccaaaagcctgagaagagagaagtggagggggaggcgagtgtgtgaataaaggctcccatcaggtcaaa

SEQ ID NO: 2054 - DNA, 953 bp, Homo sapiens
cagacacactgtgacggctgcctgaagctagtgagtcgcggcgccgcgcactggtggttgggtcagtgccgcgcgccgatcggtcgttaccgcgaggcgctggtggccttcaggctggacggcgcgggtcagccctggttcgccggcttctgggtctttgaacagccgcgatgtcgatcttcacccccaccaaccagatccgcctaaccaatgtggccgtggtacggatgaagcgtgccgggaagcgcttcgaaatcgcctgctacaaaaacaaggtcgtcggctggcggagggcgtgggaaaaagacctcgatgaagttctgcagacccactcagtgtttgtaaatgtttctaaaggtcaggttgccaaaaaggaagatctcatcagtgcgtttggaacagatgaccaaactgaaatctgtaagcagattttggctaaaggagaagttcaagtttcagataaagaaagacacacacaactggggcagatgtttagggacattgcaacttttgtggcagacaaatgtgtgaatcctgaaacaaagggaccatacaccgtgatccttattgagagagccatgaaggacatccactatttggtgaaaccaaacaagagtacaaaacagcaggctttggaagtgataaagcagttaaaagagaaaatgaagatagaacgtgctcacatgaggcttcggttcatccttccagtcaatgaaggcaagaagctgaaagaaaagctcaagccactgatcaaggtcatagaaagtgaagattatggccaacagttagaaatcgtatgtctgattgacccgggctgcttccgagaaattgatgagctaataaaaaaggaaactaaaggcaaaggttctttggaagtactcaatctgaaagatgtagaagaaggagatgagaaatttgaatgacacccatcaatctcttcacctctaaaacac

SEQ ID NO: 2055 - DNA, 1123 bp, Homo sapiens
cggaagatggcgtaccagagcttgcgactggagtacctgcagatcccaccggtcagccgcgcctacaccactgcctgcgtcctcaccaccgccgccgtgcagttggaattgatcacaccttttcagttgtacttcaatcctgaattaatctttaaacactttcaaatatggagattaatcaccaacttcttattttttgggccagttggattcaattttttatttaacatgatttttctatatcgttactgtcgaatgctagaagaaggctctttccgaggtcggacagcagactttgtatttatgttcctttttggtggattcttaatgaccctttttggtctgtttgtgagcttagttttcttggggccagggctttacaataatggctcgtctatgtgtggagccgaagaacccctatgtccgcatgaacttcttcggccttctcaacttccaggccccctttctgccctgggtgctcatgggattttccttgttgttggggaactcaatcattgtggaccttttgggtattgcagttggacacatatattttttcttggaagatgtatttcccaatcaacctggtggaataagaattctgaaaacaccatctattttgaaagctatttttgatacaccagatgaggatccaaattacaatccactacctgaggaacggccaggaggcttcgcctggggtgagggccagcggcttggaggttaaagcagcagtgccaataatgagacccagctgggaaggactcggtgatacccactgggatcttttatcctttgttgcaaaagtgtggacacttttgacagcttggcagattttaactccagaagcactttatgaaatggtacactgactaatccagaagacatttccaacagtttgccagtggttcctcactacactggtactgaaagtgtaatttcttagagccaaaaaactggagaaacaaatatcctgccacctctaacaagtacatgagtacttgatttttatggtataaggcagagccttttcttcctcttcttgatagatgaggccatggtgtaaatggaagtttcagagaggacaaaataaaacggaattccatttttctctcactgtaaa

SEQ ID NO: 2056 - DNA, 860 bp, Homo sapiens
cggaggcgggcacttggggggaaagttgagacgtgattaccgggttgggcgggccccatctgggaggggtttgtgggtgaactcggggtccaccgcccgctgaggagatggatgaggacgggcttcctctcatggggtcaggcatagacctgaccaaggtgccagctattcaacagaaaagaacggtggcttttctaaaccaatttgtggtgcacactgtacagttcctcaaccgcttttctacagtttgtgaggagaaactggcagacctttcacttcgtatccaacaaattgaaacaactctcaatattttagatgcaaagttgtcatctatcccaggcctagatgatgtcacagttgaagtatctcctttaaatgtcaccagtgtcacaaatggagcacatcctgaagccacttcagagcaaccacagcagaacagtacacaagactctggactacaggaaagtgaagtatcagcagaaaatatcttaactgtagccaaggatccaagatatgccagatatctcaaaatggttcaagtgggtgtaccagtgatggcaataagaaacaaaatgatatcagaaggactagacccagatcttcttgagaggccagatgctccagtgcctgatggcgaaagtgagaaaactgtagaagaaagttcagatagcgaatcttcttttagtgattaagcttaattttgataagaattacatatgcatgcataggggtacatttacattctgtaagagattgagcctgaactctcttagtcataaaaacatcaaatggccacatgtccactaccaagcttcttctatgttaaaaaaataataataaagcagttttaacctgccaaa

SEQ ID NO: 2057 - DNA, 1706 bp, Homo sapiens
tgttcttgagcccagcttcttctcgtctcccaccccagcttcccggcattggaagaagggaccgtcctcttccttgtcttggccacccaaatcctggtatcgaaagggttgaacggaccggaagtgtgcagcagcgacgggtccccagctaatcgacgccggaagtagcaattactagacaagcattccgccgccggcttcgctatggcggcaattcccccagattcctggcagccacccaacgtttacttggagaccagcatgggaatcattgtgctggagctgtactggaagcatgctccaaagacctgtaagaactttgctgagttggctcgtcgaggttactacaatggcacaaaattccacagaattatcaaagacttcatgatccaaggaggtgacccaacagggacaggtcgaggtggtgcatctatctatggcaaacagtttgaagatgaacttcatccagacttgaaattcacgggggctggaattctcgcaatggccaatgcggggccagataccaatggcagccagttctttgtgaccctcgcccccacccagtggcttgacggcaaacacaccatttttggccgagtgtgtcagggcataggaatggtgaatcgcgtgggaatggtagaaacaaactcccaggaccgccctgtggacgacgtgaagatcattaaggcatacccttctgggtagacttgctaccctcttgagcagctcttctgagatggccccagtgaaccagcttctagatgacatagaatgacatgtaatgctaaatttcattttggctttgcaagtcatgaagcttaggaggcctggcatcttgggtgagttagagatggaagtacattttaataggatgcttcttttctcttcccccagtgcctaggttgccagagcatttgcacaaatgcccctgtttatcaataggtgactacttactacacatgaaccataatgctgcttcttgtgcatgtctgctctgatatacgtcgaacaatgtagcagccactgtcatttctcagtggttttgcctaaccaaacttcttcctaaggagatttatattctggcctacacagcagtccttgatggctgacagccacagaattccaaaccaagtagtgtctgtcagccctcttaactctgtgcacgccctatttcagtcttttacatttgttcttctagggaatgtatgcatctctatatatattttccctctcaaaaccagaacatcaacagtgctgtttctgacacttcagacatcccacgcaaagccacattgaatttttgccaaatgaaaaacacatccaacaatcaagtttctaagaaggtgtcaagtggggaataataataatgtataataatcaagaaattagtttattaaaaggaagcagaagcattgaccattttttcccagagaagaggagaaatctgtagtgagcaaaggacagaccatgaatcctccttgagaagtagtactctcagaaaggagaagcgccactcaagttcttttaacccaagactttagagaaattaggtccaagatttttatatgttcagttgtttatgtataaaaataactttctggattttgtggggaggagcaggagaggaaggaagttaatacctatgtaatacatagaaacttccacaataaaatgccattgatggttgaaaaaaaaaaaaaaaaaaa

SEQ ID NO: 2058 - DNA, 2183 bp, Homo sapiens
ccagggcctgactaaacctggagactcgggtggccgaggggcttcataccagctgaagagcgacaagccgctggcagccgcggatctcaccgccgctcagggtttttagaacttcagccataaaaatgggcagaattttccttgatcatatcggtggtacccgtctgttttcttgtgcaaactgtgatacgatcctgaccaaccgctcagaactcatctccactcgtttcacaggcgccactggcagagcatttctttttaacaaggtagttaacctgcagtacagcgaagttcaagatcgggtcatgctcactggccgccacatggttcgagatgtgagctgcaaaaactgcaatagcaaactgggatggatctatgagtttgccactgaagacagccagcgatataaggaaggccgcgtgatcctggaacgtgctctagttcgagagagtgagggctttgaggagcatgtaccatctgataactcttgaagatacagagagaaatccatcttttcccaggtctccttcactgaaaacaaaaatctacttacatacactgtcaccttagcatcagagtcggattaatgaactgcggaacaagaggttgtgagaatctaagatggaacctttctttctttctttctttttttttaaattttgtattttccatccaacagcagtgtgtagagagaatattatgcagatgccgttaattttttaccctatgtttacatcttgaggcagcagagtctgtctgcagctatgtggtgagctatgtaaggaaaaaaatctgggctgttagagtgaaaaagtgtgttttatgtcaattgtgaaaggaaaatgttaggagtatggtttttaaacttgggcttcattttaaacttttttttttaaacccagttatttcacttgatttgctagcttcagagaagagatccgaatctgtgcccagcgctaaaggctcagtgttagcatggcttgtgctggccggtgtgccatattcttgttggagatgaaccgtagcaccagagcccattcttccttgtcagtcttggcccaaagatgtcaccattcctagttatttgtcaccacataattggtgttgattggaaactttttctgagatgggacagaactgctgggttgtctttttccatgtaacttaagcatagtaatataaataaagtaatagttggatgcttttggtcctgtgttgcttttaaaaacaccttataaaagaggagagtatttgataagcaattttcatagtagtaaagttttttttcatctcttaaactaaattgaccatgcatataatattctttgtttaaatgaaagcatactgttgaaacccgcagtgttgcatttagaaaacagttgaacagaatgtcaatgtgcattcatgcaaaaaaacatttaatctgcatctgttttagaaaagggggaaatgaagcaacttgtctaaaaatactgctttacaaagcatttcagcctttccccctcagttttgcattgattttttgacaagtctgtagagcctaatagtttccatcaaaggcctagatctcttatttagcatttttttcagctcttctctcagaagttcagctgttgaaacgaaaactgtactttgtaccctcacatacaaagggatcaaatttgacctggtgttattttagccccaaatttatgacattacacaatattaaaatgtaaatgtttctttacccaaactacttctagatattctagtatttgcttctggtggaattaaatgacggtaaaattggctaattatttgaatgaatgaatggatggatgttttgcatgctcaatttctaggtcctttgtctagaaaggaaatttgcctcagttgaattagtgaaatatttctgtcgttgatattaaaagtgacttctgagtacagttaagttcctcctatttgccactgggctgttggttagaagcataggtaactgattaagtaggtatgatactgcatttgaaataagtggacacaaactatcctttctccaccatggactcaatctgagaacaacagcattcatttccattcatttccatactggcttttgattatatgcagattcctagtagcatgccttacctacagcactatgtgcatttgctgtcacaataaagtatattttgtcttgcaaa

SEQ ID NO: 2059 - DNA, 903 bp, Homo sapiens
tagtcacgctcggtaccaggcgcagatcatggcaggcagccggctggaaaccgtagggagcatcttctctcggactcgggacctggttcgggccggggtgctgaaggagaagcccctgtggtttgacgtatatgacgcctttcccccgctgagggagcccgtcttccaaaggcctcgagtgcgatatggcaaagccaaagctcccatccaagacatctggtaccacgaggatcggattagagcgaagttttattcagtgtatgggtctggtcaaagagcttttgatctattcaatccaaacttcaagtctacctgtcaacggtttgtggagaagtacactgagctacagaaacttggagaaacagatgaagagaagttatttgtggaaacagggaaggctttattggcagaaggtgtcattttaagacgagtaggcgaagcaaggactcaacacggaggtagtcacgtttcccggaaatccgaacacttgagtgtcagaccacagactgcgttggaagaaaacgagactcagaaagaagttccacaggaccagcatttggaggcacctgcagaccagtcgaaaggtctcttgcctccctgaaggacctgtatactgtgtatgctggcattcacactctactcactggctgaatgttgagctatttttaaacagttgaactgtgtaaatgtttcttgatctctaaggtattatgtttgccttctcttagttatttctgggttgtcacaaagctcagtatcatggtttgacagaagcagttatgtgaacttttatgttaggacattactaaataaagaattccctagctgcttataaagtaaatttactttgaattgtaaataacatgaagaaacctttataaagattgttcaaatgggactcaa

SEQ ID NO: 2060 - DNA, 2070 bp, Homo sapiens
gacagcaaatacttccgtaaaacagaccatcaagctttccacttagagcccagtgtggccccaatacctttccttgtcgctcctgcgtgccagtccgcctccgcgtggtccggccgctgcgccacgcccccgctcgccccgcccctggatttgctccctcaaagctgaagtgaggccgggctgaggctcttacagtggtccctgctggcccttggtgacgggtcgcctcagttccgacccggacccgtacgctgctgcgctgacgtggctcccggaagtagggctggcgtagggccgccatgttgcagcaggatagtaatgatgacactgaagatgtttcactgtttgatgcggaagaggagacgactaatagaccaagaaaagccaaaatcagacatccagtagcatcgtttttccacttattctttcgagtcagtgcaatcatcgtctatcttctctgtgagttgctcagcagcagctttattacctgtatggtgacaattatcttgttgttgtcgtgtgacttttgggcagtgaagaatgtcacaggtagactaatggttggcctacgttggtggaatcacattgatgaagatggaaagagccattgggtgtttgaatctagaaaggagtcctctcaagagaataaaactgtgtcagaggctgaatcaagaatcttttggttgggacttattgcctgtccagtactgtgggtgatatttgcctttagtgcactcttctccttcagagtaaagtggttggcggtggttatcatgggtgtggtgctacaaggtgccaacctgtatggttacatcaggtgtaaggtgcgcaagaaaagcatttaaccagcatggctacttcatattttggaaagcagtttttaagacaaaacactggagatgatcagacttcctgaatagagaaagcttatgtgctttgttacattggggaacaactgaagagattcttgactcaaccttttagagcttagtccatgttgcaacgaggagtgttggctttgtttttccacttaaaaactttatttataaaaaggaaaagtagttttcatattaagtttttatttcctttccagcagttggggctagaaagtatgtgttggcactagaaacattgtcaagatttgttctgtggtgtaggtatgcacattccataggtatgcacacggccatgtaatatcagtatatcccaagttaatgaaagtgttcatttacataggtaatggagacctttgcattttgatccatagaacataggaggatgttcttagtctgtctcaaagctctatatgtttacatattatttctgtaggattgttttcaggagaaagttttgcttctatgggtaaggagtgaggcactttgggcttatgtataagttagaaataattgttagtttttaatatgcacttcgtggggaaatttcttagacgtatgcaagcaagtgaaaacaattagggccagtggtattaactactttataaaattttatttttgtttgtaagaagtcatctacttaaggcccagttaatataagtggaatcatcatagtttaaggaatacccagagattgctgctgttctatttattttacagaaagggtagctagattgaaagctcttcagtggaccttgagctaatagatcttttaccactaaaagagcattattctcatgtcataatgagaataataatttacatacttggcataataaatgcctaaaagacattttattttctgaatctatttttttcttgctataatggggatattgtaaattatgcatttgtattaatggtatttcttaaagcaatctatgtaactgtaaattaaaccaatctacaaactattgtaggcatctgtaaattctgttgtaggtattataaactttgttgaagtcttaatcagcagattatgttgtgaatatatttgtacattgttaaaatagtttttaagattatttgtttaattgaataagtgtcttattggagtgatagctttgaaggtgcaaaactttatatttgtataaaattctactatttacaaggcaaa

SEQ ID NO: 2061 - DNA, 2115 bp, Homo sapiens
aacgcgcggcgacctgtgaggggatccgacttgccggcagaacttacgctgcgggaccccgggcactgttgctgctgcgggagactgtgggctgtttagtgccatgcgcctttacagtgtgtcctccaagtgcagaggtctctggggtggggaccattggcctctgtgtcttggctgtcgctgaggatgtgcagggcaacagcagtctctctagtaccatgtgtcccagtccagagaggcaggaggatggagctcggaaggatttcagctccaggctggctgctggaccgacttttcaacattttttaaaaagtgcctcagctcctcaggagaagctgtcttcagaagtggaagacccacctccctatctcatgatggatgaacttcttggaaggcagagaaaagtctacctcgagacctatggctgccagatgaatgtgaatgacacagagatagcctggtccatcttacagaagagtggctacctgcgaccagtaacctcaagagcagatgtgattctccttgtcacatgctctatcagggagaaggctgagcagaccatctggaaccgtttacatcagcttaaagccttgaagacaaggcggccccgctcccgggttcctctgaggattggaattctaggctgcatggctgagaggttgaaggaggagattctcaacagagagaaaatggtagatattttggctggtcctgatgcctaccgggaccttccccggctgctggctgttgctgagtcgggccagcaagctgccaacgtgctgctctctctggacgagacctatgctgatgtcatgccagtccagacaagcgccagtgccacgtctgcctttgtgtcaatcatgcgaggctgtgacaacatgtgtagctactgcattgttcctttcacccggggcagggagaggagtcggcctattgcctccattctagaggaagtgaagaagctttctgagcaggtgttcctcccacctcggcctcccaaagtgttgggattacaggggctgaaagaagtgacacttcttggtcagaatgttaatagttttcgggacaattcggaggtccagttcaacagtgcagtgcctaccaatctcagtcgtggctttaccaccaactataaaaccaagcaaggaggacttcgttttgctcatcttctggatcaggtctccagagtagatcctgaaatgaggatccgttttacctctccccaccccaaggattttcctgatgaggttctgcagctgattcatgagagagataacatctgtaaacagatccacctgccagcccagagtggaagcagccgtgtgttggaggccatgcggaggggatattcaagagaagcttatgtggagttagttcaccatatcagagaatctattccaggtgtgagcctcagcagcgatttcattgctggcttttgtggtgagacggaggaagatcacgtccagacagtctctttgctccgggaagttcagtacaacatgggcttcctctttgcctacagcatgagacagaagacacgggcatatcataggctgaaggatgatgtcccggaagaggtaaaattaaggcgtttggaggaactcatcactatcttccgagaagaagcaacaaaagccaatcagacctctgtgggctgtacccagttggtgctagtggaagggctcagtaaacgctctgccactgacctgtgtggcaggaatgatggaaaccttaaggtgatcttccctgatgcagagatggaggatgtcaataaccctgggctcagggtcagagcccagcctggggactatgtgctggtgaagatcaccttcagcccagttctcagacacttaggggacatgttctctgcaggaccactctgagggactcttctgcatattgctgacctgagaggatggcctcagagctgacttgggcaatcctccccaacaggaaggggagacattgcctgccactgaggaaacaggtcatgaaggtggagataagctgcaaggggcgaagcaactttatgtcagtggaaaacgtgtctctttaaagctgctatgtgaacagcttttacagtcattaaatttacctaaactaaggttaaaaaaa

SEQ ID NO: 2062 - DNA, 1758 bp, Homo sapiens
agcaagcggcctgtgcccagatcctgggagaaccccagccgagcccagcctagcccgagcccagcccgagcggagccggagccccaagcccgagccgcgcccagcccgagcagagccctccagccgctcaccccgcgtgccaccccagcgaccctcagccgctctctgcccttctctcggccccgcgcccgccctcgcggcccctctgcccaatgaaactggccgcgatgatcaagaagatgtgcccgagcgactcggagctgagtatcccggccaagaactgctatcgcatggtcatcctcggctcgtccaaggtgggcaagacggccatcgtgtcgcgcttcctcaccggccgcttcgaggacgcctacacgcctaccatcgaggacttccaccgcaagttctactccatccgcggcgaggtctaccagctcgacatcctcgacacgtccggcaaccacccgttccccgccatgcggcgcctctccatcctcacaggagacgttttcatcctggtgttcagtctggacaaccgcgactccttcgaggaggtgcagcggctcaggcagcagatcctcgacaccaagtcttgcctcaagaacaaaaccaaggagaacgtggacgtgcccctggtcatctgcggcaacaagggtgaccgcgacttctaccgcgaggtggaccagcgcgagatcgagcagctggtgggcgacgacccccagcgctgcgcctacttcgagatctcggccaagaagaacagcagcctggaccagatgttccgcgcgctcttcgccatggccaagctgcccagcgagatgagcccagacctgcaccgcaaggtctcggtgcagtactgcgacgtgctgcacaagaaggcgctgcggaacaagaagctgctgcgggccggcagcggcggcggcggcggcgacccgggcgacgcctttggcatcgtggcacccttcgcgcgccggcccagcgtacacagcgacctcatgtacatccgcgagaaggccagcgccggcagccaggccaaggacaaggagcgctgcgtcatcagctaggagccccgccgcgctggcgacacaacctaaggaggacctttttgttaagtcaaatccaacggcccggtgcgccccaggccgggagcgcgcgcggactggcgtctcccctcccggcgatccgcccccagcactggggaggcgccactgaaccgagaagggacggtcatctgctccggaaggaaagagaacgggccaagactgggactattccccacccccggtcccccattgaggcccgccacccccataactttgggagcgagggcccagccgagggtggatttatcttctcaaagacctaagagtgagcgcggggtgggggagggatgtgaagttatccagcctctgctaggcttcaagaaaccgtcatgcccgcttgagggtcaggacccacggggcattatcttgtctgtgattccgggttgctgtgacagccggtagagcctctgccctcccgaaactaagcgggggggcgtgggtcaaatcatagccaagtgacttgtttacatgtgagtgaaactgcacaaaggaacacaaaacaaaacttgcactttaacggtagttccggtgtcaacatggacacgaacaaaaccttacccaggtgtttatactgtgtgtgtgtgaggtctttaaagttattgctttatttggttttttaatatacaataaaataatttaaaatgcaaaaaaaaaaaaaaaa

SEQ ID NO: 2063 - DNA, 1086 bp, Homo sapiens
ggagcaccaagggaacggaaaatggcgcctcacggcccgggtagtcttacgaccctggtgccctgggctgccgccctgctcctcgctctgggcgtggaaagggctctggcgctacccgaggtacagaagcaagtttgaggtcgggctgaagcagggtcactggccagccgtgcgtcgcgctcgccagcggctcccccttctcctcggcgggcctgcggttctgatttcgtccctgacgcttcccgaccctgcccagccagatatgcacccaatgtccagggagcgtgcaaaatttgtcaaaagtggccttttattgtaaaacgacacgagagctaatgctgcatgcccgttgctgcctgaatcagaagggcaccatcttggggctggatctccagaactgttctctggaggaccctggtccaaactttcatcaggcacataccactgtcatcatagacctgcaagcaaaccccctcaaaggtgacttggccaacaccttccgtggctttactcagctccagactctgatactgccacaacatgtcaactgtcctggaggaattaatgcctggaatactatcacctcttatatagacaaccaaatctgtcaagggcaaaagaacctttgcaataacactggggacccagaaatgtgtcctgagaatggatcttgtgtacctgatggtccaggtcttttgcagtgtgtttgtgctgatggtttccatggatacaagtgtatgcgccagggctcgttctcactgcttatgttcttcgggattctgggagccaccactctatccgtctccattctgctttgggcgacccagcgccgaaaagccaagacttcatgaactacataggtcttaccattgacctaagatcaatctgaactatcttagcccagtcagggagctctgcttcctagaaaggcatctttcgccagtggattcgcctcaaggttgaggccgccattggaagatgaaaaattgcactcccttggtgtagacaaataccagttcccattggtgttgttgcctataataaacactttttctttttaaaaaaaaaaaaaaaaaaaaaaaaaaa

SEQ ID NO: 2064 - DNA, 1901 bp, Homo sapiens
gtctttccggcggtgctcgcaagcgaggcagccatgtcttatcccgctgatgattatgagtctgaggcggcttatgacccctacgcttatcccagcgactatgatatgcacacaggagatccaaagcaggaccttgcttatgaacgtcagtatgaacagcaaacctatcaggtgatccctgaggtgatcaaaaacttcatccagtatttccacaaaactgtctcagatttgattgaccagaaagtgtatgagctacaggccagtcgtgtctccagtgatgtcattgaccagaaggtgtatgagatccaggacatctatgagaacagctggaccaagctgactgaaagattcttcaagaatacaccttggcccgaggctgaagccattgctccacaggttggcaatgatgctgtcttcctgattttatacaaagaattatactacaggcacatatatgccaaagtcagtgggggaccttccttggagcagaggtttgaatcctattacaactactgcaatctcttcaactacattcttaatgccgatggtcctgctccccttgaactacccaaccagtggctctgggatattatcgatgagttcatctaccagtttcagtcattcagtcagtaccgctgtaagactgccaagaagtcagaggaggagattgactttcttcgttccaatcccaaaatctggaatgttcatagtgtcctcaatgtccttcattccctggtagacaaatccaacatcaaccgacagttggaggtatacacaagcggaggtgaccctgagagtgtggctggggagtatgggcggcactccctctacaaaatgcttggttacttcagcctggtcgggcttctccgcctgcactccctgttaggagattactaccaggccatcaaggtgctggagaacatcgaactgaacaagaagagtatgtattcccgtgtgccagagtgccaggtcaccacatactattatgttgggtttgcatatttgatgatgcgtcgttaccaggatgccatccgggtcttcgccaacatcctcctctacatccagaggaccaagagcatgttccagaggaccacgtacaagtatgagatgattaacaagcagaatgagcagatgcatgcgctgctggccattgccctcacgatgtaccccatgcgtatcgatgagagcattcacctccagctgcgggagaaatatggggacaagatgttgcgcatgcagaaaggtgacccacaagtctatgaagaacttttcagttactcctgccccaagttcctgtcgcctgtagtgcccaactatgataatgtgcaccccaactaccacaaagagcccttcctgcagcagctgaaggtgttttctgatgaagtacagcagcaggcccagctttcaaccatccgcagcttcctgaagctctacaccaccatgcctgtggccaagctggctggcttcctggacctcacagagcaggagttccggatccagcttcttgtcttcaaacacaagatgaagaacctcgtgtggaccagcggtatctcagccctggatggtgaatttcagtcagcctcagaggttgacttctacattgataaggacatgatccacatcgcggacaccaaggtcgccaggcgttatggggatttcttcatccgtcagatccacaaatttgaggagcttaatcgaaccctgaagaagatgggacagagaccttgatgatattcacacacattcaggaacctgttttgatgtattataggcaggaagtgtttttgctaccgtgaaacctttacctagatcagccatcagcctgtcaactcagttaacaagttaaggaccgaagtgtttcaagtggatctcagtaaaggatctttggagccagaaaaaaa

SEQ ID NO: 2065 - DNA, 1583 bp, Homo sapiens
gcacgaggccgtggaggcgccacgtcccttgcggcggcgggagagaaatcgcttggacttcggggcggcctcggacggccatggcctttaccctgtactcactgctgcaggcagccctgctctgcgtcaacgccatcgcagtgctgcacgaggagcgattcctcaagaacattggctggggaacagaccagggaattggtggatttggagaagagccgggaattaaatcacagctaatgaaccttattcgatctgtaagaaccgtgatgagagtgccattgataatagtaaactcaattgcaattgtgttacttttattatttggatgaatatcagtggagaaaatggagactcagaagaggacatgccagtagaagttattactttggtcattattggaatatttatatcttagcttggctgaccttgcacttgtcaaaaatgtaaagctgaaaataaaaccagggtttctatttatctgtttttttttttaatgttgcacttgtagtttcattacaaaagatcagatcatgaaaggcagtaactctccaggactggaatatctgattgctcagtgttaatagtagttcatgctgtggtgagattgttaaaagggtgcaagactgttgcttctctttttttagatatttttctatctctcacttctcagggatgaaattctttttcaaagttttgaagttccttgcaacttagccatgatgtgagtggttatccctagataaaattaaaaggatttttaaaaagtaattactgcacataaaatgataaataggtaatttgaataattttattttaagctccttggttaattattttgtctattgtctcagctataaattcaaatttatacatactattgagtattaatattctctgatttcagggagaattctgtcagtcacatgatgattatgtttttgtttaacaattctttccatgcacttgttattttattaatttgcctgaatgatgagaccagaccagtgtctacagattttcattgtcagaaaaatctataagtctgccctttttacaatgatgatttaaaaaaaacaacagcgtaaatattagcccacaagagcagtcctaaacaatcacaattacactgtactacccaagaagactgtttattgtgaagcatttacctttcaaaaaatcattacatttctatttcttggtggagcagcacattgtggagtgtgattcttaattcttcattgagtttgtcaataggacattgatgctggataggttgtcttttgtttttatgtctcagaccatcttgtgagattgtttgcctatctcataatacagttttatgcagaaaggttgaaactatgtaaatggtttttatggaaattatcagttacaatattttaaaggtgtagaatggcatctttgtttataggagaacatttgtaaataaagttaaatttctaagcctttaaaatattgtaactgataatttccataaaaaccatttacatagtttcaacctttctgcataaaactgtattatgagataggcaaacaatctcacaagatggtctgagacataaaaa

SEQ ID NO: 2066 - DNA, 1898 bp, Homo sapiens
agctggagggcagaggaggcggcgcggggtgtcctgtcctcgccatgaggccgcagcaggcgccggtgtccggaaaggtgttcattcagcgagactacagcagtggcacacgctgccagttccagaccaagttccctgcggatggagaaccggattgataggcagcagtttgaagaaacagttcgaactctaaataacctttatgcagaagcagagaagctcggcggccagtcatatctcgaaggttgtttggcttgtttaacagcatataccatcttcctatgcatggaaactcattatgagaaggttctgaagaaagtctccaaatacattcaagagcagaatgagaagatctatgctccacaaggcctcctcctgacagaccctattgagcgaggactgcgagttattgaaattaccatttatgaagacagaggcatgagcagtggaagataaaccgaagaattaaagatcccacttccagccgggcccctcatgtatccactggccgaccgcagagtgtccctacctcctctccagagcatcattcctttctatctgctgccagagccacggtgccatttactccaaggactcactttctaaaattccacacctggagtgacctctagtcgctcagcatccactttgtgtctccaaattgtgtaggactctgtaatcttttgattagtttctgagaaaacacaatgaagcacttcacttttttttattcaaagccatttaataaaacacagttggtcagcccagtgcaaagcttgttatctgccaccagtacataccattggttctcttcattccttgggccagcttctcaggtggctttagacctcaacaagccgtatcttcaccagtgttctatcttgttcccctaaattaataaaatgtttttctccaggattttggtgagggttggctgtggctgtcgttttgcacctcccagatttcaaagaattactggttttaccatgactcaaatcttaagatctgtttctactattcagttcctcaaactgaagcttattgaaaaaaaaatgtataatgttatttgttttattatagcaattattcctaattaaagcagtatttaatgcaatttccagttatttctttggagaattttatgtcattgttccattaccttgaatgttggaaagatatgatacgtgctgcttgttcatcacaaaaatcagtaagcacaataaagtggatgccaaaccatcagacacataaatgttcccgctgtgtccctggatatggaataagcaggtataaaaaatattttaattatagttttgttataaatataacttatgagaaaaaaatttgataggaataatactgtatattactaatttttaactatccctaaggcaaaccttatgacccacagaattttctcatatacagtattcagtgcacagaaatcttatgattggctcaagtacagtaagttacttctcagtaaaactctcaagtctgagtccatatttgtagctctgcttttggctgtacgttcctaggatcggggctgcttatgcctttcgtttatccttggggtttgagagcgctgtatttgggagagagtttaaaaatacattaggagagagaaaccattaaaagtttcactgtcagagatattgtaggtgctaatactggatttcgtctcagatttaatttcttttatgggtctgttagtcattcaacaaatcccataagtatgtgttaatattttaattgtgtaaaactcatttgttactttacagcctgtaatagtgtgtctgcattttcaacctgttgcaataactttgctgaaatattaacacattaataaaacttttcttaaacaaaaaaaaaaaaaaaaaaaaaaaaaaaaaaaa

SEQ ID NO: 2067 - DNA, 1090 bp, Homo sapiens
gctccgggagacttccggcagggcgggcgcggggtcttggcgaacggtcttcggaagcggcggcggcgcgatgaccacgctacgggcctttacctgcgacgacctgttccgcttcaacaacattaacttggatccacttacagaaacttatgggattcctttctacctacaatacctcgcccactggccagagtatttcattgttgcagaggcacctggtggagaattaatgggttatattatgggtaaagcagaaggctcagtagctagggaagaatggcacgggcacgtcacagctctgtctgttgccccagaatttcgacgccttggtttggctgctaaacttatggagttactagaggagatttcagaaagaaagggtggattttttgtggatctctttgtaagagtatctaaccaagttgcagttaacatgtacaagcagttgggctacagtgtatataggacggtcatagagtactattcggccagcaacggggagcctgatgaggacgcttatgatatgaggaaagcactttccagggatactgagaagaaatccatcataccattacctcatcctgtgaggcctgaagacattgaataaccctgggcagtggttcttaggcagatactctagatgctttatggacaatattattttcattggatgattctggagctctattaggagaaaagtaatcattttaggtcttaaagacttcaagaaaatacaggttatcaatttattttaaatctcattgtttccagttagcaatatcatacctattaaagctgttcattgtaacaaaattcaatcaaaaaggcagctaggtcagaaggaaacataccactctcatggttcatagtattcactgtatgtatgctagggaaaagacttgctccagtctcctcctcagttctgtgcctgagaaccactgctgcatatatttgtttttaaattttgtattgaactgttaattgaagctttaaaagcatatatgaaatgtataaatctaagatgtataatacattattgactctaaaaaaaaaaaaaaaaaaaaaaaaaaaaaaaaaaaaaaaaaaaaaa

SEQ ID NO: 2068 - DNA, 1280 bp, Homo sapiens
ggctgcgagaagacgacagaagggggaaggggctgatgcgaactggggccacggtagccatcgcgctttgcagttcggtctcctggtgtacggccaacgccaagtaggggattgcgttccctccagtcgcagaccctatcagatttggatatgtccttcatatttgattggatttacagtggtttcagcagtgtgctacagtttttaggattatataagaaaactggtaaactggtatttcttggattggataatgcaggaaaaacaacattgctacacatgctaaaagatgacagacttggacaacatgtcccaacattacatcccacttccgaagaactgaccattgctggcatgacgtttacaacttttgatctgggtggacatgttcaagctcgaagagtgtggaaaaactaccttcctgctatcaatggcattgtatttctggtggattgtgcagaccacgaaaggctgttagagtcaaaagaagaacttgattcactaatgacagatgaaaccattgctaatgtgcctatactgattcttgggaataagatcgacagacctgaagccatcagtgaagagaggttgcgagagatgtttggtttatatggtcagacaacaggaaaggggagtatatctctgaaagaactgaatgcccgacccttagaagttttcatgtgtagtgtgctcaaaagacaaggttacggagaaggcttccgctggatggcacagtacattgattaacacaaactcacattggttccaggtctcaacgttcaggcttactcagagatttgattgctcaacatgcataacttgaattcaatagacttttgctggttataaaacagatgttttttagattattaatattaaatcaacttaatttgaatgagaattgaaaactgattcaagtaagtttgagtatcacaatgttagctttctaattccataaaagtacttggtttttacagtttataatctgacatcaccccagcgccatttgtaaagagcaactttccagcagtacatttgaagcactttttaacaacatgaaactataaaccatatttaaaagctcatcatgttaaattttttatgtacttttctggaactagtttttaaattttagattatatgtccacctatcttaagtgtacagttaataattagcttattcaatgattgcatgatgccttacagttttcaataactttttttcttatgcaaacgtcatgcaataaaacaaactctaatgtttggcaaaaaaaaaaaaa

SEQ ID NO: 2069 - DNA, 1398 bp, Homo sapiens
cccagccggtccaggcctctggcgaacatggcgcttgtcccctgccaggtgctgcggatggcaatcctgctgtcctactgctctatcctgtgtaactacaaggccatcgaaatgccctcacaccagacctacggagggagctggaaattcctgacgttcattgatctggttatccaggctgtcttttttggcatctgtgtgctgactgatctttccagtcttctgactcgaggaattgggaaccaggagcaagagaggcagctcaagaagctcatctctctccgggactggatgttagctgtgttggcctttcctgttggggtttttgttgtagcagtgttctggatcatttatgcctatgacagagagatgatatacccgaagctgctggataattttatcccagggtggctgaatcacggaatgcacacgacggttctgccctttatattaatcgagatgaggacatcgcaccatcagtatcccagcaggagcagcggacttaccgccatatgtaccttctctgttggctatatattatgggtgtgctgggtgcatcatgtaactggcatgtgggtgtaccctttcctggaacacattggcccaggagccagaatcatcttctttgggtctacaaccatcttaatgaacttcctgtacctgctgggagaagttctgaacaactatatctgggatacacagaaaagtatggaagaagagaaagaaaagcctaaattggaatgagatccaagtctaaacgcaagagctagattgagccgccattgaagactccttcccctcgggcattggcagtgggggagaaaaggcttcaaaggaacttggtggcatcagcacccccctcccccaatgaggacaccttttatatataaatatgtataaacatagaatacagttgtttccaaaagaactcaccctcactgtgtgttaaagaattcttcccaaagtcattactgataataacattttttccttttctagttttaaaaccagaattggaccttggatttttattttggcaattgtaactccatctaatcaagaaagaataaaagtttattgcacttctttttgagaaatatgttaaagtcaaaggggcatatatagagtaaggcttttgtgtatttaatcctaaaggtggctgtaatcatgaacctaggccaccatggggacctgagagggaaggggacagatgtttctcattgcataatgtcacagttgcctcaaatgagcaccatttgtaataatgatgtcaatttcatgaaaagcctgagtgtattgcatctcttgatttaatcatgtgaaacttttcctagatgcaaatgctgactaataaagacaaagccaccctgaaaaaaaaaaaaaaaaaaaaaaaaaaaa

SEQ ID NO: 2070 - DNA, 3113 bp, Homo sapiens
ccggaatgaaaacaaacggcggccgctgccgcatccgggcactctgctggtcgcggcgggagtggcgtggcgcagggatggcacaaaagaaatatcttcaagcaaaattgacccagtttttaagggaagacaggattcaactttggaaacctccatatacagatgaaaataaaaaagttggtttggcattaaaggaccttgctaagcagtactctgacagactagaatgctgtgaaaatgaagtagaaaaggtaatagaagaaatacgttgcaaggcaattgagcgtggaacaggaaatgacaattatagaacaacgggaattgctacaatcgaggtgtttttaccaccaagactaaaaaaagataggaaaaacttgttggagacccgattgcacatcactggcagagaactgaggtccaaaatagctgaaacctttggacttcaagaaaattatatcaaaattgtcataaataagaagcaactacaactagggaaaacccttgaagaacaaggcgtggctcacaatgtgaaagcgatggtgcttgaactaaaacaatctgaagaggacgcgaggaaaaacttccagttagaggaagaggagcaaaatgaggccaaactcaaagaaaaacaaattcagaggaccaagagaggactagaaatactggcaaagagagcagcagagacagtggtggatccagaaatgacaccgtacttagacatagctaaccagacaggcagatcaatcagaattcccccatcagaaagaaaagcccttatgttagctatgggatatcatgagaagggcagagctttcctgaaaagaaaagaatatggaatagccttgccatgtctgttggacgctgacaaatatttctgtgagtgttgcagagagctgctggacacagtggataactatgccgtcctccagctggatatagtgtggtgttacttccgcctggaacagctggaatgccttgatgatgcagaaaaaaaattaaacttggcccagaaatgctttaaaaattgttacggagaaaatcatcagagactggtccacataaaaggaaattgtgggaaagagaaggtactgtttctaagactctacttacttcaagggatccgaaactatcacagtggaaatgatgtagaggcttatgagtatcttaacaaggcacgtcagctctttaaagagctatatattgatccatcaaaagtggacaatttgttgcagttggggtttactgcccaggaagcccggcttggcctgagggcgtgtgatgggaacgtggatcatgcggccactcatattaccaaccgcagagaggaactggcccaaataaggaaggaggaaaaagagaagaaaagacgccgcctcgagaacatcaggtttctgaaagggatgggctactccacgcacgcggcccagcagattctgctcagcaatcctcagatgtggtggttaaatgattccaatcctgaaaccgacaaccgtcaagaaagtccttcccaggaaaacattgaccgattggtgtacatgggttttgatgcactcgtggccgaagctgcgctgagagtgttcagaggcaacgtccagctggccgcccagacccttgctcacaacggaggaagcctgcctcccgagctgccgctgtcgccagaagactctttgtccccgccagccacgtccccttctgactccgcaggaacctctagtgcctcaacagacgaagacatggagacagaggccgtcaatgagatactggaagacattccagagcatgaggaagactatcttgactcaactctggaagatgaagaaattattattgcagagtacctatcctatgtagaaaataggaagtcagcaacaaagaaaaactaaataatgaacagaaatagcgctaattttctgcttataaatgctatcattatgaaaaggctaatgcagctctttctgttcttactttttatctgaattacaagtcctctttgggtgtaggagggggtgggcaggggacaagtccaggaggggtcccagggccttcatgcatggtctcggggaagaagcttcctctggcctggcgcaggccgttccatctgcctcccaggtctgcgtcccataaccctttccccagcttggtgttttaccccgaaacaggaaggaacaggggtcctgtagaacaggggtcctggggaaggtgtccagggcagggtcctgggaagggtgtcccgactgcttcctctccagctgtggctccatctgcccagcttgcctgcctcctgcacccactgccctgaccttcctgcttcccacgctgccatctctgccagggtgccacatgggttcctgtgccaccctttccccgcccctcaaatcgtcctttaagtcttccttccaagtgctgtggggcataacgatgaggcgctggccttgggggccacaccaggtcgcagcaaatggcttcagcctgggacgccagtgttttatgctcttagttcagtaaaatacgcccccgaaattcaagattgagtgtcaggctttatatatattcagcattcctcattacagaaatcttctattgaatgggaaaggtttaaatgctaaccaaagcaatttatttttaattaatatttttagactctgtgctgtcatactgaactcactgctagctaagagacctatcagagatttagatatattttctccaggttttttgtgggttttctttgttgttgttgttgttctagccatgtgacagaggctctttctaaaagtatgtagttcgctgtgtgtcggctccagcagtaaccgtcctcactgcgccacgcactcctctgtagatgtgtgcccagtgggagttccttccagccccaggaccgcagcagcagccaggtgccgagtggattgagtgccaggtgcatccaagactttccctcccttccagaaggcactgactgaagacaggatggatcatgcggagccggctgaaatgctccaactttttcaaagtgtgggtggtccagtttggactgatgggaatcttcttgtcattctttttaaacggatgataccgatggaaataaaaggtgggaaatatattcaaaaaaaaaa

SEQ ID NO: 2071 - DNA, 2989 bp, Homo sapiens
cccaccgactccactatgttgaagaaattcgacaagaaggatgaggagtcaggtggaggctccaacccattccagcaccttgagaagagtgcggtactccaggaggcccgtgtatttaatgaaactcccatcaaccctcggaaatgtgcccacatcctcaccaagattctttatctcataaaccagggggagcacctggggaccacggaagcgaccgaggccttctttgccatgaccaagctctttcagtccaatgatcccacactccgtcggatgtgctacttgaccatcaaggagatgtcttgcattgcagaggatgtcatcattgtcaccagcagcctaacaaaagacatgactgggaaagaagacaactaccggggcccggccgtgcgagccctctgccagatcactgatagcaccatgctgcaggctattgagcgctacatgaaacaagccattgtggacaaggtgcccagtgtctccagctctgccctcgtgtcttccttgcacctgctgaagtgcagctttgacgtggtcaagcgctgggtgaatgaggctcaggaggcagcatccagtgataacatcatggtccagtaccacgcactagggctcctgtaccatgtgcgtaagaatgaccgcctagccgtcaataagatgatcagcaaggtcacacggcatggccttaagtctccctttgcctactgcatgatgatccgggtggccagcaagcagctggaagaggaggatggcagccgtgacagcccactgtttgacttcatcgagagctgcttgcgcaacaagcacgagatggtggtgtatgaagccgcctcggccatcgtcaatctgccaggctgcagtgccaaagagctggccccggctgtgtcagtgctccagcttttctgcagctcacccaaggctgctctccgctatgctgctgttcgtaccctcaataaggttgccatgaagcatccgtcagctgtgacagcttgtaatctggatctggagaacctggtcacagattcaaaccgcagcattgccacgctggccatcaccaccctccttaagacgggcagcgagagcagcatcgaccgcctcatgaagcagatctcctccttcatgtcagaaatctcggatgaattcaaggtggtggttgtccaggccatcagtgccctgtgtcagaaatatcctcgcaaacacgccgtccttatgaacttcctgttcaccatgctgcgggaagagggtggctttgagtataagcgcgctatcgtggactgcatcatcagcatcattgaagagaactcagagagcaaggagacagggctgtcacatctgtgcgagttcatcgaggactgcgagttcacagtgctggccacccgtattctacatctcctgggccaggaggggcccaagaccaccaatccctcaaagtacatccgcttcatctataaccgagtggtcttggagcatgaggaggtccgggcaggtgctgtgagtgctctggcgaagtttggagcccagaatgaagagatgttacccagtatcttggtgttgctgaagaggtgtgtgatggatgatgacaatgaagtaagggaccgagccaccttctacctaaatgtcctggagcagaagcagaaggcccttaatgcaggctatatcctaaatggtctgactgtgtccatccctggtctggagagggctctgcagcagtacactctagaaccatcagaaaaaccttttgacctcaagtctgtgcccctggccacggcgcccatggcagagcagagaacagaaagtacccccatcacagcagtcaaacagcctgagaaagtggcagctaccaggcaggagatcttccaggagcagttggcagcagtgccagagttccgcggtcttgggcccctcttcaagtcctcgcctgagcccgtggccctcaccgagtcagagacggagtatgtcatccgctgcaccaaacacaccttcaccaaccacatggtttttcagtttgactgcacaaacacactcaatgaccagaccttggagaatgtcacagtgcagatggagcccactgaggcctatgaggtgctctgttacgtgcctgcccggagcctgccctacaaccagcccgggacctgctacacactggtggcactgcccaaagaagaccccacagctgtggcctgcacattcagctgcatgatgaagttcactgtcaaggactgtgatcccaccactggggagactgatgacgaaggctatgaggatgagtatgtgctggaagatctggaagttactgtagctgatcacattcaaaaggtcatgaaactgaacttcgaagcagcctgggatgaggtaggggatgaatttgagaaggaggaaacgttcaccttgtctaccatcaagacacttgaagaggctgtgggtaatattgtgaagttcttgggaatgcacccttgtgagaggtcagacaaagtgccggataacaagaacacccacacgttgctcctggctggtgtgttccggggtggtcatgacatcctggtgcgctcccggctgctgcttttggacacagtgacaatgcaggtgacagccagaagtttggaggagctgccagtagacatcatcttggcatctgtgggataagaggccagcctgcataggacctcatacccttccccaacactacctggaagttgtgccttcctcatgaaactggcagaaaccccttcccaagcttctgtattgaaaaacaattaggaatcattgcagatttttttttattctgctcccacctcccacccgggactacttgctggtgactttttttttttttttttttttaaataggggatgattttagcttgtcctaaatcttgctgtccacccttccaggaaagggacattgtaaatgaataaaacattctcaactcctcttgaatctatcccccaagaaaccatcttatccctgtaataaatcagcatgtatttattg

SEQ ID NO: 2072 - DNA, 1613 bp, Homo sapiens
agaaagatggcggccgtgcgacaggatttggcccagctcatgaattcgagcggctctcataaagatctggctggcaagtatcgtcagatcctggaaaaagccattcagttatctggagcagaacaactagaagctttgaaagcttttgtggaagcaatggtaaatgagaatgtcagtctcgtgatctcgcggcagttgctgactgatttttgcacacatcttcctaacttgcctgatagcacagccaaagaaatctatcacttcaccttggaaaagatccagcctagagtcatttcatttgaggagcaggttgcttccataagacagcatcttgcatctatatatgagaaagaagaagattggagaaatgcagcccaagtgttggtgggaattcctttggaaacaggacaaaaacagtacaatgtagattataaactggagacttacttgaagattgctaggctatatctggaggatgatgatccagtccaggcagaggcttacataaatcgagcatcgttgcttcagaatgaatcaaccaatgaacaattacagatacattataaggtatgctatgcacgtgttcttgattatagaagaaaattcattgaagctgcacaaaggtacaatgagctctcttacaagacaatagtccacgaaagtgaaagactagaggccttaaaacatgctttgcactgtacgatcttagcatcagcagggcagcagcgttctcggatgctagctactctttttaaggatgaaaggtgccagcaacttgctgcctatgggatcctagagaaaatgtatctagataggatcatcagaggaaatcaacttcaagaatttgctgccatgctgatgcctcaccaaaaagcaactacagctgatggttccagcatcttggacagagctgttattgaacacaatttgttgtctgcaagcaaattatataataatattaccttcgaagaacttggagctcttttagagatccctgcagctaaggcggaaaagatagcatctcaaatgataaccgaaggacgtatgaatggatttattgaccagattgatggaatagttcattttgaaacacgagaagccctgccaacgtgggataagcagatccaatcactttgtttccaagtgaataaccttttggagaaaattagtcaaacagcaccagaatggacagcacaagccatggaagcccagatggctcagtgaatccttgcagaacttctgtgcacatgacatctttttccatgttgtgcagatcagtttcactatctccaaagcatttgcatcatgaccttatacatttcaatcccttttatgctggattccgtttaaagaagacattattagagcaggaagtacaagcatttaaaatatgtagttcccatatatttcagggtctctgtgtattaagctaactcagatgttttgaaagctttttctttaaacagaggtgaaatatctgtggctaaaaagtttgagatttgtgataactttgtagtcatgtaaaacttaagtgcttcatgcctctccaaatgtggttattctaataaatggagaaatgagccaaaaaaaaaaaaaaaaaaaaaaaaaaaaaa

SEQ ID NO: 2073 - DNA, 3164 bp, Homo sapiens
cggcctcagaaagccgagtgaggagttggccgtagtgagagggaccgatcccttggggccgccggcggcgaggccgagccgctcctcccaatggcgaagaagacgtacgacctgcttttcaagctgctcctgatcggggattccggagtggggaagacctgcgtcctttttcgtttttcggatgatgccttcaatactacctttatttccaccataggaatagacttcaagatcaaaacagttgaattacaaggaaagaagatcaagctacagatatgggatacagcaggccaggagcgatttcacaccatcacaacctcctactacagaggcgcaatgggtatcatgctagtatatgacatcaccaatggtaaaagttttgaaaacatcagcaaatggcttagaaacatagatgagcatgccaatgaagatgtggaaagaatgttactaggaaacaagtgtgatatggacgacaaaagagttgtacctaaaggaaaaggagaacagattgcaagggagcatggtattaggttttttgagactagtgcaaaagcaaatataaacatcgaaaaggcgttcctcacgttagctgaagatatccttcgaaagacccctgtaaaagagcccaacagtgaaaatgtagatatcagcagtggaggaggcgtgacaggctggaagagcaaatgctgctgagcattctcctgttccatcagttgccatccactaccccgttttctcttcttgctgcaaaataaaccactctgtccatttttaactctaaacagatatttttgtttctcatcttaactatccaagccacctattttatttgttctttcatctgtgactgcttgctgactttatcataattttcttcaaacaaaaaaatgtatagaaaaatcatgtctgtgacttcatttttaaatgtacttgctcagctcaactgcatttcagttgtattatagtccagttcttatcaacattaaaacctatagcaatcatttcaaatctattctgcaaattgtataagaataaagttagaattaacaattttattttgtacaacagtggaattttctgtcatggataatgtgcttgagtccctataatctatagacatgtgatagcaaaagaaacaaacaaaagccaggaaaacactcattttcgccttgaatatgtaaatgggattaattttgtcctgtgccttatgtggaaagggacttctttgggttttccttttttgttctggtggaagcatgtgcagggagaccatatcatccaaaccataaacccattaaaatgtttgtggtttgcttggctgtaattttcaaagtagttaattgaggacaaagggtaatgcagaagtgatagctttggtttgctgagtcttgttttaagtggccttgatatttaaaactattcctgccaccatttcttctccttggccacttcttccttgcgtctccctgcatgctgctttatttgcttctccctccccaaccacctcatggtatatttaagagtgaaagggacaaactagtaggtttgtcaagtttaatataaagcactgatgtaacttgctaggtaaacggaaagataagttctaactgcctactatccaatgtcagttaattggtgtcttcccccctcatttgctctcttccctaaaatgtgtcccagatgccttcatttgctgttttacttctatgttctgcttttcctcctctctttgttcccttcctgtctatccattgagtttatgaaatggaagagttaactgcatgcactagtgtttggagggtgttgtggtttgtctttctaattaggtgtatagcctattcactttcctaggaataaatctcttaacctaaatttgagtagtctgcattttggcaactcctctaagcagcttggtagcctaagtacaggttgtttttttaaaaaaggaaaagcaggaaggaggagtgaattttattaacatgtttgccaaatgtattgagatttggcctctgaagaacactttttcagtgttaagtttctttaccttaagattccgaaatactttagaatattattaattttaagtcctgtctttacatccttttggaaaacttgtattaccatgagtttggaaaaaggacaacgaaaggcttttcatgtaaagataagatctttagctatctctaaccctgtccttttttcactgcattttttctagttttgcttcattgcttatcattaggatagggtaagtgaagtttgctatgctgctagcatcctaagatgatacctttgttgaaagaattgtgaatagcatgattcatttctagcagaggctgagtttaggacagcagcttccattgagaagtctttctgtgtcgtgaatagcattttaatgacctcttggctcacataagcaaacaacatagggacgtatctgctatgaaaatccacaaatttttcagatagtgccctaaaaacaattttatatgcctcactggttgttattcttaggttattcccacacttgactttatcattgtttactactagtaaaaagcagcattgccaaataatccctaattttccactaaaaatataatgaaatgatgttaagctttttgaaaagtttaggttaaacctactgttgttagattaatgtatttgttgcttccctttatctggaatgtggcattagcttttttattttaaccctctttaattcttattcaattccatgacttaaggttggagagctaaacactgggatttttggataacagactgacagttttgcataattataatcggcattgtacatagaaaggatatggctaccttttgttaaatctgcactttctaaatatcaaaaaagggaaatgaagtataaatcaatttttgtataatctgtttgaaacatgagttttatttgcttaatattagctttgccccttttctgtaagtctcttgggatcctgtgtagaagctgttctcattaaacaccaaacagttaagtccattctctggtactagctacaaattcggtttcatattctacttaacaatttaaataaactgaaatatttctagatggtctacttctgttcatataaaaacaaaacttgatttccaaaaaaaaaaaaaaaaaaaaaaaaaaaaaaaaa

SEQ ID NO: 2074 - DNA, 841 bp, Homo sapiens
gcaaccactgcagctgggccaagtcgcttagctcttcggtggttgtcacacgtccggaggcctagccgtcgcgtacctaggatgccgcgtggaagccgaagccgcacctcccgcatggcccctccggccagccgggcccctcagatgagagctgcacccaggccagcaccagtcgctcagccaccagcagcggcacccccatctgcagttggctcttctgctgctgcgccccggcagccaggtctgatggcccagatggcaaccactgcagctggcgtggctgtgggctctgctgtggggcacacattgggtcacgccattactgggggcttcagtggaggaagtaatgctgagcctgcgaggcctgacatcacttaccaggagcctcagggaacccagccggcacagcagcagcagccttgcctctatgagatcaaacagtttctggagtgtgcccagaaccagggtgacatcaagctctgtgagggtttcaatgaggtgctgaaacagtgccgacttgcaaacggattggcctaatgaagaagttcaacctggagagatggaaaatcagctctcataactaagttaatttagtataaaaatagaattgatagtgagggtataaagtgtaaccatcagttaaacctctcctgtcattcctagcttccttgcttcagaattgaaatggaagtgggggtgtccctactctgtagaatctgggactgggcaaatgtttgtgtggcctccttaaactagctgttatgttatgattttattctttgtgagttaattagaataaagtcattttcttacaaaaaaaaaaaaaaaaaaaaaaaaaaaa

SEQ ID NO: 2075 - DNA, 2393 bp, Homo sapiens
ggccggcgcctcctcctggattcattcactcgctcttttcattcacgaaggtagtgaggcctagtggaaagccatggagagcgctctccccgccgccggcttcctgtactgggtcggcgcgggcaccgtggcctacctagccctgcgtatttcgtactcgctcttcacggccctccgggtctggggagtggggaatgaggcgggggtcggcccggggctcggagagtgggcagttgtcacaggtagtactgatggaattggaaaatcatatgcagaagagttagcaaagcatggaatgaaggttgtccttatcagcagatcaaaggataaacttgaccaggtttccagtgaaataaaagaaaaattcaaagtggagacaagaaccattgctgttgactttgcatcagaagatatttatgataaaattaaaacaggcttggctggtcttgaaatcggcatcttagtgaacaacgtgggaatgtcgtatgagtatcctgaatactttttggatgttcctgacttggacaatgtgatcaagaaaatgataaatattaatattctttctgtttgtaagatgacacaattggtactgcctggcatggtggaaagatccaaaggggctattctgaacatttcatctggcagtggcatgctccctgtcccactcttgaccatctattctgcaaccaagacttttgtagatttcttctctcagtgcctccatgaggagtataggagcaagggcgtctttgtgcagagtgtcctgccatacttcgtagctacaaaactggctaaaatccggaagccaactttggataagccctctccggagacgtttgtgaagtctgcaattaaaacagtcggcctgcaatcccgaaccaatggatacctgatccatgctcttatgggctcgataatctcaaacctgccttcttggatttatttgaaaatagtcatgaatatgaacaagtctacacgggctcactatctgaagaaaaccaagaagaactaagcatgataactgcattgtaacttggccagatgctccagcatatgcacgttcactgcaaagcaccctactggttttgaaaatctgaccttgtcatttcaatagttattaacatgactaaatattatcttaattaagaggaaaatagaagttgcttttaggggtttctgacatatattctggatactatccgaggtaattttgaagtttaatataaatgctcatatcaaatgaatatagaactaatattgtcgggaacacctaatagaaaggaatactattatagcaaatcacagaatgatagactcaagcataaaacttggcagttttatctgcttcaaaatgccattgatcattattcctgtattttctctgaaactgattataaaaaccaatgtccagctactcttttgtttttgacacttgaagaaatggagatcgatttgatttgtttataagcagacacactgcaatttacaaagatctctttacggttttataaaattatcttccagtttgtacatttatatggaattgttctttatcaagggtagctaatgacatgaaaataattgtgaaatatggaattatttctgacacatgaagcccactaaactatgctttcctataatgcatatttcttctcagtttaaatgtatgtaaatatcgaagctatatggtatgatttataaagataaatgggccaaagtgtacattgagactggcagccatctatggtaccactgaaaccctgacccagaaaagtggcttgcttggacacccagctgcctttgtttctgcattaaaccaatattgatcacacatatgacacaggctagtcctataaaagtaatgacttcatagaaatggcattataatttttaagttgatactctacaggtagctattgatataattagttttaataaaacatgctgcaaccatggtatacaacaaaaatacatttctttggtgattgaaattaaggccgtatttacaatgacttaatataagactgacttttatcctgcttcataacttgtatggagaactcaccaagaaagaattcaatactgtgaaatatgcagcaagaagattggtctttacctaggctgtgtttcctaagctctgagttttcagcaccagtagatttgtattaaaagaaaaaaaaatggggccttagcttctggcttttaattttgccagctaaggacataaaacaaaaataaacaaacaaaaacaaatagccatctgctatcagcatcattatgtaaaagaaaatatattttagcccctaaaattaggaagaatgtaatctcagaataaaggttgtcatttaagttgaataaatatatagctttatgaaaaacacaaaaaaaaaaaa

SEQ ID NO: 2076 - DNA, 2393 bp, Homo sapiens; identical to SEQ ID NO: 2075

SEQ ID NO: 2077 - DNA, 1450 bp, Homo sapiens
ggcacgaggggcaagcggaacgcggcagcggggctgggcctgtgcggcggccgccggagcgctttggaaggcgcacggggcgaagatggcggcggagcgacaggaggcgctgagggagttcgtggcggtgacgggcgccgaggaggaccgggcccgcttctttctcgagtcggccggctgggacttgcagatcgcgctagcgagcttttatgaggacggaggggatgaagacattgtgaccatttcgcaggcaacccccagttcagtgtccagaggcacagcccccagtgataatagagtgacatccttcagagacctcattcatgaccaagatgaagatgaggaggaagaggaaggccagaggttttatgctgggggctcagagagaagtggacagcagattgttggccctcccaggaagaaaagtcccaacgagctggtggatgatctctttaaaggtgccaaagagcatggagctgtagctgtggagcgagtgaccaagagccctggagagaccagtaaaccgagaccatttgcaggaggtggctaccgccttggggcagcaccagaggaagagtctgcctatgtggcaggagaaaagaggcagcattccagccaagatgttcatgtagtattgaaactctggaagagtggattcagcctggataatggagaactcagaagctaccaagacccatccaatgcccagtttctggagtctatccgcagaggggaggtgccagcagagcttcggaggctagctcacggtggacaggtgaacttggatatggaggaccatcgggacgaggactttgtgaagcccaaaggagccttcaaagccttcactggcgagggtcagaaactgggcagcactgccccccaggtgttgagtaccagctctccagcccaacaggcagaaaatgaagccaaagccagctcttccatcttaatcgacgaatcagagcctaccacaaacatccaaattcggcttgcagacggcgggaggctggtgcagaaatttaaccacagccacaggatcagcgacatccgactcttcatcgtggatgcccggccagccatggctgccaccagctttatcctcatgactactttcccgaacaaagagctggctgatgagagccagaccctgaaggaagccaacctgctcaatgctgtcatcgtgcagcggttaacataaccgcccagccagctgcctggcctccctcctgtgtttcccatggccagtggccatgccccatggggatcgcccctcctgcccccttgtgcacacccagcagtccagtgcaacgtctcctccatagctctgggttcttagatcttggttggacgtttgttttctccttagttgcatttcctgggtttttgtgatgatcaatggactttaatgaaaaaaaaaaataaaaacaaccaaaaaaaaaaaaaaaaaaaa

SEQ ID NO: 2078 - DNA, 2438 bp, Homo sapiens
ccggcgggggcgccgcggagagcggagggcgccgggctgcggaacgcgaagcggagggcgcgggaccctgcacgccgcccgcgggcccatgtgagcgccatgcggcgccgcgcagcccggggacccggcccgccgcccccagggcccggactctcgcggttgccgctgctgccgctgccgctgctgctgctgctggcgctggggacccgcgggggctgcgccgcgcccgcacccgcgccgcgcgccgaggacctcagcctgggagtggagtggctaagcaggttcggttacctgcccccggctgaccccacaacagggcagctgcagacgcaagaggagctgtctaaggccatcacagccatgcagcagtttggtggcctggaggccaccggcatcctggacgaggccaccctggccctgatgaaaaccccacgctgctccctgccagacctccctgtcctgacccaggctcgcaggagacgccaggctccagcccccaccaagtggaacaagaggaacctgtcgtggagggtccggacgttcccacgggactcaccactggggcacgacacggtgcgtgcactcatgtactacgccctcaaggtctggagcgacattgcgcccctgaacttccacgaggtggcgggcagcaccgccgacatccagatcgacttctccaaggccgaccataacgacggctaccccttcgacggccccggcggcaccgtggcccacgccttcttccccggccaccaccacaccgccggggacacccactttgacgatgacgaggcctggaccttccgctcctcggatgcccacgggatggacctgtttgcagtggctgtccacgagtttggccacgccattgggttaagccatgtggccgctgcacactccatcatgcggccgtactaccagggcccggtgggtgacccgctgcgctacgggctcccctacgaggacaaggtgcgcgtctggcagctgtacggtgtgcgggagtctgtgtctcccacggcgcagcccgaggagcctcccctgctgccggagcccccagacaaccggtccagcgccccgcccaggaaggacgtgccccacagatgcagcactcactttgacgcggtggcccagatccgcggtgaagctttcttcttcaaaggcaagtacttctggcggctgacgcgggaccggcacctggtgtccctgcagccggcacagatgcaccgcttctggcggggcctgccgctgcacctggacagcgtggacgccgtgtacgagcgcaccagcgaccacaagatcgtcttctttaaaggagacaggtactgggtgttcaaggacaataacgtagaggaaggatacccgcgccccgtctccgacttcagcctcccgcctggcggcatcgacgctgccttctcctgggcccacaatgacaggacttatttctttaaggaccagctgtactggcgctacgatgaccacacgaggcacatggaccccggctaccccgcccagagccccctgtggaggggtgtccccagcacgctggacgacgccatgcgctggtccgacggtgcctcctacttcttccgtggccaggagtactggaaagtgctggatggcgagctggaggtggcacccgggtacccacagtccacggcccgggactggctggtgtgtggagactcacaggccgatggatctgtggctgcgggcgtggacgcggcagaggggccccgcgcccctccaggacaacatgaccagagccgctcggaggacggttacgaggtctgctcatgcacctctggggcatcctctcccccgggggccccaggcccactggtggctgccaccatgctgctgctgctgccgccactgtcaccaggcgccctgtggacagcggcccaggccctgacgctatgacacacagcgcgagcccatgagaggacagaggcggtgggacagcctggccacagagggcaaggactgtgccggagtccctgggggaggtgctggcgcgggatgaggacgggccaccctggcaccggaaggccagcagagggcacggcccgccagggctgggcaggctcaggtggcaaggacggagctgtcccctagtgagggactgtgttgactgacgagccgaggggtggccgctccagaagggtgcccagtcaggccgcaccgccgccagcctcctccggccctggagggagcatctcgggctgggggcccacccctctctgtgccggcgccaccaaccccacccacactgctgcctggtgctcccgccggcccacagggcctccgtccccaggtccccagtggggcagccctccccacagacgagccccccacatggtgccgcggcacgtcccccctgtgacgcgttccagaccaacatgacctctccctgctttgtaaaaaaaaaaaaaaaaaaa

SEQ ID NO: 2079 - DNA, 4898 bp, Homo sapiens
cgccgtgcgcaggcgcggagctagacctcgctgcagcccccatcgcctcggggagtctcacccaccgagtccgcccgctggcccgtcagtgctctccccgtcgtttgccctctccagttcccccagtgcctgccctacgcaccccgatggcggagctgcggcctagcggcgcccccggccccaccgcgcccccggcccctggcccgactgcccccccggccttcgcttcgctctttcccccgggactgcacgccatctacggagagtgccgccgcctttaccctgaccagccgaacccgctccaggttaccgctatcgtcaagtactggttgggtggcccagaccccttggactatgttagcatgtacaggaatgtggggagcccttctgctaacatccccgagcactggcactacatcagcttcggcctgagtgatctctatggtgacaacagagtccatgagtttacaggaacagatggacctagtggttttggctttgagttgacctttcgtctgaagagagaaactggggagtctgccccaccaacatggcccgcagagttaatgcagggcttggcacgatacgtgttccagtcagagaacaccttctgcagtggggaccatgtgtcctggcacagccctttggataacagtgagtcaagaattcagcacatgctgctgacagaggacccacagatgcagcccgtgcagacaccctttggggtagttaccttcctccagatcgttggtgtctgcactgaagagctacactcagcccagcagtggaacgggcagggcatcctggagctgctgcggacagtgcctattgctggcggcccctggctgataactgacatgcggaggggagagaccatatttgagatcgatccacacctgcaagagagagttgacaaaggcatcgagacagatggctccaacctgagtggtgtcagtgccaagtgtgcctgggatgacctgagccggccccccgaggatgacgaggacagccggagcatctgcatcggcacacagccccggcgactctctggcaaagacacagagcagatccgggagaccctgaggagaggactcgagatcaacagcaaacctgtccttccaccaatcaaccctcagcggcagaatggcctcgcccacgaccgggccccgagccgcaaagacagcctggaaagtgacagctccacggccatcattccccatgagctgattcgcacgcggcagcttgagagcgtacatctgaaattcaaccaggagtccggagccctcattcctctctgcctaaggggcaggctcctgcatggacggcactttacatataaaagtatcacaggtgacatggccatcacgtttgtctccacgggagtggaaggcgcctttgccactgaggagcatccttacgcggctcatggaccctggttacaaattctgttgaccgaagagtttgtagagaaaatgttggaggatttagaagatttgacttctccagaggaattcaaacttcccaaagagtacagctggcctgaaaagaagctgaaggtctccatcctgcctgacgtggtgttcgacagtccgctacactagcctgggctgggccctgcaggggccagcagggagcccagctgctccccagtgacttccagtgtaacagttgtgtcaacgagatctccacaaataaaaggacaagtgtgaggaagactgcgcagtgccaccccgcagcccagtggggtgccatgcacaggccacaggccctccacctcacctccagctcaggggccgcaccccgccgctggctaagccttgtgacccatcaggccagtgagtgggcaaatgcggaccctccctgcctgcagcctgcacagattctggtttgaggtttgactctggaccctggctgtgcccctaggtggagacagccctctttctcacctaccccctgccgcacagcccagcaggagggaggcggacagccagatgcagagcgagtggatgcacttcccagctcatctctggaagcctttgctactcaagctcctctggccgcggaacaattcctctgatcatgtttggttttcttcttccttattttattttgtagaaaccgggtggtattttattgctctgcaaagatgtccagaagccatgtatataatgttttttaaacagaacttcattccccgttgaactttcgcattctctgacagaggcctagggctgtatctctccctgggctgccaccagagaaggtgcttggtgttcgcctgccagcccagagccctggaggagccggctgcacagagaggcttttcttcccagctgggcctgatggagcccggggcagggggagagtagagacactcccttgtgcagctttgagcctagtttagctggggccagggaggggtgctactgttttccaagtgaatgggtctcaaagacttggtgaccccagcctcatcttctaggccttttccatccaaccaggcctacctgggagagggtgaggttcagcacatcacacaccatccccactgtcattcagggcctgggtctccagctctgtaaccagtcctgtcccatttcctcagtccctgggcctcccagccttcaggctgtagggctgccttactaaaattgaaaaatccacctcttaacatctctttcactttggttttgctaacactgctctctgctgccctcccatcctccctgtatccattcatgccctatctttcattctccactcctaatccctctcctttctggcatcctggcctctcgtggtcctcagcccctcacccccagtactgcagatctcacagtttgccttccagaagccagcctatctctagcccatggttttggagttcctctcgggttatctcccacgcctgacctggaaccagcaagcccctttcctgccttcttacccccaactctagggatgggactgttacaatacttcaagatcactctttacacctcttcaaagcaaagtcatgacaatgcagggctcctcattgctcccatctgcctctgctgcacacacaggcaccagcagggatgccacaggagtgcccacagggtgcaggactccactgatgagagatccagccaaagagctgcccccaggggtatgagggcaccagctgggttctccagggagcaggagttggacctccatggagccactaggcctggcctcctctacacatccccagggctatctggttaattccatcaagctcagagttaaaaggcatatcagcctggagtatttgggagagactggctgcagatccccgccagccaagatgcaagccactcgggacctgatgtcggcagctgtgcctctactgccctgaggacttaccagagggagccctactggccttcccccaccacagcagccctgcctgtgaagctcttgtttctgacatttcacaggcagagaggtgccatcagttcgcctccattccttgccaccatgaccagcctctccctgaactctctcttgctcgggacctgcctgagggctccctgctgcagttcgccgtacttccatctgctgggtgcctccatcgttggttgggtggggatggggcattttctgagctaagctttgtcattagtttgtgaagcacctggtcagcaacctgccccagacctggagggtctttgtggactgaaggtagacaccagccagcatggtggccctgttctgggggagcagggtaaggcaggaggaagtgggtgagctccgagatgatgagcacatgaagcctgtggccccttcgtacctgcaatatgtcaggagcctcacgctcacccaagatcctgcaggggccaggctccatctcactggctctgagggcaggacagggtatcacacatttctcaccaggcctcctttcctatgggcattggtgcctcccagaggtttcttgggctgctggctggtgagagaggacccttaaagaagatcaagccaagctgaccttggaccctgtccagcacagcttctggcacaggatgcttggtgaatgtaccctttctttccctccctgcagctctgagggagcccctgaccttgtagtgggtggaggaggtaaggggcctccctccctaaatctgcctcttctgcaagctacttggagacttgcctagttgtacccacccctccaggtccctggtgctagagcttctgagaagggcctttccctttcctctttgcctgctatataaggcaggctcctgtggctctgctggctcagtgtgggctgcaggaggactgcagactcagctgcaattctgaggggggtttgggaggcttgtgcgaggtctcaggcctgtgtggggagctggtgcctcttcctgcccgtatctttctcttccaagggcagtgctccaaggcagggactggagaagccaaggggagagtctaaaagggctagagcatttttaaaaatagacacagggtcttgggactggggtttcggattgagttgcaagcagggagaaaacctgaaggtcggtgcccctatggggctgaccagtagagaatttcctttactgtatttttgtgtctggtcttccctttctggcttctaggacatccatgccaggtgaggtgcctgggtccctgttacaagtcaggagccctgtagggagacccctccttttgtacaagtacctgaatgctgcgacaagcagatttttgtaaaattttatattagtttttaatgtcagtggcgactcggttcctggggctgcagccagcctgggacttttgtaagaatttttgggtgactcacttagatgtcgtttccttcttgccccctcttcctctctgtaatctaagtgcattaaacatctttgcag

SEQ ID NO: 2080 - DNA, 1554 bp, Homo sapiens
atgctgcaggagtggctggcggctgtgggcgatgactatgctgctgtggtctggaggcctgagggcgagcccaggttctacccagatgaagagggtcccaagcactggaccaaagaaaggcaccagtttctgatggagctgaagcaggaagccctcacctttgccaggaactggggggccgactatatcctgtttgcagacacagacaacattctgaccaacaatcagactctgcggcttctcatggggcaggggcttccagtggtggccccaatgctggactcccagacctactactccaacttctggtgtgggatcaccccccagggctactaccgccgcacagccgagtacttccccaccaagaaccgccagcgccggggctgcttccgtgtccccatggtccactccaccttccttgcatccctgcgggctgaaggggcagaccagcttgctttctacccgccacatcccaactacacttggcctttcgacgacatcatcgtcttcgcctatgcctgccaggctgctggggtctccgtccacgtgtgcaatgagcaccgttatgggtacatgaatgtgccggtgaaatcccaccaggggctggaagacgagagggtcaacttcatccacctgatcttggaagcactagtggacggcccccgcatgcaggcctcagctcatgtgactcggccctctaagaggcccagcaagatagggtttgacgaggtctttgtcatcagcctggctcgcaggcctgaccgtcgggaacgcatgctcgcctcgctctgggagatggagatctctgggagggtggtggacgctgtggatgctggatggctcaacagcagtgccatcaggaacctcggcgtagacctgctcccgggctaccaggacccttactcgggccgcactctgaccaagggcgaggtgggctgcttcctcagccattactccatctgggaagaggtggttgccaggggcctggcccgggtcctggtgtttgaggatgacgtgcgctttgagagcaacttcagggggcggctggagcggctgatggaggatgtggaggcagagaaactgtcttgggacctgatctaccttggacggaaacaggtgaaccctgagaaggagacggccgtggaggggctgccgggcctggtggtggctgggtactcctactggacgctggcctatgccctgcgtctggcgggtgcccgcaagctgctggcctcacagcctctgcgccgcatgctgcccgtggacgagttcctgcccatcatgttcgaccagcaccccaacgagcagtacaaggcacacttctggccacgggacctggtggccttctccgcccagcccctgctcgctgcccctacccactatgccggggacgccgagtggctcagtgacacggagacatcctctccatgggatgatgacagcggccgcctcatcagctggagcggctcccaaaagaccctgcgcagcccccgcctggacctgactggcagcagcgggcacagcctccaaccccagccccgagatgagctctag

SEQ ID NO: 2081 - DNA, 2466 bp, Homo sapiens
ctggagtggggtaagaggcgaattatagacacaaggggctcctctgcaggaaggaggccaagggaaagaggcttgaaaggcttgatatttcacccaccaccactcactgccggagtaagcaggtctccccttcccagggctgaggggaggcagggatgtgtgctgtcccagggctgagaagtggcaggtgagctggtgattccttactgcccaggttctgtctaggaaggtgcgtcctcaccatgctggatggtgtcctagtccaggagcaccccctgagctcctggcctagactccaaagggttgggtagatgagcaaagactttacaaagaccttaggcgatatatgtccaggagcacccaggaattactgggctaccactgcagactgcaggacaagctccaagaacaggaaggaagtcttgcagctgaagggaggcactccttggcctccgcagccgatcacatgaaggtggtgccaagtctcctgctctccgtcctcctggcacaggtgtggctggtacccggcttggcccccagtcctcagtcgccagagaccccagcccctcagaaccagaccagcagggtagtgcaggctcccaaggaggaagaggaagatgagcaggaggccagcgaggagaaggccagtgaggaagagaaagcctggctgatggccagcaggcagcagcttgccaaggagacttcaaacttcggattcagcctgctgcgaaagatctccatgaggcacgatggcaacatggtcttctctccatttggcatgtccttggccatgacaggcttgatgctgggggccacagggccgactgaaacccagatcaagagagggctccacttgcaggccctgaagcccaccaagcccgggctcctgccttccctctttaagggactcagagagaccctctcccgcaacctggaactgggcctcacacaggggagttttgccttcatccacaaggattttgatgtcaaagagactttcttcaatttatccaagaggtattttgatacagagtgcgtgcctatgaattttcgcaatgcctcacaggccaaaaggctcatgaatcattacattaacaaagagactcgggggaaaattcccaaactgtttgatgagattaatcctgaaaccaaattaattcttgtggattacatcttgttcaaagggaaatggttgaccccatttgaccctgtcttcaccgaagtcgacactttccacctggacaagtacaagaccattaaggtgcccatgatgtacggtgcaggcaagtttgcctccacctttgacaagaattttcgttgtcatgtcctcaaactgccctaccaaggaaatgccaccatgctggtggtcctcatggagaaaatgggtgaccacctcgcccttgaagactacctgaccacagacttggtggagacatggctcagaaacatgaaaaccagaaacatggaagttttctttccgaagttcaagctagatcagaagtatgagatgcatgagctgcttaggcagatgggaatcagaagaatcttctcaccctttgctgaccttagtgaactctcagctactggaagaaatctccaagtatccagggttttacaaagaacagtgattgaagttgatgaaaggggcactgaggcagtggcaggaatcttgtcagaaattactgcttattccatgcctcctgtcatcaaagtggaccggccatttcatttcatgatctatgaagaaacctctggaatgcttctgtttctgggcagggtggtgaatccgactctcctataattcaggacacgcataagcacttcgcgtgtagtagatgctgaatctgaggtatcaaacacacacaggataccagcaatggatggcaggggagagtgttccttttgttcttaactagtttagggtgttctcaaataaatacagtagtccccacttatctgagggggatacattcaaagacccccagcagatgcctgaaacggtggacagtgctgaaccttatatatattttttcctacacatacatacctatgataaagtttaatttataaattaggcacagtaagagattaacaataataacaacattaagtaaaatgagttacttgaatgcaagcactgcaataccataacagtcaaactgattatagagaaggctactaagtgactcatgggcgaggagcatagacagtgtggagacattgggcaaggggagaattcacatcctgggtgggacagagcaggacaatgcaagattccatcccactactcagaatggcatgctgcttaagacttttagattgtttatttctggaatttttcatttaatgtttttggaccatggttgaccatggttaactgagactgcagaaagcaaaaccatggataagggaggactactacaaaagcattaaattgatacatattttttaaaaaaaaaaaaaaaa

SEQ ID NO: 2082 - DNA, 1814 bp, Homo sapiens
gcagagctcgagaggcggctgccgggctgcggggcgccttgactctccctccaccctgcctcctcgggctccactcgtctgcccctggactcccgtctcctcctgtcctccggcttcccagagctccctccttatggcagcagcttcccgcgtctccggcgcagcttctcagcggacgaccctctcgctccggggctgagcccagtccctggatgttgctgaaactctcgagatcatgcgcgggtttggctgctgcttccccgccgggtgccactgccaccgccgccgcctctgctgccgccgtccgcgggatgctcagtagcccgctgcccggcccccgcgatcctgtgttcctcggaagccgtttgctgctgcagagttgcacgaactagtcatggtgctgtgggagtccccgcggcagtgcagcagctggacactttgcgagggcttttgctggctgctgctgctgcccgtcatgctactcatcgtagcccgcccggtgaagctcgctgctttccctacctccttaagtgactgccaaacgcccaccggctggaattgctctggttatgatgacagagaaaatgatctcttcctctgtgacaccaacacctgtaaatttgatggggaatgtttaagaattggagacactgtgacttgcgtctgtcagttcaagtgcaacaatgactatgtgcctgtgtgtggctccaatggggagagctaccagaatgagtgttacctgcgacaggctgcatgcaaacagcagagtgagatacttgtggtgtcagaaggatcatgtgccacagatgcaggatcaggatctggagatggagtccatgaaggctctggagaaactagtcaaaaggagacatccacctgtgatatttgccagtttggtgcagaatgtgacgaagatgccgaggatgtctggtgtgtgtgtaatattgactgttctcaaaccaacttcaatcccctctgcgcttctgatgggaaatcttatgataatgcatgccaaatcaaagaagcatcgtgtcagaaacaggagaaaattgaagtcatgtctttgggtcgatgtcaagataacacaactacaactactaagtctgaagatgggcattatgcaagaacagattatgcagagaatgctaacaaattagaagaaagtgccagagaacaccacataccttgtccggaacattacaatggcttctgcatgcatgggaagtgtgagcattctatcaatatgcaggagccatcttgcaggtgtgatgctggttatactggacaacactgtgaaaaaaaggactacagtgttctatacgttgttcccggtcctgtacgatttcagtatgtcttaatcgcagctgtgattggaacaattcagattgctgtcatctgtgtggtggtcctctgcatcacaaggaaatgccccagaagcaacagaattcacagacagaagcaaaatacagggcactacagttcagacaatacaacaagagcgtccacgaggttaatctaaagggagcatgtttcacagtggctggactaccgagagcttggactacacaatacagtattatagacaaaagaataagacaagagatctacacatgttgccttgcatttgtggtaatctacaccaatgaaaacatgtactacagctatatttgattatgtatggatatatttgaaatagtatacattgtcttgatgttttttctgtaatgtaaataaactatttatatcacacaatatagttttttctttcccatgtatttgttatatataataaatactcagtgatgagaaaaaaa

SEQ ID NO: 2083 - DNA, 537 bp, Homo sapiens
cgctgccgggttctggcgcgccctttcagttctgcttgctgtccgcaccgctgcgttacccggaaccgccgggccgaacagcatgacgtccgctttggagaactacatcaaccgaactgttgccgttattacatcagatgggagaatgattgtgggaacactgaaaggttttgaccagaccattaatttgattttggatgaaagccatgaacgagtattcagctcttcacagggggtagaacaagtggtactaggattatacattgtaagaggtgacaacgttgcagtcattggagaaatcgatgaagaaacagattctgcgcttgatttggggaatattcgagcagaacctttaaattctgtagcacactgaggaaaaactacatacttggacatctgtaaatctttgtacagaaactgattattctgaggatgatatatggagtttttatgagtgtgtctctggattttgaccccttattgattcattgtaatatgtaaattaaaatatttctacattttattgaaaaaaaaaaa

SEQ ID NO: 2084 - DNA, 3007 bp, Homo sapiens
gcccggagagccgcatctattggcagctttgttattgatcagaaactgctcgccgccgacttggcttccagtctggctgcgggcaacccttgagttttcgcctctgtcctgtcccccgaactgacaggtgctcccagcaacttgctggggacttctcgccgctcccccgcgtccccaccccctcattcctccctcgccttcacccccacccccaccacttcgccacagctcaggatttgtttaaaccttgggaaactggttcaggtccaggttttgctttgatccttttcaaaaactggagacacagaagagggctctaggaaaaagttttggatgggattatgtggaaactaccctgcgattctctgctgccagagcaggctcggcgcttccaccccagtgcagccttcccctggcggtggtgaaagagactcgggagtcgctgcttccaaagtgcccgccgtgagtgagctctcaccccagtcagccaaatgagcctcttcgggcttctcctgctgacatctgccctggccggccagagacaggggactcaggcggaatccaacctgagtagtaaattccagttttccagcaacaaggaacagaacggagtacaagatcctcagcatgagagaattattactgtgtctactaatggaagtattcacagcccaaggtttcctcatacttatccaagaaatacggtcttggtatggagattagtagcagtagaggaaaatgtatggatacaacttacgtttgatgaaagatttgggcttgaagacccagaagatgacatatgcaagtatgattttgtagaagttgaggaacccagtgatggaactatattagggcgctggtgtggttctggtactgtaccaggaaaacagatttctaaaggaaatcaaattaggataagatttgtatctgatgaatattttccttctgaaccagggttctgcatccactacaacattgtcatgccacaattcacagaagctgtgagtccttcagtgctacccccttcagctttgccactggacctgcttaataatgctataactgcctttagtaccttggaagaccttattcgatatcttgaaccagagagatggcagttggacttagaagatctatataggccaacttggcaacttcttggcaaggcttttgtttttggaagaaaatccagagtggtggatctgaaccttctaacagaggaggtaagattatacagctgcacacctcgtaacttctcagtgtccataagggaagaactaaagagaaccgataccattttctggccaggttgtctcctggttaaacgctgtggtgggaactgtgcctgttgtctccacaattgcaatgaatgtcaatgtgtcccaagcaaagttactaaaaaataccacgaggtccttcagttgagaccaaagaccggtgtcaggggattgcacaaatcactcaccgacgtggccctggagcaccatgaggagtgtgactgtgtgtgcagagggagcacaggaggatagccgcatcaccaccagcagctcttgcccagagctgtgcagtgcagtggctgattctattagagaacgtatgcgttatctccatccttaatctcagttgtttgcttcaaggacctttcatcttcaggatttacagtgcattctgaaagaggagacatcaaacagaattaggagttgtgcaacagctcttttgagaggaggcctaaaggacaggagaaaaggtcttcaatcgtggaaagaaaattaaatgttgtattaaatagatcaccagctagtttcagagttaccatgtacgtattccactagctgggttctgtatttcagttctttcgatacggcttagggtaatgtcagtacaggaaaaaaactgtgcaagtgagcacctgattccgttgccttgcttaactctaaagctccatgtcctgggcctaaaatcgtataaaatctggatttttttttttttttttgctcatattcacatatgtaaaccagaacattctatgtactacaaacctggtttttaaaaaggaactatgttgctatgaattaaacttgtgtcgtgctgataggacagactggatttttcatatttcttattaaaatttctgccatttagaagaagagaactacattcatggtttggaagagataaacctgaaaagaagagtggccttatcttcactttatcgataagtcagtttatttgtttcattgtgtacatttttatattctccttttgacattataactgttggcttttctaatcttgttaaatatatctatttttaccaaaggtatttaatattcttttttatgacaacttagatcaactatttttagcttggtaaatttttctaaacacaattgttatagccagaggaacaaagatgatataaaatattgttgctctgacaaaaatacatgtatttcattctcgtatggtgctagagttagattaatctgcattttaaaaaactgaattggaatagaattggtaagttgcaaagactttttgaaaataattaaattatcatatcttccattcctgttattggagatgaaaataaaaagcaacttatgaaagtagacattcagatccagccattactaacctattccttttttggggaaatctgagcctagctcagaaaaacataaagcaccttgaaaaagacttggcagcttcctgataaagcgtgctgtgctgtgcagtaggaacacatcctatttattgtgatgttgtggttttattatcttaaactctgttccatacacttgtataaatacatggatatttttatgtacagaagtatgtctcttaaccagttcacttattgtactctggcaatttaaaagaaaatcagtaaaatattttgcttgtaaaatgcttaatatcgtgcctaggttatgtggtgactatttgaatcaaaaatgtattgaatcatcaaataaaagaatgtggctattttggggagaaaatt

SEQ ID NO: 2085 - DNA, 2366 bp, Homo sapiens
ggaggtcacaagctctggtgccccaaaatggctctggtcctcagatatagttggttgccaccctgggagtgagaggaaccaggaaagcagcacccaggaaggcagggggctccctttatccaaggaggtggctgtgcaggtggccaccacaggtggcaggaaccacaggctggggcactccggagtcaggagtgagtgggcaggttgactggcatcaggcagcctctcagccagggccctctccgcatcagcatgaactccaggaccgcatctgctaggggctggttcagcagccgcccacccacctctgagtctgacctggaacctgccacagatgggccagcctccgagaccactaccctcagcccagaggccaccacctttaatgacaccagaatccctgatgcagctggtggcacggccggcgtgggtaccatgcttctgtcctttgggatcatcacggtgataggcctggctgtggccttggttttgtacatcaggaagaagaagaggctggagaagctacgccaccagctcatgcccatgtacaacttcgaccccacggaggaacaagatgagttggagcaggagctgctggagcatgggcgggacgccgcctctgtacaggctgctacttctgtgcaggccatgcagggcaagactactctgccctcccagggcccactgcagagacccagccggctggtgtttaccgatgtggccaatgccatccatgtgtgagtggcctgggacaagcctggacttctgatagagacccatcacggtgcctacagagctccccactccctgattgtcaagacctactctgaagatcttccctgccaagacacaagagggctgagccaggtcctagctgttctccagacccacctgctgactttagactctaagagagggccctagccaggctggacttctgaccactgacttctcctgacctgagggccctggcacagagggcatccctcatgctgagaaggtcaagagcctctgctggcttcctcatcccctgtccagatccctcacatcagggtctgccccgctaatgtggaggaaatgagggagatacggagtgggagggattgggggaggaaaggggaggtttccctctgttagggagagacctgttttttggaatctggagcctcctctggggtggggagaggaaaccacccaagttatagggacagggtagggcagcatctgttatgggccctgagaagcccagagatggagctgaaactgtccagtatgcaaggatgccaggagaagggcaattcacacccagggtccatccatactacggagggtccaggaggtctcccagccacccatccttggcaaccagatgttactggggccaagctaggatgggagctgagggggaaggaagtaggggaatggaagtggaaggatgcagcccccccagacctgccgagaggcctcatgcatgtgcatgagtgtgcccatgggcagacatgtgcctgtcccagcacagcgggcagaatgagattgtccacactggccccaccctccaagtcgacctctaccccatggtatgtagtggagcatcagggtaggctatcttctctgccttcaatcttcagggactgcagggaagagggaagcacgcacagcacggttcctctctccactgcattgtttcactgggctcacctgcttctgaaaacggctccctgtcttgggctctaatgaggatctggggttgggagaggctgttggtctgagggcagtaatcacaggctgcaggctagagggggcagttatgactgcctgaaagtgggtgagggattgcacttcagaaaaacatctaaaaaacttagtctatgtttgaattccccacctccatcccatctatgggaagagccgttcagtgtttagagagtggggagatgggtccctgcacttggcctctccataagccttggagggtcagggctgataccaggggtcctggcaagccattgggcagagacagaccacaagagcagggcatttttttacgctgggcatacatatgcacacaagcatgcacagaggcatgtcccgtgcccagcctctccaccgtcactgtccgctgctggctggaggggatgcaggggtagtgtatgcagaccttccactgggcaaatgccatgtgtcaggagggaaaggcctaggaagcccccatggggaaggttctggatttattccctcctctaaatgctataaatacgttagcacttgagtcgactggaggctgccaggaattcaggatgcatacagctgtaatttaacccagagcagctccacgtgagagcattaaagatgtaatgaagatgttt

SEQ ID NO: 2086 - DNA, 2160 bp, Homo sapiens
gaattccgggtctcaaatagggattggtttaaatgatctggagacagcaccaaagcaaataataaactaaaaaatgtccagtcattaaactgttaaaatgaaattcaggtttccaaagtactttagaaatcatgtaatccaggctggggaagatggcggtggctggggcggtgtccggggagccgctggtgcactggtgcacccagcagttgcggaagactttcggcctggatgtcagcgaggagatcattcagtacgttttgtcaattgagagtgctgaagagatacgagaatatgttactgatctcctccagggaaatgaaggcaaaaaaggtcaattcatagaagaacttataaccaaatggcaaaagaatgatcaggagttgatttcggatcctttgcagcagtgcttcaaaaaagatgaaattttagatgggcagaaatcaggcgaccatctaaagcggggtaggaagaaagggagaaacagacaggaagttcctgcatttactgaacctgacacgactgcagaggttaaaacaccttttgatttggccaaggcacaagagaacagcaactccgtaaagaagaagacaaagtttgtcaatttatacacaagagaaagacaggacaggcttgcagtcgcgctccctggtcgtcacccttgtgattgcctgggccagaagcacaagctcatcaataactgtctgatctgtgggcgcattgtctgtgaacaagaaggctcaggcccttgcttattctgtggcactctggtgtgtactcatgaggaacaagatattttacagcgtgactcaaacaagagccagaaactgctaaagaaactcatgtcaggagtggagaattctggaaaggtggacatctctaccaaggaccttcttcctcatcaagaattgcgaattaagtctggtctggagaaggctatcaagcataaagacaaactgttagagtttgacagaactagtattcgaaggacccaagtcattgatgatgagtcagattactttgccagtgattctaaccaatggttgtccaaacttgagcgggaaaccttgcagaagcgagaggaggagctgagagaacttcgacacgcctctcgactttctaagaaggtcaccattgactttgcaggaaggaagatcctggaagaagaaaattcactagcagagtatcatagcagactagatgagacaatacaggccattgccaatggaaccttgaaccagccactgaccaaattggatagatcttctgaagagcctttgggagttctggtaaatcccaacatgtaccagtcccctccccagtgggttgaccacacaggtgcagcctcacagaagaaggctttccgttcttcaggatttggactagagttcaactcatttcagcaccagttgcgaatccaggatcaagaatttcaggaaggctttgatggtggctggtgcctctctgtacatcagccctgggcttctctgcttgtcagagggattaaaagggtggagggcagatcctggtacaccccccacagaggacgactttggatagcagccacagctaaaaaaccctcccctcaagaagtctcagaactccaggctacatatcgtcttcttcgtgggaaagatgtggaatttcctaatgactatccgtcaggttgtcttctgggctgtgtggacctaattgactgcttgtcccagaagcaatttaaggagcagtttccagacatcagtcaagaatctgattctccatttgttttcatctgcaaaaatcctcaggaaatggttgtgaagtttcctattaaaggaaatccaaaaatctggaaattggattccaagatccatcaaggagcaaagaaggggttaatgaagcagaataaagctgtctgacccaggagaaaaggaactatacagcatagtggagttttgtgtactaaaattgctatctactggtcctttggaattgaagtagtagaaacctaaaggcttggcgtcaggcttgaatatctcagaacttaaactcttaccaaaatctgtatatttttcttaaggagtgggattcctactttatgtaatggggtcgaaatctttgaacacattatttataaaaacctgtttaaaaattctaaaaaaaaaaaaaaaaaaaaaaaaa

SEQ ID NO: 2087 - DNA, 2739 bp, Homo sapiens
cgcacgcgcagtcgtatccgtgtgatgggcgggctgttgacggcgctgcgatggctgcctgcgagggcaggagaagcggagctctcggttcctctcagtcggacttcctgacgccgccagtgggcggggccccttgggccgtcgccaccactgtagtcatgtacccaccgccgccgccgccgcctcatcgggacttcatctcggtgacgctgagctttggcgagagctatgacaacagcaagagttggcggcggcgctcgtgctggaggaaatggaagcaactgtcgagattgcagcggaatatgattctcttcctccttgcctttctgcttttctgtggactcctcttctacatcaacttggctgaccattggaaagctctggctttcaggctagaggaagagcagaagatgaggccagaaattgctgggttaaaaccagcaaatccacccgtcttaccagctcctcagaaggcggacaccgaccctgagaacttacctgagatttcgtcacagaagacacaaagacacatccagcggggaccacctcacctgcagattagacccccaagccaagacctgaaggatgggacccaggaggaggccacaaaaaggcaagaagcccctgtggatccccgcccggaaggagatccgcagaggacagtcatcagctggaggggagcggtgatcgagcctgagcagggcaccgagctcccttcaagaagagcagaagtgcccaccaagcctcccctgccaccggccaggacacagggcacaccagtgcatctgaactatcgccagaagggcgtgattgacgtcttcctgcatgcatggaaaggataccgcaagtttgcatggggccatgacgagctgaagcctgtgtccaggtccttcagtgagtggtttggcctcggtctcacactgatcgacgcgctggacaccatgtggatcttgggtctgaggaaagaatttgaggaagccaggaagtgggtgtcgaagaagttacactttgaaaaggacgtggacgtcaacctgtttgagagcacgatccgcatcctgggggggctcctgagtgcctaccacctgtctggggacagcctcttcctgaggaaagctgaggattttggaaatcggctaatgcctgccttcagaacaccatccaagattccttactcggatgtgaacatcggtactggagttgcccacccgccacggtggacctccgacagcactgtggccgaggtgaccagcattcagctggagttccgggagctctcccgtctcacaggggataagaagtttcaggaggcagtggagaaggtgacacagcacatccacggcctgtctgggaagaaggatgggctggtgcccatgttcatcaatacccacagtggcctcttcacccacctgggcgtattcacgctgggcgccagggccgacagctactatgagtacctgctgaagcagtggatccagggcgggaagcaggagacacagctgctggaagactacgtggaagccatcgagggtgtcagaacgcacctgctgcggcactccgagcccagtaagctcacctttgtgggggagcttgcccacggccgcttcagtgccaagatggaccacctggtgtgcttcctgccagggacgctggctctgggcgtctaccacggcctgcccgccagccacatggagctggcccaggagctcatggagacttgttaccagatgaaccggcagatggagacggggctgagtcccgagatcgtgcacttcaacctttacccccagccgggccgtcgggacgtggaggtcaagccagcagacaggcacaacctgctgcggccagagaccgtggagagcctgttctacctgtaccgcgtcacaggggaccgcaaataccaggactggggctgggagattctgcagagcttcagccgattcacacgggtcccctcgggtggctattcttccatcaacaatgtccaggatcctcagaagcccgagcctagggacaagatggagagcttcttcctgggggagacgctcaagtatctgttcttgctcttctccgatgacccaaacctgctcagcctggacgcctacgtgttcaacaccgaagcccaccctctgcctatctggacccctgcctagggtggatggctgctggtgtggggacttcgggtgggcagaggcaccttgctgggtctgtggcattttccaaggcccacgtagcaccggcaaccgccaagtggcccaggctctgaactggctctgggctcctcctcgtctctgctttaatcaggacaccgtgaggacaagtgaggccgtcagtcttggtgtgatgcggggtgggctgggccgctggagcctccgcctgcttcctccagaagacacgaatcatgactcacgattgctgaagcctgagcaggtctctgtgggccgaccagaggggggcttcgaggtggtccctggtactggggtgaccgagtggacagcccagggtgcagctctgcccgggctcgtgaagcctcagrtgtccccaatccaagggtctggaggggctgccgtgactccagaggcctgaggctccagggctggctctggtgtttacaagctggactcagggatcctcctggccgccccgcagggggcttggagggctggacggcaagtccgtctagctcacgggcccctccagtggaatgggtcttttcggtggagataaaagttgatttgctct

SEQ ID NO: 2088 - DNA, 3837 bp, Homo sapiens
atcgcctcctccctccccaagatggcgtccttgctgcagtcggaccgggttctctatctagtccagggagaaaagaaggttcgggccccgctctcgcaactctacttctgccgctattgtagcgaactgcggtcgctggaatgtgtgtctcacgaggtggactcccattattgtcccagttgtttagaaaatatgccatcggctgaagccaaactaaaaaagaatagatgtgccaattgttttgactgtcctggctgcatgcacaccctctctactcgggccacgagcatctccacacagcttccagatgacccagccaagaccaccatgaagaaagcctattacctggcatgtggattttgtcgctggacgtctagagatgtgggcatggcagacaaatctgtagctagtggcggttggcaggaacctgaaaatcctcacacacaacggatgaacaaattgattgaatattaccagcagcttgctcagaaagagaaggttgagcgagatcgcaagaaactggcacgacgtagaaactatatgcctctggctttttcggacaaatatggtcttggaaccaggcttcagcgaccacgagctggtgcatccatcagtacccttgccggactttcccttaaagaaggagaggatcagaaagagataaagattgagccagctcaggctgtggatgaagtggaacctctacctgaagactattatacaagaccagtaaatttaacagaggtaacaacccttcagcagcgtctgttacagcctgacttccagccagtctgtgcttcacagctctatcctcgccacaaacatcttctgatcaaacggtccctgcgctgccgtaaatgtgaacataatttgagcaagccagaatttaacccaacgtcaatcaaattcaaaatccagctggtcgctgtcaattatattccagaagtgagaatcatgtcaattcccaaccttcgctacatgaaggagagccaggtcctcctgactcttacaaatccagttgagaacctcacccatgtgactctcttcgagtgtgaggagggggaccctgatgatatcaacagcactgctaaggtggtggtgcctcccaaagagctcgttttagctggcaaggatgcagcagcagagtacgatgagttggcagaacctcaagactttcaggacgatcctgacattatagccttcagaaaggccaacaaagtgggtattttcatcaaagttacaccacagcgtgaggagggtgaagtgaccgtgtgcttcaagatgaagcatgattttaaaaacctggcagcccccattcgccccattgaagaaagtgaccagggaacagaagtcatctggctcacccagcatgtggaacttagcttgggcccacttcttccttaaaaggttccactggagggcagatcccaaaggacagtatcaccgtaaacctgcgttaaaatgtggaagctgctgcttcattaggccttgtttataacgatgtacccatgcactacggaattctattgctaagaaagtgggagcataggcaaggcattgggaacacagggtagctgctgttgctcttgctctcacccctgttgacaccagtaagtctgtgtcttcctcactgaaccctgcacgttgagtaacagcagcataattccatcctaggaaagggggatgggtgttccttggaaatggcattgtatttaccacctgagaaactctgtactgtctcttgatctgatctcactaaggatcacaatgtcacagatgaaacttaaatgataacccaaaggtagacctgctgttaatgatccagcattggtcacaatgtaccaactgctttctgcattccgttaaatatcatctaacagtctaaaacatatcccttcattgccataatggctgccattttgccatagatttccatataactgaaaaactgaattgtcactttatctttagtatcatgatgattggaaaaacctgtgaagttgttaaggcactctcatttgccctctttttctaagtgaatacaggacacgtattagttgttcttaatttttttcccagtaaaatatggatcttttaagaagaatttgagaagcaaacaattacatgtcatgtcaagggggtagcagattccattcgttttcaatattgccacaatacccagggattaatgctgccacaggggggcaatctttatttgtcttacttcctaccccttccctgttctgcctctttaactcagttaagttgttctgtttgggacctggaaaagaacccaaagaaaacctgagtggacaggttcatttctggaatgcagaaaacattttaaaggctagatttttagaatattctcaactagcattctttccattgatttgaaggggaaattaactattataatctcttgaatccaaaactggatattaagaactttcccccttactaagtttaagacttttgtcatgtggtgagtcaaataagaccattttgattgtaaaccataaaatagttcagcaagtagcccacagttctggcctaacagcagacttgctgttttcacttggtatcctggagttgggttgctaaccttaatttctatgatgttttctaaaatgaaacttgataaagtagaccaccagctgcaccgtgttttctgtaaaagtattgttagtaagtggccaagagacttgaggaaaatacagattttttgtttaccttggtcttgttttaagtcttaaaaaattaaagataacattataatgtagaatacagatgggacatagtccttgtaagcttcccttgaaaatgttttaaatatttaggaagcttttaaaagacactaaattgtactctaaaagacactaaattgtactaattgtacaaaggtcaagccaattttatgaaacagtcctacagagtaatatatgtgatgcagtgtaagaaggaaaatactcatctctaacattatggtaataacatttagcctcttaggagttggagcagggggatgggtaattacagatttgcagactatagaaagagtttcatttttttgtgaccccacagagtctcaaatttttattccactacctgctagagcctactgtgaaatcactgctccatatttgccagtggaggaaatgggcatagagtagagaatagcttcatatgtttacacgtttgcatagactacacacatgtcatgcgtttatggcaggtagctggtatttattccccaaagtaataatgttgaagtatgggtctcatcattcccatacacagaaacacaaaacactttgatcataaacttttttcttcagaagccaaactaacttgcagaataatagagccactggtttaatgtttcctcaagataggttttagtgtaagctagtattctgtgtgttcgtagaaatgattcaatacctgcagctggtgaattaggaattgtatttgttgccttttttatattagatgaggtgcaaaaattttaatgctagtcagtatgcaccaccacaggaaagttagatcccattagcacttgagactacagctttggaaacttaggctaagttaatttggatttgttacttgattcacctactgaccttttcttttgtttgaagtgcttatcagcataatgagctaagtgtcatgcatatttgtgaagaaacacccttgtttggtcccttttgggacagagaggtactccttgatctttatgaatgaccggttactgttttgccttattgcttaacttaatgtagtgaaataaagcagaccaagcttgaaaaaaaaaaaaaaaaaaaaaaaaaaaaa

SEQ ID NO: 2089 - DNA, 1095 bp, Homo sapiens
gaggagccagaggaagagggcggcgacggtggtggtgactgagcggagcccggtgacaggatgttggtgttggtattaggagatctgcacatcccacaccggtgcaacagtttgccagctaaattcaaaaaactcctggtgccaggaaaaattcagcacattctctgcacaggaaacctttgcaccaaagagagttatgactatctcaagactctggctggtgatgttcatattgtgagaggagacttcgatgagaatctgaattatccagaacagaaagttgtgactgttggacagttcaaaattggtctgatccatggacatcaagttattccatggggagatatggccagcttagccctgttgcagaggcaatttgatgtggacattcttatctcgggacacacacacaaatttgaagcatttgagcatgaaaataaattctacattaatccaggttctgccactggggcatataatgccttggaaacaaacattattccatcatttgtgttgatggatatccaggcttctacagtggtcacctatgtgtatcagctaattggagatgatgtgaaagtagaacgaatcgaatacaaaaaaccttaaagccaggcctgtcttgatgatttttggttttttttcattgtcctgttgaaatcaagtaattaaacatttaagagccacaaaattgtatcacttttataatattttgcagtaaaatataataccatcttctctgttaatacataattgctccaagcttcctgtaaactataagaatatatttagtttacagtatatggattctatgaaaaaatgtccacaacacagtaattggtcacttgttaagaaaaatttatccttgtaagtatcttcaaagttgatatttggaactttattccaaaagtagtgcatgtggagaaagaatctagactttcttgtatacatttttctcttctccagtaataaacaattacctttcatttatactttgataacctgtatttaatttaaaaaaaaacataaaaatgaggaaccaagtgaaactacggatataaatattaaagtggacgagatgacctttcaaaaaaa

SEQ ID NO: 2090 - DNA, 2499 bp, Homo sapiens
ggcacgaggccttgtggtgacaactggcggcagcgcgccgcgggcccgagacttagtctcgggccgccatggccagcgtccacgagagcctctacttcaatcccatgatgaccaatggggttgtgcacgccaatgtgttcggcatcaaggactgggtgacgccgtacaagatcgcggtgctggtgctgctgaacgagatgagccgcacaggcgagggcgccgtcagcctcatggagcggcggaggctcaaccagctgctcctgcccctgctgcagggcccagatattacactgtcaaaactttacaagttaattgaagagtcttgtccacagctggcaaattcagtgcagatcagaatcaaactgatggctgaaggcgagttgaaggatatggaacagttttttgatgacctttcagattctttctctggaactgaaccagaggttcacaaaacaagtgtagtaggtttgtttctgcgtcacatgatcttggcctacagtaagctttctttcagccaagtgtttaaactgtacactgcccttcagcagtacttccagaatggtgagaaaaagacagtggaggatgctgatatggaactgaccagtagagatgagggtgaaagaaaaatggaaaaagaagaacttgatgtatctgtaagagaagaggaggtatcttgcagtgggcctctgtcccaaaaacaagcagaattttttctttctcaacaggcttctttgctaaagaatgatgagactaaggccctcactccagcttccttgcagaaggaattaaacaatttgttgaaatttaatcctgattttgctgaagcgcattatctcagctacttaaacaacctccgtgtccaagatgttttcagttcaacacacagtctcctccattattttgatcgtctgattcttaccggagccgaaagcaaaagtaatggggaagagggctatggccggagcttgagatacgccgctctgaatcttgccgccctgcactgccgcttcggtcactatcaacaggcagagctcgccctgcaggaggcaattaggattgcccaggagtccaacgatcacgtgtgtctccagcactgtttgagctggctttatgtgctggggcagaagagatccgatagctatgttctgctggagcattctgtgaagaaggcagtacattttgggttaccgtacctcgcctccctgggaatacagtcccttgttcaacagagagcttttgctgggaagacggcaaacaagctgatggatgccctaaaggactccgacctcctgcactggaaacacagcctgtcagagctcatcgatatcagcatcgcacagaaaacggccatctggaggctgtatggccgcagcaccatggcactgcaacaggcccagatgttgctgagcatgaacagcctggaggcggtgaatgcgggcgtgcagcagaacaacacagagtcctttgctgtcgcactctgccacctcgcagagctacacgcggagcagggctgttttgctgcagcttctgaagtgttaaagcacttgaaggaacgatttccgcctaatagtcagcacgcccagttatggatgttatgtgatcaaaaaatacagtttgacagagcaatgaatgatggcaaatatcatttggctgattcacttgttacaggaatcacagctctcaatagcatagagggtgtttataggaaagcggttgtattacaagctcagaaccaaatgtcagaggcacataagcttttacaaaaattgttggttcattgtcagaaactgaagaacacagaaatggtgatcagtgtcctactgtccgtggcagagctgtactggcgatcttcctcccctaccatcgcgctgcccatgctcctgcaggctctggccctctccaaggagtaccggttacagtacttggcctctgaaacagtgctgaacttggcttttgcgcagctcattcttggaatcccagaacaggccttaagtcttctccacatggccatcgagcccatcttggctgacggggctatcctggacaaaggtcgtgccatgttcttagtggccaagtgccaggtggcttcagcagcttcctacgatcagccgaagaaagcagaagctctggaggctgccatcgagaacctcaatgaagccaagaactattttgcaaaggttgactgcaaagagcgcatcagggacgtcgtttacttccaggccagactctaccataccctggggaagacccaggagaggaaccggtgtgcgatgctcttccggcagctgcatcaggagctgccctctcatggggtacccttgataaaccatctctagagaggacatccctgctgggctgctgtgcagagtataagattttggacttgttcatgtcccctctctccctataaatgatgtatttgtgacaccctatcttgtcaataaacagcattctgattaaaaaaaaaaaaaaaaaaaaaaaaaaaaaaaaaaaaaaaaa

SEQ ID NO: 2091 - DNA, 2024 bp, Homo sapiens
cgggacgcagcaaagagaggagagaccccaagtcagaaggagtgagaaccctgacccctaatcccactgcatccagccaataggagcccagccaccatggcggagctgcaggaggtgcagatcacagaggagaagccactgttgccaggacagacgcctgaggcggccaagactcactctgtggagacaccatacggctctgtcactttcactgtctatggcacccccaaacccaaacgcccagcgatccttacctaccacgatgtgggactcaactataaatcttgcttccagccactgtttcagttcgaggacatgcaggaaatcattcagaactttgtgcgggttcatgtggatgcccctggaatggaagagggagcccctgtgttccctttgggatatcagtacccatctctggaccagcttgcagacatgatcccttgcgtcctgcagtacctaaatttctctacaataattggagttggtgttggagctggagcctacatcctggcgagatatgctcttaaccacccggacactgttgaaggtcttgtcctcatcaacattgatcccaatgccaagggttggatggattgggcagcccacaagctaacaggcctcacctcttccattccggagatgatccttggacatcttttcagccaggaagagctctctggaaattctgagttgatacaaaagtacagaaatatcattacacatgcacccaacctggataacattgaattgtactggaacagctacaacaaccgccgagacctgaactttgagcgtggaggtgatatcaccctcaggtgtcctgtgatgctggtggtaggagaccaagcacctcatgaagatgcagtggtggaatgtaactcaaaactggaccccacccagacctcgttcctcaagatggctgactccggaggtcagccccagctgactcagccaggcaagctgaccgaggccttcaagtacttcctgcaaggcatgggctacatggcctcatcctgcatgactcgcctgtcccggtctcgtacagcctctctgaccagtgcagcatccgttgatggcaaccggtcccgctctcgcaccctgtcccagagcagcgagtctggaactctttcttcggggcccccggggcacaccatggaggtctcctgttgaatggcccttgttgccctagagtgggacccagccctcacctcccccagagctaacctgggaggtgctgaaggggcattgggccaccgtaagcaagggaaaaagggcagatcatgcggggagatgaccttgatctttgattgctaccctaaccttgacctttaacccgtgattccccccagctcctggaagagatgtcctaatatctcttagggacccagacccctaaattctcctcctcccccattttgatgttaaggtggagagggcatatgcatcctctgtcctgatctaggtgtctatagctgaggggtaagaggttgttgtagttgtcctggtgcctccatcagactctccctacttgtcccatatttgcaaggggaggggatttggggctggggctccattcaccaaagctgaggtggcttctcattaaccccttaggactctgaagggtatggacctacgtgaatgtgtgtcagggggagacttgctggtgggttagtggtcctcaggatgtgataaaaacatccagtgtaaaaaggaagttggaatgggagttggcgggcagtgaacgagtgtggggaaggattggtgctggggcaacaggaaggggcctggggccgtttggctgcactaactttggtagctcagtgtgcatctaaagtgggactggggagggagctaagcttgggctgggctgcttggggcttggcatagggtggaaagggctaccctggggcttctgacccccctgtagtatgtgtggagggtgccctcccgtctcccacaacttctgctataacaataaactgtagaggaatcggaaaaaaaaaaaaaaaaaaaaaaaaaaaaaa

SEQ ID NO: 2092 - DNA, 4695 bp, Homo sapiens
gggggagggaaacggagcagtaacaagtatcccagagggtgctgctgaggcgacgatggccgaggggcccgaggaagcccgaggccaccctcccgggcaggacgatggcgggggggaccacgagcccgtcccttccctgagaggccctcctaccaccgccgtcccatgcccccgcgacgacccccaggccgaaccccaggccccgggccggcccacagccccgggcctcgcggctgccgccgcagccgacaaattggagccgccgcgcgagctcaggaagcgcggggaggcggcctccggctccggtgcagagctgcaggagcaggcgggctgcgaggcgcccgaagccgcggcgccacgagagagaccagctcggctgagcgcccgcgagtactcccggcaagtgcacgagtggctgtggcagtcctactgcggctacctcacctggcacagcggcctggccgccttcccagcctactgcagcccccagccctccccgcaaagcttcccttcgggcggcgctgcagtcccccaggccgcggcgccgccgcccccgcagctgggctattacaaccccttctacttcctgagccccggggccgcggggcctgacccgcggacagctgccggcatcagcacccctgctccagtcgcgggcctgggaccccgggctcctcacgtgcaggcgtcggtccgggccactccagtgacgagggtaggatccgcagccccttcgcgaagcccgagcgagaccgggcgacaggcaggcagagaatatgttattccatccttggcccacagatttatggcagagatggtggatttctttattctcttctttataaaagcaaccattgtcttaagcattatgcacctcagtgggataaaggatatctctaagtttgctatgcattatataatagaagaaatagatgaagacacatcaatggaagacttgcagaaaatgatggttgtggcacttatatacagattattagtttgtttctatgagataatttgcatttggggagcaggtggagctaccccagggaagttcctgctggggcttcgagttgtgacatgtgatacatcagtgcttattgcaccaagtcgggttttagtgattccttcctcaaatgttagcattacaacgtccactatccgagctttgatcaagaatttttcaattgcttcttttttccctgctttcatcacactgctgttttttcagcataatcgaacagcttatgacattgtagcaggaaccattgtggtaaaaagaaatggggtcagatgatgccccccaaaaccctgatttccacacactaagactaaattatgtatcaaggccatcagtatccctgggttacactaattgatgatttagaaattaaagcagtcactccagtgtgatgcaggtgactactctgaaagtattgattatacttgaatgccaaagaacttgtccagaagaaaaacctgttaaattcaagtattaaaatttttagatcaaaaaggcaaatgattttataaacaatggacaatatatactttcttaagatctaaggtactttcttaagatctaagaatttgctgaaagcattttcagctttgaaatctccaaatgaaactttaaaatttattttggtttatcccaaaataatggaaaatgtccagttgtgttttgtaaacacctatgtaactcatcttttagtttacacttcctggggaaattgtctttggtgtttagaggagggaatgagaacacaaattggataatccactgtctcccatcccaggaggtggtgagttggctacaagagaaagggacaagtgaggcaggcctagcagttcccttacctgaagttttcaaatccatactgcagttccctctcgtaatgatgtaactttacaactattcttaatgcttgaacatgtatttaggggcaagtttctcatgatgatgaaaaagtatcaagtcatattgctatgttaattggtttttttttttaaaaggtaagttagtgattactgttaatggtgggggagtaagttttcactgtaaattgaacttataatttatgtgcaagtgttttcagtgccctgaatcaaactataaatgtggggagaaatcacctccatcaaacagttgcatatttactgtaaaagtattcccagtatgtgtgcagcatgaagaaagtattagtgcttctcagtgttctcagtgtaaattctatttatatacagcatattcacatactactttccttatattttatatagttctatgactgttgaaacatcaaggagttaaaaaaatcttaatatttcatgattaactctaagtactattaatagcttgcgaaatattagcaattttcccattatggactatctctctaaagcaagagagactagcattcccagacatcattctagggtctttaagctcattttgggtctgctaaagtttggggggaaatgttacgcaaagtgatactgtgtatgttgccattttgctttattcttctgttgaagcaaaattgtggggttttattatgtgtgtgtgcttttcctagatgtcccagttagctgtgctgagatatacctgtactatttatggtttaagttttgattcttaggtattttctccagctctgacattgttttccaaagacacactaaactgcattgcacagttcaaaatttgattacttaagggatcaatctaggtggtgttcttggtcttaaatttaacagcaaacacagcacatatctattatcactatattaattttcaaaggtttttctgtgacgtttaaaactgtgacaacagatattcacatttgattatagaaacttaatgtctattaataattttagtacaaaatttcataaaccgtgtttttcaaaataagtttatgtcaaatccagcttcccagaaacactaataattaagtacatcaatgtactaaataaatcattcagttgcacccatggggaagattgtgttactgcccttcacagtgaaaaaaagaaaaatctttcatttttaaaattaggagatgttacgtaacttggcactttagtagtgtatacactagcattagtttatacaccacttttgccgctggggattcaagttgaaatgtccctcaatcatataggtctggaatacatctttcattcataatttctgctcagataattgaatagtttgccatcgagattattttcatttatactataaaacaaaagcaaactagtccagtttaattttttgtacttagaatattgcacattttctatatatgagttattcagattagtatctatgtaggttcagtcagatccaaccatggattcgaggtattatactgtataaccctacaaaatacatagaagtattatttgccttcataatagaacccaagagtctgtttcaatttatgaattcagtatttgcaccgagattttgattcccaaagtttggaaaaaaatgacaaaacaacgagggaagaaggaaccagaccttagtgccacatatttttctcttggggttgtaaggtagtctcctgctttccagaacactttattatatttcacttatagacctgattttctgtgtcaaagtataattctcatgctgaagctgtagcctaaaaagccaaaagaaagttgtcttcattgtacaaacatattcatcactttaacaataagggaacaaaatttagtattcaagctgagtgagaatactggttcaatggacatgtccctaagataaaccagaattggcagttaatttaggcgtctagaaaatctcagttcccaccagtaaaattatcctgagtagctaatgcaccttgagaaaaatctggcatactgaataagtaacattaacttgggagccaagagctgggtaagccttacctttagactactctgtgactacagaaataaagccagcacttttggaactaataagccttcacttgtcagtatcataaagagtattgcccaactgaactttgctcccactggtttaatagttacttatttctgcctaagcactcaccttccgattttacccaagtatatatataggatagaaaaaaatgcattatatttgagagctcacttcgcccgaattacaaaatgagtgtttttagattcaagtgacggtaaaaggatttgttcccttcagtgacttgagtgttttagttatgcataagtatttctagcaaaggaagggtagaaaggaattgaaaattaatttacactagttgctacttgggaataaagggctttttgaggggggtatggatattaaatgttttcgttatatacttatccctattaaaacaggcagttgtttctttgaatatgcctaaataacagtattcttaaaatctgacagacaagtaacatgtcaattacttgatattccttgtctccagtaccacaggccactcttgacatcccatgtttgcctggataaagttcctcatttcaaacagtatacatacttctttgcagttcattatagtaaggcttaacctgtaaacagtatctgatggcccacctataaataaaattcagcattctatttttaataatttgtatgccaccaatttgtattatttgtctcaataaatacttagtcatcgatgcaaaaaaaaaaaaaaaaaaaaaaaa

SEQ ID NO: 2093 - DNA, 2730 bp, Homo sapiens
gccgcgcgctgtgtctccgctgcgtccgccgaggcccccgagtgtcagggacaaaagcctccgcctgctcccgcagccggggctcatctgccgccgccgccgcgctgaggagagttcgccgccgtcgccgcccgtgaggatctgagagccatgtcggccagcagcctcttggagcagagaccaaaaggtcaaggaaacaaagtacaaaatggatctgtacatcaaaaggatggattaaacgatgatgattttgaaccttacttgagtccacaggcaaggcccaataatgcatatactgccatgtcagattcctacttacccagttactacagtccctccattggcttctcctattctttgggtgaagctgcttggtctacggggggtgacacagccatgccctacttaacttcttatggacagctgagcaacggagagccccacttcctaccagatgcaatgtttgggcaaccaggagccctaggtagcactccatttcttggtcagcatggttttaatttctttcccagtgggattgacttctcagcatggggaaataacagttctcagggacagtctactcagagctctggatatagtagcaattatgcttatgcacctagctccttaggtggagccatgattgatggacagtcagcttttgccaatgagaccctcaataaggctcctggcatgaatactatagaccaagggatggcagcactgaagttgggtagcacagaagttgcaagcaatgttccaaaagttgtaggttctgctgttggtagcgggtccattactagtaacatcgtggcttccaatagtttgcctccagccaccattgctcctccaaaaccagcatcttgggctgatattgctagcaagcctgcaaaacagcaacctaaactgaagaccaagaatggcattgcagggtcaagtcttccgccacccccgataaagcataacatggatattggaacttgggataacaagggtcccgttgcaaaagccccctcacaggctttggttcagaatataggtcagccaacccaggggtctcctcagcctgtaggtcagcaggctaacaatagcccaccagtggctcaggcatcagtagggcaacagacacagccattgcctccacctccaccacagcctgcccagctttcagtccagcaacaggcagctcagccaacccgctgggtagcacctcggaaccgtggcagtgggttcggtcataatggggtggatggtaatggagtaggacagtctcaggctggttctggatctactccttcagaaccccacccagtgttggagaagcttcggtccattaataactataaccccaaagattttgactggaatctgaaacatggccgggttttcatcattaagagctactctgaggacgatattcaccgttccattaagtataatatttggtgcagcacagagcatggtaacaagagactggatgctgcttatcgttccatgaacgggaaaggccccgtttacttacttttcagtgtcaacggcagtggacacttctgtggcgtggcagaaatgaaatctgctgtggactacaacacatgtgcaggtgtgtggtcccaggacaaatggaagggtcgttttgatgtcaggtggatttttgtgaaggacgttcccaatagccaactgcgacacattcgcctagagaacaacgagaataaaccagtgaccaactctagggacactcaggaagtgcctctggaaaaggctaagcaggtgttgaaaattatagccagctacaagcacaccacttccatttttgatgacttctcacactatgagaaacgccaaagaggaagaagaaagtgttaaaaaggaacgtcaaggtcgtgggaaataaaaggcagttctacacagactgcagcaacggttgcatctgcatatcctaagaggaaaaaatgaccttcaagagaattaggacttttttcttaatttcactgacttcagagacgattgcagacttgcagtttaagtattggaatttcacaaaagacataggacttaactggaaaatgaaaagaaaagaaaaagaaaaaactaaacaaaaaatccctctaggtagtttaggtgaaaaatgtcccttttattttggctttggttgtgatttcagagcataatgctatgttttttgtctttttactatgtttttcggatttttaagtccgtaagtgcatacagttttctctaatttttaaaccctttcctcctcccatttggacatttgcacttggagaacacttgagttgtgaaggttttgggcatccaccccagaaagtgggaatttgattttatccttccgaactggaagaacatttttatgaagaatttttgtctaggagaatataacagtgttacccaaggttgtgtctttaagggtggttcattttctctgaccttttgttactcaaagtaaagtactaggagtcctaagaaatgttctgttcttgtacattatactgattaagtcaggattaatttgatttcaaagctgagaacagtggtaaaaactcgtttacagaaatgcattttggaagagaaaaatactgtaaaacgtgtcgtgaatgtttcttcagtttcttgttcagccaatgaggaaagggcattgcctttctttttaccattaatcacttctcaataaacgtgagatcctgttgagcatcaaaaaaaaaaaaaaaaaaa

SEQ ID NO: 2094 - DNA, 1834 bp, Homo sapiens
gaaaaatccttgtggttaacagcagaggcttcagagtgtaacctgtactcgggcctagaaattatttaaaatggcgactgatacgtctcaaggtgaactcgtccatcctaaggcactcccacttatagtaggagctcagctgatccacgcggacaagttaggtgagaaggtagaagatagcaccatgccgattcgtcgaactgtgaattctacccgggaaactcctcccaaaagcaagcttgctgaaggggaggaagaaaagccagaaccagacataagttcagaggaatctgtctccactgtagaagaacaagagaatgaaactccacctgctacttcgagtgaggcagagcagccaaagggggaacctgagaatgaagagaaggaagaaaataagtcttctgaggaaaccaaaaaggatgagaaagatcagtctaaagaaaaggagaagaaagtgaaaaaaacaattccttcctgggctaccctttctgccagccagctagccagggcccagaaacaaacaccgatggcttcttccccacgtcccaagatggatgcaatcttaactgaggccattaaggcatgcttccagaagagtggtgcatcagtggttgctattcgaaaatacatcatccataagtatccttctctggagctggagagaaggggttatctccttaaacaagcactgaaaagagaattaaatagaggagtcatcaaacaggttaaaggaaaaggtgcttcttggaagttttgttgtggttcagaaatcaagaaaaaacacctcagaaatccagaaaacagaaagaataggagctctgcagtggatccagaaccacaagtaaaattggaggatggtctcccactggcctttactcgcctttgtgaacctaaagaagcttcctacagtctcatcaggaaatatgtgtctcagtattatcctaagcttagagtggacatcaggcctcagctgttgaagaacgctctgcagagagcagtagagaggggccagttagaacagataactggcaaaggtgcttcggggacattccagctgaagaaatcaggggagaaacccctgcttggtggaagcctgatggaatatgcaatcttgtctgccattgctgccatgaatgagccgaagacctgctctaccactgctctgaagaagtatgtcctagagaatcacccaggaaccaattctaactatcaaatgcatttgctgaaaaaaaccctgcagaaatgcgaaaagaatgggtggatggaacagatctctgggaaagggttcagtggcaccttccagctctgttttccctattatcccagcccaggagttctgtttccgaagaaagagccagatgattctagagatgaggatgaagatgaagatgagtcatcagaagaagactctgaggatgaagagccgccacctaagagaaggttgcagaagaaaaccccagccaagtccccagggaaggccgcatctgtgaagcagagagggtccaaacctgcacctaaagtctcagctgcccagcgggggaaagctaggcccttgcctaagaaagcacctcctaaggccaaaacgcctgccaagaagaccagaccctcatccacagtcatcaagaaacctagtggtggctcctcaaagaagcctgcaaccagtgcaagaaaggaagtaaaattgccgggcaagggcaaatccaccatgaagaagtctttcagagtgaaaaagtaaattttataggaaaaaagggtatgatgatgaaattcaaaatcttattttctaagcacttttgatatcaagcaagtggcttcctttttgagatattaaaac

SEQ ID NO: 2095 - DNA, 1737 bp, Homo sapiens
  misc_feature (1695)..(1695): n is a, c, g, or t
acgagcggcagcagagcatcctggccagtaacaagccaaggtagccaagtacgagagggacacacggacaaacaacagacagtaagacgtactggccgctggactccgctgcctcccccatctccccgccatctgcagcccggaggatgagcccagccttcagggccatggatgtggagccccgcgccaaaggcgtccttctggagccctttgtccaccaggtcggggggcactcatgcgtgctccgcttcaatgagacaaccctgtgcaagcccctggtcccaagggaacatcagttctacgagaccctccctgctgagatgcgcaaattcactccccagtacaaaggtgtggtatctgtgcgctttgaagaagatgaagacaggaacttgtgtctaatagcatatccattgaaaggggaccatggaattgtggacattgcacataattcagactgtgaaccaaaaagtaagctcctaaggtggacaacaaacaaaaaacatcatgtcttagaaacagaaaagacccctaaggactgggtgcgtcagcaccgtaaagaggagaaaatgaagagccataagttagaagaagaatttgagtggctaaagaaatctgaagtcttgtactacactgtagagaagaaggggaatataagttcccagcttaaacactataacccttggagcatgaaatgtcaccagcaacagttacagagaatgaaggagaatgcaaagcatcggaaccagtacaaatttatcttactggaaaacctgacttcccgctatgaggtgccttgtgtccttgacctcaagatgggcacacgacaacatggtgatgatgcttcagaggagaaggcagccaaccagatccgaaaatgtcagcagagcacatctgcagtcattggtgtgcgtgtgtgtggcatgcaggtgtaccaagcaggcagtgggcagttaatgttcatgaacaagtaccatggacggaagctatcggtgcagggcttcaaggaggcacttttccagttcttccacaatgggcggtacctgcgccgtgaactcctgggccctgtgctcaagaagctgactgagctcaaggcagtgttggagcgacaggagtcctaccgcttctactcaagctccctgctggtcatttatgatggcaaggagcggcccgaagtggtcctggactcagatgctgaggatttggaggacctgtcagaggaatcagctgatgagtctgctggtgcctatgcctacaaacccatcggcgccagctctgtagatgtgcgcatgatcgactttgcacacaccacctgcaggctgtatggcgaggacaccgtggtgcatgagggccaggatgctggctatatcttcgggctccagagcctgatagacattgtcacagagataagtgaggagagtggggagtgagcttgctagctgctccagtacttgagagcgactctgtgtcccaggcacagctgtgctgcggcagccacgaagccagtatggccaggtggtggctcctgcagcctggaaaaaaatgtgcagtggcctctgagagccccagcctgagccagtcccagctgtgcttggagtctttatttattttaactatttcttcgaacattccacatttgatgatgatacctctttcttccctgagtgtatatgttcgtaatacaaatctttttgttanatgaaaaaaaaaaaaaaaaaaaaaaaagaaaaactcgaaaag

SEQ ID NO: 2096 - DNA, 2225 bp, Homo sapiens
cgacatggcgcgcgagctgcgggcgctgctgctgtggggccgccgcctgcggcctttgctgcgggcgccggcgctggcggccgtgccgggaggaaaaccaattctgtgtcctcggaggaccacagcccagttgggccccaggcgaaacccagcctggagcttgcaggcaggacgactgttcagcacgcagaccgccgaggacaaggaggaacccctgcactcgattatcagcagcacagagagcgtgcagggttccacttccaaacatgagttccaggccgagacaaagaagcttttggacattgttgcccggtccctgtactcagaaaaagaggtgtttatacgggagctgatctccaatgccagcgatgccttggaaaaactgcgtcacaaactggtgtctgacggccaagcactgccagaaatggagattcacttgcagaccaatgccgagaaaggcaccatcaccatccaggatactggtatcgggatgacacaggaagagctggtgtccaacctggggacgattgccagatcggggtcaaaggccttcctggatgctctgcagaaccaggctgaggccagcagcaagatcatcggccagtttggagtgggtttctactcagctttcatggtggctgacagagtggaggtctattcccgctcggcagccccggggagcctgggttaccagtggctttcagatggttctggagtgtttgaaatcgccgaagcttcgggagttagaaccgggacaaaaatcatcatccacctgaaatccgactgcaaggagttttccagcgaggcccgggtgcgagatgtggtaacgaagtacagcaacttcgtcagcttccccttgtacttgaatggaaggcggatgaacaccttgcaggccatctggatgatggaccccaaggatgtcggtgagtggcaacatgaggagttctaccgctacgtcgcgcaggctcacgacaagccccgctacaccctgcactataagacggacgcaccgctcaacatccgcagcatcttctacgtgcccgacatgaaaccgtccatgtttgatgtgagccgggagctgggctccagcgttgcactgtacagccgcaaagtcctcatccagaccaaggccacggacatcctgcccaagtggctgcgcttcatccgaggtgtggtggacagtgaggacattcccctgaacctcagccgggagctgctgcaggagagcgcactcatcaggaaactccgggacgttttacagcagaggctgatcaaattcttcattgaccagagtaaaaaagatgctgagaagtatgcaaagttttttgaagattacggcctgttcatgcgggagggcattgtgaccgccaccgagcaggaggtcaaggaggacatagcaaagctgctgcgctacgagtcctcggcgctgccctccgggcagctaaccagcctctcagaatacgccagccgcatgcgggccggcacccgcaacatctactacctgtgcgcccccaaccgtcacctggcagagcactcaccctactatgaggccatgaagaagaaagacacagaggttctcttctgctttgagcagtttgatgagctcaccctgctgcaccttcgtgagtttgacaagaagaagctgatctctgtggagacggacatagtcgtggatcactacaaggaggagaagtttgaggacaggtccccagccgccgagtgcctatcagagaaggagacggaggagctcatggcctggatgagaaatgtgctggggtcgcgtgtcaccaacgtgaaggtgaccctccgactggacacccaccctgccatggtcaccgtgctggagatgggggctgcccgccacttcctgcgcatgcagcagctggccaagacccaggaggagcgcgcacagctcctgcagcccacgctggagatcaaccccaggcacgcgctcatcaagaagctgaatcagctgcgcgcaagcgagcctggcctggctcagctgctggtggatcagatatacgagaacgccatgattgctgctggacttgttgacgaccctagggccatggtgggccgcttgaatgagctgcttgtcaaggccctggagcgacactgacagccagggggccagaaggactgacaccacagatgacagccccacctccttgagctttatttacctaaatttaaaggtatttcttaacccgaaaaaaaaaaaaaaa

SEQ ID NO: 2097 - DNA, 1385 bp, Homo sapiens
agggagtgtggcgggcggctccgggagcaacatgcctcggtatgcgcactgcgtcatgggccccgcgcacgcgaaacgcagcacctactgtgccaccatggtccagcactgtgaagccctcaaccggtctgtccaagttgtaaacctggatccagcagcagaacacttcaactactccgtgatggctgacatccgggaactgatcgaggtggatgatgtaatggaggatgattctctgcgattcggtcccaacggaggattggtattttgcatggagtactttgccaataattttgactggctggagaactgtcttggccatgtagaggacgactatatcctttttgattgtccaggtcagattgagttgtacactcacctgcctgtgatgaaacagctggtccagcagctcgagcagtgggagttccgagtctgtggagtttttcttgttgattctcagttcatggtggagtcattcaagtttatttctggcatcttggcagccctgagtgccatgatctctctagaaattccgcaagtcaacatcatgacaaaaatggatctgctgagtaaaaaagcaaaaaaggaaattgagaaatttttagatccagacatgtattctttattagaagattctacaagtgacttaagaagcaaaaaattcaagaaactgactaaagctatatgtggactgattgatgactacagcatggttcgatttttaccttacgatcagtcagatgaagaaagcatgaacattgtattgcagcatattgattttgccattcaatatggagaagacctagaatttaaagaaccaaaggaacgtgaagatgagtcttcctctatgtttgacgaatattttcaagaatgccaggatgaatgaagagtttactaaaagtaaccatctaaagagcttgtggccaaaccagcagaacattcttctcttcaaaggatgcaatagtagaaagctacttattttaatgaaaaaaagtaaaacttcgttctttatcagcctcatgcctgaatcaaatttttaattattctgaaactgctgctgtttaaagtggaatcttttagtattataacagcatcactttagattttgtaagtcaaaattgaaatgaatgcacatagatttatatataaattagcacctgagctaaggttaaggctggtctaaacttattttcactttttgtattatttttgagatgcaggaattactgtaacaaaatatgtatgtccgaagggaaaaagctgcaaggatatatataagaccactgcttatctgtatcttcccattttcctatattgaaaatgtatattatttatataacttaaaaagtaaaaataactatgttttgaaaaaaaaaaaaaaaaaa

SEQ ID NO: 2098 - DNA, 1668 bp, Homo sapiens
ggcgaaggagatcagcaggacgctgcgcacaacatgggcaaccacctgccgctcctgcctgcagagagtgaggaagaagatgaaatggaagttgaagaccaggatagtaaagaagccaaaaaaccaaacatcataaattttgacaccagtctgccgacatcacatacatacctaggtgctgatatggaagaatttcatggcaggactttgcacgatgacgacagctgtcaggtgattccagttcttccacaagtgatgatgatcctgattcccggacagacattacctcttcagctttttcaccctcaagaagtcagtatggtgcggaatttaattcagaaagatagaacctttgctgttcttgcatacagcaatgtacaggaaagggaagcacagtttggaacaacagcagagatatatgcctatcgagaagaacaggattttggaattgagatagtgaaagtgaaagcaattggaagacaaaggttcaaagtccttgagctaagaacacagtcagatggaatccagcaagctaaagtgcaaattcttcccgaatgtgtgttgccttcaaccatgtctgcagttcaattagaatccctcaataagtgccagatatttccttcaaaacctgtctcaagagaagaccaatgttcatataaatggtggcagaaataccagaagagaaagtttcattgtgcaaatctaacttcatggcctcgctggctgtattccttatatgatgctgagaccttaatggacagaatcaagaaacagctacgtgaatgggatgaaaatctaaaagatgattctcttccttcaaatccaatagatttttcttacagagtagctgcttgtcttcctattgatgatgtattgagaattcagctccttaaaattggcagtgctatccagcgacttcgctgtgaattagacattatgaataaatgtacttccctttgctgtaaacaatgtcaagaaacagaaataacaaccaaaaatgaaatattcagtttatccttatgtgggccgatggagcttatgtgaatcctcatggatatgtgcatgagacacttactgtgtataaggcttgcaacttgaatctgataggccggccttctacagaacacagctggtttcctgggtatgcctggactgttgcccagtgtaagatctgtgcaagcccatattggatgggaagtttacggccaccaaaaaagacatgtcacctcaaaaattttggggcttaacgcgatctgctctgttgcccacgatcccagacactgaagatgaaataagtccagacaaagtaatactttgcttgtaaacagatgtgatagagataaagttatctaacaaattggttatattctaagatctgctttggaaattattgcctctgatacatacctaagtaaacataacattaatacctaagtaaacataacattacttggagggttgcagtttctaagtgaaactgtatttgaaacttttaagtatactttaggaaacaagcatgaacggcagtctagaataccagaaacatctacttgggtagcttggtgccattatcctgtggaatctgatatgtctggtagcatgtcattgatgggacatgaagacatctttggaaatgatgagattatttcctgtgttaaaaaaaaaaaa

SEQ ID NO: 2099 - DNA, 1038 bp, Homo sapiens
gaagtcctggtaatctggtccttgttcccgtctggataccagcttccttcagcagcgcaggcggtcggtccctgaggcccgtggaaggagtcaaacttgcgggaattttgcagtttatctgcagggctgttgtttccagcaagacccaaagctagaaaaggaggaggaagaaactgacccgatcagtgccagaagtcattgtattcaaagaagaataagcaagaaagaaaagaaggaaggaagagaggtagacagatacaagatgaaatcctgtcaaaaaatggaaggaaaaccagaaaatgagagtgaaccaaagcatgaggaagagccaaagcctgaggaaaagccagaagaggaggagaagctagaggaggaggccaaagcaaaaggaacttttagagaaaggctgattcaatctctccaggagtttaaagaagatatacacaacaggcatttaagcaatgaagatatgtttagagaagtggatgaaatagatgagataaggagagtcagaaacaaacttatagtgatgcgttggaaggttaatcgaaaccatccttacccctatttaatgtagtttaccttgatttttatctgatattaacaataccatatagcttgctttttattagcatttcctgatattcctttgtccatatttctacttataacctgttgctattaatggttttagatgtatctcttgttatctgcatctcattgtttattgtattttgaaccaatctacaagtctctgtcttttaataaaagaactttacacatttgtaaaaaagaggttcttggtaagatataaaatggaaaaaggctaagtaatatgtgaatatcatatttttgaaaggtaaaaagtacatttgtatattacatatatggacataacttgtgaaggatgaaagaaagtcagcctctcggtggtgggattatgaatgatttttctccttttgcttgttagtattttctatattctaaaattaacacacattattatagctagaatataaaagttttataaaaaaaaaa

SEQ ID NO: 2100 - DNA, 1487 bp, Homo sapiens
ctggtctaacagacccgcgagaacgaaggacgcttgcctttttccggtcggggaagggggaagaaggtaacttccggtgacggggttgcatcacttcctctcaagcttggcgtttgtttggtggggttacacgcgggttcaacatgcgtatcgaaaagtgttatttctgttcggggcccatctatcctggacacggcatgatgttcgtccgcaacgattgcaaggtgttcagattttgcaaatctaaatgtcataaaaactttaaaaagaagcgcaatcctcgcaaagttaggtggaccaaagcattccggaaagcagctggtaaagagcttacagtggataattcatttgaatttgaaaaacgtagaaatgaacctatcaaataccagcgagagctatggaataaaactattgatgcgatgaagagagttgaagaaatcaaacagaagcgccaagctaaatttataatgaacagattgaagaaaaataaagagctacagaaagttcaggatatcaaagaagtcaagcaaaacatccatcttatccgagcccctcttgcaggcaaagggaaacagttggaagagaaaatggtacagcagttacaagaggatgtggacatggaagatgctccttaaaaatctctgtaaccatttcttttatgtacatttgaaaatgccctttggatacttggaactgctaaattattttattttttacataaggtcacttaaatgaaaagcgattaaaagacatctttcctgcattgccatctacataatatcagatattacggatgttagattgcatctcagtgttaaatctttactgatagatgtacttaagtaaatcatgaaaattctacttgtaactatagaagtgaattgtggacgtaaaatggttgtgctatttggataatggcactaggcagcatttgtatagtaactaatggcaaaaattcatggctagtgatgtataaaataaaatattctttgcagtaaaatattccctttgttaatgttatagaaggggggatacaaaaaggaactaacaatttgtatggcagtgtcagatatttttattttagtatttcctgttttggtttatttgcatcttagaagagcataatgacattgtttgatgaagcctaattatgctggactgttttgacctggtttaacccttctgataggtagttgtggatgctggggatgagaactgaataatctttgcctggagtgacactacactctagaatttccactttggagaatactcagttccaacttgtgattcctgatagaacagactttacttttctagcccagcattgatctagaagcagaggaatcccagcgccttttaaaagttgttatgtggttttcttttaaaaagctcctgtttttggaaagtagaatttatgggtacaacgtatgttcattatttgtacataaaataaaaccatttaaaaagtaaaaaaaaaaaaaaaa

SEQ ID NO: 2101 - DNA, 1701 bp, Homo sapiens
ggaacaaaagctggagctccaccgcggtggcggccgctctagaactagtggatcccccgggctgcaggaattcggcacgagcagaagagggggctagctagctgtctctgcggaccaggggagaccccgcgcccccccggtgtgaggcggcctcacagggccgggtgggctggcgagccgacgcggcggcggaggaggctgtgaggagtgtgtggaacaggacccgggacagaggaaccatggctccgcagaacctgagcaccttttgcctgttgctgctatacctcatcggggcggtgattgccggacgagatttctataagatcttgggggtgcctcgaagtgcctctataaaggatattaaaaaggcctataggaaactagccctgcagcttcatcccgaccggaaccctgatgatccacaagcccaggagaaattccaggatctgggtgctgcttatgaggttctgtcagatagtgagaaacggaaacagtacgatacttatggtgaagaaggattaaaagatggtcatcagagctcccatggagacattttttcacacttctttggggattttggtttcatgtttggaggaacccctcgtcagcaagacagaaatattccaagaggaagtgatattattgtagatctagaagtcactttggaagaagtatatgcaggaaattttgtggaagtagttagaaacaaacctgtggcaaggcaggctcctggcaaacggaagtgcaattgtcggcaagagatgcggaccacccagctgggccctgggcgcttccaaatgacccaggaggtggtctgcgacgaatgccctaatgtcaaactagtgaatgaagaacgaacgctggaagtagaaatagagcctggggtgagagacggcatggagtacccctttattggagaaggtgagcctcacgtggatggggagcctggagatttacggttccgaatcaaagttgtcaagcacccaatatttgaaaggagaggagatgatttgtacacaaatgtgacaatctcattagttgagtcactggttggctttgagatggatattactcacttggatggtcacaaggtacatatttcccgggataagatcaccaggccaggagcgaagctatggaagaaaggggaagggctccccaactttgacaacaacaatatcaagggctctttgataatcacttttgatgtggattttccaaaagaacagttaacagaggaagcgagagaaggtatcaaacagctactgaaacaagggtcagtgcagaaggtatacaatggactgcaaggatattgagagtgaataaaattggactttgtttaaaataagtgaataagcgatatttattatctgcaaggtttttttgtgtgtgtttttgtttttattttcaatatgcaagttaggcttaatttttttatctaatgatcatcatgaaatgaataagagggcttaagaatttgtccatttgcattcggaaaagaatgaccagcaaaaggtttactaatacgtctccctttggggatttaatgtctggtgctgccgcctgagtttcaagaattaaagctgcaagaggactccaggagcaaaagaaacacaatatagagggttggagttgttagcaatttcattcaaaatgccaactggagaagtctgtttttaaatacattttgttgttattttt

SEQ ID NO: 2102 - DNA, 2836 bp, Homo sapiens
ctccctcagcgtccggccgaggcgcggtgtatgctgagccgctgccgcagcgggctgctccacgtcctgggccttagcttcctgctgcagacccgccggccgattctcctctgctctccacgtctcatgaagccgctggtcgtgttcgtcctcggcggccccggcgccggcaaggggacccagtgcgcccgcatcgtcgagaaatatggctacacacacctttctgcaggagagctgcttcgtgatgaaaggaagaacccagattcacagtatggtgaacttattgaaaagtacattaaagaaggaaagattgtaccagttgagataaccatcagtttattaaagagggaaatggatcagacaatggctgccaatgctcagaagaataaattcttgattgatgggtttccaagaaatcaagacaaccttcaaggatggaacaagaccatggatgggaaggcagatgtatctttcgttctcttttttgactgtaataatgagatttgtattgaacgatgtcttgagaggggaaagagtagtggtaggagtgatgacaacagagagagcttggaaaagagaattcagacctaccttcagtcaacaaagccaattattgacttatatgaagaaatggggaaagtcaagaaaatagatgcttctaaatctgttgatgaagtttttgatgaagttgtgcagatttttgacaaggaaggctaattctaaacctgaaagcatccttgaaatcatgcttgaatattgctttgatagctgctatcatgacccctttttaaggcaattctaatctttcataactacatctcaattagtggctggaaagtacatggtaaaacaaagtaaatttttttatgttctttttttggtcacaggagtagacagtgaattcaggtttaacttcaccttagttatggtgctcaccaaacgaagggtatcagctatttttttttaaattcaaaaagaatatcccttttatagtttgtgccttctgtgagcaaaactttttagtacgcgtatatatccctctagtaatcacaacattttaggatttagggatacctgcttcctctttttcttgcaagttttaaatttccaaccttaagtgaatttgtggaccaaatttcaaaggaactttttgtgtagtcagttcttgcacaatgtgtttggtaaacaaactcaaaatggattcttaggagcattttagtgtttattaaataactgaccatttgctgtagaaagatgagaaaacttaagctttgttttactacaacttgtacaaagttgtatgacagggcatattctttgcttccaagatttgggttgggggcactaggggttcagagcctggcagaattgtcagctttagtctgacataatctaagggtatggggcaaggatcacatctaatgcttgtgtccttatactctattatatagtgttattcatgattcagctgatcttaacaaaattcgtagcagtggaaccttgaaatgcatgtggctagatttatgctaaaatgattctcagttagcattttagtaacacttcaaaggtttttttttgtttgttttctagacttaataaaagcttaggattaattagaagaagcaatctagttaaatttcccatttgtattttattttcttgaatacttttttcatagttatttgtttaaaaagatttaaaaatcattgcactttggtcagaaaaataataaatatatcttataaatgtttgattcccttccttgctatttttattcagtagatttttgtttggcatcatgttgaagcaccgaaagataaatgatttttaaaaggctatagagtccaaaggaatattcttttacaccaattcttcctttaaaaatctctgaggaatttgttttcgccttacttttttttcttctgtcacaatgctaagtggtatccgaggttcttaatatgagatttaaaatcttaaaatgtttcttattttcagcacttacatcatttggtacacagggtcaaatagggcaaataattttgtctttgtataatagatttgatatttaaagtcactggaaataggacaagttaatggatgtttttatattttaatagaatcatttatttctatgtgttatgaaattcacttaatgataaatttttcaacatacttgccattagaaaacaaagtattgctaagtactataacatattggccactaaaattcatattgagattatcttggtttcttggaagagataggaatgagttcttatctagtgttgcaggccagcaaatacagaggtggtttaatcaaacagctctagtatgaagcaagagtaaagactaaggtttcgagagcattcctactcacataagtgaagaaatctgtcagataggaatctaaatatttatagtgagattgtgaaagcaaccttaaagttttgaagaagactgatgagactaggtgctttgcttcctttcatcaggtatctttctgtggcatttgagaacagaaaccaagaaacatggtaattactaaattatgaggctttgctttttgtttgcttttaagtagaaaaacatgttggcaacattgagttttggagttgattgagataatatgacttaactagttttgtcattccatttgttaaagatacagtcaccaagaatgttttgagttttttgaaagaccccaatttaagccttgcttatttttaaattatttccattcagtgatgttggatgtatatcagttatttagtaaataatctcaataaattttgtgctgtggcctttgctaaaaaaaaaaaaaaaaaaaaaaaaaaaa

SEQ ID NO: 2103 - DNA, 1868 bp, Homo sapiens
agcgactcttcagggaggtggcaggaaaggcttggaacagctgccggaggtgacggagcggcggccccgcccggtgcgctggaggtcgaagcttccagctctggacatcctgagcccaagtcccccacactcagtgcagtgatgagtgcggaagtgaaggtgacagggcagaaccaggagcaatttctgctcctagccaagtcggccaagggggcagcgctggccacactcatccatcaggtgctggaggcccctggtgtctacgtgtttggagaactgctggacatgcccaatgttagagagctggctgagagtgactttgcctctaccttccggctgctcacagtgtttgcttatgggacatacgctgactacttagctgaagcccggaatcttcctccactaacagaggctcagaagaataagcttcgacacctctcagttgtcaccctggctgctaaagtaaagtgtatcccatatgcagtgttgctggaggctcttgccctgcgtaatgtgcggcagctggaagaccttgtgattgaggctgtgtatgctgacgtgcttcgtggctccctggaccagcgcaaccagcggctcgaggttgactacagcatcgggcgggacatccagcgccaggacctcagtgccattgcccgaaccctgcaggaatggtgtgtgggctgtgaggtcgtgctgtcaggcattgaggagcaggtgagccgtgccaaccaacacaaggagcagcagctgggcctgaagcagcagattgagagtgaggttgccaaccttaaaaaaaccattaaagttacgacggcagcagcagccgcagccacatctcaggaccctgagcaacacctgactgagctgagggaaccagctcctggcaccaaccagcgccagcccagcaagaaagcctcaaagggcaaggggctccgagggagcgccaagatttggtccaagtcgaattgaaagaactgtcgtttcctccctggggatgtggggtcccagctgcctgcctgcctcttaggagtcctcagagagccttctgtgcccctggccagctgataatcctaggttcatgacccttcacctcccctaaccccaaacatagatcacaccttctctagggaggagtcaaatgtaggtcatgtttttgttggtactttctgttttttgtgacttcatgtgttccattgctccccgctgccatgctctctcccttgtttccttaagagctcagcatctgtccctgttcattacatgtcattgagtaggtgggtagccctgatgggggtcgctctgtctggagcataacccacaggcgttttttctgccaccccatccctgcatgcctgatccccagttcctataccctacccctgacctattgagcagcctctgaagagccatagggcccccacctttactcacaccctgagaattctgggagccagtctgccatgccaggagtcactggacatgttcatcctagaatcctgtcacactacagtcatttcttttcctctctctggcccttgggtcctgggaatgctgctgcttcaaccccagagcctaagaatggcagccgtttcttaacatgttgagagatgattctttcttggccctggccatctcgggaagcttgatggcaatcctggaagggtttaatctccttttgtgagtttggtggggaagggaagggtatatagattgtattaaaaaaaaaaaggtatatatgcatatatctatatataatatgacgcagaaataaatctatgagaaatctatctacaaaaaaaaaaaaaaaaaaaaaaaaaaaaaaaaaaaaaaaaaaaaaaaaaaaaaaaaaaaaaaaaaaaaaaaaaaaa

SEQ ID NO: 2104 - DNA, 1337 bp, Homo sapiens
ggcacgaggggaggtggacgcgggtaccggcggtcgtcgggtcggcagcctttggtcagttggcagcggcaagcgcgctgcggttccggtggcgccatgtcgttctgcagcttcttcgggggcgaggttttccagaatcactttgaacctggcgtttacgtgtgtgccaagtgtggctatgagctgttctccagccgctcgaagtatgcacactcgtctccatggccggcgttcaccgagaccattcacgccgacagcgtggccaagcgtccggagcacaatagatctgaagccttgaaggtgtcctgtggcaagtgtggcaatgggttgggccacgagttcctgaacgacggccccaagccggggcagtcccgattctgaatattcagcagctcgctgaagtttgtccctaaaggcaaagaaacttctgcctcccagggtcactaggcgggcagcccacacccaccccagacggccaccacactgaggccacacgttggccattccaccttggagttggaaccctgggcgtcgagacaggaaggcagggcgcagtggttgaaacatcaggacactcccaaggccccggctctgaacaagaccttttcgtttcttggaaaagagactcatttgctgatggttcatgccttctgctgggacaggcctgggctgtgcagccacactgtcggctgacttagccccctgctcactctaggtgcctccaggaggtgagccctgggtgcagctggtctctgaatgacgttacaccctcaccttcttttcctggccctgtctctggactctcccctgtgaggcccaattccaagacagactctcgtcctcaccgaagcttaggcccacatctcccaggctgcttaggagacagaatggaaacggaggccgcccctgccagccgccctggccctggtcactgcatgatccgctctggtcaaacccttccaggccagccagagtggggatggtctgtgacctgctgggaaggcaggctgatggggcacacccttggcctctcgtccacgaggggagaaacctaaaccctgtttcacaatctgtgcggaagtagcttgcctcacttctgcttaggaaagcggctgttgctccataactctaaccagcacagggctgaggcctgcagtgcacacctgcagggaggcccttcccaaggtgtggtgactgtgccttactgtacatgctcggaggcctggccatataggagggtgggtgatgctgaaatcaccccccatcttaagtaattactttctggagtaatcaggtggaaatccatagacaaatgaaaaaaaaaaaaaaaaaaaaaa

SEQ ID NO: 2105 - DNA, 1833 bp, Homo sapiens
ggcacgagtgggagtacaggactcgcctcctcagggttccctgtgctgccacttttcagccatggccacaagtgaacagagtatctgccaagcccgggcttccgtgatggtctacgatgacaccagtaagaaatgggtaccaatcaaacctggccagcagggattcagccggatcaacatctaccacaacactgccagcaacaccttcagagtcgttggagtcaagttgcaggatcagcaggttgtgatcaattattcaatcgtgaaagggctgaagtacaatcaggccacgccaaccttccaccagtggcgagatgcccgccaggtctacggcttaaactttgcaagtaaagaagaggcaaccacgttctccaatgcaatgctgtttgccctgaacatcatgaattcccaagaaggaggcccctccagccagcgtcaggtgcagaatggcccctctcctgatgagatggacatccagagaagacaagtgatggagcagcaccagcagcagcgtcaggaatctctagaaagaagaacctcggccacagggcccatcctcccaccaggacatccttcatctgcagccagcgcccccgtctcatgtagtgggcctccaccgccccccccacccccagtcccacctccacccactggggctaccccacctcccccacccccactgccagccggaggagcccaggggtccagccacgacgagagctccatgtcaggactggccgctgccatagctggggccaagctgagaagagtccaacggccagaagacgcatctggaggctccagtcccagtgggacctcaaagtccgatgccaaccgggcaagcagcgggggtggcggaggaggcctcatggaggaaatgaacaaactgctggccaagaggagaaaagcagcctcccagtcagacaagccagccgagaagaaggaagatgaaagccaaatggaagatcctagtacctccccctctccggggacccgagcagccagccagccacctaactcctcagaggctggccggaagccctgggagcggagcaactcggtggagaagcctgtgtcctcgattctgtccagaaccccgtctgtggcaaagagccccgaagctaagagcccccttcagtcgcagcctcactctaggatgaagcctgctgggagcgtgaatgacatggccctggatgccttcgacttggaccggatgaagcaggagatcctagaggaggtggtgagagagctccacaaggtgaaggaggagatcatcgacgccatcaggcaggagctgagtgggatcagcaccacgtaaggggccggcctcgctgcgctgattcgtcgagcccatccggcgacagaggacagccagaagcccagccagccccagactccagtgcaccagagcacgcacaggagcctgggcgcgctgctgtgaaacgtcctgacctgtgatcacacatgacagtgaggaaaccaagtgcaactcctgggtttttttagattctgcctgacacggaacaccaggtctgctcgtcttttttgtgttttatatttgcttatttaaggtacatttctttgggtttctagagacgcccctaagtcacctgcttcattagacggtttccaggttttctcccaggtgacgctgttagcgcctcagctggcggtgacagccggcccagcgtggcgccaccacacaccgcagagctgtccaggcacagctccgtccccagcgctcatggtgttgaaactgtctgtcatgcaccacggtgtctgtgtccacacagtaataaacggtttactgtccgcaaaaaaaaaaaaaaaaaa

SEQ ID NO: 2106 - DNA, 1374 bp, Homo sapiens
aagatgtcacctttgctaactctcctgcccccatcctgcccctctgctgggagggtgtctgcttctccccgccagccctcgatcccctaaacctccttctttcagaaggctggggaagcgaggcctggggagggaagggactcacctgcccggcagatggggtcctcacctgcccgctgctgccagctacacctccgttgcccaggccctgggatcaaaccctgcccaccagctcccctcgtccaaccagctgccacgtcctgtaaccaaaagtgaccgggatgaatgcctggctcccccttctttccagccctagctcaggcccatcgtccccagctgatgtcgccctgtctgcacgatgcctgggcgcctactccacactcctcactggcctcaggccccaccagccctgcctcgagctagcccctccacccgtcatcactcctgccagactccagatgtccaaggtgctccttggctcccacaagctctcctccagcaccccatcttcccctggttgcccctcggttccccacttccccagtttcccctcccaggttcaagcaattctcctgcctcagcctcccaagtagctgggattacaggtgcctgccaccacgcacagctaatttttgtatttttagtagagacagggttttaccatgttggcctggctggtctcgaactcctgacctttagtgatccatccgtcttggcctcccactgcgcccggccataaacttttaaactaaagcatgatctatcgatacattgcagagcttctttcctttagtatctgaaggtttgagtcaaagctgttttcccatctggaatcagttgcccatttggctatccgcccgagcgttgtggtttcctctcctgttcctggcctgcctttgtgactcactctggagatcaccttcgaggttaatggcttgtggaagagttccaagttttatctctgtcctagttggttaaacatcattttctctttttcaagcaagtgaaaagctttcaatagatagatgtttatttcctaagcactaaatgactcataaattaagtccctgtagatttggaaaaactccttaaactgtatctagaggtctagcacttcctagtaggatagacagtcctttctagatactgtaacttttttctgtaccgctttggagtacagtctttatgaagttgtttgtaagcaaaagggaatagaatttaagcctaaaggctgggcgcgatggctcacatctgtaatcccaatgctttgggaggccaaggcaggtggatcacctgaggtcaggagttcgagaccagcctgaccaacatggtgaaaccccatctcaaaatacaaaaaattatctgggtgtggtg

SEQ ID NO: 2107 - DNA, 2795 bp, Homo sapiens
cggggacatgaggtggatactgttcattggggcccttattgggtccagcatctgtggccgagaaaaattttttggggaccaagttttgaggattaatgtcagaaatggagacgagatcagcaaattgagtcaactagtgaattcaaacaacttgaagctcaatttctggaaatctccctcctccttcaatcggcctgtggatgtcctggtcccatctgtcagtctgcaggcatttaaatccttcctgagatcccagggcttagagtacgcagtgacaattgaggacctgcaggcccttttagacaatgaagatgatgaaatgcaacacaatgaagggcaagaacggagcagtaataacttcaactacggggcttaccattccctggaagctatttaccacgagatggacaacattgccgcagactttcctgacctggcgaggagggtgaagattggacattcgtttgaaaaccggccgatgtatgtactgaagttcagcactgggaaaggcgtgaggcggccggccgtttggctgaatgcaggcatccattcccgagagtggatctcccaggccactgcaatctggacggcaaggaagattgtatctgattaccagagggatccagctatcacctccatcttggagaaaatggatattttcttgttgcctgtggccaatcctgatggatatgtgtatactcaaactcaaaaccgattatggaggaagacgcggtcccgaaatcctggaagctcctgcattggtgctgacccaaatagaaactggaacgctagttttgcaggaaagggagccagcgacaacccttgctccgaagtgtaccatggaccccacgccaattcggaagtggaggtgaaatcagtggtagatttcatccaaaaacatgggaatttcaagggcttcatcgacctgcacagctactcgcagctgctgatgtatccatatgggtactcagtcaaaaaggccccagatgccgaggaactcgacaaggtggcgaggcttgcggccaaagctctggcttctgtgtcgggcactgagtaccaagtgggtcccacctgcaccactgtctatccagctagcgggagcagcatcgactgggcgtatgacaacggcatcaaatttgcattcacatttgagttgagagataccgggacctatggcttcctcctgccagctaaccagatcatccccactgcagaggagacgtggctggggctgaagaccatcatggagcatgtgcgggacaacctctactaggcgatggctctgctctgtctacatttatttgtacccacacgtgcacgcactgaggccattgttaaaggagctctttcctacctgtgtgagtcagagccctctgggtttgtggagcacacaggcctgcccctctccagccagctccctggagtcgtgtgtcctggcggtgtccctgcaagaactggttctgccagcctgctcaattttggtcctgctgtttttgatgagccttttgtctgtttctccttccaccctgctggctgggcggctgcactcagcatcaccccttcctgggtggcatgtctctctctacctcatttttagaaccaaagaacatctgagatgattctctaccctcattcacatctagccaagccagtgacctttgctctggtggcactgtgggagacaccacttgtctttaggtgggtctcaaagatgatgtagaatttcctttaatttctcgcagtcttcctggaaaatattttcctttgagcagcaaatcttgtagggatatcagtgaaggtctctccctccctcctctcctgttttttttttttgaggcagagttttgctcttgttgcccaggctggagtgtgatgggctcgatcttggctcaccacaacctctgcctcctgggttcaagcaattctcctgcctcagcctcttgagtagcttggtttataggcgcatgccaccatgcctggctaattttgtgtttttagtagagacagggtttctccatgttggtcaggctggtctcaaactcccaacctcaggtgatctgccctccttggcctcccagagtgctgggattacagggggagccactgtgccggtcccgtcccctccttttttaggcctgaatacaaagtagaagatcactttccttcactgtgctgagaatttctagatactacagttcttactcctctcttccctttgttattcagtgtgaccaggatgggcgggaggggatctgtgtcactgtaggtactgtgcccaggaaggctgggtgaagtccccatctaaattgcaggatggcgaaattatccccatctgtcctaatgggcttccctcctctttgccttttgaactcacttcaaagatgtaggcctcatcttacaggtcctaaatcactcatctggcctggataatctcactgccctggcacattcccatttgtgctggggtatcctgtgtttccttgtcctggtttgtgtgtgtgtgtgtgtgtgtgtgtgtgtgtgtgtgtgtttgtgtgtgtgtgtctgtctattttgatccggcccaagttcctaagtagagcaagaattcatcaaccagctgcctttgtttcatttcacctcagcacgtaccatcgtcctttggggggttgtttgtttttgttttttgctttaaccaaaatgtttgtaaatcttaacctcctgcctaggatttgtacagcatttggtgtgtgcttataagccaataaatattcaatgtgagttccaaaaaaaaaaaaaaaaaaaaaaaaaaaaaa

SEQ ID NO: 2108 - DNA, 2660 bp, Homo sapiens
accagcccctcggataccacttggccactcccgctgaggccactcccactgcgtggctgaagcctcgaggtcaccaggcggaggcgcggagatgcccctgcatcagctgggggacaagccgctcaccttccccagccccaactcagccatggaaaacgggcttgaccacaccccacccagcaggagggcatccccgggcacacccctgagccccggctccctccgctccgctgcccatagccccctggacaccagcaagcagcccctctgccagctctgggccgagaagcatggcgcccgggggacccatgaggtgcggtacgtctcggccgggcagagcgtggcgtgcggctggtgggccttcgcaccgccgtgcctgcaggtcctcaacacgcccaagggcatcctgttcttcctgtgtgcggccgcattcctgcaggggatgactgtgaatggcttcatcaacacagtcatcacctccctggagcgccgctatgacctgcacagctaccagagcgggctcatcgccagctcctacgacattgccgcctgcctctgcctcaccttcgtcagctacttcgggggctcagggcacaagccgcgctggctgggctggggcgtgctgcttatgggcacggggtcgctggtgttcgcgctgccccacttcacggctggccgctatgaggtggagttggacgcgggtgtcaggacgtgccctgccaaccccggcgcggtgtgtgcggacagcacctcgggcctgtcccgctaccagctggtcttcatgctgggccagttcctgcatggcgtgggtgccacacccctctacacgctgggcgtcacctacctggatgagaacgtcaagtccagctgctcgcccgtctacattgccatcttctacacagcggccatcctgggcccagctgccggctacctgattggaggtgccctgctgaatatctacacggaaatgggccgacggacggagctgaccaccgagagcccactgtgggtcggcgcctggtgggtcggcttcctgggctctggggccgctgctttcttcaccgccgttcccatccttggttaccctcggcagctgccaggctcccagcgctacgcggtcatgagagcggcggaaatgcaccagttgaaggacagcagccgtggggaggcgagcaacccggactttgggaaaaccatcagagacctgcctctctccatctggctcctgctgaagaaccccacgttcatcctgctctgcctggccggggccaccgaggccactctcatcaccggcatgtccacgttcagccccaagttcttggagtcccagttcagcctgagtgcctcagaagctgccaccttgtttgggtacctggtggtgccagcgggtggtggcggcaccttcctgggcggcttctttgtgaacaagctcaggctccggggctccgcggtcatcaagttctgcctgttctgcaccgttgtcagcctgctgggcatcctcgtcttctcactgcactgccccagtgtgcccatggcgggcgtcacagccagctacggcgggagcctcctgcccgaaggccacctgaacctaacggctccctgcaacgctgcctgcagctgccagccagaacactacagccctgtgtgcggctcggacggcctcatgtacttctcactgtgccacgcagggtgccctgcagccacggagacgaatgtggacggccagaaggtgtaccgagactgtagctgtatccctcagaatctttcctctggttttggccatgccactgcagggaaatgcacttcaacttgtcagagaaagcccctccttctggttttcatattcgttgtaattttctttacattcctcagcagcattcctgcactaacggcaactctacgatgtgtccgtgaccctcagagatcctttgccctgggaatccagtggattgtagttagaatactagggggcatcccggggcccatcgccttcggctgggtgatcgacaaggcctgtctgctgtggcaggaccagtgtggccagcagggctcctgcttggtgtaccagaattcggccatgagccgctacatactcatcatggggctcctgtacaaggtgctgggcgtcctcttctttgccatagcctgcttcttatacaagcccctgtcggagtcttcagatggcctggaaacttgtctgcccagccagtcctcagcccctgacagtgccacagatagccagctccagagcagcgtctgaccaccgcccgcgcccacccggccacggcgggcactcagcatttcctgatgacagaacagtgccgttgggtgatgcaatcacacgggaacttctatttgacctgcaaccttctacttaacctgtggtttaaagtcggctgtgacctcctgtccccagagctgtacggccctgcagtgggtgggaggaacttgcataaatatatatttatggacacacagtttgcatcagaacgtgtttatagaatgtgttttatacccgatcgtgtgtggtgtgcgtgaggacaaactccgcaggggctgtgaatcccactgggagggcggtgggcctgcagcccgaggaaggcttgtgtgtcctcagttaaaactgtgcatatcgaaatatattttgttatttaagcctg

SEQ ID NO: 2109 - DNA, 3655 bp, Homo sapiens
ggcacgaggcgctaggtagagcgccgggacctgtgacagggctggtagcagcgcacaggaaaggcggcttttagccaggtatttcagtgtctgtagacaagatggaatcatctccatttaatagacggcaatggacctcactatcattgagggtaacagccaaagaactttctcttgtcaacaagaacaagtcatcggctattgtggaaatattctccaagtaccagaaagcagctgaagaaacaaacatggagaagaagagaagtaacaccgaaaatctctcccagcactttagaaaggggaccctgactgtgttaaagaagaagtgggagaacccagggctgggagcagagtctcacacagactctctacggaacagcagcactgagattaggcacagagcagaccatcctcctgctgaagtgacaagccacgctgcttctggagccaaagctgaccaagaagaacaaatccaccccagatctagactcaggtcacctcctgaagccctcgttcagggtcgatatccccacatcaaggacggtgaggatcttaaagaccactcaacagaaagtaaaaaaatggaaaattgtctaggagaatccaggcatgaagtagaaaaatcagaaatcagtgaaaacacagatgcttcgggcaaaatagagaaatataatgttccgctgaacaggcttaagatgatgtttgagaaaggtgaaccaactcaaactaagattctccgggcccaaagccgaagtgcaagtggaaggaagatctctgaaaacagctattctctagatgacctggaaataggcccaggtcagttgtcatcttctacatttgactcggagaaaaatgagagtagacgaaatctggaacttccacgcctctcagaaacctctataaaggatcgaatggccaagtaccaggcagctgtgtccaaacaaagcagctcaaccaactatacaaatgagctgaaagccagtggtggcgaaatcaaaattcataaaatggagcaaaaggagaatgtgcccccaggtcctgaggtctgcatcacccatcaggaaggggaaaagatttctgcaaatgagaatagcctggcagtccgttccacccctgccgaagatgactcccgtgactcccaggttaagagtgaggttcaacagcctgtccatcccaagccactaagtccagattccagagcctccagtctttctgaaagttctcctcccaaagcaatgaagaagtttcaggcacctgcaagagagacctgcgtggaatgtcagaagacagtctatccaatggagcgtctcttggccaaccagcaggtgtttcacatcagctgcttccgttgctcctattgcaacaacaaactcagtctaggaacatatgcatctttacatggaagaatctattgtaagcctcacttcaatcaactctttaaatctaagggcaactatgatgaaggctttgggcacagaccacacaaggatctatgggcaagcaaaaatgaaaacgaagagattttggagagaccagcccagcttgcaaatgcaagggagacccctcacagcccaggggtagaagatgcccctattgctaaggtgggtgtcctggctgcaagtatggaagccaaggcctcctctcagcaggagaaggaagacaagccagctgaaaccaagaagctgaggatcgcctggccaccccccactgaacttggaagttcaggaagtgccttggaggaagggatcaaaatgtcaaagcccaaatggcctcctgaagacgaaatcagcaagcccgaagttcctgaggatgtcgatctagatctgaagaagctaagacgatcttcttcactgaaggaaagaagccgcccattcactgtagcagcttcatttcaaagcacctctgtcaagagcccaaaaactgtgtccccacctatcaggaaaggctggagcatgtcagagcagagtgaagaatctgtgggtggaagagttgcagaaaggaaacaagtggaaaatgccaaggcttctaagaagaatgggaatgtgggaaaaacaacctggcaaaacaaagaatctaaaggagagacagggaagagaagtaaggaaggtcatagtttggagatggagaatgagaatcttgtagaaaatggtgcagactccgatgaagatgataacagcttcctcaaacaacaatctccacaagaacccaagtctctgaattggtcgagttttgtagacaacacctttgctgaagaattcactactcagaatcagaaatcccaggatgtggaactctgggagggagaagtggtcaaagagctctctgtggaagaacagataaagagaaatcggtattatgatgaggatgaggatgaagagtgacaaattgcaatgatgctgggccttaaattcatgttagtgttagcgagccactgccctttgtcaaaatgtgatgcacataagcaggtatcccagcatgaaatgtaatttacttggaagtaactttggaaaagaattccttcttaaaatcaaaaacaaaacaaaaaaacacaaaaaacacattctaaatactagagataactttacttaaattcttcattttagcagtgatgatatgcataagtgctgtaaggcttgtaactggggaaatattccacctgataatagcccagattctactgtattcccaaaaggcaatattaaggtagatagatgattagtagtatattgttacacactattttggaattagagaacatacagaaggaatttaggggcttaaacattacgactgaatgcactttagtataaagggcacagtttgtatatttttaaatgaataccaatttaattttttagtatttacctgttaagagattatttagtctttaaattttttaggttaattttcttgctgtgatatatatgaggaatttactactttatgtcctgctctctaaactacatcctgaactcgacgtcctgaggtataatacaacagagcactttttgaggcaattgaaaaaccaacctacactcttcggtgcttagagagatctgctgtctcccaaataagcttttgtatctgccagtgaatttactgtactccaaatgattgctttcttttctggtgatatctgtgcttctcataattactgaaagctgcaatattttagtaataccttcgggatcactgtcccccatcttccgtgttagagcaaagtgaagagtttaaaggaggaagaagaaagaactgtcttacaccacttgagctcagacctctaaaccctgtatttcccttatgatgtcccctttttgagacactaatttttaaatacttactagctctgaaatatattgatttttatcacagtattctcagggtgaaattaaaccaactataggcctttttcttgggatgattttctagtcttaaggtttggggacattataaacttgagtacatttgttgtacacagttgatattccaaattgtatggatgggagggagaggtgtcttaagctgtaggcttttctttgtactgcatttatagagatttagctttaatattttttagagatgtaaaacattctgctttcttagtcttacctagtctgaaacatttttattcaataaagattttaattaaaatttg

SEQ ID NO: 2110 - DNA, 1884 bp, Homo sapiens
gccttgcacatggagatgcttagctgagggggtggctttgttagactatttgcaggtcgtgagatagagcctgagatgggggactgggcccctgcctgggggattgggtcgtgacctgtgtggagccccacactgagctgcagtgggtggggagggtggtttacaggggtgctctgtgcagcccctctgattttcccctgggagtcccaggtccaggggaaggaggacagtggcccaggccacacagctcactgggcggctctcactcccccagggctggctgctggcgggatggacaccctggaggaggtgacttgggccaatgggagcacagcgctacccccacccctggcaccaaacatcagtgtgcctcatcgctgcctgctgctgctctacgaagacattggcacctccagggtccggtactgggacctcttgctgctcatccccaatgtgctcttcctcatcttcctgctctggaagcttccatctgctcgggcgaagatccgcatcacctccagccccatttttatcaccttctacatcctggtgtttgtggtggcgctggtgggcattgcccgggccgtggtatccatgacggtgagcacctcgaacgctgcaactgttgctgataagatcctgtgggagatcacccgcttcttcctgctggccatcgagctgagtgtgatcatcctgggcctggcctttggcacctgggagagtaagtccagcatcaagcgggtgctggccatcaccacagtgctgtccctggcctactctgtcacccaggggaccctggagatcctgtaccctgatgcccatctctcagctgaggactttaatatctatggccatgggggccgccagttctggctggtcagctcctgcttcttcttcctggtctactctctggtggtcatccttcccaagaccccgctgaaggagcgcatctccctgccttctcggaggagcttctacgtgtatgcgggcatcctggcactgctcaacctactgcaggggctggggagtgtgctgctgtgcttcgacatcatcgaggggctctgctgtgtagatgccacaaccttcctgtacttcagcttcttcgctccgctcatctacgtggctttcctccggggcttcttcggctcggagcccaagatcctcttctcctacaaatgccaagtggacgagacagaggagccagatgtacacctaccccagccctacgctgtggcccggcgggagggcctggaggctgcaggggctgctggggcctcagctgccagctactcgagcacgcagttcgactctgccggcggggtggcctacctggatgacatcgcttccatgccctgccacactggcagcatcaacagcacagacagcgagcgctggaaggccatcaatgcctgagggcagctgccagggcctgtggaggacaggccagagaggaggccagcaggcccagagtccccaggggaggaggaccaggtcaagggacgttctgtgggcagtagccctgtgtggccctgttcccaccatgagtctggaggccccacctccctggggctcccaatcccctttgccatctctgctctcactggggaccctcctccccttcccacctgctctcatactgctcagtgacatggcccaggctttccttccagggccatgcttggcaaggttggctgagggcaccctccttctctgcacccttggcacgagggcagggctggctctcccaatgcctccatcccatccccatggtgctttggcctcctcaaagcatccaccatggtggatggactgaagtgtgtatattttcttgatctattttttaataaaaaggaaaaggagcaaaaaaaaaaaaaaaaagttttg

SEQ ID NO: 2111 - DNA, 6062 bp, Homo sapiens
agcgatgtttgcccgtcagtcgagtccggagtgaggagctcgggcgccccaacggaaggagactcttgagcttgatgttgcccgcgacactggcaccgcctggacctttgcccggagggagctgcagagggtccttcgccgccgtcctctggagggcagcgcgattgggggcccggacctccagtccgggggggattttttgtcgtccccctccccccaaccagggagcccgagcggccgccaaacaaaggtaccagtcgccgccgcgggaggaggaggagccggagcctctgcctcagcagccgctggacccgccgcccttcttccccatctctcccccgggcctgctggttttgggggggagaaggagagaggggactctggacgtgccagggtcagatctcgcctccgaggaaggtgcagctgaacctggtgttttagaggataccttggtcccagagtcatcatgaaggcccttgatgagcctccctatttgacagtgggcactgatgtgagtgctaaatacagaggagccttttgtgaagccaagatcaagacagcaaaaagacttgtcaaagtcaaggtgacatttagacatgattcttcaacagtggaagttcaggatgaccacataaagggcccactaaaggtaggagctattgtggaagtgaagaatcttgatggtgcatatcaggaagctgttatcaataaactaacagatgcgagttggtacactgtagtttttgatgacggagatgagaagacactgagacgatcttcactgtgcctgaaaggagagaggcattttgctgaaagtgaaacattagaccagctcccactcaccaaccctgagcattttggcactccagtcataggaaagaaaacaaatagaggaagaagatctaatcatataccagaggaagagtcttcatcatcctccagtgatgaagatgaggatgataggaaacagattgatgagctactaggcaaagttgtatgtgtagattacattagtttggataaaaagaaagcactgtggtttcctgcattggtggtttgtcctgattgtagtgatgagattgctgtaaaaaaggacaatattcttgttcgatctttcaaagatggaaaatttacttcagttccaagaaaagatgtccatgaaattactagtgacactgcaccaaagcctgatgctgttttaaagcaagcctttgaacaggcacttgaatttcacaaaagtagaactattcctgctaactggaagactgaattgaaagaagatagctctagcagtgaagcagaggaagaagaggaggaggaagatgatgaaaaagaaaaggaggataatagcagtgaagaagaagaagaaatagaaccatttccagaagaaagggagaactttcttcagcaattgtacaaatttatggaagatagaggtacacctattaacaaacgacctgtacttggatatcgaaatttgaatctctttaagttattcagacttgtacacaaacttggaggatttgataatattgaaagtggagctgtttggaaacaagtctaccaagatcttggaatccctgtcttaaattcagctgcaggatacaatgttaaatgtgcttataaaaaatacttatatggttttgaggagtactgtagatcagccaacattgaatttcagatggcattgccagagaaagttgttaacaagcaatgtaaggagtgtgaaaatgtaaaagaaataaaagttaaggaggaaaatgaaacagagatcaaagaaataaagatggaggaggagaggaatataataccaagagaagaaaagcctattgaggatgaaattgaaagaaaagaaaatattaagccctctctgggaagtaaaaagaatttattagaatctatacctacacatgatcaggaaaaagaagttaacattaaaaaaccagaagacaatgaaaatctggatgacaaagatgatgacacaactagggtagatgaatccctcaacataaaggtagaagctgaggaagaaaaagcaaaatctggagatgaaacgaataaagaagaagatgaagatgatgaagaagcagaagaggaggaggaggaggaagaagaagaagaggatgaagatgatgatgacaacaatgaggaagaggagtttgagtgctatccaccaggcatgaaagtccaagtgcggtatggacgagggaaaaatcaaaaaatgtatgaagctagtattaaagattctgatgtcgaaggtggagaggtcctttacttggtgcattactgcggatggaatgtgagatacgatgaatggattaaagcagataaaatagtaagacctgctgataaaaatgtgccaaagataaaacatcggaagaaaataaagaataaattagacaaagaaaaagacaaagatgaaaaatactctccaaaaaactgtaaacttcggcgcttgtccaaaccaccatttcagacaaatccatctcctgaaatggtatccaaactggatctcactgatgccaaaaactctgatactgctcatattaagtccatagaaattacttcgatccttaatggacttcaagcttctgaaagttctgctgaagacagtgagcaggaagatgagagaggtgctcaagacatggataataatggcaaagaggaatctaagattgatcatttgaccaacaacagaaatgatcttatttcaaaggaggaacagaacagttcatctttgctagaagaaaacaaagttcatgcagatttggtaatatccaaaccagtgtcaaaatctccagaaagattaaggaaagatatagaagtattatccgaagatactgattatgaagaagatgaagtcacaaaaaagagaaaggatgtcaagaaggacacaacagataaatcttcaaaaccacaaataaaacgtggtaaaagaaggtattgcaatacagaagagtgtctaaaaactggatcacctggcaaaaaggaagagaaggccaagaacaaagaatcactttgcatggaaaacagtagcaacagctcttcagatgaagatgaagaagaaacaaaagcaaagatgacaccaactaagaaatacaatggtttggaggaaaaaagaaaatctctacggacaactggtttctattcaggattttcagaagtggcagaaaaaaggattaaacttttaaataactctgatgaaagacttcaaaacagcagggccaaagatcgaaaagatgtctggtcaagtattcagggacagtggcctaaaaaaacgctgaaagagcttttttcagactctgatactgaggctgcagcttccccaccgcatcctgccccagaggagggggtggcagaggagtcactgcagactgtggctgaagaggagagttgttcacccagtgtagaactagaaaaaccacctccagtcaatgtcgatagtaaacccattgaagaaaaaacagtagaggtcaatgacagaaaagcagaatttccaagtagtggcagtaattcagtgctaaatacccctcctactacacctgaatcgccttcatcagtcactgtaacagaaggcagccggcagcagtcttctgtaacagtatcagaaccactggctccaaaccaagaagaggttcgaagtatcaagagtgaaactgatagcacaattgaggtggatagtgttgctggggagctccaagacctccagtctgaagggaatagctcgccagcaggttttgatgccagtgtgagctcaagcagtagtaatcagccagaaccagaacatcctgaaaaagcctgtacaggtcagaaaagagtgaaagatgctcagggaggaggaagttcatcaaaaaagcagaaaagaagccataaagcaacagtggtaaacaacaaaaagaagggaaaaggcacaaatagtagtgatagtgaagaactttcagctggtgaaagtataactaagagtcagccagtcaaatcagtttccactggaatgaagtctcatagtaccaaatctcccgcaaggacgcagtctccaggaaaatgtggaaagaatggtgataaggatcctgatctcaaggaacccagtaatcgattacccaaagtttacaaatggagttttcagatgtcggacctggaaaatatgacaagtgccgaacgcatcacaattcttcaagaaaaacttcaagaaatcagaaaacattatctgtcattaaaatctgaagtagcttccattgatcggaggagaaagcgtttaaagaagaaagagagagaaagtgctgctacatcctcatcctcctcttcaccttcatccagttccataacagctgctgttatgttaactttagctgaaccgtcaatgtccagcgcatcacaaaatggaatgtcagttgagtgcaggtgacagcaggacttgctaaagcactttgcacttaatggctgttgagggccactttttttttatactgcacagtggcacaaaaaaatatcagacaagcactattttatatttaaaaattgtttcttgacaagctgacttggcacttaagtgcacttttttatgaagaaaaagtacaatgaactgcttttcctcaagcaataattgtttccaacttgtctgggaattgtgtgtctggtaactggaaggccttccactgtggcaaatggaggcttttcactgcctgtagagacaatacagtaagcatagttaaggggtgggtcagaacatgttaagataacttactgtatatgtattcccttgtattttgttaaagctggaacatttgatatttttccatttatttatgaaaaaatatgaacctattttcatttgtacaaggtaattgttttttaaagcaagtcaccttagggtggctttaattgtataagtcaagcacatgtaataaattcaaaacctgcagttaacaggatattagacatcaatcctggtaaccaaatattaaagattctctttaaaaaagactgaacatgtttacaggtttgaattaggctaaaaggtcttgcagtggcttttcatggcccttcaaattggaatggaactactgtactttgccatttttctataaatcagtatttttttttaattttgatatacattgtgtgaaaaaagaaaatggctaataaactgtattaaatcttaaacaatgtataaagattgtacttagccagttcaaagtgtatatttattcataatgaattataacagttatatttttgtgttttcttgtaaatgtttcttttcccttaaatacagataattcatttgtattgcttattttattatgagctacaacaaaaggacttcaggaacaagtaatgtattagtatggttcaagattgttgataggaactgtctcaaaaggatggtggttattttaaatataaatagctaatgggggtggtaggcctataaaattaaatgccttgtataaaatccaaaatgaatgcaaaattgttttcacttgtattgactttatgttgtatgattccaatctctgttctgtttggcacttgtatttaattcttcacctttgtaagacatttgtatattgtggatgtgttcattcaagctatttaatatctggcactgttaatacacagtactttattgtacagactgttttactgttttaattgtagttctgtgtactttttttggatggggctggcatgttttctttgtttcctggcaatacgacgtgggaatttcaatgcgttttgttgtagatgctaacgtgtcagaatcctttacattcaacttttctaagaaaagcattttcagtcttgtagtgtgtgcttacagtaactaattttgttgaaaatggtttcaagttattcaaatttgtacaggactgtaaagatttgttgacagcaaaatgttgaagaaaaaagcttatagaataaaagctataaagtatatattaggatctgcaaacaatgaagaattatgtaatatattgtacaaatgtaagcaaaggctctgaaataaaatgccatagtttgtgaatccttaaaaaaaaaaaaaaaaaaaaaaaaaaaaaaaa

SEQ ID NO: 2112 - DNA, 1137 bp, Homo sapiens
ggtgccttatgcggtgattttaatgataggtgtcatatataggacggagtaatctgtttacattctgttcttctcgatgcactcacaagcgggtaactaggtgacaagaaaacaaagatcttattcaaaagaggtcttacagcaacccaacgtctcatcttcccatagtaaagatgacggcgccttgaggtaagctacaggcaacaccacttccgcgtttctcttgcgccctggtccaagatggcggatgaagccacgcgacgtgttgtgtctgagatcccggtgctgaagactaacgccggaccccgagatcgtgagttgtgggtgcagcgactgaaggaggaatatcagtcccttatccggtatgtggagaacaacaagaatgctgacaacgattggttccgactggagtccaacaaggaaggaactcggtggtttggaaaatgctggtatatccatgacctcctgaaatatgagtttgacatcgagtttgacattcctatcacatatcctactactgccccagaaattgcagttcctgagctggatggaaagacagcaaagatgtacaggggtggcaaaatatgcctgacggatcatttcaaacctttgtgggccaggaatgtgcccaaatttggactagctcatctcatggctctggggctgggtccatggctggcagtggaaatccctgatctgattcagaagggcgtcatccaccacaaagagaaatgcaaccaatgaagaatcaagccactgaggcagggcagagggacctttgataggctacgatactattttcctgtgcatcacacttaactcatctaactgcttccccggacaccctccacctctagttgttactaagtagctgcagtaggcattgctggggaagaaacaaacacacaccaaacagtactgctacttagtttctaaggctgcacagggaagggaaagactgggctttggacaatctagaggtaatttatatccgcccccaggtggagcaacatgcgattctggaggcacgggggtaactgaaagtgagtacatatagtctttctggtttctggagataacccatcaataaaagctgcttcctctggtaaaaaaaaaaaaaaaaaaaaaaaaaaaaaa

SEQ ID NO: 2113 - DNA, 1639 bp, Homo sapiens
gggatttcgcgggaaatcccggaagtgacagctttgggggtttgctgctggctctgactcccgtcctgcgatgggttgcgacgggggaacaatccccaagaggcatgaactggtgaaggggccgaagaaggttgagaaggtcgacaaagatgctgaattagtggcccaatggaactattgtactctaagtcaggaaatattaagacgaccaatagttgcctgtgaacttggcagactttataacaaagatgccgtcattgaatttctcttggacaaatctgcagaaaaggctcttgggaaggcagcatctcacattaaaagcattaagaatgtgacagagctgaagctttctgataatcctgcctgggaaggggataaaggaaacactaaaggtgacaagcacgatgacctccagcgggcgcgtttcatctgccccgttgtgggcctggagatgaacggccgacacaggttctgcttccttcggtgctgcggctgtgtgttttctgagcgagccttgaaagagataaaagcggaagtttgccacacgtgtggggctgccttccaggaggatgatgtcatcgtgctcaatggcaccaaggaggatgtggacgtgctgaagacaaggatggaggagagaaggctgagagcgaagctggaaaagaaaccaaagaaacccaaggcagcagagtctgcttcaaaaccagatgtcagtgaagaagccccagggccatcaaaagttaagacagggaagcctgaagaagccagccttgattctagagagaagaaaaccaacttggctcccaaaagcacagcaatgaatgagagctcttctggaaaagctgggaagcctccgtgtggagccacaaagaggtccatcgctgacagtgaagaatcggaggcctacaagtccctctttaccactcacagctccgccaagcgctccaaggaggagtctgcccactgggtcacccacacgtcctactgcttctgaagcccgcactgccaccgctcctgccccagaaggttgtttagtttccacgtaggcaggtcgctttgtgcctctgagtgcgctgctgtgtgttctctctatagttctgtgtcataaagctgtcctgggccagccttcaagctgggtgttggccactcttgatgtgaggcgtgtcggttccaggggggacatgggaggggctgcacagtggcccgaggtcatgcttgcttccacctgcaggtgcatttggtcctttccatggccaggaagccctgtgggctgcactttttatgcttgcagtaacaagagactccagagtcctcaccggtgcagagttggcacatattaattaactaaaattctaatgatcttgctaccagcaataaatcaagtaggccaagtgaaactgggctttaaaaaggatggatttcaaatacactgtgcccactagaagcttcgaagggcctcgtccctctgctacagccctgggaggagccaggatccttgttggtctagctaaatactgttaggggagtgtgccccatctcatcatttcgaagatagcagagtcatagttgggcacccagtgattgggttcaaaaataaagctggtctgcctctccaaaaaaaaaaaaaaaaaaaaaaaaaaaa

SEQ ID NO: 2114 - DNA, 3451 bp, Homo sapiens
  misc_feature (2141)..(2141): n is a, c, g, or t
tctggttcggcccacctctgaaggttccagaatcaatagtgaattcgtgggatttcggcctgagagcgggccgaggagattggcgacggtgtcgcccgtgttttcgttggcgggtgcctgggctggtgggaacagccgcccgaaggaagcaccatgatttcggccgcgcagttgttggatgagttaatgggccgggaccgaaacctagccccggacgagaagcgcagcaacgtgcggtgggaccacgagagcgtttgtaaatattatctctgtggtttttgtcctgcggaattgttcacaaatacacgttctgatcttggtccgtgtgaaaaaattcatgatgaaaatctacgaaaacagtatgagaagagctctcgtttcatgaaagttggctatgaaagagattttttgcgatacttacagagcttacttgcagaagtagaacgtaggatcagacgaggccatgctcgtttggcattatctcaaaaccagcagtcttctggggccgctggcccaacaggcaaaaatgaagaaaaaattcaggttctaacagacaaaattgatgtacttctgcaacagattgaagaattagggtctgaaggaaaagtagaagaagcccaggggatgatgaaattagttgagcaattaaaagaagagagagaactgctaaggtccacaacgtcgacaattgaaagctttgctgcacaagaaaaacaaatggaagtttgtgaagtatgtggagcctttttaatagtaggagatgcccagtcccgggtagatgaccatttgatgggaaaacaacacatgggctatgccaaaattaaagctactgtagaagaattaaaagaaaagttaaggaaaagaaccgaagaacctgatcgtgatgagcgtctaaaaaaggagaagcaagaaagagaagaaagagaaaaagaacgggagagagaaagggaagaaagagaaaggaaaagacgaagggaagaggaagaaagagaaaaagaaagggctcgtgacagagaaagaagaaagagaagtcgttcacgaagtagacactcaagccgaacatcagacagaagatgcagcaggtctcgggaccacaaaaggtcacgaagtagagaaagaaggcggagcagaagtagagatcgacgaagaagcagaagccatgatcgatcagaaagaaaacacagatctcgaagtcgggatcgaagaagatcaaaaagccgggatcgaaagtcatataagcacaggagcaaaagtcgggacagagaacaagatagaaaatccaaggagaaagaaaagaggggatctgatgataaaaaaagtagtgtgaagtccggtagtcgagaaaagcagagtgaagacacaaacactgaatcgaaggaaagtgatactaagaatgaggtcaatgggaccagtgaagacattaaatctgaaggtgacactcagtccaattaaaactgatctgataagacctcagatcagacagaggtaagtgtattgtttctcactttgattagggctttttgttactgtttgacagtgcagcgtaagtatgcacagatgaagatggaactaagccgagtaagaagacatacaaaagcctcttctgaaggaaaagacagtgtagtcctgcaaaacattttgaggtacattgttttgtctcagctattttgtagcagactcgtgcccccattagtgtgcctctttggaaattatcgcccacatttgtaatatagtcgccattgaaaagttaattatcctttttttagggattttgatgtcatttcttttttttttttaataaaaaggttgaactgtttttttttttctttttggtattaagtccatcttgtgttggtacattggcagagacatatgctttaaaaacttaaatatttcggaggcacatgttggactactttgttttaattaaactgctagtatttctttgtcaaggatgtttctagttttttgctttattgccttgcattctaatgcagtttgttctgtaactcgagagccagtagcattggattgatggaagtgtagggtttatgaattattgcagctgactaccatacctcacacagcgttggtgttgtgagcggcccatgaaaagccaaattaaaaatcaaggattcagncaaactaagcaggtactcatgccaggtactcctttctctacccacatccatgtttgaatgctattgcctgtgatctttacgcttaactgttgtgtatcttttttgttctttacaagaagtgcagaggggttttttgtgtattgcgtgaaaacttataaaacaaatgttaacagaatggaattttttttcaactgtatgtagggctgcagtggtggccagaattagatatctttaaagaattttaaatacaataaacacttcatattattcgccttgttacactcaatgcaattctcaagtctataagaggtatgtgcttaatatttcctactgtgtaggagaatttgcagtcagccataggtatgtaggaatagtcactcactggctgatacatttaaagcagcagtgtgaatagcaaggacagacaccttcaatttgtgaaatcaaagaactgatgcactatatagaacgaatttgggtttttaaagaaatattaaaagttaggtactgtaagtgttcttaaaacctgtaaacttcattctgtgggctagtggtgtgggacaaaatattcctaatgaaaggaagtaccaattagttgatttgttggtggcattccccttttgggaaagcaatgtaaggttatgtctgtgtatgtcattcacacttaggcaagcatacacaggcacatggctttaagaaccacactgatgccttgataattaaaaagaatacaagcattccatgtacacatgttaattagcagttagtgactgggccaacactttctcataaaaattggccttttacatgttgtctaattatcatttttccccaaattgggcgttgtaggactactgttcgaagatttttggaagaatactgagaacggcataaagtgaagatcgacatttaaaaaatgaggtgaaagaaagctatagtggcatagaaaaagtataaagctcagttagtttttttattattattattattaaaagttaattcaggactgatgtgacctaccagatttcagaacatgtgttaatagtatatatgccactgaaaacttaggtcctgtatcatacttttttctttaagactttttaagaaatattacttaaacatgtggcttgctcagtgtttaattgcaagttttcaatcttggactttgaaaacaggattaaacgttagtattcgtgtgaatcagactaagtgggatttcatttttacaactctgctctacttagcctttggatttagaagtaaaaataaagtatctctgactttctgttaaaaaaaaaaaaaaaaagctt

SEQ ID NO: 2115 - DNA, 875 bp, Homo sapiens
ggcctttccctcaggttttcctcttccccactgcggctccccagtcggcgcttgcgcggagaactcagcgctgagattgtctaaagccccaggaaaaatggtggaaaattcaccgtcgccattgccagaaagagcgatttatggctttgttcttttcttaagctcccaatttggcttcaaaaatctgaagggatctcgtgtttgctgagtgttccgtgtgccagcactagcctaggaggttttagtctctacaaatatttatacagcaccagacgcgatggcaaagtggataaagcctggtccctgcccttaaggaggtcgtggtcttgtggaggagacagatggtactttacctcgtgtgggcctttattcctgaatcttggctaaactctttaggtttaacctattggcctcaaaaatattgggcagttgcattacctgtctacctccttattgctgtagtaattggctacgtgctcttgtttgggattaacatgatgagtacctctccactcgactccatccatacaatcacagataactatgcaaaaaatcaacagcagaagaaataccaagaggaggccattcccgccttaagagatatttctattagtgaagtaaaccaaatgttctttcttgcagccaaagaactttacaccaaaaactgaactgtgtgtaaccatagtaacaccaagcacgtatttatttataagtttttgccattataattttgaccataaattaatttgaccatctctcttattaatagagaagtaaaaaatgtaagttgaccttctcttagattatgttcaatgaatattgtaaatgttcaagtattgttaatgaatagaataaatacaatattgcattcccat

SEQ ID NO: 2116 - DNA, 875 bp, Homo sapiens; identical to SEQ ID NO: 2115

SEQ ID NO: 2117 - DNA, 1449 bp, Homo sapiens
ccggagcctgcggcgggcggctgtgacggccccggcgctgacggcggcggccgggggggcggtgtcgacgcccgcggcgccggctggggcatcaccgcgggcctcgaccccgaaatggcgctgctggccgaacacttgctgaagccgctgcccgcggacaagcagatcgagaccgggcccttcctcgaggcggtgtcccacctgccgcccttcttcgattgccttgggtccccagtgtttactcccatcaaggcagacataagcggcaacatcacgaaaatcaaagctgtgtacgacaccaacccagccaagttccggaccctgcagaacatcctggaggtggagaaagaaatgtatggagcagagtggcccaaagtaggggccacactggcgctgatgtggctgaaaagaggcctccgcttcatccaggtcttcctccagagcatctgcgacggggagcgggacgagaaccaccccaacctcatccgtgtcaacgccaccaaggcctacgagatggccctcaagaagtaccatggctggatcgtgcagaagatcttccaggcagcactgtacgcagcaccctataagtctgacttcctgaaagcgctctccaaggggcagaatgttacggaggaggagtgcctggagaagatccgcctcttcctagtcaactacacggcgaccatcgatgtcatctacgagatgtacacccagatgaacgctgagcttaactacaaggtgtaggcatgcccactgctggacacgtccccgactcgtggccacatggagaaacaggcaaaccagaatcactgtgaatcaagtcggtgaactgcccctggcctgtgtcccccagagcagcccagggtcctgccagagtctgcaggggacagccctcgttttttaagtcttttttttttttttttttggtctattctaaaggaccagtaaataatgatcttacttccaaatctccttggaatttcacgacagcacagactgactttataccttcatttcagcgtggtaaaaaccgattaacacttctaatgagtcaagtcctagggttttttggttttgttttgttgccaacgaggaacacagctctgggggaatggtgtcatccacctcgctttaaaaataagcacatgatggctgggcaccgtggctcacgcctgtaatcccagcactttgggaggctgaggcgggtggatcacctgaggtcgggagtttgagaccagcctggccaacatggtgaaaccccatcgctactaaaaatataaaaaattagctgggcatggtggcgcacgcctgtagttccagctactcaggaggctgaggcaggagaatcgcttgaacccgggaggtggaggttgcagtgagctgagatcgcaccattgcactccagcctgggcaacaagagcgaaactctgtctcaaaaaaaaaaaaaaa

SEQ ID NO: 2118 - DNA, 5601 bp, Homo sapiens
ggcccggctgcgaggaggaggcggcggcggcgcaggaggatgtacttggtggcgggggacagggggttggccggctgcgggcacctcctggtctcgctgctggggctgctgctgctgctggcgcgctccggcacccgggcgctggtctgcctgccctgtgacgagtccaagtgcgaggagcccaggaactgcccggggagcatcgtgcagggcgtctgcggctgctgctacacgtgcgccagccagaggaacgagagctgcggcggcaccttcgggatttacggaacctgcgaccgggggctgcgttgtgtcatccgccccccgctcaatggcgactccctcaccgagtacgaagcgggcgtttgcgaagatgagaactggactgatgaccaactgcttggttttaaaccatgcaatgaaaaccttattgctggctgcaatataatcaatgggaaatgtgaatgtaacaccattcgaacctgcagcaatccctttgagtttccaagtcaggatatgtgcctttcagctttaaagagaattgaagaagagaagccagattgctccaaggcccgctgtgaagtccagttctctccacgttgtcctgaagattctgttctgatcgagggttatgctcctcctggggagtgctgtcccttacccagccgctgcgtgtgcaaccccgcaggctgtctgcgcaaagtctgccagccgggaaacctgaacatactagtgtcaaaagcctcagggaagccgggagagtgctgtgacctctatgagtgcaaaccagttttcggcgtggactgcaggactgtggaatgccctcctgttcagcagaccgcgtgtcccccggacagctatgaaactcaagtcagactaactgcagatggttgctgtactttgccaacaagatgcgagtgtctctctggcttatgtggtttccccgtgtgtgaggtgggatccactccccgcatagtctctcgtggcgatgggacacctggaaagtgctgtgatgtctttgaatgtgttaatgatacaaagccagcctgcgtatttaacaatgtggaatattatgatggagacatgtttcgaatggacaactgtcggttctgtcgatgccaagggggcgttgccatctgcttcactgcccagtgtggtgagataaactgcgagaggtactacgtgcccgaaggagagtgctgcccagtgtgtgaagatccagtgtatccttttaataatcccgctggctgctatgccaatggcctgatccttgcccacggagaccggtggcgggaagacgactgcacattctgccagtgcgtcaacggtgaacgccactgcgttgcgaccgtctgcggacagacctgcacaaaccctgtgaaagtgcctggggagtgttgccctgtgtgcgaagaaccaaccatcatcacagttgatccacctgcatgtggggagttatcaaactgcactctgacagggaaggactgcattaatggtttcaaacgcgatcacaatggttgtcggacctgtcagtgcataaacaccgaggaactatgttcagaacgtaaacaaggctgcaccttgaactgtcccttcggtttccttactgatgcccaaaactgtgagatctgtgagtgccgcccaaggcccaagaagtgcagacccataatctgtgacaagtattgtccacttggattgctgaagaataagcacggctgtgacatctgtcgctgtaagaaatgtccagagctctcatgcagtaagatctgccccttgggtttccagcaggacagtcacggctgtcttatctgcaagtgcagagaggcctctgcttcagctgggccacccatcctgtcgggcacttgtctcaccgtggatggtcatcatcataaaaatgaggagagctggcacgatgggtgccgggaatgctactgtctcaatggacgggaaatgtgtgccctgatcacctgcccggtgcctgcctgtggcaaccccaccattcaccctggacagtgctgcccatcatgtgcagatgactttgtggtgcagaagccagagctcagtactccctccatttgccacgcccctggaggagaatactttgtggaaggagaaacgtggaacattgactcctgtactcagtgcacctgccacagcggacgggtgctgtgtgagacagaggtgtgcccaccgctgctctgccagaacccctcacgcacccaggattcctgctgcccacagtgtacagatcaaccttttcggccttccttgtcccgcaataacagcgtacctaattactgcaaaaatgatgaaggggatatattcctggcagctgagtcctggaagcctgacgtttgtaccagctgcatctgcattgatagcgtaattagctgtttctctgagtcctgcccttctgtatcctgtgaaagacctgtcttgagaaaaggccagtgttgtccctactgcatagaagacacaattccaaagaaggtggtgtgccacttcagtgggaaggcctatgccgacgaggagcggtgggaccttgacagctgcacccactgctactgcctgcagggccagaccctctgctcgaccgtcagctgcccccctctgccctgtgttgagcccatcaacgtggaaggaagttgctgcccaatgtgtccagaaatgtatgtcccagaaccaaccaatatacccattgagaagacaaaccatcgaggagaggttgacctggaggttcccctgtggcccacgcctagtgaaaatgatatcgtccatctccctagagatatgggtcacctccaggtagattacagagataacaggctgcacccaagtgaagattcttcactggactccattgcctcagttgtggttcccataattatatgcctctctattataatagcattcctattcatcaatcagaagaaacagtggataccactgctttgctggtatcgaacaccaactaagccttcttccttaaataatcagctagtatctgtggactgcaagaaaggaaccagagtccaggtggacagttcccagagaatgctaagaattgcagaaccagatgcaagattcagtggcttctacagcatgcaaaaacagaaccatctacaggcagacaatttctaccaaacagtgtgaagaaaggcaactaggatgaggtttcaaaagacggaagacgactaaatctgctctaaaaagtaaactagaatttgtgcacttgcttagtggattgtattggattgtgacttgatgtacagcgctaagaccttactgggatgggctctgtctacagcaatgtgcagaacaagcattcccacttttcctcaagataactgaccaagtgttttcttagaaccaaagtttttaaagttgctaagatatatttgcctgtaagatagctgtagagatatttggggtggggacagtgagtttggatggggaaatgggtgggagggtggtgttgggaagaaaaattggtcagcttggctcggggagaaacctggtaacataaaagcagttcagtggcccagaggttatttttttcctattgctctgaagactgcactggttgctgcaaagctcaggcctgaatgagcaggaaacaaaaaaggccttgcgacccagctgccataaccaccttagaactaccagacgagcacatcagaaccctttgacagccatcccaggtctaaagccacaagtttcttttctatacagtcacaactgcagtaggcagtgaggaagccagagaaatgcgatagcggcatttctctaaagcgggttattaaggatatatacagttacactttttgctgcttttattttcttccaagccaatcaatcagccagttcctagcagagtcagcacatgaacaagatctaagtcatttcttgatgtgagcactggagcttttttttttttacaacgtgacaggaagaggagggagagggtgacgaacaccaggcatttccaggggctatatttcactgtttgttgttgctttgttctgttatattgttggttgttcatagtttttgttgaagctctagcttaagaagaaactttttttaaaaagactgtttggggattctttttccttattatatactgattctacaaaatagaaactacttcattttaattgtatattattcaagcacctttgttgaagctcaaaaaaaatgatgcctctttaaactttagcaattataggagtatttatgtaactatcttatgcttcaaaaaacaaaagtatttgtgtgcatgtgtatataatatatatatatacatatatatttatacacatacaatttatgttttcctgttgaatgtatttttatgagattttaaccagaacaaaggcagataaacaggcattccatagcagtgcttttgatcacttacaaattttttgaataacacaaaatctcattctacctgcagtttaattggaaagatgtgtgtgtgagagtatgtatgtgtgtgtgtgtgtgtgtgtgtgtgcgcgcgcacgcacgccttgagcagtcagcattgcacctgctatggagaagggtattcctttattaaaatcttcctcatttggatttgctttcagttggttttcaatttgctcactggccagagacattgatggcagttcttatctgcatcactaatcagctcctggattttttttttttttttttcaaacaatggtttgaaacaactactggaatattgtccacaataagctggaagtttgttgtagtatgcctcaaatataactgactgtatactatagtggtaacttttcaaacagcccttagcacttttatactaattaacccatttgtgcattgagttttcttttaaaaatgcttgttgtgaaagacacagatacccagtatgcttaacgtgaaaagaaaatgtgttctgttttgtaaaggaactttcaagtattgttgtaaatacttggacagaggttgctgaactttaaaaaaaattaatttattattataatgacctaatttattaatctgaagattaaccatttttttgtcttagaatatcaaaaagaaaaagaaaaaggtgttctagctgtttgcatcaaaggaaaaaaagatttattatcaaggggcaatatttttatcttttccaaaataaatttgttaatgatacattacaaaaatagattgacatcagcctgattagtataaattttgttggtaattaatccattcctggcataaaaagtctttatcaaaaaaaattgtagatgcttgctttttgttttttcaatcatggccatattatgaaaatactaacaggatataggacaaggtgtaaatttttttattattattttaaagatatgatttatcctgagtgctgtatctattactcttttactttggttcctgttgtgctcttgtaaaagaaaaatataatttcctgaagaataaaatagatatatggcacttggagtgcatcatagttctacagtttgtttttgttttcttcaaaaaagctgtaagagaattatctgcaacttgattcttggcaggaaataaacattttgagttgaaatcaaaaaaaaaaaaaaaaaa

SEQ ID NO: 2119 - DNA, 5327 bp, Homo sapiens
actttcggtcctgggggagctaggccggcggcagtggtggtggcggcggcgcaagggtgagggcggccccagaaccccaggtaggtagagcaagaagatggtgtttctgcccctcaaatggtcccttgcaatcatgtcatttctactttcctcactgttggctctcttaactgtgtccactccttcatggtgtcagagcactgaagcatctccaaaacgtagtgatgggacaccatttccttggaataaaatacgacttcctgagtacgtcatcccagttcattatgatctcttgatccatgcaaaccttaccacgctgaccttctggggaaccacgaaagtagaaatcacagccagtcagcccaccagcaccatcatcctgcatagtcaccacctgcagatatctagggccaccctcaggaagggagctggagagaggctatcggaagaacccctgcaggtcctggaacacccccctcaggagcaaattgcactgctggctcccgagcccctccttgtcgggctcccgtacacagttgtcattcactatgctggcaatctttcggagactttccacggattttacaaaagcacctacagaaccaaggaaggggaactgaggatactagcatcaacacaatttgaacccactgcagctagaatggcctttccctgctttgatgaacctgccttcaaagcaagtttctcaatcaaaattagaagagagccaaggcacctagccatctccaatatgccattggtgaaatctgtgactgttgctgaaggactcatagaagaccattttgatgtcactgtgaagatgagcacctatctggtggccttcatcatttcagattttgagtctgtcagcaagataaccaagagtggagtcaaggtttctgtttatgctgtgccagacaagataaatcaagcagattatgcactggatgctgcggtgactcttctagaattttatgaggattatttcagcataccgtatcccctacccaaacaagatcttgctgctattcccgactttcagtctggtgctatggaaaactggggactgacaacatatagagaatctgctctgttgtttgatgcagaaaagtcttctgcatcaagtaagcttggcatcacagtgactgtggcccatgaactggcccaccagtggtttgggaacctggtcactatggaatggtggaatgatctttggctaaatgaaggatttgccaaatttatggagtttgtgtctgtcagtgtgacccatcctgaactgaaagttggagattatttctttggcaaatgttttgacgcaatggaggtagatgctttaaattcctcacaccctgtgtctacacctgtggaaaatcctgctcagatccgggagatgtttgatgatgtttcttatgataagggagcttgtattctgaatatgctaagggagtatcttagcgctgacgcatttaaaagtggtattgtacagtatctccagaagcatagctataaaaatacaaaaaacgaggacctgtgggatagtatggcaagtatttgccctacagatggtgtaaaagggatggatggcttttgctctagaagtcaacattcatcttcatcctcacattggcatcaggaaggggtggatgtgaaaaccatgatgaacacttggacactgcagaggggttttcccctaataaccatcacagtgagggggaggaatgtacacatgaagcaagagcactacatgaagggctctgacggcgccccggacactgggtacctgtggcatgttccattgacattcatcaccagcaaatccaacatggtccatcgatttttgctaaaaacaaaaacagatgtgctcatcctcccagaagaggtggaatggatcaaatttaatgtgggcatgaatggctattacattgtgcattacgaggatgatggatgggactctttgactggccttttaaaaggaacacacacagcagtcagcagtaatgatcgggcaagtctcattaacaatgcatttcagctcgtcagcattgggaagctgtccattgaaaaggccttggatttatccctgtacttgaaacatgaaactgaaattatgcccgtgtttcaaggtttgaatgagctgattcctatgtataagttaatggagaaaagagatatgaatgaagtggaaactcaattcaaggccttcctcatcaggctgctaagggacctcattgataagcagacatggacagacgagggctcagtctcagagcaaatgctgcggagtgaactactactcctcgcctgtgtgcacaactatcagccgtgcgtacagagggcagaaggctatttcagaaagtggaaggaatccaatggaaacttgagcctgcctgtcgacgtgaccttggcagtgtttgctgtgggggcccagagcacagaaggctgggattttctttatagtaaatatcagttttctttgtccagtactgagaaaagccaaattgaatttgccctctgcagaacccaaaataaggaaaagcttcaatggctactagatgaaagctttaagggagataaaataaaaactcaggagtttccacaaattcttacactcattggcaggaacccagtaggatacccactggcctggcaatttctgaggaaaaactggaacaaacttgtacaaaagtttgaacttggctcatcttccatagcccacatggtaatgggtacaacaaatcaattctccacaagaacacggcttgaagaggtaaaaggattcttcagctctttgaaagaaaatggttctcagctccgttgtgtccaacagacaattgaaaccattgaagaaaacatcggttggatggataagaattttgataaaatcagagtgtggctgcaaagtgaaaagcttgaacatgatcctgaagctgacgcaacaggatgaaaatccatcagaatctcagactacagcactaaatatgctttgatgctacatcaaacggaatggaagcatagctgacttcgctaaagttacttcatctccatctagcaaatgaggcactgttctcaaccaaaggagatggggatctggtttagggcaatccctttataatttgatgtgctgtggtctccttggtaatgtataatttggtattgcacaggtgattagtcaaggaagtctggaaaagctttggtcccacagccttgcctcacagcatgtaaataattaaaacaatattgatgctgaggttcttctactgctagtatgaaagtgacaaatttttactggtgtgaattgggaagaaaacaatgctattccatgacgtttgtaaaatgtttgtaaaagctcaaacatgacgattccataaaataaacttgaggttaaataatgggtagtaaattatagaatgtataagaaaaaatataaaggagaaaatcaattatcaggaaagctaaagaacttttcaaatctagtaatttgaatatagacacaatgcactttattgcactttcaattcttataaagcaacaataatattaaggtccttgactatgtgtacaatgttttcacatatatagtttcatttaatcatttcaaagttaatctctgccatctcgctaaatcatcagtctcggctcttctgaaatagaaggtgcctgatcttcctaataattctgcctattttcatttgctttaaacaggcgccctattttctttctagttgtggctgcgcaaaaacatttatctcccaaataagatgtgctgcttaccgaggtatcacggggtggggctccagcttgggtcgttgaagctggggtttgggaaaccacttcagagatggcagcagcaagtttagcatcttcaaatttcttttattgaaaaaaattttattagtaacatgttgtatataaaattatgagcacaatgccatcacttaactataactcttaaagatagcttaatgactgtttattctcttgaccaaatagactcataataacatataattttaaaagaaatttaaattctttcttctctattgtattattttatacaatttgctatttctatttccttctcatattgattattctaaatactatgcaataatataacttagagttccacggtttgtttacacatttcctgttgtacatttaggttattcaaagttttcagctcttttaaaattgctctgaataagttctagtgagtgagttatggtgctggctatattttgctaaactgccctctcaaatgttgctaggaattcatactgcgaaaagcaatgaataagcatgcctgttttcccatggccttgcttgccagaatttgacttttattatgataatcagtgtaaaatgatatactactattgcttgtatattgtggtatacggtgtcaggtttcagggttttttttcaacgttaaatattctagaaactttctgaaataatttctgtttaaaaatattgaatatttgcttcatttcaaatactcccttttgacaaaaaaacttaggtataactgttgatgaaaaaccagaaaaaagtccagaactctttggtgactccaactatggatagcttattttgaaaaaggagaattgcaaattttaccaaaagatggagaaaagcacattaaaaagataccaacattcagaaattcatttcagcatgttattattggaaattatttaaactaatttagataactataagatacttattgtccatttataccctgtaaagccgttttagaatgtaatattttaggtaatccaaaatgtactaaattaaattcatttttagttatgagaaatctttgcttatatgacaaatgaaaagaataacaagttgtcaaatgaaaagaatgacattgaaacatttgtattgtctcttcttaaactatcttattgacttattatttaagccttttaatactaagtatgaaacaacctatggtctggaaatttgtatcgcaaagctatatgtgcatatgttatttaattcatctaacgctacacaaaagcataaaataatgatttttcactctctttaaaaatactaaatcatttatgtccatttctcaattttttcattgatctatgctttgagtttgctttctcaacattattgtattttccacttattattactgtataacatatgctagtgtttagttggattaatcttacctaaaagtactgaaaaatgctttttagtactttttcatattttatacatttattttccgaatgtatcattgaataattttattgagttataaaagtatcttattgctatttaataaaaaattaacacat

SEQ ID NO: 2120 - DNA, 2674 bp, Homo sapiens
  misc_feature (514)..(514): n is a, c, g, or t
  misc_feature (568)..(568): n is a, c, g, or t
  misc_feature (654)..(654): n is a, c, g, or t
  misc_feature (656)..(656): n is a, c, g, or t
  misc_feature (744)..(744): n is a, c, g, or t
gggactggccagccagaggaagagggcatgaggacacagccagcagcagttactgggtcgtgatgacgcagacctgccgggacacccccgtgggctcgaggcattggatgggcctgagagctgaagcaggggcacttgcaggaatggcacttgaagccacctgcctggctttacagggcagcctcctggaagcctccatgaaacgcagctttccctgggccacacactgcctggctccacaaaggcgaacaacacagcctgctttgccccggatattcctggttttggcattaaatgtccacagcctgagaaatccttcagtctcgggcaaatgggacgtttggtgaccctaccaccatgtatctttgattttagactcccctgaccaatgggagggctgcaagcactggctgggcctggcggaggtggtctttggtcatctctgtggtggctgaagtcccattagcctggcagggccccctctcttaccaccagaaatggatcctttcccaangctgctccccatcacaagcccttcctttcatcccattcctgccggttcagcganccggagtcgcccaggcctgaactcctacccaggtccccggcccccgccccggcccgcgagacaccggagccaccccccggggtggngnagcggagcgcggcctagactcaagtctgggtttcagctgccgccagccctattgctgctgttgctgttctctgtccttggcccagggnatggaggccttttcctgactgattactccacctgctcaccccgcaagctgagtcctttccgctcctttgccagcaccgagctcttccacttccatgttcctgaggacacattcctggctgtttggaacctcatcatcttcaaggagcaagggggaacttttggggaccactgcccagaccaaagtgtgactgtgtatttccggtccggggcaccccctgtcatcaatcccctgcatacacacttcccaggggacacagctgtgcctggggttttctcactgaccctcagctggacactgcccaaccgcacctcaggcatctttaacgtcagcagccccttacctggggactggttcttggctgcccaccttccccaggcccacggccacatctctgtcaagggtctccaggatgagtgtcagtacctccttcagccgcagctgattgtccggcgtttgctggacgtcgctgtgctggttcctggccggccctcagagcaaaccctctccccacacaatcgctcagccctgtacaaggtctttgtgcccagcttcacttacagggtttcagcacagctggtgtgtgtggggggccgtggggtatctgcctgccccctgtcactgcgtctgcgtcccaaagccccacccctgcacaactcaagctctgtggcctgtggaggtgcctcaggatgccagctggagctggcactgcccccctgggggcactgggtctacgtgcgtgtggaaacatcatcccggggccctggtaggaccatccgcttccagctgtgtgtgcagttgcaagagtgcccacagcccggcctgctccgagccctggtccctggagctgccatgaacatgccccagtccctgggcaaccagccactgcccccagaaccgccatcccttggaacccctgcggaggggcctgggaccacgtccccacccgagcactgctggccagtgcgcccgactctgcgcaacgagctggacaccttctctgtccacttctacatcttctttggcccaagtgtggcccttccccctgagcgcccagccgtgttcgccatgaggctgttgccagtgctggacagtggaggcgtcctcagcctggagctccagctcaatgcgagctccgtgcgccaggaaaacgtgacggtgtttggatgcttgactcacgaggtgcccttgagcctgggggatgcagcagtgacctgttccaaagagtccctggccggcttcctcctctctgtcagtgccaccaccagggttgccaggctgcgaatcccattcccgcagacggggacctggttcctggccctccgctccctgtgcggggtggggcctcggttcgtgcggtgccgcaacgcgacggccgaggtgcggatgcgcaccttcctgtccccatgcgtggacgactgcgggccctacggccagtgcaagctgctgcgcacacacaattatctgtacgcagcctgcgagtgcaaggccgggtggagaggctggggctgcaccgacagtgcagatgcgctcacctatggattccagctgctgtccacactcctgctctgcctgagcaacctcatgtttctgccacctgtggtcctggccattcggagtcgatatgtgctggaagctgcagtctacaccttcaccatgttcttctccacggtatgcggtggtgtctgcatcttatcactgggtgcttgtgcatggtggtgggtcacagtctgtatttccaccacgttctccgagggtttgggaatgtctgtgccttcactgtgtcttctacagacagagacagcagtgcttcccaaactgtcatgcatagataatggtcatttttgtaagacacattggagtaaatgaacaaaactgtttgcaacttaataaagtaagtttgggcctccaaaaaaaaaaaaaaaaaaaaa

SEQ ID NO: 2121 - DNA, 3330 bp, Homo sapiens
gccgctgctgcggttcatatccggagtagacggagccgcagtagacggatccgcggctgcaccaaaccactgcccctcggagcctggtagtgggccacaagcccccagtcccagaggcgtgattttctggcatccttaaatcttgtgtcaaggattggttataatataaccagaaaccatgacggcggctgagaacgtatgctacacgttaattaacgtgccaatggattcagaaccaccatctgaaattagcttaaaaaatgatctagaaaaaggagatgtaaagtcaaagactgaagctttgaagaaagtaatcattatgattctgaatggtgaaaaacttcctggacttctgatgaccatcattcgttttgtgctacctcttcaggatcacactatcaagaaattacttctggtattttgggaaattgttcctaaaacaactccagatgggagacttttacatgagatgatccttgtatgtgatgcatacagaaaggatcttcaacatcctaatgaatttattcgaggatctactcttcgttttctttgcaaattgaaagaagcagaattgctagaacctttaatgccagctattcgtgcatgtttggagcatcgacacagctatgttagaagaaatgctgttttggccatctataccatctatagaaattttgaacatcttatacctgatgctcctgaactgatacatgattttctggtgaatgagaaggatgcaagttgcaaaaggaatgcatttatgatgctaattcatgcagatcaggatcgagctttggattacttaagtacttgcattgatcaagttcaaacatttggagacattctgcagctggttattgttgaactgatttataaggtctgtcatgctaatccatcagaaagagctcgttttattcgctgcatctataacttattacagtcatccagccctgctgtaaaatatgaagctgctgggacattagtgacactctctagtgcaccaactgcaatcaaggctgctgctcagtgttacattgatttaattattaaggagagcgacaacaatgtaaaactcatagttttggatcgcttgatagaattaaaagagcatcctgctcatgaacgagtactacaggatctggttatggatatcctaagagtattgagcacaccagacttagaagtacgaaagaaaactctgcagttagcactggatcttgtctcttctagaaatgttgaagagctggttattgtcctgaagaaggaagtgataaaaacaaataatgtgtctgagcatgaagatactgacaaatacagacaactcctagtgcgaacattgcattcctgttctgtccgatttccagatatggctgcaaatgttattcctgtgttaatggaatttctcagtgacaacaacgaagcagcagctgctgatgtcttggagtttgttcgtgaagccattcagcgctttgataacctgagaatgcttattgttgagaagatgcttgaagtctttcatgctattaaatctgtcaagatttaccgaggagcattatggatcctgggagaatactgtagtaccaaggaagacattcagagtgtgatgactgagatccgcaggtcccttggagagatcccaattgtagagtcagaaataaagaaagaagctggtgaattaaaacctgaagaagaaataactgtagggccagttcagaaattggttactgaaatgggtacctatgcaactcagagtgcccttagcagttctagacccaccaagaaagaggaagacagacctcccttgagaggattccttctggatggagatttctttgttgctgcctcccttgccacaactctgaccaagattgcattgcgctatgtagctttggttcaggagaagaaaaagcaaaattcttttgttgctgaggctatgttgctcatggctactatcctgcatttgggaaaatcctctcttcctaagaagccaattactgatgatgatgtggatcgaatttccctgtgcctcaaggtcttgtctgaatgttcacctttaatgaatgacattttcaataaggaatgcagacagtccctttctcacatgttatctgctaaactagaagaagagaaattatcccaaaagaaagaatctgaaaagaggaatgtgacagtacagcctgatgaccccatttccttcatgcaactaactgctaagaatgaaatgaactgcaaggaagatcagtttcagctgagtttactggcagcaatgggtaacacacagaggaaagaggcagcagatcccctagcatctaaacttaacaaggtcacccaattgacaggtttctcagatcctgtatatgcagaagcttacgttcatgtcaaccaatatgatattgtcctggatgtacttgttgtgaaccaaaccagtgatactttgcagaattgcacattagaactagctacactaggggatctgaaacttgtggaaaagccgtctcctttgactcttgctcctcatgacttcgcaaatattaaagctaacgtcaaagtagcatcaacagaaaatggaataatttttggtaatatagtttatgatgtctctggagcagcaagtgacagaaattgtgtggttctcagtgatattcacatcgacatcatggactatatccagcctgcaacttgcactgatgcagaattccgtcagatgtgggccgaatttgaatgggaaaacaaagtgacagttaacaccaacatggttgatttaaatgactacttacagcacatattaaagtcaaccaatatgaaatgcctgactccagaaaaggccctttctggttactgtggctttatggcagccaacctttatgctcgttccatatttggtgaagatgcacttgcaaatgtcagcattgagaagccaattcaccagggaccagatgctgctgttaccggccatataagaattcgtgcaaagagccagggaatggccttaagtcttggagataaaatcaacttgtcacagaagaaaactagtatataaaaataaacaaaaagtccttgaagctttacagttaatttaggtatgggcttactggactccaacatcttttgtactctttcatgcttatatagaatctgagttcatgctgaatacttttcagccaataatttatagcctttcccttaaatcaagattgagtttaaaattatagtttgtcttttgtcttaacagttctgaatgctgtcctcaaagtatataatgtttcatgtaccaagacccttttcacagtacaataaacagatctattcataaaaaaaaaaaaaaaaaaa

SEQ ID NO: 2122 - DNA, 552 bp, Homo sapiens
atgacggcccaggggggcctggtggctaaccgaggccggcgcttcaagtgggccattgagctaagcgggcctggaggaggcagcaggggtcgaagtgaccggggcagtggccagggagactcgctctacccagtcggttacttggacaagcaagtgcctgataccagcgtgcaagagacagaccggatcctggtggagaagcgctgctgggacatcgccttgggtcccctcaaacagattcccatgaatctcttcatcatgtacatggcaggcaatactatctccatcttccctactatgatggtgtgtatgatggcctggcgacccattcaggcacttatggccatttcagccactttcaagatgttagaaagttcaagccagaagtttcttcagggtttggtctatctcattgggaacctgatgggtttggcattggctgtttacaagtgccagtccatgggactgttacctacacatgcatcggattggttagccttcattgagccccctgagagaatggagttcagtggtggaggactgcttttgtga

SEQ ID NO: 2123 - DNA, 552 bp, Homo sapiens
atgaagctcttatctttggtggctgtggtcgggtgtttgctggtgcccccagctgaagccaacaagagttctgaagatatccggtgcaaatgcatctgtccaccttatagaaacatcagtgggcacatttacaaccagaatgtatcccagaaggactgcaactgcctgcacgtggtggagcccatgccagtgcctggccatgacgtggaggcctactgcctgctgtgcgagtgcaggtacgaggagcgcagcaccaccaccatcaaggtcatcattgtcatctacctgtccgtggtgggtgccctgttgctctacatggccttcctgatgctggtggaccctctgatccgaaagccggatgcatatactgagcaactgcacaatgaggaggagaatgaggatgctcgctctatggcagcagctgctgcatccctcgggggaccccgagcaaacacagtcctggagcgtgtggaaggtgcccagcagcggtggaagctgcaggtgcaggagcagcggaagacagtcttcgatcggcacaagatgctcagctag

SEQ ID NO: 2124 - DNA, 2900 bp, Homo sapiens
ccgggtgggctccaggcggccggtccccggcctccccccatggccaccgccccctcttatcccgccgggctccctggctctcccgggccggggtctcctccgccccccggcggcctagagctgcagtcgccgccaccgctactgccccagatcccggccccgggttccggggtctcctttcacatccagatcgggctgacccgcgagttcgtgctgttgcccgccgcctccgagctggctcatgtgaagcagctggcctgttccatcgtggaccagaagttccctgagtgtggcttctacggcctttacgacaagatcctgcttttcaaacatgaccccacgtcggccaacctcctgcagctggtgcgctcgtccggagacatccaggagggcgacctggtggaggtggtgctgtcggcctcggccaccttcgaggacttccagatccgcccgcacgccctcacggtgcactcctatcgggcgcctgccttctgtgatcactgcggggagatgctcttcggcctagtgcgccagggcctcaagtgcgatggctgcgggctgaactaccacaagcgctgtgccttcagcatccccaacaactgtagtggggcccgcaaacggcgcctgtcatccacgtctctggccagtggccactcggtgcgcctcggcacctccgagtccctgccctgcacggctgaagagctgagccgtagcaccaccgaactcctgcctcgccgtcccccgtcatcctcttcctcctcttctgcctcatcgtatacgggccgccccattgagctggacaagatgctgctctccaaggtcaaggtgccgcacaccttcctcatccacagctatacacggcccaccgtttgccaggcttgcaagaaactcctcaagggcctcttccggcagggcctgcaatgcaaagactgcaagtttaactgtcacaaacgctgcgccacccgcgtccctaatgactgcctgggggaggcccttatcaatggagatgtgccgatggaggaggccaccgatttcagcgaggctgacaagagcgccctcatggatgagtcagaggactccggtgtcatccctggctcccactcagagaatgcgctccacgccagtgaggaggaggaaggcgagggaggcaaggcccagagctccctggggtacatccccctaatgagggtggtgcaatcggtgcgacacacgacgcggaaatccagcaccacgctgcgggagggttgggtggttcattacagcaacaaggacacgctgagaaagcggcactattggcgcctggactgcaagtgtatcacgctcttccagaacaacacgaccaacagatactataaggaaattccgctgtcagaaatcctcacggtggagtccgcccagaacttcagccttgtgccgccgggcaccaacccacactgctttgagatcgtcactgccaatgccacctacttcgtgggcgagatgcctggcgggactccgggtgggccaagtgggcagggggctgaggccgcccggggctgggagacagccatccgccaggccctgatgcccgtcatccttcaggacgcacccagcgccccaggccacgcgccccacagacaagcttctctgagcatctctgtgtccaacagtcagatccaagagaatgtggacattgccactgtctaccagatcttccctgacgaagtgctgggctcagggcagtttggagtggtctatggagggaaacaccggaagacaggccgggacgtggcagttaaggtcattgacaaactgcgcttccctaccaagcaggagagccagctccggaatgaagtggccattctgcagagcctgcggcatcccgggatcgtgaacctggagtgcatgttcgagacgcctgagaaagtgtttgtggtgatggagaagctgcatggggacatgttggagatgatcctgtccagtgagaagggccggctgcctgagcgcctcaccaagttcctcatcacccagatcctggtggctttgagacaccttcacttcaagaacattgtccactgtgacttgaaaccagaaaacgtgttgctggcatcagcagacccatttcctcaggtgaagctgtgtgactttggctttgctcgcatcatcggcgagaagtcgttccgccgctcagtggtgggcacgccggcctacctggcacccgaggtgctgctcaaccagggctacaaccgctcgctggacatgtggtcagtgggcgtgatcatgtacgtcagcctcagcggcaccttccctttcaacgaggatgaggacatcaatgaccagatccagaacgccgccttcatgtacccggccagcccctggagccacatctcagctggagccattgacctcatcaacaacctgctgcaggtgaagatgcgcaaacgctacagcgtggacaaatctctcagccacccctggttacaggagtaccagacgtggctggacctccgagagctggaggggaagatgggagagcgatacatcacgcatgagagtgacgacgcgcgctgggagcagtttgcagcagagcatccgctgcctgggtctgggctgcccacggacagggatctcggtggggcctgtccaccacaggaccacgacatgcaggggctggcggagcgcatcagtgttctctgaggtcctgtgccctcgtccagctgctgccctccacagcggttcttcacaggatcccagcaatgaactgttctagggaaagtggcttcctgcccaaactggatgggacacgtggggagtggggtggggggagctatttccaaggcccctccctgtttccccagcaattaaaacggactcatctctggccccatggccttgatctcaaaaaaaaaaaaaaaaaaaaa

SEQ ID NO: 2125 - DNA, 339 bp, Homo sapiens
atgcaggacactggctcagtagtgcctttgcattggtttggctttggctacgcagcactggttgcttctggtgggatcattggctatgtaaaagcaggcagcgtgccgtccctggctgcagggctgctctttggcagtctagccggcctgggtgcttaccagctgtctcaggatccaaggaacgtttgggttttcctagctacatctggtaccttggctggcattatgggaatgaggttctaccactctggaaaattcatgcctgcaggtttaattgcaggtgccagtttgctgatggtcgccaaagttggagttagtatgttcaacagaccccattag

SEQ ID NO: 2126 - DNA, 1108 bp, Homo sapiens
agcagtggcccaaagaggagcagcagacaagagtgcagtggtggctgccgccgcaccagcctcagtggcagatgacacaccaccccccgagcgtcggaacaagagcggtatcatcagtgagcccctcaacaagagcctgcgccgctcccgcccgctctcccactactcttcttttggcagcagtggtggtagtggcggtggcagcatgatgggcggagagtctgcttgacaaggccactgcggctgcagcctggccttccctgttggccaatgggatgacctggcggcggccatggcggtggacaaaagcaaccctacctcaaagcacaaaagtggtgctgtggccagcctgctgagcaaggcagagcgggccacggagctggcagccgagggacagctgacgctgcagcagtttgcgcagtccacagagatgctgaagcgcgtggtgcaggagcatctcccgctgatgagcgaggcgggtgctggcctgcctgacatggaggctgtggcaggtgccgaagccctcaatggccagtccgacttcccctacctgggcgctttccccatcaacccaggcctcttcattatgaccccggcaggtgtgttcctggccgagagcgcgctgcacatggcgggcctggctgagtaccccatgcagggagagctgcctctgccatcagctccggcaagaagaagcggaaacgctgcggcattgtgcgcgccctgccggcggcgcatcaactgcgagcagtgcagcagttgtaggaatcgaaagactggccatcagatttgcaaattcagaaaatgtgaggaactcaaaaagaagccttccgctgctctggagaaggtgatgcttccgacgggagccgccttccggtggtttcagtgacggcggcggaacccaaagctgccctctccgtgcaatgtcactgctcgtgtggtctccagcaagggattcgggcgaagacaaacggatgcacccgtctttagaaccaaaaatattctctcacagatttcattcctgtttttatatatatattttttgttgtcgttttaacatctccacgtccctagcataaaaaaaaaaaaaaaaaaaaaaaaaaaaaaa

SEQ ID NO: 2127 - DNA, 462 bp, Homo sapiens
atgaacgttggagttgcccacagtgaagtgaatccaaatacccgtgtcatgaacagccggggtatgtggctgacatatgcattgggagttggcttgcttcatattgtcttactcagcattcccttcttcagtgttcctgttgcttggactttaacaaatattatacataatctggggatgtacgtatttttgcatgcagtgaaaggaacacctttcgaaactcctgaccagggtaaagcaaggctcctaactcattgggaacaactggactatggagtacagtttacatcttcacggaagtttttcacaatttctccaataattctatattttctggcaagtttctatacgaagtatgatccaactcacttcatcctaaacacagcttctctcctgagtgtactaattcccaaaatgccacaactacatggtgttcggatctttggaattaataagtattga

SEQ ID NO: 2128 - DNA, 879 bp, Homo sapiens
atgaaatccgaagccaaggatggagaggaggagagtctacagactgctttcaaaaaattaagagtggatgcatcagggtctgtagcatctctgtctgttggagaaggcacaggtgtcagagcaccagtcagaacagcaacagatgataccaaacctaaaaccacatgtgcatctaaagacagttggcacgggtctacaaggaagtcttcacgaggagcagtgagaactcagcgtcgtcgacgttctaagtctcctgtccttcatcctccaaagtttatacattgcagtacaatagcgtcttcttccagcagtcaactcaagcacaaaagccagactgactcacctgatggcagcagtgggctgggaatttcatcccctaaagagttcagtgcaggagaaagctctacttctctcgatgctaatcacacaggggcagtcgttgagcctttgagaacttctgttccaaggctcccatcagagagtaagaaggaagactcctctgacgctacccaagtcccccaagcaagtctcaaagccagtgatctctctgactttcaatcagtttccaagctaaaccagggcaagccatgcacatgcataggcaaggaatgccagtgtaagagatggcatgatatggaagtgtattccttttcaggcctgcagagtgtccctcccttggctccagaacgaagatccacacttgaggactactctcagtcgctgcacgccagaactctgtctggctctccccgatcctgttctgagcaagctcgagtcttcgtggatgatgtgaccattgaggacctgtcaggctacatggagtattacttgtatattcccaagaaaatgtcccacatggcagaaatgatgtacacctga

SEQ ID NO: 2129 - DNA, 468 bp, Homo sapiens
atggaaacagactgtaatcccatggagctaagcagtatgtcaggatttgaagaaggttcagagctgaacggttttgaaggaactgacatgaaagacatgaggctcgaagctgaagcagttgtaaatgatgttctctttgctgttaacaacatgtttgtctcgaaaagcctgcggtgtgcggatgatgtggcctatatcaatgtggaaacaaaggaaagaaacagatattgcctagaactcactgaagcagggctcaaggtggtaggctatgcttttgaccaggtagatgatcatttacagactccctaccatgaaacagtctactccttgttggatacactcagccccgcctaccgagaagcatttggaaacgcactgcttcaaagactggaaagctttgaaaagagatggacagtcatgactacactttttcctttcagaggggctggtgctggtacagaatgttga

SEQ ID NO: 2130 - DNA, 513 bp, Homo sapiens
atgccgcctcagccaggatgccagcagcaacctacccaatgcagtacccaccaccttaaccagcccagcccatgggcccaccggcttacaacgagaccctggcttgaggagcagccgcgccctaccccgccagccagcctccttacaacccggcctacatggatgccccgaagcggccctctgagcattccctggcctctctggctgccacttggttatgttgtgtgtgtgcgtgagtggtgtgcaggcgcggttccttacgccccatgtgtgctgtgtgtgtcctgcctgtatatgtggcttcctctgatgctgacaaggtggggaacaatccttgccagagtgggctgggaccagactttgttctcttcctcacctgaaattatgcttcctaaaatctcaagccaaactcaaagaatggggtggtggggggcaccctgtgaggtggccctgagaaggtgggggcctctccagggcacatctggagttcttctccagcttaccctagggtga

SEQ ID NO: 2131 - DNA, 1514 bp, Homo sapiens
ggggggactggagaagggaggcggcgggcgaagcgcacgtcgagcgggggagcggcgctgcctgtggagatccgcggaggccgacaggattcgttggctgccgtccccgctgctgtgcattgggttaaaaacgacaaccaacatcagccatgaaagatccaagtcgcagcagtactagcccaagcatcatcaatgaagatgtgattattaacggtcattctcatgaagatgacaatccatttgcagagtacatgtggatggaaaatgaagaagaattcaacagacaaatagaagaggagttatgggaagaagaatttattgaacgctgtttccaagaaatgctggaagaggaagaagagcatgaatggtttattccagctcgagatctcccacaaactatggaccaaatccaagaccagtttaatgaccttgttatcagtgaaggctcttctctggaagatcttgtggtcaagagcaatctgaatccaaatgcaaaggagtttgttcctggggtgaagtacggaaatatttgagtagacggggccctcttttggtggatgtagcacaatttccacactgtgaaggcagtattagaagacttaattgtaaaagcactcttgtcactgtgttacacttatgcattgccaaagtttttgttagtcttgcatgcttaataaaagtgctgagactgttactaagtaaaaagctgtcaaacatttactgaaaatagaattggccccatggcttgatgtgaagacagcaaggaaagaagcaccagtcaagttgtgaacaagcaccaaattaaaagacctaaaccttaccaaattgtctttttttgaggctaatctatcacttgttaatgtctaaactttaaaatcagtacatttaatttgagttccaactgttaagcatatttctcagacttaaatttgattatgtccccatcaaaaagaatctccattttctgaaggtctgttagttaatttgagataatttgttaaaggcaagtatgtcatattactgaggctacaagttagtcagcagatgagtgccagtccagccttttccggtatgttattgttagaaatattgagttctaatgttacatctgaggaagtatgtaatttgagaattgtaacttctaagggattcactgcatcatagctatgcctgtatggagtctaacatatgaccaataccaacccataatccagctgaacaaagatactgtaacattatgatttgagtggtgcttttccttgctttgttaaccatcacgagagtctgcagcacaacttttaacaaagctagaacagttttggcttcttaaacttcatatttgggtaggttaagctgccatacgtgttcagtgtgaatagtgtttaagttgaaaatattgtaaaaaaattatattttttcaaaaatatttaaaaaaataaataatagtagaactgaaaaaaaaaaaaaaaaaaaaaaaaaaaaaaaaaaaaaaaagaaaaaaaaaaaaaaaaaaa

SEQ ID NO: 2132 - DNA, 1919 bp, Homo sapiens
gagtaggaagtggtgagttcggagtagagatggccgcgcttgcaccgctgcccccgctccccgcacagttcaagagcatacagcatcatctgaggacggctcaggagcatgacaagcgagaccctgtggtggcttattactgtcgtttatacgcaatgcagactggaatgaagatcgatagtaaaactcctgaatgtcgcaaatttttatcaaagttaatggatcagttagaagctctaaagaagcagttgggtgataatgaagctattactcaagaaatagtgggctgtgcccatttggagaattatgctttgaaaatgtttttgtatgcagacaatgaagatcgtgctggacgatttcacaaaaacatgatcaagtccttctatactgcaagtcttttgatagatgtcataacagtattggagaactcactgatgaaatgtgaacacaggaagtatgccagatggaaggcaacatacatccataatgttaagaatggggagactcctcaagcaggccctgttggaattgaagaagataatgatattgaagaaaatgaagatgctggagcagcctctctgcccactcagccaactcagccatcatcatcttcaacttatgacccaagcaacatgccatcaggcaactatactggaatacagattcctccgggtgcacacgctccagctaatacaccagcagaagtgcctcacagcacaggtgtagcaagtaatactatccaacctactccacagactatacctgccattgatcccgcacttttcaatacaatttcccagggggatgttcgtctaaccccagaagactttgctagagctcagaagtactgcaaatatgctggcagtgctttgcagtatgaagatgtaagcactgctgtccagaatctacaaaaggctctcaagttactgacgacaggcagagaatgaagcctttgtatgacagacccatgtatttttggcatgaggaactaacagtccattactctatcttcagcctatcaggatcacagttttaaggaagacttggttttgttgaatatgacaatgaaatctgtgtgtatcagatttttattgaagcattcatcagcagcctcaaccagttttcattgtccatttactagattcaatcgtctctgagtatatagggctgatgttagcaagaccctaaaaatgtccattgaaccctgcttcaaaaaatgaaaacacacctctataaaatgtgtactgggaataagctttgtatttacatacattaggggaattttttaaaatctgtaatgtttggacaaacagatgatattactttgctataaaattataaatgtaacttttaataaagatagccagaatattctaaattagaaattacgtttttgtttccctcaagacataaaacaaatataacattctaaactgctggatgaatctgaaaagacattaagttcaaattttaatttattctcatattaaatataactccattaaaagtttaaaatttcatgggagaaaatataataaggtaaagaggtagaatcactttcagacttaagaataatgttgatttcccaagtgctttaccttatctgttaaagcgtaagatgaattggtatttgcttcataggcagtttgactgcatgtattagagaatgaaaagaagatatttgtagtaatgcctggaaacttggtgctttaaattaaggtactcctctgctgctgtagaatggattccacacagtggatagctatgggtgattcagaatattatgtttagattcccatttgttaagtttataagttttgtggggaattatgaacttactgtgtactacctgcatttgtgctgtgtgaaaaataaatacaaggattcgtttagctaattcaattaaaaaaaaaaaaaaa

SEQ ID NO: 2133 - DNA, 612 bp, Homo sapiens
atgtccaaggccttggctttcctctcatttccagcgtatatgagcaagacacagtgctatcatacatccccctgcagctttaaaaagcagcagaagcaagcacttctagccagaccctcaagcaccatcacttacctaactgacagcccaaagccagcattatgtgtaactctggcaggactaatccccttcgttgctccaccactggtcatgctgatgacaaaaacttatattcccatattagcttttactcagatggcttatggagccagtttcctatctttcttgggtgggatcagatggggttttgctctaccagaaggtagtccagccaaaccagactaccttaatttagctagcagtgcagctcctcttttcttttcatggtttgccttccttatttctgaaagacttagtgaagccatagtcacagtaataatgggtatgggagtagcattccaccttgaactttttctcttaccacattatcccaactggtttaaagccctgaggatagtagtcactttattggccactttttcatttataatcactttagtagttaaaagtagttttccagaaaaaggacataagagacctggtcaagtataa

SEQ ID NO: 2134 - DNA, 960 bp, Homo sapiens
atggcttacagaagagacgaaatgtggtctgagggacgatatgaatatgaaagaattccgagagaacgagcacctcctcgaagtcatcccagtgatgaatctggttatagatggacaagagacgatcattctgcaagcaggcaacctgaatacagggacatgagagatggctttagaagaaaaagtttctactcttcccattatgcgagagagcggtctccttataaaagggacaatacttttttcagagaatcacctgttggccgaaaggattctccacacagcagatctggttccagtgtcagtagcagaagctactctccagaaaggagcaaatcatactctttccatcagtctcaacatagaaagtccgtgcgtcctggtgcctcctacaaacgggcagaattgaaggaaatcctgaaagagataagagaggcctgtccagtctttgaaacatcaggagatacttcaccctcaagtggttcagcagtttcttcatcaaaggtgttagacaaacccagtaggctaactgaaaaggaacttgctgaggctgcaagcaagtgggctgctgaaaagctagagaaatcagatgaaagtaacttgcctgaaatttctgagtatgaggcgggatccacagcaccattgtttactgaccagccagaggaacctgagtcaaacacaacacatgggatagaattatttgaagatagtcagctaaccactcgctctaaagcaatagcatcaaaaaccaaagagattgaacaggtttaccgacaagactgtgaaactttcgggatggtggtgaaaatgctgattgaaaaagatccttcattagaaaagtctatacagtttgcattgaggcagaatttacatgaaataggtgagcggtgtgttgaagaactcaagcatttcattgcagagtatgatacttccactcaagattttggagagcctttttag

SEQ ID NO: 2135 - DNA, 1087 bp, Homo sapiens
gggggctccgggagccgctgtggcagcgtatgctgccacggggactgaagatggcgccgcgaggtgagattccggaggtaaacggttgtcctccaccccgctggaaatcctgttctttctgaacgggtggtataatgctacctatttcctgctggaacttttcatatttctgtataaaggtgtcctgctaccatatccaacagctaacctagtactggatgtggtgatgctcctcctttatcttggaattgaagtaattcgcctgttttttggtacaaagggaaacctctgccagcgaaagatgccactcagtattagcgtggccttgaccttcccatctgccatgatggcctcctattacctgctgctgcagacctacgtactccgcctggaagccatcatgaatggcatcttgctcttcttctgtggctcagagcttttacttgaggtgctcaccttggctgctttctccagtatggacacgatttgaagtacagaatttcagccagcagcccatcaggctgacaccacacatattgcttctggtactttagccacaccagtgagaattggtggggcaagttgtcctgagaaaggctgtgtggcttttcttcagcacagacatttgggcaagcaactcagcataaggccagtgggtaccatcttctaaaccaggaccatcagcccaagagactcttctacactcaagtatagggaggggcaaggttattcccatcctgccccttctcagaaccagtcccctgctgacctcaagttctcctccttgatcaccgtggccagagcatctcgtgtggaccatctaggctccttgggcttcaagcaggacctgagccacatgctccctgtacgagctgtgctatacctgtcccacatgagcacggagagcctcatgttggtgggtttccagagtgatgtgaaagcctctcaccccaatcctcggagactgagttccacaacttttttagtagctcatagtgttatttttctactctcttcatgaaactaactttattttataataaatatatattttctggaaaaaaaaaaaagaaaaaaaaaaaaaaaa

SEQ ID NO: 2136 - DNA, 1780 bp, Homo sapiens
tgggggtacaactcggccgttgtcaccatgccggtcgtccggaagattttccgtcgccgccggggcgactcggagtcagaggaagatgagcaggactcagaggaggttcgattaaaactggaagagaccagagaggtacagaacttgaggaagaggcccaacggggtgagtgctgtggccttgctggtgggagagaaggtacaagaggagaccactctagtggatgatccctttcagatgaagacaggtggtatggtggatatgaagaaactgaaggaaaggggcaaagataagatcagtgaggaggaggacctgcacctggggacatcgttttctgcagaaaccaaccgaagggatgaggatgcagacatgatgaagtacattgagacagagctaaagaagaggaaagggatcgtggaacatgaggaacagaaagttaagccaaagaatgcagaggactgtctttatgaacttccagaaaacatccgtgtttcctcagcaaagaagaccgaggagatgctttccaaccagatgctgagtggcattcctgaggtggacctgggcatcgatgctaaaataaaaaatatcatttccacggaggatgccaaggcccgtctgctggcagagcagcagaacaagaagaaagacagcgagacctccttcgtgcctaccaacatggctgtgaattatgtgcagcacaacagattttatcatgaggagctcaacgcgcccatacggagaaacaaagaagagcccaaggcccggcccttgagagtaggcgacacggagaagccagagcctgagcggtcccctcctaaccgcaagcgtcctgctaacgagaaggcaactgatgactatcattatgagaagttcaagaaaatgaataggcggtactgagttgtgcacagtgggatgtaaatatcgccttcctctccctatatccctcccatgaaaaatggcttcctggccgggcgtggtggctcacgcctgtaatcccagcactttgggaggccgaggtgggcggatcacctgaggtcgggagtttgagaccagcctgaccaacatggagaaacccagtctctactgaaaatacagaaaagttagccaggcgtggtggcacatgcctgtaatcccagctgctcaggaggctgaggcaggagaattgcttgaacccaagaggcggaggttgtggtgagccgagattgcacctttgtactccagcctgggcaacgagcaaaaaactctgtctcaaagaaaaaaaaaaaagaaagaaaaagaaaaatggcttccaggacagagcatgctcatttgctggcggacagttccagaaacagaccctgttagtccttctacttacctgctggatttttcaagcactaaatttataactttttgcaacaaaataatgtgtaattttccatttgggggcaaactctattctggtgagcattattaaatcttgtttgtaaatatattgtctttctcttaatatttgctctgggtcaggaagaagctgttcacggtgtgataatactctttagattgtgctttcattattatagatgcatcatgtcttctgctttcacgtgtctgggatggggtcagaaatgcatcctccagctgacagaaaaatccaggatgagatcagaaggatactggtgttttctgacttttacaaaattacttgtttgttttcatttaaaaaaaagcataaactatgtttcttgttactattagaattattaaatttcaaaatgaatccaaaaaaaaaaaaaaaaaa

SEQ ID NO: 2137 - DNA, 545 bp, Homo sapiens
cggccgcccccgcgactgcgccacgtctgaggcggctgtggccacgtctgaggcggctgtggccgcgtcggtgtccgcgtcgaggagccggggcagggcacgatggcggactgggctcgggctcagagcccgggcgctgtggaagagattctagaccgggagaacaagcgaatggctgacagcctggcctccaaagtcaccaggctcaaatcgctcgccctggacatcgatagggatgcagaggatcagaaccggtacctggatggcatggactcggatttcacaagcatgaccagcctgcttacagggagcgtgaagcgcttttccacaatggcaaggtccggacaagacaaccggaagcttctatgtggcatggccgtgggtctaattgtggccttcttcatcctctcctacttcttgtccagggcaaggacgtgagccagtgggagctggtgtctgtgggtgccaagggcagccagcggtcttccctgcctggtgttttgggctccacaggacttacctacaaaatactcctttgcaatgat

SEQ ID NO: 2138 - DNA, 1265 bp, Homo sapiens
attggcgggcacgccccctcgcccgcggccccctccccgcctctctccaccgcctcctctggctccccggtcagagggccggagcgagaagatggcgaagacgtacgattatctcttcaagctcctgctgatcggcgactcgggggtaggcaagacctgcctcctgttccgcttctcagaggacgccttcaacaccaccttcatctccaccatcggaattgattttaaaattagaacgatagaactagatggaaagaaaattaagcttcagatatgggacacagcgggtcaggaaagattccgaacaatcacgacagcgtactacagaggagccatgggcattatgctggtctatgacatcacaaatgaaaaatcctttgacaatattaaaaattggatcagaaacattgaagagcatgcctcttccgatgtcgaaagaatgatcctgggtaacaaatgtgatatgaatgacaaaagacaagtgtcaaaagaaagaggggagaagctagcaattgactatgggattaaattcttggagacaagcgcaaaatccagtgcaaatgtagaagaggcattttttacacttgcacgagatataatgacaaaactcaacagaaaaatgaatgacagcaattcagcaggagcaggtggaccagtgaaaataacagaaaaccgatcaaagaagaccagtttctttcgttgctcgctactttgatgaactctttctgagagactgcagcacacctagagggccctttcctgcttctctgaaagcacaggtcacccagcctcagaatcacacctcccggctgctgctgagagcaccactgaacttagacctctcaacacagtatgccaagtggattccagcctcatggcctagcaaaagaacagactccctttttcaaacatggaagcaatgaagtggagacacatgcaggacctaactcgttttttccttgttttattacctgttgcagaagcggttatctttcttttttactttgcacatcagtgttagcctttccctatttcagcacaatcttagactcatatttgcacacttttgtgtcgtgaagttctagacaaatttgtacatgtggcaatgttaaaagagcatttacagcagaggttaatatactaaaattaaagggtatttggtctggttcatatggtcaaatattactgccttggtagcatttatttaagggctttttcttaaataagaatcattaaagtcattaaaaaatttactgaaatgccca

SEQ ID NO: 2139 - DNA, 2773 bp, Homo sapiens
cgtctctgacggaagccggggcggacggtcggagtccggaagaaaaacagtccgcgacagctaggcgcgtgagaccggccgcccgcagggctgctctggccgggacccgctggccgggagacgcgaacctgccggaccaccgcgcggggacgacggcggccatgagctcgcggaagctgagcgggccgaaaggcaggaggctcagcatacacgtcgtgacttggaacgtggcttcggcagcgccccctctagatctcagtgacctgcttcagctgaacaaccggaacctcaatcttgacatatatgttattggtttgcaggaattgaactctgggatcataagcctcctttccgatgctgcctttaatgactcgtggagcagtttcctcatggatgtgctttcccctctgagcttcatcaaggtctcccatgtccgtatgcaggggatcctcttactggtctttgccaagtatcagcatttgccctatatccagattctgtctactaaatccacccccactggcctgtttgggtactgggggaacaaaggtggagtcaacatctgcctgaagctttatggctactatgtcagcatcatcaactgccacctgcctccccacatttccaacaattaccagcggctggagcactttgaccggatcctggagatgcagaattgtgaggggcgagacatcccaaacatcctggaccacgacctcattatctggtttggagacatgaactttcggatcgaggactttgggttgcactttgttcgggaatccattaaaaatcggtgctacggtggcctgtgggagaaggaccagctcagcattgccaagaaacatgacccgctgctccgggagttccaggagggccgcctactcttcccgcccacctacaagtttgataggaactccaacgactatgacaccagtgagaaaaaacgcaagcctgcatggaccgatcgcatcctgtggaggctgaagcggcagccctgtgctggccccgacactcccataccgccggcgtcacacttctccttgtctctgaggggctacagcagccacatgacgtacggcatcagcgaccacaagcctgtctccggcacgttcgacttggagctgaagccattggtgtctgctccgctgatcgtcctgatgcccgaggacctgtggaccgtggaaaatgacatgatggtcagctactcttcaacctcggacttccccagcagcccgtgggactggattggactgtacaaggtggggctgcgggacgttaatgactacgtgtcctatgcctgggtcggggacagcaaggtctcctgcagcgacaacctgaaccaggtttacatcgacatcagcaatatccctaccactgaagatgagtttctcctctgttactacagcaacagtctgcgttctgtggtggggataagcagacccttccagatcccgcctggctccttgagggaggacccactgggtgaagcacagccacagatctgagccaggatgggagtgaatcccaggcggaggccagagctggcagccagctctgcctttccactgccgggagtgctgggggcccagcctggccccctgaagagacagccaagtgtcgtccacatactcctcccagagtgagctctaaccaggctcatttgctctctccactactcatctctggaattagccgcttaaatacaggtttttgttgctgagatgtgagtgaaaccagctagtgtgtcaacagtgaagacctggggacagttctgcgtctcatttctggattcctaccccctcttctagtcttgcccaagtagtcctgccaggcacatgccccatttggcacaggcctgcattcttgtcgtgccgtcctgggcctcaggctgtctgggaggggagatgctcacatttgtacaggctacatagactggtgcaagcagtgctggattccaggagtcttggcatctcatagcttgtccccgtgaggagtgagcagagggtctgggatttctgctttcagcaaaagcagtctgactcagtgggcagaatggaggggcccctctagccaggctcttacgccatggttatgagcaggttgatgagggtccttcggccagcacaaccttcctccctactcacggcatggagtctgactgcatggaagttccagatcctgacagagagaactgggaaggatccaggttcgcttccgttggtagcttgagtcccatgcctccaccctgccatctgaggaaggggtgacaagtggtcaaggagctgtggccacagacttttccagggtggtccttggcaggtgaggtgcgtctgtgccacccttgtcaggagccattgacgacgggccccccctggaccccccgggacctcagagtgggggcaggcagaagggagaaccagctcaagacattttggaggatctggccctggggttcttcagagaacaccctctaggggctttggggacatggcctgtccccacatccagcacttgcctccgccatggtcactcggcagcccttttcccaggagaagacacctctgggagcctgctcagtgcttgtcctgccatcctgtgtcctgggactgagggttactccagttgctctgtgttgcatactctcccccgcaagcctgtgtatgaagaattgtcccctggcttccagcaggccatggctggctgttttgtgactgttacattgtgcaggggtaattattagcgtggcttttaaaaaaaaaaaaaaaaaaaa

SEQ ID NO: 2140 - DNA, 1638 bp, Homo sapiens
gcttccggcggaagcggcctcaacaagggaaactttattgttcccgtggggcagtcgaggatgtcggtgaattacgcggcggggctgtcgccgtacgcggacaagggcaagtgcggcctcccggagatcttcgaccccccggaggagctggagcggaaggtgtgggaactggcgaggctggtctggcagtcttccagtgtggtgttccacacgggtgccggcatcagcactgcctctggcatccccgacttcaggggtccccacggagtctggaccatggaggagcgaggtctggcccccaagttcgacaccacctttgagagcgcgcggcccacgcagacccacatggcgctggtgcagctggagcgcgtgggcctcctccgcttcctggtcagccagaacgtggacgggctccatgtgcgctcaggcttccccagggacaaactggcagagctccacgggaacatgtttgtggaagaatgtgccaagtgtaagacgcagtacgtccgagacacagtcgtgggcaccatgggcctgaaggccacgggccggctctgcaccgtggctaaggcaagggggctgcgagcctgcaggggagagctgagggacaccatcctagactgggaggactccctgcccgaccgggacctggcactcgccgatgaggccagcaggaacgccgacctgtccatcacgctgggtacatcgctgcagatccggcccagcgggaacctgccgctggctaccaagcgccggggaggccgcctggtcatcgtcaacctgcagcccaccaagcacgaccgccatgctgacctccgcatccatggctacgttgacgaggtcatgacccggctcatggagcacctggggctggagatccccgcctgggacggcccccgtgtgctggagagggcgctgccacccctgccccgcccgcccacccccaagctggagcccaaggaggaatctcccacccggatcaacggctctatccccgccggccccaagcaggagccctgcgcccagcacaacggctcagagcccgccagccccaaacgggagcggcccaccagccctgccccccacagaccccccaaaagggtgaaggccaaggcggtccccagctgaccagggtgcttggggagggtggggctttttgtagaaactgtggattctttttctctcgtggtctcactttgttacttgtttctgtccccgggagcctcagggctctgagagctgtgctccaggccaggggttacacctgccctccgtggtccctccctgggctccaggggcctctggtgcggttccgggaagaagccacaccccagaggtgacagctgagcccctgccacaccccagcctctgacttgctgtgttgtccagaggtgaggctgggccctccctggtctccagcttaaacaggagtgaactccctctgtccccagggcctcccttctgggccccctacagcccaccctacccctcctccatgggccctgcaggaggggagacccaccttgaagtgggggatcagtagaggcttgcactgcctttggggctggagggagacgtgggtccaccaggcttctggaaaagtcctcaatgcaataaaaacaatttctttcttgcaaa

SEQ ID NO: 2141 - DNA, 3263 bp, Homo sapiens
ggcatcactcgagcccaggtcccagtcatcaccactcacagcgctcggcgttcaggaagaggagcaccagcggagcgcggctgcttcagcggcgggcgggcgccagaaaggccccgatcgaaaagcctgggagggccgccgaactacccccggagggaggagccagtccgaacccaaggcgccaccgccgcagaagcggagcgaggcagcattcgcctccatggcccactcgccggtggctgtccaagtgcctgggatgcagaataacatagctgatccagaagaactgttcacaaaattagagcgcattgggaaaggctcatttggggaagttttcaaaggaattgataaccgtacccagcaagtcgttgctattaaaatcatagaccttgaggaagccgaagatgaaatagaagacattcagcaagaaataactgtcttgagtcaatgtgacagctcatatgtaacaaaatactatgggtcatatttaaaggggtctaaattatggataataatggaatacctgggcggtggttcagcactggatcttcttcgagctggtccatttgatgagttccagattgctaccatgctaaaggaaattttaaaaggtctggactatctgcattcagaaaagaaaattcaccgagacataaaagctgccaatgtcttgctctcagaacaaggagatgttaaacttgctgattttggagttgctggtcagctgacagatacacagattaaaagaaatacctttgtgggaactccattttggatggctcctgaagttattcaacagtcagcttatgactcaaaagctgacatttggtcattgggaattactgctattgaactagccaagggagagccacctaactccgatatgcatccaatgagagttctgtttcttattcccaaaaacaatcctccaactcttgttggagactttactaagtcttttaaggagtttattgatgcttgcctgaacaaagatccatcatttcgtcctacagcaaaagaacttctgaaacacaaattcattgtaaaaaattcaaagaagacttcttatctgactgaactgatagatcgttttaagagatggaaggcagaaggacacagtgatgatgaatctgattccgagggctctgattcggaatctaccagcagggaaaacaatactcatcctgaatggagctttaccaccgtacgaaagaagcctgatccaaagaaagtacagaatggggcagagcaagatcttgtgcaaaccctgagttgtttgtctatgataatcacacctgcatttgctgaacttaaacagcaggacgagaataacgctagcaggaatcaggcgattgaagaactcgagaaaagtattgctgtggctgaagccgcctgtcccggcatcacagataaaatggtgaagaaactaattgaaaaatttcaaaagtgttcagcagacgaatccccctaagaaacttattattggcttctgtttcatatggacccagagagccccaccaaacctacgtcaagattaacaatgcttaacccatgagctccatgtgccttttggatctttgcaacactgaagatttggaagaagctattaaactattttgtgatggcgtttatcattttatattttgaaaggattattttgtaaggaataacttttaatactatagtttcacctgtattctagtaaatgttgagacaccgttttgcttttaagtatccctatttcttaagttacgaggatgaatacctttcacattttgatctttagttgactctacagtcatgaaacatacaggtctttcaaagtcattctcaatattcagcttttgtaaattatcaagcttcaaaaagctttttttttaaaaaaaaaaacatgcatattctaaaaatgactattggtggggaggtgtaaataagtcataccttcttaaaacagaaaatttaagtaaagtcttttaaatgaaacctgtaaaagtattgactcttctaccaagttggtatgatattccaggcagctcaatgattatcacatttgagaccctgtgtttgaagcatttacaggcaatgtacagcaacagaggtacctcttggtgtatagtatttacattctcttttaggtagaagaggcaattttacccttatttcacatggttagaaatttaaagcaagatcatttacccaaggataggtgtttggtaatgttgaaggagttagtctggcttcatgttttacatcttcaactaaaatcccatactatctgcttggatttggagagccaaaaaataaagctgattgtcatgtgattaaatatctgatcaacaggtatgaatataacttaaatcagcatatttttgccatggtaataaattgtcctataaactatttatatatttttgttcttcataattatcactaataagcatcagtttgttgtttttaaaaggatatttaagtgagcattttctagttcatatgaaaataaccatagtacaggatgatttctgtccacacaaaggttaaattagattgcacagttaattttcacttatatttatggtactattatgtgggtgatgcctttttcttttaagcccagtacatatattatgcctgcctaagttctgaactggggctgtatttcagtagttgtagaattattgatatttagttttgatagctaatgtttaattgtttggatctgcacagtttggtttttgcacaaaagtcatttaaaaaaatctgagtaattgtcaaatattaaaagaaagatattcttcctgtaaggaatacagtttttagtcaaagtggccattacatcctctttttaatttacataatacagatacttgagaaagttgttgtggtgttgtatgccaagaaaattctttttattggtgcctatattgtaacaattatttttaatgcattgtattttgaagtaacggttcagttaaatttttcacctgctgtgtaactgaagcacaattacagtttataatcatctgtagaagtctggagataattttgcaactcatgttatgggttaaatgaatatttttgtaaaagtaaaagcaacaaatttataaattgattatttgaaactttacaacacaattgcatcccaaatacaaattgtattgcttattcattatagctattcgtcctgtaatctgtttctaggtgaagcatactccagtgttttaggggttttgaaaataaatatttaaatttcacagtcaaaaaaa

SEQ ID NO: 2142 - DNA, 3345 bp, Homo sapiens
cagatgtccagttccagatgcctggacccagagtgtgggggaaatatctctggagaagccctcactccaaaggctgtccaggcgcaatgtggtggctgcttctctggggagtcctccaggcttgcccaacccggggctccgtcctcttggcccaagagctaccccagcagctgacatcccccgggtacccagagccgtatggcaaaggccaagagagcagcacggacatcaaggctccagagggctttgctgtgaggctcgtcttccaggacttcgacctggagccgtcccaggactgtgcaggggactctgtcacaatctcattcgtcggttcggatccaagccagttctgtggtcagcaaggctcccctctgggcaggccccctggtcagagggagtttgtatcctcagggaggagtttgcggctgaccttccgcacacagccttcctcggagaacaagactgcccaccttcacaagggctttctggccctctaccaaaccgtggctgtgaactatagtcagcccatcagcgaggccagcaggggctctgaggccatcaacgcacctggagacaaccctgccaaggtccagaaccactgccaggagccctattatcaggccgcggcagcaggggcactcacctgtgcaaccccagggacctggaaagacagacaggatggggaggaggttcttcagtgtatgcctgtctgcggacggccagtcacccccattgcccagaatcagacgaccctcggttcttccagagccaagctgggcaacttcccctggcaagccttcaccagtatccacggccgtgggggcggggccctgctgggggacagatggatcctcactgctgcccacaccgtctaccccaaggacagtgtttctctcaggaagaaccagagtgtgaatgtgttcttgggccacacagccatagatgagatgctgaaactggggaaccaccctgtccaccgtgtcgttgtgcaccccgactaccgtcagaatgagtcccataactttagcggggacatcgccctcctggagctgcagcacagcatccccctgggccccaacgtcctcccggtctgtctgcccgataatgagaccctctaccgcagcggcttgttgggctacgtcagtgggtttggcatggagatgggctggctaactactgagctgaagtactcgaggctgcctgtagctcccagggaggcctgcaacgcctggctccaaaagagacagagacccgaggtgttttctgacaatatgttctgtgttggggatgagacgcaaaggcacagtgtctgccagggggacagtggcagcgtctatgtggtatgggacaatcatgcccatcactgggtggccacgggcattgtgtcctggggcatagggtgtggcgaagggtatgacttctacaccaaggtgctcagctatgtggactggatcaagggagtgatgaatggcaagaattgaccctgggggcttgaacagggactgaccagcacagtggaggccccaggcaacagagggcctggagtgaggactgaacactggggtaggggttgggggtggggggttgggggaggcagggaaatcctattcacatcactgttgcaccaagccactgcaagagaaacccccacccggcaagcccgccccatcccagacaggaagcagagtcccacagaccgctcctcctcaccctctacctccctgtgctcatgcactaggccccgggaagcctgtacatctcaacaactttcgccttgaatgtccttagaaccaccttcccctacttcatctgttgacacagcttttatactcacctgtggaagagtcagctactcacccgctattagagtatggaggaaggggttttcattgcattgcatttctgaaacattcctaagaccctttagttgaccttcaaatattcaagctattctgcagctccaagatgcaattatagaaacagctccttttttattttatgtcctctatatgccaggtgcttcacctgttatttcacttaatcctcataccatatttgcaaaggatgtgttattatctatgtgtgacaaatgaggaaactgaggctcaggggataaagggacttgcccaagtcccacagctggtgtgtgactgcagagactgtgctcttcccagtgtgctgcaatacttctcaaccctcctctaacctgctgtgtcacccgctttccctcccagcccccacatccttaccattttccctccctgggaattcctgcttctgcgaaaatggtatcctctagctcacactttcctaatggccccatctcctgcagaagccaggtgagcccagcactggactgaagttcttgcagacaccccacctgtgcccctatcatcaggggaactgctccacctgagaggaccaactctttaatttttagtaaaacctgaaggtgatgggccgggcgcagtggctcacgcctgtaatcccaacaccttaggagtccgaggtgggtggatcacgaggtcaggagatccagcccatcctggccaacatggtgaaaccccatctctactaaaaatacaaaaattagccgggcgtggtgacacgtgcctgtagtcccagctactcgggaggctgaggcaggagaatcacttgaacctgggaggcggaggttgcagtgagctaagatcacgccactgcactccagcctgcggacagaccaagacttcatcccccccaaaaaaaaaagattggaggtgatttacagtgaaagacacaaataaaatacaactgttcaatggaaatagaaaataaacaccataaaagagagaagagaggtaatttgttagcatcaagagtcaagttgctatatggtcaaaggttaaatttatctctaaaaaatggcaggattcaaagttgtacatacatgtgattacttctgttttttacacccacatacagtacaaaagattattaaaaatattcccaaaaggcaggtgcaatgatgcacacttatacccccagccactcaggaggctgatgcaagaggatcgcttgagcccaggagttgaagtccagcctaagcaacatagtgaaaccccatctccaaaaatataataataattctctcaaaatactaaacagaggtggttttattgataagattttggctgtttggttttccactattctctattggctaaaatttgtttaatgagcatgaaatgtttttattttattttgcttatttttatgattgcaaaaaatgatatgagtttctccctgccaaggcaaaaaatatatatatatacctataaaaaaaaaaaaaaaaaaaaaaaaaaa

SEQ ID NO: 2143 - DNA, 3042 bp, Homo sapiens
cggaggcgctgggcgcacggcgcggagccggccggagctcgaggccggcggcggcgggagagcgacccgggcggcctcgtagcggggccccggatccccgagtggcggccggagcctcgaaaagagattctcagcgctgattttgagatgatgggcttgggaaacgggcgtcgcagcatgaagtcgccgcccctcgtgctggccgccctggtggcctgcatcatcgtcttgggcttcaactactggattgcgagctcccggagcgtggacctccagacacggatcatggagctggaaggcagggtccgcagggcggctgcagagagaggcgccgtggagctgaagaagaacgagttccagggagagctggagaagcagcgggagcagcttgacaaaatccagtccagccacaacttccagctggagagcgtcaacaagctgtaccaggacgaaaaggcggttttggtgaataacatcaccacaggtgagaggctcatccgagtgctgcaagaccagttaaagaccctgcagaggaattacggcaggctgcagcaggatgtcctccagtttcagaagaaccagaccaacctggagaggaagttctcctacgacctgagccagtgcatcaatcagatgaaggaggtgaaggaacagtgtgaggagcgaatagaagaggtcaccaaaaaggggaatgaagctgtagcttccagagacctgagtgaaaacaacgaccagagacagcagctccaagccctcagtgagcctcagcccaggctgcaggcagcaggcctgccacacacagaggtgccacaagggaagggaaacgtgcttggtaacagcaagtcccagacaccagcccccagttccgaagtggttttggattcaaagagacaagttgagaaagaggaaaccaatgagatccaggtggtgaatgaggagcctcagagggacaggctgccgcaggagccaggccgggagcaggtggtggaagacagacctgtaggtggaagaggcttcgggggagccggagaactgggccagaccccacaggtgcaggctgccctgtcagtgagccaggaaaatccagagatggagggccctgagcgagaccagcttgtcatccccgacggacaggaggaggagcaggaagctgccggggaagggagaaaccagcagaaactgagaggagaagatgactacaacatggatgaaaatgaagcagaatctgagacagacaagcaagcagccctggcagggaatgacagaaacatagatgtttttaatgttgaagatcagaaaagagacaccataaatttacttgatcagcgtgaaaagcggaatcatacactctgaattgaactggaatcacatatttcacaacagggccgaagagatgactataaaatgttcatgagggactgaatactgaaaactgtgaaatgtactaaataaaatgtacatctgaagatgattattgtgaaattttagtatgcactttgtgtaggaaaaaatggaatggtcttttaaacagcttttgggggggtactttggaagtgtctaataaggtgtcacaatttttggtagtaggtatttcgtgagaagttcaacaccaaaactggaacatagttctccttcaagtgttggcgacagcggggcttcctgattctggaatataactttgtgtaaattaacagccacctatagaagagtccatctgctgtgaaggagagacagagaactctgggttccgtcgtcctgtccacgtgctgtaccaagtgctggtgccagcctgttacctgttctcactgaaaagtctggctaatgctcttgtgtagtcacttctgattctgacaatcaatcaatcaatggcctagagcactgactgttaacacaaacgtcactagcaaagtagcaacagctttaagtctaaatacaaagctgttctgtgtgagaattttttaaaaggctacttgtataataacccttgtcatttttaatgtacaaaacgctattaagtggcttagaatttgaacatttgtggtctttatttactttgcttcgtgtgtgggcaaagcaacatcttccctaaatatatattaccaagaaaagcaagaagcagattaggtttttgacaaaacaaacaggccaaaagggggctgacctggagcagagcatggtgagaggcaaggcatgagagggcaagtttgttgtggacagatctgtgcctactttattactggagtaaaagaaaacaaagttcattgatgtcgaaggatatatacagtgttagaaattaggactgtttagaaaaacaggaatacaatggttgtttttatcatagtgtacacatttagcttgtggtaaatgactcacaaaactgattttaaaatcaagttaatgtgaattttgaaaattactacttaatcctaattcacaataacaatggcattaaggtttgacttgagttggttcttagtattatttatggtaaataggctcttaccacttgcaaataactggccacatcattaatgactgacttcccagtaaggctctctaaggggtaagtaggaggatccacaggatttgagatgctaaggccccagagatcgtttgatccaaccctcttattttcagaggggaaaatggggcctagaagttacagagcatctagctggtgcgctggcacccctggcctcacacagactcccgagtagctgggactacaggcacacagtcactgaagcaggccctgtttgcaattcacgttgccacctccaacttaaacattcttcatatgtgatgtccttagtcactaaggttaaactttcccacccagaaaaggcaacttagataaaatcttagagtactttcatactcttctaagtcctcttccagcctcactttgagtcctccttggggttgataggaattttctcttgctttctcaataaagtctctattcatctcatgtttaatttgtacgcatagaattgctgagaaataaaatgttctgttcaacttaaaaaaaaaaaaaaaaaa

SEQ ID NO: 2144 - DNA, 2527 bp, Homo sapiens
ccagccctggcgtgggcccagcccggcccaggcagcaatggggttcctgcagctgctggtcgtagcggtgctggcatccgaacaccgggtggctggtgcagccgaggtcttcgggaattccagcgagggtcttattgaattttctgtggggaaatttagatacttcgagctcaataggccctttccagaggaagctattttgcatgatatttcaagcaatgtgacttttcttattttccaaatacactcacagtatcagaatacaactgtttccttttctccgactctcctttccaattcctcggaaacaggcactgccagtggactggttttcatccttagaccagagcagagtacatgcacttggtacttggggacttcaggcatacagcctgtccagaatatggctatcctactctcctactcagaaagagatcctgtccctggaggctgtaatttggagttcgatttagatattgatcccaacatttacttggagtataatttctttgaaacgactatcaagtttgccccagcaaacctaggctatgcgagaggcgtagatcccccaccatgtgacgctgggacagaccaggactccaggtggaggttgcagtatgatgtctatcagtattttctgcctgagaatgacctcactgaggagatgttgctgaagcatctgcagaggatggtcagtgtgccccaggtgaaggccagtgctctcaaggtggttaccctaacagctaatgataagacaagtgtttccttctcctccctcccgggacaaggtgtcatatacaatgtcattgtttgggacccgtttctaaatacatctgctgcctacattcctgctcacacatacgcttgcagctttgaggcaggagagggtagttgtgcttccctaggaagagtgtcttccaaagtgttcttcactctttttgccctgcttggtttcttcatttgtttctttggacacagattctggaaaacagaattattcttcataggctttatcatcatgggattcttcttttatatactgattacaagactgacacctatcaagtatgatgtgaatctgattctgacagctgtcactggaagcgtcggtggaatgttcttggtagctgtgtggtggcgatttggaatcctctcgatctgcatgctctgtgttggactagtgctggggttcctcatctcgtcagtgactttctttactccactgggaaacctaaagatttttcatgatgatggtgtattctgggtcactttctcttgcatagctatcctcattccagtagttttcatgggctgcctaagaatactgaacatactgacttgtggagtcattggctcctattcggtggttttagccattgacagttactggtccacaagcctttcctacatcactttgaacgtactcaagagagcgctcaacaaggatttccacagagctttcacaaatgtgccttttcaaactaatgacttcattatcctggcagtatggggcatgctggctgtaagtggaattacgttacagattcgaagagagagaggacgaccgttcttccctccccacccatacaagttatggaagcaagagagagagcgccgagtgacaaacattctggaccctagctaccacattcctccattgagagagaggctctatggccgattaacccagattaaagggctcttccagaaggagcagccagctggagagagaacgcctttgcttctgtagatgcccaggggcttggtcagtgtgcctcagctttggagttcatgcctggagtggttcaacagtctctggtgcaagtctaataagagatcaggcatatatatctgttctttgcataatattatggtgcccttattgatatatggtaagggtgtactaggggattaggatgattgtaagagaatgagaaagatgaccaaaaggttggtggtagggaggctttttcttatttccaaatacttgagaaattaccttttggtttacaaatctatgatcaacttattccattaaatagatacattaaaaaaattaaaaactgcaaaaaaaaaaaaaaaactggtgtttctttttataaccccttgaaacaagtctctcacctgagcctgtctaaactttcggagggagtttattattgagtctttatctgtgacagtatttggagatttagggatttgatacttaggcctttgaattttagaatacaaaaagagaagcaagccagacatggtggctcacacctgtaatcccaatactgggaagccaaggtgggagtatcgcttgagcccaggagtttgagaccgacatgggcaacatgacaagaccccatctctacaaaaaaaattaaaaaattagccaggcatggtggcacatgcctactcccagctcccaaggagactgagatgggaggatccctggagccctgaagattgaggctacagtgagccttgattgtgtcactgcactccagcttgggtgacagagaccctgtctcgagaaatt

SEQ ID NO: 2145 - DNA, 2531 bp, Homo sapiens
cgaagcctctccctcttcctctgctcccgcggggtctgtgctgagaataatggcccggttggcccgggacgagtggaatgattaatgatgttttgcagcagttttctacgtctgaaattttttatgtctctggaacccagaatttgctaagagatggaggaacctcagaaaagctatgtgaacacaatggaccttgagagagatgaacctctcaaaagcaccggccctcagatttctgttagtgaattttcttgccactgctgctacgacatcctggttaaccccaccaccttgaactgtgggcacagcttctgccgtcactgccttgctttatggtgggcatcttcaaagaaaacagaatgtccagaatgcagagaaaaatgggaaggtttccccaaagtcagtattctcctcagggatgccattgaaaagttatttcctgatgccattagactgagatttgaagacattcagcagaataatgacatagtccaaagtcttgcagcctttcagaaatatgggaatgatcagattcctttagctcctaacacaggccgagcgaatcagcagatgggagggggattcttttccggtgtgctcacagctttaactggagtggcagtggtcctgctcgtctatcactggagcagcagggaatctgaacacgacctcctggtccacaaggctgtggccaaatggacggcggaagaagttgtcctctggctggagcagctgggcccttgggcatctctttacagggaaaggtttttatctgaacgagtaaatggaaggttgcttttaactttgacagaggaagaattttccaagacgccctataccatagaaaacagcagccacaggagagccatcctcatggagctagaacgtgtcaaagcattaggcgtgaagcccccccagaatctctgggaatataaggctgtgaacccaggcaggtccctgttcctgctatacgccctcaagagctcccccaggctgagtctgctctacctgtacctgtttgactacaccgacaccttcctacctttcatccacaccatctgccctctgcaagaagacagctctggggaggacatcgtcaccaagcttctggatcttaaggagcctacgtggaagcagtggagagagttcctggtcaaatactccttccttccataccagctgattgctgagtttgcttgggactggttggaggtccattactggacatcacggtttctcatcatcaatgctatgttactctcagttctggaattattctccttttggagaatctggtcgagaagtgaactgaagaccgtgcctcagaggatgtggagccatttctggaaagtatcaacgcagggactttttgtggccatgttctggcccctcatccctcagtttgtttgcaactgtttgttttactgggccctgtactttaacccaattattaacattgatcttgtggtcaaggaactccggcggctggaaacccaggtgttgtgactggcactgcccaggctgagactcttcaagtcccgctgacgtctgagctttgatgcttaagaagggtgaggcagggagcggacttcttattttcaaccttcagtaaaacaaggtgttgctttgtatatcaaaagctccaaccatgtcttttccccttcagcctgtgggtggcacgagcaaggactgacatccgcacagggaggattgtctgtttggctgacacagcagcagcctttcccacccagccactttcttcacagggattaggaggctcagtccccaacggctggcaagactcagggtcctcagtggacatggtgtgggtgacatcagaagggtgccacatcagtcccctccccaacctcagtgactgacagaggatccggatctcagagcctgagaccaggtttattggggcctggcctgtcctctaagtcaagtttaggaaaacaaggataagattctgtcataggcatagagagttgcacataaaaaataccgaagaaaacccaaaattcaatcaacaattctgtcttattgaagagttgctaggattcagagtaaaactcaaaggattcagtttgagcctagaatgatggttagacttgtagtcactgggcttttgttttgctttatggaaatcattgaaggtctggatccctttctctgaatggagagattgagagggatgtcgggcagttcccattagatttagtggccttcatgttattcagaattgttttggtgatacctcacccctgtaatcccagcactttgggtgggtgaggcaggcggatcacttgaagccaggacttcaagaccagcttggccaacatggtgaaacctcatctctactaaaaatacaaaaattagccaagtgtgatggcacatacctgtaatcccagctacttggaattggaaatcgcctgaacccaggaggcggaggttgcagggagggagactgcaccactgcacttcagcctgggtgacagagggagactctgtcttaaaaaaaaaaaaaaaaa

SEQ ID NO: 2146 - DNA, 1290 bp, Homo sapiens
gtgagcggcaacatggcgtccaggtctaagcggcgtgccgtggaaagtggggttccgcagccgccggatcccccagtccagcgcgacgaggaagaggaaaaagaagtcgaaaatgaggatgaagacgatgatgacagtgacaaggaaaaggatgaagaggacgaggtcattgacgaggaagtgaatattgaatttgaagcttattccctatcagataatgattatgacggaattaagaaattactgcagcagctttttctaaaggctcctgtgaacactgcagaactaacagatctcttaattcaacagaaccatattgggagtgtgattaagcaaacggatgtttcagaagacagcaatgatgatatggatgaagatgaggtttttggtttcataagccttttaaatttaactgaaagaaagggtacccagtgtgttgaacaaattcaagagttggttctacgcttctgtgagaagaactgtgaaaagagcatggttgaacagctggacaagtttttaaatgacaccaccaagcctgtgggccttctcctaagtgaaagattcattaatgtccctccacagatcgctctgcccatgtaccagcagcttcagaaagaactggcgggggcacacagaaccaataagccatgtgggaagtgctacttttaccttctgattagtaagacatttgtggaagcaggaaaaaacaattccaaaaagaaacctagcaacaaaaagaaagctgcgttaatgtttgcaaatgcagaggaagaatttttctatgaggagcagggaaaacctgaggtgcttggaggtccagacacaagaagaggattggaaccagttccgatacagcacaatggtggttcacgggggcaagtgacagccctggtttctctgaaggctggactaattcaatcaagatcaactctaagtgatttccagggaaccttcatgactgttggaattgctctgtcataataagtcagggatatttaggaggctcatagtctcctggagggataaaacatctcggcacctagtaatggtaaattagtcaatatttgttagtttcgtttgagatctcaaatgttaggattttctgaagtctcagtgtctttcagagtttgagataccttgttttcattttttctaatttttaatttaaaagtaataaagaatattttgtaatgattaggatgaaaattttatcgtcaattataagccaaaatttgctaaaattaaagtcagtatacttggaaaaaaaaaaaaaaaaaaaaaaaaaaaaaa

SEQ ID NO: 2147 - DNA, 1378 bp, Homo sapiens
gggacccgggcttctgtgaaacatggcggtaggctgggaccataacacaagcatgactatatgaaggaagaggaaggttttcctgaagatgaggcgactgaatcggaaaaaaactttaagtttggtaaaagagttggatgcctttccgaaggttcctgagagctatgtagagacttcagccagtggaggtacagtttctctaatagcatttacaactatggctttattaaccataatggaattctcagtatatcaagatacatggatgaagtatgaatacgaagtagacaaggatttttctagcaaattaagaattaatatagatattactgttgccatgaagtgtcaatatgttggagcggatgtattggatttagcagaaacaatggttgcatctgcagatggtttagtttatgaaccaacagtatttgatctttcaccacagcagaaagagtggcagaggatgctgcagctgattcagagtaggctacaagaagagcattcacttcaagatgtgatatttaaaagtgcttttaaaagtacatcaacagctcttccaccaagagaagatgattcatcacagtctccaaatgcatgcagaattcatggccatctatatgtcaataaagtagcagggaattttcacataacagtgggcaaggcaattccacatcctcgtggtcatgcacatttgggcagcacttgtcaaccatggaatcttacaattttttctcatagaatagatcatttgtcttttggagagcttgttccagcaattattaatcctttagatggaactgaaaaaattgctatagatcacaaccagatgttccaatattttattacagttgtgccaacaaaactacatacatataaaatatcagcagacacccatcagttttctgtgacagaaagggaacgtatcattaaccatgctgcaggcagccatggagtctctgggatatttatgaaatatgatctcagttctcttatggtgacagttactgaggagcacatgccattctggcagttttttgtaagactctgtggtattgttggaggaatcttttcaacaacaggcatgttacatggaattggaaaatttatagttgaaataatttgctgtcgtttcagacttggatcctataaacctgtcaattctgttccttttgaggatggccacacagacaaccacttacctcttttagaaaataatacacattaacacctcccgattgaaggagaaaaactttttgcctgagacataaaacctttttttaataataaaatattgtgcaatatattcaaagaaaagaaaacacaaataagcagaaaacatacttattttaaaaaaaaaaaaaaaaaaaaaaaaaaaaaa

SEQ ID NO: 2148 - DNA, 1851 bp, Homo sapiens
tccccccggcggccccgcgcgcagctcccggctccctcccccttcggatgtggcttgagctgtaggcgcggagggccggagacgctgcagacccgcgacccggagcagctcggaggcggtgaataatagctcttcaagtctgcaataaaaaatggcctccaacaaaactacattgcaaaaaatgggaaaaaaacagaatggaaagagtaaaaaagttgaagaggcagagcctgaagaatttgtcgtggaaaaagtactagatcgacgtgtagtgaatgggaaagtggaatatttcctgaagtggaagggatttacagatgctgacaatacttgggaacctgaagaaaatttagattgtccagaattgattgaagcgtttcttaactctcagaaagctggcaaagaaaaagatggtacaaaaagaaaatctttatctgacagtgaatctgatgacagcaaatcaaagaagaaaagagatgctgctgacaaaccaagaggatttgccagaggtcttgatcctgaaagaataattggtgccacagacagcagtggagaattgatgtttctcatgaaatggaaagattcagatgaggcagacttggtgctggcgaaagaggcaaatatgaagtgtcctcaaattgtaattgctttttatgaagagagactaacttggcattcttgtccagaagatgaagctcaataattgttcacattgttcttttatatatatttatatatatatataaaaattgggtcttagattttgatttactagtgtgacaaaataactacatcctaatgaaaatcaagtttgatatgtttgttttgaaagtagcgttggaagagttgttgggggttttttgcatccatagcactggttactttgaacaaataaataaaagctttctgtagttgcttcctttatcagaaaagaacatttgataccatggtatatcatttcctcttcattaaagaacagcttttctaaatgttgggggaaatgtccatagtcattactcagtcaaaacttgtgttctcatgagcctaaggaccattctagatttattacgtgttttttgtgtgtgtgtgtgtgtgtgtgtgtgtgtgtatccataaaatgcatatgtaaatttttttttgtttttaagcattcacccaaacaaaaaaatcacaggtaaacccatgtttctgagatgccattattccaagcaaaataagagataatcccttcaagttaaattgaaaattttcctgaaaccatacatttcaagtgaaataagtaattctagataggacaatttaaattggataattttaaagtgtctataattgcagtggtttatttgcaaaattcctaaaaggaaaaattttatcactgccatcacagcaggtttcctcatccagatgaggaaactagacaaatgctagtgtgttttaactagctaaacaaaactaagttaaatgaacatttaaaagtttccctagcgggccattccttagcaaaatgttggaatccctgttgctacattgactaaaaggtcatgatgaatggaatatgtaagacttggctcatagaaacctaatcagatggttagaggtgttggcagtttaggacctgctgtcataaatgtgtgaacaaccttttgtaacctaacctattgacctgcatgttttttctttaccccaattcattacatggaggctcaatcttgagtttgctttactggttcagcaaaagccaggaagaacaactttgtagtaatcaaaatgttatccaactgtatattgtttactttattgtaaatactggtgaacagtggttaataaatagttttatattcctttatgcaa

SEQ ID NO: 2149 - DNA, 1589 bp, Homo sapiens
gtctcttcctcgctccctctctttctctcctccctctgccttcccagtgcataaagtctctgtcgctcccggaacttgttggcaatgcctattttttggctttcccccgcgttctctaaactaactatttaaaggtctgcggtcgcaaatggtttgactaaacgtaggatgggacttaagttgaacggcagatatatttcactgatcctcgcggtgcaaatagcgtatctggtgcaggccgtgagagcagcgggcaagtgcgatgcggtcttcaagggcttttcggactgtttgctcaagctgggcgacagcatggccaactacccgcagggcctggacgacaagacgaacatcaagaccgtgtgcacatactgggaggatttccacagctgcacggtcacagcccttacggattgccaggaaggggcgaaagatatgtgggataaactgagaaaagaatccaaaaacctcaacatccaaggcagcttattcgaactctgcggcagcggcaacggggcggcggggtccctgctcccggcgttcccggtgctcctggtgtctctctcggcagctttagcgacctggctttccttctgagcgtggggccagctccccccgcgcgcccacccacactcactccatgctcccggaaatcgagaggaagatccattagttctttggggacgttgtgattctctgtgatgctgaaaacactcatataggattgtgggaaatcctgattctcttttttatttcgtttgatttcttgtgttttatttgccaaatgttaccaatcagtgagcaagcaagcacagccaaaatcggacctcagctttagtccgtcttcacacacaaataagaaaacggcaaacccaccccattttttaattttattattattaattttttttgttggcaaaagaatctcaggaacggccctgggccacctactatattaatcatgctagtaacatgaaaaatgatgggctcctcctaataggaaggcgaggagaggagaaggccaggggaatgaattcaagagagatgtccacggccgaaacatacggtgaataattcacgctcacgtcgttcttccacagtatcttgttttgatcatttccactgcacatttctcctcaagaaaagcgaaaggacagactgttggctttgtgtttggaggataggagggagagagggaaggggctgaggaaatctctggggtaagagtaaaggcttccagaagacatgctgctatggtcactgaggggttagctttatctgctgttgttgatgcatccgtccaagttcactgcctttattttccctcctccctcttgttttagctgttacacacacagtaatacctgaatatccaacggtatagatcacaagggggggatgttaaatgttaatctaaaatatagctaaaaaaagattttgacataaaagagccttgattttaaaaaaaaaagagagagagatgtaatttaaaaagtttattataaattaaattcagcaaaaaaagatttgctacaaagtatagagaagtataaaataaaagttattgtttgaaaaaaaaaaaaaaaaaa

SEQ ID NO: 2150 - DNA, 6340 bp, Homo sapiens
gatctttgtagaatttgatggctgtaactggaagcaacactcctgggtaaaagttcatgctgaggaagttattgtgcttctgctggaagggtctcttgtatgggcgccccgtgaggacccagtccttctccagggcattcgagtctccattgcacaatggccagccctgacttttactccccttgtagataaactgggtttgggttctgtggttccagtggaatatcttctggatcgagagcttcggttcctgtcagatgccaatgggttgcatctgtttcagatgggaacagatagccaaaaccagattcttttggaacatgctgcactgagagaaacagttaatgctttgatcaagtgaccaaaagctacaagagatattcagccgaggtccctacagtgttcaaggtcacagggtcaaaatatatcagccagagggggaagaagggtggctctatggtgttgtgagccatcaggactccatcactcgtcttatggaggtgtctgtaactgagagtggtgagatcaagtcggtagatcccagactaatccatgtgatgctgatggataattcaacgcctcaaagcgaggggggtacgttaaaagcagtaaaatcttccaaaggaaagaagaagagagaaagcatagaggggaaagatggccggaggaggaaaagtgcttcggactctgggtgtgaccctgcatcaaagaaattaaaaggagacaggggtgaagtagacagtaatgggagcgatggagataaaccgcaacattcgctttgccacttacaccaaagaaaacggcaggactctggtggtgcaggatgagcctgtaggtggggacacacctgcatctttcactccatattctacagccacaggtcagacacctttggccccagaggtgggtggagccgaaaacaaagaggcaggaaaaacactggaacaagttggccagggcatagtggcttccgcagctgtggtcactaccgccagctccaccccaaacacagtgaggatctcagacactggccttgcagcagggactgtgccagaaaaacagaaaggcagccggtcgcaggcctcgggagagaattcaagaaattctattctggcctcttctggatttggagcacctctccctagttcatcgcaacctttgacttttggaagtggaaggagccagtccaatggtgttctagccacagagaacaaacctttgggcttctcttttggctgtagctctgcacaagaggcacagaaagacactgatctctccaaaaacttgttttttcaatgcatgtcccaaactttacctaccagtaactacttcactactgtttcagagagtttggctgatgattcttctagtcgggactcattcaaacaaagccttgagagcctgagctcaggcctgcgtaaaggcagatccgttcttggaacagacactaagccaggctctaaggctggcagctctgtggaccggaaagtgcctgcagagtccatgcccaccctcactccagccttcccacggagcctcctaaatgcccgtaccccagagaatcatgaaaatctatttttacagccccccaaattgtcccgagaagagccttctaatcctttcctggcatttgtggagaaagttgaacacagccctttcagtagttttgcatctcaggcatcaggtagctcctcttctgctaccactgtcacctccaaggtggcacccagctggcccgagtctcactcctctgcagattcggcatctttagcaaagaagaaacccctcttcattacaactgactcctccaagctagtatctggtgttctgggctcagctcttaccagtgggggcccaagcctctctgccatggggaatggccgctccagctcgcccaccagcagcctcactcagcccattgagatgccaactctctcctctagccccacagaggagaggccaactgtggggcctgggcagcaggacaatcccctcctcaaaacctttagtaacgtctttggcaggcactcaggcggctttctgtcctccccggcagatttttcacaggagaacaaagctccttttgaagctgtgaaaaggttctcactggatgaacgaagcttggcttgcagacaagactcggactccagcaccaacagtgacctgtcagatttgagtgactctgaggagcagctgcaggctaagacaggcctgaagggaattccagagcacctgatggggaagctgggccccaatggggagcgcagtgctgagctgttgctgggcaaaagcaaagggaagcaggcccccaagggccggcctcggactgcccccctgaaagttggccagtcagtgctgaaagatgtaagcaaagtgaagaagctgaagcaatctggagagcccttcctgcaggatgggtcatgcatcaatgtggcacctcatctgcacaagtgtcgtgaatgccgcctggagcggtaccggaagtttaaggaacaggagcaagatgattctactgtagcctgccgtttctttcacttccggaggttgatcttcactcgaaaaggggtactccgtgtggaggggtttttaagcccccagcaaagtgaccctgatgccatgaacctgtggattccttcttcctccctagcagaagggatagatctagagacctcaaaatacatcctggccaatgttggggaccagttctgccagctcgtaatgtctgagaaggaggccatgatgatggtggagccacaccagaaagtggcatggaagcgagctgtgcgtggtgtacgggagatgtgtgatgtgtgtgaaacaactctcttcaacatccactgggtttgtcgcaaatgtggatttggggtctgccttgactgttaccggctcaggaaaagccggccacgcagtgagacagaagagatgggtgatgaagaagttttctcctggttgaagtgtgcaaagggacagtcccacgaaccagagaatctcatgcccacacaaattattcctggcacagctctttacaatattggagacatggtacatgctgcccggggcaagtggggaattaaagcaaactgcccttgtatcagtcgacagaacaaatctgtattgagacctgccgtcaccaatgggatgtcacagcttcctagcataaaccctagtgcctcttctggaaacgaaactaccttctctggcggaggaggaccggcaccagtaacaactccagagccggaccatgttcccaaagccgacagcactgacatcagatctgaagagcctctgaaaacagacagttcggcatcaaatagcaatagtgaactgaaagccatcaggcctccttgccctgacacggccccaccctcctccgccctgcactggttggcagatttagcaactcagaaggctaaagaagaaacaaaagaagcagggtccctgaggtcggtgctcaataaagagtctcattcaccctttgggctggactcgttcaactccactgcaaaggtctctccgctgactccaaagctttttaacagtctgttgctgggtcccactgcctccaacaacaaaaccgaagggtctagccttcgagacctccttcactccgggccgggaaaacttcctcaaacccccttggacacaggcataccctttcccccggtcttctctacatcctcagcaggagtgaagagcaaggccagcctacccaactttcttgaccacatcattgcctcagtggtagaaaataagaaaacctcagatgcttcaaagcgggcctgcaacttgactgatacccagaaggaagtgaaggagatggtgatggggttaaatgtgctagatccccatacttctcactcctggctttgtgatgggaggcttctgtgtctccatgaccccagcaacaaaaacaattggaagatcttccgggagtgttggaagcaaggtcagccagtgctggtttcgggggtacataaaaagctcaagtctgagctctggaagccagaagcctttagccaggaatttggagaccaggatgtagacttggtgaactgcaggaactgtgctataatttccgatgtgaaagttcgggatttctgggatggtttcgagatcatatgcaaacgactacggtcagaagatgggcagccaatggtgctcaaactcaaggactggcctcctggggaagattttcgagacatgatgccaaccaggtttgaagatctgatggagaaccttcctctgccagaatataccaaacgagatggcaggctcaatctggcctctaggctacctagctactttgtaaggcctgatctgggccccaagatgtacaacgcctatgggttgataacagcagaagatagaagagttggtacaacaaatcttcacttagatgtgtctgatgctgttaatgtgatggtgtatgttgggattcccatcggggagggtgctcatgatgaagaggtactcaagacaattgacgagggagatgccgatgaggtgacgaagcagaggattcatgatggaaaagagaagccaggtgctttatggcacatctatgcagccaaggatgcagagaagatccgggagctgctccgaaaggttggagaagaacaaggccaagagaacccccctgatcatgacccaattcatgaccaaagttggtacctggaccagaccctccgtaagcgactctatgaggagtatggcgtgcaaggctgggctattgtgcagttcctaggtgatgctgttttcatacctgctggagccccacaccaggttcacaatctatacagttgcataaaagtagcagaagactttgtatctccagaacatgtaaagcactgtttccgcctgactcaggaattcaggcatctctctaacactcatacaaatcatgaggataaactgcaggtgaagaacatcatttaccatgcagtgaaagatgcggttggcaccctcaaggctcatgaatccaaactggcaaggtcctaggcatggagaaactccaagctcctctgtgaagcaggtctttcactcacaacacttaacagggaacggcagggctctttgctggagcagaggcccttcacccagagccagtgtggtcagtattccaaactctccagccactctcttctacgctgcctcaacactgaaggttgacacaggaaagtcgtactgttcacacacacagtttgagactccaagccaagagtgccacatccctatcctgtggccttttggaaatccaaattgcctgaacatggcggggctttcctgcacattctcctgatttgagattcacgggcacacctttcttttcttttcctcttgtgcctagttaagtgggaatgtgtttggagataggggaaatcacataactggtacaagtatggggtaattgcttaaacatgcctggtggaagtctgatagcgtctctgcacgtgacctctgacaaagcccatcccaggagacggggtgaagctattccccacactctcctgtgaacactggagtcttgcaagacccagggagaacccactgcttttcccaggaggctccaggattaggaaatgtgtgtatttagtgaaaaataggtttgtagtgaaatagttactatttcatgaaagtagatatttttagaatttttgaaataccacagttgttttcctggattataaggaaaggcacattacatttagtcttcctttcgatataaaactctttgaagaaatatgatttttagaaatcagctacccattatagcacaaaatcagccaaagcagaatttttaaaaattggcttttttaggattctttttctccccctcccatcttagtcttaccttgagggaacagtcatatgagaaggaactttgtcacatctaagctgtggtgtgttccccatgtgtgtgtacaacactggtgactccaggaaccattttcacctattaccagtgttccctggggactcctcttaatgtttccaaatgggaaggacagttgatttccaacatgaggttttttgttttttatccagaaatattttcagcaaaactttccaactgagtggagtctgattaaggatttatttgaaaatggtgggattcattggcccataggtacattggaaaatgtatatctctccagctgtactgtagtgccctgcaggctgtttatatgttcacagttactttttttttttttttaaataaaagtcatttaatgtagaatacttttaatttcactttctgtattttaattttgttgaagggctgattgggatttccatgttcttattaaaaatctaacaaatctgtaaaaaaaaaaaaaaa

SEQ ID NO: 2151 - DNA, 4135 bp, Homo sapiens
ccgcggccctgggagctggaggaaccgcgactcagcaggcatgactggagagggaagtcccaatggtgctagaatggtgctgcagtggcagaagacggctcacaagtgaggtctggaagaacaacagggaagacatccatcatttgctccaaagtgtgcaagtcaaatcctggggagaatcatgataaccctgatcactgagcagctacagaagcagactctggatgagctgaaatgcacacgcttcagcatcagtctgcctttgcctgatcatgcagacatctccaactgtgggaactctttccagcttgtgtctgaaggtgcttcctggaggggcctgccccactgttcctgtgctgagttccaggacagcctcaacttcagctaccatccctcaggcctgagcctgcacctcagaccacccagtcggggaaactcccccaaggagcagcccttctcccaagtcctaagacctgagcccccagatccagagaagcttcctgtgccccctgcccctccatccaagaggcactgccgctcactctcagtgcccgtggacctgtctcgctggcagccggtgtggcggcccgccccctccaagctgtggactcccataaagcaccggggcagtggtggagggggtgggccgcaggtgcctcaccagagccccccaaagcgggtctccagcctcaggttcctccaagctcccagtgcctcttctcaatgtgccccagctcacagaccctacagccctcctttcttcagcctggccctggcccaagattcctctcgaccctgcgccgcctcccctcaaagtggctcctgggagagtgatgctgagtccttgtcaccttgcccacctcagcgccgcttctccctgtcacccagtctgggcccgcaggcaagccgcttcttgccctctgcccggagctctcccgcatcctccccagagctgccctggcgacctcgaggtctccgcaaccttccccgaagccgctcacagccttgtgatctggatgcccgcaaaactggggtcaagcggcgccacgaggaagacccccggcgtctgcggccttcgttggactttgacaagatgaatcagaaaccatactcaggaggtctttgtctccaagaaacagcccgggaaggcagcagcatctctccaccatggttcatggcctgtagccccccacccctctctgcttcctgcagccccactgggggttcctcccaggtgctgagtgaaagcgaagaggaggaggagggggctgtgcggtggggtcggcaggcgctgagcaagcggacactgtgccagcgggactttggggacctggacttgaatttgattgaggaaaactaaaactgagaggctacttcctggggccacacagactgactctctcatggctactaacaagtgtcgagtccccaaggctgggggccgagcctgggaatgggggtgagtggagggctccgactcagggcagctggaaatcttctcgctccagcaagctcgaccatgccaagagactggccgggacaagataaacggagctggtggcgggagggacagccccagagcagacccttcctatggcggccctgagtgtgagtatccctgccaccaagagagcaatgggcagggaaggaaggggtctgccgaccccagctcggggaatttcactagcccctttgcttcaaagggcacttgtgtcttagaatttggccagggtggggggttgagtcagcctcctcagagaaactgcgtgagagtgtgtgcgtgcatgggagtgtacttgtggaaaggtgtgtttgcgtagccttagggaaggaaggcaattgctccttaacagcagagtatcatgatacccccaggatcttgagttttttacaggatgttgggtttgctcaaggagtcaagaggagggcaccaagttttccttttttctaaatagctctggaaccaggcttgtaatccatagcatcaccgactctgcaaaggatttcattttggggtacagcagggtgttttaagtgctgtgacttcagctaatgatcttttcttcagccccaccccctccccactagctcgatctagtatattggggaatgcaggtggggggtgtcaccatattttttctgagctggcctttttttctcatcagattgtccaggctatattccacctgcctcttttgccctcttgagtagagttgcacacagcacatgggcaactgaagcagggttgaggggctctatctctctctctcctctgctgatgggacccttttcccctcaccctctgcccttctaagtcatagactaggtaggaaggccctatattggtccccagcatctactgaggcagacctgcaacagaagtggcattcagtccccagcagacatgggtgagctcaccccagcactgctgttgggaaggtgactgcaggaaaccaattcttacaagatccaggcccagcctttttgacctgcttgagagggaagaaggggtgtttagcatttaatagtttgcttgtcttccactcctgccaggaagtgtttatttgcctctaattgggcctgagagaccatagggaggttggggctcactgagggattggctgaggatgtataaagcaaaggctgtgagaagcagttgggagtttggttgtcattggattgaatttacttttttgtttctcacccgcaacttgagccaggacagctggtccaagtggccacagtgatgggtttaagtaccttggtagggctggcaccagtggaaacacatactgaagctgccaccacaatagcttgtgaggttttatccagctttggttagaccctgcatgaccaaatttgacctgcccttgtttatggcaagaagggcatttttctcttcaatttccagggtttcctaggacccagttcctcatgtaagggaggaagaccaaggtctttgtgttttcttcctcatggaattgaacctgacattttctggatctcctgcatgtcaggagcatcagtgaggcttcagcctccttgtctccactccagagaggaggtggctatgtcttcttaagcctctggccctcagaggctcctccctatctcctggctagttaccactaggctaccaggtctctaggggcctgagagaggccctctagagaatccagggaaactgtgagcccaggagttgcccatctatggtttcattcctcccctggctcttctccctcttcaggccataatttccctggtgccaatttcttttcctcctggggcatcctcatcccagggctctctgctgtagattggctgtgccagcttccaacaggttactggcaatgccagtgagtttctgtaggccctaagctgaagaagtgaggcagtgattctgcctccatcctggtttccccaaagccccagggcaccatccttaagggagaaggtctacagttatcattattttaattccattactttcagtctggaaaactaagctagtcagaactgtcatcttgcttcccaatctaagaacctgtggccctggaacacttttcaagaattggttcattttgctttacacagtagatctgttccaacagttctgtgtaaaccaaatgctatttttcaatgcatttggactgctgaccatttaaaagcagcctatgattgcttctttttgtaaagcaagcaacctccctccactttagctgttttgactatttgaattttcacatattgggcttacccagagtggagcacacctccagggcatgtggctgacactgggtcaatgtctgcatctgtgctgtgtgtgtagtgtggttggccagtaggtgagtatccctgtgtgtgtgagtgaagccactccccaggctggtgctctcctcctgtgcccagtgactgcccagtggcagctcagctgcccttcactcccacctgctgccaaagtccctgtgctaatgggattacaaatacaaaaagtggaaaaaaattttcgtaaactttgttttatattaaaagaaaaatccataagtctgtgtgtgttaaacatgaggttctgcctctgtggctgtgtttgaaaaaataaagttttattagaataatccattttcccaagcaaaaa

SEQ ID NO: 2152 - DNA, 2529 bp, Homo sapiens
cggagttgtcgtgtgttctggattcattccggcaccaccatgtcgaaggtttcctttaagatcacgctgacgtcggacccacggctgccgtacaaagtactcagtgttcctgaaagtacacctttcacagcagtcttaaagtttgcagcagaagaatttaaagttcctgctgcaacaagtgcaattattaccaatgatggaataggaataaatcctgcacagactgctggaaatgtttttctaaaacatggttcagaactgcggattattcctagagatcgtgttggaagttgttaatatctgctacttggaacatacgattgcctttcagaataaatattggtattttttgttgttgtaaaattgaaatcaggcatttaacatactatgaaaacaccaggagtcaatgattaatgaaaggtgactcatctgtccctttttgttgtccatactcttcctatgaagagggaatgcgtatgaattaaggctactactgtcacagaagatcatagtctttgatgctacctcacaacacaaacaggtagttcgttgggggcaaatgaattagccaactgttaactggaagcttttgataatttttttttttagaacaatttggaacattaaaatttactgaatcgtatatattcatctgagataaaaatataaaaagaattatggaccctggatggcaatttgcttgatagcatctgatttgcagactcataatttgatttttaattaaatatataggttatgatgaagtgaatagacatatcagtgaacagttaactatattaaatttttatcatttactttttttaagattcagacctcagttatataaatttcagtttaatatcaaccaaaaaattaaaattttaatctaacccttatgtgtataaattggtgtcccataccagcttttaatggtggacctatagaatccagtacttttaatggtgggaatttacagtagaagcatcctttgctgagttatacattcctttatcaatctcttttgatacaacatttaaaacaagtagcttcaagaaaccactggtgttttgaggatagtatttctaaatagcattcaggaacagagtattattgcacagatctgaagatcaaaaaaaagctcaaggaaatacagatcggaagtgctgatgagttatatttattgaaaacccaacttttaaggaagtgctaagatcagtcacccatgtgaataagaagccaggaaaggaaagatggggaagcccagatcaccaggcttctattaaggaggaaagcaacagaggaaacagtgaaggggaacagaagggggtagcaaagtgttacagaaaagcggactggatagacaaaactgcagaaggtgtatgttggggagaactgaaagggaaaacaaaatacttgacatagtcttaagtagaagaaggcagttagagaaaacaaagtatctactggccttgtcaacatacagacttcaaaataccccttatgagaatccaaagaatgatgtgtgtaagggaagattttatttgcccttccggaagaaatcagtatctatgcaaatcttgaaagacgaaatcaaagcccattaatgattcagaatcagtgcttgacctcctgtattctgaatggtgaactctggaagcagggattgtgtctggctctttttagagctggaagtgtagtggctttcattaaatacttgctgtaaagtctttctaagaccaattattatcttagcatgtttcagtatcttctctatcataggccctaagttcattgggggaaaaaaaataagaagattcaacagaatcagcatttgaagtgtaccattggtagttgtttatgaaattaccagatattcataaatgtgacaaatgaacagcaggattatgaattatcaaaggaaaaagtatttgctgaggtgaaaaaatctgatgtttgaggaagtttttatttttatttatttgttttgtttttttttttttttgaggcagactctctgtcgccaggcttctcctgcctcagcctcacgagtagctgggactacaggcatgcaccaccacgcccagctaatttttgtatttttagcagagacagggaggaagtttttatttttataaacaaaatctgatgttcagaggccccgtttcttacaataaatgttgagtcttagttaagcaggaatttatgaacacccatttcctgactttttgctttaatttagatttttctccatcctgtttctagcacaaaaatttgcctgctgtgttacaaaaataaatttatgttgtcctgtgccataaagtgatatatttaatatttttattctttggttttgaacattgtaagttcctaaaaacattttattaaacaagtagacattttgttattaaaaaaatgtgatctgtaatttctttgtgcagaatgatttgaagtattgtattcagtttacatgcattattggtttataattaatatctaatgaaaatacatgttgttatattgtaaaaaaaa

SEQ ID NO: 2153 - DNA, 2135 bp, Homo sapiens
gccccaggagcccggcgggtccgggactcccgtccgtgccggtgcgggcgccggcatgtggctgtgggaggaccagggcggcctcctgggccctttctccttcctgctgctagtgctgctgctggtgacgcggagcccggtcaatgcctgcctcctcaccggcagcctcttcgttctactgcgcgtcttcagctttgagccggtgccctcttgcagggccctgcaggtgctcaagccccgggaccgcatttctgccatcgcccaccgtggcggcagccacgacgcgcccgagaacacgctggcggccattcggcaggcagctaagaatggagcaacaggcgtggagttggacattgagtttacttctgacgggattcctgtcttaatgcacgataacacagtagataggacgactgatgggactgggcgattgtgtgatttgacatttgaacaaattaggaagctgaatcctgcagcaaaccacagactcaggaatgatttccctgatgaaaagatccctaccctaagggaagctgttgcagagtgcctaaaccataacctcacaatcttctttgatgtcaaaggccatgcacacaaggctactgaggctctaaagaaaatgtatatggaatttcctcaactgtataataatagtgtggtctgttctttcttgccagaagttatctacaagatgagacaaacagatcgggatgtaataacagcattaactcacagaccttggagcctaagccatacaggagatgggaaaccacgctatgatactttctggaaacattttatatttgttatgatggacattttgctcgattggagcatgcataatatcttgtggtacctgtgtggaatttcagctttcctcatgcaaaaggattttgtatccccggcctacttgaagaagtggtcagctaaaggaatccaggttgttggttggactgttaatacctttgatgaaaagagttactacgaatcccatcttggttccagctatatcactgacagcatggtagaagactgcgaacctcacttctagactttcacggtgggacgaaacgggttcagaaactgccaggggcctcatacagggatatcaaaataccctttgtgctagcccaggccctggggaatcaggtgactcacacaaatgcaatagttggtcactgcatttttacctgaaccaaagctaaacccggtgttgccaccatgcaccatggcatgccagagttcaacactgttgctcttgaaaatctgggtctgaaaaaacgcacaagagcccctgccctgccctagctgaggcacacagggagacccagtgaggataagcacagattgaattgtacaatttgcagatgcagatgtaaatgcatgggacatgcatgataactcagagttgacattttaaaacttgccacacttatttcaaatatttgtactcagctatgttaacatgtactgtagacatcaaacttgtggccatactaataaaattattaaaaggagcactaaaggaaaactgtgtgccaagcatcatatcctaaggcatacggaatttggggaagccaccatgcaatccagtgaggcttcagtgtacagcaaccaaaatggtagggaggtcttgaagccaatgagggatttatagcatcttgaatagagagctgcaaaccaccagggggcagagttgcacttttccaggctttttaggaagctctgcaacagatgtgatctgatcataggcaattagaactggaagaaacttccaaaaatatctaggtttgtcctcattttacaaatgaggaaactaaactctgtggaagggaaggggttgcctcaaaagtcacagcttagctgggcacagtggctcatgccgataatcccagcaattcagaaagctgaggcaggaggattacttgaggccagactgggcaatatagcaagaccccatctctaaaaaattaggcatggtggtgcatgcctgtattcccagctactcaggaggttgaggtgggaggatcacttgagcccagaagttcaaggctgcaatgagccatgattacaccacggcactacaaccttggtggcacagtgagaacctgactcttaaaaaaaaaaaaaaaaaa

SEQ ID NO: 2154 - DNA, 1729 bp, Homo sapiens
tcgacatggcggttaccctgagtctcttgctgggcgggcgcgtttgcgccgccgtcactcgctgtgggttcgcgacccggggggtggcgggcccaggccctattggccgggagccggaccccgattccgactgggagccggaggaacgggagctgcaggaggtggagaggtaccggcttctccccgggccctcagcttgaagcagggcctcgtgccccggcgctccaggccgcgcccccttggcgccgggtgtcctgccgctgcttgcgcagcggcccttgtttcttcttacccgttgttaggggcgcagcgtcaggtgttcagctccccgggaccactggtcccttcattagtgacgtatttcatcatcagtttagagagttcggcatgcttacaggcagttattgttctaggtgttagctttctgggtgtacggagcagctctaagccggcaacatggcccggttgcccttgcgatcaaagagaagagggctgggcgctccatgatttagcctgaggctcttcaaacatccattctgcttccacgcatggcttctgccattggttctcttcccccagcaccctgaaacgacagaaacaagcaatccgattccagaaaattcggaggcaaatggaggcgcctggtgccccgcccaggaccctgacgtgggaagccatggagcagatacggtatttacatgaggaatttccagagtcctggtcagttcccaggttggctgaaggctttgatgtcagcactgatgtgatccgaagagttttaaaaagcaagtttttacccacattggagcagaagctgaagcaggatcaaaaagtccttaagaaagctgggcttgcccactcgctgcagcacctccggggctctggaaatacctcaaagctgctccctgcaggccactctgtatcaggctctttgcttatgccagggcatgaagcctcatctaaagacccaaatcacagcacagctttgaaagtgatagagtcagacactcacaggacaaatacaccaaggagaaggaagggaagaaataaagaaatccaggacctggaggagagctttgtgcctgttgctgcacccctaggtcatccaagagagctgcagaagtactccagtgattctgagagccccagaggaactggcagtggtgcgttgccaagtggtcagaagctggaggagttgaaggcagaggagccagataacttcagcagcaaagtagtgcagaggggccgagagttctttgacagcaacgggaacttcctgtacagaatttgagtcggggcttggcttatggagatgcctcgtgaaacacagctgggcaagtattaatgtatatggaacagcctggatttctgcatatggataagccaccttggaataggaagaggtgttgagcctggactgtgggaggaaagagctgcgtggatagattcaaacttcctgtggtagtgctcccagtctgacctctgtagaccttcagtactcactcttcttgcttaggctctctgtgtgttgaaagccatcccgtgttgcatgtgttgttacaattttctgtgatacttgcaatttatgtttgagaagaagtgaaaagtttgccttctgacctcatttccttcttgatcagtgaacactaacattttggggacaacttagtcaattggttttccttacaacaaaataaagtaaaatgtagcaaaaaaaaaaaaaaaaaaa

SEQ ID NO: 2155 - DNA, 6203 bp, Homo sapiens
ggaaaagctcctcggagatgagcgtgaccccctggctcgtggtggccgcctgttctcactaacgccatggcggggaccggagtgagaaaccggtgtctgtcactgactgcaaagtgagcgagaagcaggctgcgggccgtcccagcacgacgtggagccccgcggagacctcgagatgccccgcggggaagctcctggccccgggagacggggggctaaggacgaggccctgggcgaagaatcgggggagcggtggagccccgagttccatctgcagaggaaattggcggacagcagccacagtgaacagcaagatcgaaacagagtttctgaagaacttatcatggttgtccaagaaatgaaaaaatacttcccctcggagagacgcaataaaccaagcactctagatgccctcaactatgctctccgctgtgtccacagcgttcaagcaaacagtgagtttttccagattctcagtcagaatggagcacctcaggcagatgtgagcatgtacagtcttgaggagctggccactatcgcttcagaacacacttccaaaaacacagatacctttgtggcagtattttcatttctgtctggaaggttagtgcacatttctgaacaggctgctttgatcctgaatcgtaagaaagatgtcctggcgtcttctcactttgttgacctgcttgcacctcaagacatgagggtattctacgcgcacactgccagagctcagcttcctttctggaacaactggacccaaagagctgcacggtatgaatgtgctccggtgaaaccttttttctgcaggatccgtggaggtgaagacagaaagcaagagaagtgtcactccccattccggatcatcccctatctgattcatgtacatcaccctgcccagccagaattggaatcggaaccttgctgtctcactgtggttgaaaagattcactctggttatgaagctcctcggatcccagtgaataaaagaatcttcaccaccacacacaccccagggtgtgtttttcttgaagtagatgaaaaagcagtgcctttgctgggttacctacctcaggacctgattggaacatcgatcctaagctacctgcaccctgaagatcgttctctgatggttgccatacaccaaaaagttttgaagtatgcagggcatcctccctttgaacattctcccattcgattttgtactcaaaacggagactacatcatactggattccagttggtccagctttgtgaatccctggagccggaagatttctttcatcattggtcggcataaagttcgaacgagcccactaaatgaggatgtttttgctaccaaaattaaaaagatgaacgataatgacaaagacataacagaattacaagaacaaatttacaaacttctcttacagccagttcacgtgagcgtgtccagcggctacgggagcctggggagcagcgggtcgcaggagcagcttgtcagcatcgcctcctccagtgaggccagtgggcaccgtgtggaggagacgaaggcggagcagatgaccttgcagcaggtctatgccagtgtgaacaaaattaaaaatctgggtcagcagctctacattgagtcaatgaccaaatcatcattcaagccagtgacggggacacgcacagaaccgaatggtggtggtgaatgtaagacctttacttccttccaccaaacactgaaaaacaatagtgtgtacactgagccctgtgaggatttgaggaacgatgagcacagcccatcctatcaacagatcaactgtatcgacagtgtcatcagatacctgaagagctacaacattccagctttgaaaagaaagtgtatctcctgtacaaatacaacttcttcctcctcagaagaagacaaacagaaccacaaggcagatgatgtccaagccttacaagctggtttgcaaatcccagccatacctaaatcagaaatgccaacaaatggacggtccatagacacaggaggaggagctccacagatcctgtccacggcgatgctgagcttggggtcgggcataagccaatgcggttacagcagcaccattgtccatgtcccacccccagagacagccagggatgctaccctcttctgtgagccctggaccctgaacatgcagccagcccctttgacctcggaagaatttaaacacgtggggctcacagcggctgttctgtcagcgcacacccagaaggaagagcagaattatgttgataaattccgagaaaagatcctgtcatcaccctacagctcctatcttcagcaagaaagcaggagcaaagctaaatattcatattttcaaggagattctacttccaagcagacgcggtcggccggctgcaggaaagggaagcacaagcggaagaagctgccggagccgccagacagcagcagctcgaacaccggctctggtccccgcaggggagcgcatcagaacgcacagccctgctgcccctccgcggcctcctctccgcacacctcgagcccgaccttcccacctgccgccatggtgcccagccaggccccttacctcgtcccagcttttcccctcccagccgcgacctcacccggaagagaatacgcagcccccggaactgcaccggaaggcctgcatgggctgcccttgtccgagggcttgcagccttacccagctttcccttttccttacttggatacttttatgaccgttttcctgcctgacccccctgtctgtcctctgttgtcgccatcgtttttgccatgtccattcctgggggcgacagcctcttctgcgatatcaccctcaatgtcgtcagcaatgagtccaactctggacccacccccttcagtcaccagccaaaggagagaggaggaaaagtgggaggcacaaagcgaggggcacccgttcattacttcgagaagcagctcacccttgcagttaaacttacttcaggaagagatgcccagaccctctgaatctccagatcagatgagaaggaacacgtgcccacaaactgagtattgtgttacaggcaacaatggcagtgagagcagtcctgctactaccggtgcactgtccacggggtcacctcccagggagaatccatcccatcctactgccagcgctctgtccacaggatcgcctcccatgaagaatccatcccatcctactgccagcgctctgtccacaggatcgcctcccatgaagaatccatcccatcctactgccagcacactgtccatgggattgcctcccagcaggactccatcccatcctactgccactgttctgtccacggggtcacctcccagcgaatccccatccagaactggttcagcagcatcaggaagcagcgacagcagtatataccttactagtagtgtttattcttctaaaatctcccaaaatgggcagcaatctcaggacgtacagaaaaaagaaacatttcctaatgtcgccgaagagcccatctggagaatgatacggcagacacctgagcgcattctcatgacataccaggtacctgagagggttaaagaagttgtactaaaagaagacctggaaaagctagaaagtatgaggcagcagcagccccagttttctcatgggcaaaaggaggagctggctaaggtgtataattggattcaaagccagactgtcactcaagaaatcgacattcaagcctgtgtcacttgtgaaaatgaagattcagctgatggtgcggccacatcctgtggtcaggttctggtagaagacagctgttgagtgactgtgaggatgaaccttcataccctttccaagacgtgttacacagacagacctttttaagtcctggacttttaaatgaccatgaagttatcattgaatgttaagattttttcttcttgattttttaatacacgtaatctttttgaagcagacattgtatacagaatcttacttctctttgttcctgatatattaaaatggccagttaggctctttttgtagttgaattgtcttctaaagagattggatggcctctaaagaggtatgtgtatctttatttcagatgtcacccagagtaaattataattagaagtatagctagaatgagccccaaaccttagcctcatttattttgttctgttacataagtcattttccccttagagtgcttgaagaaatgccacctacaggttgtgtacttttcataatggtttccatgaatgtagtacgttcatacaggcttcattcaacctggcgttcccctccataattaagatgaaacattccggttttctcacaacacattagcacatactgtccattagcatatctgggataaccaggttttgggggttgagttttggccttcatccttgtagatccctttcctattgatttcccaccttccagtgaaattctgaaagtcttatcttaaaaatcgatccgcttaccatgggcctattcttgtaagtttcagttagcatttgcatgtgtaatattaaaatgaaagagcttcttacccagtgctgttgcccttttgagtatttttgtttttaaaataatgattgtaaaatgttttacaagtaatgtaaaagctagtatcattcttacatacttctgtgtttaaattttcattcttaccaaaacagttaactctttctttccaatcaatttatacaaaagaggtcgctccagccctaccacaggtctgactggcactgccttttgtttgcccttgaacagggcagtgttgtggggactgcaaaagagaaaacgtccaggcgagcccagttgtcctcgcccacagggtcctgcaggctccatcagtcaccgctttctatggcgtttgtagttgtgtcttttaagaagtgagtgtgattgtttacttgataaatcagctcactctctggtgctttttagagaagtccctgattccttcttaaacttggaatgatagatgaaattcacacccctgcagatcagaaaaaacaaatagaagaaaatgagggttacagtaacctgttgtctttatataacttgcaacaaactaatttatttttttttcctttttttgtttttggttttttatggttttttaaggaaaatacttttctcctttgaagttttacagctttttgtaaatgcgtcctgataatgattaggaaaatcgaccttttcatccatgatgaccatcctcatagctcagatctcctttcaaagtagtggctttctggatggtaattccatcttaaggtgtcagaactattttcaaatgctgcctttgacagttcttggaattttctgatattaagcagttccatgcaaatattcgtgttttataaatagctctcatagtctgctccatcttgatagttaagtgatttctgaagcgtttgtgtgtgtgttgatcaggttgtgtgatatttttgcttgatagagaatcaaatttgaaacaattaaccagccagtagattgtctgtcagtgaccttctgtagtaataaagtttttgccactgtaaataaaaacagtatccgtagctatcaggatcattgcgcactcatatatgctaagccttctgttctctaatagaagcctttcttttccattgtttctggatatttgtattatccaaatgtgcttatttctttgccttagcacacgttttatggagtacttgttatactaggtttgatttgaaactggtgcttgtcgcagaactgtcagagcatgaggagcgctcctcctgtgggtggacgcattcacgcactcccaggttgcacctgctgctggcggtgagcagggggttcagcagcttgaccgatgccccccgagggggctctccccagcttaaactttgttgtttaaatttgttaactttttatattaatgactattgaaagtggtaataaaaatttatattataggcttcaatgttttcatgaatgttacccaaaaagctgtgttttctttggtcagaggtcaaaatttatgaaaaacaaaatgctgtatgaatggaaatcattttgcaattgagtgacacttcattgtaattcacagtgtaaatttaatccaaactgaaattttgtttcaactgaatttgtaattaactctgaatttgtttttaatcattagtaatatttcagttgggtatctttttaagtaaaaacaacaaataaactctgtacatgtaaaacgtga

SEQ ID NO: 2156 - DNA, 2168 bp, Homo sapiens
tttatttcaggtcccgggctcgagacggcggcgcgtgcagcagctccagaaagcagcgagttggcagagcagggctgcatttccagcaggagctgcgagcacagtgctggctcacaacaagatgctcaaggtgtcagccgtactgtgtgtgtgtgcagccgcttggtgcagtcagtctctcgcagctgccgcggcggtggctgcagccggggggcggtcggacggcggtaattttctggatgataaacaatggctcaccacaatctctcagtatgacaaggaagtcggacagtggaacaaattccgagacgaagtagaggatgattatttccgcacttggagtccaggaaaacccttcgatcaggctttagatccagctaaggatccatgcttaaagatgaaatgtagtcgccataaagtatgcattgctcaagattctcagactgcagtctgcattagtcaccggaggcttacacacaggatgaaagaagcaggagtagaccataggcagtggaggggtcccatattatccacctgcaagcagtgcccagtggtctatcccagccctgtttgtggttcagatggtcatacctactcttttcagtgcaaactagaatatcaggcatgtgtcttaggaaaacagatctcagtcaaatgtgaaggacattgcccatgtccttcagataagcccaccagtacaagcagaaatgttaagagagcatgcagtgacctggagttcagggaagtggcaaacagattgcgggactggttcaaggcccttcatgaaagtggaagtcaaaacaagaagacaaaaacattgctgaggcctgagagaagcagattcgataccagcatcttgccaatttgcaaggactcacttggctggatgtttaacagacttgatacaaactatgacctgctattggaccagtcagagctcagaagcatttaccttgataagaatgaacagtgtaccaaggcattcttcaattcttgtgacacatacaaggacagtttaatatctaataatgagtggtgctactgcttccagagacagcaagacccaccttgccagactgagctcagcaatattcagaagcggcaaggggtaaagaagctcctaggacagtatatccccctgtgtgatgaagatggttactacatgccaacacagtgtcatggcagtgttggacagtgctggtgtgttgacagatatggaaatgaagtcatgggatccagaataaatggtgttgcagattgtgctatagattttgagatctccggagattttgctagtggcgattttcatgaatggactgatgatgaggatgatgaagacgatattatgaatgatgaagatgaaattgaagatgatgatgaagatgaaggggatgatgatgatggtggtgatgaccatgatgtatacatttgattgatgacagttgaaatcaataaattctacatttctaatatttacaaaaatgatagcctatttaaaattatcttcttccccaataacaaaatgattctaaacctcacatatattttgtataattatttgaaaaattgcagctaaagttatagaactttatgtttaaataagaatcatttgctttgagtttttatattccttacacaaaaagaaaatacatatgcagtctagtcagacaaaataaagttttgaagtgctactataataartttttcacgagaacaaactttgtaaatcttccataagcaaaatgacagctagtgcttgggatcgtacatgttaattttytgaaagataattctaagtgaaatttaaaataaataaatttttaatgacctgggtcttaaggatttaggaaaaatatgcatgctttaattgcatttccaaagtagcatcttgctagacctagatgagtcaggataacagagagataccacatggcaagaaaaacaaagtgacaattgtagagtcctcaattgtgtttacattaatagtggtgtttttacctawgaaattattctggatctaayaggacattttacaaaatggcaagtatggaaaaccatggattctgaaagttaaaaatttagttgttctccccaatgtgtattttaatttggatggcagtctcatgcagattttttaaaagattctttaataacatgatttgtttgcc

SEQ ID NO: 2157 - DNA, 1924 bp, Homo sapiens
cgcccgggcaggttagaattcagcgaccgcttaattctaggctcagtcccgacgtggaactcagcagcggaggctggacgcttgcatggcgcttgagagattccatcgtgcctggctcacataagcgcttcctggaagtgaagtcgtgctgtcctgaacgcgggccaggcagctgcggcctgggggttttggagtgatcacgaatgagcaaggcgtttgggctcctgaggcaaatctgtcagtccatcctggctgagtcctcgcagtccccggcagatcttgaagaaaagaaggaagaagacagcaacatgaagagagagcagcccagagagcgtcccagggcctgggactaccctcatggcctggttggtttacacaacattggacagacctgctgccttaactccttgattcaggtgttcgtaatgaatgtggacttcaccaggatattgaagaggatcacggtgcccaggggagctgacgagcagaggagaagcgtccctttccagatgcttctgctgctggagaagatgcaggacagccggcagaaagcagtgcggcccctggagctggcctactgcctgcagaagtgcaacgtgcccttgtttgtccaacatgatgctgcccaactgtacctcaaactctggaacctgattaaggaccagatcactgatgtgcacttggtggagagactgcaggccctgtatacgatccgggtgaaggactccttgatttgcgttgactgtgccatggagagtagcagaaacagcagcatgctcaccctcccactttctctttttgatgtggactcaaagcccctgaagacactggaggacgccctgcactgcttcttccagcccagggagttatcaagcaaaagcaagtgcttctgtgagaactgtgggaagaagacccgtgggaaacaggtcttgaagctgacccatttgccccagaccctgacaatccacctcatgcgattctccatcaggaattcacagacgagaaagatctgccactccctgtacttcccccagagcttggatttcagccagatccttccaatgaagcgagagtcttgtgatgctgaggagcagtctggagggcagtatgagctttttgctgtgattgcgcacgtgggaatggcagactccggtcattactgtgtctacatccggaatgctgtggatggaaaatggtcttgcttcaatgactccaatatttgcttggtgtcctgggaagacatccagtgtacctacggaaatcctaactaccactggcaggaaactgcatatcttctggtttacatgaagatggagtgctaatggaaatgcccaaaaccttcagagattgacacgctgtcattttccatttccgttcctggatctacggagtcttctaagagattttgcaatgaggagaagcattgttttcaaactatataactgaccttatttataattagggatattatcaaaatatgtaaccatgaggcccctcaggtcctgatcagtcagaatggatgctttcaccagcagacccggccatgtggctgctcggtcctgggtgctcgctgctgtgcaagacattagccctttagttatgagcctgtgggaacttcaggggttcccagtggggagagcagtggcagtgggaggcatctgggggccaaaggtcagtggcagggggtatttcagtattatacaactgctgtgaccagacttgtatactggctgaatatcagtgctgtttgtaatttttcactttgagaaccaacattaattccatatgaatcaagtgttttgtaactgctattcatttattcagcaaatatttattgagcatctcttctccataagatagtgtgataaacacggtcatgaataaagttattttccccgaaaaaaaaaaaaaaaaaaaaaaaaaa

SEQ ID NO: 2158 - DNA, 1924 bp, Homo sapiens; identical to SEQ ID NO: 2157

SEQ ID NO: 2159 - DNA, 1233 bp, Homo sapiens
atggtccgtccgcgccgtgccccgtaccgctccggcgccgggggccccctcgggggtcgcggccgccctccgcggcccctcgtggtgcgcgccgtccgctcgcgctcctggcctgccagcccccgaggcccgcagcctccgcggatccgggcccgctcggcccctcccatggaaggtgctcgggtcttcggggcactgggtcccatcggtccctcctcacctgggctcaccctcgggggtctggccgtgagcgagcaccggctcagcaacaagctgctggcttggagcggcaagcgcagaccctactctgactccactgcaaagctgaagcggaccctgccctgccaagcctacgtgaaccaaggcgagaacctggagaccgaccagtggccgcagaagctgatcatgcagctgatccctcagcagctgctgaccaccctgggccccctgttccggaactcccagttggcacagttccacttcaccaacagagactgcgactcgctcaaggggctctgccgcatcatgggcaacggcttcgcgggctgcatgctgttcccccacatctccccctgtgaggtgcgcgtgctcatgctcctgtactcgtccaagaagaagatcttcatgggcctcatcccctacgaccagagcggcttcgtcagtgccatccggcaggtcatcaccacccgcaagcaggcagtgggacctggtggtgtcaactcaggcccagtccagatcgtcaacaacaagtttctggcatggagtggtgtcatggagtggcaggagcccaggcctgagcccaacagtcggtccaagaggtggctgccatcccacgtctacgtgaaccagggggagatcctgaggaccgagcagtggccaaggaagctgtacatgcagctcatcccgcagcagctgctgaccaccctagtgccgctgttccggaactcgcgcctggtccagttccacttcaccaaggacctggagacactgaagagcctgtgccggatcatggacaatggcttcgccggctgcgtgcacttttcctacaaagcatcgtgtgagatccgcgtgcttatgctcctgtactcttcagagaagaaaatcttcattggcctcatcccccatgaccagggcaactttgtcaacggcatccggcgtgtcattgccaaccagcagcaggtcctgcagcggaacctggagcaggagcaacagcaacgagggatgggggggtag

SEQ ID NO: 2160 - DNA, 910 bp, Homo sapiens
ttacactaagaactctttgttacatcaggtattgcactctcagtctcgccatgttgaagtcagaatggcctgtattcactatcttcgagagaacagagagaaatttgaagcgtttatagaaggatcatttgaagaatatttaaagcgtttggaaaatccacaggaatgggtaggacaagtggaaataagtgccctttctcttatgtacaggaaagattttataatttatcgggaaccaaatgtttctccttcacaagtaacagaaaataattttcctgaaaaggtgttactgtgtttttcaaatggaaatcattatgatattgtgtatcccataaagtataaagaaagctctgctatgtgtcagtctctcctttatgaattgctgtatgagaaggtatttaaaactgatgttagtaaaattgtgatggaactagacacgttggaagtagctgatgaagataacagtgaaatatcagattcagaggatgacagttgcaagtaagaatgaaatcctaaaatacctttcttagtgccatacaaggaaagttaagtaaatgtctttacatttcagtaaatgtctttctataacatatattgaggtattaatggtattcataaaatacagcagtctgctgaagtttctttatccctgtcactaattttacctaatttctattatgggactgtttgctttgaaagttggtgtttttggttgatgagaatttacgtctgcaatctagatgcatatttgtagaataaatttggtcctacctatatgtgtgtgtattgtaaaattttaaagttaacttgtcaattgttcacatacccagtaatgaaataaaatggccgtttggatttccttcaaaaaaaaaaaaaaaaaaaaaaaaaaaaactgtctctgtcacctgtc

SEQ ID NO: 2161 - DNA, 1309 bp, Homo sapiens
actgcagccgaaccctggtccctcctccacaatgtggcttctcctcactctctccttcctgctggcatccacagcagcccaggatggtgacaagttgctggaaggtgacgagtgtgcaccccactcccagccatggcaagtggctctctacgagcgtggacgctttaactgtggcgcttccctcatctccccacactgggtgctgtctgcggcccactgccaaagccgcttcatgagagtgcgcctgggagagcacaacctgcgcaagcgcgatggcccagagcaactacggaccacgtctcgggtcattccacacccgcgctacgaagcgcgcagccaccgcaacgacatcatgttgctgcgcctagtccagcccgcacgcctgaacccccaggtgcgccccgcggtgctacccacgcgttgcccccacccgggggaggcctgtgtggtgtctggctggggcctggtgtcccacaacgagcctgggaccgctgggagcccccggtcacaagtgagtctcccagatacgttgcattgtgccaacatcagcattatctcggacacatcttgtgacaagagctacccagggcgcctgacaaacaccatggtgtgtgcaggcgcggagggcagaggcgcagaatcctgtgagggtgactctgggggacccctggtctgtgggggcatcctgcagggcattgtgtcctggggtgacgtcccttgtgacaacaccaccaagcctggtgtctataccaaagtctgccactacttggagtggatcagggaaaccatgaagaggaactgactattctagcctatctcctgtgcccctgactgagcagaagcccccacagctggccagcagccccgcctgacatggaacagaacggagccatcccccaagaccctgtccaaggcccagatgttagccaaggacttgtcccacctgaggacaaagctggcgctcaaggtcacctgtttaatgccaagataacaaagcgctgatccaagttgctctgtaggaatttctgtgacttttttctggggtcaaagagaaaccccgagacactgtacactgttccttttcacccaccaccccgatccctaggtgaggagaagcggcttgaagcagggctccattcattcaacacacatgaccacccgtgtgatcttgaacaagaggcccaatctcacttcgccttggtttccttatctgtaaaatgagaccatcttattgctgacttcaaagggctgttgtgaggattaaatgagatgattcgtctgaactgattaaaatcgtgtctggcactga

SEQ ID NO: 2162 - DNA, 1114 bp, Homo sapiens
gtctggcttgggcaggctgcccgggccgtggcaggaagccggaagcagccgcggccccagttcgggagacatggcgggcgttaaagctctcgtggcattatccttcagtggggctattggactgacttttcttatgctgggatgtgccttagaggattatggcgtttactggcccttattcgtcctgattttccacgccatctcccccatcccccatttcattgccaaaagagtcacctatgactcagatgcaaccagtagtgcctgtcgggaactggcatatttcttcactactggaattgttgtttctgcctttggatttcctgttattcttgctcgtgtggctgtgatcaaatggggagcctgcggccttgtgttggcaggcaatgcagtcattttccttacaattcaagggtttttccttatatttggaagaggagatgattttagctgggagcagtggtagcactttattctgattacagtgcattgaatttcttagaactcatactatctgtatacatgtgcacatgcggcattttactatgaaatttaatatgctgggttttttaatacctttatatatcatgttcactttaagaaagacttcataagtaggagatgagttttattctcagcaaatagacctgtcaaatttagattatgttactcaaattatgttacttgtttggctgttcatgtagtcacggtgctctcagaaaatatattaacgcagtcttgtaggcagctgccaccttatgcagtgcatcgaaaccttttgcttggggatgtgcttggagaggcagataacgctgaagcaggcctctcatgacccaggaaggccggggtggatccctctttgtgttgtagtccatgctattaaaagtgtggcccacagaccaagagcctcaacatttcctagagccttattagaaatgcagaatctgaagccccactctggacccaggacattttgatgagatccaaaggagttgtatgcacatgaaagtttgagaagcatcatcatagagaagtaaacatcacacccaacttccttatctttccagtggctaaaccacttaacctctctgggtgttacctgctcatttgttta

SEQ ID NO: 2163 - DNA, 1815 bp, Homo sapiens
gctgctgaggcgtggtaatggcgtcccgcggccggcgtccggagcatggcggacccccagagctgttttatgacgagacagaagcccggaaatacgttcgcaactcacggatgattgatatccagaccaggatggctgggcgagcattggagcttctttatctgccagagaataagccctgttacctgctggatattggctgtggcactgggctgagtggaagttatctgtcagatgaagggcactattgggtgggcctggatatcagccctgccatgctggatgaggctgtggaccgagagatagagggagacctgctgctgggggatatgggccagggcatcccattcaagccaggcacatttgatggttgcatcagcatttctgctgtgcagtggctctgtaatgctaacaagaagtctgaaaaccctgccaagcgcctgtactgcttttttgcttctcttttttctgttctcgtccggggatcccgagctgtcctgcagctgtaccctgagaactcagagcaggtgagtccctcggctactgggtgtgccggggagttgggggactcaacaggtaagctgtcctggggaagcgacaaagaatcttatgcagattggcgggaaaaggaggaaacatgcaccctagtgtggcccctgatggcacatttgatgacctgatatcctaagggggtggcatctgcggaggtggggtgggatgccttctcttggtagatgacatggtattacagataaggtgatgcgactgatttccataaccaaataagtaaatgccatttaggaagggtgagagggcaccgacagttctccgttgtgtgatgtataaattaaggaatggcggagtaggatgtagatgttgaaagataagtgaagagctgttcctgactaataacatgaatgactctggattccaattggtggccatctccctaaacttgagtggggagctgggtccctgcactggaaagtgagaatgaggggagttgctttgttctgtaattctcctgagggaggtgtgggccatgccagattctagcctgtacttttctctacgtggcttacagcgaccttaagttctcccaggcaggatttgtcctggagcagactggcttctgaaggaggggagggaggtgaagctgtctgctcctctcaacctccgctgcctgacccgctgcctttctttcctcagttggagctgatcacaacccaggccacaaaggcaggcttctccggtggcatggtggtagactaccctaacagtgccaaagcaaagaaattctacctctgcttgttttctgggccttcgacctttataccagaggggctgagtgaaaatcaggatgaagttgaacccagggagtctgtgttcaccaatgagaggttcccattaaggatgtcgaggcggggaatggtgaggaagagtcgggcatgggtgctggagaagaaggagcggcacaggcgccagggcagggaagtcagacctgacacccagtacaccggccgcaagcgcaagccccgcttctaagtcaccacgcggttctggaaaggcacttgcctctgcacttttctatattgttcagctgacaaagtagtattttagaaaagttctaaagttataaaaatgttttctgcagtaaaaaaaaagttctctgggccgggcgtggtggctcacacctgtaatcccagcaccttgggaggctgaggtgggaggatcatttgaggccaggagtttgagacctgcctgggcaacataatgaaacttcctttccagggagaaaaaaaaaaaaaaaaaaaa

SEQ ID NO: 2164 - DNA, 3164 bp, Homo sapiens
cacatttcttagcttctctgagcctccatttcagcatctgtaaaatgttactacctactttataggttttctgatgaggcttaagtgtggttgtgcatgtgaccatcttagcatagtgtgtggcaatggtaagcactcagtgctgtcagctgtttttaccgctgttattatattactgtgttttcccatgtcattaggtctgtgatccaggcttcagcagacaatccaggctgatgcttttgctgagtgcgctaagggatgctggcctggcgggatggtgaactggaagcagaaacgtcatcctctctcttccttcttgccatgcaggtgtggatgtgtgggggccgcatggaggacatcccctgctccagggtgggccatatctacaggaagtatgtgccctacaaggtcccggccggagtcagcctggcccgggtaagaaccttaagcgggtggccgaagtgtggatggatgagtacgcagagtacatttaccagcgccggcctgaataccgccacctctccgctggggatgtcgcagtccagaaaaagctccgcagctcccttaactgcaagagtttcaagtggtttatgacgaagatagcctgggacctgcccaaattctacccacccgtggagcccccggctgcagcttggggggagatccgaaatgtgggcacagggctgtgtgcagacacaaagcacggggccttgggctccccactaaggctagagggctgcgtccgaggccgtggggaggctgcctggaacaacatgcaggtattcaccttcacctggagagaggacatccggcctggagacccccagcacaccaagaagttctgctttgatgccatttcccacaccagccctgtcacgctgtacgactgccacagcatgaagggcaaccagctgtggaaataccgcaaagacaagaccctgtaccaccctgtcagtggcagctgcatggactgcagtgaaagtgaccataggatcttcatgaacacctgcaacccatcctctctcacccagcagtggctgtttgaacacaccaactcaacagtcttggaaaaattcaataggaactgagccctcatgtccccttggcaggccccccagggtctggcactcactgcagacttcctctttcaagggaggcagggcccctgtgggcactaggtgtaaaaggtgctggccaaatggttcagggtgaagagggctcttgattcaggggctggggtctgcctggtccttgagcccctgagttgtgggggtagggtgaagagcatatcccacaagaggccccacagggagcagagactgctttaatccctgctgacatcacggaaaagcaacagagccttttcaactttgtcactatgtccccttgaacattatgtgggagaacaccaaggtagcctaggccacccaaaagtgagtcctgcgaggttgcccagccctcagatggctctcctacatgatggtgctttagaaacaaaggtaaaatttgcctgtttggggcagcttttagtatcgatgccactcatctgcagcagaagagaaagaagtcctcttggggctttttagtttctgccgtcctggggggaacattgcagttactgcacagcttctgttctctgtcacaaccccaggtgatttggtccggtcaaaggccatacttggggccctaagagtgttcagtattgaatgctgatcagctgccaggtgaggagtcagaagagggagcccccctagacatttctttgcagctatggacatgcgggatatctccccctgctctctgggtatttgaaatgtcaattttagcactctccaggcacaaggacagcccagcaccagctttacagggcagtgtttcagatggccctgagcccacggaaaaggccaggtagacctccaaactagaaatgctggctgatttgccctgatccatgcttccatttccctgtctctcttccccaggcaattactggcctcaaaagaggaacagaggtgctgcgaggtgctcacctcacagagtctggaggcctccaggatcaactgtgggcaaagtgcctgcctctgacctcatcatggttctagttctcatacagaactccagaatttttaaagaactctataattggattgcaaactaggatgctacataggattctggtattccacatccaatatggatttctagaatgctgtgattaaaggagccagccaggtgtaatacagtcaaggcagcccccagcctagagacaatctgtgaaatccaaagttggtggtgttgggaaagcagggggacatgtgtccctcagctcagcagaggctgtggtacaacatggtccttggtgaagacctgcacccctggaacctcccaccatcatcacaactgtagtctcatttgcagtggagaaaagaacccgacgtcccacagccagatatacacccagctccatgccagcccttcatgtttaccttttgctttgttaattacatgtcagactcctagagggcctccagactaataggaagcatttctgtaaccaacctgccacccactgattcagaaatggaaatcacattccacaatctatggcttccaccagctagcccaggaaatacttgaaatcagcattccaattagtgttgagtctcttgattgtgtcatttaccaattaaataactgagacctaagtctgggaacagagccacgaatctgcctttgagatgctggcagatctcaaggccatcaattattgggggagggagggacaaacactcccaatcatccaccagtcagactgaatgtgtagctggcgaggaattacttccacttctggcccagcacaagccctgctttggccacctgtctgcaagagaggcggcccctgtgcttgcaacgcttacgtgttgatcccagtgtccttttccaaatgagtgctgtagctttagaagtggccctctatagaaagaagtcaaaagatgaggccccttctagaatctaggataacaagagtgttgacagtttgaggagtcgaattgagattcatcatcaaagagcaatgcagcgtcgttaaaataaaaactgtgccttttaaaaagaaaaatgcaaatatagagcaaatccctaaacttgaaaaaaaaaaaaaaaaa

SEQ ID NO: 2165 - DNA, 1533 bp, Homo sapiens
atgcccggcggaggggcgagcgcggcgtctggccggcttctcaccgccgcggagcaaagagggtcccgggaagcggcagggtcggcgtccaggagcggcttcgggggctccggcggcggcagaggcggagcaagcggccccgggtccgggagcggaggccctgggggccccgcgggcaggatgagcttgaccccgaaggagctctcgagcctgctgagcatcatatcggaggaggcgggcggcggcagcaccttcgagggcctgtccaccgccttccaccactacttcagcaaggccgaccacttccgcctgggctcggtgctcgtcatgctgctccagcagcccgacctgctgcctagcgcggcgcagcgcctcacggcgctctacctgctctgggagatgtaccgcaccgagccgctggccgccaaccccttcgccgccagcttcgcgcacctgctcaaccccgcgccgcccgcccgcggcggccaggaacccgaccgccctccgctctcaggatttttacctcctataactccaccagaaaagttttttctttcccagctgatgctggcacccccacgggaactcttcaaaaagacgcctcgccagattgcactgatggacgttggaaacatgggccagtctgtggacattagtgggcttcagttagccttggccgaacgccaatctgaattgccaacgcaaagcaaagcgagcttccccagtattctcagtgacccagacccggattcttctaattctggatttgacagctcagttgcctctcagatcacagaagctttagtcagcggaccaaagccacctattgaaagccattttcgaccagagtttattcgtccaccgcctccactccacatttgtgaggatgaacttgcttggctaaaccccacggagcctgaccacgcgatccagtgggataaatcgatgtgtgttaagaatagcactggtgtggagatcaaacgaataatggccaaagccttcaaaagccccttatcctctccccaacaaacacagctacttggtgagttggaaaaagaccccaaacttgtctaccatattggcctcaccccagccaaacttcctgaccttgtggaaaacaaccctttagtcgctatagaaatgttgctgaaattaatgcagtcaagccagatcactgagtatttctctgtcctggtcaatatggacatgtctttacattcaatggaagttgtaaatcgactaactacagctgttgatctacctcctgaatttattcacctttatatatcaaattgcatctctacttgtgaacagattaaggataaatatatgcagaatcggttggtgcgtcttgtgtgtgtgtttctccaatccttgatccgtaacaaaattattaatgtacaggatttgtttatagaagtgcaggcattctgtattgaattcagtaggatacgagaagctgctggtcttttccggttgttgaagacattggatactggggaaacaccttctgagaccaaaatgtcaaaataa

SEQ ID NO: 2166 - DNA, 1187 bp, Homo sapiens
gcgacggtagcagcagcatggccgcgatctatgggggtgtagaggggggaggcacacgatccgaggtccttttagtctcagaggatgggaagatcctggcagaagcagatggactgagcacaaaccactggctgatcgggacagacaagtgtgtggagaggatcaatgagatggtgaacagggccaaacggaaagcaggggtggatcctctggtaccgctgcgaattttgggcctatctctgagcggtggggaccaggaggacgcggggaggatcctgatcgaggagctgagggaccgatttccctacctgagtgaaagctacttaatcaccaccgatgccgccggctccatcgccacagctacaccggatggtgggattgtgctcatatctggaacaggctccaactgcaggctcatcaaccctgatggctccgagagtggctgcggcggctggggccatatgatgggtgatgagggttcagcctactggatcgcacaccaagcagtgaaaatagtgtttgactccattgacaacctagaggcggctcctcatgatatcggctacgtcaaacaggccatgttccactatttccaggtgccagatcggctagggatactcactcacctgtatagggactttgataaatgcaggtttgctgggttttgccggaaaattgcagaaggtgctcagcagggagaccccctttcccgctatatcttcaggaaggctggggagatgctgggcagacacatcgtagcagtgttgcccgagattgacccggtcttgttccagggcaagattggactccccatcctgtgcgtgggctctgtgtggaagagctgggagctgctgaaggaaggttttcttttggcgctgacccagggcagagagatccaggctcagaacttcttctccagcttcaccctgatgaagctgaggcactcctccgctctgggtggggccagcctaggggccaggcacatcgggcacctcctccccatggactatagcgccaatgccattgccttctattcctacaccttttcctaggggctggtcccggctccaccccctccaagctcagtggacactgggtctgaaaggaaggagtcttttgcttcctttctcctttttacaaaaacaaacatagaagaaaataaatgcactttatccactccccaaaaa

SEQ ID NO: 2167 - DNA, 1549 bp, Homo sapiens
gctggcggggcccggacagaagatggtgcagaagaaaccagccgaacttcagggtttccaccgttcgttcaaggggcagaaccccttcgagctggccttctccctagaccagcccgaccacggagactctgactttggcctgcagtgctcagcccgccctgacatgcccgccagccagcccattgacatcccggacgccaagaagaggggcaagaagaagaagcgcggccgggccaccgacagcttctcgggcaggtttgaagacgtctaccagctgcaggaagatgtgctgggggagggcgctcatgcccgagtgcagacctgcatcaacctgatcaccagccaggagtacgccgtcaagatcattgagaagcagccaggccacattcggagcagggttttcagggaggtggagatgctgtaccagtgccagggacacaggaacgtcctagagctgattgagttcttcgaggaggaggaccgcttctacctggtgtttgagaagatgcggggaggctccatcctgagccacatccacaagcgccggcacttcaacgagctggaggccagcgtggtggtgcaggacgtggccagcgccttggactttctgcataacaaaggcatcgcccacagggacctaaagccggaaaacatcctctgtgagcaccccaaccaggtctcccccgtgaagatctgtgacttcgacctgggcagcggcatcaaactcaacggggactgctcccctatctccaccccggagctgctcactccgtgcggctcggcggagtacatggccccggagttagtggaggccttcagcgaggaggctagcatctacgacaagcgctgcgacctgtggagcctgggcgtcatcttgtatatcctactcagcggctacccgcccttcgtgggccgctgtggcagcgactgcggctgggaccgcggcgaggcctgccctgcctgccagaacatgctgtttgagagcatccaggagggcaagtacgagttccccgacaaggactgggcccacatctcctgcgctgccaaagacctcatctccaagctgctggtccgtgacgccaagcagaggctgagtgccgcccaagtcctgcaacacccctgggttcaggggtgcgccccggagaacaccttgcccactcccatggtcctgcagaggtgggacagtcacttcctcctccctccccacccctgtcgcatccacgtgcgacctggaggactggtcagaaccgttactgtgaatgagtgaagatcctggaggaccctggccccaggccagctcccatcgctgggggacggtgaacggccatgtgttaatgttacgatgtttttaaaagacaaaaaaaaaaaaaaaacctcaaaagtttttttaaagtgggggaaaaacatccaagcactttaattccaatgtaccaggtgaactgacggagctcagaagttttcctttacaccaactgtcaatgccggaattttgtattctgttttgtaaagatttaataaaagtcaaaaaacttgcaaaaaaaaaaaaaaa

SEQ ID NO: 2168 - DNA, 1488 bp, Homo sapiens
gatgctcgtatgtgataggccagaaagagagcaactgaaaatgcttctcttggctgtgttgaacttcacagccttgctcattgagtacagcttttcccggcatctgtacagttccatagagcatttgacaactttattggcttcctctgatatgcaagtggtgctggcagtcctcaatctcctatatgtatttagcaaaagatcaaactacatcactcgtctgggatctgacaagaggaccccgctgctaactcggctacaacatttggcagagagctggggtggaaaggagaatggctttggacttgcagaatgttgcagagacttgcatatgatgaaatatccacccagtgcaactacactacactttgaattctatgcagatcctggggccgaggtcaaaattgagaaaaggacaactagtaacacactacattatattcacatagagcaacttgacaagatttcagaaagcccttctgaaatcatggaatctcttaccaaaatgtacagcattcctaaggataagcagatgctgttatttacacacatacgactggcccatggcttttctaatcacaggaagcgattgcaggcagttcaggccagactgcatgcaatatctatattagtgtattccaatgccttgcaggaatcagcaaacagtatcttgtataatggcttgatagaggagttggtagatgtccttcagataacggataagcagcttatggagattaaagcagcttctttacgaacattaacatcaattgtccacttggagagaactcccaaactcagcagtattattgactgtactggaactgcctcctaccatggatttttgccagtgcttgtaaggaactgtatccaggccatgattgatccttccatggatccataccctcaccagtttgccactgctctcttctcttttttataccatctggccagctacgatgctggtggtgaagccttggtctcctgtggaatgatggaagccttattgaaggtcataaagtttcttggcgatgaacagagaccagaaagagtaaaaccttttatgacaggggctgcagaacaaatcaagcacatccttgctaatttcaaaaactaccagttctttattggtgaaaacatgaatccagatggcatggttgctctattggactaccgtgaggatggtgtgaccccatatatgattttctttaaggatggtttagaaatggaaaaatgttaacaaatgtggcaattattttggatctatcacctgtcatcataactggcttctgcttgtcatccacacaacaccaggacttaagacaaacgggactgatgtcatcttgagctcttcatttattttgactgtgatttatttggagtggaggcattgtttttaagaaaaacatgtcatgtaggttgtctaaaaataaaatgcatttaaactcaaaaaaaaaaaaaaaaaaaaaaaaaaaaaaaaaaaaaaaa

SEQ ID NO: 2169 - DNA, 1702 bp, Homo sapiens
acaactgctaaagctccagagacacgagcgtgtgtggcagcaagagccgccagttcgggaccaccgcagctggggtggcagcggcgcaggaggggtcgcggggcgggagtggtgagcgcaggcggcaggggtctgggaaagacgaagtcgctatttgctgtctgagcgcgctcgcagctcctggaagtgttgccgcctctcggtttcgctctcgctcgctgcgctcctagaaggggcggccgcctccaggactgaccagggccaagtggcgctcggcgggcactacatggcggagggtgaagggtacttcgccatgtctgaggacgagctggcctgcagcccctacatccccctaggcggcgacttcggcggcggcgacttcggcggcggcgacttcggcggcggcgacttcggcggcggcgacttcggcggtggcggcagcttcggtgggcattgcttggactattgcgaaagccctacggcgcactgcaatgtgctgaactgggagcaagtgcagcggctggacggcatcctgagtgagaccattccgattcacgggcgcggcaacttccccacgctcgagctgcagccgagcctgatcgtgaaggtggtgcggcggcgcctggccgagaagcgcattggcgtccgcgacgtgcgcctcaacggctcggcagccagccatgtcctgcaccaggacagcggcctgggctacaaggacctggacctcatcttctgcgccgacctgcgcggggaaggggagtttcagactgtgaaggacgtcgtgctggactgcctgttggacttcttacccgagggggtgaacaaagagaagatcacaccactcacgctcaaggaagcttatgtgcagaaaatggttaaagtgtgcaatgactctgaccgatggagtcttatatccctgtcaaacaacagtggcaaaaatgtggaactgaaatttgtggattccctccggaggcagtttgaattcagtgtagattcttttcaaatcaaattagactctcttctgctcttttatgaatgttcagagaacccaatgactgagacatttcaccccacaataatcggggagagcgtctatggcgatttccaggaagcctttgatcacctttgtaacaagatcattgccaccaggaacccagaggaaatccgagggggaggcctgcttaagtactgcaacctcttggtgaggggctttaggcccgcctctgatgaaatcaaggcccttcaaaggtacatgtgttccaggtttttcatcgacttctcagacattggagagcagcagagaaaactggagtcctatttgcagaaccactttgtgggattggaagaccgcaagtatgagtatctcatgacccttcatggagtggtaaatgagagcacagtgtgcctgatgggacatgaaagaagacagactttaaaccttatcaccatgctggctatccgggtgttagctgaccaaaatgtcattcctaatgtggctaatgtcacttgctattaccagccagccccctatgtagcagatgccaactttagcaattactacattgcacaggttcagccagtattcacgtgccagcaacagacctactccacttggctaccctgcaattaagaatcatttaaaaatgtcctgtggggaagccatttcagacaagacaggagagaaaaaaaaaaaaaaaaaaaa

SEQ ID NO: 2170 - DNA, 2075 bp, Homo sapiens
ttcgaggctctgatgagagtcctaaagtcatcctgttctttgagattcttgatttcttaagcgtggatgaaattaagaataattctgaggttcaaaaccaagaatgtggctttcggaaaattgcctgggcatttcttaagcttctgggagccaatggaaatgcaaacatcaactcaaaacttcgcttgcagctatattacccacctactaagcctcgatccccattaagtgttgttgaggcatttgaatggtggtcaaaatgtccaagaaatcattacccatcaacactgtacgtaactgtaagaggactgaaagttccagactgtataaagccatcttaccgctctatgatggctcttcaggaggaaaaaggtaaaccagtgcattgtgaacgtcaccatgagtcaagctcagtagacacagaacctggattagaagagtcaaaggaagtaataaagtggaaacgactccctgggcaggcttgccgtatcccaaacaaacacctcttctcactaaatgcaggagaacgaggatgtttttgtcttgatttctcccacaatggaagaatattagcagcagcttgtgccagccgggatggatatccaattattttatatgaaattccttctggacgtttcatgagagaattgtgtggccacctcaatatcatttatgatctttcctggtcaaaagatgatcactacatccttacttcatcatctgatggcactgccaggatatggaaaaatgaaataaacaatacaaatactttcagagttttatctcatccttcttttgtttacacggctaaattccatccagctgtaagagagctagtagttacaggatgctatgattccatgatacggatatggaaagttgagatgagagaagattctgccatattggtccgacagtttgatgttcacaaaagttttatcaactcactttgttttgatactgaaggtcatcatatgtattcaggagattgtacaggggtgattgttgtttggaatacctatgtcaagattaatgatttggaacattcagtgcaccactggactataaataaggaaattaaagaaactgagtttaagggaattccaataagttatttggagattcatcccaatggaaaacgtttgttaatccataccaaagacagtactttgagaattatggatctccggatattagtagcaaggaagtttgtaggagcagcaaattatcgggagaagattcatagtactttgactccatgtgggacttttctgtttgctggaagtgaggatggtatagtgtatgtttggaacccagaaacaggagaacaagtagccatgtattctgacttgccattcaagtcacccattcgagacatttcttatcatccatttgaaaatatggttgcattctgtgcatttgggcaaaatgagccaattcttctgtatatttacgatttccatgttgcccagcaggaggctgaaatgttcaaacgctacaatggaacatttccattacctggaatacaccaaagtcaagatgccctatgtacctgtccaaaactaccccatcaaggctcttttcagattgatgaatttgtccacactgaaagttcttcaacgaagatgcagctagtaaaacagaggcttgaaactgtcacagaggtgatacgttcctgtgctgcaaaagtcaacaaaaatctctcatttacttcaccaccagcagtttcctcacaacagtctaagttaaagcagtcaaacatgctgaccgctcaagagattctacatcagtttggtttcactcagaccgacagtcactttgctgaattcaacacatgtatattatggtggaaaaagcactagactcagggtcagccagccagaagaactgagccgacctgggatcccaccacttcctaactgttttgttaggtagttcactttctctcttcggataaatgtctccacatttcctacttcatagaattgtcagaatcaacacaatacatttaatactttgaaactcataaaatattgggagaataaacagtatgaggttaaaaaaaaaaaaaaaaa

SEQ ID NO: 2171 - DNA, 1747 bp, Homo sapiens
aattggcaacccggaagcggtcggtagtgcggcgctgtttaaagatggcggcggaggaacctcagcagcagaagcaggagccgctgggcagcgactccgaaggtgttaactgtctggcctatgatgaagccatcatggctcagcaggaccgaattcagcaagagattgctgtgcagaaccctctggtgtcagagcggctggagctctcggtcctatacaaggagtatgctgaagatgacaacatctatcaacagaagatcaaggacctccacaaaaagtactcgtacatccgcaagaccaggcctgacggcaactgtttctatcgggctttcggattctcccacttggaggcactgctggatgacagcaaggagttgcagcggttcaaggctgtgtctgccaagagcaaggaagacctggtgtcccagggcttcactgaattcacaattgaggatttccacaacacgttcatggacctgattgagcaggtggagaggcagacctctgtcgccgacctgctggcctccttcaatgaccagagcacctccgactaccttgtggtctacctgcggctgctcacctcgggctacctgcagcgcgagagcaagttcttcgagcacttcatcgagggtggacggactgtcaaggagttctgccagcaggaggtggagcccatgtgcaaggagagcgaccacatccacatcattgcgctggcccaggccctcagcgtgtccatccaggtggagtacatggaccgcggcgagggcggcaccaccaatccgcacatcttccctgagggctccgagcccaaggtctaccttctctaccggcctggacactacgatatcctctacaaatagggctggctccagcccgctgctgccctgctgcccccctctgccaggcgctagacatgtacagaggtttttctgtggttgtaaatggtcctatttcacccccttcttcctgtcacatgacccccccccatgttttattaaagggggtgctggtggtgagccgtgtgtgcgtgtccctgctctgctgcccgcctggctgctctgtctgctgccccctccccccaggtgggtccccctgcttttcacctatctactcctgagcttccccaacaggagcaggtttgaggggccaggcctcttggaggcccctcctgcttcgttgggttctgcttccttcccttcttagctggctcaggggcttctatgggatcctggaagttccttagggacttgcccagggtcccagggccacccacacttcatctgctccctcataggccccacctccacgtcccggctgggccccagaccccagcttcctgccctccaccgggagtctgcatggttgggagtcctgggtggaggggcctttgtgaggctggacccggctcagggcaggtggaggagctgggcctcccacagggtgcccgggcagtgccatcctggtgggggagggcagccttcaaacgtgtggggtctacagtcctcaggtctaggcagggcagccggttctccacctccccatccgccccaggccccctgcctgtgcctgccttgcaccccctctgcttgggccacggtgtctctgcattgcctgcctttttgccttcacctcttttcttccccgccccctgcacattcggggtctcagcccccaggctgtgagctccttgggggcaggccctcaataaatgtgaactgctgctgccgccaaaaaaaaaaaaaaaaaa

SEQ ID NO: 2172 - DNA, 2466 bp, Homo sapiens
atctgtgggagcagtttattccagtatcacccagggtgcagccacaccaggactgtgttgaagggtgttttttttcttttaaatgtaatacctcctcatcttttcttcttacacagtgtctgagaacatttacattatagataagtagtacatggtggataacttctacttttaggaggactactctcttctgacagtcctagactggtcttctacactaagacaccatgaaggagtatgtgctcctattattcctggctttgtgctctgccaaacccttctttagcccttcacacatcgcactgaagaatatgatgctgaaggatatggaagacacagatgatgatgatgatgatgatgatgatgatgatgatgatgatgatgaggacaactctctttttccaacaagagagccaagaagccatttttttccatttgatctgtttccaatgtgtccatttggatgtcagtgctattcacgagttgtacattgctcagatttaggtttgacctcagtcccaaccaacattccatttgatactcgaatgcttgatcttcaaaacaataaaattaaggaaatcaaagaaaatgattttaaaggactcacttcactttatggtctgatcctgaacaacaacaagctaacgaagattcacccaaaagcctttctaaccacaaagaagttgcgaaggctgtatctgtcccacaatcaactaagtgaaataccacttaatcttcccaaatcattagcagaactcagaattcatgaaaataaagttaagaaaatacaaaaggacacattcaaaggaatgaatgctttacacgttttggaaatgagtgcaaaccctcttgataataatgggatagagccaggggcatttgaaggggtgacggtgttccatatcagaattgcagaagcaaaactgacctcagttcctaaaggcttaccaccaactttattggagcttcacttagattataataaaatttcaacagtggaacttgaggattttaaacgatacaaagaactacaaaggctgggcctaggaaacaacaaaatcacagatatcgaaaatgggagtcttgctaacataccacgtgtgagagaaatacatttggaaaacaataaactaaaaaaaatcccttcaggattaccagagttgaaatacctccagataatcttccttcattctaattcaattgcaagagtgggagtaaatgacttctgtccaacagtgccaaagatgaagaaatctttatacagtgcaataagtttattcaacaacccggtgaaatactgggaaatgcaacctgcaacatttcgttgtgttttgagcagaatgagtgttcagcttgggaactttggaatgtaataattagtaattggtaatgtccatttaatataagattcaaaaatccctacatttggaatacttgaactctattaataatggtagtattatatatacaagcaaatatctattctcaagtggtaagtccactgacttattttatgacaagaaatttcaacggaattttgccaaactattgatacataagggttgagagaaacaagcatctattgcagtttctttttgcgtacaaatgatcttacataaatctcatgcttgaccattcctttcttcataacaaaaaagtaagatattcggtatttaacactttgttatcaagcacattttaaaaagagctgtactgtaaatggaatgcttgacttagcaaaatttgtgctctttcatttgctgttagaaaaacagaattaacaaagacagtaatgtgaagagtgcattacactattcttattctttagtagcttgggtagtactgtaatatttttaatcatcttaaagtatgatttgatataatcttattgaaattaccttatcatgtcttagagcccgtctttatgtttaaaactaatttcttaaaataaagccttcagtaaatgttcattaccaacttgataaatgctactcataagagctggtttggggctatagcatatgcttttttttttttaattattacctgatttaaaaatctctgtaaaaacgtgtagtgtttcataaaatctgtaactcgcattttaatgatccgctattataagcttttaatagcatgaaaattgttaggctatataacattgccacttcaactctaaggaatatttttgagatatccctttggaagaccttgcttggaagagcctggacactaacaattctacaccaaattgtctcttcaaatacgtatggactggataactctgagaaacacatctagtataactgaataagcagagcatcaaattaaacagacagaaaccgaaagctctatataaatgctcagagttctttatgtatttcttattggcattcaacatatgtaaaatcagaaaacagggaaattttcattaaaaatattggtttgaaaaaaaaaaaaaaaaaa

SEQ ID NO: 2173 - DNA, 1625 bp, Homo sapiens
cttttaaaacccgcttcccgctgagtctgcacccaggagaccagagagcaccttgcccttccatggaaactcaggctgatctcgtatctcaggaacctcaggccctgcttgacagtgctcttctttcaaaagttcctgccttttccgacaaggacagcctgggggatgagatgttggcggctgcgctcctaaaggccaagtcccaggagctggtaacctttgaggatgtagctgtgtacttcatccggaaggagtggaagcgtttggaacctgctcagagggacctctatagagatgtgatgctggagaattacgggaatgtgttctcactggatcgtgagaccaggactgaaaatgatcaagaaatttctgaagacacaagatcacatggggtcctactgggaagatttcaaaaggatatttctcagggtctcaagtttaaagaagcctatgaacgagaagtcagtctgaaaaggccgctggggaactcccctggagaaagactgaacaggaaaatgccagattttggtcaagtgacagttgaggagaagctaacccccaggggagagagaagcgagaaatataatgattttgggaacagcttcactgtgaattccaaccttatctcacatcagagactccccgtgggagacagaccccataagtgtgatgaatgtagcaagagctttaatcgaacttcagaccttattcaacatcagagaatccacactggggaaaagccctatgaatgtaatgagtgtgggaaggccttcagccagagctcacaccttattcagcatcagagaatccacactggggaaaaaccttatgaatgtagtgattgtgggaaaaccttcagctgtagctctgccctcattctgcatcggaggatccacacgggggagaaaccctatgaatgtaatgagtgtgggaagaccttcagctggagctccaccctcacccaccatcagagaatccacactggtgagaaaccctacgcctgcaatgaatgtgggaaggccttcagcaggagctcaacccttattcaccatcagagaatccacactgaagctcttcccacattcgttacactgataaggcttctccccagtgtggatccgatagtgacgaatgaggctgcctttcccgctgaaagccttgccacaatctttgcactgatatggcgcctcttctgtgtgcattctctgatgtttaagaaggtctgagctctgcccaaaagcttttccacacttacagtcatagggccggtccaccaagtgtgttctgtaatggagggtgaggtttgagctgtggctgaaagctttcccacacttggtgcacacgtaaggtttctccccagtgtgtgttctcctgtgtttggtgagatttgagctattactaaaggctttgccacattcagcacatatataacgtctctctcctggggtaggtttagtaggaactgattctctacctttcttggagcctgcctcttgaagagggggttttgttcctttttcattttcaaggtttacgcactgcctctctaagctggcctcaggtttattggcgataatcacagaaattatatcccctttgagcccctcaaaaaaaaaaaaaaaaaa

SEQ ID NO: 2174 - DNA, 2929 bp, Homo sapiens
ggcacgaggggtcggcggcctggggtcggcgccggcgccggcggccgaggaggcggcaggaaccgcagggcgctcggggaagcaaacggagtgtggaaatacgacctgacccctgcaatccagaccacaagcaccctttatgagcggggctttgagaatatcatgaagcggcagaataaggagcaggtcccaccccctgctgtggaacctaagaaaccagggaacaagaagcagccaaagaaggtggcaactcctcccaaccaaaaccagaagcagggccgcttccgcagcctggaggaagcactgaaagctctggatgtggcagacctgcagaaggaactggacaagagccagagtgtgttctctggaaacccatccatatggttgaaggacctggccagctatctcaactacaagctacaagctcctctaagtgaacccacgctgagccagcatactcatgattatccctacagcctggtgagccgggagctacgtgggatcatccgagggctgctggcgaaggcagcagggtctctggagctcttttttgaccactgtctgttcaccatgttgcaagagctggataagacaccaggggagtcactacatggttaccgcatctgtatccaggccatcctgcaagacaagcccaagattgccacggcaaacctaggcaagttcctggaactgctgaggtcccaccagagccgaccagcaaagtgtctcaccatcatgtgggccctgggtcaagcaggttttgccaacctcaccgagggactgaaagtgtggctggggatcatgctgcctgtgctgggcatcaagtctctgtctccctttgccatcacatacctggatcggctgctcctgatgcatcccaaccttaccaagggcttcggcatgattggccccaaggacttcttcccacttctggactttgcctatatgccgaacaactccctgacacccagcctgcaggagcagctgtgtcagctctacccccgactgaaaatgctggcatttggagcaaagccggattccaccctgcatacctacttcccttctttcctgtccagagccacccctagctgtccccctgagatgaagaaagagctcctgagcagcctgactgagtgcctgacggtggaccccctcagtgccagcgtctggaggcagctgtaccctaagcacctgtcacagtccagccttctgctggagcacttgctcagctcctgggagcagattcccaagaaggtacagaagtctttgcaagaaaccattcagtccctcaagcttaccaaccaggagctgctgaggaagggtagcagtaacaaccaggatgtcgtcacctgtgacatggcctgcaagggcctgttgcagcaggttcagggtcctcggctgccctggacgcggctcctcctgttgctgctggtcttcgctgtaggcttcctgtgccatgacctccggtcacacagctccttccaggcctcccttactggccggttgcttcgatcatctggcttcttacctgctagccaacaagcgtgtgccaagctctactcctacagtctgcaaggctacagctggctgggggagacactgccgctctggggctcccacctgctcaccgtggtgcggcccagcttgcagctggcctgggctcacaccaatgccacagtcagcttcctttctgcccactgtgcctctcaccttgcgtggtttggtgacagtctcaccagtctctctcagaggctacagatccagctccccgattccgtgaatcagctactccgctatctgagagagctgcccctgcttttccaccagaatgtgctgctgccactgtggcacctcttgcttgaggccctggcctgggcccaggagcactgccatgaggcatgcagaggtgaggtgacctgggactgcatgaagacacagctcagtgaggctgtccactggacctggctttgcctacaggacattacagtggctttcttggactgggcacttgccctgatatcccagcagtaggccctgccttcctggccactgatttctgcatgggtagaccatccaagactgcagcgggtagaaggtggcagttcttcatgggagtctttttaacttggtgcctgagttctctcctaggcaagtggccagttgcctccacctcagttcttccatctttggtggggacagggcccagcagcatctcagcctcctacccacaattccactgaacacttttctggccctactgcacatggcccccagcctccatccttgtgctggtagcctctcacaactccgcccttgccctctgccttccacttccttccatctcatttctaaaccccaaacagctcatctctaaaaagatagaactcccagcaggtggcttctgtgttcttctgacaaatgattcctgcttctccagactttagcagcctcctgttcccattcttggtcacagctctagccacagcagaaggaaaggggcttccagaagaatatagcaccgcattgggaaacagcagcctcacctccacctgaagcctgggtgtggctgtcagtggacatggggagctggatggaaatgcctctcacttcaaaatgcccagcctgccccaaatgcctctaagcccctccctgtcccctcccttgtagtcctacttcttccaactttccattccccatcatgctgggggtcttggtcacaaggctcagcttctctccactgtccatccctcctatcatctgtagagcagagcacaggcagttgtgtgccttgggcccagggaaccctccatcaacctgagacaggactcagtatatggttcttgggtatgccctaccaggtggaataaaggacacagatttgatttctaaaaaaaaaaaaaaaaaaaaaaaaaaaaaaaaaaaaaaaaaa

SEQ ID NO: 2175 - DNA, 2150 bp, Homo sapiens
aaactgacagctattcagagcttgccatggtggactttgagatgtgtgaatattcatcagcatttgcttgaggaacgctcacctctgctttttactcttgccgaaaactgtattgatcaagtgatgaaactacagaatctgtttgtagatgattcaggtcgatatttggctattcaattccatctggaatgtgcatatgtgtttttatattattatgagtacagaaaagcaaaagatcagttggatattgctaaggacatcagccaattacaaattgatttgacaggtgctttgggaaaaagaacacggttccaggaaaattatgtggcacaactgattctagatgtaagaagggaaggggatgtcctttcaaattgtgaattcactccagcacccactcctcaggaacatttaaccaagaatcttgagctcaatgatgacaccattctgaatgacataaagttagcagattgtgaacagttccagatgccggatctgtgtgctgaagagatcgctattattcttggaatctgcactaattttcaaaagaataacccagtgcacacattaactgaagtggagcttctggcatttacatcatgtttgctttcacaaccaaagttctgggccattcagacatcagccttgatcctccggacaaaacttgagaaaggaagtactcgccgagtggaacgggcaatgaggcagacacaggctcttgcagaccaatttgaagataaaactacatctgtattggaacgcctgaagattttctattgctgtcaagtaccacctcactgggccattcagcgccaacttgcaagtttgctctttgagttgggatgtaccagttcagcccttcagatatttgaaaagctagaaatgtgggaagatgttgtcatttgttatgaaagagccgggcagcacggaaaggcagaagaaatccttagacaagagctggagaaaaaagaaacgcctagtttatactgcttgcttggagatgtcctcggagaccattcttgctatgacaaggcctgggagttgtcccggtaccacagtgctcgtgctcagcgctccaaagccctccttcatcttcggaacaaggagtttcaagagtgtgtagagtgcttcgaacgctcggttaagattaatcccatgcagctcggggtgtggttttctctcggttgtgcctatttggccttggaagactatcaaggttcagcaaaggcatttcagcgctgtgtgactctagaacccgataatgctgaagcttggaacaatttgtcaacttcctatatccgattaaaacaaaaagtaaaagcttttagaactttacaagaagctctcaagtgtaactatgaacactggcagatttgggaaaactacatcctcaccagcactgacgttggggaattttcagaagccattaaagcttatcaccggctcttggacttacgtgacaaatacaaagatgttcaggtccttaaaattctagtcagggcagtgattgatgggatgactgatcgaagtggagatgttgcaactggcctcaaaggaaagctgcaggagttatttggcagagtgacttcaagagtgacaaatgatggagaaatctggaggctgtatgcccacgtatatggaaatgggcagagtgaaaagcctgatgaaaatgaaaaggcattccagtgcctctcaaaggcatacaagtgtgacacccagtccaattgttgggagaaagatattacatcatttaaggaagtcgttcaaagagccttaggacttgcacatgtggccataaaatgcagtaaaaacaaatccagttcccaagaagctgtacaaatgctttcttctgttcgactcaatttacggggcttgttatctaaagcaaagcaactttttacagatgtggcaactggagaaatgtccagggaattagctgatgacataacagctatggacaccttagtgacagagctccaagacctaagcaaccagtttcgaaatcagtattgattctgctggaagcagattctggaaaaggtgctttcacctgctggtaaaaggttacatctgtatatctgaaatgcaagatattgatttttaaaataaatttgttttaatgacttaaaaaaaaaaaaaaaaaaaaaaaa

SEQ ID NO: 2176 - DNA, 2490 bp, Homo sapiens
accagttcgcgccggcggtagacgaggacgccaacagcagcggagaaacgtttctctttcctctcagtttgcgcacaccatggcggcccctgcccagcagactactcagcctggcggcgggaagcgcaaaggcaaggctcagtatgtgctggccaagcgcgctcggcgctgcgacgctggcgggccccgtcagctagagcccgggctacagggcatcctcatcacctgcaatatgaacgagcgcaagtgcgtggaggaggcctacagcctcctcaacgaatacggcgacgacatgtatgggccagaaaagtttacagacaaggatcagcggccctctggaagtgagggagaggatgatgatgcggaggctgccttgaagaaagaagttggtgacattaaggcatctacagagatgaggttaagaagattccagtcagtggaaagtggagcaaataacgttgtcttcatcaggacacttgggatagagcctgagaaattggtgcatcatattctccaggatatgtacaaaaccaagaaaaagaagactcgagttattttgcgaatgttacccatctcaggcacatgcaaggcttttttagaagatatgaaaaaatatgcagaaacatttttggaaccctggtttaaagctccaaacaaagggacatttcagattgtgtacaaatctcgaaataacagtcatgtgaatagagaagaagttatcagagaattggcaggaatagtgtgcaccctcaattcagaaaataaagtggatctcaccaatccacagtacacagtggtagtagaaatcatcaaagctgtctgttgcctgagtgttgtgaaagattacatgttgtttagaaaatacaatctccaggaggtggtgaagagccctaaggatccgtcacagcttaactcaaagcagggaaatggggaagaagctaaactggaatctgcggacaaatcagaccaaaacaacacagcagaaggaaaaaataaccagcaggtaccagagaatactgaggagctggggcagacaaaaccaacgtctaatccacaggtggtaaatgagggaggagccaaacctgaacttgcaagtcaagccacagaaggatccaagtcaaatgaaaatgactcctcataggaagtcatttggtgttggaggtgggtttctcacctggggctctacgagatgttgctggggctccaccttaaattgtgactaaaaacagttttttatttgtgtgctgcactatgctgttctcacagtagtgagcaatgattgcgcagccctgttaacagtttttttagggatctttcagcctttatggtattacgtagaggcagacccatgtgctgctgttgcaaagaggggaggataggagggggatgttggcctctcccaggctcctcttctgcagtgccagctgacttaagggagtgaactacctgtgaagtagaaaatcagagggaagttttcattctaaggaaggagtttttacatgccacagctcagctgtctgcctgccactttgttgtaaacattgcaaaaatgtggatcatgtaggttagaagtgaattgtttagtgaagtttttgtacttttgtgattttcttgtttatgtctgtttttttttttttttttaacatttgtgtgtaatatagctgacagtccagtgtcgcaattttggaaggcaagatgtgagagagacgagaaccattttaggcatagaactacagacatttctgaaaaggttggtgatgaagaacttcagtcttctgagtatacttcagtatactagtgcaacaagggacacaaagaaattctgtcttaataaagaaagctacttctcaagggtattatgtggactcagtccaagctctcctgtcccattgtgcattgtctgtgacatgcaacttacaaaactagcaattgtaacaataaatcacagccacttgacaagaaaggatattcattattttcaaatggcttttggactatcaaaaacagtaaggcttttgttcagaaatcacctttagtcaaaaggtttaagaagcaaattatttagtagcagaacttatctcaggaaaggaaaatatgcatggttggtgagaatctaataacattaaaatgctggggcaagatgcagtacaagttgaagagactttattctcaataagttgatttactgatgatatgtcatatgatgcaaaaaaggttttgtgtcattaactgaaaagtagcagcttctctatccaggatgatgagtcaacaggtttcactaatatttgtcatgctgtagcatttgtaagatttgtaaatgatgaaattcaaagaaaactttttctattgctaggagcctgccagaacaaggccaatatataatgttgtgacatcatatctgataaccagaggtctggtatctacactcctggtgccccatcagtggttgtctccataagtcattttgcgttaaaaaaaaaaaaaaaaaaa

SEQ ID NO: 2177 - DNA, 2830 bp, Homo sapiens
aagtgctaaagcctccgaggccaaggccgctgctactgccgccgctgcttcttagtgccgcgttcgccgcctgggttgtcaccggcgccgccgccgaggaagccactgcaaccaggaccggagtggaggcggcgcagcatgaagcggcgcaggcccgctccatagcgcacgtcgggacggtccgggcggggccggggggaaggaaaatgcaacatggcagcagcaatggaaacagaacagctgggtgttgagatatttgaaactgcggactgtgaggagaatattgaatcacaggatcggcctaaattggagcctttttatgttgagcggtattcctggagtcagcttaaaaagctgcttgccgataccagaaaatatcatggctacatgatggctaaggcaccacatgatttcatgtttgtgaagaggaatgatccagatggacctcattcagacagaatctattaccttgccatgtctggtgagaacagagaaaatacactgttttattctgaaattcccaaaactatcaatagagcagcagtcttaatgctctcttggaagcctcttttggatctttttcaggcaacactggactatggaatgtattctcgagaagaagaactattaagagaaagaaaacgcattggaacagtcggaattgcttcttacgattatcaccaaggaagtggaacatttctgtttcaagccggtagtggaatttatcacgtaaaagatggagggccacaaggatttacgcaacaacctttaaggcccaatctagtggaaactagttgtcccaacatacggatggatccaaaattatgccctgctgatccagactggattgcttttatacatagcaacgatatttggatatctaacatcgtaaccagagaagaaaggagactcacttatgtgcacaatgagctagccaacatggaagaagatgccagatcagctggagtcgctacctttgttctccaagaagaatttgatagatattctggctattggtggtgtccaaaagctgaaacaactcccagtggtggtaaaattcttagaattctatatgaagaaaatgatgaatctgaggtggaaattattcatgttacatcccctatgttggaaacaaggagggcagattcattccgttatcctaaaacaggtacagcaaatcctaaagtcacttttaagatgtcagaaataatgattgatgctgaaggaaggatcatagatgtcatagataaggaactaattcaaccttttgagattctatttgaaggagttgaatatattgccagagctggatggactcctgagggaaaatatgcttggtccatcctactagatcgctcccagactcgcctacagatagtgttgatctcacctgaattatttatcccagtagaagatgatgttatggaaaggcagagactcattgagtcagtgcctgattctgtgacgccactaattatctatgaagaaacaacagacatctggataaatatccatgacatctttcatgtttttccccaaagtcacgaagaggaaattgagtttatttttgcctctgaatgcaaaacaggtttccgtcatttatacaaaattacatctattttaaaggaaagcaaatataaacgatccagtggtgggctgcctgctccaagtgatttcaagtgtcctatcaaagaggagatagcaattaccagtggtgaatgggaagttcttggccggcatggatctaatatccaagttgatgaagtcagaaggctggtatattttgaaggcaccaaagactcccctttagagcatcacctgtacgtagtcagttacgtaaatcctggagaggtgacaaggctgactgaccgtggctactcacattcttgctgcatcagtcagcactgtgacttctttataagtaagtatagtaaccagaagaatccacactgtgtgtccctttacaagctatcaagtcctgaagatgacccaacttgcaaaacaaaggaattttgggccaccattttggattcagcaggtcctcttcctgactatactcctccagaaattttctcttttgaaagtactactggatttacattgtatgggatgctctacaagcctcatgatctacagcctggaaagaaatatcctactgtgctgttcatatatggtggtcctcaggttgctattgctggggccccagtcactctgtggatcttctatgatacaggatacacggaacgttatatgggtcaccctgaccagaatgaacagggctattacttaggatctgtggccatgcaagcagaaaagttcccctctgaaccaaatcgtttactgctcttacatggtttcctggatgagaatgtccattttgcacataccagtatattactgagttttttagtgagggctggaaagccatatgatttacagatctatcctcaggagagacacagcataagagttcctgaatcgggagaacattatgaactgcatcttttgcactaccttcaagaaaaccttggatcacgtattgctgctctaaaagtgatataattttgacctgtgtagaactctctggtatacactggctatttaaccaaatgaggaggtttaatcaacagaaaacacagaattgatcatcacattttgatacctgccatgtaacatctactcctgaaaataaatgtggtgccatgcaggggtctacggtttgtggtagtaatctaataccttaaccccacatgctcaaaatcaaatgatacatattcctgagagacccagcaataccataagaattactaaaaaaaaaaaaaaaaaaaaa

SEQ ID NO: 2178 - DNA, 1879 bp, Homo sapiens
actatcccaggattcccgactcccggtttcctgtccttctcccctcccagctcctggcgcctgcgatagcggcaagatggcggaccgtggcggcgtgggtgaagccgcagctgttggagcgtctcctgcatctgtccctggcctaaacccgacgctaggctggagggagcgactgcgggccgggctggcggggactggggcctcgttgtggttcgtggcggggctggggctgctttacgccctgaggatccctttgaggctgtgtgagaatttggcagcggtgactgtatttttaaattcattgacacccaaattctatgtggcacttacagggacctcttcattgatatcaggactaatatttatatttgaatggtggtacttccataagcatggcacatcttttattgagcaagtatctgtaagccatttgcaaccactgatgggaggaacagagagcagcatttcagaaccaggttctccttcgaggaacagagaaaatgaaaccagcagacagaatttgtcagaatgtaaggtatggagaaaccctctaaatcttttcagaggagcagaatataggagatacacttgggtgactggtaaagagccacttacatactatgacatgaacctgtcagctcaggaccatcagacctttttcacctgtgacacagattttttacgtccttcagacacagttatgcagaaggcttggagggaaagaaatcctccagctcgaatcaaagcagcctatcaagctttagaattaaacaatgactgtgccactgcatatgttctactggctgaggaagaagcaacaactattgtagatgctgaaaggttatttaaacaggcactcaaggcaggagaaacaatttataggcagtcacagcagtgccagcaccaaagtcctcagcatgaagctcaactgaggagagataccaatgtactggtatatattaaaagaagattggcaatgtgtgcaagaaaattaggaagaataagagaagcagtaaaaataatgagagatttgatgaaagaatttcctcctcttaccatgttgaacatccatgaaaatctcttagaatcacttttagaattacaggcctatccagatgttcaggcagtcctagcaaaatatgatgatataagccttccaaagtcagcagcaatctgttacacagcagcactgttgaagacaaggactgtttcagaaaaattctctccagaaacagcctccagaagaggattaagcacagcagaaattaatgccgtggaagcaattcatagagctgtggaatttaatcctcatgttccaaaatatttattagagatgaaaagtttaattttacctccagaacacattctgaaacggggtgatagtgaagcaattgcctatgctttctttcatcttcagcactggaaacgaatagaaggtgctcttaatctgttacagtgtacatgggaaggcacttttagaatgattccatacccgttagagaaaggacatctattttacccttatcccagctgcacagagacggctgatagagagctattacctacctttcatcatgtttctgtttacccaaaaaaggagcttcctttgttcatccatttcacagcaggattttgctcttctacagcaatgatagccattctcactcaccagtttcctgaaatcatgggtatttttgctaaagctgtgctgggactctggtgcccccaaccctgggcatcctcaggctttgaggagaatacacaggatttgaagtcagaagacctaggtttgagttctggctgagccacgcactgttcatgtgaccttggacaaatcaccaaatttttctgaacagcatctataaagtgacagtaaccc

SEQ ID NO: 2179 - DNA, 2382 bp, Homo sapiens
agaaggagaaggtcgggttgtagaagctggggtggccggcagctcgctcatcggtgttcgtgggctttgtcggtccgtgcctcgtctctccctggaaagggagggaggcttcgacgtcgagagggagccgctgccgcgttagttccgagcttgaagtcactaggacttctctcaaacttgtgtgctgaggagactcagatgttggcctcagctcctaggctgaactcagcagatcggcccatgaaaacttctgtattgagacaaaggaagggatctgtcagaaagcaacacttgttatcttgggcttggcagcaaggaagaggacaggtagtggagatcctgcaatctgaaaagcagactgaaaggtgacaaagaagctgaagatgggtggtggagagaggtataacattccagcccctcaatctagaaatgttagtaagaaccaacaacagcttaacagacagaagaccaaggaacagaattcccagatgaagattgttcataagaaaaaagaaagaggacatggttataactcatcagcagctgcctggcaggccatgcaaaatggggggaagaacaaaaattttccaaataatcaaagttggaattctagcttatcaggtcccaggttactttttaaatctcaagctaatcagaactatgctggtgccaaatttagtgagccgccatcaccaagtgttcttcccaaaccaccaagccactgggtccctgtttcctttaatccttcagataaggaaataatgacatttcaacttaaaaccttacttaaagtacaggtataaaataagacaaatgtttaaatttagttatgttcacggatagttgtcaattggtctgaaacaaattcgctagggaatctatttgtgtagaactaattaatgtaaaaaaaacagaccatctcgtgttgtgtgcactgtgatataatggtagtatcagtgcaactttaatgattgtacttgatattaagtgttctcaactgagtaacttttaagtggaaaccaagtttagatttggggagtggtaaaggaatcagctttttctattgttaggggaagacagtaatttatcattcatggaccagtagattgttgaaagttggtgaatcggattataagcttctagctaacacaaggattcagaattaggtaaacatctgaaggtttagtatattagaaacacccaaaccagtaatatgctaacctgatgcactgctgaaagaaaatgtgaatttttcgtaataattgcattttagtgaattgtacagtgggtggaaagggcatttggagctcattagaatgagacatagtacaccccaatggccctgtttattaaatgtagtggattaagtgtctgtcaacaaatacaccaaaaccattttttatagaaacagtatttaatggtcactcaatagctttcaaaatacatttttgtattacagcactgcacaagctattctaatagtgctctcgcctcatcattcctgcaaagcttgctttggggagttggataatgtgaaaattttaagtacctaggggagaaagagccatgtaaatatctgtaataaacttgtagcatatgtaaagttttcttggcctttatcttacaaaaatggagtattttagtatgaatttgctgaatgtaagaccgtggactgttttttataatatggcctaattttaaaggtccaaaataacttgtttttaaagtttgcccttgtgctaaagtgccagtgtatgtatgttatacttgatttggttgtaaactatatttcaaagtaaaccctagtgtaataagttttataactaaaaaggtttaagctgctaaaactatttttaagagatgtgaaatgcagtatgggactatctttttttcctcctctaagcccaaagattaactagagtccctccaaccttatagattgttggctttcacaatcttataacctaggatacaggtagtttcgagtatggtgccagtgatgttttgtttttgtttggtcaaggggtaggtgcaacccaatggaccacttatgcaaaagatgtaaactcttgcataatacattgataacatgttttgccaactttaaatgcttaaacataagcgaaaccagtagcaagtatgtgggtcagcttaaaaattttgattgttaatgccctattttctaatttggcacctcttgatgcctaagcaggtaagcagatgcctaagctgtatttctccaaataaatcaagatgaagtactgcccaagttaaatattgatagcctaaagacaagtttatgtagtacttaatgtacatgatatgaatgtgaagcataaaattaaataaaatttttccccattaaaaaaaaaaaaaaaaaaa

SEQ ID NO: 2180 - DNA, 2668 bp, Homo sapiens
atggcggcgggtgggagcggcgggcgtgcgtcgtgcccgccgggggtcggggtcggcccgggcacggggggcagtcccgggcccagcgccaacgccgccgccaccccggcccccggcaacgcggccgccgccgccgccgccgccgccgccgccgccgccgcccctgggccgacgccgcccgccccgccgggccccgggacagacgcgcaggccgcgggcgcggagcgggcggaggaggcggcgggcccgggggcggcggcgctgcagcgcgaggccgcgtacaactggcaggccagcaagcccaccgtgcaggagcgcttcgccttcctcttcaacaacgaggtgctgtgcgacgtgcacttcctggtgggcaaggggctcagctcgcagcgcatccccgcgcacaggttcgtgctggccgtgggcagcgccgtctttgatgccatgttcaacgggggaatggccacaacatccacggagattgagctgcccgacgtggaacccgccgccttcctcgcactgctcaagtttctctactcggacgaggtgcagattggcccggagacggtgatgaccacgctatacaccgccaagaagtacgcggtgccagcgctcgaggcccattgcgtggagttcctgaagaagaacctgcgagccgacaacgccttcatgctgctcacgcaggcgcgactcttcgatgaaccgcagctggccagcctgtgcctggagaacatcgacaaaaacactgcagacgccatcaccgcggagggcttcaccgacattgacctggacacgctggtggctgtcctggagcgcgacacactgggcatccgtgaggtgcggctgttcaatgccgttgtccgctggtccgaggccgagtgtcagcggcagcagctgcaggtgacgccagagaacaggcggaaggttctgggcaaggccctgggcctcattcgcttcccgctcatgaccatcgaggagttcgctgcaggtcccgcacagtcgggcatcctggtggaccgcgaggtggtcagcctcttcctgcacttcaccgtcaaccccaagccacgagtggagttcattgaccggccccgctgctgcctgcgtgggaaggagtgcagcatcaaccgcttccagcaggtggagagtcgctggggctacagcgggaccagtgaccgcatcaggttctcagtcaacaagcgcatcttcgtggtgggatttgggctgtatggatccatccacgggcccaccgactaccaagtgaacatccagattattcacaccgatagcaacaccgtcttgggccagaacgacacgggcttcagctgcgacggctcagccagcaccttccgcgtcatgttcaaggagccggtggaggtgctgcccaacgtcaactacacggcctgtgccacgctcaagggcccagactcccactacggcaccaaaggcctgcgcaaggtgacacacgagtcgcccaccacgggcgccaagacctgcttcaccttttgctacgcggccgggaacaacaatggcacatccgtggaggacggccagatccccgaggtcatcttctacacctaggctgcccgacaccgacaccgccctccctccgcggggatagccgcagccccaggccatcatctgctgctggggtccccccaccacgcggtgccaggcccagtgtcccccaggccgtctgtccactccatgccacctttctcagcatcaggacggggttgccctgtgttcaccacgagtgtggctgctggatcagggcagccggggaggtggccaggccagtggccaggccctgtggagacaatccctcaggactagggacagggctgtgccggcctgggccagggcccacggacccgcagctcagggcgcctgcccacgtcgtctgccggcggtgcgccgcgggcgtccctcgcgtctcttcactgcacattgcaatgcatttgcgattcccatttctctgctaggagccagcctgggtggcgctgctcccagagccgtgggtcccagaccttgcgttccttttgttcctgtccgtttatcaggacacgggccccacctgtcacgtgcccgaggccacccaagcccagcctgcggggcgttcccactgcctggatgccggcttgagttctgcgcacgcaggattcagtgtggggacggcccctgccggataggcctagccctggcccaggtggtgagcggtttgcagtgtccgttctcatccacctgatgggcccagataaaggcccccgctgtccagcctccctggacggccctcgcggtccctgcagcccaagatgggactcagaccctgtgccccagagctcccctgccgcagaatggggccccagccggccccgaccgggtccaggagcactgctcgcctgtacatactgttgccctagcccacctggtgccgtgggagccacccccaggtgctgggggcacagcccctccccactccggccacgcccccacccaccccgcgtgtttctgccctgtgactcctggaacctgcgtcctccccaaagccatgggaggggtgtcctcctcagaccatgcccccagatgatttttttaaataaagaaacaaatgcacctgcaaaaaaaaaaaatagaaaataaaaaaaaaaaaaaaaaaaaaaaaaaaaaa

SEQ ID NO: 2181 - DNA, 1654 bp, Homo sapiens
gtcggctgtgtagactgttgggtaggctgcgtgctagcttcggcgcggatccctgggcgtccgtacgtcggagtccttcgtcctccagggtccctgttctttgcgccagcgggaaccactatctctgcactcctggggttttgttacatggctgctttcctcaaaatgagtgttagtgtcaatttcttcagacctttcaccaggtttttggtgccatttacccttcataggaagagaaataacttaacaattttgcagagatacatgtcttccaaaataccagctgttacttatcctaaaaatgagagtacacccccttctgaagagctagagttggataagtggaaaactaccatgaaatctagtgtgcaagaagaatgtgtttcaacaatctcaagcagtaaggatgaagatcctctagctgccaccagagagttcattgagatgtggagattgcttggcagagaagtaccagaacacatcactgaagaagagctcaaaacccttatggaatgtgtttctaacacagcaaaaaaaaaaaatatttaaaatatttatatacgaaggaaaaagtgaaaaaagctaggcaaataaaaaaggaaatgaaagcagcagcaagggaagaagcaaaaaatatcaagctgctagaaaccactgaggaagataaacagaaaaactttctatttttacgactttgggataggaatatggacatagcaatgggctggaagggtgcccaggccatgcagtttggacaacctttggtttttgacatggcttacgaaaattatatgaaacgaaaagaattgcagaatactgtttcccagcttttagaaagtgaaggatggaacagaagaaatgttgatcctttccatatttatttctgcaatctaaaaatagatggtgctttgcacagagagttagttaaacggtatcaagaaaaatgggacaaattgcttttaacatcaacagaaaagtctcatgtagatttatttccaaaggacagtattatctatttaactgcagattctcccaatgttatgactactttcaggcatgacaaagtttatgtaattgggtcttttgttgataagagtatgcagccaggcacatccctagccaaggcaaaacggctgaacctggcaactgaatgccttccattagataaatatttacaatgggaaattggtaacaaaaatctcaccttagatcaaatgatacgtattttgttatgtctgaaaaacaatggtaattggcaagaggctctgcaattcgttcccaagagaaaacatactggttttctggagatttctcagcattctcaagagtttatcaacagactaaagaaggcaaagacttaattcattttcaaaaggttctctgaatgtgcacagaacacgtggctcaaatgagaacatttgatggcttaaaaagtaaatgcgttagaaatacagtcctgttaatgtatttcttcccaaacaattcatttttctcttctaaaggtagtctttcccaactgactgtagggttgtgtcttttcccaattaagtatctgcagaactttgggattatactttgtttactgtagaaagataataaaaagagttgtccaaaaaaaaaaaaaaaaaaaaaaaaaaaaaaaaaaaaaaaaaaa

SEQ ID NO: 2182 - DNA, 1815 bp, Homo sapiens
gtgcacgtgcgcacggcgacggccggatggctgcgtggggctgtgtggctgcgctcggcgcggcgcgtgggctttgctggcgggcggcgcgcgcggctgcggggctccagggccgccccgcccgcaggtgctatgctgtgggccccgctcagagcccacccacctttgggttcctgttggacatcaatggagtgcttgtgcggggccacagagtgatccctgctgctctgaaagccttccgaaggctggtgaactcccaggggcagctgcgggtgcccgtggtttttgttacaaatgctgggaacatcttacaacacagcaaagcccaggagctgtcagccctgctggggtgcgaggtggatgcagaccaagttatcctctctcacagccccatgaagctcttctccgagtaccatgagaagcggatgctggtgtctggacaggggcccgtgatggaaaatgcccagggactgggcttccgaaatgtcgtcaccgtggatgagctgcggatggcctttcctctgcttgacatggtggacctggagcggcggctaaagaccacgcccctcccgaggaatgacttcccccgcattgaaggggtgctcctcctaggggagccggtccgctgggagaccagcctgcagctgatcatggatgtcctcctcagcaatgggagccctggggctggcctggcaacacccccctacccccacctccccgtcctagccagcaacatggatctcctgtggatggctgaagccaagatgcccaggtttggacatggcacctttctgctgtgcctggaaaccatttaccagaaagtgacgggcaaggagctgagatacgagggcctgatgggcaaacccagcatcctcacttaccagtatgccgaggacctgatcaggcgacaggcggagaggcggggctgggccgcccccatccggaagctctatgctgtgggtgataaccctatgtctgacgtatacggcgccaacctgttccaccagtacctgcagaaggcaacgcatgatggggcgccagaactaggggccgggggcacacggcagcaacagccctcagcaagccagagctgcatctccatcctggtgtgtacaggcgtctacaatcccaggaacccacagtccacggagcctgtccttggaggaggggagcctccattccacgggcaccgagacttatgcttcagtccagggctcatggaggcctcccacgtggtgaatgacgtgaatgaggctgtgcagctggtcttccgcaaggagggctgggctttggagtgagggcagtgcggtggaggtgagggggtgagcctggacctgtgggcgagtcccattggctgggctctggcctgatcactgggctcaggtcagggcttggttcccttgccacccttcttgctgccccatgagtgtggcattactggtcacttggaagaagacagtgactctttttccctgctgggtagcattttgtatggaacggttggaattttctgggcccagttcccacgtgcctttcgtggcagtctaacctcaggccattctcttcccctgtgtgcctcagtgtccttctcatttcagtagggacttctgaaatgggggaggcagtgtggaatactgtggatgtctgtgcagagcctttgccggcactgaaggcatgcagcctgtcggcagagtgtcttaacaccagatgctactttttactgtattgtagtttattgcccggagatgtggggctttttttttaaataaaataatcataataaatgttcatgatgctgaaaaaaaaaaaaaaaaa

SEQ ID NO: 2183 - DNA, 1434 bp, Homo sapiens
gagcccctgtctggatgacttcttgcggctgttctacccctccccctccccgcggtaccttgcacttttctccctccctgccccctctcgagtccaccctccgggccttctgcccctgatcgcttggttttccttgcagtcgcctgctgctgtcgtcgggaggaaagatgaatgggagggctgattttcgagagccgaatgcagaggttccaagaccaattccccacatagggcctgattacattccaacagaggaagaaaggagagtcttcgcagaatgcaatgatgaaagcttctggttcagatctgtgcctttggctgcaacaagtatgttgattactcaaggattaattagtaaaggaatactttcaagtcatcccaaatatggttccatccctaaacttatacttgcttgtatcatgggatactttgctggaaaactttcttatgtgaaaacttgccaagagaaattcaagaaacttgaaaattccccccttggagaagctttacgatcaggacaagcacgacgatcttcaccacctgggcactattatcaaaagtcaaaatatgactcaagtgtgagtggtcaatcatcttttgtgacatccccagcagcagacaacatagaaatgcttcctcattatgagccaattccattcagttcttctatgaatgaatctgctcccactggtattactgatcatattgtccaaggacctgatcccaaccttgaagaaagtcctaaaagaaaaaatattacatatgaggaattaaggaataagaacagagagtcatatgaagtatctttaacacaaaagactgacccctcagtcaggcctatgcatgaaagagtgccaaaaaaagaagtcaaagtaaacaagtatggagatacttgggatgagtgaaaaattacatcattggacatgaaggagtttcaacatccagcttcatctaggtggtcatgattacctgcatgctttgagctcagcagcagtcttcataaacacatttaaaacaagatcctgggtttttgtggtttgacttctatggtgttttaaaaaaacacagatttttagtgttaatattgtgtaaatgtactcaccttagggattcatttgaatgatggtattataccatgattgtatacagtttgtgaaattgttgcaagggcaaagataactcttaaaaaaccgtcgagattacaatgctctagaatcagcatataagaaaataaatgatatctgcatgttgaattggggtggatggggggagcaagcataatttttaagtgtgaagctttgcatcaagaaattattaaaaagctttttttctccagtattttctgtattatcttaatgtttatggcaaataaaatgtaaaggaacatgccaaaaaaaaaaaaaaaaaaaaaaaaaaaaaaaaaaaaaaaaaaaa

SEQ ID NO: 2184 - DNA, 2114 bp, Homo sapiens
ctcgtctgcttccggccctgtggcctggtggggctctgcaggctccctcgggagtggtccttgggccgtggcccctctgggaggcctgagggagctcaatcctggtagcaacacccctgaattcctggtggtgaaaggatgtggccccaggacccatcccggaaggaggtgctgaggtttgcagtcagctgccgtatcctgactctgatgctgcaggccctcttcaatgccatcaccccagatcaccatgcagaagccttctctcctcctcgcctggccccctcaggctttgtggaccaactcgtggaaggtcttctgggcggcctgtctcactgggatgctgaacacttcttgttcattgctgagcatggctacctgtatgagcacaactttgccttctttcctggtttccccttggccctgctggtggggactgaactgttgagacccttacgggggttactgagtctacgcagttgcctgctgatttcggtagcatcactcaatttcttgttcttcatgttggctgcagttgcacttcatgacctgggttgtctggttttgcactgtccccaccagtccttttatgcagctctgcttttctgtctcagccctgccaatgtcttcctggcagctggttactcagaagctttgtttgccctcctgacattcagtgccatggggcagctggagaggggccgagtctggactagtgtactcctctttgcctttgccactggggtacgctccaacgggctggtcagtgttggcttcctcatgcattctcaatgccaaggctttttctcttctctaacgatgctgaatcctctgagacagctctttaagctgatggcctctctgtttctgtcggtgttcacacttggccttccctttgccctctttcagtattatgcctacacccaattctgtctgccaggctcagcccgccccattcctgagcctttggtacagttagctgtagacaagggctaccggattgcagagggaaatgaaccgccttggtgcttctgggatgttccactaatatacagctatatccaggatgtctactggaatgttggctttttgaaatactatgagctcaagcaggtgcccaattttctactggctgcaccagtggctatactggttgcctgggcaacttggacatacgtgaccactcacccttggctctgccttacacttgggctgcaaaggagcaagaacaataagaccctagagaagcccgatcttggattcctcagtcctcaggtgtttgtgtacgtggtccacgctgcagtgctgctgctgtttggaggtctgtgcatgcatgttcaggttctcaccaggtttttgggctcctccactcctattatgtactggtttccagctcacttgcttcaggatcaagagccgctgttgagatccttaaagactgtgccttggaagcctcttgcagaggactccccaccaggacaaaaggtccccagaaatcctatcatgggacttttgtatcactggaaaacctgttctccagtcacacgatacattctaggctacttcctgacttactggctcctgggactactcctacattgcaacttcctgccttggacatgacctggactctccagggacaggttggaagccaacttaacccaggggtctgaaagtaaaaatacacattggaactgcctctgctgccctgggatcattactgtgtccattataatctttctctttctctttgaaagctggtcaggaatgggagaagtgtcagacactagagagccccttctggtcctggctagggcaaattttagacaactattttctctgtaagtgaagattgtcgtattccaagtctaaaatacacctggatctgtctagtcaatcaacatagcagagacagtcttaaacctaccattgacctgtgtgtaaatttaaatgtcaatttattgaagtgtaaatttcatcaaaggcattagctgacaggctggtaacagtccacacaagatggtataggcctgaacagtgtagtggcagtaataaagtgggaccattttttccaaaaaaaaaaaaaaaaaaaaaaaaaaaaaaaaaaaaaaaaaaaa

SEQ ID NO: 2185 - DNA, 1114 bp, Homo sapiens
agcggtgtcctgagccgattacagctaggtagtggagcgccgctgcttacctgggtgcaggagacagccggagtcgctgggggagctccgcgccgccggacgcccgtgaccatgtggaggctgctggctcgcgctagtgcgccgctcctgcgggtgcccttgtcagattcctgggcactcctccccgccagtgctggcgtaaagacactgctcccagtaccaagttttgaagatgtttccattcctgaaaaacccaagcttagatttattgaaagggcaccacttgtgccaaaagtaagaagagaacctaaaaatttaagtgacatacggggaccttccactgaagctacggagtttacagaaggcaattttgcaatcttggcattgggtggtggctacctgcattggggccactttgaaatgatgcgcctgacaatcaaccgctctatggaccccaagaacatgtttgccatatggcgagtaccagcccctttcaagcccatcactcgcaaaagtgttgggcatcgcatggggggaggcaaaggtgctattgaccactacgtgacacctgtgaaggctggccgccttgttgtagagatgggtgggcgttgtgaatttgaagaagtgcaaggtttccttgaccaggttgcccacaagttgcccttcgcagcaaaggctgtgagccgcgggactctagagaagatgcgaaaagatcaagaggaaagagaacgtaacaaccagaacccctggacatttgagcgaatagccactgccaacatgctgggcatacggaaagtactgagcccatatgacttgacccacaaggggaaatactggggcaagttctacatgcccaaacgtgtgtagtgagtgtaggagataactgtatataggctactgaaagaaggattctgcatttctattcccctcagcctacccactgaagtctttgggtagctcttaagccataactaaggagcagcatttgagtagatttctgaaaaacaatgttatttgttgatttaaaaagaaaactgtatttttattaaataaaatttaaacatcacttcaggaaaaaaaaaaaaaaaaaaaaaaaaaaaaaaaaaaaaaaaaa

SEQ ID NO: 2186 - DNA, 2016 bp, Homo sapiens
gaagcgaaatctccccttctacagagtccctccggcgcttcctccaccccgggatacacagaacctcatctcctacggtgctgaagcctgcagcagggcaggatgggcaggagagcagagccgcggagtctgcggcgcgggtgaagagcggcgcgtaattcccgcagcaagattgttccgcgcccgcagcccctggactagcaggatccgaaccccggcggctgcgtgcttataggcgcagacgtcagagagcccgcggcttaaagcgcgtcgcctggctagcgccaccccctagccttcttcaaggcctccagggctgggcccaagcgcccgtcgacggcaccctgggcccagaggactcgcgggcctcatctccaatgattcagaactcacgtccgtcgctgctgcaaccccaagatgtcggagacacggtggaaacgcttatgttacatccggtgatcaaggctttcctgtgtggctccatcagtgggacctgctctaccctccttttccaacctctggatctccttaaaacacgcctacaaaccctccagccctcagatcatgggtctagacgtgttgggatgttggctgtactcttgaaggtggttcgcacggagagtcttttgggcctttggaaagggatgtccccttccattgtgagatgtgtccctggcgttggaatctactttggcactctctactctttgaagcagtatttcttgcgaggccatcccccaaccgccctggagtcagtcatgctgggggtgggctctcgctctgttgcaggggtctgtatgtcacctatcactgtaatcaagacgcgctatgagagtgggaaatatggctatgagagtatctacgctgccctgaggagcatctatcacagtgaggggcaccggggcctcttcagtggcctgacagcaactctccttcgagatgcgcccttctcaggaatctacctgatgttttacaaccagaccaaaaatatagtgcctcatgaccaggtggatgcaacccttattcctattacaaatttcagctgtgggatatttgctggtattctggcctcactggtaactcaacctgcgggtgttatcaaaactcatatgcagctttatccactgaagtttcaatggattggccaagcagtgacacttattttcaaagactatggactacgtggcttcttccaaggtggcatcccccgagccctccgcagaactctaatggcagcaatggcgtggacggtgtatgaagagatgatggccaagatgggcctgaagtcctgaccaagagaggactgggaacgggtgaaatctgttgccctgcctggtttctgccaagggctgctgcttcttactattctgcagtaagatgaagtcctacctggaaaaccaggcagaaattgtgttgcctttgccttcagtaatccccttaaggagaaaatatatggacctgatttcagccttcagaatctccaaaagaggagtcatcaattcatagagcacactagggtgttaggagagagctttgcatactctgagaggctacttggaaaggcattttcccaggagagctctgtcaggtggctgcgcttcagccccacccctacaccacagggtctccttgggtatgttcttgggcaagcaatcacaaagccagagaagctgtaagctgcctgccgggcctgaggagctccaaccagggaagactggatgtgaggagaggagtcactgtcaccaggtcacagactgactgaggtgatggtaggatgaggaggaacagatgcccttctttaattggttctcagttaacttctcagaggctctggagaacgggacagtggctttctagcctctgaatgttccaaataaaattttttggtcttggcccctgtactgttttacctctaaattctggcatttttttttccctgcaattaaagtgctgtactttatttattgaactttatcattgaaagctgtttggaaaacctaaaaaaaaaaaaaaaaa

SEQ ID NO: 2187 - DNA, 794 bp, Homo sapiens
aagtgcccgagggcggccgcagaacggtcaatttgagccgcgtcgagctcccctgggacctgtggccgccgcccacagaccatgctcctggggcgcctgacttcccagctgttgagggccgttccttgggcaggcggccgcccgccttggcccgtctctggagtgctgggcagccgggtctgcgggcccctttacagcacatcgccggccggcccaggtagggcggcctctctccctcgcaagggggcccagctggagctggaggagatgctggtccccaggaagatgtccgtcagccccctggagagctggctcacggcccgctgcttcctgcccagactggataccgggaccgcagggactgtggctccaccgcaatcctaccagtgtccgcccagccagataggggaaggggccgagcagggggatgaaggcgtcgcggatgcgcctcaaattcagtgcaaaaacgtgctgaagatccgccggcggaagatgaaccaccacaagtaccggaagctggtgaagaagacgcggttcctgcggaggaaggtccaggagggacgcctgagacgcaagcagatcaagttcgagaaagacctgaggcgcatctggctgaaggcggggctaaaggaagcccccgaaggctggcagacccccaagatctacctgcggggcaaatgagtctggcgccgcccttcccgcccgttgctgctgtgatccgtagtaataaattctcagaggactcagcctttaaaaaaaaaaaaaaaaaaaaaaaaaaaaaaaaaaaaaaaaaa

SEQ ID NO: 2188 - DNA, 1112 bp, Homo sapiens
acggacgccgtccctcctcggcgcggcctgagcgcccggcccgaccccggccatggggtgctgctacagcagcgagaacgaggactcggaccaggaccgagaggagcggaagctgctgctggaccctagcagcccccctaccaaagctctcaatggagccgagcccaactaccacagcctgccttccgctcgcactgatgagcaggccctgctctcttccatccttgccaagacagccagcaacatcattgatgtgtctgctgcagactcacagggcatggagcagcatgagtacatggaccgtgccaggcagtacagcacccgcttggctgtgctgagcagcagcctgacccattggaagaagctgccaccgctgccgtctcttaccagccagccccaccaagtgctggccagtgagcccatcccgttctctgatttgcagcaggtctccaggatagctgcttatgcctacagtgcactttctcagatccgtgtggacgcaaaagaggagctggttgtacagtttgggatcccatgaagagaggggtccttggacagctcttctcctctcttcatcccatctctaccccacccccttggcccccagcctcactgcggcttatacagtaccctaacctgctactaatcacagagaaaaatgtgaagaaggaggagaagaggaaggctagaagcctgagcaagtgagggtagaaccttttgggactggcctttgaagctctggccagggatggggtgggggccaaaaggacagagcctggtatgtcttcatagtcattgagaatgtggagataccagtttgggtggggggtgatcaccaggggacctagggagatccccttcccaccctctccgttggcctcagagtcactcctgccccctctccctgacttggtgctcacatgcacctcactagggtttgtgaccagggtctggatgagcttgaatttgaatgaattgagtttgtatttctagaaccctgggtttttacatgtttggtctttttttgttttggtttgtcaccctcgataaaggaagtatattcatccaaaaaaaaaaaaaaaaaaaaaaaaaaaaaaaaaaaaaaaaaaaaa

SEQ ID NO: 2189 - DNA, 4346 bp, Homo sapiens
aagctggagcggcggtggcggcggcgtagggaggccggggccggggctgaggccgcggccgggtctgcgaggcccttggggcggcaggcggcggcggcccggggctcgagcccggaggcaggagcagccgccatggccgagagcatcataattcgtgtccagtccccagatggagtgaagcggatcacagcaacaaagagagaaacagcagcaacatttttgaaaaaggttgcaaaggagtttggcttccaaaataatggcttctcggtttacatcaatagaaacaagactggagagataacagcctcctccaacaaatccctcaacttgctaaaaatcaagcatggcgatttgttgttcctgtttccctcgagccttgctgggccctcatctgaaatggagacgtcagttccaccgggcttcaaagtctttggcgctcccaacgtggtggaggatgagattgatcagtacctcagcaaacaggacgggaagatttacagaagccgagacccacagctatgccgccacggccctttggggaaatgcgtgcactgcgtccctctagagccattcgatgaggactatctaaaccatctcgagcctcccgtgaagcacatgtccttccacgcctacatccggaagctgactggaggggctgacaaggggaagtttgttgccctggagaacatcagctgcaagattaagtcagggtgcgaggggcacctcccgtggccgaatggcatctgtactaagtgccagccgagcgccatcacgctgaacagacagaagtacaggcatgtggacaatatcatgtttgagaatcacaccgtcgctgaccgctttcttgacttctggagaaagacagggaaccagcaatttgggtacttatacggacggtacaccgagcacaaagacattccccttggcatcagggctgaagtggctgcgatttatgagccacctcagattggtacacagaacagcttggagcttcttgaggatccaaaagctgaagtggtcgatgaaattgctgccaaacttggcctgcggaaggttggctggatatttacagacctcgtctcagaagatacccgaaagggtaccgtccgctacagtcgaaataaggacacctatttcctaagttcagaagagtgcatcactgcaggagacttccagaacaagcatcccaacatgtgccggctctctccagacggacattttggatccaagtttgttactgcagtggctacaggtggtcctgacaaccaagtccactttgaagggtaccaggtgtccaatcagtgtatggcactggtccgtgatgagtgtttgctgccatgcaaggacgccccggagcttggctacgccaaggagtctagcagtgagcagtacgtgcctgatgtgttttataaggacgtagacaagtttggcaacgagatcacccagctggcccggcccctgcctgtggagtatctcatcatagacatcacaacaactttccccaaggatccagtttacactttttctatttcgcaaaatccatttcctattgaaaaccgggatgtattgggtgagacacaggacttccatagcttggccacctatttgtctcagaatacctcatctgtgttcttggataccatctcagatttccacctcttgctgttcctggtcaccaatgaagttatgcctctgcaggacagcatcagcttgctgctggaggccgtgcggaccagaaatgaggagctcgcccagacatggaagaggtctgagcagtgggccaccatcgagcagctgtgcagtacagttggcgggcagctcccaggtctccatgagtacggggccgtcgagggctccacacacacggccactgcagccatgtgggcctgtcagcactgcacgttcatgaaccagccaggcacaggccactgcgagatgtgcagcctccccaggacctagggcgcctgccctctgctggctaggaccgggcccagcccagcccttcctgaagccagaagcgttgctgagtgtgttccctgtaactgccccatagtgggcagccctggaggaacaaggggctggctgtcctgggctccctgacccactgaagcttctcagcacgttcctccctggagagcgggcgccacggctggtattctgcaggctgaatgcagtctccagactggaaacgcagagcggctcctcacgcctaatcctgttgacaagtcccccgccgtgttggaaagacctctcgcctctacgtggcacctggaattggggcgcacagggaggggcggatgctgccaccacccagccttctctttattttcagtgctttttgtttggcctccctgcccccatgtttttctggctgggagctcttggttacccccttgtctgactgcttggtggcaggcaccctgcctgtgagggccactttcctcttctagtagctgttgtctggtggggacgcagtggccctggacacggctcccctctgcaggtctgcaggtcggtttgctgcctgccctcctcctctcacccgatgtccaggtgggattttaaagtctgcattggttataacaacagttatcagtaattcctgcccagaagacttttatttatttttttttaagataaaaactgcacaaaaggggagtgagagagactagtttccacatccttccctcctttagtgaagcccccgaggttgtgtccagggtgatgagtgtggacgggggcaccagtcagttctcccttgaagtaaacctcagtgcctgagacttttctaccaagccacacagctgcagcaactgcagatactgcgggctgagcaggagcagtggtggcgcctgccctgaggctgccctgcgatggcctgggtgggagagctgggtcaccggtgccgatgctctggccctccccaatacgctgcttcgtcccactgcaccgcctggctgagggcgttaggggctgtgcctcttgtgagggccatttgggacctccctggggcactgcacaattgatagtgtaccaatagggggagactgggcgatctggaacagcacgtggtggggtcctgcttgtgtgctctgcgttcctctgtggcgtggccaggccggggcctggctcttacccggggagtggtgggcatctcgatgcttctttgccttaatgatggccacatctgggctgctctgcacccacgggagaggctggcccagctgcagactgcttagggacttctgtgtccatcctggggggtaagcccacgtgacccacattcttggcactatgaacagagaacatttgcctgttggcttctgaagtggtcagggccatggctgacacctccaggtccgcctggcatgggacaccaagtggaaggcccaagcagctcatctgctcttgggaccaggggccagttgggttgggtctggtcacggcagagcttttgtggagggtcaggaagggtggagaggagctgggttgaagcggactgctgcggatgcaactcccagcttgcccaccgcgggctgtctgctctccctcctagcagctgtcacactgaagttttgtcctctgctgtctcctctggtcctgagatgagctgtgagcctaggtggccaaggcttcctgcattgcttccctgtgagtccaaggccttcccccaccactgggcagaggctggacagcacggacttctagagagagccgcgttgccagttcctctcccactcgctcgtccttatccaccacgctattatagtttccgttgtcctccaccagcatttcccttactctgaagttccggcattcacatcattcatgttttcttttgtcttttagctaaaggaaaagcattggcgatttgtctgattctggttttgagttactctttgttcagtaatgcactttattttattgtccaaagagagtcagagctaagcatacaggcttgggggtgagccctgctgtgagagttcaggccctgggaggctcagccacctcctcttgtgggaaggaggtctcagccccacctcgcatcttcacctgcccttggtgtggacacaccctctcatgctaccagcaccataatccagtgggggtgactgggtgcacacctgcccaggtgaacacagcggctgccagtctcctggtcccgagaggaggtggggcctggccctggctccctccaaccagctgctcctgggacacaggtgctcctgcttcggctctgtttcggctcacaggtgtgcatcactgggcttggatttgcattacattgaccccagccctgcagtggaacctaataaaagcgcctgaagcaaaaaaaaaaaaaaaaa

SEQ ID NO: 2190 - DNA, 2284 bp, Homo sapiens
gaatggaatgaaaagccttgtacaagaggcttcgtgccatgttcagcctgccccttagccttccactgtgtgaggacacagcattccttccttccaagtgctgcagctctcacaagacaatcaaacaagcccgcaccttgatcatgatcttcctagcctccggaacgcactttcagaccatgctgaagtctaaattgaatgtcttaacactgaaaaaggaacctctcccagcggtcatcttccatgagccggaggccattgagctgtgcacgaccacaccgctgatgaagacaaggactcacagtggctgcaagcactttcagaccatgctgaagtctaaattgaatgtcttaacactgaaaaaggaacctctcccagcggtcatcttccatgagccggaggccattgagctgtgcacgaccacaccgctgatgaagacaaggactcacagtggctgcaaggttacctacctgggcaaagtctccaccactggcatgcagtttttgtcaggctgcacagaaaagccagtcattgagctctggaagaagcacacgctagcccgagaggatgtctttccggccaatgccctcctggaaatccggccattccaagtttggctccatcatctcgaccacaaaggggaggccacagtgcacatggataccttccaggtggcccgcatcgcctactgcaccgccgaccacaacgtgagccccaacatcttcgcctgggtctacagggagatcaatgatgacctgtcctaccagatggactgccacgccgtggagtgcgagagcaagctcgaggccaagaaactggcccacgccatgatggaggccttcaggaagactttccacagtatgaagagcgacgggcggatccacagcaacagctcctccgaagaggtttcccaggaattggaatccgatgatggctgaatgaacttgagacgcttcagcaaaggcagcattggtcacggagttcaagggaatagatgagtaagcaacgtttcaaatttgggatgaaaagactgccaaactattggctgaccaaggtttttaaattcagaagagcaattctaaatctaaagaaatgtatcattaaagtaattacgttacattgaaacctgctgctgctgtgactgtgaggagggtgggagtgtggatggggaggaaggttctaggctctcttcttatttttctcatttcccaatgcctctctgtgggagagcttcatgccagttttcaccacgctcaggcaaatactctgcagctgttattggatgggccattccgatctgccttatgaaattccacaagaatgttaggggcaccctctttccccttctaacatccttagagggatgaaatctcagcatatgttgcaggacaccaaaaggaagaaaacaatcaagcaaataaaataaacagtcaaacaaaccaggagtttaaaacaacaaccccaacaacagaagccttggcaaagaggaataagtgatcagcaagtgaacacactctatgtcaactctccttttatccagctgagatttatggtaacttatttaattaatggtcctgtctgatgcatccttgatggcaagcttcaaatctgatttggtatcaccgaggaaaccttgcccccatcactcagcattgcacttagatacagaatgagttagataaacttggcttgtctagagacccatgtcatcttaacctaaagggaaatcttattgcgttatcataaaattgatgatatcttagggtcagaattgcccttttttttattttgaatgggaagctctcactaaaacaatcctgagatttcttaatttcatggttctttaaatattataaacacagagtcaacatagaatgaaattgtatttgttaaaatacacacattggaggacaagagcagatgactacttttcgaagtaatgctgctccttcctaaaagtctgttttcaatcctggtaatattaggggcactgcggcacctaagaagccttaaatgagagctaatccaatttagagagcgatggtgtcagcatttcggtctgcatatctgtgtgtccgtatctgcgtttgtgtgcgtgtacgtgtgcccctgtgtgtgggcccagttttcaggcatgtagaataagcatggagtcatattgaggaggactcacttcttgaagatatgcttgttgctttacaacatatgtaagctattctttagcataaatgcattcattctttaataaaaatatgtttgcattaaaaaaaaaaaaaaaaaaaaa

SEQ ID NO: 2191 - DNA, 4369 bp, Homo sapiens
tttgcatcccaataatacagccctttggcagaaataccttttattttgccagagccagtttagtaccttttcgatatcaaaaattcacagtctttatggaaaatgcttgagcactttgtctgctgttaaggacggcagcatcttatctcaccctgcgttgcctggcacggaagaggccatgtttgcactctttcttcagcagtgccactttctgcggcaggctggccactctgagaaggccatctcattgttccaggccatggtggacttcaccttcttcaaacccgacagcgtaaaagatctgcctaccaaaggacaggtggaattctttgaacccttttgggacagtggagagccccgggctggggagaagggagcccgaggctggaaggcgtggatgcaccagcaggaacgaggtggctgggtggtcatcaacccagatgaggatgacgatgaaccagaagaggatgaccaggaaataaaagataagactctgcccaggtggcagatctggcttgctgctgagcgttcccgtgaccagaggcactggcggccctggcgccctgataagaccaagaagcaaaccgaggaagactgtgaggatcccgagagacaggtgttgtttgatgatattgggcaatctttgatcagactttccagccatgatcttcagttccagctggtggaggccttcctgcagttcttgggtgtgccttctggctttactcctccagcctcctgtctttatctggccatggatgagaacagcatctttgataatggactttatgatgaaaagcccttgacttttttcaaccctttgttttctggggctagctgtgttggccgcatgggtaggttgggctatcctcgctggaccaggggtcagaaccgagagggcgaggagttcatccgcaatgtcttccaccttgtcatgcctttattttcaggcaaagagaagtcccagctctgcttctcctggttacagtatgagattgcaaaggtcatttggtgcctgcacactaaaaacaagaagagattaaagtctcaagggaagaactgcaaaaaactagccaagaatctccttaaggagccagaaaactgcaacaacttttgcctgtggaagcagtatgcacatctggagtggttgcttggcaacacggaggatgccagaaaagtttttgacacagcacttggcatggcaggaagcagagaactgaaagactctgacctctgtgagctcagtctgctctatgctgagctggaggtggagctgtcgccagaagtgagaagggctgccacagctcgagctgttcacatattaaccaagctgactgagagcagcccctatgggccctacactggacaggtgttggctgttcacattttgaaagcgcgaaaggcttatgagcacgcactgcaggactgtttgggtgacagctgtgtctccaatccagctcccaccgattcctgtagccgcctaattagcctggctaaatgcttcatgctcttccagtatttgaccatagggattgatgctgctgtgcagatatacgaacaggtgtttgcaaaactgaacagttctgttttcccagaaggctctggcgagggggacagtgccagctcccagagttggaccagtgttctcgaagccatcacactgatgcacacgagcctgctgagattccacatgaaagtgagtgtttacccgctggcccctctgcgagaggcactctcacaggctttaaagttgtatccaggcaaccaggttctttggaggtcctatgtacagattcagaataagtcccacagtgccagcaaaaccaggagattttttgacacaatcaccaggtctgccaaacccttggagccttggttgtttgcaattgaagctgagaaactgaggaagagactggtggaaactgtccagaggttagacggtagagagatccacgccacaattcctgagaccggcttaatgcatcggatccaagccctgtttgaaaatgccatgcgcagcgacagtggcagccagtgccccttgctgtggaggatgtatttgaactttctggtttccttaggaaataaagaaagaagcaaaggtgtattctacaaagcacttcagagttgcccttgggcaaaggtgttgtacctggacgccgtggagtatttccccgatgagatgcaggagatcctggacctgatgactgagaaggagctccgggtgcgcctgccgctggaggagctggagctgctgctggaggattagagagcagtgggaaaacgggctgtgcctgcgaggccaagttgcccaccctgcggagctaggaggcgcgagcagagaacgtgtgtgttaggagaactcggcttttgaaatgttctttctcgatagtaataatgtgggctgccagcctctcacatcttgcacactttttgggtgtgtaaatgacacaaaagttatttacatattatatatgtgaatatgtgtatatatgtacatagccagagagtcatgccacgtggtcattaaaccgatgatgattgaggcgtggcagcgtccttgctcattctctccctgtgcgcagccagcactggcccccgcacggtgaatgtgttccctccgctggtgtcgtggtggtcctgccaggccctctctgagataaaggtctggtttttcagcactaggatgtcttccccaggctggtgagcaggagattttgctcttgtgttgagacccgcagttaacgcttggtgttctggcctgcacgcagtgtgtggcaagttccctgagtttacctcggcggcgatgcctccgcctggagctggaggggcagcgtgccctggggctgctgaaaaactcaggcctgtggagtcagaacccgctcttcagcaggtcccaggccacttgagtgtggaaggctgcccggggcactggcagcctctgggggaagcctgctcccaagccgtctaggagccgagcacgctgtaccgccagccccagccctgcctgcatgaggggcccggcacgcttgtgcagcaacgctgcttacactatgaaggccaaggctggcccggttctggtgttgcattcgagggctgtgaacagaatgaaatgtcaacatccatttttcagacttgttctgcctccgaagagatttttagtgctgagtgattttcactattaacatatggctggaaggaatggttttcttatcttctccgagctctagactggctagcttctctctggctttttttgttttgttttcctctctttagaattgctgtatacttgtatctcctcagcacatttagaaaagccagtgtataattttggctggcaactgacggacgcagcgggcagcagcaggcagggcagcgcacgagagcacctcccagggcacggtgggaaactggccagcccagccccactactgccctctcctgctcgtccccagtccctgagctacaggtggctgtaggcagaagcccaccgggtgttccttagcgacagacaggtcgtcagctgctccccttgatgccttttcacagaaacaaccctcaacttgaggaagttgagagctccactccgaggtggacttgctccccctccctgagagctaactggcttgaactgtcatgagttcctggctgcccacaaagagggaccttctccacccttgtcctctgcgtggggcggacatcagccagacatgtcaccgacctgattgggggcagggagtaggaagtccaggaccaaaccatgctccccatgacagcagctggcgcctcagtccccatctgactcatgtctcttctcatctggttcagaacttagaagggcgtggcctctgatcagctggttccctccaaaccccagtggcaacctgtcccttgagagccaggaatggctcttagcagtgggcagtgagcccccgagaggataaagcggctgctcgaacagattgcgagcacattacttgctgcatgggaggaggtttaaaacaaatcaaagattccttgagggcattttacagaaaacaagatgtcaagagcatcactgttgttatttaaaagcccatttgaggccaggcgcggtggctcacgtctgtaatcccagcactttgggaggccgaggcggacggatcacgaggtcaggagatcgagaccatcctggctaacatggtgaaacccccgtctctactaaaaatacaaaaaattagccgggtgtggtggctggcgcctgtagtcccagctactcggaaggctaaggcaggagaatggcgtgaacctgggaggcagagcttgcagtgagccaagatcgcgccactgcactccagcctgggcgacacagcaagactccgtctcg

SEQ ID NO: 2192 - DNA, 1672 bp, Homo sapiens
gagtgttcgggacgcgggcctgcaggcgccatggtcttcctcaccgcgcagctctggctgcggaatcgcgtcaccgaccgctactttcggatccaggaggtgctgaagcacgccaggcacttctggggaaggaaaaatcgctgctacaggttggcggtcagaaccgtgattcgagcctttgtgaaatgcaccaaagcccgatacctgaagaaaaagaacatgaggaccgtaagcgtggacccgggacacccgccggccagcgcactcgcggcccctgcgtttctgcgccgcgacccagctagtgtgcagccgcccggccaccctcagccccttcctttcataccttgcttcgaaactccgacaaattatgtcgccccgcaggcaaactgtgggacatccgttctcccgccccgccgccacccccactgtcaccccctgctccagcccctcgcccgggccactgcagagccgccttgacactctccctgcgtcgccagccaccgccctagtcgctgctgctctcatccctccggtggcttcccttccctttggcagctgaagtcaacccagccccttgccaaccctccagggctactatctgctgccgtggtgctcctcgaagagaccacgcctgctgccaagctctgcccacccggaaccccccgcatttctgggaggctggcgcctccactctgtccacgtgccgcctcattactgcgcctcaccactcccgtctcagcctcatgaacctagcatctaacgtaccccggtttttttttcttaccccgagacggagtctcgcgctgtcacccaggctggagtgcaatggcgcgatctaggcttaatgcaacctcgtctcccgggttcaagcgattttcccgccccagtctcccgagtaactgtgactgcaggtgtgcgccaccaagctattttttgtatttttagtagagaccgggttccgccatgttggtcaggctggtctcgaactccagatctgaaatgatctgcctgccttgccctcccaaagtgctgggattacaggcgtgagacaccgtgcccagctgggtttttgctgtttttaattttgaaacagggtcttgatttcgcttaggccagagtgatggcaccatcatagctcactgattttgctatttacttttagaaaaatattctttagatcaattagaggctttgctgggacataacatccagaagtcatttttaagtatcttcatgttttcttatttcagctctggattaatcgaattacagctgctagccaggaacatggactgaagtatccagcgctcattgggaatttagttaagtgccaggtggagctcaacaggaaagtcctagcggatctggccatctacgagccaaagactttcaaatctttggctgccttggccagtaggaggcgacacgaaggatttgctgctgccttgggggatgggaaggaacctgaaggcattttttccagagtggtgcagtaccactgaggactgttgctgtattgattaggaaaagagacagagtaatttgcagtttgtttgatttatacttttgtttatctacaacccaataacagacatgagggatggccctgtctctctgggacagagcctcaaagatgatgtccatgttttgtgtgaatgaaactcaaacactc

SEQ ID NO: 2193 - DNA, 1760 bp, Homo sapiens
aaaacgtttgtatctcaagcaagtgctacaatgcaacagtatgcacagagagataagaaacatgaatattggtttgctgtgccacaagaaaggacagatcacttgtatgccttcttcattcagtggagtccagaaatatatgcagaagatactggcgaatataccagagaacctggatttatagtagtaaaaaagattgaggagtctgaaacaattgaggattctagtaatcaagcagcagccagagaatgggagattactacaagggaagacataaattcaaagcaggttgctacagtgaaagcagacctggagtctgaatcttttcgaccaaacctaagtgatcccagtgaacttttactgccagatcaaattgaaaagcttaccaagcatcttccaccaagaacaattggctatccatggactcttgtttatggtactggaaaacatggcacaagcttgaaaactctttatcgaacaatgacaggtttagacaccccagtgctgatggtgattaaagacagtgatggacaggtttttggtgcgttagcatctgagccactgaaagtgagtgatggcttttatggtactggagagacctttgtttttacattctgtccggagtttgaggtctttaagtggacaggagatgatatgttttttatcaaaggagacatggattcactagctttcggtggtggaggaggagaatttgcgctttggcttgatggagatctctaccatggaagaagccattcttgtaaaacgtttgggaatcgtacactttctaagaaggaagatttctttatccaagatattgaaatctgggcttttgaataaataaaatgctctctgtcttagcaggagaatggcccaaacctgacatggacaagcattgtttggaaagttcaagaagcaatacagtgtaacatgtcacttgtgctttaaaattagtctgtatcaccatttattacagttataattttggagtttatttttcaaatcatgttcttgtcccagagttctttaggttaacactagggactgcgtccatgtactagtataacagcttgggtttgttagaatttgggcaacattttgattataatgacaacttcattttcacatgttactcagttccctaataggatggtgctcttttgttgaacctgtattgatttttttttttttaactatattgattcgtttactagaacagtctaattggggcattgaggaaatgaagactggatacttctgtatctgtgaagttggcacaggtaacatttggacatgttcatcttattcttaggaaggaaaaaatcacttgccaaaataatacatacttcatagaccactgagttctagtttttattcacactacaacattctctttaacgatgttgcaggtattctcaatttccttttaagaaaaatgaaatgtgaggagaattctggttgtaatagatgacagtacatatgatctgcaggtttgggcatatgctttcatcattaaattatctgataaagttacaagtcacaaaggagaatgagaacttaatgattctattggatttaatatattagcaagaaaacatactatttacatatgtgtagcttagtaaggcattaacataagtacaaaaactatgaaacagatgcatatttcctcaacatactgtgtcaggtatactgttttataatttggttgttttagccttattgcacaccaactcccaaaatataggttactcttgttc

SEQ ID NO: 2194 - DNA, 1564 bp, Homo sapiens
gaagcacatctggacagctgtgcggcctccttgcgggccgacgtcagccgagcacgtcccccacgtcctctccttctcgccacttattatttattcgttttcccaaagaagcgactagggacccaagtttaaaaattcctccccccactcaatgcgagacgtggccagatcccatccaacacacggtttaattttcatggggctctgggatcaaaagaacagaaacagcaacaacaaaagcccagccgctgtctgattttaagctggcaaagtgggaaaaataaagtgttgagtaaacagaccaagttggatcatggggaatttcagaggtcatgccctccctggaaccttcttttttattattggtctttggtggtgtacaaagagtattctgaagtatatctgcaaaaagcaaaagcgaacctgctatcttggttccaaaacattattctatcgattggaaattttggagggaattacaatagttggcatggctttaactggcatggctggggagcagtttattcctggagggccccatctgatgttatatgactataaacaaggtcactggaatcaactcctgggctggcatcatttcaccatgtatttcttctttgggctgttgggtgtggcagatatcttatgtttcaccatcagttcacttcctgtgtccttaaccaagttaatgttgtcaaatgccttatttgtggaggcctttatcttctacaaccacactcatggccgggaaatgctggacatctttgtgcaccagctgctggttttggtcgtctttctgacaggcctcgttgccttcctagagttccttgttcggaacaatgtacttctggagctattgcggtcaagtctcattctgcttcaggggagctggttctttcagattggatttgtcctgtatccccccagtggaggtcctgcatgggatctgatggatcatgaaaatattttgtttctcaccatatgcttttgttggcattatgcagtaaccattgtcatcgttggaatgaattatgctttcattacctggttggttaaatctagacttaagaggctctgctcctcagaagttggacttctgaaaaatgctgaacgagaacaagaatcagaagaagaaatgtgactttgatgagcttccagtttttctagataaaccttttcttttttacattgttcttggttttgtttctcgatcttttgtttggagaacagctggctaaggatgactctaagtgtactgtttgcatttccaatttggttaaagtatttgaatttaaatattttctttttagctttgaaaatattttgggtgatactttcattttgcacatcatgcacatcatggtattcaggggctagagtgatttttttccagattatctaaagttggatgcccacactatgaaagaaatatttgttttatttgccttatagatatgctcaaggttactgggcttgctactatttgtaactccttgaccatggaattatacttgtttatcttgttgctgcaatgagaaataaatgaatgtatgtattttggtgc

SEQ ID NO: 2195 - DNA, 3052 bp, Homo sapiens
actggcggcggcagggctggcggcttaggccgcagaggtctgtgggcctgagccacgctggactctgtccgttctgcgatgactgctgctctggccgtcgtcacgacgtcgggtttggaagatggggtgcctaggtcccgtggcgaagggaccggggaagtggtcttggagcgggggcccggcgcggcctaccacatgttcgtggtgatggaggacttggtggagaagctgaagctgctccgctacgaggaggagttcctccggaagagcaacctgaaggccccgtccagacactattttgcactgcctaccaaccctggcgaacagttctacatgttttgtactcttgctgcttggttgattaataaagcgggacgtccctttgagcagcctcaagaatatgatgaccctaatgcaacaatatctaacatactatccgagcttcggtcatttggaagaactgcagattttcctccttcaaaattaaagtcaggttatggagaacatgtatgctatgttcttgattgcttcgctgaagaagcattgaaatatattggtttcacctggaaaaggccaatatacccagtagaagaattagaagaagaaagcgttgcagaagatgatgcagaattaacattaaataaagtggatgaagaatttgtggaagaagagacagataatgaagaaaactttattgatctcaacgttttaaaggcccagacatatcacttggatatgaacgagactgccaaacaagaagatattttggaatccacaacagatgctgcagaatggagcctagaagtggaacgtgtactaccgcaactgaaagtcacgattaggactgacaataaggattggagaatccatgttgaccaaatgcaccagcacagaagtggaattgaatctgctctaaaggagaccaagggatttttggacaaactccataatgaaattactaggactttggaaaagatcagcagccgagaaaagtacatcaacaatcagcttgagaatttggttcaagaatatcgtgcagctcaagcccagctgagtgaggcaaaggagcgataccagcagggaaatggaggagtgacggaaagaaccagactcctctctgaggttatggaagaattagaaaaggtaaaacaagaaatggaagaaaagggcagcagcatgactgatggtgctcctttggtgaagattaaacagagcttaacaaaactgaagcaagaaactgtagagatggacattagaattggcattgtggaacacacactactccaatcaaagctgaaggagaagtccaacatgactaggaacatgcatgccacagttattccagaaccagcaacaggcttttattaaaacatactggttttcatgtttctgattagttgggttttttatatcaaactatatttcatgttgcatagatttcaaaacataattttatgttcaatgggtatttttttacatatacatactcacatattatatcatggtgattatgatggttaaagcctttacactgaatgtaatgtttaataaagaaattacaaattctcactttctaagaagctttcactaatcattacctatgttaaagctcccacctggtggctcatttttcatagcattccttgtgtaagccaaggtatatgacctgcgttttctgcagatgctgctgctgtcacaacatgaactgctgacacagtcctttaccttgctccacctctgcagtgatcataagtgctttgtgcccagaggccactgaagatggtaggcaggattctttccaagaacccaaactgcctttgcctcagctttatggttacctaaaattgccactttttttaggttaaaaaaaacttcagtatcctcattaacatttgaagttggtttcttatgaatatttcgtggctaaaatgattttatagggaatctatcttctaggatctaagccactaaataaaaggataaatgaatgatgataagtcagtcactcatgtttgactctgttcttagaatgaagagaaggtgcatatgcatgtctcaatttctacctttttctgtggtatcggctatactagggaaccattttgtagaagaaggaacgatgacaggtcgcatgaagatcagcctctagtactgatgatctttacttatgcatcttcctgagcaactttctaggctaggatttctaaattggtgaaaaaagcagcattagagtgccagaattagcactggggaaaactggccaggggaacacaaagcaggagacagcctgcgttaatttttttttttaataattttcaaaagcagtggtagaaaatttgataagaatgctttatgtttaggacaacaaaaataattttaaaaagttattttttaccctaatacttttctccactgaatattattatttttttcttagctttttctttctagatgtattccccaacatgctcacatacacagatctttccctttccttactagacctctctttagtttaagataagtttagacaggagaaagtgtatgtaaactacctgaaaggatgacaatcaatacaatgacaaatatgccagtttatttaatttgtttaaaaaaaaaaaggcagaaaacccaccatgggaaaataagcattttttaaaatctgaagttgctcttttcctgtgtggtctttgggaggagtctagtacaaaaactgaaaacctttggtcctgggaatttattttcatggctgttgtcatggctgagtagttttttgatgaattcaatcaatgcagagaacgcttttagataaatcagaactctccttaaaatgcatttcaatcagaagcaaagtacacccattatttatgcagacatgtaaaaaatctaaaaattcttgcaatgagtagtataagccacctatttttacttccttctctgaaatattccagttaactcagcttgggttctgtgctcctcctctcttcctatagaacactgtgcataccttgaataaagagcttattatactaaaaaaaaaaaaaaaaaaaaa

SEQ ID NO: 2196 - DNA, 1734 bp, Homo sapiens
attgtgggaagggcggccggtgcagccgcagctgccatcttaggggcgcctggcgctacgggtttctcgttggaggcggccttcgtggcagctgtagacgccgggaaaaggcataaagtccgttggccgacacctttctttcctccggcctcggtagaaccgccagcccgcgtccgaaggcggaggcgaggggaactggccgcgtgaggggcctgaggcgagcggttagagcgtctcccggaaggatgggccggtctcggagccggagctcgtcccgctccaagcacaccaagagcagcaagcacaacaagaagcgcagccggtcccggtcgcgatcccgggacaaggagcgcgtgcggaagcgttccaaatctcgggaaagtaaacggaaccggcggcgggagtcgcggtcccgttcgcgctccaccaacacggccgtgtcccggcgcgagcgggaccgggagcgcgcctcgtccccgcccgaccgcatcgacatcttcgggcgcacggtgagcaagcgcagcagcctggacgagaagcagaagcgagaggaggaggagaagaaagcggagttcgagcggcagcgaaaaattcgacagcaagaaatagaagaaaaactcatcgaggaagaaacagcacgaagagtagaagaattggtagcaaaaagggtggaggaagaactggagaaaaggaaggatgaaattgaacgagaagttctccgaagggtggaggaagccaaacgcatcatggaaaagcagttgctcgaagaactcgagcgacagagacaagctgagcttgccgcacaaaaagctagagaggaggaagaacgtgcaaaacgtgaggagctagagcgaatactggaagagaataaccgaaaaattgcagaagcacaagccaaactggccgaagaacagttgagaattgttgaagaacaaagaaagattcatgaggaaaggatgaaactagaacaagaacgacaacgtcaacagaaagaagaacaaaaaattatcctgggcaaggggaagtccaggccaaaactgtccttctcattaaaaacccaggattaaattgcaaactctgaactttttacaaagaaaaatggaaaaactttgtatggtagcttcatgttgaagtggttttttgtttttgtttttgtttttttaatttgtaaaatctggaaagttagcttgttctaataggggctatgctctgcaattcccttttttttttttttttccttccactaagtcaaatccttatcagatcattgttgtattctaaggagtgacgtatttttcacctgtttggattctatattagtggtctgaggaagagcagatcacattgtaaaactatggatggtctgataaggcttttactgaccccactgacttcagagttatactctgcttgctacatcataatgctggttttgctgactttttgtttttttatatatttataaaaaaagaaaaagttggtgattgcattgggaaattcccagggtattactggacctatgtggtgtattgttaaaccagtgtccttgtgatactgtcgctcttgatgttcctgatacaggtaaggaaacagttggtcaactctgatacaaagtatatatacagttcagtattgtctctgttcattttgtttttatttcattgacaaaatcaaaccagcattccccattgtgtaaataaatgattttgctgaataaagtaaagtcttaaattc

SEQ ID NO: 2197 - DNA, 4079 bp, Homo sapiens
cttcttagccgtggctgcctcagcacctcgaggatcgacatggacgctctcgaggactacgtttggccgcgggcaacctcggagcttatactcctcccagtgacgggtctggagtgcgtgggggaccggctgttggcgggtgagggtcccgatgtcctggtgtacagcttggactttggtgggcatctgcggatgataaagcgagtgcagaacctgcttggccactatcttatccatggcttccgggtacggccagagcctaatggagaccttgacttggaggccatggtggctgtgtttggaagcaagggactccgagttgtgaaaattagctggggacagggccacttctgggagctttggcgctctggcctgtggaacatgtctgactggatttgggatgcacgctggcttgagggaaatatagccttggccctgggccacaactcagtggtgctatatgaccctgtagtagggtgcatcctgcaagaggtgccctgcacagacaggtgcaccctctcttcagcctgcctgattggagacgcctggaaggagctgaccatagtggcaggtgctgtttccaaccagctcttggtctggtacccagcaactgccttagcagacaacaaacctgtagcacctgaccgacgaatcagtgggcatgtgggcatcatcttcagcatgtcatacctggaaagcaagggattgctggctacagcttcagaagaccgaagcgttcgtatctggaaggtgggcgacctgcgagtgcctgggggtcgggtgcagaatattgggcactgctttgggcacagcgcccgtgtgtggcaggtcaagcttctagagaattaccttatcagtgcaggagaggattgtgtctgcttggtgtggagccatgaaggtgagatcctccaggcctttcggggacaccagggacgtgggatccgggccatagctgcccatgagaggcaggcctgggtgatcactgggggtgatgactcaggcattcggctgtggcacttggtagggcgtgggtaccggggattgggggtctcggctctctgcttcaagtcccgtagtaggccaggtacactcaaggctgtgactctggctggctcttggcgactgctggcagtgactgatacaggggccctgtatctctatgacgtcgaggtcaagtgctgggagcagctgctagaggataaacatttccagtcctactgcctgctggaggcagctcctggtcccgagggcttcggattgtgtgctatggccaatggggaaggtcgtgtcaaggttgtccccatcaacactccaactgctgctgtggaccagaccctgtttcctgggaaggtgcacagcttgagctgggccctgcgtggttatgaggagctcctgttgctggcatcgggccctggcggggtagtagcttgcctagagatctcagccgcaccctctggcaaggccatctttgtcaaggaacgttgtcggtacctgctgcccccaagcaagcagagatggcacacatgcagtgccttcctacccccaggtgacttcctggtgtgtggtgaccgccggggctctgtgctgctattcccctccagaccaggtctgctcaaggaccctggggtgggaggcaaggctcgggctggtgctggggcacctgtagtgggtagtggtagtagtgggggtgggaatgctttcactgggttgggcccagtgtctaccctgccctctctgcacgggaagcagggtgtgacctcagtcacatgccatggtggctatgtgtataccacagggcgtgatggagcctactaccagctgtttgtacgagacggccagctccagccagtcctaaggcagaagtcctgtcgaggcatgaactggctagctgggctccgtatagtgcccgatgggagcatggttatcctgggtttccatgccaatgagtttgtggtgtggaaccctcggtcacacgagaagctgcacatcgtcaactgtggtggagggcaccgttcgtgggcattctctgatactgaggcggccatggcctttgcttacctcaaggatggggatgtcatgctgtacagggctctgggtggctgcacccggccacacgtgattctccgggagggtctgcatggccgtgagatcacttgtgtaaagcgtgtgggcaccattaccctggggcctgaatatggagtgcccagcttcatgcagcctgatgacctggagcctggcagtgaggggcccgacttgactgacattgtgatcacatgtagtgaggacactactgtctgtgtcctagcactccctacaaccacaggctcagcccacgcactcacagctgtttgtaaccatatctcctcggtacgtgctgtggctgtgtggggcattggcaccccaggtggccctcaggatcctcagccaggcctgactgcccatgtggtgtctgcgggggggcgggctgagatgcactgcttcagcatcatggttactccggaccccagcaccccaagccgcctcgcctgccatgtcatgcacctttcgtcccaccggctagatgagtattgggaccggcaacgcaatcggcatcggatggttaaggtagacccagagaccaggtacatgtcccttgctgtgtgtgaacttgaccagcccggccttggcccccttgtggctgcagcctgtagtgatggggccgtaaggctctttcttttgcaggattctgggcggattctgcagctccttgctgaaaccttccaccataagcgatgtgtcctcaaggtccactcctttacacacgaggcacccaaccagaggcggaggctcctcctgtgcagcgcagctactgatggcagcctggctttctgggatctcaccaccatgctagaccatgactccactgtcctggagcctccagtggatcctgggcttccctaccggcttggcaccccctccctgactctccaggcccacagctgtggtatcaacagcctgcacaccttgcccacccgtgagggccaccatctcgtggccagtggcagtgaagatggatccctccatgtcttcgtgcttgctgtggagatgctacagctagaagaggctgtgggagaggctgggctggtaccccagctgcgtgtgctagaggaatactctgtcccctgtgcacatgctgcccatgtgacaggcctcaagatcctaagcccaagcatcatggtctcagcctccattgatcaacggctgaccttctggcgtctggggcatggtgaacccaccttcatgaatagcactgtgttccatgtgcctgatgtggctgacatggactgctggcctgtgagccctgagtttggccaccgttgtgcccttgggggtcaggggcttgaggtttacaactggtatgactgaggtatcctgcggtggctggcgtgctgggcatggggcctgctcacagacagcatggagcagggaagggctgtctgtgcccatgctcagcatgccttgaggggaggaggtggtggccgtgggttcctgatgtcggtgcaggagctgaaggtgagtggagtgctgccaagaatatgcccgactccccatgacaagacagaactttgtaacaaacagtaccaatttattttggccgtgggtttttgctttttttccagttgatgactttgtgaacattcccaggtattggagcctctgtggccttaaatgtggctcagtggagggagacccagcatagccaggccagtatggagcacctcacgcacagctctcagaagctgcaggcggacgaacatctgaccaaagaggtgtggtcgaggctcctgaaagagaaagggcctgctggtctcatcctctgcttcctttgcctttaccctatacctctctgcacgtcccaccccgttttgctgtgtgctcacccccaggatgtgtacccggttgtagtaggagctgaaatccatgctgagctgtaccaggaacttgcatatctagagacagagactgagtcactggcccatctctttgctcttgtgccccaggccagaataaagaatagagtgtagaggtcaaaaaaaaaa

SEQ ID NO: 2198 - DNA, 1672 bp, Homo sapiens
aaaggcgcgcgggaacatggggctgtatgctgcagctgcaggcgtgttggccggcgtggagagccgccagggctctatcaaggggttggtgtactccagcaacttccagaacgtgaagcagctgtacgcgctggtgtgcgaaacgcagcgctactccgccgtgctggatgctgtgatcgccagcgccggcctcctccgtgcggagaagaagctgcggccgcacctggccaaggtgctagtgtatgagttgttgttgggaaagggctttcgagggggtgggggccgatggaaggctctgttgggccggcaccaggcgaggctcaaggctgagttggctcggctcaaggttcatcggggtgtgagccggaatgaggacctgttggaagtgggatccaggcctggtccagcctcccagctgcctcgatttgtgcgtgtgaacactctcaagacctgctccgatgatgtagttgattatttcaagagacaaggtttctcctatcagggtcgggcttccagcctcgatgacttacgagccctcaaggggaagcattttctcctggaccccttgatgccggagctgctggtgtttcccgcccagacagatctgcatgaacacccactgtaccgggccggacacctcattctgcaggacagggccagctgtctcccagccatgctgctggaccccccgccaggctcccatgtcatcgatgcctgtgccgccccaggcaataagaccagtcacttggctgctcttctgaagaaccaagggaagatctttgcctttgacctggatgccaagcggctggcatccatggccacgctgctggcccgggctggcgtctcttgctgtgaactggctgaggaggacttcctggcggtctccccctcggatccacgctaccatgaggtccactacatcctgctggatccttcctgcagtggctcgggtatgccgagcagacagctggaggagcccggggcaggcacacctagcccggtgcgtctgcatgccctggcagggttccagcagcgagccctgtgccacgcactcactttcccttccctgcagcggctcgtctactccacgtgctccctctgccaggaggagaatgaagacgtggtgcgagatgcgctgcagcagaacccgggcgccttcaggctagctcccgccctgcctgcctggccccaccgaggcctgagcacgttcccgggtgccgagcactgcctccgggcctcccctgagaccacactcagcagtggcttcttcgttgctgtaattgaacgggtcgaggtgccaaggtgagtgagtgggggcgtgcttgggaggcgcaggatggcaccggcacatctaacatctacacttctctagctcagcctcacaggccaaagcatcagcaccagaacgcacacccagcccagccccaaagagaaagaagagacagcaaagagccgcagccggtgcttgcacaccgccttgcacatagcagaggctccgggctgactccttcctggtgggaaaggaagatgcctgtcctctccgtggaggaccctgggccctcaccgcaggaagcagtttgggttttgaaaggttattgggtcccttccttgggctgtgttcttgctggtgagcaaagtgttgcctgcaaaaataaaatgcagaacgtactct

SEQ ID NO: 2199 - DNA, 2826 bp, Homo sapiens
gatgtcatgcaggcaagatggcggaaggggaggacgtgggatggtggcggagctggctgcagcagagctaccaagcagtcaaagagaagtcctctgaagccttggagtttatgaagcgggacctgacggagtttacccaggtggtgcagcatgacacggcctgtaccatcgcagccacggccagcgtggtcaaggagaagctggctacggaaggctcctcaggagcaacagagaagatgaagaaagggttatctgacttcctaggggtgatctcagacacctttgccccttcgccagacaaaaccatcgactgcgatgtcatcaccctgatgggcacaccgtctggcacagctgagccctatgatggcaccaaggctcgcctctatagcctgcagtcggacccagcaacctactgtaatgaaccagatgggcccccggaattgtttgacgcctggctttcccagttctgcttggaggagaagaagggggagatctcagagctccttgtaggcagcccctccatccgggccctctacaccaagatggttccagcagctgtttcccattcagaattctggcatcggtatttctataaagtccatcagttagagcaggagcaggcccggagggacgccctgaagcagcgggcggaacagagcatctctgaagagcccggctgggaggaggaggaagaggagctcatgggcatttcacccatatctccaaaagaggcaaaggttcctgtggccaaaatttctacattccctgaaggagaacctggcccccagagcccctgtgaagagaatctggtgacttcagttgagcccccagcagaggtgactccatcagagagcagtgagagcatctccctcgtgacacagatcgccaacccggccactgcacctgaggcacgagtgctacccaaggacctgtcccaaaagctgctagaggcatccttggaggaacagggcctggctgtggatgtgggtgagactggaccctcaccccctattcactccaagcccctaacgcctgctggccacaccggcggcccagagcccaggcctccagccagagtagagactctgagggaggaggcgcccacagacttacgggtgtttgagctgaactcggatagtgggaagtctacaccctccaacaatggaaagaaaggctcaagcacggacatcagtgaggactgggagaaagactttgacttggacatgactgaagaggaggtgcagatggcactttccaaagtggatgcctccggggagctggaagatgtagagtgggaggactgggagtgagggagccagagggagcagctcccccacccatggcatctctcgcctccctcgctcgtctcagcccagccctggaagactgagaatgttcccccaaatctcctctgccaaccagagctctgggcacagattctggtggctccctgctggccctcttgggcctctgctcacacctgggaaggggctctctaaatcccggccagaaactctgacttgtgccaacaataggatgacccaagggagaggaaacctatcctcctcaccagaagagcctgtgtttttctgctgaacacccactgttcctgaggactcctgctgggaagtcccaagggatagttctagcccttctgcctgtgtagacagaagctaaaccaccagtctctctcggaggaagctgagacaacatactctgtccatacataagcaggcagggagggccatgccacctacccttggctaaacagggacagtgaacacattttggttcctatcccagtgggtaagaggcacttatctctgggaaatttgcctctcttgggactctccccctcccaggcattttccattcctggaaaggctcctttggggttcagaatccagagaccaaaccctgacccacctccttcctttcctccagcccacgctggtctgtccccatgccttcccagggcttcttcatgtcagatgcacccaagtccttagcccagctgtgccacctgcaggagttcgctcttgcgtttcttcccctccccaagaagggagggggctacttcaggcccttctgtgtgttgcctggcaggataccttgtccaaccagctacccacctcaactcccctgtagtttaggacacaaaacagctaccagcggtacagagcggtgatcaaagccgagtacttacaactctggtaagcctagcttctccgcctcagcccttctgcttctggaagggctatcctgggggtgaacttgaaactctcatcaggcttctgcaaaagctcttcttcctgaagacagacccagcctttgtgctctcaccctccactctggtaaagctgcacctctgggggaatgaggggctgcaggaatctctggagagcctggtgcttcacgatgctgctctggtgattcttgtacctaatctggtgtgctcaccaatgagtgaaagggatcgtgggtcagggacaccgagagagtgaggtcacttccacttcaaaccttcagtgagggggtgggatggagagaatgctgaatcttttttttgacgggatggggtttttctctttgtaattatttctttagtttaattaaccttttggttgtttgtgcaatattatatattttaaattataatgcatctccccagagtattttgtagctgggaaaagaaaaaaggaaaaaaagaaaaaaagattctaacagctgttagttttataattaaaaaagaaagaaaaaagaactttgtcctgaaccttttacagacttgccgttaacagcattaaagtgattcacccgaagctg

SEQ ID NO: 2200 - DNA, 2297 bp, Homo sapiens
agcctcggggcttgacgggattgtggcggtcctctctcccaattcggaagctacagctacctccggacgctctcaagatggcgacctctctgggttccaacacctacaacaggcagaactgggaggatgcggacttccccattctgtgccagacatgtcttggagaaaacccatatatccgaatgaccaaagaaaagtatgggaaggaatgcaaaatctgtgccaggccattcacagtgtttcgctggtgccctggagtccgcatgcgtttcaagaagactgaagtgtgccaaacctgcagtaaattgaagaatgtctgtcagacctgcctcttagacctagagtatggcctgcccatccaggttcgtgacgcaggattgtcttttaaagatgacatgccaaagtcagatgtcaacaaagagtactatacacagaatatggagagagagatttctaactctgatggaacacggccagttggcatgctggggaaagccacatctaccagtgacatgctgctcaaactggcccggaccacaccctactacaaaaggaatcgaccccacatttgctccttctgggtgaaaggagagtgtaagagaggagaggaatgtccatacagacatgagaagcctacagatccagatgacccccttgctgatcagaatattaaagaccgttattacggaatcaatgatcctgtagctgacaagcttctaaagcgggcttcaacaatgcctcggctggacccaccagaggataaaactatcaccacactatatgttggtggtctaggtgataccattactgagacagatttaagaaatcatttctaccagttcggagagatccggacgatcactgttgtgcagagacagcagtgtgctttcatccagtttgccacacggcaggctgcagaagtggctgctgagaagtcctttaataagttgattgtaaatggccgcagactgaatgtgaaatggggaagatcccaggcagccagaggaaaagaaaaagagaaagatggaactacagactctgggatcaaactagaacctgttccaggattgccaggagctcttcctcctcctcctgcagcagaagaagaagcctctgccaactacttcaacttgcccccaagtggtcctccagctgtggtgaacattgctctgccaccgccccctggcattgctccacccccacccccaggttttgggccacacatgttccacccaatgggaccaccccctcctttcatgcgggctccaggaccaatccactatccttctcaggaccctcagaggatgggagctcatgctggaaaacacagcagcccctagcaccttgtcaccactctggggctctgtggaagaaagggcacttaaaactcccagtaaatcttggaataaatatatttttccttcccttgtagtttccatggtagctgaatgtgctcagatgtgagcagtcagagactgacagccatgctttcctatacttgttcaaaggatcgatggaccgtaaataagctgccattaacacatctggttactgctgtaacatgactaataaaaccgaacgcctgttccccttacccgtgtgggggacacgcagatgagtgaattggaatgtccagcagagttaccctcccaattatatgttcattttgtatattttttggtcgggggaaaaattgacctgcagtaaaaaaacctttgaccatttttatgtccattggatactttcctttttatcatcttaaaaaaagataactagtactaatcattgtagtggcctaagtgtgatttaactcttgaagtcacaccctccgaaagatgagtagaaaccagcaccagcacagcccagatcttctctttcctctccttttcctcatttattcctaaaggaatctgaccattttacgtctctacggcccaaaaaaagacaaaaataaaaattcctttttattcctgtcaactggatggaaacacaaatttcatggagctgtgtaccatcgaagaaacctggtgtctggcatgaaattactgtaaagaacttcctgtaaaacacgttctttaacaaactgaaatgaaaagcattggagcgtctgaatgaaagacgtgacctcctgctgggactctgatggtcttcagcattcaccttcgtgtgtcttcagtgtctcattgtcatccctgcttctgtttggtcttagagtgtttggatataactgaattgtagatggtaaaggaaatttgatgtgttttttgtttttaaataattaaaacgggtcaattttt

SEQ ID NO: 2201 - DNA, 1356 bp, Homo sapiens
ctgggtctggcttcagggcacagacttcatgccggaccccagctccgagtggctgtaccgggtgacggtggccaccatcctctatttctcctggttcaacgtggctgagggccgcacccgaggccgggccatcatccacttcgccttcctcctgagtgacagcattctcctggtggccacctgggtgactcatagctcctggctgcccagcgggattccactgcagctgtggctgcctgtgggatgcggctgcttctttctgggcctggctctgcggcttgtgtactaccactggctgcaccctagctgctgctggaagcccgaccctgaccaggtagacggggcccggagtctgctttctccagaggggtatcagctgcctcagaacaggcgcatgacccatttagcacagaagtttttccccaaggctaaggatgaggctgcttcgccagtgaagggataggtgaacggcgtcctttgaagcaggatcagacccagccagcagagatggagagtgactctgttggcagaaggcaggcgaggataagctaacgatgctgctgtggcctctatgcactcagcaagagcgggacgcctgtgctgggccgggcaccagggatggtgctgagtcgggcagaggcctcctttcaaggagttcacagtgaacaagatgagaagggctgggccctggagggtcaagagccccaattatgtacaagacactttgggaggaaagaagactaccttttccccctgccattggtatagctggtgccccaaaacttccacctccctccctggccacctctaaaatgactggtataggtgctgccccaccccttagctcccctatcctgggctaggaggccacaggggctgtcctctagaattcttccttccctcccccacaccattcattcaattcatgaaacaaatctttgccaagagcagtttatgtgccaggaacatcattctgtccctgcaacctggaacaagaccagctaccagcctagcttcatccgctacttgcaccaaccagtcccgggttagatcccaaatgctagaagccagggatgcccaactctgggtggccccagtcagaacctctgggatctcagtgaagctggcctggcctctgctcctgctctcaaggggctgcttttcaaccaagagccttgtgagcctggtctgagccttgcacagccactgagtattttttttgccttagccagtgtacctcctacctcagtctatgtgagaggaagagaatgtgtgtgcctgtgggtctctacaagtgacagatgtgttgttttcaacagtattattaggttatgaataaagcctcatgaaatcctc

SEQ ID NO: 2202 - DNA, 2178 bp, Homo sapiens
tacgcgctgcgggaccggcaggggaacgccatcggggtcacagcctgcgacatcgacggggacggccgggaggagatctacttcctcaacaccaataatgccttctcgggggtggccacgtacaccgacaagttgttcaagttccgcaataaccggtgggaagacatcctgagcgatgaggtcaacgtggcccgtggtgtggccagcctctttgccggacgctctgtggcctgtgtggacagaaagggctctggacgctactctatctacattgccaattacgcctacggtaatgtgggccctgatgccctcattgaaatggaccctgaggccagtgacctctcccggggcattctggcgctcagagatgtggctgctgaggctggggtcagcaaatatacagggggccgaggcgtcagcgtgggccccatcctcagcagcagtgcctcggatatcttctgcgacaatgagaatgggcctaacttccttttccacaaccggggcgatggcacctttgtggacgctgcggccagtgctggtgtggacgacccccaccagcatgggcgaggtgtcgccctggctgacttcaaccgtgatggcaaagtggacatcgtctatggcaactggaatggcccccaccgcctctatctgcaaatgagcacccatgggaaggtccgcttccgggacatcgcctcacccaagttctccatgccctcccctgtccgcacggtcatcaccgccgactttgacaatgaccaggagctggagatcttcttcaacaacattgcctaccgcagctcctcagccaaccgcctcttccgcgtcatccgtagagagcacggagaccccctcatcgaggagctcaatcccggcgacgccttggagcctgagggccggggcacagggggtgtggtgaccgacttcgacggagacgggatgctggacctcatcttgtcccatggagagtccatggctcagccgctgtccgtcttccggggcaatcagggcttcaacaacaactggctgcgagtggtgccacgcacccgggttggggcctttgccaggggagctaaggtcgtgctctacaccaagaagagtggggcccacctgaggatcatcgacgggggctcaggctacctgtgtgagatggagcccgtggcacactttggcctggggaaggatgaagccagcagtgtggaggtgacgtggccagatggcaagatggtgagccggaacgtggccagcggggagatgaactcagtgctggagatcctctacccccgggatgaggacacacttcaggacccagccccactggagacaccaatgaatgcatccagttcccattcgtgtgccctcgagacaagcccgtatgtgtcaacacctatggaagctacaggtgccggaccaacaagaagtgcagtcggggctacgagcccaacgaggatggcacagcctgcgtggggactctcggccagtcaccgggcccccgccccaccacccccaccgctgctgctgccactgccgctgctgctgccgctgctggagctgccactgctgcaccggtcctcgtagatggagatctcaatctggggtcggtggttaaggagagctgcgagcccagctgctgagcaggggtgggacatgaaccagcggatggagtccagcaggggagtgggaaagtgggcttgtgctgctgcctagacagtagggatgtaaaggcctgggagctagaccctccccaagcccatccatgcacattacttagctaacaattagggagactcgtaaggccaggccctgtgctgggcacatagctgtgatcacagcagacagggtcgctgccctgatggcgcttacattccagtgggtctaatgaccatatcttaggacacagatgtgcccagggaggtggtgtcactgcacaggaagtatgaggactttagtgtcctgagttcaaatcctgattcaggaactcacaaagctatgtgaccttacaccagtcacttaacttgttagccatccattatcgcatctgcaaaatggggattaagaatagaatcttggggttagtgtggagattagattaaatgtatgtaagacacttggcacaaaacctggcacatagtaaaggctcaataaaaacaagtgcctctcactgggctttgtcaacacgtg

SEQ ID NO: 2203 - DNA, 1648 bp, Homo sapiens
actctgcctccaaagccaccgtccccccgaggcaccactgcatcccccaaggggcgggttcggaggaaggaggaggcaaaggagagccccagcgccgcagggcccgaggacaagagccagagcaagcgcagggccagtaacgagaaggagtcagcagccccagcctcaccggcaccttcgccggcgccctcgcccaccccagccccgccccagaaggagcagccccccgcggagacccctacagacgctgctgtcttgacctcacccccagcccctgctcccccggtgacccctagcaaaccaatggccggcaccacagaccgagaagaagccactcggctcttggctgagaagcggcgccaggcccgggagcagcgggagcgcgaggagcaggagcggaggctgcaggcagaaagggacaagcgaatgcgagaggagcagctggcacgggaggccgaggcccgggcggagcgggaggcggaggcccggaggcgggaggagcaggaggcacgagagaaggcgcaggccgagcaggaggagcaggagcggctgcagaagcagaaagaggaggccgaagctcggtcgcgggaagaggcggagcggcagcgtctggagcgggaaaagcacttccagcagcaggagcaagagcggcaagagcgcagaaagcgtctggaggagatcatgaagaggactcggaagtcagaagtttctgaaaccaagaagcaggacagcaaggaggccaacgccaacggttccagcccagagcctgtgaaagctgtggaggctcggtccccagggctgcagaaggaggctgtgcagaaagaggagcccatcccacaggagcctcagtggagtctcccaagcaaggagttgccagcgtccctggtgaatggcctgcagcctctcccagcacaccaggagaatggcttctccaccaacggaccctctggggacaagagtctgagccgaacaccagagacactcctgccctttgcagaggcagaagccttcctcaagaaagctgtggtgcagtccccgcaggtcacagaagtcctttaagagggtttgccttggatccgggcacagttgtgagggctcctctgcatcacctaccaggatgtctggaggagaaaaagacagaacaaagatggaagtggcctgggcccctgggggtgggtcctctctgttgtttttaatctgcaccttatagactgatgtctctttggccggagccagatctgcccctcagtgcattcgtgtgctcgcacgcgcagacatcccttctcccccatacacacatatacactcacagcctctctggcctcttcccttggggaggggccacctgtagtatttgccttgatttggtggggtacagtggatgtgaatactgtaaatagcttgtgctcagactcctctgcgtggagagggtgggtgcaggaggcagaccctccccccaaagccccctggggagatcttcctctctctatttaactgtaactgagggggatcccaggtctggggatgggggacaccttgggccacaggatactggttgcttcaggggtacccatgccccctgccctcgcctggaatcagtgttactgcatctgattaaatgtctccagaaataaagaataattctgcc

SEQ ID NO: 2204 - DNA, 2046 bp, Homo sapiens
ggcacgagggttcggtgggctccaggcgtcgcgatggaggagagcgggtacgagtcggtgctctgtgtcaagcctgacgtccacgtctaccgcatccctccgcgggctaccaaccgtggctacagggctgcggagtggcagctggaccagccatcatggagtggccggctgaggatcactgcaaagggacagatggcctacatcaagctggaggacaggacgtcaggggagctctttgctcaggccccggtggatcagtttcctggcacagctgtggagagtgtgacggattccagcaggtacttcgtgatccgcatcgaagatggaaatgggcgacgggcgtttattggaattggcttcggggaccgaggtgatgcctttgacttcaatgttgcattgcaggaccatttcaagtgggtgaaacagcagtgtgaatttgcaaaacaagcccagaacccagaccaaggccctaaactggacctgggcttcaaggagggccagaccatcaagctcaacatcgcaaacatgaagaagaaggaaggagcagctgggaatccccgagtccggcctgccagcacaggagggctgagcctgcttccccctcccccaggggggaaaacctccaccctgatccctccccctggggagcagttggctgtggggggatccctcgtccagccagcagttgctcccagttcaggaggtgctcctgtaccctggccacagcccaatcctgccactgctgacatctggggagactttaccaaatctacaggatcaacttccagccagacccagccaggcacaggctgggtccagttctgacctgagcacggtttttcctcatgtgacttctgggaaggcgctccctcatctgggccaaaggaaggaggacgaagccctcctcagctggcctgtgtttggggcatgaatctctcctctcctccttgtctggctctgttgacaaaccgggcatgtttggcagtaaattggcaccgtgtcacactgtttcctgggattcaagtatgcaaccagaacacaggagaagaaaagctccaggatccctgtccccatctgtcctcttgatgtgagagagactctgagacttcttccatcgcaatgacctgtattaaacacaagccccccaagcaaaagaagaggttgagtttgctgccaggattcagatcagcccttcccagggtctgcaggtgtcacatgatcacagttcagcgggaggctttccgtacccacactggctgtagccacttcagtccatctgccctccagaggaggggtttcttcctgatttttagcaggtttagaggctgcagcttgagctacaatcaggagggaaattggaaggattagcagcttttaaaaatgtttaaatattttgctttgctaatgtgctgatccgcactaactcatctttgcaaaaggaactgctccctcggcgtgccccagctggggcctctgaagggattcctcactgtgggcagctgccctgagcttcaggcagcagtgttcatctctggccagttgtctggtttccatgtattctaggccaggtaggcaacacagagccaaggcgggtgctggaagccagacggaacagtgttggggcaggaaggtggatgctgttgtcatggagctgtgggagttggcactctgtctgctggtggccctctcggctcacatgttcacagtgcagctcctggcagacttgggttttctctttggtggtttctaaagtgccttatctgcaaacaacttcttttctccttcaggaactgtgaatggctagaagaaggagctcagtaaactagaagtccagggttgcttggtttactggtttataagaaatctgaaagcacctctgacattccttttattaactcacctctcagttgaaagatttcttctttgaaaggtcaagaccgtgaactgaaaaaagtgttggcctttttgcgggaccagatttttaagataaaataaatatttttacttctgtcaaaaaaaaaaaaaaaaaaaaaaaaaaaaaaaaaa

SEQ ID NO: 2205 - DNA, 1366 bp, Homo sapiens
tagtaataccagctgtaatcccagctacttgggaggctgaggcagaagaatcgcttgaacccgggaggcggaggttgagcaactacactgcgctgcatcggactcgacgcccgctggtgacgcacacgctgcgccggaagtgtgaactgtctgcctccaggctttgtcatggcggctgctgctgcacgctggaaccatgtgtgggtcggcaccgagactgggatcttgaaaggggtaaatcttcagcgaaaacaggcggcgaacctcacggccggaggacagccgcggcgcgaggaggcagtgagcgccctgtgttggggcaccggcggcgagacccagatgctggtgggctgcgcggacaggacggtgaagcacttcagcaccgaggatggcatattccagggtcagagacactgcccgggcggggagggcatgttccgtggcctcgcccaggccgacggcaccctcatcacatgtgtggattctgggattctcagagtctggcatgacaaggacaaggacacatcctctgacccactcctggaactgagagtgggccctggggtgtgtaggatgcgccaagacccagcacacccccatgtggttgccacaggtgggaaagagaatgctttgaagatatgggacctgcagggctctgaggaacctgtgttcagggccaagaacgtgcggaatgactggctggacttgcgggttcccatctgggaccaggacatacagtttctcccaggatcacagaagcttgtcacctgcacagggtaccaccaggtccgtgtttatgatccagcatccccccagcgccggccagtcctagagaccacctatggagagtactcactaacagccatgaccctcactccgggaggcaactcagtgattgtgggaaacactcatgggcagctggcagaaattgaccttcggcaagggcgtctactgggctgtctgaaggggctggcaggcagtgtgcgtgggttgcagtgccacccttcaaagcctctactagcctcctgtggcttggacagagtcttgaggatacacgggacccagaatccacggggtctggagcataaggtttatctcaagtctcaattgaactgcctcctcttgtcaggcagggacaactgggaggatgagccccaagagcctcaagaacccaacaaggtgcccctagaagacacagagacagatgaactttgggcatccttggaggcagctgccaagcggaagctctcgggtttggagcagccccaaggagctctccaaacgagacggagaaagaagaagcggcctgggtccaccagcccctgacgcccctgtgcccactttgtaaataaactgctgaacaccc

SEQ ID NO: 2206 - DNA, 1366 bp, Homo sapiens; identical to SEQ ID NO: 2205

SEQ ID NO: 2207 - DNA, 2167 bp, Homo sapiens
gaagctgcctccgccatcttggagatgggagacgggcgatggctgtggtccttctgctaatgcaaacaacaaaacgggcacactagtcacccccgagggaggccaccatcactgtaactgttggccaaagctacaaaagaagcgagggaatccaaccgagcgcagcgacactgagaacagcttcccctgccttctgcggcggcagaagtgaagtgcctgaggaccggaaggatggtgcagtcctgctccgcctacggctgcaagaaccgctacgacaaggacaagcccgtttctttccacaagtttcctcttactcgacccagtctttgtaaagaatgggaggcagctgtcagaagaaaaaactttaaacccaccaagtatagcagtatttgttcagagcactttactccagactgctttaagagagagtgcaacaacaagttactgaaagagaatgctgtgcccacaatatttctttgtactgagccacatgacaagaaagaagatcttctggagccacaggaacagcttcccccacctcctttaccgcctcctgtttcccaggttgatgctgctattggattactaatgccgcctcttcagacccctgttaatctctcagttttctgtgaccacaactatactgtggaggatacaatgcaccagcggaaaaggattcatcagctagaacagcaagttgaaaaactcagaaagaagctcaagaccgcacagcagcgatgcagaaggcaagaacggcagcttgaaaaattaaaggaggttgttcacttccagaaagagaaagacgacgtatcagaaagaggttatgtgattctaccaaatgactactttgaaatagttgaagtaccagcataaaaaaatgaaatgtgtattgatttctaatggggcaataccacatatcctcctctagcctgtaaaggagtttcatttaaaaaaataacatttgattacttatataaaaacagttcagaatatttttttaaaaaaaattctatatatactgtaaaattataaatttttttgtttgtaatttcaggttttttacattttaacaaaatattttaaaagttataaactaacctcagacctctaatgtaagttggtttcaagattggggattttggggtttttttttttagtatttatagaaataatgtaaaaataaaaagtaaagagaatgagaacagtgtggtaaaagggagatttcagtttaaaacttaaaattagtactgttttattgagagaatttagttatattttaaatcagaagtatgggtcagatcatgggacataacttcttagaatatatatatacatatgtacatattctcatatgtaaagtcacaaggttcatttatctttctgaatcagttatcaaagataaattggcaagtcagtacttaagaaaaaagatttgattatcatcacagcagaaaaaagtcattgcatatctgatcaataacttcagattctaagagtggatttttttttttttacatgggctcctattttttcccctactgtcttgcattataaaattagaagtgtattttcagtggaagaaacatttttcaataaataaagtaaggcattgtcatcaatgaagtaattaaaactgggacctgatctatgatacgcttttttctttcattacaccctagctgaaggacatccagttccccagctgtagttatgtatctgccttcaagtctctgacaaatgtgctgtgttagtagagtttgatttgtatcatatgataatcttgcacttgactgagttgggacaaggcttcacataaaaaattatttcttcacttttaacacaagttagaaattatatcccatttagttaaatgcgtgatttatattcagaacaacctactatgtagcgtttattttactgaatgtggagatttaaacactgaggtttctgttcaaactgtgagttctgttctttgtgagaaattttacatatattggaagtgaaaatatgttctgagtaaacaaatattgctatgggagttatctttttagatttagaataactgttccaatgataattattacttttatatttcaaagtacactaagatcgttgaagagcaatagaacctttaagacagtattaaaggtgtgaagcaatggcattc

SEQ ID NO: 2208 - DNA, 2339 bp, Homo sapiens
attttgcgggaagaggaggcgctgtacctgcagtgctgcttttcttgcctagactctaggaactatccgagctccactccccacaacatactcaaaggaacggagagaaccgggacccccctgcggggacccggaactgatctgacaggatggcatctgatgactttgacatagtgattgaggccatgctggaagctccctataaaaaagaagaggatgagcaacaaaggaaagaagttaaaaaggattatcctagcaataccaccagcagcaccagcaacagtggcaatgagaccagtggaagcagcaccatcggggagacaagcaatcgtagtcgagatcgggatcggtatagacggagaaatagtcggagccgaagtccaggtcggcagtgtcgtcaccgtagccgtagctgggatcgtcgacatggtagtgagtcgcgaagtcgggaccatcgtcgtgaggatcgtgtgcattacaggagtcctccacttaccactggggagccagttgataatctgagtcctgaggagcgtgatgcccgcacagttttctgtatgcagttagctgcccgaattcggcctcgagatctggaggactttttctctgctgtaggcaaggttcgcgatgtacgtatcatttcagatcggaactcacgtcgttctaagggcattgcctacgtggaattctgtgaaatccagtctgtgccactggccattgggctgactgggcagcggttgctgggagtgcctatcattgtacaggcttcacaggcagagaaaaaccgactggcagccatggccaacaacctgcaaaagggcaatggtggaccaatgcgcctctatgtgggttccctgcacttcaatatcactgaagacatgctccggggcatctttgagccctttggtaaaattgataatattgtcctgatgaaggactcagatacaggccgctctaaaggttatggtttcatcacgttctctgattctgagtgtgcccggcgggccctggaacagttgaatgggtttgagcttgctggtcgacctatgagggttggccatgtgactgagcgactggatggtggcacagacatcacttttcctgatggggaccaggagctggatctgggatcagcaggtggacgttttcagctcatggcaaaactggcagaaggcgctggaatccaactgccaagcactgctgctgctgctgctgccgccgccgccgcccaggctgctgccttgcaactgaatggagcagttcccttgggggccctgaatccagcagctctgactgctctgagtccagccctgaaccttgcctcccagtgtttccagctctccagcctctttaccccccagaccatgtaaatcagtggcacagtatactgcctccttgtgcctctggatcctgccacttcacatctactcttccatggccccatttctccattttgtggaccaagccatcctgagggcatggacattgtctctgaggaaattggggccacccttaagataccaagaaaagctcctgcccatggtcccactggaaatggactctgctgagcaaagccaccagttgaagagaacagaatccacacctgcattgaatacctgtttctccatgtgtatcgtctctgagattaccttcttgccctttccaacaccttagtgattcctcaatttctcccccattgggaaggccatagggcattaactgaaggaactgacctctctccttttcctgtacctttaacctttagtctgtcaaggaaaacccttaggacctctgaatcaagaggactgagtttgtgggtgaaccttgaaggtgctctttctgctacaagggccctgggagatagcatggacgtgcattgagaagccagcctcagaccttagcttgaagcagcttgaggccagacctactgtagcctcagcatcttgctaggaggcatggaagtgatctatcctgccaggaggcctcagagtgatctgtcctgccaggaggtgtgagagtgatctgtcctgtgaggcatttaggggctttcaggaatttagtaaaaggtggagtatgcctttccagtatcttccatcttcctttgtatacttgtccttcctcccatttcctccctttggcccgaggtaggaggatggagggaggctgctactctaccacttcctgtgtgcctctactgtggcctcaaccctggcaattatagctactcccatcccttacctgggcatgtgtgagcccttctcactggattttatacccttgtgtctgtgtacataaatatatatacatatatatatacataaaaactttgtacaaaaggc

SEQ ID NO: 2209 - DNA, 1929 bp, Homo sapiens
ccttccggtcaccatggcgaccaggcgccttggggtcggggagacgctgggggccctcaacgcggccctggggccaggcggtccggtgtggaccaaggagacgcgcacccgccacctgcgttcccgagactttctggcaccgcaccgcgcgctgcaggcgcgcttcgatgacggccaggttccggagcatttgctccatgccctcgcctgcctgcagggccccggtgtggccccggtgctgcgctgcgcgccgacccccgcgggtctgtctctccaactgcagcggtccgccgtcttcgagcgcgtcctcagcgccgtggccgcctatgccacgcccgcctcgcctgcctcgctgggccagcgcgtcttactacactgcccagcactgcgcagctccccctgcgcgctcacggggtgtgcgtgcgcctagtgccagctgtgcgggatccgcacatgctgaccttcctgcagcaactgcgggtggactggcccgctgcctcggagagagcttcctcccacaccctgaggagccacgcccttgaagaacttacctctgctaatgacgggaggacactgtcccctggcatcctaggcagactgtgtctgaaggagctggtggaagaacagggccgcacagctggctatgaccccaacctggacaactgtctggtgactgaggatctcctctctgtgctggctgagctgcaagaggctctatggcattggcccgaggacagccacccaggcctggttagtgactcccagccctgtaggttctcccaaaccaagtatactgtacttccacagttatgattgtcctcccttaggctggggcctcagatactggtacaggcggctgcctggttgtacatgttgttagctgtgaggaggagttccagcaacagaagttggacctgctttggcggaagttggttgacaaggctccactcagacagaagcacctcatctgtggccctgtgaaagtagctggtgcacctggcactctgatgactgcccctgagtactacgagttccggcatacccaggtgtgcaaggcctcagcactgaagcatggtggggatctggcacaagacccagcctggacagagatctttggtgttctctctgtggccaccatcaagtttgagatgctgagcacagccccacagagtcagctcttcctggctctggctgacagcagtatctccacgaagggcacaaagagtggcacctttgtcatgtataattgtgcccgtcttgccacactctttgagagttacaagtgtagtatggaacaaggtctgtaccccacttttcctcctgtgagcagtctggacttctcactgctacatgatgaggtgagtgtccctcctggtagctggcacaaggaggcctggacttcccctcccagcacctttctccccaacagggtgagtggttgttgctcttcaacagtatcctcccctttccggatctgctgagccggacagcagtgctggactgcacagccccggggctccacattgctgtacgcacagagatggtgaggcatagacaaccaggacactctacactctattctttattctggcctggggcacaagagcaaagagatgggccagtgactcagtctctgtctctagatatgcaagttcctggtacagctcagcatggatttcagctcctactacaaccgggtacacatcctgggggagcctcgaccacacctctttggtcaaatgttcgtccgcctgcagcttctgagagctgtgcgtgaggtgctccatactggcctggctatgctgggtctccctccactgagccacatttaaggccacagaggctccaatacctgggaatgttcacaaagtcatcaactggaaaaaaagcaaaaacccacggccaaaataaattggtactgtttgttac

SEQ ID NO: 2210 - DNA, 2415 bp, Homo sapiens
aaaagacgccgggcgcggcggcgcgcggagaagtgcggcggagcggcgcctgcattagcaggtatgcaaagaagccttttcaccctgatgtccttagagataatatggatcagtccagagttctcctctgggtgaaagcagaaccctttatagtgggtgccttgcaggtcccccctccatccaagtttagtcttcactatctcaggaagatatccacctatgtgcaaatccgggccacagaaggagcttacccgcgcctctactggtctacatggaggcacatcgcttgtgggaagctgcagttggccaaggacctggcgtggctttacttcgaaatatttgatagtctttcaatgaagacacctgaggagcgcctggaatggtctgaggttctgtccaactgcatgtctgaggaggaagttgaaaagcagagaaatcagctttcagtggacacgctacagtttctgctcttcttatacattcaacagttgaacaaggtctccctaaggacatctttgattggcgaagagtggcccagtcccagaaacaaatctcagtctcctgacctgactgaaaaatctaattgtcataataagaactggaatgattacagtcaccaagcttttgtctatgatcatctgtctgatctcctcgagctgcttttagatccaaaacaactcactgcatcatttcattcaacccatagtagtctagtgtctcgagaagctgttgtggcgctcagcttccttattgaaggtacaataagtagagccaggaagatctatccacttcatgaacttgcactgtggcaaccactgcatgcagatagtggcttctcaaagatctctaagactttctctttctacaaactggaaacctggttgaggtcctgtttgactgggaatccatttggtacatcagcttgcctcaagtctggaaagaaattggcttgggctcatcaagttgaagggaccaccaaaagagctaagattgcttgtaatactcatgtggcccctaggatgcaccgactggtagtgatgagccaggtttacaagcagacactggctaagagctcagacactctggcgggggcacatgtaaagattcatcgttgcaacgaatcttttatatatctgctctctcccttacgatctgtgacaattgagaagtgcaggaatagcatctttgtcttgggccctgtagggactacacttcacctccacagttgtgacaatgttaaagtcattgctgtttgccatcgtttgtccatctcttctacaacaggttgcatctttcacgttcttacgcctacacgcccacttattctctctgggaaccagacagtaacttttgccccttttcatacacattacccaatgctagaggaccatatggccaggactggccttgctacagtgcctaactattgggataatccaatggttgtgtgcagagagaacagcgacacaagagtcttccagcttttaccaccttgtgaattctatgtatttattattccctttgaaatggaaggggacacaacagagatacccgggggtcttccatctgtatatcagaaagcactgggtcaaagagaacagaagatacagatctggcagaaaactgtgaaggaggctcatttgacaaaggatcaaaggaagcagttccaggtactggtagagaacaagttttatgaatggttgattaatacaggacatcgccaacagctggacagccttgtaccccctgcagcaggctccaaacaagcagctggataaggatcttacatgcagacactgggccctggaaatacaaggataaatggaggatggtgctcatcttgaaacttgaaactaaattgggaaggtgctattgctgcttaagagacattgggacttttctgtcttttttttttttttttttttgaggcagagtcttgttctgtcgcccaggctggcgtgcagtggcgcgatctcggctcactgcaagctctgcctcccgggttcacgccattctcctgcctcagcctcctgagtagctgggactacaggcgcccgccaccacgcccggccaattttttttgtatttttagtagagacggggtttcaccgtgttagtcaggatggtctcgatctcctgacctcgtgatccgcccatctcggcctcccaaagtgctgggattacaggcgtgagccaccgtgcccagccttctgttctatttaagaactttgatttccattccattttcatttattactgtttaggccgaattttcgctaaacttctgactttcatataaacatattgcttatagaacatcagaagactcatctttgtgatgcccaaatgaaaaagttggtgaaggtagtaccattgtatgtatgttaatattaaagcaactgagtgtagatttgc

SEQ ID NO: 2211 - DNA, 2635 bp, Homo sapiens
gcgctcctgctcttaggaagcctgggaaggaccggtgtgctaggagatgatcggggaaagcatagtcccctgtctgtggcaccagacactcccgactgtgcgctgactctccccgcccagccagcagccttttccagagaggctgtggtccatagcctctgttcgttttcactgcaggaccaggcacgaaagttaaaacaaaatgaagattttttctgaatctcataaaacagtgtttgttgtggatcactgcccttatatggcagaatcttgcaggcagcatgtcgggtttgatatgctggtgaagaatagaacccaaggaatcattcctttggcccccatatctaaatcattgtggccttgctcagtagaatcttccatggaatattgtagaataatgtatgatatatttcctttcaaaaagccggtgaattttattgtgagtgactctggagcacatgttttaaattcttggactcaagaagaccaaaatttacaggagctaatggcagcattagccgctgttgggcctcctaatcctcgggcagatccagagtgctgcagtattctgcatggccttgttgcagcagtggaaactctctgcaaaattactgaataccaacatgaggctcgtactctactcatggagaatgcagaacgtgttggaaatagaggacgaataatctgtattactaatgcaaaaagtgatagtcatgtgcgaatgcttgaagactgtgtccaggaaacgattcatgaacataacaagcttgctgcaaattcagatcatctcatgcagattcaaaaatgtgagttggtcttgatccacacctacccagttggtgaagacagccttgtatctgatcgttctaaaaaagagttgtccccggttttaaccagtgaagttcatagtgttcgtgcaggacggcatcttgctaccaaattgaatattttagtacagcaacattttgacttggcttcaactactattacaaatattccaatgaaggaagaacagcatgctaacacatctgccaattatgatgtggagctacttcatcacaaagatgcacatgtagatttcctgaaaagtggtgattcgcatctaggtggcggcagtcgagaaggctcgtttaaagaaacaataacattaaagtggtgtacaccaaggacaaataacattgaattacactattgtactggagcttatcggatttcacctgtagatgtaaatagtagaccttcctcctgccttactaattttcttctaaatggtcgttctgttttattggaacaaccacgaaagtcaggttctaaagtcattagtcatatgcttagtagccatggaggagagatttttttgcacgtccttagcagttctcgatccattctagaagatccaccttcaattagtgaaggatgtggaggaagagttacagactaccggattacagattttggtgaatttatgagggaaaacagattaactccttttctagaccccagatataaaatcgatggaagtcttgaggtccctttggaacgagcaaaagatcagttagaaaaacatacccgttaccggcctatgatcatttcacaaaccaccatttttaacatgcaagcggtagttccattagccagtgttattgtgaaagaatctctgacagaagaagatgtgttaaactgtcaaaaaacaatatacaacttagttgatatggaaagaaaaaatgatcctctacctatttccacagttggtacaagaggaaagggccctaaaagagatgaacaataccgtatcatgtggaatgaattagaaacccttgtcagagcccatatcaacaactcagagaaacatcaaagagtcttggaatgtctgatggcatgcaggagcaaacccccagaagaggaagaacgaaagaaacgaggaagaaagagggaagacaaagaggacaagtcagagaaagcagtgaaagattatgaacaggaaaagtcttggcaagactcagagagattaaaaggaatcttagagcgtggaaaagaagaattggctgaagctgagattataaaagattcgcctgattccccagaacctccaaacaaaaaaccccttgttgaaatggatgaaactccacaagtggaaaaatcaaaagggccagtgtcgttattatccttgtggagtaatagaatcaatactgccaattccagaaaacatcaggaatttgctggacgtttgaactctgttaataacagagctgaactatatcaacatcttaaagaggaaaatgggatggagacaacagaaaatggaaaagccagccggcagtgaagagtgacttgaagaactaaatttagcatattgcaaaaatattttgtgcggaattcgatataagtacttttacagcaggatggtatagttatgttgcctggactggtttttacatttttaaaatatttcagctgtcatttttgtactaattataaaattggcacataattcaaaaatatacatttgagatgatttgtcctcccaaattatacaagtttattttatggtataaagtgttctctctggaaatgtttttaaaaaaattcttaggcttctctttgcgaaataaaactattgaaatatttgaaatgc

SEQ ID NO: 2212 - DNA, 2635 bp, Homo sapiens; identical to SEQ ID NO: 2211

SEQ ID NO: 2213 - DNA, 2087 bp, Homo sapiens
atggcgccggaggagaactcggggagcgaactcttgctgcagagtttcaagcgccgcttcctggcggcgcgcgccctgcgctccttcccctggcagagcttagaagcaaagttaagagactcatcagattctgagctgctgcgggatattttgcagaagcacgaggctgtccacacagagcctttggatgagctgtacgaggtgctggcggagaccctgatggccaaggagtccacccagggccaccggagctatttgctgacgtgctgtattgcccagaagccatcgtgtcgctggtcggggtcctgcggaggctggctgcctgccgggagcaccagcgggctcctcaattctacatggcccttaccgtctgcaacccagagatgtgccagctgttcaccaccgagctatgctggactgggatcagatgggaagcggaagctcatcatgaccagaaactgtttccctacagagagcacttggagatggcaaagctgaacctcacactgtaggactcacacatgactccaacgggattgtgagaattaagtcactctcgtgggaagaatttttatatgggaaagcggataaaattttcattggactggaatgtttggagaatgttaaattccaaatcaggaaccacaaactgcgctctaataagacatcggctatctaagcatgtgggttccccctttctgccagcagttctggttcttaagaaaatcaccataaatcagacatgaaaattctggctccaaaaatagcattttcattgtgcaaatgaaaacgtgtgtatcaagtatgacattcccccaacgtggacacacttggttcctcacaaagccaagcccgctgcagctgccacatccctggacacactcgtttcctcacaaagccaagcccgctgcagctgccacatccctggacacactcggttcctcacaaagccaagcccgctgcagctgccacatccctggacacactcgtttcctcacaaagccaagcccgctgcagctgccacatccctggacacactcgtttcctcacaaagccaagcccgctgcagctgccacatccctggacacacttggttcctcacaaagccaagccggctgcagctgccacatccctgggtttatgatgcagcaggtgcttttttcaagacaggaatcaaagtgttaggaacatggcagaaaggtgacacctggagaccaaatgcagggtaaggagtactgcagaggtcacagggaagtcacagaacagtaatacgctagcaggggcatggggcgtgaagaacagaagacaggaagcgtttcagagactccaaagaagaaatcagggccaaccacagcttcccgagtcattcaccaggtggcaccactgccttcatttcagcttccggccactgggaggcgctgctcgaaagggtttgccctgagacaccaagaagaagctgcgggaaggacagcaggggccctggggttttagcctctggcccaggagttatgtgtccataaccaaagggagcacagtctgcacccagctctcatcccatcagagctgctgcgactcccgcaggttcttccagaactggtttagcttgcctgcaggatcaggaaagtttgagaaaagcatctgcaaaatactaaagagcagagcttacttcattgtctgtccccaccccatcccaggtcaccacctggctgaacccaggtccccgacccaaaaacaacccctcccaagtccctaactccctcacttggacttgagacccttcacaacccagcagcgctccgcctccaacttgacatcatgctttctggaaacttccccgtgtgtcccactttcccacacttggtgcgctggagcaccttccggcctctacatgctgtacgttcccctgtgagcaccctcctctcagcctctggccaacacagtcccacccatctgtgggtaacaagggggtgtgggtgttcttttcagccttgctaaactgtctgaatcaaggatcacaaactacagcctgcaggccaaatccagcccacagcctgtgtttgtaaataaagctttattggaacaaagcc

SEQ ID NO: 2214 - DNA, 3070 bp, Homo sapiens
aggcagagagcacgaggcccagtgcagaatcattttctgaaccagccaggaaataccggaacccaccaaactttaaacaccagcctaaattattcctgttcttttaagcaggcagcagaaatgacagaaacccgttaacagaaaaaaaaaaaataatgcttttcatttgaactcctgtgcattttctttttaacttatatgtgttcctaattttccttactctttttgtttgtttgtttcttagtgtggtttattgacaatcatttacaatgccgaagagtgctgtagtgagccagcacagtgggtaacacagcaacggagaacagatgcaggtttgaggaatttaacttgctaaaaccttgaactgaagtcttagagattggaacatacgggtttgtataaataggcttttaagccctgtttgcaatgggttactgataggagaaacttgcttgtggaatgtcagctgcgtgagctcactgtcagacaagatggaagaagaagggctggagtgtccaaactcttcctctgaaaaacgctattttcctgaatccctggattccagcgatggggatgaggaagaggttttggcctgtgaggatttggaacttaacccctttgatggattgccatattcatcacgttattataaacttctgaaagaaagagaagatcttcctatatggaaagaaaaatactcctttatggagaacctgcttcaaaatcaaatcgtgattgtttcaggagatgctaaatgtggtaagagcgctcaggttcctcagtggtgtgctgaatattgtctttccatccactaccagcacgggggcgtgatatgcacacaggtccacaagcagactgtggtccagctcgccctgcgggtggcggatgaaatggatgttaacattggtcatgaggttggctacgtgatccctttcgagaactgctgtaccaacgaaacaatcctgaggtattgtactgatgatatgctgcaaagagaaatgatgtccaatccttttttgggtagctatggggtcatcatcttagatgatattcatgaaagaagcattgcaactgatgtgttacttggacttcttaaagatgttttactagcaagaccagaactgaagctcataattaactcctcacctcacctgatcagcaaactcaattcttattatggaaacgtgcctgtcatagaagtgaaaaataaacaccctgtggaggttgtgtaccttagtgaggctcaaaaggattcttttgagtctattttacgccttatctttgaaattcaccactcgggtgagaaaggtgacattgtagtctttctggcctgtgaacaagatattgagaaagtctgtgaaactgtctatcaaggatctaacctaaacccagatcttggagaactggtggttgttcctttgtatccaaaagagaaatgttcattgttcaagccactcgatgaaacagaaaaaagatgccaagtttatcaaagaagagtggtgttaactactagctctggagagtttttgatctggagcaactcagtcagatttgttatcgatgtgggtgtggaaagaagaaaggtgtacaacccgagaataagagcaaactcgctcgtcatgcagcccatcagccagagccaggcagagatacgcaagcagattcttggctcatcttcttcaggaaaatttttctgcctgtacactgaagaatttgcctccaaagacatgacgccactgaagccagcagaaatgcaggaagccaacctaacaagcatggtgctttttatgaagaggatagacattgcgggcctaggccactgtgacttcatgaacagaccagcaccagaaagtttgatgcaggcattggaagacttagattatctggcagcactggataatgatggaaatctttctgaatttggaatcatcatgtcagagtttcctcttgatccacaactctcgaagtctatcttagcgtcctgtgaatttgactgtgtagatgaagtgctaacaatcgcagccatggtaacagctccaaattgcttttcacatgtgccacatggagctgaagaggctgccttgacttgttggaagacatttttacatcccgaaggagatcactttaccctcatcagcatttacaaggcttaccaagacacaactctgaattctagcagtgagtactgtgtggaaaagtggtgtcgtgattacttcctcaactgttcagcactcagaatggcagatgttattcgagctgaactcttagaaattatcaagcgaatcgagcttccctatgcagaacctgcttttggctccaaggaaaacactctaaacataaagaaagctcttctgtccggttactttatgcagattgctcgggatgttgatggatcaggtaactacttaatgctgacacataagcaggttgctcagctgcatcccctgtctggttactcaatcaccaagaagatgccagagtgggtcctcttccataaattcagcatttctgagaacaactacatcaggattacctcagaaatctctcctgaactatttatgcagctggtaccacaatactatttcagtaatctgcctcctagtgaaagtaaggacattctacagcaagtagtggatcacctatcccctgtgtcaacaatgaataaggaacagcaaatgtgtgagacgtgccctgaaactgaacagagatgcactctccagtgactccccagcaaacacaaggtgcagcagggtcccaaaggtagctggatggctgaactgctggatatgggagatacatgacgcgaagacggatttcacatccacaggacggtcttgaagaaaataacactgtgtatattattttaaaataaaaaatagaagtttttattgagttctttaaattactactccatgcttttcttcttcttggaaaagtttttaaatcaaccactcataatttgaccaaaattttaaaaaactggtattttgtaaatgtgtcagagacacatgggacagaaccctactttttgtagaggaacttaatctgaataaagtctgagtttttcagt

SEQ ID NO: 2215 - DNA, 3354 bp, Homo sapiens
taattttaaagccagtcccagcagatcaaatgatagtttctccgtcaagcaatacttccacttcaacttccactcttcagagccctgtgggagctggcacacacactgtcacaaaaattcagtctggcataactgggacagtcatatcggctccttcaagcactcccatcaccccagccatgcccctagatgaagacccctccaaactgtgtagacatagtctaaaatgtttggagtgtaatgaagtcttccaggacgagacatcactggctacacatttccagcaggctgcagatacgagtggacaaaagacttgcactatctgccagatgctgcttcctaaccagtgcagttatgcatcacaccagagaatccatcagcacaaatctccctacacctgccctgagtgtggggccatctgcaggtcggtgcacttccagacccacgtcaccaagaactgtctgcactacacgaggagagttggttttcgatgtgtgcattgcaatgttgtgtactctgatgtggctgctctgaagtctcacattcaaggttctcactgtgaagtcttctacaagtgtcctatttgtccaatggcgtttaagtctgccccaagcacacattcccacgcctacacacagcatcctggcatcaagataggagaaccaaaaataatatataagtgttccatgtgcgacactgtgttcaccctgcaaaccttgctgtatcgccactttgaccaacacattgaaaaccagaaggtgtctgttttcaagtgtccagactgttctcttttatatgcacagaagcaacttatgatggaccatatcaagtctatgcatggaacattgaaaagtattgaagggcctccaaacttgggtataaacttgcctttgagcattaagcctgcaactcaaaattcagcaaatcagaacaaagaggacaccaaatccatgaatgggaaagagaaattggaaaagaaatctccatctcctgtgaaaaaatcaatggaaaccaagaaagtggccagtcctgggtggacgtgttgggagtgtgactgcctgttcatgcagagagatgtgtacatatcccacgtgaggaaggagcacgggaagcaaatgaagaaacacccctgccgccagtgtgacaagtctttcagctcgtcccacagcctgtgccggcacaaccggatcaagcacaaaggcatcaggaaagtgtacgcctgctcgcactgcccagactccagacgtacctttaccaaacgtttgatgctggagaagcacgtccagctgatgcatggcatcaaggaccctgacctgaaagaaatgacagatgccaccaatgaggaggaaacagaaataaaagaagacactaaggtccccagtcccaagcggaagttggaagaaccagttctggagttcaggcctccccgaggagcaatcactcaaccactgaaaaagctgaaaatcaatgtttttaaggttcacaagtgtgccgtgtgtggcttcaccaccgaaaacctgctgcaattccacgaacacatccctcagcacaaatcggatggttcttcctaccagtgccgggagtgtggcctctgctacacgtctcacgtctctctgtccaggcacctcttcatcgtacacaagttaaaggaacctcagccagtgtccaagcaaaatggggctggggaagataaccaacaggagaacaaacccagccacgaggatgaatcccctgatggcgccgtgtcagacagaaagtgcaaagtgtgcgcaaaaacttttgaaactgaagctgccttaaatactcacatgcggacacacggcatggccttcatcaaatccaaaaggatgagctcagccgagaaatagccacagatgctccatgaggaaaatccctgtccacattggaataaaaaagacatttttgttacaaagtttgcagtataatagagttaacagtactgtctaggctgttgcaatatattctctttcaatgtaccttccttcacctcgtcgtatatatcctcgataagtattaaaacagtatttgagtttaaaagagtttgtatatatttaaatgaataactttttatactctttgttacatgtttgtatcagtatttagtggaaaaccatttgagttgttttgggttagaatttttctttttgtactgtttctttaaaacagagttcttagtaacaggggcagttcctgaattcaaataaaccattttgtatgtttggattttgaatgggttaactaattacaggctaaaataatgccttttttagtgtttttaatttttagaattcactacataaattgtaagtaattgtgggtctcaaaaacactaggaacttttaagtgtcttagcacttcctcgatgtgcctgccctgagggagtgagttcacatttgagacaactgcactccagtgtggacgtgcctttgtcttcaggccatgccgaagggtgtttaaagcagtcttgcaggtcgctcctttcccagccgtggataaaaactgaagctaggaatctaataaggaatgctgatttcctcagttccattttgaggaatggggaaggctattctaaagaaaaaaatgggatttgttttctcggcagatctgcaaggctggctttaagagcacaaggagggaaagtaacgaaagggctggactactataaaagttacaaatacgtagttagaccaatagatttatatagtcaggtttttgtcatgtaatttattaactaactattacagaaacacagctaagaatatcaagtatttctctggctcttgacagaaaaaaatcagttgacttaaccctttgctgtcaaaagagttggcgtttcctgttctgggtgctactgccaaacgttatggtacttagagtcgggatgcacaacttcaaccaccgacttatcaatgcagccgcctgtgtattgcaattggccgttaccttaagcactgagccacccgggtttagttcagccatttcaagaagtatatttaacgtcggtagttctgctttattaaaatgcagcagaggtactcttctgtcccttccgtttatagttctctgagagagttctattttttggttttgttttgtgttttcttttgcattttgtatcttgtatttatccctgaacatgttttgtaccttttttttttttttttttaagaaaaggaattcttttgtgtatatatagatacttgcatgatatactgtagtcaatgttcggttcctcaaaaggtcttgctgctgtcaggtgttatgcactccatccatcataactgtatgaaacacatttcatatgtaaataaacgtgggacatttggcccttgt

SEQ ID NO: 2216 - DNA, 2944 bp, Homo sapiens
atatgatccgctcggcttcctgggtctggctgctgccgcccgccggtgtccgcccgtgtcgcgccggggcaccaaggagccgttggagggtccgggcggaggcccgctcgtgtggaagtcgtcgacgccgccgctcgtccgtcctcccgtccgttctcgctcccggccgccatcatgctggcgctcatctcccgcctgctggactggttccgttcgctcttctggaaggaagagatggagctgacgctcgtggggctgcagtactcgggcaagaccaccttcgtcaatgtcatcgcgtcaggtcaattcagtgaagatatgatacccacagtgggcttcaacatgaggaaggtaactaaaggtaacgtcacaataaagatctgggacataggaggacaaccccgatttcgaagcatgtgggagcggtattgcagaggagtcaatgctattgtttacatgatagatgctgcagatcgtgaaaagatagaagcttcccgaaatgagctacataatcttctagataaaccacagttacaaggaattccagtgctagtgcttggaaacaagagagatcttcctaatgccttggatgagaaacagctaattgaaaaaatgaatctgtctgctattcaggatagagaaatttgctgctattcaatttcttgcaaagaaaaggataatatagatatcacacttcagtggcttattcagcattcaaaatctagaagaagctgaagcatctcttgaagtcttccagtccttcttggctataatcctagaattattgtccgttcctctgaagtaattcccagaatacggtccttcctaaaccccagaaattgcctttttcagagtctatttctcatgtgcactgctgaagatgaatatccctaatccttcataaagaatcagctagagttgtcatgataaagtcagcacacacaaaaaggcttcttacacataccaaaaaaaatgtcttaaaccatgtgtagagctttaaaaacagaaaaaaaaccccatatacttatgaccatcttaaatcaagaaaattgcatatttccattctggtctttctgggccagatttttatattggttttcagtaaatgtctatctataatatttcattatagagtccagtagcttaatactgacactgacttgatacagcacgaagtttctagtgccacacacagtatttagaaaacctttaggcgtgaatgactcatgtgggatatatgtaaacataatgtttattttatctcacaaatgcatgtgaaatgtataattacatcttaggaatccaaaatggtctgcagagagtgagcggaggcaccagatcaatgttggttctttgcactggtgagattctgcctgatgaatattaaagatatcctgctttctgagaactctatcaccagatggcagttgggatatgggaggaactaaagcatcctgttttgtatctgtccagatcattatttctgtctcttgttttttcttcctggttcaggatacttttttaaggggttgagaattgaagattttccaaaagcgttcatgaatttagagcattccacccaatataataaaacctgttaagaatgtcagtctttgttcaaacatctgtttgttctatctccagtcattaaatcagtgctgctgcatgacactcttaactcctgactttttatatccagtcataaagttgactttcagcacaaaagatacttataaacaaataaaaaatttttatttttctctcttactgatgtaagctttggcactcttttgactggtgccattagacatcttgattattgtgacaactctagacctgcctgctttatctaatgtaatcatgctcaatgtctacaggttgtttaataatcagtcacacagagaactgaggaactgatgctgtttgtttgcttctatgatacagagatgtctaaaaacttcaaatggacatgttttgtagtttagcgacttccgtatacataaagggacatattaatactggttcatttgtaaattattattcatatagaccactgtagtagataaaactctatggtacacctgcttatgtgttgcctcacactgtgtgtgattttgtttcttttgttaagcagcacttatgtagactgcatttccaaatgtgttgagcactcggagtgtagtcaacagtaagttcttttaatgaatatcagttttaatttatagactgccatggccttaaaaatattctgtacaatatactgcactgtgttgcacagacactacttgcttttctccattcatatttttatgagtagaatctgggcttttaaatttctcttcttattctttgaagcatgttgcatactaccctggtgggatggatggttctgtaaatgaagggatatttaaacttgctactgttgttcaacaccattaatggtcagtgtgaaccattacaaagaatgtggcaacttgcttgtgcctaaaaggaggaattggaactagaatgtgtgactctgtggggactgcataggtttgttaattgacctatagctaaaccttaatgtgtttgtgtgtctatacattgctttccgcatttcaagacatccagacgctattaccaacattttcctgtgcattaacctctgcatgtgaaaacttttaacagttactgaactatgtaaatatgtgaatttttttatttaggtggatgcattttttgtctgtttactgctcttctcagctttattcaataaacttgcattttaagggttgtattggcaattttaacttaaaatgtgcatcatgatggaaggtgcagacttttttggaagtttccgagaggagggtctatagaccatttgtcagaaatcagatcagccctcaaagaatggggtctgtgggctagttaaaatagaaataaacttttaaaatatccacag

SEQ ID NO: 2217 - DNA, 4020 bp, Homo sapiens
ctcctcctcttcgctgccggtgggcaccgccgctcgctcgcacttctgcgcccattggagcttcggagatccctgcggtcccgcgggacggcgcggcagcagctgacctcgcagacaggatcttgctctcttgcccagactggaatacagtggtgtgaacacggctcactgcagcctcaacctcctggactcagagatgtcggcttatttataggaattgcttgaagccagagtcatggtggatgtcggaaagtggcccatcttcactctactctcccctcaagagatcgcgtctattcggaaggtgtgtgtcttcggcacctcagccagtgaagcactgtacgttactgacaatgatgaggtctttgtatttggactgaactatagtaactgtctaggaactggagataaccagagtacacttgtacccaaaaagctagaaggcttatgtggaaagaagattaaaagcctcagttacgggagtggaccacatgttcttctcagcaccgaagatggagtggtttatgcctggggccacaatggatatagccagcttgggaatgggacgaccaaccaaggcattgctcccgtccaggtctgtaccaatctcttgatcaagcaagtggtggaagtagcttgtggctcacatcattcaatggctctggcagctgatggagaggtgtttgcttggggttataacaactgtggccaagtgggatcaggttctacagcaaatcaaccaactcctcgaaaagttacaaactgtttacatattaagagggtagttggcattgcctgtggtcagacttcatccatggctgttctggacaatggcgaggtatatggctggggttacaatggcaacggtcagctgggcttgggaaacaatggcaaccagctgacccctgtgagagtggcagctttgcacagcgtgtgtgtgaaccagattgtctgcggttacgcacatactctagcactaacagatgagggcttgctgtatgcctggggagctaacacatatgggcagctgggaactggcaataaaaataacctgctaagcccagcacacatcatggtggagaaagaaagggtggtagagattgcagcctgtcactctgcccacacgtctgcagccaagacgcagggtgggcacgtgtacatgtggggccagtgccggggtcagtccgtgatcctcccgcacctcacccacttctcctgcaccgacgacgtgtttgcctgctttgccactccggccgtctcgtggcgcctcctgtctgtggagcatgaagactttttaacagttgcagagtcactgaagaaagaatttgatagtccagaaactgctgatctgaagtttcgaattgatggaaaatatattcatgtccataaagctgttttgaaaatcaggtgtgagcattttcgatccatgttccagtcgtattggaatgaagacatgaaggaagtgatagaaatcgatcagttttcttacccagtgtatcgtgcctttctccagtacctctacacagacacagtcgacctgccgccagaagatgctataggtcttctggatttggcgacatcttactgtgaaaacagactgaaaaaactttgtcagcacattatcaagagaggaattactgtggagaatgccttttcgctattctctgctgcagtcagatatgatgcagaggatttagaagaattctgctttaagttttgcatcaatcatttgacagaagttacacagactgcagcattttggcaaatggatggccctctgctaaaggaattcattgctaaagccagtaaatgtggagcctttaagaactgaagcgcaaggctgctgggttctgtgtgagtgctctggggcactgttgaggatgtgtccagtttgtgctctacgggtgatgtgattctgcaggtaaaagaccatcaggttgtttttttccacatctgggacacagttgtttgtgtaggaacataacaagggtgtacggcttttcttgagcccattttaaacaacccttgtttccagataagtgtattttaaatgtgacctttcgtaaatttgggctggaacatgtaaaagggtgaaagttagtcgtttttggtcttcttttcatttttgattagaggaacttctgaacttggaaaggggaagttggcagcaactctcctgggccacgtatcaacaatcttctgacagcaggagcagtgatagttggggaattgtgagatgaatggagaggccccatcgtgaattaaagatgctgacctggggattgttaagtgctgccttagttgctagtttagtagccttactgtgaaggaataattaagattgtttcagacttttgtttgtgtgcttgcgttgatgacttttttaacttcaagataaatcaaagtaataagtttaacgtatattaaacctgttgaaatgataattatgtaaagataaatattctaggttagtcaagatttctcttaagatttaagtgcataaagaatagtaatttagaagtatccgtgaaaagttgataatgaaagaaatttgatgaaggtgaatattttataaattagaatctccactacttatccaatggtgttttatttcattaaggtagaacttgagaactcaagtttaaattgtcccccaccaccttcttctataaatgcaaacttaagaggaaaataatgacatgtatagtatactcttgccttcctaaattatgactgctgaatcatcatatctactatatatgactggaagaagtggttcttcaagtcaaccctcttacaagacttagtgggaatttgctttatctactttaggccaaatccatcacacattggcttatgtgaaactttatcatctttcacttttggttttcctctgtttttaaacatcttaggtataacagcacaatttcaccttgaaaaagcaccaaaattatggtgttcctgaaaagatcctattaaaagacagtagtttatttgaactggttatggaaggtgactttgggatgtaagagtgttcaactgtgagtttcatcatgtgtgtccgttgagcttgcttttaagagcaatgttttgctttgctctctggtccatgaactcatttccatttgagtgagttcccttagtgaattttgtctcctgcttggaaagtctctcttctgaacctggagcctgaatacattttcagagccaaattacaagtgggtgaagacatgctacaactactatttttagcaatgtttttaaatttgtgtctattggggtgggaaggggagtgaggccctaaagataggaattcactgatagctgaaatagatacaagcctaggagccccagcccccttttcttgaccatatcacaagtgattgaagcccagtgaattagtcggttagaattcgttctacaacatgatagaacttttcttactagcttcagaaatgcacattgatttgtgctatgatgggtggtgtttgtaacaatcactgttctataggcttatgatctgagcaaaatgtgaacttcagtatgtttactattgctcttacttgaaaactttttttcaaaaaaagcacaaattaaagtagtaaattcatatccatagatagttcattcattcaacaaatatttaccaagttcctaatataagtgaaggaccacttctcatattagattactaagtcatttgtatgaatatgtgtggcagtgaagagaacaggtctttcaaaaagcatttgattattttttttaaatacactctcttatttttctacttgtttttttgttaatcatagcaggatatgacaactcttatttgaattgattttttcatctaatgtaataatggaagccaaagtattcatatttcttaagatagccctaaatgtactcttgaacttcttactggaacaatgtttgatactctagtatgtaagctgtatttatgtaatatttagaacgacatgttaataaacaaagtaacattaaaatatttaaaaaaaaaaa

SEQ ID NO: 2218 - DNA, 2800 bp, Homo sapiens
cttaaggctaaatcctggaataaaaagttctatgattatgaagcaaacatgccagacagatggggtcacagtggttataaagagttataccctgaagaatttgaaacagacagtagtgatcagcaagatattaccaacgggaagaaaacatctccccaggtaaagtcatctacccatgaatcccgcaaacacaagaagtcaaagaaatcccacaaaaaaaaagcagaaaaaaaggtcacacaaaaaacagaagaaaagcaaaaaggaagccacagatataacagcagattcctcgagtgagttctcagaagaaactggggcttctggtacaaggaaagggaaacaaccacataaacgcaagaaaaaatccaggaaaaagtctctcaaaaaacctgctttattcttagaggcagaaagtaacacttcacattcagatgattcagcatccagcagttctgaggaaagtgaggaaagagacactaagaaaaccaaaaggaaaaagagagagaaaaaagcccatacctctgtaaccaacaatgaaatacaggagaggacaaacaaacgcacaaattggaaagtagctacagatgaaaggtctgctgagagctcagaggatgactaaatgggaaacacttttgttttccacatgactgtggatatttacagttcttactccttgtggttttgccagtgactcttgttcagcacggggcctgaggtcagagctgtcttgtgccatctgtatgttctgacagacgtcttgtcttctattttggcgttaagcttgatccccttttcttgttaaaagggaatctggtattttgttatgaaggtttcttgaagagattatttttttttgcaattaattacgtttagtgtagagtgcatatacagcaaattaaaggacccagaaagctggatccaatagtgacctgggtacaccaatcggaaattgagtttggggaagtcaagggctgggatcaagaggtggattggaactaatgccatgtaggatggtatgacaaggcaacactgtattgctctctgtttatatagcaggtgtcacaactaacttgtctttagccttggtgctttgatccttctatattttgaccccacaggtgtggtccggtttacttaatcaggacatgggcctaagaacaaaccttttcccttcatgataacatccatagacaacttattagaagggactagagtttttgcaaatttccctgctggatggggcctatagctatacttagtatatgcctaaacatggtaattggatagtaaatggttttctagttccattgctgtatatttgcctaaatggacttgtgttcaaattatttcttcaattgtcatagataatcctgtaccaaatggggaagaattaggaaataatcatgttgtctaatggtactctggattcagggcagcaactgccatttaaatgttgtcttgttcatttctaaatctgttcatgaagtttaggttttccctgaaaccaagttgaattatttccaaaatgaaacaggcttctcagggacatatccacttcttcccagtctgcctttggattaaagcaccaagcagagaccacattaattccctttgctatactgtgatccttagtatgttaattcttaagaaaccaacatatcactgaaagaaggctggcagaacgcaagtgcattttttcactgtgggaagaaagatcaagtgacgtattattttttcctggttgtcacttaatgggctgagtaaaaagcttgaaaactcagactttcggtcttggttctgccactcattggttatgaggaggcccagagcaggtaagttcaccttcctggccttactttcctgatgtgtaatacggaattacttcacagtagcatgacagtataagacaccagcagtagatacaactatgatgacattccatgagttggtatttttagttctaactgctaaatttgttctctttacgggacagatttctaataaagtgcttggtcttaaaatacatggttggacagaggtgccctatcccttaactatgagcaggtgctaccttttgggatatttattttaaattttaatactttggtactcaattgtcagtgttccatggtgtgtatttttatttttgggattagtgggggtctaaagggagaagaatagtctctaattactacctcttaacctaaagcaattattttgttcctggagcaagttaaatctttgttggaaggagctttggccatatattttttagcatgcattgtttctgtgccctgaaagtacctgaaaggttttaagcacagactcaggaaaatgtgccagtagaacaggccatctccaggaaattggctctatttgggtcctgaccttcccttcctcccaagttagcaggcttgttcttttgcaaggaatacacatcttgccttttttttttttttttttttgccatgttttccttttcttggtcatgtataagcaataaagctgttttttgttcttcatctttcttaaccccaaattttcttctatgccttaggcttcgatggttcttccaacccccttaatatggcttagggtggtttttcaaaacctacaatcccccatttgcactactggccatggaacatttatttctagtgttcctgccaatcagagatctctatattaaattctaaaatgggattaaaagaagagttggagaattcacacttattgagtaactgatgtcatacaacctggaatttctgaattccaaataaataaatttcactctttg

SEQ ID NO: 2219 - DNA, 3803 bp, Homo sapiens
agctgtgagacgacgagtgcgtgaagtgaaggcgattgagaggggctgagggaattgtcctctgtggaagggactttcttttggccctaggccccttcctgcccctgtcgtcagcagagagatggaaaacttgatgactagctccaccctaccgcccctttttgcagatgaagacggttccaaggagagtaatgatctggctaccactgggttaaatcacccagaggttccatacagtagtggcgccacatcatccaccaacaatccagaatttgtggaggatctctctcaaggtcagttgcttcagagtgagtcttcaaatgcagcagaaggcaatgaacagaggcatgaagatgagcaacgaagtaaacgaggaggttggtccaaaggaagaaagaggaagaaacctcttcgagacagcaatgcacccaaatccccccttacaggatatgttcggttcatgaatgagcgtcgagaacaacttcgagcaaagagaccagaagtcccatttccagaaatcacaaggatgttaggcaatgaatggagtaaactgcctcctgaggaaaaacagcgctaccttgatgaagcagacagagataaggagcgttacatgaaggaactggaacagtatcagaaaacagaggcctacaaggtcttcagtaggaaaacccaggaccgtcagaaaggcaaatctcataggcaagatgcagcccggcaggccactcatgatcatgagaaagaaacagaggtaaaggaacggtctgtttttgacatccctatatttacagaggaattcttgaaccatagcaaagctcgggaagcagagctccgccagcttcgcaaatccaacatggagtttgaggagaggaatgcagccctgcaaaagcacgtggagagcatgcgcacagcagtggagaagctggaggtggatgtgatccaggagcggagccgcaacacagtcttacagcagcacctggagaccctgcggcaggtgctgaccagcagctttgccagcatgcccttgcctggaagtggagagacacctacagtggacaccattgactcatatatgaacagactgcacagtattattttagctaatccccaagacaatgaaaacttcatagctacagttcgagaagttgtgaacagactcgatcgttagggaatggtcttagaactccaagatgttccataagtgtttttacttgtgaggaatgagaagccatccatggaaatttgaactgagtgggggcagagaaagagtgcagatccctttgcttgtgaaagaattatcagtgagtgaaaggccatcaccccaggaagccaaatgagggagcagcaacatgtatatgagcttcctatggaattgtccttatgtgaagctttgaaggtgtacagccactctcccgggtcttcaggttcctaccatttccatttctgttaaagtggatctgcatatcttcagcttactaggtgacccggatgctgacatctgctgctgcagaaaggaagacttttcattgtaatttcgcttagacccttttatcagtggagctccagttttcttacctagctgtcacttttttaaatgcctctgggggttatttttgctttccttggcccccaccaatttatacatctccattttctgacctctggactaactggttgctcagcaaggttctgaaggagagtttcttgcattggacaggcccagtcttctcccatcattgccctgctgtgactccaaagaaaggagcttcttgctgacagtgccctgtggagcaaggctgtgtttcctaccccacacggtgctcagtgggtgccagccctcagtgtggctttgtgattgctgccctaaaggagaatgctctttccttcctcactggtactgcctgctgttttctaagcattgctcctgcacagacatggagtcccagccccagcaaggctcttctgttcccatctgttgacaatgtcttgtggagcatttttgctgaggaaaaggtcacttgtaaacagaggagaaagggaaagagtacaaagccctaagtttattgtaagtgaaaactgagggaattcctgtcttctttaggagtaatgattcatagatctagataggtggaaatatcattcaaaatagtcacttgagctcacaaaaaaagcaaggaagaattctcatgtcctttgtcttccttctgtagccattaactgctgaatccatgtgaggaagacaggcttcccttccttccccctccttagtgattttttctttaacagcataagtaaagaggactttctggttcatttttgtttgttttgttttgttttgttttgtttacagatgaggtcttcctgtgttgcccaggctggagtgcggtggctattcacagatgctatcatagcacactacagcctacaactcttgggctcaagcatcacgcctagcagtttctggttcctttaacagcaaaaggaaagagaggttctgattcttacctcagggttttttggttgttcattgtttttgtttttgtttttgttttgacactgcagagcacaaggctaaaggttacagctgcgatctttggaaccaaaggcagagcaagcagagcccgttgtctgggccccacaccactgcaggcaggtggatagaagtgcggcccctctcatagtatgcccataagtcagggcatagggcagaactacctgtcatgttgctacaccatcctgtcttctcagcatctccttgcctgttttctttattagtccaaaggaaaacaacagcaacaaaatctgtttttaaaatgtcttatatgaacatatatcaaatatccatgcgctgaaacccacataccatcacttggcaattttttagaataagaccccattattatctattgctataaacctagccagttctcttgctcttctgtattttcctatttccctgccatcatctgctatttctgccacttctcttagactccttgtctgcaaagcccaagctagaactcactgtctatggcagaaggacatccagagcccattctggagttttgttttttccttctgccagatgctttgtgtcctgtcttccttcctcctcatatttctgtttctcatttgtgttcagttttgtgcagcattgctagcactgcttttgtgaccagaaaaggccataacatggtccaggatcatcattcttctgactctagatgggacacttgacagtgacttgaaacatttgcatattcaggaatgcatgagatttcaagagagcctacagtatgaaatcattttcacaaaataagcagcttgcttctgaaatgctgtctttcccagtagctactcacctgcctctggtggctgggattcagatgccacaaaactgtcagtatctatagaccaggtctgtgccacctcctctctcctctgtgctcagtgaggaggcagtaaatgaagttacaggctagcacaatacctaactcatgtttcccagtacacctgtagatattactgtacttttatgttctcaagaaataagttgttgcctattcagtgttacagatttctttgtttctttttaattaaaatacaagaagcagctgaggaaagggagacaaggtattttatttctgactgattttagaaaaaacttgtgtacatgtgtttggaactgttgaaatgccaagttttctgtataagtgtttttgtaattaaactttcagattttctttgttttttaagaagttgatgtgcttgtttgacatttgtctcattaaaacttttctacgttg

SEQ ID NO: 2220 - DNA, 2707 bp, Homo sapiens
ctacgcgcggggcgggtgctgcttgctgcaggctctggggagtcgccatgcctacaacacagcagtcccctcaggatgagcaggaaaagctcttggatgaagccatacaggctgtgaaggtccagtcattccaaatgaagagatgcctggacaaaaacaagcttatggatgctctaaaacatgcttctaatatgcttggtgaactccggacttctatgttatcaccaaagagttactatgaactttatatggccatttctgatgaactgcactacttggaggtctacctgacagatgagtttgctaaaggaaggaaagtggcagatctctacgaacttgtacagtatgctggaaacattatcccaaggctttaccttttgatcacagttggagttgtatatgtcaagtcatttcctcagtccaggaaggatattttgaaagatttggtagaaatgtgccgtggtgtgcaacatcccttgaggggtctgtttcttcgaaattaccttcttcagtgtaccagaaatatcttacctgatgaaggagagccaacagatgaagaaacaactggtgacatcagtgattccatggattttgtactgctcaactttgcagaaatgaacaagctctgggtgcgaatgcagcatcagggacatagccgagatagagaaaaaagagaacgagaaagacaagaactgagaattttagtgggaacaaatttggtgcgcctcagtcagttggaaggtgtaaatgtggaacgttacaaacagattgttttgactggcatattggagcaagttgtaaactgtagggatgctttggctcaagaatatctcatggagtgtattattcaggttttccctgatgaatttcacctccagactttgaatccttttcttcgggcctgtgctgagttacaccagaatgtaaatgtgaagaacataatcattgctttaattgatagattagctttatttgctcaccgtgaagatggacctggaatcccagcggatattaaactttttgatatattttcacagcaggtggctacagtgatacagtctagacaagacatgccttcagaggatgttgtatctttacaagtctctctgattaatcttgccatgaaatgttaccctgatcgtgtggactatgttgataaagttctagaaacaacagtggagatattcaataagctcaaccttgaacatattgctaccagtagtgcagtttcaaaggaactcaccagacttttgaaaataccagttgacacttacaacaatattttaacagtcttgaaattaaaacattttcacccactctttgagtactttgactacgagtccagaaagagcatgagttgttatgtgcttagtaatgttctggattataacacagaaattgtctctcaagaccaggtggattccataatgaatttggtatccacgttgattcaagatcagccagatcaacctgtagaagaccctgatccagaagattttgctgatgagcagagccttgtgggccgcttcattcatctgctgcgctctgaggaccctgaccagcagtacttgattttgaacacagcacgaaaacattttggagctggtggaaatcagcggattcgcttcacactgccacctttggtatttgcagcttaccagctggcttttcgatataaagagaattctaaagtggatgacaaatgggaaaagaaatgccagaagattttttcatttgcccaccagactatcagtgctttgatcaaagcagagctggcagaattgcccttaagactttttcttcaaggagcactagctgctggggaaattggttttgaaaatcatgagacagtcgcatatgaattcatgtcccaggcattttctctgtatgaagatgaaatcagcgattccaaagcacagctagctgccatcaccttgatcattggcacttttgaaaggatgaagtgcttcagtgaagagaatcatgaacctctgaggactcagtgtgcccttgctgcatccaaacttctaaagaaacctgatcagggccgagctgtgagcacctgtgcacatctcttctggtctggcagaaacacggacaaaaatggggaggagcttcacggaggcaagagggtaatggagtgcctaaaaaaagctctaaaaatagcaaatcagtgcatggacccctctctacaagtgcagctttttatagaaattctgaacagatatatctatttttatgaaaaggaaaatgatgcggtaacaattcaggttttaaaccagcttatccaaaagattcgagaagacctcccgaatcttgaatccagtgaagaaacagagcagattaacaaacattttcataacacactggagcatttgcgcttgcggcgggaatcaccagaatccgaggggccaatttatgaaggtctcatcctttaaaaaggaaatagctcaccatactcctttccatgtacatccagtgagggttttattacgctaggtttcccttccatagattgtgcctttcagaaatgctgaggtaggtttcccatttcttacctgtgatgtgttttacccagcacctccggacactcaccttcaggaccttaataaaattattcacttggtaagtgttcaagtctttctgatcaccccaagtagcatgactgatctgcaatttaaaattcctgtgatctgtaaaaaaaaaa

SEQ ID NO: 2221 - DNA, 3248 bp, Homo sapiens
ggaagctggtggcggctggtgggcgaccgggcgcatcctcattgcagtgcggcggccctacctcggccctggcctgaccccggcggccctgcccgcccctccctccagcatcatggccagcccaagaaccaggaaggttcttaaagaagtcagggtgcaggatgagaacaacgtttgttttgagtgtggcgcgttcaatcctcagtgggtcagtgtgacctacggcatctggatctgcctggagtgctcggggagacaccgcgggcttggggttcacctcagctttgtgcgctctgttactatggacaagtggaaggacattgagcttgagaagatgaaagctggtgggaatgctaagttccgagagttcctggagtctcaggaggattacgatccttgctggtccttgcaggagaagtacaacagcagagccgcggccctctttagggataaggtggtcgctctggccgaaggcagagagtggtctctggagtcatcacctgcccagaactggaccccacctcagcccaggacgctgccgtccatggtgcaccgagtctctggccagccgcagagtgtgaccgcctcctcggacaaggcttttgaggactggctgaatgatgacctcggctcctatcaaggggcccaggggaatcgctacgtggggtttgggaacacgccaccgcctcagaagaaagaagatgacttcctcaacaacgccatgtcctccctgtactcgggctggagcagcttcaccactggagccagccggtttgcctcggcagccaaggagggcgctacaaagtttggatcccaagcgagtcagaaggcgtccgagctgggccacagcctgaacgagaacgtcctcaagcctgcgcaggagaaggtgaaggagggaaagatttttgatgatgtctccagtggggtctctcagttggcgtccaaggtccagggagtcggtagtaagggatggcgggacgtcaccacctttttttcggggaaagcagagggccccttggacagcccctcggagggccacagttatcagaacagcggtctggaccacttccaaaacagcaacatagaccagagcttctgggagacctttggaagtgctgagcccaccaagacccgcaagtccccgagcagcgacagctggacgtgcgcggacacctccaccgagaggaggagctcggacagctgggaggtgtggggctcggcctccaccaacaggaacagcaacagcgacggcggggagggcggggagggcaccaagaaggcagtgccgccggccgtgcccactgatgatggctgggacaaccagaactggtagggcccactgcgcccccgtccccagcgcccccgggcgacttcgtgtttgcactctgccctcgtcgttcctcctccttccatttgacccaagaatcagcaactgcagtgtgaggacagcgtctcgggaggcaggaccctagggagacccgggtgtgcgccgcctgcgcgtggggagtcttcggtgcgtgggggcggcttgctgtccagcctgtgtgggggccgtcccgtcccacactcccctgggcattcttggactcaaggccggggctctgcgtggcttgctgggaggtgggctgcagcacagaggcctgtgactgcgttccagcggccagttcactacgcagtatctctggggcctgggaccagccacgtgccgagctgtcagcgacgtgaggtgtcccttctcgttgagatatttaactttggttttgctctagttctttctttttgaagagagtgactggagtggtaaagatggaaatgctggaaatgatactggcgctcacgctgccatccgaccaccctcggctcccgagtccacgcctgcctgggcctgtgctgtcagacccgcgtcggtcgtaaccctctgtggctcccctgcatcagcaccgtcccaccaccaagttcaccaggttcaccagacacggcctccacaatagccacacccacacctgagctgtcctcagtgctggaacttgaccatcctggaacaccctggaagaaaaaggagcgcagggtgggccctcggccctgatgcaggagggtgcgatagcggacgtggccaggcaggaggggccgggttcaggagctgagcaggggatgcctgtgcgtggtgcctgggtctagggaagctccagccccaggatggggctgccctgcacaccggtgcccgccacatgccaaccctcacctccccgaggactggatgatgtgctgccacgtgtgactcgtctcccttgtctgccctgtgtgaccctcagtcttggccagccatgcatgcgcccgaagctcgtgcagtttgtacgtgaggtgctctcctccctgccaccatgctcatcactctggccttggccatgctccctggtcaccccacttcccggtcgccgtctgcagcactcctggagcagcctgggcccttcagcccctgtgctcgtcccaccctagggactcagtcacttgcagaacaggatgggaccgagatttcagcgagccctcctggcgcccggtcctccctgtgggcaccagccctcttggtagctggtgtggagggccggtgtccttggctgccacggagggatttgatcaccgaagcagccacctgctgtagttggacctgaggtcagaggcggggcatcagaggctcaaggtgctgagaagccaccgggaaagcagccagcacaaagggcccaggaagccagcccccgagagctgagcgtgggggtctttgagtgtctttctccaagctgagacgtgggcggccgcgtggtatctcccgagggctgcttggaccctggtgggctgagtgctccgaggaggggtggactccaccttggacagtgggatgtggtgttccacatgtgcctgtttccacgccagcaccttgacttggcagcatggagccaaggtctgtccccgcccaggagggtgccttcctcgggggtagggggacggcccactctgccccagggagtcccttttgatgggaagtgcagtcagcagcgtggaggtgtctgggccaccttcagaaggtggatgtggtggccgagaccccgtccacggagggtgatggcctttcccttctgcaggtgcgggcaggtgggcctgggaccggtgctggggcctctccttgctgtgtgtgagggcccaggtggaaggcgcggacctgacagcattccaataaagcatacgggaacatg

SEQ ID NO: 2222 - DNA, 2943 bp, Homo sapiens
ccctaatcaagtaccccctcctcctccaccacctcctgccccacccctccctgcatctggattctttttggcatccatgtcagaagacaatcgccctttaactggacttgcagctgcaattgccggagcaaaacttaggaaagtgtcacggatggaggatacctctttcccaagtggagggaatgctattggtgtgaactccgcctcatctaaaacagatacaggccgtggaaatggaccccttcctttagggggtagtggtttaatggaagaaatgagtgccctgctggccaggaggagaagaattgctgaaaagggatcaacaatagaaacagaacaaaaagaggacaaaggtgaagattcagagcctgtaacttctaaggcctcttcaacaagtacacctgaaccaacaagaaaaccttgggaaagaacaaatacaatgaatggcagcaagtcacctgttatctccagaccaaaatccacacccttatcacagcccagtgccaatggagtccagacggaaggacttgactatgacaggctgaagcaggacattttagatgaaatgagaaaagaattaacaaagctaaaagaagagctcattgatgcaatcaggcaggaactgagcaagtcaaatactgcatagaggaacagactaaggagagataggactttaatctggaggaaaaatatcctacaaacaacaactgttcacaacagcaaacccctacatttatgagctgtaagaagaaaatggagacaaacagaaggagggaaaaaccaacctactctgaaagccttcagacattatgactctggtgataagctctttccctctccgtttgctgcttttttctggcctttacaacagaatggaagagaatcatttaagagttcctgtaacagttatgcagaaaatactaaaacccatcaggcaagatcaccacgcattgaaatattttcatatcaagataaagtcgcacattttccacaatacattgctaaaataaagaggagaaaggcttaggaagtttttctgcagagagtgctggtaaagaattgagcaagtttgctattgtattgtaatgtttctctcaggtttgttcttcctatcatgtttgatattccatgaataattgagatcagccctatgtaagttaagatcataatatgtggaacaaatggaattgtaagtgctttcaaagggtaatatttataagaaagtgtccgaaaaatgtttcttcagcttgagaaattttagaatgataggaagtttctcgagttagccttcatgcaattttgtagattaaaacataaaatttgtccagaacttaaagatttagatgccttcctaaattgttacaatgctttaccaaatctatgacttctacataacacaaaccagtggtcaaatgtaaacactatattgtagatttactgtaggttttcaaccttttttagatttatgcatgtggacatttttataatgtaattacaatcaccacaaggttagcttttttaattgcagacagtaatgcatgtcacactaatatgtagtggccttttcaaggcctagtcccagggaaaacattttgtagagtataggggagtgggaggaaggggaggaataattttttatttaaagttgatttctgcactatctttttctcagttacctgcatgaataaataatgagaaatattttgtgactttaattggtaaatatgttacaaaaccaagtacttaatcttttacatcatgtcttcagctatttgtattttaaccagtaatttcaatggtctgaaacatgattctgagcttcacataatatcttaactgtggaactcaaaagtttgatcactgaatttggcagttattattacctaggtacccccgctgttacacaggtgtttagatacgtgttcctgaatgaagctgcttttgaattttgttatgttgaaatgcaagaaataacaatgatggcagcaattaaggtcacagaaatcattaggtaaaggaaaaccaatgaggagttctgcagttttcttttaataagtaaagtgagacttgggtggtgggaagaaggaaggtgggaagaaggaattagacactctgcctgccactctgcgtgtgtgtgctctcgcgcacgtgctgtctatatggaagccactcccttttctttcctttgaaactggtaaggttaaaataggggagaaatcctacatgttggaatgatagctttttggaaaatttaagaaactctccaggctctccatcttgatttatgcttgagttgttatgtgccatatttgctttgaactctgattatcagaagttttactaaaactttgaaataattcactttcatctgctttctagattttgtacatctcagtccataaagcaaagcttgttgatagtgtagttttctaaacgctgcaaatttgcagcctttaccactacaaagaagtttggatgagggattttttttttctttgtcaaaatagttcctgtttctgtagaaatttcatttttagattaaactgtgatggatgggctatcataattcaagtatacatttcttttttctatcagatattcattgtcatgcagtagtagtaaaaacatcaaagatgcagcaagcttattaagtattattttctaaaagaaataggaggcattttcatctttattattgtacttttggttatgcaaacactttgataatataaacagttatgtcccctataaatctggtcagcaacctcttttgattttgttgggtaagttaaatagtctgtagtaggtagagtactgggtacaagtggtccaaactaagataagagactaaaataaaatgctaaatcttaaaagaaactgggtttatgcactaaacgttttgtgccttggtctaatattaacatgatgtatgtgtaaactgac

SEQ ID NO: 2223 - DNA, 4091 bp, Homo sapiens
gaaagccgcagcctcagtcccgccgccgcccgctgcgtccgcccagcgccagctccgcgtcccgaccggcccgcggcagcctgcgccgcgccatggccacctccccgcagaagtcgccttctgtccccaagtctcccactcccaagtcgcccccgtcccgcaagaaagatgattccttcttggggaaactcggagggaccctggcccggaggaagaaagccaaggaggtgtccgagctgcaggaggagggaatgaacgccatcaacctgcccctcagcccaattccctttgagctggaccccgaggacacgatgctggaggagaatgaggtgcgaacaatggtggatccaaactcacgcagtgaccccaagcttcaagaactgatgaaggtattaattgactggattaatgatgtgttggttggagaaagaatcattgtgaaagacctagctgaagatttgtatgatggacaagtcctgcagaagcttttcgagaaactggagagtgagaagctaaatgtggctgaggtcacccagtcagagattgctcagaagcaaaaactgcagactgtcctggagaagatcaatgaaaccctgaaacttcctcccaggagcatcaagtggaatgtggattctgttcatgccaagagcctggtggccatcttacacctgctcgttgctctgtctcagtatttccgcgcaccaattcgactcccagaccatgtttccatccaagtggttgtggtccagaaacgagaaggaatcctccagtctcggcaaatccaagaggaaataactggtaacacagaggctctttccgggaggcatgaacgtgatgcctttgacaccttgttcgaccatgccccagacaagctgaatgtggtgaaaaagacactcatcactttcgtgaacaagcacctgaataaactgaacctggaggtcacagaactggaaacccagtttgcagatggggtgtacctggtgctgctcatggggctcctggagggctactttgtgcccctgcacagcttcttcctgaccccggacagctttgaacagaaggtcttgaatgtctcctttgcctttgagctcatgcaagatggagggttggaaaagccaaaaccgcggccagaagacatagtcaactgtgacctgaaatctacactacgagtgttgtacaacctcttcaccaagtaccgtaacgtggagtgaggggctgccctgggcccaccactgcccaagagttcttgctgttggcgtactggaccctcctccgaactgccttaccctgcttattcctgtctcttgcactgtgctctcccacaagtccagctgcaacccagagatagtggaaactgaaattaggaaggaaatcatcaataactcagtgggctgacccatccctcccaggcgctggggaccaacctagcaatgaaggttgggaaggttgttcccttcccggtgccaggtccagatttccctccatgatttgggaaccagcttaggcaaaagagtccccacaagatgaaaataaagatcctagttaccattcaaaggatgctaactgtgtgtcaggccccacactaagtgctctgctctgatatactcaaggccattaatcttcaggactcccattgacgtaggtgtttcattccccttttacagatgaggaaactaaggcttggaggttaaatgacttgccagaagttggaatttttttcctctttgaacataacctctcccttctccctaaaggtaaccactattctgagtccaatcatcaaggttttgcttttctttttagctaagtatgcattcctcaatagtagacagtacaacatgtttataacaagccaattacattatgttctttgcatgttctaaagttgtgtatgtgtgtgcacatctgagcacgtgcacatgtacacctgagccaaaaacacgagaacccactgatctcaccactggggcaagctaggtcagagcttagtgattcacactgaaattggcaaattggatttaacccaattaatagtgtgtgtgtggcaggagtcatgtccctcacatcctttgtacaaatgaaaattactcttaattccttcagatttataataactctgtactttggtttcagggtgacatttgggaaggattttgtttagaattaatggagtggcacattttgcagcctttttgcttgattgcatgtaatggaaatgccctatattttcctgcaaaataagtactaaattcattatcgttaagcaaatgtacaatatgctcaggcaccgcagagagctgggcacgggcccatgtgagcatcactttggaagtagggctcttcaacagggacccttgaactttaaagaaaggaacttctttttgccttctaattgatcatttagactattctggctaagtctgcccacatgtaattaccggctaattcaagcgaggaaaaatgtaagtcatttagaccaaagccaagcagtttctttgcgtgggttactcaagggcttgtggttacttgtatctcctctatgtgaacttgactttgaaagacagagctctagtgtgccagcctgctaagtcctgtaagaatagggaagggcggaggggggtgggcagtgactaggggacgagaagcatggggaaaatatttgcactctaaacatacagagatagaggtggggcttgtggtacttaacacttgtagccatcaactgactgagaccttgggctaaataatcaattgtgctgatattacatctcgttatggaatgttcctaaatatgccaggtagacaccagcccaagtaccctcctccagaagtctgtgactaccttgtcactactttaggcccattccacaaagcccatctctggtttgagaattcattttgatctgtatctacaccacccaaagttaggcctcctataatgtccaaaacattcctttcagcctttttatttcttactgtactgtctcttactgtactgtctatctgcagtaattgaggacccataaaatttagataactacatgtctttgctcttagaattgtcactcagcataatgagcatttaacatacaaaggcaatgtactgttttgtgttgatctatgtaaaagaatacaattcttttttacataattagtgaaattttattttttattaggaaacactaaatagtgtaatatttcttttgcttttaaaaaaattcctggtagcaaatcaagataaataattgcttcattttcttgagcaatactgaagcaggatgaagtaagaggaatgcattcatttaaacatgctttgctttatgaattttgtctcttttttggtctctttttcttatattcaagttacaaatgtacaagtatccttactaagagtgctccttttgtattttacatatatacagtatgaaaatacattggaacactaggaaagtttttaaataacagttctaatttatcagaaaattgtgttttgggattgagttctttgtctcagcccagaatcccaggtcctgggcctggttttctaatgctgtcatctcagttcgatattttactttagaatctggaatctcctacttaatatatgaccatgactttgaaaggcaaaagaggaatcaagaataaataaaacaaacttaatcttcatctttaaaaaaaagaaaaaagaaaccaaaatgagaatcaacacttcataggctcactgggttttcttttcttttctgttaatttaaactcagttatttttaatgcttaatacatacatggtgcaaaatttaaaaagcgcaaataggtatctagtggaaaacctaagcctccctctctctccggcacccattacctctccctggaggcaactgttttgatccatttcttacacacactgccagagatactctaggcatgtaaagcacaaacatacatataaaatctgcgggcttcaaaaaatataagtaggatgtcatctatactgtcatacactttgttttttatcacttacttaatgttatatcttggatattgtattaccctgggtattaaaaagaactcctttcacattttaaaataaaaaa

SEQ ID NO: 2224 - DNA, 1702 bp, Homo sapiens
gagggagagctggggcctgctcccggagagatacggctatgtcgatcgaaatcgaatcttcggatgtgatccgccttattatgcagtacttgaaggagaacagtttacatcgggcgttagccaccttgcaggaggagactactgtgtctctgaatactgtggacagcattgagagttttgtggctgacattaacagtggccattgggatactgtgttgcaggctatacagtctctgaaattgccagacaaaaccctcattgacctctatgaacaggttgttctggaattgatagagctccgtgaattgggtgctgccaggtcacttttgagacagactgatcccatgatcatgttaaaacaaacacagccagagcgatatattcatctggagaaccttttggccaggtcttactttgatcctcgtgaggcatacccagatggaagtagcaaagaaaagagaagagcagcaattgcccaggccttagctggcgaagtcagtgtggtgcctccatctcgtctcatggcattgctgggacaggcactgaagtggcagcagcatcagggattgcttcctcctggtatgaccatagatttgtttcgaggcaaggcagctgtcaaagatgtggaagaagaaaagtttcctacacaactgagcaggcatattaagtttggtcagaaatcacatgtggagtgtgctcgattttctccagatggtcagtatttggtcactgggtctgttgatggattcattgaagtatggaactttactactggaaaaatcagaaaggatcttaagtaccaggcccaagataactttatgatgatggatgatgctgtcctctgcatgtgtttcagcagagatacagaaatgttagcaactggggcccaagatggaaaaatcaaggtgtggaagattcagagtggacaatgtttaaggagatttgagagggcacacagtaagggtgtcacctgtctaagcttttctaaggatagcagtcagatccttagtgcttcttttgaccagacaattagaattcatggtttaaaatctgggaaaaccctgaaggaatttcgtggccattcctcctttgttaacgaagcaacatttacacaagatggacattacattattagtgcatcctctgatggcactgtaaagatctggaatatgaagaccacagaatgttcaaatacctttaaatccctgggcagcaccgcagggacagatattaccgtcaacagtgtgattctacttcctaaaaaccctgagcactttgtggtgtgcaacagatcaaacacggtggtcatcatgaacatgcaggggcagattgtcagaagcttcagttctggtaaaagagaaggtggggactttgtttgctgtgccctctctccccgtggtgaatggatctactgtgtaggggaggactttgtgctctactgtttcagtacagtcactggcaaactggagagaactttgacagtgcacgagaaggatgtgattggtattgcacatcaccctcatcagaacccgattgctacctacagtgaagatggactcctaaagctctggaaaccataattcaacttttctttttaaatcagctcgaaagcatgtacttaaatgaagcatattcatgtaatgtgcttttttttttttttgccagcttttctaagcaaatagattgtctgaattagtcacag

SEQ ID NO: 2225 - DNA, 2419 bp, Homo sapiens
cacgataaaggggacatgccgggagttgcagtaccctcaggaagaagtcattgtcatggacatggacccttttcttcactgtgtgatcccaaacttcatccaaagccaagacttcttagaagggcttcagaaggaactgatgaacttggacttccatgagaatctgatgatttgaagaagagaagagagcctcacatctccactttaaggaaaattctgtttgaagatttccggtcctggctttctgatatttctaaaattgacctggaatcaaccattgacatgtcctgtgctaaatatgaattcactgatgccctgctgtgccatgatgatgagctggaagggcgccggattgccttcatcctgtacctggttccttcctgggacaggagcatgggtggtaccctggacctgtacagcatagatgaacactttcagccgaagcagattgtcaagtctcttatcccttcgtggaacaaactggttttctttgaagtatctcctgtgtcctttcaccaggtgtctgaagtgctgtctgaagaaaagtcacgtttgtctataagtggctggtttcatggtccatcattgactcggcctcccaactactttgaaccccccatacctcggagccctcacatcccacaagatcatgagattttgtatgattggatcaaccctacttatctggacatggattaccaagttcaaattcaagaagagtttgaagaaagttctgaaattctcctgaaggagtttcttaagcctgagaaattcacgaaagtctgtgaggccttggagcatggacatgtggaatggagcagccgaggtccccctaacaaaaggttttatgagaaagctgaggagagtaagcttcctgagatattgaaggagtgcatgaagttatttcgctctgaggcactattcttgctgctctccaacttcacaggcctgaagcttcatttcttggccccttcggaagaagatgagatgaatgataaaaaagaggcagaaaccactgatatcactgaagaagggactagccatagtcctcctgagccagagaataatcagatggccatcagcaacaacagccaacagagcaatgagcagacagacccagagccagaggaaaatgaaacaaagaaagaatcaagtgttcccatgtgccaaggggaactgaggcattggaagaccggtcactacactttaattcatgaccatagcaaggctgaatttgccctagacttaattctgtactgtggctgtgaaggctgggagccagaatatggcggttttacttcttacattgccaaaggtgaagatgaagagctgctaacagtgaatccagaaagcaattctttggcattggtctacagagacagagagactctgaaatttgtcaagcatattaaccaccgaagcctggaacaaaagaaaaccttcccaaacagaacaggtttctgggacttttcattcatctattatgaatgacagcactgggcaaagctgaacaaaaatgtgacccttcgtaattactgggaagtctgaaagagctaagcatggagtcaaggagaactacatggtagcttgcctgacagtgttcttaaaactggttgtcttttactaggactcataatgattgtcctcaaccgagaccttgagcttgcagctacgtacttatctcttgattaaaaaaaaaaaaaagttggctttttttttttttaacatttagtcctttttccatattggcttcttcagtgaatttttaagttcaatttgtttttattgaggtaaaatatttataacataaaactgaccagcttacccatttttaaatatgcaattcagtggattaagtacattctcattgttgtccagccatcaccatcatccatctccagaagttttccatcttcccaaattctgtgcccattgaacaataactccccacctccccttcccctagcaacagccatactttttgtctctatcatcaacttcactactcatatttctcatgtaagtggaatcatacagtatttgtccttttgtgactggtttcacttagcataaagtctttaagatgcatccatgtttccagtgtttcggtttttttagaaaaactcatacgtgattgcagccgggcatggtggctcacgcctgtaatcccagcacttgggaggccaaggcaggcggatcacctgaggtcaggagttaaacaccagcctgacaaacatggagaaaccccatctctactaaaaatacaaaattagctgggcgtggtggcacatgcctgtaatcccagctactcaggaggctggggcaggagaattggttgaacccaggaggcggaggttgcagtgagccgagattgtgccactgcactccagcctgggcaacaagagtgaaactctgtctc

SEQ ID NO: 2226 - DNA, 3912 bp, Homo sapiens
accgccttcgccgcggaccttcagctgccgcggtcgctccgagcggcgggccgcagaggttcaagcgattctcctgcttcagcctccggagtagctgggattacaggcacgtgccaacacacccagccaccaaaatgccagaagagatggacaagccactgatcagcctccacctggtggacagcgatagtagccttgccaaggtccccgatgaggcccccaaagtgggcatcctgggtagcggggactttgcccgctccctggccacacgcctggtgggctctggcttcaaagtggtggtggggagccgcaaccccaaacgcacagccaggctgtatccctcagcggcccaagtgactttccaagaggaggcagtgagctccccggaggtcatctttgtggctgtgttccgggagcactactcttcactgtgcagtctcagtgaccagctggcgggcaagatcctggtggatgtgagcaaccctacagagcaagagcaccttcagcatcgtgagtccaatgctgagtacctggcctccctcttccccacttgcacagtggtcaaggccttcaatgtcatctctgcctggaccctgcaggctggcccaagggatggtaacaggcaggtgcccatctgcggtgaccagccagaagccaagcgtgctgtctcggagatggcgctcgccatgggcttcatgcccgtggacatgggatccctggcgtcagcctgggaggtggaggccatgcccctgcgcctcctcccggcctggaaggtgcccaccctgctggccctggggctcttcgtctgcttctatgcctacaacttcgtccgggacgttctgcagccctatgtgcaggaaagccagaacaagttcttcaagctgcccgtgtccgtggtcaacaccacactgccgtgcgtggcctacgtgctgctgtcactcgtgtacttgcccggcgtgctggcggctgccctgcagctgcggcgcggcaccaagtaccagcgcttccccgactggctggaccactggctacagcaccgcaagcagatcgggctgctcagcttcttctgcgccgccctgcacgccctctacagcttctgcttgccgctgcgccgcgcccaccgctacgacctggtcaacctggcagtcaagcaggtcttggccaacaagagccacctctgggtggaggaggaggtctggcggatggagatctacctctccctgggagtgctggccctcggcacgttgtccctgctggccgtgacctcactgccgtccattgcaaactcgctcaactggagggagttcagcttcgttcagtcctcactgggctttgtggccctcgtgctgagcacactgcacacgctcacctacggctggacccgcgccttcgaggagagccgctacaagttctacctgcctcccaccttcacgctcacgctgctggtgccctgcgtcgtcatcctggccaaagccctgtttctcctgccctgcatcagccgcagactcgccaggatccggagaggctgggagagggagagcaccatcaagttcacgctgcccacagaccacgccctggccgagaagacgagccacgtatgaggtgcctgccctgggctctggaccccgggcacacgagggacggtgccctgagcccgttaggttttcttttcttggtggtgcaaagtggtataactgtgtgcaaataggaggtttgaggtccaaattcctgggactcaaatgtatgcagtactattcagaatgatatacacacatatgtgtatatgtatttacatatattccacatatataacaggatttgcaattatacatagctagctaaaaagttgggtctctgagatttcaacttgtagatttaaaaacaagtgccgtacgttaagagaagagcagatcatgctattgtgacatttgcagagatatacacacactttttgtacagaagaggcttgtgctgtggtgggttcgatttatccctgcccaccccatccccacaacttcccttttgctacttccccaaggctcttgcagagctagggctctgaaggggagggaaggcaacggctctgcccagagccatccctggagcatgtgagcagcggctggtctcttccctccacctggggcagcagcaggaggcctgggggggaggaaaatcaggcagtcggcctggagtctgtgcctggtcctttgcccggtggtgggaggatggagggattgggctgaagctgctccacctcatccttgctgagtgggggagacattttccctgaaagtcagaagtcaccatagagcctgcaaatggatcctcctgtgagagtgacgtcacctcctttccagagccattagtgagcctggcttgggaacaagtgtaatttccttccctcctttaacctggcgatgagcgtcctttaaaccactgtgccttctcaccctttccatcttcagtttgaacgactcccaggaaggcctagagcagaccctttagaaatcagcccaagggggagagcaagagaaaacactctagggagtaaagctccccgggcgtcagagttgagccctgcctgggctgaaggactgtcttcacgaagtcagtcctgaggaaaaatattggggactccaaatgtcctctggcagaggacccagaaaaccacactggctccaacttcctcctcatggggcattacacttcaaaacagtggggagcaacttttccaccaaagctacaaacctaaaatgctgctgccccaaagcacaagagggaagagcaccgccggggccacaggacgtctgtcctccagtcacaggccatccttgctgctccctactgactctagcttacttcccctgtgaagaaacaggtgttctcggctgagcccccaaccctctgcagaaccaggttgatctgccacagaaaaagcatctttgaagacaaagagggtgaggtcttcatgagtctcctgggcccaaagccatcttctgatggaaggaagagagtagggccagtgaaggctgcccagagagaatgtcacagatgaggctgcccctgccccctccccgccagggaggtttcatgagctcatgtctatgcagcacataagggttcttcagtgaaaagcaggagaagagcccactgcaaggatagctcattaggcacatgaccgatgcagggaaggccatgccggggaagctcttcctgcaggtattttccatctgctgtgccaaggctgagcggcagaaacttgtctcataaattggcactgatggagcatcagctgtggcccacagagagccttgctgagaagggggcaggtaaagcagagattttagcattgccttggcataacaagggcccatcgattccctactaatgagaggcagggagagcatgggcaatggagacccaccaatgatccccaaccccggtgggtactggctgcctgccctgggccagggaatggctccttataccaaagatgctggcacatagcagaacccagtgcacgtcctccccttcccacccacctctggctgaaggtgctcaagagggaagcaattataaggtgggtggcaggagggaacaggtgccacctgctggacaatcacacgaaaggcaggcgggctgtgtactgggccctgactgtgcgtccactgctgtcttccctacctcaccaggctactggcagcagcatcccgagagcacatcatctccacagcctggtaaattccatgtgcctctgggtacaaaagtgcctcaacgacatgctctggaaatcccaaatgccacagtctgaggttgatatctaaaatctatgccttcaaaagagtctctgttttttttttttaacctggtagacggtataaaagcagtgcaaataaacacctaaccttctgc

SEQ ID NO: 2227 - DNA, 2647 bp, Homo sapiens
agagccgcgagctggaccagccgtgcaaatctctagaagatgacggtgttctttaaaacgcttcgaaatcactggaagaaaactacagctgggctctgcctgctgacctggggaggccattggctctatggaaaacactgtgataacctcctaaggagagcagcctgtcaagaagctcaggtgtttggcaatcaactcattcctcccaatgcacaagtgaagaaggccactgtttttctcaatcctgcagcttgcaaaggaaaagccaggactctatttgaaaaaaatgctgccccgattttacatttatctggcatggatgtgactattgttaagacagattatgagggacaagccaagaaactcctggaactgatggaaaacacggatgtgatcattgttgcaggaggagatgggacactgcaggaggttgttactggtgttcttcgacgaacagatgaggctaccttcagtaagattcccattggatttatcccactgggagagaccagtagtttgagtcataccctctttgccgaaagtggaaacaaagtccaacatattactgatgccacacttgccattgtgaaaggagagacagttccacttgatgtcttgcagatcaagggtgaaaaggaacagcctgtatttgcaatgaccggccttcgatggggatctttcagagatgctggcgtcaaagttagcaagtactggtatcttgggcctctaaaaatcaaagcagcccactttttcagcactcttaaggagtggcctcagactcatcaagcctctatctcatacacgggacctacagagagacctcccaatgaaccagaggagacccctgtacaaaggccttctttgtacaggagaatattacgaaggcttgcgtcctactgggcacaaccacaggatgccctttcccaagaggtgagcccggaggtctggaaagatgtgcagctgtccaccattgaactgtccatcacaacacggaataatcagcttgacccgacaagcaaagaagattttctgaatatctgcattgaacctgacaccatcagcaaaggagactttataactataggaagtcgaaaggtgagaaaccccaagctgcacgtggagggcacggagtgtctccaagccagccagtgcactttgcttatcccggagggagcagggggctcttttagcattgacagtgaggagtatgaagcgatgcctgtggaggtgaaactgctccccaggaagctgcagttcttctgtgatcctaggaagagagaacagatgctcacaagccccacccagtgagcagcagaagacaagcactctgagaccacactttaggccaccggtgggaccaaaagggaacaggtgcctcagccatcccaacagtgtcgtcagagggtccccagggcattttcatggcaagtacccctctgcccccactccagcagtgcttcccaaagtgtgctctgtcacctgctttgcaatcggcttccattagcgcatgttttattttggtgtgacggttggccctcctaaacacggactttcctcaggctggttcaagacggaaaaggactttcttctgttttcttccaaagtgcaaccacagtggagagcccacggtgggcttagcctgcctaggcccttccatttctcttctttgaccgtgctaggaattccaggaaagtgcattcctgccctggtgaccttttcctatgtctaggctcctccacaggtgctgctattttgtgagctccggctcctgtttagcttttatttcagttctaacctcagtccagaaacatatgtgaggttgtttccctcttcagccacggctacaataccggaaaatgctagtttttatttatttttttaagtagtgcttcctaaatggtttgcatgagagccacctggggtacatgttgaaaacttatttggggtctaccccaaacctaataacccaaatttggggatggggcccaggaatatgcatttttaaaaagtcatctgcccctcccaggtgattctgtaagttgtccctcaactgtacttggagaaatcgtgttttaaagcagtagtccacaaagtattctgctcatgtgcccccaaaagtattttgaaaaatcatgtataccctcacccacctaagttgatatctaaaattttatctaagttggtatctaaaatttttcatgggaagttaaatagttgacaaagtatgtatttgctggtgtcgtgtaaatattggtattttaaaataaaaactgttacatcactattttaaacatatccagtacaatttaaatatcacaacaatttgacacccttcattcatttataaaaataaatgagctagttctttagtagttaaacatttcaaattggcttttctccttctgtatttccataccacttttcagccaagaatcctatcataatgtaatctattatgcccgacatcttttaatcattcaccccattacttcttgtcaacaaaaaatataaatggaaattttttttttagctcttgctttaagtgtttgtttgttatctcagtccagaaccaatattatcgtaattaattattggtatataatgaaaacggtattaattcttggatgattaaaagtttttttattag

SEQ ID NO: 2228 - DNA, 3598 bp, Homo sapiens
aagtgcacggaggagttccgggggccaggcggccgccgcgagtctggtatcctgagcttcgtgagttgagcgctgctgctccgcggtggagtcaccgcaccgctcccgggatcatggtgttctacttcaccagcagcagcgttaattcatctgcctacactatttacatgggaaaagataaatatgaaaatgaagatctgatcaagcatggctggcctgaagatatctgggagagaatatagaagacatcccaaaggaagtgctgatggactgtgcccaccttgtgaaggccaatagcattcaaggctgcaagatgaacaacgttaatgtggtatatacgccgtggtctaacctgaagaaaacagctgacatggatgtggggcagataggctttcacaggcagaaggatgtaaaaattgtgacagtggagaagaaagtaaatgagatcctgaaccgattagaaaagaccaaagtcgagcggttcccagacctagcagcagagaaagaatgcagagatcgtgaagagaggaatgagaaaaaagcccaaattcaggaaatgaaaaagagagaaaaagaagaaatgaagaagaagagggaaatggatgaacttaggagctattcatcactaatgaaagttgaaaatatgtcttcaaatcaggatggcaatgattcagatgaattcatgtaaaaggagaaaaggagaaaaggacctttgaaagatgtgaatgtagagacaattgcagaccttttggtttcatctgtgttctgaagtataaaatacaaccaaaattctaccttcatcctacccagaaattattgattttcaagttttaaaaaaattgtaccttttttgctgacagaaaaggatcagatatgtataaaatagttgaacttgacagcatataacttaaagtgaaaatgtttttgccagaacatgtcttggtaccttgtgaaagcaggctgcccttgttcttgagatagactttaaaatgaaccagctctgaaaagtacttctgctgctctggtctatccctgaaaacagatgtcttgaaacacttttcatattcttaaaataatcttcacttctgttaagaagaacatgttggtgggtaattatgcgaatgtttccctgtccctgatttctcgattaggcgtatgggttttgaaaaagagatttttcagaagattgtcagcttcagtattcacgttccatcgtgtcatctgggtctgttagtgtagtgaccctcagtgcagtctgtcccagcgtttacgtccttgcttcctctgagcggaggcctccatcttagtatcaacatatttaaagaaattgatggtgttcatcaagctggggcctgtggcagttgttgcctgagcaccaagtaacccaagccacctatgtgacaacttctgggcccaggagtaatttctcagcattgagggtaaaataggatggagtgctctgttgatcatttgggagatgtaggttacctgatttgtgccttaggatgcagcgtgaagcagaagtccatattgcaattatgattttagaaggaactaagcattttactcacacccacagcagcaagaatgacctcctgcagcagatattccacctgtaatagcactttggaactgtgggcaaaaccaaaaggctagtgcttccatttattccatgttggtgtatggggttgaactggaaaattccctgaggcaaaactcactggccaaattttgagagggtatagaaaatgactttagaaatgagtggttttgtgtatgtgtctgatgatattcagtctgatgttccgcaattttaaaagttataataaaataccatttttttaatctggaaggacattgatatatgaattcttagaatttgctattaaaaagggtagcccccattccacaagctggttttgagggtgatcttgctctaaaaaacctcattcatcataggctcagtctgacaggttctgtacggggctatcatctttctcctcctctgctaaatgcctctttcttccagctgctcactgggtcaaagggatgtcctttctcagatgtattcttgatacatctcagatgtattcgtagctgtgctccttccatacttccaaggagtccggcttctacagaattcctctgtacctcacactgcaacacatgtagatagcgcttttgaaaaatacatatatttttactatagtatgagaggtcctggggctcaaactttaaacatttcctaactcagcttacactggtttaaaatgtccaggtctctgctgaattctcttgttgaattcatagctctccaacctcctctgtgttgattcctatgcccctaaccctgcggcctctttgttttatttttttccccatctctgttggtcccagggaaagcaaggaaattttcttttgaggacttataggttgattgcccacaggtcaaactgttggcattgaactcctctcatttcttgccattggattgtttcctaaacgttggataggagaattcgaaattgttgctatttttatgagctgtgcccttgatcaaatctgtgctgtgggtctgagtcattttgccaatgtcgtcttcagtttcaacactctgatcagcatgcaggcgaggggcatgtttaatttacttcactaactgctatattctatagctttagacttcatatttcttatccacctttgtctaggctcacgatctttgggcgagggagctttgtcaccgtggttgggctagaacaaatattgagaagtttaccaacacagatgttgagaagtttattgaaaggcactgacattagcagaataagtgatggacattagttgaaccccttcagtgtctatgtgttttattgtattgtctttaactcgttcttgaagcacagatttcagcgagcctttcagctattcagtgccagcggttttccccactcaggaaagatggtgtgagccatacacacagcaggattagacggggagagtttcagctgcagcttctagtttaagaccaaagcccttcctcccgctgctgcatctgtctgagaggggaagctcttgttttccaagctggaaccgtttatgaggaaaactgagcagggtggcaaaatggaaaaggaacaattttctagtttttcctacgcgtgatattgacgcgtgctttttctttgatttgaggtacagcatgtaaataacaaatttccatattcaaaatgatcatattagagtgactgagtgaccttttgattttgaagcagactaaaatctgaccagaccacaatgaaaagtataaaattagaaacttaaattccaagctaaatttcagctttgacccacctaactccagtgaataggtggcagctcagaaacaaggacagcactgctgctgccagagcaagctcacatccagctggcacttcgtgagagctccttcctgccgggcacgtgtgagttcagcgtgggcaagagacttttatgcacattctgtcattcaaaagggaaatgatgccaaccccagatgcagcatgtcctgaatgaatgatctgtaaaatacaataataaaagcttatagtttgagtag

SEQ ID NO: 2229 - DNA, 3720 bp, Homo sapiens
gctctacagcggaggtggctgtggcggtggcgctggtggctgcggcggcggcggcggcagcggcgctcgagcggttcctgtcagggtcagccggcgggccccctgggtggtccacctgcaaatcgcggagcggcgccccagggatcgatggcgatgaactataacgcgaaggatgaagtggacggtgggcccccgtgtgctccggggggcaccgcgaagactcggagaccggataacacggccttcaaacagcaacggctgccagcttggcagcccatccttacggctggcacggtgctacctattttcttcatcatcggtctcatcttcattcccatcggcattggcatttttgtcacctccaacaacatccgcgagatcgagattgattataccggaacagagccttccagtccctgtaataaatgtttatctccggatgtgacaccttgcttttgtaccattaacttcacactggaaaagtcatttgagggcaacgtgtttatgtattatggactgtctaatttctatcaaaaccatcgtcgttacgtgaaatctcgagatgatagtcaactaaatggagattctagtgctttgcttaatcccagtaaggaatgtgaaccttatcgaagaaatgaagacaaaccaattgctccttgtggagctattgccaacagcatgtttaatgatacattagaattgtttctcattggcaatgattcttatcctatacctatcgctttgaaaaagaaaggtattgcttggtggacagataaaaatgtgaaattcagaaatccccctggaggagacaacctggaagaacgatttaaaggtacaacaaagcctgtgaactggcttaaaccagtttacatgctggattctgacccagataataatggattcataaatgaggattttattgtttggatgcgtactgcagcattacctacttttcgcaagttgtatcgtcttatagaaaggaaaagtgatttacatccaacattaccagctggccgatactctttgaatgtcacatacaattaccctgtacattattttgatggacgaaaacggatgatcttgagcactatttcatggatgggaggaaaaaatccatttttggggattgcttacatcgctgttggatccatctccttccttctgggagttgtactgctagtaattaatcataaatatagaaacagtagtaatacagctgacattaccatttaattttatattatgaaagcaaatcatctgcatgtgcatcaaggccagtcctattcaacctagctttcgaatgctgatatctggttagtatgtcattttgaagttggcacataacttttctaaaaaaaagcagtctttgttgtttgcttcttccctacggatgacttctaaaaatatatgacgggtataaaaaaattagctatattgatcatatcaacactgtaactgctgaaatggcattctaatgtttgctttttattcggacaggccacatgatgcatagagcctctttcatgtgacttgtgtctactgcttaaatctttatgctgtgttgatgatattatattgacatatgaagctgtatatgtgtatgtattttgtggagaaagggattacaagatgtatgagtataatgacttgctaacctttcaggattcagagaaagatgaagaaagaccatatctaaataatacacttcatcattttcatgtgtataaatgcttaaagtaccatctttgttgaggtggttcatgtatccagtttatccagtacagttatttgtcaagcttagctttgatttcaaaggacacgcttaccttgtctggcataagaattaatgctcatgtctgcagtggttgggtaggtcctgcttaggagaattaaaaaattcctctttccgtttggttgaatgttgcagtcaggaaccccaactcacttggaatgtttttatatgtaatcatttcccttgaagcttatactttataagggaagaaagaattcaggtgatatgggaaaactgcttggcagaccttcatcttctgcctcaactgtaaaccacatgtaaatgcttaatggagactgttttcattcttgtgatatttaacattcagaaaattacttcagctttggaaatactcaggctgtttttattctgcaggtaagtgttttgacttaagtactaatattccagaaatttttgaaagcagtaaccttaatttcctatgtatttcattccacttttgcatataggtcaaatagcaatgtgtatgcacattctctttagttaaggcaccaattgttttggttggttttcctaagacatactttaaaaagatgttctataaatttcctagttaaattatggggattttggagtatgtacatgataaattataatacgtatatggttgaagttattttattttttactaatgaattattttaatattccttattgaataaatgctgtaacttgtttgctatggaacttattcttaaagttctagttaaaaataatttttccacatgcatgaaaatatgtattaatcagaggtggcttaattacattgaaattgcttttttgttgttgtttttttactgaaataactcatgtttgtgtagaagaatgcctgtttactcagagtttatattttccttcagttatattttaaatcaaaaggtctgggtaatgtatacttttgattaatatatactttttttaaaaaacaaaaaacaatgtaatggttaatagtagaaatgtgccacacttttcaagttttatataacatatgaaattcagttaaaagaatgtgtgtttcataatgacttttaactggtaaaaatattacttgcacgaagtacttgatgtatggttatcctgaaatttcggagtatttggtgtgttctttgtctaaaaatagtctgttttgtcagtccttcagaatattatttattctgaagattgtccctcttgcacttggcagtttattttcggggatacattgttgggggagaggggtttctgccactctttccagattgagtctgtgctgtttaaggaggactaccatcctgcaactctttttctaattggggcacagaggatgtcgctaaagaaaagttgaagagccctttcagcactttctcatctgtggagaagatggaatcttaaaatacatttggagttttatctgttttacaagtccattgatggcctaagttcctcctgttttctgctgtttgatctctaaggaactcctgttgctaaatatgaagagtatggaacattcatatagtctctgtgaagcatggggggagggaagacatttctttttcttataggctttatgctcaaatgtcatagtctcctttcaaagaattgtgttgcattttaaatgcacccagcttaagtagaagacattgaaggatgcattaattttcaggaactattttgaattatgaaaagattcccaattgaaaaaattattcaacaagtaaaagctaagaaatttcattgaaatcataaggcagtttaagcataaattgataaaaatagctgtgtactactaattaatagaaaatcattcaaccaagagaagagtcaagtgaatatcgtttgtttatttgctagtgagtttctttgtaacgttgattttattaaatgataatatttggttagtatgtcctatgttaataaaaatgaacaaaatt

SEQ ID NO: 2230 - DNA, 2447 bp, Homo sapiens
gagttgatatcttcccatccacccgccgcttctttcctccatctagcgatttttattttttaagtgtctcttcctttttctttcttttcttcttttttattttttatatatattttttggcattgctttgcagatgttgggatgagagtcggagccgaataccaagctcggatccctgaatttgatccaggtgctacaaagtacacagataaagacaatggagggatgcttgtatggtctccatatcacagtatcccagatgccaaattggatgaatacattgcaattgcaaaggaaaagcatggctacaatgtggaacaggcacttggcatgttgttctggcataaacataacattgagaagtcccttgctgatctccctaatttcactccctttccggatgagtggacagtggaagataaagtcctatttgaacaagcctttagttttcatggaaagagctttcacaggattcagcaaatgcttccagataagacaattgcaagccttgtaaaatattactattcttggaaaaaaactcgctctaggacaagtttgatggatcgccaggctcgtaaactagctaatagacataatcagggtgacagtgatgatgatgtagaagaaacacatccaatggatgggaatgatagtgattatgatcccaaaaaagaagccaaaaaagagggtaatactgaacaacctgtccaaactagcaagattggacttggaagaagagagtatcagagtttacaacatcgccatcattctcagcgttctaagtgccgtccacctaagggcatgtatttaacccaggaagatgtggtagcagtttcctgtagtcccaatgcagccaacaccatcctgaggcaactggacatggagttgatctctctaaaacgtcaggttcagaatgctaagcaagtaaacagtgcacttaaacagaaaatggaaggtggaattgaagaattcaaacctcctgagtcaaatcagaaaattaatgcccgttggaccacagaggagcagcttctagcagtgcaaggtgtccgcaaatatggtaaagattttcaagctattgcagatgtaattggcaacaagactgttggccaagtgaagaacttctttgtaaactacaggcgtcggtttaacttagaggaggtattgcaggagtgggaagcagaacaaggaacccaggcttctaatggtgatgcttctactttaggggaggagacaaaaagtgcttctaatgtgccatcagggaagagcactgatgaagaagaggaggcacagaccccacaggctcctcggacactgggtccatcacctcctgccccatcatccactccaacaccaacagcccctattgccactctgaaccagcctccaccacttcttcgtccaacactgcctgctgccccggctcttcaccggcagcctcctccactccagcagcaggctcggttcatccagccccggccaactttaaatcagcctccaccacctcttattcgccctgctaattccatgccaccccgtctaaacccaagaccggtgttgtccacggttggtggtcaacagccaccatcacttattggaattcagacagattcacagtcctcactgcactaaaaattaaattggacacagctgcagtaacttttcaccccatcattataccagtgctcatctgactgatgaaaaagaggaaagaataatcatttctagatactgaggctgcgaactagttctgtggcagtggactagcataagtggatgtctaagaaatttttcagttcactagactaaaatgttttacaacaaaaagcctccagttagcctcctttctagagtatatgttcagcaatgttgatctcataaaaggaaaaacaaaagatttaagtattctatataccaagtttttgttttgtttttactgtatttattttattgaggttctttatattcctgcctcttcatagtcaaggctcttagtacaggaatattgacttaggaattgtgaaaactccttaagtttcttaagttaaggatgtttggcttttttctttaattttttaaaaaccattttcctatgttaggagtgcaagaatagccagcatttccgattttgacatatgttcattttatgcatatttaagaaattatagctgcatatcccttctttcaaaaaatgttgctttttttttaaaggaattttaatatattcctttaaaagaaagcaatttaatcaattgcaaagcaattatataaaaccacaaagaatgtactgaacctactaaccctttaacatacagtttagggtcctagcgcagagtccttgtttaaaggtcattgactcatcatctgtcagtaatgagaggattggaagaataattttgcatacaaatgaggacttaatttgttgaaatataatctctttaagttccttg

SEQ ID NO: 2231 - DNA, 3655 bp, Homo sapiens
gttggagcggcgctgctcggccgcggacacacgagggacgcgcccgaggagctgcaggtggcagcccaggcggtccgaacccgtcggccggccgagcctggagtattgcctaagtgtaatcttgaacatgggcggtgctgtgagtgctggtgaagacaatgaagagctgatagataatttgaaagaagcacagtatatccggactgagctggtagagcaggctttcagagctatcgatcgtgcagactattatcttgaagaatttaaagaaaatgcttataaagacttggcatggaagcatggaaacattcacctctcagccccgtgcatctactcggaggtgatggaagccctagatctgcagcctggactctcgtttctgaacctgggcagtggcactgggtatctcagctccatggtgggcctcattctaggtccttttggtgtgaaccatggggtggaacttcactcagatgtgatagagtatgcaaagcagaaactggacttcttcatcagaacaagtgatagttttgacaagtttgacttctgtgaaccttcctttgttactgggaattgcctggagatttctccggattgttctcagtatgatcgtgtatactgtggggctggcgtgcagaaagagcatgaagagtacatgaagaatcttctcaaagtgggagggatccttgtcatgccactggaagagaagttgactaagataacacgcacaggtccttcagcttgggaaaccaaaaagattcttgctgtttcttttgctcctctgatccagccctgccattcagagtcaggaaaatcaagacttgtccagttaccaccagtggcagttcgcagcctccaggacttggctcgcatcgccatccggggcaccattaaaaagattattcatcaggaaactgtgagcaaaaacggaaacggactaaagaacacccccaggtttaaacgaaggagagttcgccgccgtcgaatggaaacgattgtctttttggacaaagaagtctttgccagtcggatttccaacccctcagatgacaacagctgtgaagacttggaagaggaacggagggaagaagaagagaagaccccgccggaaacaaagccagaccccccagtgaacttcctacgccagaaggtcctgagcctccctctgccagatcccctgaaatactacttgctttattacagagaaaaataagtctcctgtttgaaagggggaaataggaagagcagattgctgagtgtgaagttcgtgctgcctgtgtgctgttgaagggtcacctggaggcagacgttgtggggaagggaactgctgggctcatccacaccatggttttcttctagttcctgattgacctctaaaattctattcagttgtatgatttgtttacatagttccacaagaccttcattgcatagaagattgttttcccaaagtggagagaatcttcatagagaaaaagagaaggctgtttctttttcggctctgacgaaacactgaagtctgcgtaagagagactgtttgatgaccgtccctcatgcaacatgcacggtactcactaaaaatgaaaactgaagtggaaactaacctgtgttgcttataaagtgtgaaagcacaagcttataaatgtataaaatcttttctgggtgtgacgcacctgcgtccaagtttgaatttttatgatatgtaccacttaattactggcactgagtatcactgaatttcttagttttctagtggggaaacattattgagaagccctcccttattttaagtaagttgattaaatcttatgtgagttgccagttgtaatttttcaaaggaaaaattttgatggggtggaggaatgaattgccagataatctttctggaattccgagagaattccaaagagggtttttttttttttttttttaggacatcttttgatacctttaaaagaaccactgtcaagtaatccttaaaaaaatatcttggaaaaggaaacagattttttcctgtgtgtaagcaataagtgaagttacatttgccctaaccctagggatgattctttacccagttttaaagcccatcatggtattctaaggtgttgacaccctccatcctcagagcaggtcgaaaatattaaatagactggggactctatgatgggcagcctgtgctttttgacttcagtttgctatttttctgtgatcacattagtactgattcatagattctatcttttataattctggagaaaaagatttgttagttttgtaatttttttgtaagaccaaatgtatgtattttagtagctccattgcatgagaagagtgtaactcacactgacttgtgatatcagccttctctgggccttgtgtgtggagagctttctatcttaccaagtggtagggctaaaagaacaacagcctttttggtagtcacatagcagaatgatcagagttacattgcttattccaaaacattggttctttttaaaacatttttttttacccaaagaaaagaataatagaaattactaacaataaatataaattcagagtgttgatataggattcagtatccagagtttatttttaatcttaatcctcagcttcttgggagttgctgggcttcagtgtctctgtggtttcaccagcttagcttgagctctggttattttggatcttttctgctttttttaagtaactgagtcatttttaccacacagtccagtttgcatgtatagctaggaaacatgtattgctctagattgggcagtttaagtcattttaaagaaagttagttcatagttgttgccttttaactcatagtcaagcttcagtctttcaaagagaaatgtgtgattttcatttacttgctgatattttgtagtttggagatccttgtgggcattattctaactgatacgtagacacttacttggaaatttttggacattatattaaatgagtgctatctgtgaaattggttatattaggtggcttgactaatgttttttctataattgtatatggactgcatttttaaaaaaaccgcatttgcctttatgctagattgtaaaaaattatattagaatgcataagacatgtttttccttcatatgctagacttttcctagcatttcgtatttctgtgttgtcagtgtgtgatttttaaaccggaatttggtttaaaaaaaatctggtggtaatatatgtgagaaatactttggtgtttaccttatgaaaataaaggattgtaagtaaagtttcctgcgcaccttataccagaattcagtataatacactactttctgttttcaaacagataaatcataatatagtctgtattatctgtaagatctgtcttgtaaaccacattcttgacaactatttgcttttgagtagtttgtattttaatatgtgacttttgtcttgaaaagtagtaaagccatagacttgtgcaaaacaagtttcaagtttatagatattaagtttgtaatgtgagcatcaaatgtgtatgtaaaaatactttttaccagtctggaacttgggaaaatccagggaatttgaaacatagattttaatgagctggtaaacacaaatcatgtcaataaaggtagtcaggatattttatccttagcattgcttctgc

SEQ ID NO: 2232 - DNA, 3444 bp, Homo sapiens
agcggcccggccgggggggcaagatggcggcggcagtaggggttcgtggccggtacgagctgccgccttgctccggcccaggctggctcctcagcctttccgccttgctgagtgtggcggcacgaggggccttcgccaccacgcactgggtcgtcacggaggacgggaaaatccagcagcaggtggattcaccaatgaacttgaagcatcctcatgacctagtcatattaatgagacaagaagcaacagttaactacctcaaagaattagagaaacaattagttgctcaaaaaattcacatagaagagaatgaggacagagacacaggactggaacagagacataataaagaagacccagactgcatcaaagccaaggtgcccttaggggacctggatctatatgatggcacatacataactttggagagcaaagacatcagtcctgaagattatatagacacagaatctcctgtccctccagacccagagcaacctgattgtactaaaattctagaacttccatgtagtatacatgcttttcagcacttgagaggtgtacaggagagagttaatctttctgcacctctgctacctaaagaagacccaatcttcacatatttatctaaacggttaggaaggagtatagatgacataggtcacctcattcatgaaggcctacagaagaacacttcctcgtgggtactgtataacatggcttcattttactggagaattaagaatgagccatatcaggtagtagaatgtgccatgcgagcacttcacttctcttccaggcacaataaagacattgccctggtcaacctggcaaacgttctacacagagcacacttctctgctgatgctgctgtcgtggtccatgcagctctggatgacagtgacttcttcaccagctattacactttggggaatatatatgcaatgcttggggaatataaccactcagtgctctgttatgaccacgctttgcaggccagacctgggtttgagcaagctataaagaggaagcatgctgtcctatgtcagcaaaaactggagcagaaattggaggctcagcatagatctctccagcgaacactgaatgagttaaaagagtatcaaaagcagcatgaccactacctgagacagcaggaaatcctagaaaaacataaactgattcaggaggagcaaatcttaagaaatatcattcatgagactcagatggcaaaagaggcacaattaggaaatcatcagatatgccgactggtcaaccagcagcatagtttacattgccggtgggaccagcctgtacgctatcatcgtggagatatctttgaaaatgtggactatgttcagtttggtgaggattcatcaacctccagtatgatgtctgtgaactttgatgttcaatcaaatcagagtgatatcaatgattcggtcaagtcttctcccgtagcccattctattctctggatttggggcagggactctgatgcatatagggacaaacagcatattctatggcctaaaagagcagattgtacagaaagctaccctagagtccctgttggtggggaattgccaacgtattttctgcctccggaaaacaaaggactcaggatccacgaactcagcagtgatgattattctacagaagaagaggcccaaacccctgactgttccataactgacttcagaaaaagccacactctgtcctacttagtcaaagaattagaggttcgcatggatctgaaagccaaaatgccagatgaccatgcacgaaaaattttgctttcccgtattaataactatactatcccagaagaagaaattgggtctttcttatttcatgctattaataagccaaatgctcctatctggctcatactcaatgaagctggactatactggagagcagtaggaaatagcacttttgctattgcctgtcttcagagggctttgaatttagctccacttcaataccaagatgttcctcttgtcaacttggccaaccttttgattcattacggccttcatcttgatgccactaagctgctacttcaagctttggccatcaatagctctgagcctctgacctttttgagcctgggaaatgcttaccttgctctgaagaatatcagtggggcacttgaggcctttagacaggccttgaaattaaccaccaaatgtccagagtgtgaaaacagcctgaagttgatccgctgtatgcagttttatccttttctgtacaacatcacttcttctgtttgcagtggtaattgtcatgagaaaaccctggacaacagccgtgacaaacagaaatattttgacaactcacagtcactggatgctgctgaagaagagccctctgagagaggaacagaggaggaccctgtattctctgttgagaattcagggagggactcagatgcccttagacttgaaagtacggtggttgaggagagcaatggttctgatgagatggagaattcagatgaaaccaaaatgtcagaagaaatactggctttggtggatgaatttcaacaggcatggcctttggaaggctttgggggtgcactagagatgaaagggcggcgtctagacttacaaggaatacgggtgctgaagaaaggtccccaggatggagtggccagaagctcttgctatggagactgcagaagtgaagatgatgaagcaacagaatggattacattccaggtcaaacgtgtaaagaaacccaaaggagatcataagaaaactcctggaaaaaaagtagaaacaggtcagatagaaaatggacatcgttaccaagcaaacctagagatcactggccccaaggtggcatctcctgggccacaagggctactagactggaagaccaggaaagtgccatagacataatgtaactggatttcagcaaggcatttaacagagcctcttatgatatccttgtgaaccagatggagagatgtgggcttgaagccttcccattgcctacaggataaaattcaaacttcctagtgtggtgtacaagaccctttacagcccgcctctgtgtacccttcaacaccattctctgaaccaaccatgctcatgtttttacctcagtgcctttgcacatgctattccctctgcctggaatgccctgtgccccctctgccctctgccgtgctaaaatatcactcatccttaaacttcaaaatcaagtgccatctcttccttgttaccttcaggcagaattagttactctttcctctgtgcaattgttctatatcttcgctctagctcttttcctgttgtattgtaatgatttgtttatgtttaccttccttactagactgtgagctcaagagcaggccgtcttaattattcctttctgtacccctagtgtcttttatggttctcagccccttataacaggtgctcaataaatatttttcaaatg

SEQ ID NO: 2233 - DNA, 2957 bp, Homo sapiens
acgtctgctcagctccgcggtaatggaggctagggatgggtgctgaagtatcaggctctggctctagctttagctctggcactggaactgcgtcggagtctgggtctgagtctggcagcccgaagcctggacaccttttcttgattctctaggcgggggctgcctgcgtccaagcagctggtttgcagcgttccaacgctgggagggagttcccttacctggggtccagtctgtaaagttgtcgccgctttctagggaccccgccccaccggctgggactcttccatgcagttgaaactggttgacaaccattaacctgggttgcaactacaggtggcactggaagcagactggttcctggacatgcccggtggaaggaggggccctagtcggcaacagctaagccgttcagctttaccttctttgcagactttggttggtggaggctgtggcaatggaacaggcttgagaaacaggaatggtagtgctattggccttccagtcccacctatcacagccttaatcaccccaggtcctgttcgtcattgccaaattcctgacttgcctgtggatgggagcctactctttgaattcctttttttcatctacctgttggttgctcttttcattcagtacatcaacatttataaaacagtgtggtggtatccttacaatcatcctgcttcttgtacatcactgaattttcatctcattgattatcatctggcagcattcatcacagtgatgcttgcgaggaggcttgtatgggctctcatctcagaggctactaaggcaggtgcagcatcaatgattcactacatggttctgatatcagctcgcttggtactactcactttgtgtggatgggtactttgttggaccctcgtcaatctctttcgaagccattcagtcctcaatctccttttccttggctacccgtttggtgtttatgttcctctttgctgttttcatcaagatagtagagcacatcttcttctcacagactacaactatgtggttcagcacgaggcagtagaggaaagtgcctcgactgtgggaggcttggccaaatccaaagactttctctccttgttgctggagtcgctaaaagaacagtttaataatgccacacccatccccacccacagttgtcccctatctccagacctcattcgcaatgaagtagaatgtctgaaagcagatttcaaccacagaatcaaggaggttctcttcaactccctcttcagtgcctactatgttgcatttctccccctgtgttttgtgaagagtacccagtactatgacatgcgctggtcatgtgagcacctcattatggtgtggatcaatgcttttgtcatgctcaccacgcaactgttgccatccaaatactgtgatttgctacataaatcagctgctcacctgggcaagtggcagaagttggaacatgggtcctacagcaatgctccacagcacatttggtcagaaaatacaatatggcctcaaggggtgctggtgcggcacagcagatgtttatatagagccatggggccttacaacgtggcagtgccttcagatgtatctcatgcccgcttttatttcttatttcatcgaccattaaggctgttaaatctgctcatccttattgagggcagtgtcgtcttctatcagctctattccttgctgcggtcggagaagtggaaccacacactttccatggctctcatcctcttctgcaactactatgttttatttaaacttctccgggacagaatagtattaggcagggcatactcctacccactcaacagttatgagctcaaggcaaactaagctgcctctcaacaatgagggagaactcagataaaaatattttcatacgttctatttttttcttgtgatttttataaatatttaagatattttatattttgtatactattatgttttgaaagtcgggaagagtaagggatattaaatgtatccgtaaacaaggtgatgtgatctttcatgtgttagtatattcgaataatatacatatgagaggtatgcctgtccagtaaagagattgatttgtttgtatggctctggaataactcattcgtttatgaacacatctcatgtattacttgacacagtacctttggtatgtctgcttttctttcaatcctcattatctttagccctcagctggccagtacttattgctaaagaaagggagatcaatggagttgcctaccagcacccattctcttttagttcagctggctaatagtattggaatacattgggaaaagagtgggttaaagtcctaggtggggttctctttgttgcctaccaggagaaagcagtaggcttcctttctaagatacggactcagctggtctattttaccctgtgacatttaaatatacttttgaataagctactatcctgaggctgagggttttgctgccacttttcctgtgtttccacttctgcttccaaagattttcctcttagttgtttgaaataatactttgccagacaggaagtctttagactgcccacattcatgaagaagatgatgtgtggctggatcagtaggagaagctgagtgcaaatgccatgtgggctagagtatgggaaggttgaaaattccaagtaactgggagagtgggcaagtcctcagctgaacaatcttggatgtagtctagcagcaacccacctacaatggcgttatgtttggagttatgaggggaagtgaaagataagaattacctacagctttgtactcagataatttatatccaaaatttgtgttttaaatttcatactccagaactttcatgtttatgagtattagccttttaagttatgggaggtgatatacttagtccattgatgttgtcacttgtcatctaaacttatgagaccttgtcttagagaatctaaaatatattgtcatatgttttctgtgc

SEQ ID NO: 2234 - DNA, 2845 bp, Homo sapiens
aaaaaagcgggacaggtccagcggttgttctgtgtgaagtcgcgcggcttccacccacgcagtgttctaagtgaaggccagaaactcgctcgccatgtcggctgcagaggcggggggtgttttccacagagccaggggcaggaccctggacgcgtttcccgcagaaaaggaaagcgaatggaaaggcccattctacttcatcctgggcgcagacccacagtttgggctgatcaaggcctggtccactggggactgtgacaatggcggcgacgaatgggaacaggagatccgtctaactgagcaagccgtccaggccatcaacgagctgaaccccaaacccaaattcttcgttctgtgcggcgacctcatccacgccatgccagggaagccgtggcggacggagcagacggaggacctgaagcgagtgcttagggcagtggacagggccatcccactggtccttgtcagcggcaaccatgacattggcaacacccccacggccgagaccgtcgaggagttctgccggacttggggagatgactacttcagcttctgggtcgggggcgtcctgttcctggtcctcaactcccagttctacgagaacccctccaaatgccccagcctgaagcaggctcaggaccagtggctggacgagcagctgagcatcgcgaggcagcggcactgccagcatgccatcgtcttccagcacatcccgctgttcctggagagcatcgacgaggacgacgactactacttcaacctcagcaagtccactcggaaggagttggcagacaagttcatccacgcaggtgtcagagtcgtgttctcaggccactaccacaggaatgccgggggtacctaccagaacctcgacatggtggtgtcatctgccattggatgccagctgggcagagacccccacgggctccgagtcgtggtggtcaccgccgagaaaattgttcaccgatactacagtctagatgagctgagtgagaaaggaatagaagacgatctcatggatttgatcaagaaaaaatgacgctccttcccgttcccgttcacttttcacttgcactatttttttattttgccagaaacagcagctgcacacaacctcttgctgaaatataaaaatagcccaggcaggtttgtgaatttatgtccttttgcataaatcagagagctggggccctgtcctgaattatattcaaaatagaactgcatttcctttaaaatggagcgaatgatcctggaaatcagtttttaaaatattagactatctctgcatggatgtttgaataaattctcctaatgctgtgtttctcaactccacttttgaattggattgtattctggttagcatatggtcaaagtctgcctatcgacctcaattccaatctgacagccaagtatgatctttgataattccttaaacaaactacacctgattgtattaaattgtggtcacgattcccaaaacgctaggcaaaacaaagttcatctcctttcctttccagcggaacgaacagctgtctgccttgttgtgagagccatgcagacttattttgacaaggagccaagtaggcaccatttactgttcaattctgagacttctgatgataggaacagaatgcagttgatacagctcggagcttaaatttgccttcctgggtgcctagaaaagtcacctttgcacataaattggccatttctgaaaatctcctccaagagactgaaaccaaagctctaaaacgccgcttcttcagtctctggggagcacgttgagttggttcacatccacattctggctgtgtagccactccacagatgggtggtctcttgggatcagaatgcccctccactcatgagactctccattttgtccactttgacaggaaaagtgggaatgtatgcagagctctcaaaagaaacaaaaaaggccaaaacggtgccttcagccacatcctctgaattggccctgacttggactaaatgcactaatgcgaaatcccttgacaaaagcgcataggttatttcaaaccagcattgttttttatgtaacctgttttaccgcatcttctcagcagcttctgaccactgctcaattttctcctttacagccattgttctggtggacaaataacctaggtactccaaatcctggcaggaaaaatatacagcattatgaaacagcactcagtaatcctaaaatgatttccaaagctggttacacatgacctgcaaagtctattaaattaaaagactttctcattacagagtttagtcaacgtagcaaaaccatgggaaattaaatggaaagataattaaatatgtaaattcataaggaacaaaagacgagaagttaattatacaataggctggtgacaccagagttcattgttatgtgccacaagaaaattaaattttttaaaaaactagaacgctcttcttttagtgttttgctgaaatcctgttttgtatttgtttctttacaacaggtgtaggtataggaggtcaagaaaaggagttcggtaaagggcatagctaataacaaccacacattgggccaggcgcagtggcttacgcctgtaatcccagcactttgggaggctgagacgggcagatcacctgagatcaggagtttgagaacagcctggccaacatggtgaaactccatctctactaaaaatacaaaaattagccaggcatgctggtgcacacctgtaatcccagctactcgggaggctgaggcaggagatcgctggaactcaggaggcagaggttgcagtgagccaagatcatgccactgcactccagcctgggcaacagagcaagactctgtctc

SEQ ID NO: 2235 - DNA, 1832 bp, Homo sapiens
gctttgcggctgtcgtcggagaggcatctgggttcggactggggccgccatggggaaagtgaatgtggccaagttgcgttacatgagccgagatgacttcagggtcttgaccgcggttgaaatgggcatgaagaaccatgaaattgttcccggcagtttgattgcttctatagccagccttaaacatggtggctgtaataaagttttaagagaattagtgaaacataaactcatagcttgggagcgtaccaaaactgtccagggctatcggttgacaaatgcaggatatgattacctagctttgaaaacactttcttctaggcaagtagttgagtctgttggaaaccagatgggtgttggcaaagaatcagatatttacattgttgcaaatgaagaaggacaacaatttgcattaaagcttcacagactaggaagaacctcgtttcgaaatttgaaaaacaaacgcgattatcataaacataggcacaatgtgtcttggctttatttatctcgtctctctgccatgaaggaatttgcctatatgaaggcattgtatgagaggaaatttccagttccaaagccaattgattacaatcgtcatgcagtggtcatggaactcataaatggttatccactatgtcagatacaccatgttgaagatcctgcatcagtatatgatgaagctatggaactaattgtcaaacttgcaaatcatgggctgattcatggagattttaatgaatttaatctcattttggatgaaagtgaccatatcaccatgattgattttccacagatggtttcaacttctcatcccaatgctgagtggtattttgacagagatgttaaatgcattaaagatttctttatgaaacgtttcagctacgaaagtgagctttttccaacttttaaggatatcaggagagaagacactcttgatgtggaggtttctgccagtggctacacaaaggaaatgcaggcagatgatgaactgcttcatccattaggtccagatgataaaaatattgaaacaaaagagggatctgaattctcattttcagatggagaagtggcagaaaaagcagaggtttacaggtcagaaaatgaaagtgaacggaactgtctagaagaatcagagggctgctattgcagatcatctggagaccctgaacaaataaaggaagacagtttatcagaagagagtgctgatgcacggagttttgaaatgactgaattcaatcaagctttagaagaaataaaagggcaggttgttgaaaacaactctgtaactgaattttctgaggagaaaaacagaactgaaaattacaacaggcaagatggtcagagagttcaaggaggagtccctgctggctctgacgagtatgaagatgaatgccctcatctaattgccttgtcgtcattaaatagagaattcaggcctttcagagatgaagaaaatgtgggagctatgaatcagtatagaacaagaactctgagtatcacttcttcaggcagtgctgtaagctgttcaacaattcctccagaactggtgaaacagaaggtgaaacgtcagttgacaaaacagcaaaaatcagctgtcagacgtcgattgcagaaaggagaagcaaatatatttaccaagcaacgtagggaaaacatgcaaaatatcaaatcaagtttggaagcagctagcttttggggagaataatatatttaggatcttggatatgtttaatatattttttaaagttactgtaattcctttttgagccctcatttgtcttttttgagccaaggctatcatatattaataaataaaccctctttcatct

SEQ ID NO: 2236 - DNA, 2675 bp, Homo sapiens
aaacatgaattcaaacggctcatcttatttcgaccattcggccccatcatgaaagtgaaaaatgaaaagctcaacatggccaacacgcttatcaatgttatcgtgcctctagcaaaaagggtggacaagttccggcagttcatgcagaatttcaggcctgctgatgaagtttttagatgtgtgcctttaagcccttgattgtgcggtgttggatcttagaagctgtgatggctcagatgcacatattggctgaggataaccagctaagtgatttcaccagcttgttttaaacatagaaaatcctactgtctaattataaatcttgaaagatcaagctgattttttatttctttttttttgagatggagtcttactctgtcacccaggctggagtgcagtggcacgaactctgctcactgcaaccttcacctcccaggttcagggagatgtgcattgagcaggatgggagagtccatctcactgttgtttactttgggaaagaagaaataaatgaagtcaaaggagtacttgaaaacacttccaaagctgccaacttcaggaactttaccttcatccagctgaatggagaattttctcggggaaagggacttgatgttggagcccgcttctggaagggaagcaacgtccttctctttttctgtgatgtggacatctacttcacatctgaattcctcaatacgtgtaggctgaatacacagccagggaagaaggtattttatccagttcttttcagtcagtacaatcctggcataatatacggccaccatgatgcagtccctcccttggaacagcagctggtcataaagaaggaaactggattttggagagactttggatttgggatgacgtgtcagtatcggtcagacttcatcaatataggtgggtttgatctggacatcaaaggctggggcggagaggatgtgcacctttatcgcaagtatctccacagcaacctcatagtggtacggacgcctgtgcgaggactcttccacctctggcatgagaagcgctgcatggacgagctgacccccgagcagtacaagatgtgcatgcagtccaaggccatgaacgaggcatcccacggccagctgggcatgctggtgttcaggcacgagatagaggctcaccttcgcaaacagaaacagaagacaagtagcaaaaaaacatgaactcccagagaaggattgtgggagacactttttctttccttttgcaattactgaaagtggctgcaacagagaaaagacttccataaaggacgacaaaagaattggactgatgggtcagagatgagaaagcctccgatttctctctgttgggctttttacaacagaaatcaaaatctccgctttgcctgcaaaagtaacccagttgcaccctgtgaagtgtctgacaaaggcagaatgcttgtgagattataagcctaatggtgtggaggttttgatggtgtttacaatacactgagacctgttgttttgtgtgctcattgaaatattcatgatttaagagcagttttgtaaaaaattcattagcatgaaaggcaagcatatttctcctcatatgaatgagcctatcagcagggctctagtttctaggaatgctaaaatatcagaaggcaggagaggagataggcttattatgatactagtgagtacattaagtaaaataaaatggaccagaaaagaaaagaaaccataaatatcgtgtcatattttccccaagattaaccaaaaataatctgcttatctttttggttgtccttttaactgtctccgtttttttcttttatttaaaaatgcactttttttcccttgtgagttatagtctgcttatttaattaccactttgcaagccttacaagagagcacaagttggcctacatttttatattttttaagaagatactttgagatgcattatgagaactttcagttcaaagcatcaaattgatgccatatccaaggacatgccaaatgctgattctgtcaggcactgaatgtcaggcattgagacatagggaaggaatggtttgtactaatacagacgtacagatactttctctgaagagtattttcgaagaggagcaactgaacactggaggaaaagaaaatgacactttctgctttacagaaaaggaaactcattcagactggtgatatcgtgatgtacctaaaagtcagaaaccacattttctcctcagaagtagggaccgctttcttacctgtttaaataaaccaaagtataccgtgtgaaccaaacaatctcttttcaaaacagggtgctcctcctggcttctggcttccataagaagaaatggagaaaaatatatatatatatatatatattgtgaaagatcaatccatctgccagaatctagtgggatggaagtttttgctacatgttatccaccccaggccaggtggaagtaactgaattattttttaaattaagcagttctactcgatcaccaagatgcttctgaaaattgcattttattaccatttcaaactattttttaaaaataaatacagttaacatagagtggtttcttcattcatgtgaaaattattagccagcaccagatgcatgagctaattatctctttgagtccttgcttctgtttgctcacagtaagctcattgtttaaaagcttc

SEQ ID NO: 2237 - DNA, 1354 bp, Homo sapiens
gggcgcagcgccgagattgattcaccttcacctgtgctgcactccagctgacccaagtaggaagccagacgagctgtaaaacatgaacggaagagtggattatttggtcactgaggaagagatcaatcttaccagagggccctcagggctgggcttcaacatcgtcggtgggacagatcagcagtatgtctccaacgacagtggcatctacgtcagccgcatcaaagaaaatggggctgcggccctggatgggcggctccaggagggtgataagatcctttcggcaaatggccaagacctaaagaacctgctgcaccaggatgctgtagacctctttcgtaatgcaggctatgctgtgtctctgagagtgcagcacaggttacaggtgcagaatggacctataggacatcgaggtgaaggggacccaagtggtattcccatatttatggtgctggtgccagtgtttgccctcaccatggtagcagcctgggctttcatgagataccggcaacaactttgaaaaacttgctctctttcaatactcccaatgaagatacatttcactcaccctccacccctgctattctgccatgtctttccctctctctgcatagccagatttgaagtgactgatacccaccccaaaccttgctgttcacagtctccaattcttcatattctaatgggaaagtaaaggtattgtttgaaggaaaactgaagaaaagacttggcttagaacaaatgaggagttatatattttactaggacttttgatagaaattcagctacaacccaaagagagaaagattgagtcttcctgtcaccataggcaataccttttttcttagctggcatgccataaaggccagctatgtgatattagaggaagaaaggatttttctttttaatgatcttccttgggaaattattgtggcctttatttaatttctaactacgtacctgggtgcctatatcgacaaagagtgagaagagcatttttacctttttaaaaaagcaaatacatatatacacatacgtatgcaaatattatagtataatagtgatccctatggagaattaaaggtgagaaagctactttgtggtgtctaggtttctgataaaagggatgatcttaactgaagaatttaaagagatacttaaacagagcaaatgtagtaggaacaagggagtgagccttataagaggacgttcagtctcatttattaaaataataactgagactgggagaggtggctcatgcctgtaaatcccagcactttggtagcctgaagtgggagattgcttgagtccaggagaccagcctgggcaacatagcaaaacctcatctctattt

SEQ ID NO: 2238 - DNA, 1564 bp, Homo sapiens
gagttcgccagtggtccaggagccgcttttttccactcgggaagacttcagagaagtctcacaaaggactcggctggctgcttttctcagtgccgaagccgcgccatgctcgttctcagaagcggcctgaccaaggcgcttgcctcacggacgctcgcgcctcaggtgtgttcatcttttgctacgggccctagacaatacgatggaacgttctatgaatttcgtacttattaccttaaaccttcaaatatgaatgcgttcatggaaaatcttaagaaaaacattcatcttcggacctcttactctgaattggttggattctggagtgtagaatttggaggcagaacgaataaagtgtttcatatttggaagtatgataattttcctcatcgagctgaagttcggaaagccttagccaactgtaaggaatggcaagaacaatctatcattccaaatttggctcgcattgataaacaagagacggaaattacttacctgataccatggtccaaattagaaaagcctccaaaagaaggagtctatgaactagctgtttttcagatgaaacctggtgggccaggtctgtggggtgatgcatttgaaagagcaattaatgcccatgtcaatttaggctacacaaaagtagttggtgttttccacacagaatatggaggactcaacagagttcatgttctttggtggaatgagagtgcagatagtcgtgcagctgggagacataagtcccatgaggatcccagagttgtggcggctgttcgggaaagtgtcaactacctagtttctcagcagaatatgcttctgattcctgcatcattttcaccattgaaatagttttctactgaaatacaaaacatttcattaactgctctaagatgtgtctgctaatggtgcttaaattctcccaagaggttctcgcttttatttgaaggaggtggtaagttaattagttaatttgctgtgcttcttgcatttttgaaagttacatattctccactgctttaagaaataattcagttcactttcaccttggcatttcagtatctgttacacattagaagtagttgtcactatttcatcatcttggtttttcatttgttttagaatacctcttctgtattttgataactcattgctttatagcattttcttttactcaaataaggattttacatttcctttcctgagattttaaaaaaatttgcttagtaaaggttattttgtgatataaaatgggatttataaaaatattagattgtttatttctttactgtggaaaagtagaatgtcatctgtattaattattgcttttacattcattgattattagtcattctaacttggaaaataatgcaattgggtcacagtgttaaaaatctagaaaagacttgttggtttatatgctgaaattgttcatttataattaattttactaatttctccttagtttggatcactaacagagatcttgggacatttatttgttttaaagaaatatttatggttatggaaacgcttgccctaataaaaatcctgcatattcattgtt

SEQ ID NO: 2239 - DNA, 1798 bp, Homo sapiens
tgattgcaaacgagcaaaagacttctctcccaaatttgttccaggataaaaacagaccgtgtctcagtaactggccagaggatacggatgtcctctacatcgtgtctcagttctttgtagaagagtggcggaaatttgttagaaagcctacaagatgcagccctgtgtcatcagttgggaacagtgctcttttgtgtccccacgggggcctcatgtttacatttgcttccatgaccaaagaagattctaaacttatagctctcatatggcccagtgagtggcaaatgatacaaaagctctttgttgtggatcatgtaattaaaatcacgagaattgaagtgggagatgtaaacccttcagaaacacagtatatttctgagcccaaactctgtccagaatgcagagaaggcttattgtgtcagcagcagagggacctgcgtgaatacactcaagccaccatctatgtccataaagttgtggataataaaaaggtgatgaaggattcggctccggaactgaatgtgagtagttctgaaacagaggaggacaaggaagaagctaaaccagatggagaaaaagatccagattttaatcaaagcaatggtggaacaaagcggcaaaagatatcccatcaaaattatatagcctatcaaaagcaagttattcgccgaagtatgcgacatagaaaagttcgtggtgagaaagcacttctcgtttctgctaatcagacgttaaaagaattgaaaattcagatcatgcatgcattttcagttgctccttttgaccagaatttgtcaattgatggaaagattttaagtgatgactgtgccaccctaggcacccttggcgtcattcctgaatctgtcattttattgaaggctgatgaaccaattgcagattatgctgcaatggatgatgtcatgcaagtttgtatgccagaagaagggtttaaaggtactggtcttcttggacattaatctttgaatacttgctgactgctaagaaatgacagaggggaagaggagtttgacatgttagggcattaaagcaaaggtggatttaagaattaaaccattacatgccccttccaaaaggcagaaatccattcaaacgtgactgtcccaaatgccttatgtcaaataaagcagattgcactgatggacatcagacttgaaggaaatgtttccaattttatatttaaggggggtggtgggtgggagggggcaagtaaagacggaacaagtttagtagcagtaatagtaaatcatgtttacatatgagatttatagtcgtgggaggggaataaagttctgttatatttccttgctcgagtttcataccagatgcgttggtccataaaggattgtatcaagtagatgggacaacattctgctctgaacgaaaagtaattttagagacataacctgcttaccaatgcctgtctttgattcatattctactttcaataaagcatgaaagtgaagaacttgtcctaagtgtggaaaagtgtcttcagatttagactcttctccatgtcagctgcagcgccacccgccttacacctgcccggccgtctgtctcttggtattgggtaaaggagggggcacctgcatgtctcctgcaatgagcaaggaattatgtctcatgttttgacttcagaggctttttgctttggtgcatttcagaaaggatggagaacatttattatgtgtgaaagcatcctcttccggttttgctgttattcaaaagtgggaaatgtacctggcacgtttgaaaataaaaaatctgactacctatc

SEQ ID NO: 2240 - DNA, 2046 bp, Homo sapiens
ttagcaataaggctggagaaggaaaagccggcgcgcccgcggcccgcgcgatttcccgccgagcccgcgtccccggcggcgggcgggctccgggggcgcccgggccgcggcggcgcggcggcgcgagctgcgcctccgggccggtgaatcatcccggcagacaccaagagccgcggcagcagagaggagcgctgaaacatggctgaagcggccacgggctttctggagcagctcaagtcctgcatagtttggtcttggacgtatctgtggaccgtgtggttcttcatcgtgctattcctggtctacatcctgcgggtgcctttgaaaatcaacgacaacttgagcacagtgagcatgtttttgaacacattaacaccgaagttctacgtggccctaacaggcacttcctcactaatatcagggcttattttgatatttgaatggtggtattttcgcaaatacggaacttcattcattgaacaagtctcagtaagccacttgcgcccccttctgggaggggttgacaacaactcttccaacaattctaattccagtaacggggactcagattccaataggcaaagtgtctcagaatgcaaagtatggcgaaatccactaaatttatttaggggtgctgaatacaatcggtatacttgggtgacaggacgagagcctcttacttactatgacatgaatctctctgcccaagaccaccagacattctttacttgtgactcggaccatctgcgtcccgcagatgcaataatgcagaaagcctggagagagagaaacccccaagctaggatttctgcagctcatgaagccttggagataaatgagtgtgcaactgcttatattctcttggctgaagaggaagcaacaaccattgctgaagcagaaaaattatttaagcaggccctgaaggctggagatggctgttaccgacgctctcagcagctacaacatcatggatcccagtatgaagcccaacatagacgagacaccaatgtcttggtgtacatcaaaagaaggctagcaatgtgtgccagaagactcgggaggaccagggaagcagtgaaaatgatgagagatttaatgaaggagttcccccttctgagtatgttcaatatccatgaaaaccttttagaagcccttctggaactacaagcatatgctgatgttcaggcagtcttagcaaagtatgatgatataagcttaccaaagtcagcaacaatatgctacacagctgctttgctcaaagcaagagctgtctctgacaaattctctcctgaggctgcatctcggcgggggctgagcacagcagagatgaatgcagtagaggccattcatagagctgtggaattcaatcctcatgtgccaaaatacctactagaaatgaaaagcttaatcctacccccagaacatatcctgaagagaggagacagtgaagcaatagcatatgcattctttcatcttgcacactggaagagagtggaaggggctttgaatcttttgcattgtacgtgggaaggcacttttcggatgatcccttatcccttggaaaaggggcacctattttatccttacccaatctgtacagaaacagcagaccgagagctgcttccatctttccatgaagtctcagtttacccaaagaaggagcttcccttctttattctctttactgctggattatgttccttcacagccatgctggccctcctgacacatcagttcccggaacttatgggggtcttcgcaaaagctttcctcagcactttgtttgcccccttaaactttgtcatggagaaagtggagagcatcctcccatccagtctgtggcaccagctaacacggatctgagagaagccctgtcctccactcacctcacccgccgctgccaccatctcctctgtgccaactccttgtggaccgcaagaaagcatgactttgaaaaagggaagccattccgagattttaaaatgttcatggactattccatattaaaagctgtttttgttgttgtacaaaaaaaaaaaaaaaaaa

SEQ ID NO: 2241 - DNA, 1535 bp, Homo sapiens
gcgcgttcgggagcttcggccctgcgtaggaggcgggtgcaggtgtgggtgctgagccgcccgccgcctggagggggagacagcttcaggacacgcaggccgcagcgagggcccgggcccgggggatcccaggccatggatgctccccactccaaagcagccctggacagcattaacgagctgcccgagaacatcctgctggagctgttcacgcacgtgcccgcccgccagctgctgctgaactgccgcctggtctgcagcctctggcgggacctcatcgacctcatgaccctctggaaacgcaagtgcctgcgagagggcttcatcaccaaggactgggaccagcccgtggccgactggaaaatcttctacttcctacggagcctgcataggaacctcctgcgcaacccgtgtgctgaagaggatatgtttgcatggcaaattgatttcaatggtggggaccgctggaaggtggagagcctccctggagcccacgggacagattttcctgaccccaaagtcaagaagtattttgtcacatcctacgaaatgtgcctcaagtcccagctggtggaccttgtagccgagggctactgggaggagctactagacacattccggccggacatcgtggttaaggactggtttgctgccagagccgactgtggctgcacctaccaactcaaagtgcagctggcctcggctgactacttcgtgttggcctccttcgagcccccacctgtgaccatccaacagtggaacaatgccacatggacagaggtctcctacaccttctcagactacccccggggtgtccgctacatcctcttccagcatgggggcagggacacccagtactgggcaggctggtatgggccccgagtcaccaacagcagcattgtcgtcagccccaagatgaccaggaaccaggcctcctccgaggctcagcctgggcagaagcatggacaggaggaggctgcccaatcgccctaccgagctgttgtccagattttctgacagctgtccatcctgtgtctgggtcagccagaggttcctccaggcaggagctgagcatggggtgggcagtgaggtccctgtaccagcgactcctgccccggttcaaccctaccagcttgtggtaacttactgtcacatagctctgacgttttgttgtaataaatgttttcaggccgggcactgtggctcacgcctgtaatcccagcactttgggagaccgaggcaggtggatcacgaggtcaggagacagagaccatcctggccaacacggtgaaaccctgtctctactaaaaatacaaaaaattagccgggcgtggtggcgggcgcctgtagtcccagctactcgggaggctgatgcagaagaatggcgtgaacccggaaggcagagcttgcagtgagccgagatcacgccactgcactccagcctgggtgacagagcgagactctggctcataaaataataataataataaataaataaaaaataaatggttttcagtaaaaaaaaaaaaaaaaaa

SEQ ID NO: 2242 - DNA, 1922 bp, Homo sapiens
gcacgagaatgtccctgagacccagaagggcctgcgctcagctgctctggcaccccgctgcagggatggcctcctgggctaagggcaggagctacctggcgcctggtttgctgcagggccaagtggccatcgtcaccggcggggccacgggcatcggaaaagccatcgtgaaggagctcctggagctggggagtaatgtggtcattgcatcccgtaagttggagagattgaagtctgcggcagatgaactgcaggccaacctacctcccacaaagcaggcacgagtcattcccatacaatgcaacatccggaatgaggaggaggtgaataatttggtcaaatctaccttagatacttttggtaagatcaatttcttggtgaacaatggaggaggccagtttctttcccctgctgaacacatcagttctaagggatggcacgctgtgcttgagaccaacctgacgggtaccttctacatgtgcaaagcagtttacagctcctggatgaaagagcatggaggatctatcgtcaatatcattgtccctactaaagctggatttccattagctgtgcattctggagctgcaagagcaggtgtttacaacctcaccaaatctttagctttggaatgggcctgcagtggaatacggatcaattgtgttgcccctggagttatttattcccagactgctgtggagaactatggttcctggggacaaagcttctttgaagggtcttttcagaaaatccccgctaaacgaattggtgttcctgaggaggtctcctctgtggtctgcttcctactgtctcctgcagcttccttcatcactggacagtcagtggatgtggatgggggccggagtctctatactcactcgtatgaggtaccagatcatgacaactggcccaagggagcaggggacctttctgttgtcaaaaagatgaaggagacctttaaggagaaagctaagctctgagctgaggaaacaaggtgtcctccatcccccagtgccttcacatcttgaggatatgcttctgtactttttaaaagcttatagttggtatggaaaacatttttcttatttttaagtgttattaattatatctatggaaaaactattcctgaaatatatacagtcttatgtcccaatcagagtcttttaacctatgatttaaaaatgtataagtaacagaaattaacatattttaatgactttactttttatttctaagaaaagtatttgaaaaatggaataattttaaatcaatgataattctagggatcatgaactcccagaagattttattatttaattgtaaaggtagaggccggacgcagtggctcacgcctgtaattccagcactttgggaggccgaggtgggcgggtcagttgaggtcaggagttcaagaccaggctggccaacatggtaaaaccctgtctctactgaaaaacaacaaaaacaaaaacacaaattagtcgggtgtggtggcacacacctgtagtcccaggtacttgggaggctgaggcaggaggatcgcttgaacccaggaagcagaggttgcagtgagctgagatcgtgctactgcagtccagcctgggctacagagtgagactgcatctcaaaaaaaacccmaaaaaacaaaaacaaacaacaacaacaaaattataaaggtagaaaataaatctaaattgtgtcgtaattaagattattaaaatgagaattatacaatgacttatttttggtggcaaatactttaggagcaataatgccttatggtaattattgatgtatagttttttttgtttatgaagtcaaatttgtataaatttttttaattcaaaggaaaagttttatgtgattttaaaaaaaaaaaaaaaaaaaaaaaaaaaaaaaaaaaaaaaaaaaaaaaaaaaaaaaaa

SEQ ID NO: 2243 - DNA, 1614 bp, Homo sapiens
cttgtcggagccctaaccaggggtatctctgagcctggtgggatccccggagcgtcacatcactttccgatcacttcaaagtggttaaaaactaatatttatatgacagaagaaaaagatgtcattccgtaaagtaaacatcatcatcttggtcctggctgttgctctcttcttactggttttgcaccataacttcctcagcttgagcagtttgttaaggaatgaggttacagattcaggaattgtagggcctcaacctatagactttgtcccaaatgctctccgacatgcagtagatgggagacaagaggagattcctgtggtcatcgctgcatctgaagacaggcttgggggggccattgcagctataaacagcattcagcacaacactcgctccaatgtgattttctacattgttactctcaacaatacagcagaccatctccggtcctggctcaacagtgattccctgaaaagcatcagatacaaaattgtcaattttgaccctaaacttttggaaggaaaagtaaaggaggatcctgaccagggggaatccatgaaacctttaacctttgcaaggttctacttgccaattctggttcccagcgcaaagaaggccatatacatggatgatgatgtaattgtgcaaggtgatattcttgccctttacaatacagcactgaagccaggacatgcagctgcattttcagaagattgtgattcagcctctactaaagttgtcatccgtggagcaggaaaccagtacaattacattggctatcttgactataaaaaggaaagaattcgtaagctttccatgaaagccagcacttgctcatttaatcctggagtttttgttgcaaacctgacggaatggaaacgacagaatataactaaccaactggaaaaatggatgaaactcaatgtagaagagggactgtatagcagaaccctggctggtagcatcacaacacctcctctgcttatcgtattttatcaacagcactctaccatcgatcctatgtggaatgtccgccaccttggttccagtgctggaaaacgatattcacctcagtttgtaaaggctgccaagttactccattggaatggacatttgaagccatggggaaggactgcttcatatactgatgtttgggaaaaatggtatattccagacccaacaggcaaattcaacctaatccgaagatataccgagatctcaaacataaagtgaaacagaatttgaactgtaagcaagcatttctcaggaagtcctggaagatagcatgcgtgggaagtaacagttgctaggcttcaatgcctatcggtagcaagccatggaaaaagatgtgtcagctaggtaaagatgacaaactgccctgtctggcagtcagcttcccagacagactatagactataaatatgtctccatctgccttaccaagtgttttcttactacaatgctgaatgactggaaagaagaactgatatggctagttcagctagctggtacagataattcaaaactgctgttggttttaattttgtaacctgtggcctgatctgtaaataaaacttacatttttcaataaaaaaaaaaaaaaaaaaaaaaaa

SEQ ID NO: 2244 - DNA, 1109 bp, Homo sapiens
actggaagaccaggcagcccagctgaaggcagtaagctcggctcacagtcgcaggagagttctggggtacacgggcaaaggggcttgagaaggcccggaggcgaagccgaagagaagcaactgtgccccggagaagagaagctcgcccattccagactgggaaccagctttcagtgaagatggcagggccagaactgttgctcgactccaacatccgcctctgggtggtcctacccatcgttatcatcactttcttcgtaggcatgatccgccactacgtgtccatcctgctgcagagcgacaagaagctcacccaggaacaagtatctgacagtcaagtcctaattcgaagcagagtcctcagggaaaatggaaaatacattcccaaacagtctttcttgacacgaaaatattatttcaacaacccagaggatggatttttcaaaaaaactaaacggaaggtagtgccaccttctcctatgactgatcctactatgttgacagacatgatgaaagggaatgtaacaaatgtcctccctatgattcttattggtggatggatcaacatgacattctcaggctttgtcacaaccaaggtcccatttccactgaccctccgttttaagcctatgttacagcaaggaatcgagctactcacattagatgcatcctgggtgagttctgcatcctggtacttcctcaatgtatttgggcttcggagcatttactctctgattctgggccaagataatgccgctgaccaatcacgaatgatgcaggagcagatgacgggagcagccatggccatgcccgcagacacaaacaaagctttcaagacagagtgggaagctttggagctgacggatcaccagtgggcactagatgatgtcgaagaagagctcatggccaaagacctccacttcgaaggcatgttcaaaaaggaattacagacctctattttttgaagaccgagcagggattagctgtgtcaggaacttggagttgcacttaaccttgtaactttgtttggagctggcacctcttgaaataaaaaggaggatgcacgagctggcaggcatgcaaaaaaaaaaaaaaaaaaaaaaaaaaaa

SEQ ID NO: 2245 - DNA, 4387 bp, Homo sapiens
cggcccgaggtcctgtgggaagtgaggatctcaggacgggggcggggctccgacagaggcggcgattgtggcggcccatttgtaaatgctgcggagattgaggtgtcggttcgtgctgctgagctgcccaggcttcacggagcggtgttggtaatcaatagctcttctagcctttgcattgtttaaatataatagtgtcattggactaagatgttcctgatgccaacctcttcagagttaaacagtgggcagaacttcctaacccagtggatgaccaatccttctcgggctggggtcatattaaatcgtggatttcctattttggaagcagacaaagagaagcgagcagctgtggacatttctaccagctttcctattaaaggcacacatttttctgatagcttcagctttataaatgaagaagattcacttcttgaagaacagaagttggagtcaaacaacccttacaaaccacagtcagataaatctgaaacccatacagcctttccttgcattaaaaagggaccacaggtagcggcatgtcacagtgctcctggacaccaggaagaaaacaaaaatgacttcatcccagatcgtgcgagtgaattcaaagaaggggcttataaagacccactttttaaaaaacttgaacagctgaaagaagtacaacagaagaagcaggaacaattgaagaggcaacagttggagcaactacagagactcatggaagaacaagagaagctgctcaccatggtgtctgggcagtgcacacttccaggtttgagtttactgcctgatgatcagagccagaagcacaggtctccaggaaataccaccactggagagagagccacatgctgcttcccatcatatgtctacccggacccaacccaggaagaaacatacccgtccaacattttatcccatgagcaaagcaacttctgtagaactgctcatggagattttgtcttaacttcaaaacgtgcgtctcctaatttattttctgaggcacagtatcaagaagcacctgtggaaaaaaataatttaaaagaagaaaaccgtaaccatcctacaggagaaagtatcttatgttgggagaaagtgacagaacagattcaggaagcaaatgataagaacttacaaaaacatgatgattcctcagaagtggctaatattgaagaaaggcccattaaagctgctattggagaaaggaaacagacctttgaagattacttagaagaacaaattcagttggaagagcaagaactgaagcaaaaacagctgaaggaagcagaaggaccattgccaatcaaagcaaaaccaaaacaaccatttttaaaacgaggagaaggtttagctagatttactaatgccaaatctaagtttcaaaaaggcaaagaaagtaaactagtgactaaccagagcacttccgaggaccagccgctgtttaaaatggatagacagcaactccagcggaaaaccgctcttaaaaataaagagctgtgtgcagacaaccctatccttaaaaaggacagtaaagctagaaccaagagtggttctgtcaccctcagtcagaagccgaaaatgctgaagtgtagtaacaggaaaagtctttctccgtcaggattgaaaatacagacggggaagaaatgtgatgggcagtttagagaccagatcaaatttgaaaacaaagtcacatctaataataaagaaaatgtaactgagtgtccaaaaccttgcgatactggctgcacagggtggaataagacacaaggtaaagacagacttcctctttcaacagggccggccagccggctggctgctaagagccccataagggagaccatgaaagagtctgaatcttctcttgacgtttctcttcagaaaaagttagagacttgggaacgagaaaaggaaaaggaaaatttggaattagatgaatttttgtttttagaacaagctgctgatgaaatatcattttctagtaattcctcatttgtactgaaaatcttagaaagggatcaacagatctgcaaaggtcaccggatgtcttccacccctgtcaaagctgtgccacagaagacaaatccggcagatcccattagtcattgtaaccgcagtgaggatttggaccacactgcacgtgagaaggagagtgagtgtgaagtcgcacccaaacaacttcattcattgtcctcagctgatgaattgagggaacagccttgtaaaatcaggaaagccgtccaaaagagcacttctgaaaatcagactgaatggaatgcacgtgacgatgaaggtgttccaaatagtgacagtagcactgactctgaggaacagcttgatgttaccataaaaccatcgactgaggatagagagaggggcatcagcagcagagaggatagcccacaagtctgtgatgataaggggccttttaaggacaccaggacccaagaagataaaaggagagatgttgatctggatttgtctgataaagattacagtagcgatgagtctatcatggaaagcataaaacataaagtgtctgagccctcgagatcctcatccctaagtctgagtaaaatggactttgatgatgaaagaacttggactgaccttgaagagaatttgtgtaaccatgatgttgttcttgggaatgaatccacttatgggacgccgcagacatgctaccctaataatgaaataggtatcctggacaaaacaataaaaaggaagattgcaccagtcaagaggggagaagacttgagcaagtccaggaggagcagaagtcctcctacatcggagctgatgatgaaattctttccttctttgaaaccaaaaccaaagtcagattcacacttgggaaatgaactcaagttaaacataagtcaagaccaaccacctggtgacaatgctcgatcccaggttttgagagagaaaattattgaattggaaacagaaatagaaaagtttaaagctgagaacgcatctttagctaaacttcgcattgaacgagaaagtgccttggaaaaactcaggaaagaaattgcagacttcgaacaacagaaagcaaaagaattagctcgaatagaagagtttaaaaaggaggagatgaggaagctacaaaaggaacgtaaagtttttgaaaagtatactacagctgcaagaacttttccagataaaaaggaacgtgaagaaatacagactttaaaacagcaaatagcagatttacgggaagatttgaaaagaaaggagaccaaatggtcaagtacacacagccgtctcagaagccagatacaaatgttagtcagagagaacacagacctccgggaagaaataaaagtgatggaaagattccgactggatgcctggaagagagcagaagccatagagagcagcctcgaggtggagaagaaggacaagcttgcgaacacatctgttcgatttcaaaacagtcagatttcttcaggaacccaggtagaaaaatacaagaaaaattatcttccaatgcaaggcaatccacctcgaagatccaagtctgcacctcctcgtgatttaggcaatttggataagggacaagctgcctctcccagggagccacttgaaccactgaacttcccagatcctgaatataaagaggaggaggaagaccaagacatacagggagaaatcagtcatcctgatggaaaggtggaaaaggtttataagaatgggtgccgtgttatactgtttcccaatggaactcgaaaggaagtgagtgcagatgggaagaccatcactgtcactttctttaatggtgacgtgaagcaggtcatgccagaccaaagagtgatttactactatgcagctgcccagaccactcacacgacatacccggagggactggaagttttacatttttcaagtggacaaatagaaaaacattacccagatggaaggaaagaaatcacgtttcctgaccagactgttaaaaacttatttcctgatggacaagaagaaagcattttcccagatggtacaattgtcagagtacaacgtgatggcaacaaactcatagagtttaataatggccaaagagaactacatactgcccagttcaagagacgggaatacccagatggcactgttaaaaccgtatatgcaaacggtcatcaagaaacgaagtacagatccggtcggataagagttaaggacaaggagggtaatgtgtcaatggacacggagctgtgacgatcctcatgtgatcatgaagtaacagtaactgactttttatgttaaaaaatgtacatttactgtggattctgtttaatttattgtgtatgtgtggggaaaagattggattttaaaataaaagtttaccctgtggcattttcaaaaaaaaaaaaaaaaa

SEQ ID NO: 2246 - DNA, 1264 bp, Homo sapiens
aattcggcacaagggggcgctttagggactggacttgcagtgtaaacagagacgctgcaaattgcttgtggacggtgtaggccgctgcaggcaccatgaaccggcttccggatgactacgacccctacgcggttgaagagcctagcgacgaggagccggctttgagcagctctgaggatgaagtggatgtgcttttacatggaactcctgaccaaaaacgaaaactcatcagagaatgtcttaccggagaaagtgaatcatctagtgaagatgaatttgaaaaggagatggaagctgaattaaattctaccatgaaaacaatggaggacaagttatcctctctgggaactggatcttcctcaggaaatggaaaagttgcaacagctccgacaaggtactacgatgatatatattttgattctgattccgaggatgaagacagagcagtacaggtgaccaagaaaaaaaagaagaaacaacacaagattccaacaaatgacgaattactgtatgatcctgaaaaagataacagagatcaggcctgggttgatgcacagagaaggggttaccatggtttgggaccacagagatcacgtcaacaacagcctgttccaaatagtgatgctggtcttgaattgtcctgcctgcatgaccacactcttgccttgattgccaaaggcatgaatcatacaaaaactcaatatagagcaatgtttgtaatgaattgttctattaacaaagaggaggttctaagatataaagcctcagagaacaaggaagaaaaggcgggtccataagaagatgaggtctaaccgggaagatgctgccgagaaggcagagacagatgtggaagaaatctatcacccagtcatgtgcactgaatgttccactgaagtggcagtctacgacaaggatgaagtctttcattttttcaatgttttagcaagccattcctaaacagcccaactggcatttaattacccaatactgtatataaggcaaatatggacagttactttcctcttgcctgttcatatccttcagtgacattgaggaagcagtgtttctctttttaaaggagaatagttgtcaaccttcattcatctcttacatctctcaccctctccttttttttttctttgattttcccccttattgatgggactgatattcattctgtttttgatgaacatttggaaactgtcgggctttttattaaagctctgtagaattaaaatgttctggaattataagcaaaaaaaaa

SEQ ID NO: 2247 - DNA, 1362 bp, Homo sapiens
tttctctttttcaaatgttttttaatatcctgcaggtaataacactgatttttctaatactcagaaacatctacttagcagttgtgatactaatttgcaaaatgtaataatgttatacaaatataagatactactaaatacatagtagaaataattgcatgattcctgatatttatattcaaggtataaacatgactgatttcgctgatactacagaataaaaaaaataaagctgctatgtaaaaaattaaagaatatctcaattagatatttttgttcccaatctctttcagacagatctatgaaataatatagaatatactatcaatatgttctttcatatgaagtgaaaaaaatgggatttaagtagtgagataatttctattttttacttttttaaaaaaatagacagggtcttgctatgttgcccaagctggtctcaaactcctgggctccagtgtgcttcctgcctcagcctcccaaagtgctgggattataggcatgagccattgtgcctggcctgtgggatcatttctattggtttttcttagagtcaaggtcttgctctgttgcccaggctgatcttggacttgcgagccaccatgcctggctgggttttttaaaaatagaatctcactgatagcctgcaagaaacagatgcagtgcctgcttccgtatcagtccaaggagccctcgtgtttgccacctttacctttgaacctccccctgcctccctgcctgtgtccgcttttgcagctcaatgcagccatgacaaggaaagaaaagacaaaggaaggccagagagccgcgcagttctctgcaggtgcagatgcaggcagtggaggtggcctgagcaggcagaaggacaccaagcgccctatgttgcttgtcattcatgacgtggtcttggagcttctgactagttcagactgccacgccaaccccagaaaataccccacatgccagaaaagtgaagtcctaggtgtttccatctatgtttcaatctgtccatctaccaggcctcgcgataaaaacaaaacaaaaaaacgctgccaggttttagaagcagttctggtctcaaaaccatcaggatcctgccaccagggttcttttgaaatagtaccacatgtaaaagggaatttggctttcacttcatctaatcactgaattgtcaggctttgattgataattgtagaaataagtagccttctgttgtgggaataagttataatcagtattcatctctttgttttttgtcactcttttctctctaattgtgtcatttgtactgtttgaaaaatatttcttctataaaattaaactaacctgccttaagaacagaaaaaaaaaaaaaaaaaaaaa

SEQ ID NO: 2248 - DNA, 1819 bp, Homo sapiens
ctggagacatttttgattgtcacaaatgatgggtgttgtgtttctggcatgggtagagggatgctactaaacatcctaccgtgcacaggatggccctccacaatggattctgtggccccaaatgttaatagtgccaaagttgagagaccctggggtagagacgtgtgatgggaaggaaagaaaattacctttagagctgcgcgccgcggcggcggaagatggctgcggccgagttggcggacactcagctgatgcttggagtcgggctgatcgaaaaggacacaaatggagaagttctgtgggtgtggtgttatccttccacgacagccacattaaggaacctgctgctgagaaaatgctgccttacagatgaaaacaaacttctccatccctttgtctttggtcagtacagaagaacatggttttatatcacaataattgaagttccagattcttccattttgaaaaaggtgactcatttttctattgtcctgaccgccaaagattttaacccagagaagtatgctgccttcactaggatattgtgtagaatgtacctgaaacatgggagcccagttaaaatgatggagagttatattgcagttctcacaaaggggatatgccagagtgaagaaaacggctctttccttagtaaggattttgatgcccgaaaggcctacccggctggctccatcaaagacattgtatctcagtttggaatggaaactgttatcttacacacagcactgatgctaaagaaaagaattgtggtgtatcaccccaagatagaagcggtccaggagttcaccaggactctgcctgccctggtgtggcaccgacaggactggaccatccttcactcttacgtgcacctcaacgccgatgagctggaagccctgcagatgtgcacaggttacgtcgctggatttgtagacttggaggtgagcaacagaccagacctctatgatgtgtttgtgaatctggcagagagtgagattaccattgctccccttgcaaaagaggccatggcaatgggcaaactgcacaaagaaatgggtcagctaattgttcagtctgcagaagatccagagaaatcagagagccacgttatacaggatattgctctaaaaacaagagaaatctttaccaacctagcaccattttcagaagtttcggctgatggagaaaagagagtccttaatttggaggcgctaaagcaaaaacgatttccaccagcaacagaaaacttcctttatcatctagcagcagccgaacaaaatgctgaaaatctgactgtgtgacagaaccgtatcactgatgactgatagaaagccctctttactctgattacccactcactacatgaagtcctgaaaataacagagaaactgttatatctttttaatgatttatttgcaagtattgagatttgacctgaaaaacaatgaaacacatgaacacacttccgattttctcctcgctgattagcttcctgcctgctgtcagtgctggacgaagtgctataactactttatgtaacattacagaacagctagaggtcctggggtaagagaaaaaaagcacatcacaacaaatgtgaaagccttcattattacacgttccagtttgtctcgctgtgtaggcataagctaatggtttattttcagaaagctgcctgaaacgttgctttgtattcttctaggaagaactttaattcctcctgaggaactctactttctgagccaaactgctaattttctgcggaactgtctagaagatcattcaagagaccctgcagttgcactttctcgtaaaagtt

SEQ ID NO: 2249 - DNA, 1621 bp, Homo sapiens
gccccggccccgccccgcgagcgccgagacttgttggccgcggagactgcgaccctcttctctcagtctgccttactaccatgccgctctacgagggcctggggagcggcggggagaagacggcggtcgtgatcgacctgggagaggcctttaccaagtgtggatttgctggagaaactggtccaagatgtataattcctagtgtgataaaaagagctgggatgcctaagcctgtcagagttgttcagtataatatcaatacagaagaattatattcctacctaaaggaattcatccacatactatatttcaggcatctattggtgaatcccagagaccgccgagttgtgattatcgaatcggtattatgtccttctcacttcagagagacactcactcgtgttcttttcaaatattttgaggttccatctgtcttgcttgctccaagtcatctaatggctcttctgacgcttggaattaattctgccatggtcctagattgtggatatagggaaagcctggtgttacccatatatgaaggaatcccagttctaaattgttggggagcactacccctaggaggaaaagctcttcacaaagagttggaaactcaactattggaacaatgtactgttgacacaagtgttgctaaagaacagagccttccctcagtgatgggttcagttccggaaggtgtcttagaggacattaaagcgcgtacttgctttgtaagtgatctgaagcgaggactaaaaatccaagcagcaaaatttaatattgatgggaataatgagcgtccctccccacccccaaatgttgactatccattagatggagagaagattttacatatccttggatcaatcagagattcagttgtggaaattctttttgaacaagataatgaagagcaatcagttgccactttaatattggattcccttatacagtgtccgatagacaccaggaagcaactagcagagaatttggtagtcataggtggcacttctatgttgccaggatttctccacagattgcttgcagaaataaggtatttggtagaaaaaccaaaatataaaaaagcacttggcactaagacatttcgaattcatactccacctgcaaaagctaattgtgtggcctggttgggaggggctatttttggagcattacaagatatacttgggagccgttctgtttcaaaggaatattataatcagacgggccgtatacctgattggtgttctctcaataacccacctttggaaatgatgtttgatgtcgggaaaactcaaccacctctgatgaagagagcattttccactgagaaatagaagtttgattaaaaatcaaccttgcttcatatcaaatatttaaccaattataagcaaattgtacaaagtatgtaggatgttttgttatagaggactatagtggaagtgaaagcattctgtgtttactctttgcattaatatataattcttttgactttgtttctcttgtgtagtggtaaaatggtagctggtgcttattgagatttgctgtatttatatcaataaagtatagtaaagcaagcagtttgattttggaaaaaaaaaaaaaaaaaaaaaaaaaaaaaaaa

SEQ ID NO: 2250 - DNA, 1510 bp, Homo sapiens
cgagtgtggccaagggtgccggaggcagggttcgggtgcgtagtcgttgcgtgggcgctgcccaaaaggcgcagagcatcaagtgtgcgtgggcagaaccggcgcgggcgcccgccgcgggtctgcgcggggcgggggcgcagcaagtgcatccgagcgagcggagactagcgcaccggcgtcggtggcgagggtggtgcagaggagtccggctgggcggagggaggaaggatgggtgcgggtaactttttgaccgccttggaagtaccagtagccgcgctcgcaggggctgcctccgaccgccgggcgagctgcgagcgagtgagcccgccaccgcccctcccccacttccgcctcggcacgaggcctcttcctcgttcccggctcccagggcccgtgtccaggccggagccaggggccccactgttgggatgctggctgcagtggggcgccccaagcccaggtcccctctgtcttctctttcgactttgcagctgtacttgttttgctcctctacccgcaggagctgacatggacccaaatcctcgggccgccctggagcgccagcagctccgccttcgggagcggcaaaaattcttcgaggacattttacagccagagacagagtttgtctttcctctgtcccatctgcatctcgagtcgcagagaccccccataggtagtatctcatccatggaagtgaatgtggacacactggagcaagtagaacttattgaccttggggacccggatgcagcagatgtgttcttgccttgcgaagatcctccaccaaccccccagtcgtctggggtggacaaccatttggaggagctgagcctgccggtggctacatcagacaggaccacatctaggacctcctcctcctcctcctccgactcctccaccaacctgcatagcccaaatccaagtgatgatggagcagatacgcccttggcacagtcggatgaagaggaggaaaggggtgatggaggggcagagcctggagcctgcagctagcagtgggcccctgcctacagactgaccacgctggctattctccacatgagaccacaggcccagccagagcctgtcgggagaagaccagactctttacttgcagtaggcaccagaggtgggaaggatggtgggattgtgtacctttctaagaattaaccctctcctgctttactgctaattttttcctgctgcaaccctcccaccagtttttggcttactcctgagatatgatttgcaaatgaggagagagaagatgaggttggacaagatgccactgcttttcttagcactcttccctcccctaaaccatcccgtagtcttctaatacagtctctcagacaagtgtctctagatggatgtgaactccttaactcatcaagtaaggtggtactcaagccatgctgcctccttacatcctttttggaacagagcacggtataaataataaactaataataatatgccaacaaaaaaaaaaaaaaaaaaaaaaaaa

SEQ ID NO: 2251 - DNA, 1680 bp, Homo sapiens
gggctgcggtacggcgtgttggtcccagcggttcagctgaggtagggacgtgctgtaggccggaatgttaccggctgttggatctgcggatgaggaggaggatcctgcggaggaggattgtcctgaattggttcccatggagacgacgcaaagcgaggaggaggaaaagtctggcctcggcgccaagatcccagtcacaattatcaccgggtatttaggtgctgggaagacaacacttctgaactatattttgacagagcaacatagtaaaagagtagcggtcattttaaatgaatttggggaaggaagtgcgctggagaaatccttagctgtcagccaaggtggagagctctatgaagagtggctggaacttagaaacggttgcctctgctgttcagtgaaggacaatggccttagagctattgagaatttgatgcaaaagaaggggaaatttgattacatactgttagagaccactggattggcagacccaggtgcagtggcttctatgttttgggttgatgctgaattagggagtgatatttaccttgatggtatcataactattgtggattcaaaatatggattaaaacatttaacagaagagaaacctgatggccttatcaatgaagctactaggcaagttgctttggcagatgccattctcattaataaaacagacctggttccagaagaagatgtaaagaaattaagaacgacaattagatccataaatggactaggacaaatcttagaaacacaaagatcaagagttgatctctctaatgtattagatcttcatgcctttgatagtctctctggaataagtttgcagaaaaaacttcagcatgtgccaggaacacaacctcaccttgatcagagtattgttacaatcacatttgaagtaccaggaaatgcaaaggaagaacatcttaatatgtttattcagaatctcctgtgggaaaagaatgtgagaaacaaggacaatcactgcatggaggtcataaggctgaagggattggtgtcaatcaaagacaaatcacaacaagtgattgtccagggtgtccatgagctctatgatctggaggagactccagtgagctggaaggatgacactgagagaacaaatcgattggtcctccttggcagaaatttagataaggatatccttaaacagctgtttatagctactgtgacagaaacagaaaagcagtggacaacacgtttccaagaagatcaagtttgtacataacactagaggcatttcttatcaaaaggattggataataaaaataagtttctactgggtatatttcaagcatttatttattactttagttacgaattccaatatactttaaaatggtatttgttttacagcatacataaaatgtagcaaatcagtactgtaaaacatttaacattcatacagttatatataatatccttttttttaaagaatggtatttcacaaaaatatcttttgaaattggctttggagtttacatatactgaacatgaaagtttataataatgatgatacaactttcaacattgtcattttttcttagaacttcagctgattgcagagatataatgattacattgttattaaatttttttaacacaagtaagtgtcaccattttatgacatgaaataaaaggttatgactgttatcg

SEQ ID NO: 2252 - DNA, 2110 bp, Homo sapiens
ttttttttttttttttttttttttttttttgtagaaaacatattcattgaaaagtgagtgtccattgcacatgactgtgcatatcaacaacatataatctggccacacccacccctctttagccatgccaagggtgagctgcagagttacaacagctgttttggattcttgtaagtgttcatgtcatcatcagtacgaggtccacttctcttcacttctgcttcttcacagttaacaaaccagggaagtgtgccttgtctttctccagataggttaaaaaggccgcaggaattcagagagtaaccaacttgtcactaatacagcctttttgccaggccaccagagcatttgaaaagatagttactactgctaagagtcatatcattgagcagaaccttgtacagtgaaacatttttatgtgtgtctttgaattctttaagcaaaggcagagcagtttggtactggaaatcacaacaaagaaaagcacattgcacattccctaactgccattattaaaataattacttcatttattggagtgtttcacattgccgggcactatcatgggtgctttacactcattgtcttattcagtcctcacattgctcctacaaagactataattttattatttcccttttgcagaagaaaacaaaaacaaactaagagtcagattaagtaagcacatagcacacgacagcagaaggtgagcccaggtttgtttgaatgcctctaaagcccatgctttttcctttgtacctccccacatgctccatctactttggttaggtagctccagcctctgccctgtgccaaggggctgaaagtctctgaagacctgatgacccagcttccagtcagatccttaccctgtctacttccagtccccccatgtggctgtgctggaagctctcggatatgccttgtcccagcttctacaggctgaggaagctccagagaagatcattccccctgcttctgccagcagctccatcttggcctccactctccctcagcacatgctacaaatgttgcaacctggcccaaagctcaaccctggggtcgctgtggagtttgcctggtgccttcattacatcatctgcagccaggtcagcaatcctctgctcattggccatggggctctgtctactctggggttgctgctgttggacttggctggggctgtccagaaaaccgaggatgcaggactggagctgctggcatgccccgtgcttcgatgtctaagcaacctgctaactgaggcagcagtggagactgtgggagggcaaatgcagctcagagatgagcgtgttgtggcagccttatttatccttctgcagttctttttccagaaacagcccagtctgctccctgagggcctttggctcctcaacaacctcactgcaaacagtcctagtttctgtacctccttgctctccctggatctgattgagcctctcttacagctgttgccagtatctaacgtggtgagcgtaatggtgctcacagttctgtgcaatgttgcagaaaagggtcctgcttactgccagcggctgtggccagggcccctgcttcccgccttgctgcacacactagccttttctgacactgaagtagtaggccggagtttggagctgctgcatctgctgttcctgtatcagccagaggctgttcaggtcttcctgcagcagtcagggctgcaagccctggaaaggcatcaggaagaggcccagctccaggatcgtgtgtatgctctccagcagacagctcttcaagggtgatcttgtttctcaatgtcactcattcccctctctcttaacatcaagcttgtttgtccagtagagcctttggagatttaggaccataatgaggtctcatgttctctgctcccacacctaagccaagacctttgggtcccagctcctccccttccactcagcactatccaggcaggaggaccaaaagggactcagtgtggtctacttactctggggccctagaatccctgcccccccgccacccttcatgtttgcttcagcagctggtagcttttgatgagacagaataaagttttatttttatattaaaaaaaaaaaaaaaaaaaaaagcg

SEQ ID NO: 2253 - DNA, 1268 bp, Homo sapiens
ggcattaatcaatccctgtttctattttaataggggggacaaggtaggggagagggaaaaacagttttggatataactatttggaaggagagtagacatgaagagggcaaaccctagcttttcattatctacaatcaatagtttgtttttcttttttaaaaaagaaagaaaaaccctttcaatcttcaatactctttaaaagcccacttcttagctactggccaatccacaccaattatttaaattcacttggtacacacctttgtccactgggtaaattatattcattatgcccactgctgcagcacgcataaaccaacacccctgcatggctgaacagggcctaatctaggactgatgggagaagggcttgcaaaccaagatcaaggtgtttctccgctaatactgtctaccaagctgatccctacaaaaatgcatataaaagcaggcaagtttagctactgtgttgcaagagaaaccaggaccttgttaaatagttctctccattaccatttattctctcaagggaagcttaaaaaaacaacaacaacaaaacaacacattggtctggccacctcatgaatccaacaagcattagtgtggcatttcagtggagaaggaaacttggggggaaaaatcccatcaaggttgtaagaaaggctcccaatttaactgtccctgtccctatttatccatcatccaagaccatccattattctagagcactctgatcaataaaaggggtccaagcatcaggagcaggcaaggagaaccaaaagacatcaagaaaccgatttgcttgagaaaagcagcgattcttcctttcagagttctccatggctgagaaaatgcccaagacatcatgtatgtgacttagatactgctttttgggaggttaagagtagcatgaagaacttaagatgatgataagagtctaaatttttagtttcaaggtttcaatagaatgtggatatattcaaaactttcaaaaaggacagtgtttagaaagggtaaaactaggacacagaaaacactgggaattaccacgacccccaagtgcttccggctccaggaaataaccattcatgtgtttgctggaggtcacacaattttcccctattacctggtgcaaaatgactcatcacttcccaaaagcttcttttcaaaccacgattttcccatttattttggtccaatgcagtcccattctttatggcctatagtctcactcccaactacccccctggggggttaaaaaaaaaaaaaaa

SEQ ID NO: 2254 - DNA, 2341 bp, Homo sapiens
agtgtaagcagtgtgcaaacaaggtgttacagcacatgaaggccgtgcaggcagatcaggagcgggagaggcagcggcggctggaagtagaacgtgaggcagagaagaagcgtgaggctaagcagcgagctaaggaagctcaggagcgggaactgcggaagcgggagaaggcggaagagaaggagcgccggagaaaggagtatgatgccctcaaagcagccaagcgggagcaggagaagaaacctaagaaggaagcaaatcaggccccgaaatctaagtctggctcccgtccccgcaagccaccaccccggaagcacactcgttcctgggctgtgctgaagctgctgctgctgctgctgctatttggtgtggcgggagggctggttgcttgtcgggtgacagagctgcagcagcagcccctctgcaccagcgtgaacaccatctatgacaatgcggtccagggtctacgccgccatgagatcctccagtgggtccttcagaccgactctcagcagtgagcttgttcccagcacctgctgcctcccagccttggagtttggattcctatggaattgggttctgctggacacaacctctttttagcatcagacctacctgccatcatcaaatggctgcagattggtacatgagacctcctctttgtaggacttcttcattccttagtcagggttccctgaaggaatgaggagaaatgggaggtggcgggggggcgtggggggcagttacctgcatgcctaaaggagtaggcttgggggtggggagagagaaaacatagccttttctagttgttatataaagctgtgtaaaggcaaggctcgtttctactaaatggtcagctgtcactacatttatacttttgtatgccacaaaccctttcattcctccctgggaatcagggtagatcaggaggaactgggggggactagaacaccacgctcagtaaatccagtctaaactgggaggtaggggtattcctgttttctttaggacctcagagatgtaagcattttagcagccacacaaaatctctggctatgaaagggacttcatgaccatccagtccaatataacacttgcagacagagaaactgaggtcttccatgacttgcctagtctcccagctagtttgaggcaaaactggattcccactctggtattctttcttccctttacatcattttccctcctttataatgtcctgagagaccagaactcacaccagaatcgattattcctcaggtgaagcatagactctttcatggtagacagatttcacgactcagagatagaaatctcttgctatcatcaggtcacgggcagctcctgtggagtcctgcccaacttatgtggcttccataaaatggcaacagtccaggctccttgcctaattttagagcattaactccctaattgccagtaagcaaggaggtggatctctgcaaacctacactgtctatgacagctctagttgtacttggtgtgactaaatacctcaaaggcaacctgcttctgcaggttttgaagtgtcagcttcataagacactgaggtttagaattgtttgattctagaccataactgaagggcataaatggaaacaggatatgaagggaaacaagtagcatcatggagctgaaaagtggtgcatcacccaatggctagcacaaacaaggatcacactgtccattctcttgtctgctaaattaagcattttcttgcctcctttgcttcatcttttcacaacagctggatagagggatcagaaatgactgtgtcatggtgctcattcactgcaaactcccagttgcaagctccttggctcccccggagggagcaagaatctcatagttcagagacacagagggccttttagccctaatgaccttttggatgggactgcaactcatgactatcctgatattggaagaaaggactttgttaatcttctcccccatagctctgctgcgtaggtctacatcttactcagaatcactacacattcctttagtcttcctccaagctccagagccattggtacaaatgctttattgaaactaaatacataatacacacaatgagatgaagacaatatagaagtccgcatagtcatcataatcccgttccttggccggttgaggcagctcagtggctgagcccagtcaagccaacccgcagcttcactcacgacttcaagatttgatgctaattcttttggatttctacagttattaaataagtgtctgagtggacaaaaaaaaaaaaaaaaaaaaaaaaaaaaaaaaaaaaaaaaaaaaaaaaaaaaaaaaaaaaaaaaaaaaaaaa

SEQ ID NO: 2255 - DNA, 1742 bp, Homo sapiens
cgcttttttttttttttttttttttttttttttttttattaacaagtgtaactctttattaagatggaattgttcttattaaagaaatagatgaaaatggttaagtacaattaaatggctccaaaagtcttacaatgaaaacaacagtcctgccagttgttctttccagaggcaaatacttttcattctcttagtttttccttccgttagttaccttcatgggtttttccaaattattgtttttactattcacccatctgcctcagtctgggccaaatctattgcccaatcttcaattggttgcgacttttttgtctcttcccgattctggcattccagagggtcaataggttccttctccacgtgcttttgagggaaatgccccccccccaaaaaacttttcacaccaccttgaacagactctaaacttaggcactacagttactaagcagcctttggattctttgtttttgaagttagatcttttcagctattagtggaaaatgtgcctcactctactccaggattaccaatagaaatgaaaggacagaaatggcattagtgtttagagaagattatgtatatatggctgtgtgaacactgaaaattatgagggtcaacataaaatcagcattacaggtactaaaacataaatcctgatggctttcaccgttttcttaagagcaaaattgcaaaaagtgatattaacagtcatcctagacgaatatgagcaaatgatttgtttttccttaaaagagcctccaagtgtattgtgatcattttcacactgatcaaagagagcacccttctgtcaacaggtatctgcagttttcaggacctggcagaaattcttctatgttctgcctttaaaggtcaggtacaaaagcagagacagctgccaggcccctctgcccagagctaagtgtctgggaccatgagtgggaaggacaggcttgagcctccttggtcctccagacagcatggggcgctacttgccccttctgcagctgcgcgcggcaaagctgtggcctggccgtggcctcctgccccatgcaacagttggtggacagaccgtacctggcacacggcgccttgtgcactttccaacattttgatgccaaccgtcgctagtcactgagccctgacatttgatctctggccttgaccgcagatttcggaaacttctggcagcccagtgtctactggaaggcccaagccgcttgccagaaagctgcgccccgcccaaaagcactgggttctgcagtccaggcccttcctcagctcccaggtccaggagaactgcaaggtcacctacttccacaggaagcactgggtccgcatccggcccctccgcaccactcctcccagctgggactacacccgcatctgcatccagagagagatggtccccgcccgcatccgcgtcctgagagagatggtccccgaggcctggaggtgctttcccaacaggctgccgctgctgagcaacatcaggcctgatttctccaaggctcccctggcctacgtgaagcggtggctttggaccgcccgccacccccacagcctgtccgcagcctggtgaccgtgaaaatcgccccgccagagagcagaggaagcccgacgcccaggccatctgccttcaggtctgtgatgagaaacggagtggcctgctccgttgtgcccaggtctaggccgctgagcagagccctcactcccaggcagagttgtctgaatccttcctg

SEQ ID NO: 2256 - DNA, 2147 bp, Homo sapiens
ttttgctatacatctgcatttattatgagcagcaggtgggacacttccagcaacagtaaaaaaaagtaatttacaaaagcaggtttcagtgaagccatctggttgttacccttgggtgctcacacgtagatgccaacccagagcagcaggaagaggactccaaagcccatgaagagtgaggccactaaggagatgaggagctctttatagatatcacgagtgtacttggtagaggtgacctcgtaaacgaagaaccaggcggtgaagaacatgccaatggctccaaagcatccaggctcaaggaaaaacatggcctgctattgcagaataccagcgtgcattgcaggagaacgtcgctatggaacctgcatctaccagggaagactctgggcattctgctgctgagcttgcagaaaaagaaaaatgagctcaaaatttgctttgagagctacagggaattgctattactcctgtaccttctgctcaatttcctttcctcatcccaaataaatgccttgttacccaggcttgtctcaaactcctggactcaagtgatcctcccaccttggcctcccagagtgctggaattacaggcatgagccaacaggcccagccactgtgggcttttcataaatacactttgatatgctgagtttccttctattcctagttgagtgtttttatcatgaaagtatgctggatctatcaaatgctttttctgcatgaattgagatgatgatgcagtttttgtcccttattctgttaatgtggtattctctttactttgatgtgtttgaaattttccatgataaagtttgttttaagttacaacagtctgagaaacatagtcgggtgaagaaacagttaaccaaaccatatactgagcaaacttgcggccatttaaaataaaagtagatcagaagtaatttgttacattagagaattaaggggggaagtctacttatatttactaaacacatgatgtgcttgacactgtgctattccacttaaccactctgtgaggtaaatattgttattgctattttacaaacaagaaaatgaaaaaaaattgtgcccagatggccttccagagacagccccaataagacctctcagcccatatattcttctgcaatgtgaccttcccacttcctttaaagacatgcagtttatttctcaagccccttgaatctgggaggccctgtgacttctttaatagatacaatactatgccagttccaaagcccttaactgcctggcaacttctacttcctaactcttggaaccctgagcagccacataagtttaggctactctgctggataaagaggccatctcaaagagcactgagacatcagacaagtaaaaggaaaacaccatcttggatccagcctagggcagagtcttcagatggccccatctccaggtactatctgaccacaaccacatgaaagaccttaacgggagaagtgtccagctgaaccctgtcaatccacagaaacatgagagataataataagttattgtattaagccactacattttggatagacttgttaggcaataatagaaaatcagaacattgcccaagggatgaaaaggagctttaggacgggcgcagtggctcatgcctgtaatcccagcactttgggagggccaaggcgggcagatcacaaagtcaggagatcgagaccatcctggccaacacggtgaaaccccatctctactaaaaatacataaaaattagctgggcgtggtgttgggagcctgcagtcccagccactcaagaggctgaggcaggagaatggcatgaacccaagaggcagggcttgcagtgagccaagattacgacaccgcactccagcctgggcacagcgcagagcgcacagcaagactccgtctcaaaaaaaaagaaaaagaaaaggagctttaaaccttggtctttcttgaatccaaaattccatcttcttttcattataccatgctgattgaaaataactatgcttttaggccaggcacagtggctcagcctataatctcagcaccctggaaggccacggagggaggatcacttgaggccaggagttcgagcctggcccaacatggcaaaaccccgtctctaccaaaaatacaaaaattaaaaaaaa

SEQ ID NO: 2257 - DNA, 2260 bp, Homo sapiens
cgcttttttttttttttttttttttttgagatggagtctcgctttaccgcccaggctggagtgcagtggcactatctcagctcactgcaagctccacctcctgggttcacgccattctcctgcctcagcctccccagtagctgggactacaggcgctcaccaccacgcgcagctaattttttgtatttttagtagagacggggtttcaccgtgttagccaggatggtctcgatctcctgacctcgtgatccgcccgcctcggcctcccaaagtgctgggattacaggcgtgagccaccgcgcctggccaaaaaaagccatgctttttcatccttccagatcgtaacccaggtgttaagtttacatggaatgcctatgccccctcctcttcctagacgtagatatctcctctcccctaggaagtcttccttaactcatcctcagggagttatccacccttcttccagcacagggcacggcactaatggtgagctcttctcacatcttctgctgagactttgttctggggctgagtcccctccccaaccccctgactctcacacatagccccccatcagctgttttactccgtgccttactggatttggcctgtcctcaagaatggtaattatgaagagtggagaagtttggaccttgcctcctttaggggaaaggtaggacaggaatgtccctgcctggtactggtgggggaaatagtccgtatccccaactattaaggatttgtcccaggccaatggtgaacatgctgcattttatgtttggattgtgctgtaataagagcctcttccttccctcagaggatgtggctgggcttctatcctagagatggagtagaaggcacaactggtttgatagttactattttctgacctgtttgctgaagtgatttgcgaattgactttcctagggtgttgcctgagtcctttgaaatctccttctgacatctttcccttctgttgtgaaatatgttaagccacaggccaaactgctataagatcgaagtttgtttttttctcacctaataatagagaggtaatcagatggtctagggcagatttaactctacaaggttatcaggaactttgtttccttctgtcttattcagccattcccagtatgttttcttacccataagatcaaagcagactcatcagctccatatctgcattccactggggaaagagagagagaaaagagcagatttttaaaaaaagatatgactgagcattgctcagatcactgtggccacactttgctgaaagagatgctgggacatagaacctcttatctgggcagtcatgtgctgagttaaaactcagggattctgtgactacaagatgaaagacaatttggttgctgagatgcagttaatggcttctgttacatggagctcaatggacgtgcccaggaatgcttttggctgttattttgcagttaatacctcctgtaactaaagcatttgtttatgagttgacttgagagaagggctgatctcagagccgctttgagctaagttggattagtcacactaggaagttaattccacacctttcgtctaagtctcagtattgaggcctctccagttctcatgcaccctgatcttagggttagaatacttgaccctgatacctgcaccatgcttcatggttcctgagctctttctcctgtttcatttgagcctccaaactacatatttggtcatattgcctgcctaccccatgcctgctgcagaaatattcatccaggttaaccttgatatacacagagatggtcttggagaattgtgaatgtatgtactgtattgtcatcaaggatactgtcccttatttgaaggcatctaaagagaaactgttttcagatccaagtgctcagatctaaagcctctgcaacaagtcaggtggtggtcatgtttcccttctagttttggctgacaggaagctcagttcagtaccataactacagaacctgtcatctgtattttttgttctcaccccgtttttgttattttgtttctggttttttatattgaggtatgttttagatatagtttacaaaaataaaacgcacagatcttaaaaaaaaaaaaaaaaaaaaaaaaaaaaaaaaaaaaaaaaaaaaaaaaaaaaaaaaaaaaaaaaaaaaaaaaaaaaaaaaaaaaaaaaaaaaaaaaaaaaaaaaaaaaaaaaaaaaaaaaaaaaaaaaaaaaaaaaaaaaaaaaaaaaaaaaaaaaaaaaaaaaaa

SEQ ID NO: 2258 - DNA, 2055 bp, Homo sapiens
acaaaagataggaagaaccttaaaaatatagatgccttttatgcagtgataaaatgtctagatatttatactgtggtgattattaggaatatgtgcaaagattggctattaggatgttcattacagtgttgtttaataattataaaaggacagaaagcaatgtggactcaaaaataggaaaagaatttaaataaatcctagtgtacccgttatacatgaaattatggaaatatgaccctgagcatggaaatatgtacatgagaatgtctaaaagctagttcattttgaaaaacaaaataatgtcacctcatattatttatagtatataaagatgattttaagagtggcagtgtctgggattataggtgattgtatttcttcccttttgcacatctatgttctctcatttgtattgtgtggggagaagtgactttttttataaaaagaaaaaggtatatgcatcccagcagagaagcactggctccacccagtacctgcctcctcatgccaccctctcaagccaaaagccgggggaagcccaggcaccttgaccatgaccgcccgagactcacacttcttctttctcatcagggaaggaaagcccccctgtaagcgatactccagatgagggcgatgagcccatgccgatccccgaggacctctccaccacctcgggaggacagcaaagctccaagagtgacagagtcgtgggtaagtgggtcaccagcggcctctgtgcctgtgaaacctttatctctttgtatttttccaagacagtgatgaagggatgcaagtcattttatccattgtgttccctcaactggcatattaaagaaatatggcacaaagatcagcaggatgggggtcctctggtgtgtgggaggatggacactcacaggccagcatggccgtgagagccacacaccccgcaaaatgtccaagttgaggagcaatcctgcccagggacgcgtctctgtcactgtcctctgtcctcactgcacttgcaggaatatcaaatgttatggattgtagatcgtgaaaattacacacttacgtgttttggcaacagtgcttttcagtgtttggggttagaacaagccacatctggccattttatgttatccctctaatctctagttcttaaatttcagatttaactgaaaatagaaagtttcataaatggtaatttttaaatgttagaaaaaaatcaaagcacacatttacataccttttccataaaaaagtgtgtgtgaaaccatctgcaactccactggttaacttacacatgcgacagtttgtgtttggaaaacttcacccaccctctttatttcaagaaaccaaagacggagagaagttcagtgaattaaccaaggtgaaatgacagagtcagaattgaactgaatttctgactgaaaaactagttctcgctccattataccatgttctaatgagctaatgagtcaacagttccctggaatacctgttttcttctttaaaaagagaaagagctgtgatactgagagctacctattggcataaaagaatatgaaggacatacaggtaaaatgaggtagactggatcaatgtgggtcagctacataagcccccatagccaaggagggaacatgtatgtaaaattctcaggcttatgagaatcacaactgtatgtctataggacatcctaatgcaataatgggaaaatgtgataactgaattttatctacatgtatagaaaacatattttgggccgggcatggtggctcaagcttgtaatcccagcactttgggaggccgaggctggcggatcacaaggtcaggaaatcgagaccatcctggctaacacggtgaaaccctgtctctactaaaaatacaaaaaattagccgggcgtagtggtgggcgcctgtagtcccagctactcgggaggctgaggcaggagaatggcgtgaacccggcaggcggagcttgcagtgagccgagattgcgccactgcactccagcctggatgacagagccagactccatctcaaaaaaaaaaaaaaaaaaaaaaaaaaaaa

SEQ ID NO: 2259 - DNA, 2270 bp, Homo sapiens
ttttttttttgaactttattcagaagcagttatcaataaattccataaaataatgtcattggtatttaaaaatgaatattaatataatgaaatggtttgcctttttgtaggcataataagccaaatacttttttacccaaaataatttttagagaaaatgatgtaatgaaaaattgtaccatgaattaggagcatagttttttccatttaaacgtcaccattacttaaaagatgattgattattgctataccaaatcagatgaactctgttcatcacttttcttctctgtccccaaacaatttggttcattcagactgaaatgtttgtgtcttcaacttattagaatggaagataatgcagatatttctgtgggaaataaaataactaattttgaggtaccaaatagtgcaattgggtaaaacagggtttattcagttgcatctgtctccagtgttgtattgacagctctgggtctttttttgggccagcccttttttgacattgcttccagcagtggaaaatgggcatttgatggcaataggccaaaattattgtgtccagagagtacactttttcaaaatgctcacctactggaagtgtgaattacttgacaatgtatggcttagttgtgttcatgttttgtctacagtagaggtctaatccacaggttacacctatgtttgatatgatataagttctctttgcgtaggccactgggtttctcatgcagtaagctttataaaaactcatttgcactggactgtcatctcattcttgtacaacgtagaattacttgtttacatccaacaaatggttagctagggaaaacagtgcaaactgagtgttagtagtcattttggtccaactgcatgtcaacccttccatttcaatcccagttagaaatgaaaataattactttgaaacttggctttaagagcacatttatcgtacgtcacagtgtatggtgaatatattattaaataatgtggtacttcgctcatcaggcataatgtctaaaatctaatatacataattccattaagtggttgaaggaagcaaataatggaattgtcaattggtcatctggctgtaaggtttgcccttgaactaaaaatgttgtttggggcaagggccagaaatgtggagacatggtttttgttacgcattcttgtattatatgtgactaaatttacaaacaagatacatgtgtaattaaagacccttatggaactggaagacgtcttgtagtgctacattgggtgaaaccgttggtccatttttgtctgtttctatgaagataaaataattgggggccatctagaaatagaaaggcagtgggaagacagattctacggcactgctttcatttaattgggctttaggcactccattcgaatgcagaacctcacctctagttgagaccaagaattggcaaatttgcatgagctcctggaaagagttgctgactttgtatctaagacctgccagggaataccaagagttgtttctacagactttttttttttttttgtatgggagaagatactgtggcaaccaggaaggaatggaaaaaaaattcttttctctacagcaaattaatgtgaggaagctcctccaatcctctggctatttaaggttcaaaatcaagtgcctagggaaaattccaatggatgattttctgggagctatcttgtctaccttgaggttcctgaacaatgaattcccattaatgagcagtcttcagtattaaaaccactgtcttgtcacctcattttgcattactgtcttccgtggatgtttcagttacaactgtaatgttatttatagaacaacattaatccattaaagctaacctatttttcaatatttatgataatctatgtacatatattgtctgtccatatgtatttgtaaataggttgtatataatgtcaggtttgggtcttgggttcaagtgtatatattcctgtaagtttcttaactgcattttgatgaattcacattatgtaactataagaattgtcccaaaagtacctgtacagaaaattgaatattgaaaaattgacaaattgtgtacaaacactaaaaaaaacttgtttaaattgtatttgcaataaacaacatcaaattttttcatgaaatcttggtacaaattcagatctcttatttaaaatttaaataaggaatacattttcaaaatgcagtaatcaaaatgtgatctagtgtaatgaaataaaatgtgatctagtgtaatggaagacctttgaga

SEQ ID NO: 2260 - DNA, 1321 bp, Homo sapiens
gtgtgctggttcaaggtgcaacatacagaatattgaattaagaaaagagggaacggggaagggaagggaaacctcttgaggtccaaagttgcaaacaaaaaatggtaaaagatttcctcacgcaagaggcatttttgcaaataccatgcaaaacaggcagctggtgtgccttaagagaatccctataaataacagaaaagacactccaagcattcctgtacgtggactcagagcacagagaaaagaaactaaaatgccttttggcatttcaagatatttggcactcttgtgattacatttttttacagtccattaaagagaataaactgacataatattagagaaataaacaggctgctcacacaacagactgcaaggggaagttagaaaaagctcaagcatttttttctttgtttttcgtgtgtgtgtgtgtgtgtgtgtgtgtgtgtgtgtgtgtgtgtttttctgacataaaaaatgtgtccatttgcattaacttgggcagatagcttgcagcaacaaagaaacacacgctttacaactcattttaaaataaaatcttttctatgtatcattccttagaaaagttctcttcttgttttaaacacattcctgataacttctaaagatgaccaaaataaaacagaatatctacagagatcattttctgaattttttgtacatccaaggataacaacataaaaaaaataaaactggacagcatttcacatccaagtgcacagaaccatttttgcaagattaaataatgtaaacattgggaacagccaaatcagcgaagaatgccaacacctcaaaacacctggtgttgccgcttcattaagtggttcaaaatccagatctataattgcgcaatattcaccgtatataaaaagaaatggatattaattttgacaaatagctgcaactgagacttctttttatttctttatatgtgtatatagtgaatttttattatttttaaaattttatttatttttttatttttatttttgcagaggagcccagagccttctcctcctcctcctcctcctctcgcctcatctgtctcccggcctgataccagatacaggttgttgatttcatcgtgggtagcaagctagtaataaatttcaaagtgctttctcttttcatgctttttgccaataactgttaccgccgttcttattctctcccttaactcattgtctttgggggagttagacaccaggaggtgccttgtcggtcatatttttcagcacgtcatcaatcctatcatcttcaataacaacccgcttgctccggccgatctggcccagcttgg

SEQ ID NO: 2261 - DNA, 1654 bp, Homo sapiens
atcaaacactgttatgcacataatgcagcactgtgatctaatttaaataatacttttttattatttatactactatatataatatacatcaacacttttgctatataacctaagtgataaccctcttttagttacctgccaaactctggacttggtttatattgcagttaacacagttacaaagctgtaatggtgtctttttttcctttgtaacggaatgtgtaaatcaaagtatatacattgtgtggtgttcctgtttctggagtttcatgaggatttacacatggcattcagtgttctgtatagatctgcctacctttgtgaattcatctgttaacccctcttcctttgagagagcaccggcgatggtggttaactccttgtgttttctctctctcctactggttattcttgaattaagcacagactcgtcagctcggttgctttatcatgaataatgtgtgtgaccttgcagttcttccacagttcagcaaacaagtgctagcttcactgaccaaaaattaaggaaggaaaacacagtttttaaaacgatccatcttttaacagccgaaaccgatgtgtctatggtgctgcaccttgctgttgtacttctgaaatcagacgtgtgtgaacgatcatttctgacttaaccgtgagatgctcacgagtacccttcctgttgttttgttagcattgaaatcgagactatttatttggaatatatacaacagtgtttttccactgtatttcatttgcaaaagttgagaactgctttctctaccttttgcaaaataattgatattccatattggattctcaaagacttcgatatggtgaacctattaaacctagaaattgtattcatcctttcatgactgtggcctgagttccccagcccctctcctccttttttttagatgagatttagcacactctcagttatttaaacatgcaacatttcttgagtatgtatgttgaggccatctgagctcatagctgattcagtaaccagtttcatgctgtgtcattcacactcactacttaatactgccatggtgaaaatgtggaggaaaaatgtatccatgtgtgtctgggaagcatatacacttgtacattttttaatactctgattctgtaacatttctgagttttgttttgttttacagaaaaaaaaaaaaaagtgataaagcaatcagaagaccaagaggtttactattgatgcttagggtcgtctgaccttggctggccaatagacctacacggccaaattaatttacgagagtaataatttttcaaaagccaattttttttctgtattttctgtatgaaactgccaatatcatgaatagaaagggagaaccataaaggagaaagaacgtgatgttctgttatgttcatgtaaacctaaagaaacagtgtggaggcaggcgcgatcagccgaactctagggacttggtgttgcttggaaggcatccatacctgcattttgcattcttcgtatgtaatcatattgccaaagacaaactatttcatcatttattgtaaataacacttttccccagacctaccataaagtttctgtgatgtattgtcttccagttgcaataaaaattactgagttgcatcaaaaaaaaaaaaaaaaaaaaaaaaaaaa

SEQ ID NO: 2262 - DNA, 2286 bp, Homo sapiens
gaattccacctggttcacaaaaaggattctggcttttggcgagattttggctttggaatgacttgtcagtatcgttcagatttcctgaccattggtggatttgacatggaagtgaaaggttggggtggagaagatgttcatctttatcgaaaatacttacatggtgacctcattgtgattcggactccggttcctggtcttttccacctctggcatgaaaagcgctgtgctgatgagctgacccccgagcagtaccgcatgtgcatccagtctaaagccatgaatgaggcctctcactcccacctgggaatgctggtcttcagggaggaaatagagacgcatcttcataaacaggcatacaggacaaacagtgaagctgttggttgaaatcataattaatgcgttactgtatgaaccacaaaacagcactatttatttagccttacttctacttccagatgcagtgcctcttttggagaagacatgtttatttttcatgttctttctgacattactttagcaattcaacttgatgtgagaagaaaaaacaaatgtttcaacacaaaatctctgttttgtgagaatactgcactatggaataattgacaaattgaaatctcatatttgtcccaaaagttgttttgagttagttctacctggtgcccatgttctgattgtgtgtgggattgcatggtgtcctgattgcatctaggtggagcggatggaatgtgctgggccactgttgggtggagagcagcacattcttacagaggagatggagcgttatgagcatagtatgtggataggtatcttcacctgcccgcccctgagtcagcctccttgacttgatagcttgaagaatccttttccactgaaatagaggataattaattgacacatctgaaatccccaatcaatcaatcaagagaaaggtagaactaaaaactccttaacttactgttgcttacacccctgaaagtctgtttttaagcaaatgggtaatagtagaaaataggttagaatctatggcttgattaaaaatatgttattacattatcatgttcaggattaggattagtagtcagttgctgtaaactattttgaacaaacagaaaagaacacggaaacatttttaacagagcatttaattatgttggaatacaggatcctagctctgtctgggaacattagcttatgtgagccagctctatcagggtcttcccatggtggttcagaatagatgagcatagcatggttttgtttgtttttgctttcaattttctaatttggcatggatccatatgtatttactatcctttttctaatatattaatatatgctacatttgtatttgcattactataatactttgagttgaaaaagagtttcattgtggagagaaaaagcaaatggtatgccacaagatcactctgatttgagaaaagggaggaggggaagatagtctgaatggaaatctgaaatacggaatgttttagagaaatatgtcacttgcatatagaatgttttaattgaggtataaattaatgagacaaagtgaaaaagaaattatattcagataggactgcactacattatttgtcacacatggatctgttaccatcaggtcaattcctagtatgcataaattttttaacccttttaaaagagacctatgttgaaaacccctgaaaattcactgaagaaaaatcattactctttttctcagtaaatcatatcatctgaaatattacaaatttcaaatttctaggtgctatattaattcaatattacaataactcttacctaattattcttacaagttttaagttgtggtagtttagtgatttttttaaaagatgtgtgaaatgttctctgcaaaataattcaggccactgtctccttttatatattattataattatttattatgaagaccagtgaattacgatatttaaagtgagagaacttaattatttgcaaaggtaagttacagcttgttttttgagagaatcaaatgagtttacttttgttcctgttgtttttaactagctttaagtttaaagatggaagctaagcaatggaaatgctatacgtttttgacatttattaaatggtaccaataaagtattttattaccaaaaaaaaaaaaaaaaaaaaaaaaaaaaaaaaaaaaaaaaaaaaaaaaaaaaaaaaaaaaaaaaaaaaaaaaaaaaaaaaaaaaaaaaaaaaaaaaaaaaaaaaaaaaaaaaaaaaaaaaaaaaaaaaaaaaaaaaaaaaaaaaaaaaa

SEQ ID NO: 2263 - DNA, 1222 bp, Homo sapiens
  misc_feature (739)..(739): n is a, c, g, or t
ttttgagggtgttcactcaacttggatctgtgctgaaaaattgtgacatttcagtacatctggtagagggtacagcttttatcttgcacatgaattttttgatgttcttcctgtgcataaatttcagaaaacaccacagggatggcgagaagtatttgttgacattgatccacaggtttctgataaactgaggtttgttttggcaccttctgccaccccagcagaagccttcatacaacatgacgaaacaagggatcatgttgaagtgtgtcctgatgctggtgttatcatcgaggaactttctcaacgcattgcattaactggaggtgctgcactggttgctgattatggtcatgatggaacaaagacagataccttcagagggttttgcgaccacaagcttcatgatgtcttaattgccccaggaacagcagatctaacagctgatgtggacttcagttatttgcgaagaatggcacagggaaaagtagcctctctgggcccaataaaacaacacacatttttaaaaaatatgggtattgatgtccggctgaaggttcttttagataaatcaaatgagccatcagtgaggcagcagttacttcaaggatatgatatgttaatgaatccaaagaagatgggagagagatttaacttttttgccttgctacctcatcagagacttcaaggtggaagatatcagaggaatgcacgtcagtcaaaaccctttgcatccgtngtagctgggtttagtgaacttgcttggcagtgatatttcagcttggacattttacccttcagtcggcccaagaaatcaaaataaaggaaacacatttcatatactgcaggtaacaaaagtcaaagtattttatcttttcacagcaagaacagtccatgttgtatataatacaaccaacattatagaacttttagggttgtgactggctttggtgcaaatgtgtgctcaagctaataagttattgtgaaactgagtttcctttaacttacaaagctagttgccatatttctattttattttaaaaagtaaacatgcggctgggtgtggtggctcatgcctgtaatcccagcactttggaggctgaggtgggcatatcacctgaggtcagcagttaaagaccagcctgaccaaaatggagaaaccccatctctactaaaaatacaaaactagccgggtatggtggtacatgcctgtaatcccagc

SEQ ID NO: 2264 - DNA, 556 bp, Homo sapiens
ggccacgaggggaaattgacgaacacgtgacgcggtcgggcggaccactgcagactgagcggtggaccgaattgggaccgctggcttataagcgatcatgtttctccagtattacctcaacgagcagggagatcgagtctatacgctgaagaaatttgacccgatgggacaacagacctgctcagcccatcctgctcggttctccccagatgacaaatactctcgacaccgaatcaccatcaagaaacgcttcaaggtgctcatgacccagcaaccgcgccctgtcctctgagggtcccttaaactgatgtcttttctgccacctgttacccctcggagactccgtaaccaaactcttcggactgtgagccctgatgcctttttgccagccatactctttggcatccagtctctcgtggcgattgattatgcttgtgtgaggcaatcatggtggcatcacccataaagggaacacatttgacttttttttctcatattttaaattactacaagattattaaagataaaatgattttgaaaaacaaaaaaaaaaaaa

SEQ ID NO: 2265 - DNA, 999 bp, Homo sapiens
gggcgaggctgcaccagcgcctggcaccatgaggacgcctgggcctctgcccgtgctgctgctgctcctggcgggagcccccgccgcgcggcccactcccccgacctgctactcccgcatgcgggccctgagccaggagatcacccgcgacttcaacctcctgcaggtctcggagccctcggagccatgtgtgagatacctgcccaggctgtacctggacatacacaattactgtgtgctggacaagctgcgggactttgtggcctcgcccccgtgttggaaagtggcccaggtagattccttgaaggacaaagcacggaagctgtacaccatcatgaactcgttctgcaggagagatttggtattcctgttggatgactgcaatgccttggaatacccaatcccagtgactacggtcctgccagatcgtcagcgctaagggaactgagaccagagaaagaacccaagagaactaaagttatgtcagctacccagacttaatgggccagagccatgaccctcacaggtcttgtgttagttgtatctgaaactgttatgtatctctctaccttctggaaaacagggctggtattcctacccaggaacctcctttgagcatagagttagcaaccatgcttctcattcccttgactcatgtcttgccaggatggttagatacacagcatgttgatttggtcactaaaaagaagaaaaggactaacaagcttcacttttatgaacaactattttgagaacatgcacaatagtatgtttttattactggtttaatggagtaatggtacttttattctttcttgatagaaacctgcttacatttaaccaagcttctattatgcctttttctaacacagactttcttcactgtctttcatttaaaaagaaattaatgctcttaagatatatattttacgtagtgctgacaggacccactctttcattgaaaggtgatgaaaatcaaataaagaatctcttcacatg

SEQ ID NO: 2266 - DNA, 2444 bp, Homo sapiens
gcaagatggcggcgcaacagcgggactgcgggggtgctgcgcagctggcggggccggcggcggaggctgaccccctaggacgcttcacgtgtcccgtgtgcttagaggtgtacgagaagccggtacaggtgccctgcggacacgtcttttgctctgcatgcctgcaggaatgtctgaagccgaagaagcctgtctgtggggtgtgtcgcagcgctctggcacctggcgtccgagccgtggagctcgagcggcagatcgagagcacagagacttcttgccatggctgccgtaagaatttcttcctgtccaagatccggtcccacgtggctacttgttccaaataccagaattacatcatggaaggtgtgaaggccaccattaaggatgcatctcttcagccaaggaatgttccaaaccgttacacctttccttgtccttactgtcctgagaagaactttgatcaggaaggacttgtggaacactgcaaattattccatagcacggataccaaatctgtggtttgtccgatatgtgcctcgatgccctggggagaccccaactaccgcagcgccaacttcagagagcacatccagcgccggcaccggttttcttatgacacttttgtggattatgatgttgatgaagaggacatgatgaatcaggtgttgcagcgctccatcatcgaccagtgagcagagtccgtgcttgctatctgtctcatgttacagagcttccattacatattaaacgtgaaatctatgactcctgtaccttacctgttcaacagacctgaaaatgagccatggcattgggacagggtcacttctgacaggggaagtgggtccccaggtcagcccttctcttccctttgggctcttgccaaagctgtcttcccctactgttaaccttgtttgtcacacggtcgagttcgtattggttctcggctacttcctggagcttctgccgcctcctgtggaagataatctagcttctccacctcttgtttcacactcattcctcccatccagtgtttgtctctcgggtccttcaagccagccaggaccttttctgggtcatgaatagcacaatgaagcaagtgtctcctttccttgtccccaaggtgtgcagactttggcagccgtgcacctgaccagagctgaagctcccgctgggctgtggggttgccagaagctggggttgccatcccggggtacatgtcaccagtcctcttggggttttgtaccatctgatgctggaagttttgattagtgatattttctactactacatatttagagttcactggttcagtcttaaatgcctgcatggtgcctttttaggataaggtataaccatacatttttggtggaagtgtttctgggttagggaagttaaagtctgtttatccgtaagtggggaggagggtcagctaagagaagtgggagggccagagctttttggttctgatttacaaattaatgaagtagtttcaaacaacgcggtcatgtttacctctccatttgggagcctgcctacattcttgttctagaagcacaaaaaatcctcagatgaattagaagaaagaggtttggggactcagcggatactagttcttttaccttctgcttggtaacttagattaaactgagcattgtttttctgtcacaaatgttttccttatgacactggtttcgacatgtaaaatgtgtttgaaaacctgctttgtagatgcagagagaagctataggaaacccagtaccacccctggtctgttctgacgagacatcgttcataaggcacagcacatcgcaagatgaacagttgttaataaaagctgttgctggaaacttgctttaggaacagctcaagaaccttggagttcatatttcacaaatattaataaatataagtccaagagctgtcagcctaatctgtaggagcagaacctctgattgaccaaaaggcatatgggtttaggttggttttttgatgtcatatgtctctgatggggctgcaagtgctacctcgcgcttgtacactgctgctgtggggctccgcgcctgccggtgaagagctgcagatgccgagaagccagcaaacacagggcccactggaaaaaaatagttttttcattagtatttctcgggaggacccaaaagttaaggtcagcttgttcactgtaatttctggaagaagttcactcagaccttcctgaattcagatcatctcagaagtctggagggaaatctggcgaaaccttcgtttgagggactgatgtgagtgtatgtccacctcactggtggcaccgagaaacttacttccttgtattaagtgcacttcttgtatttctaataagatgactttccagaaagtgagatttgttatgttctggcttttaaaaggtaaaatataaataaatttcataacttaaaaaaaaaaaaaaa

SEQ ID NO: 2267 - DNA, 1376 bp, Homo sapiens
agaaggcgtgggaggaagatggactcggtggagaagggggccgccacctccgtctccaacccgcgggggcgaccgtcccggggccggccgccgaagctgcagcgcaactctcgcggcggccagggccgaggtgtggagaagcccccgcacctggcagccctaattctggcccggggaggcagcaaaggcatccccctgaagaacattaagcacctggcgggggtcccgctcattggctgggtcctgcgtgcggccctggattcaggggccttccagagtgtatgggtttcgacagaccatgatgaaattgagaatgtggccaaacaatttggtgcacaagttcatcgaagaagttctgaagtttcaaaagacagctctacctcactagatgccatcatagaatttcttaattatcataatgaggttgacattgtaggaaatattcaagctacttctccatgtttacatcctactgatcttcaaaaagttgcagaaatgattcgagaagaaggatatgattctgttttctctgttgtgagacgccatcagtttcgatggagtgaaattcagaaaggagttcgtgaagtgaccgaacctctgaatttaaatccagctaaacggcctcgtcgacaagactgggatggagaattatatgaaaatggctcattttattttgctaaaagacatttgatagagatgggttacttgcagggtggaaaaatggcatactacgaaatgcgagctgaacatagtgtggatatagatgtggatattgattggcctattgcagagcaaagagtattaagatatggctattttggcaaagagaagcttaaggaaataaaacttttggtttgcaatattgatggatgtctcaccaatggccacatttatgtatcaggagaccaaaaagaaataatatcttatgatgtaaaagatgctattgggataagtttattaaagaaaagtggtattgaggtgaggctaatctcagaaagggcctgttcaaagcagacgctgtcttctttaaaactggattgcaaaatggaagtcagtgtatcagacaagctagcagttgtagatgaatggagaaaagaaatgggcctgtgctggaaagaagtggcatatcttggaaatgaagtgtctgatgaagagtgcttgaagagagtgggcctaagtggcgctcctgctgatgcctgttctactgcccagaaggctgttggatacatttgcaaatgtaatggtggccgtggtgccatccgagaatttgcagagcacatttgcctactaatggaaaaggttaataattcatgccaaaaatagaaattagcgtaatattgagaaaaaaatgatacagccttcttcagccagtttgc

SEQ ID NO: 2268 - DNA, 3379 bp, Homo sapiens
ggccggataggtgcggagcttcctgaacgaggcaggaggggtgcgaggttcaggggcagggcccgggcagccgaagtcgttagggaggcggttacctgacggtgggcggmggacatctcgcagcagggtcgagggctgtgaaagcggtttagtgattgaagcgctacgtttgtgtgaggaattcttgtcgttgtcagcgcctgagaacttagttgggagcggacgtttacgtcgaatctctcgtttgggaccccattcttgaatgtgggaagaagggagaacgcatgtttgctcatctagagacagccgtattaataacgataggatacaaaccatcaccccaccaagtgatagcagctgttaacctgtgggcgggttacgtgccggtcactgttccaagcccctcacatatcgcgtcactgaatctttatagggacccagaactccatttgacagatgaggaaacggcgaggcagacaggtgacctgacttccccacaatcgctgcaggacaggaagaaagtaaactccagagcccgtgctcttagctactaagctgtactgctcttcattttgctgatgttctaatcatgtcagataaagatgatattgagactccactgctaactgaagcagcccccatccttgaagatggaaactgtgagccagccaagaattctgagtctgttgaccaaggtgccaaaccagagagtaaatcagaacctgtagtttccactcggaaaagaccagagaccaaaccttccagtgatcttgagacttcaaaagttctctctattcaggataatgtttccaaagatgtaccccagaccagatggggttattgggggagctggggcaagtccatactctcctcagcctcggctacagtagctacagtaggacaaggcatttcaaatgtcatcgagaaggcagagacttcccttggaatccctagtcccagtgaaatttcaactgaagtcaagtatgtagcaggagagacaaatgccaaagagaatgaaaactcctccccagtggctggggcatttggtgtattctctaccatctctactgctgttcagagcacaggaaagagtgttataagtgggggtttggatgccttagaattcattggaaaaaagacaatggatgtgatagcagaaggggatcctggatttaaaagaaccaagggtctgatgaaccgaaatgctacactatctcaggttttacgagaggcgaaggagaaagaagagatacggacctccaatgaggttaccgtggaaacagacaagaaaactcattatgggctactctttgatgaatttcaaggcctttcacatctagaagctctggagatgctttcccaagaaagtgaaataaaggtgaaatctatccttaattctctgagtggagaagaattagagactctaaaagttgaattagagcaactcaaagaaacattttctctagcagaattttgtgaagaagaggaagaagagaaaaaaggggatgaagattttaccaaggacataacagagctgttttcccagctgcacgtttcctccaaaccagagaaacttgccagggcaagaaataccgcccacgaatggatcaggaagtctctgaccaagccattagcagagaatgaagaaggagaaaaacagtcggaagcagaaaatactgagcaagtcaacaaaaattcaatagaggatatccatgcgtttgcaatccggagcctggctgaactgactgcctgctcaattgaactattccacaaaacagctgcattggttctgcatggcaggaagcaggaagtgacagccatagaaaggagccaaactctttcccagatgacaattgtgttgtgtaaagagttgtcctctctgtctaaagagttcactacctgcctaacaactgctggggtcaaagaaatggcagatgtccttaacccattaatcactgcagtatttctagaggcatcaaacagtgcctcctacatccaggacgcctttcagctactcttacctgtgctagagatctctctcattgagaacaagattgaatcacacagacatgagctgcagggccagaaacctttgttagaacattgaagaatggagacgttttgacctgggacttgtgacgcccaaggaatgccaccttattctggctactcctgcagaaatgaaggagtggggttattttagtatataaaaattcaggcaggagagatggtttaaagaggaagattgttgccttcagtgtttgattgaagtattcaggttctcacagtattctttccagttgttgtaattcataaattatttgaaaagaaacttttgtagaaagtccaagaataataactctagataaagattagtgggacactcaggcaaaaatgttggtctttctttgacatgttgcaaaatgttatcaattttgtcatggatataatttgcagcccatggatataactggttgataagccagagaaaaataatttagtgttctaaaattcatggcatgtgtggtttattaatgccatgtactttctcctttctggaataaaatctatggctttaagaaaactgagcatatgtaaactctgtcatcattaccctttatcacatgaattcttggaaatagaaagtttcatctgcttttttaaattcttagtagatatttggcattgaggagaaacttgtagactattatagccatgtgaattaactgtagcaaagtgcctttttcttcaaattgctccccctccccaggatgacacacttcatgtcatagctgaaccctactctactggattcaaggccagtaaatgcaatttagagaagcagttttatgtttgcagatattctgagtctcttcaggatgtgtttcgtgtctaccatatatgcaggataaattctttaacagcaaactccaaaggaatgttgaagctgttttagcaatgaggatttttttgtttgagtgttgaagtgggccatagtcctttagaaatgatgttcatttatgataggatttaacttctaaggcatagtttattttttcctctttcctttttgtttgttttaatgtattctttagcatgtttttgatataacttttatcctccagatcttaagctttcttttgctctcttcagcaatttaagagactattaagctgtcgtcttcctaaaagctattttggtatccactctttttaaaaaaattctccaactttgtggttttttaatgattaaggtaatttgttagctctgcccctcatcttctaaaacctttgtaataaaatgtattaatcatgttatttgatcctttcatttacttttgtaaacacgagccctaatatcttacttagaccaaaaaaaa

SEQ ID NO: 2269 - DNA, 3835 bp, Homo sapiens
gcataagtttttttttcttaaaaaaacggcatctgcttaaagggatttatgactaaaattgcttatttttctacagagttgtctgctggttctcagcttgaagaagattctgaagtccttattgatcctttttcttggcgttaccattttttgaagcaaagttaacctagctttctagtttgagctttctttttggccgtctttaaaaaaaattttttttttaatctataaaatagacaagagctagttctacaatgtccaagtcattccagcagtcatctctcagtagggactcacagggtcatgggcgtgacctgtctgcggcaggaataggccttcttgctgctgctacccagtctttaagtatgccagcatctcttggaaggatgaaccagggtactgcacgccttgctagtttaatgaatcttggaatgagttcttcattgaatcaacaaggagctcatagtgcactgtcttctgctagtacttcttcccataatttgcagtctatatttaacattggaagtagaggtccactccctttatcttctcaacaccgtggagatgcagaccaggccagtaacattttggccagctttggtctgtctgctagagacttagatgaactgagtcgttatccagaggacaagattactcctgagaatttgccccaaatccttctacagcttaaaaggaggagaactgaagaaggccctaccttgagttatggtagagatggcagatctgctacacgggagccaccatacagagtacctagggatgattgggaagaaaaaaggcactttagaagagatagttttgatgatcgtggtcctagtctcaacccagtgcttgattatgaccatggaagtcgttctcaagaatctggttattatgacagaatggattatgaagatgacagattaagagatggagaaaggtgtagggatgattctttttttggtgagacctcgcataactatcataaatttgacagtgagtatgagagaatgggacgtggttctggccccttacaagagagatctctctttgagaaaaagagaggcgctccttcaagtagcaatattgtagacgttcattggactcttaccgaaagggttatccccatctgtgctctatatgtgattggccaggtcattctaataaggagtggagtcaacatatcaatggagcaagtcacagtcgtcgatgccagcttcttcttgaaatctacccagaatggaatcctgacaatgatacaggacacacaatgggtgatccattcatgttgcagcagtctacaaatccagcaccaggaattctgggacctccacctccctcatttcatcttgggggaccagcagttggaccagaggaatctgggtgctggaaatggaacctgcaaggacctagacacatgcagaaaggcagagtggaaacttagcagagttgttcacatcatgggtttttcaacggaggaaaaaactttgagataccagctattacagctggtagaaccatttggagtcatttcaaatcatctgattctaaataaaattaatgaggcatttattgaaatggcaaccacagaggatgctcaggccgcagtggattattacacaaccacaccagcgttagtatttggcaagccagtgagagttcatttatcccagaagtataaaagaataaagaaacctgaaggaaagccagatcagaagtttgatcaaaagcaagagcttggacgtgtgatacatctcagcaatttgccgcattctggctattctgatagtgctgttctcaagcttgctgagccttatgggaaaataaagaattacatattgatgaggatgaaaagtcaggcttttattgagatggagacaagagaagatgcaatggcaatggttgaccattgtttgaaaaaagccctttggtttcaggggagatgtgtgaaggttgacctgtctgagaaatgtaaaaaactggttctgaggattccaaacagaggcattgatttactgaaaaaagataaatcccgaaaaagatcttactctccagatggcaaagaatctccaagtgataagaaatccaaaactgatggttcccagaagactgagagttcaaccgaaggtaaagaacaagaagagaagtccggtgaagatggtgagaaagacacaaaggatgaccagacagagcaggaacctaatatgcttcttgaatctgaagatgagctacttgtagatgaagaagaagcagcagcactgctagaaagtggcagttcagtgggagacgagaccgatcttgctaatttaggtgatgtggcttctgatgggaaaaaggaaccatcagataaagctgtgaaaaaagatggaagtgcttcagcagcagcaaagaaaaagcttaaaaaggtggacaagatcgaggaacttgatcaagaaaacgaagcagcgttggaaaatggaattaaaaatgaggaaaacacagaaccaggtgctgaatcttctgagaacgctgatgatcccaacaaagatacaagtgaaaacgcagatggtcaaagtgatgagaacaaggacgactatacaatcccagatgagtatagaattggaccatatcagcccaatgttcctgttggtatagactatgtgatacctaaaacagggttttactgtaagctgtgttcactcttttatacaaatgaagaagttgcaaagaatactcattgcagcagccttcctcattatcagaaattaaagaaatttctgaataaattggcagaagaacgcagacagaagaaggaaacttaagatgtgcaaggagatttaatgatttcaaagaaaataatggttctttgtttttaatgttaaccttttttaaatacaatactgatagttagaagaaaactattgtactcttttgttttagtggagaaataatagatgtctgttcatgtgttaagtgttatagcaaaaaaaatacacatatggttaagttaatgaatagtttttgttttatcagaatggcaacagacagaagtactttgtagagattgacttcctaagctacttaagacaacttgcaccactaagaaaaaaatgtagaaccatttggaaaaatgaaatttagtagttccaagtttcaaagaaatgtcaacattttattccattcaataaagaacaaaaccaatagtgtttttattactttcatctgaaacattccatgttttaatctgagccttgcagactttcatttggagtttgaacccgttttggttgcatttcatttttggagaacttaattaacgtgagattggcaattgaaatgcaggtgcagttttctgttaatgtcatgctgttgtttaggtaataagaaatattaagtaattggctttagattttgtaatttttttccctgagttcctgctagatttcgtattctagtagtcaatgtattttcagtgaaatgcaaaaatattcccattatctttgaccagtattaatttttgagatcttactgcttgtcacttgaatcccgtgattgtcatacatctctggtataagcaacatttgatttttgaagtgtgtagaccatctcttcatattttcaagatgtaattttacatttctgcatttttaaaacagtttggccataatcctagatgcacgcttctaattcatgtacctgcacatgtgacctttgtgaacagaaatttgcatgtataatttgtgtttacttgtaactttctggttatatactgcttatatctgtggattcaagttactgaagtgaataccaataaaaagaaaaccctaggccatgttaaaaaaaaaaaaaaaaaaaa

SEQ ID NO: 2270 - DNA, 923 bp, Homo sapiens
cggacgcgtgggcggacgcgtgggcgagccaccgccgcctgccgcgcgttccagagctgggcgctgcagctgcactgccgatcgccgtgtttggtcgatagaatccccagtgtgcccagagagtgcgacccctcgcccggcccggcgagccccgggcgtgaaccgagctgagggaggatggcagcctctggggtggagaagagcagcaagaagaagaccgagaagaaacttgctgctcgggaagaagctaaattgttggcgggtttcatgggcgtcatgaataacatgcggaaacagaaaacgttgtgtgacgtgatcctcatggtccaggaaagaaagatacctgctcatcgtgttgttcttgctgcagccagtcatttttttaacttaatgttcacaactaacatgcttgaatcaaagtcctttgaagtagaactcaaagatgctgaacctgatattattgaacaactggtggaatttgcttatactgctagaatttccgtgaatagcaacaatgttcagtctttgctggatgcagcaaaccaatatcagattgaacctgtgaagaaaatgtgtgttgattttttgaaagaacaagttgatgcttcaaattgtcttggagaagcagaaaaagttgatcagagccttccagagtgtggtatgcttttcactgtgtgatgatccttagtggcacatgaatgaacgtccagatgtttgtgcagtagcccacccttatctgcaggatacgttccaagacccccagtgaatgcctgaaactgcagatagtactgaatcctatatatactgtgttttttatgatacatacatgcctatgatgaagtttaatttctaaattagacagtaaaagattaacaacaataataataaaatagaacaactttaaaaaaaaaaaaaaaaaaaaa

SEQ ID NO: 2271 - DNA, 4602 bp, Homo sapiens
atgaagattcagaaaaagctgactggctgcagcaggctgatgcttctgtgtctttctctggagctgctgttggaagctggggctgggaatattcactactcagtgccggaagagacagacaaaggttccttcgtaggcaacatcgccaaggacctagggctgcaaccccaggagctggcagatggcggagtccgcatcgtctccagaggtaggatgccgcttttcgctctgaatcctagaagtggcagcttgatcaccgcgcgcaggatagaccgggaggagctctgcgctcagagcatgccgtgtctcgtgagttttaatatccttgttgaggataaaatgaagctttttcctgttgaagtagaaataattgatattaatgacaacactccccaattccagttagaggaactggagtttaaaatgaatgaaataacgactccaggtaccagagtctcattgccttttgggcaagaccttgatgtgggtatgaactcactccagagctaccaactcagctctaaccctcatttctccctggatgtgcaacagggagccgatgggcctcaacatccagagatggtgctgcagagtcccttagacagagaagaagaagctgtccaccacctcatcctcacagcttctgatgggggtgaaccagtccgttcagggaccctcagaatttacattcaggtggtggatgcaaatgacaatcctccagcatttactcaggcacaataccatataaatgtccccgaaaacgtgccgctgggtactcagctgctcatggtaaatgccactgaccctgatgagggagccaatggggaagtaacgtactcctttcacaatgtagaccacagagtggcccaaatatttcgtttagattcttacacaggagaaatatcaaataaagaaccactagatttcgaagaatacaaaatgtattcaatggaagttcaagcccaggatggtgcggggctcatggctaaagttaaggtactgatcaaagttttggatgtaaatgataatgccccagaagtgaccatcacctctgtcaccactgcagttccagaaaactttcctcctgggaccataattgctcttatcagtgtgcatgaccaggactcaggagacaatggctacaccacatgtttcattcctggaaatttaccctttaaattggaaaagttagttgataattattaccgtttagtgactgaaagaacactggacagagaacttatctctgggtacaacatcacaataacagcaatagaccaaggaactccagctctatctactgaaactcacatttcactactagtgacagatatcaatgacaactccccagtcttccatcaggactcctactctgcctacattcccgaaaacaaccccagaggagcctccatcttctctgtgagggcccacgacttggacagcaatgagaatgcacaaatcacttactccctaatagaggacactatccagggggcacccctatctgcctacctctccatcaactccgacactggggtcctgtatgcgctgcgatccttcgactatgagcagttccgggacatgcaactgaaagtgatggcgcgggacagtggggatccgcccctcagcagcaacgtgtctctcagcctattcctgctggaccagaacgacaacgcgcccgagatcctgtaccccgccctccccacagatggttctaccggcgtggagctggcgcccctctccgcagagcccggctacctggtgaccaaggtggtggcggtggacagagactcgggccagaacgcctggctgtcctaccgcctgctcaaggccagcgagccgggactcttctcggtgggtctgcacacgggcgaggtgcgcacggcgcgagccctgctggacagagacgcgctcaagcagagtctcgtggtggccgtccaggaccacggccagcccccgctctccgccactgtcacgctcaccgtggccgtggccgacaggatctccgacatcctggccgacctgggcagcctcgagccctccgccaaacccaacgattcggacctcactctgtacctggtggtggcggcggccgcggtctcctgcgtcttcctggccttcgtcatcgtgctgctggcgcacaggctgcggcgctggcacaagtcacgtctgctacaggcttcgggaggcggcttagcgagcatgcccggttcgcactttgtgggcgtggacggggttcgggctttcctgcagacctattcccacgaggtctccctcactgcggactcgcggaagagccacctgattttcccccagcccaactatgcggacacactcatcagccaggagagctgtgagaaaaagggttttctatcagcaccccagtctttacttgaagacaaaaaggaaccattttctcagcaagccccgcccaacacggactggcgtttctctcaggcccagagacccggcaccagcggctcccaaaatggcgatgacaccggcacctggcccaacaaccagtttgacacagagatgctgcaagccatgatcttggcgtccgccagtgaagctgctgatgggagctccaccctgggagggggtgccggcaccatgggattgagcgcccgctacggaccccagttcaccctgcagcacgtgcccgactaccgccagaatgtctacatcccaggcagcaatgccacactgaccaacgcagctggcaagcgggatggcaaggccccagcaggtggcaatggcaacaagaagaagtcgggcaagaaggagaagaagtaacatggaggccaggccaagagccacagggcggcctctccccaaccagcccagcttctccttacctgcacccaggcctcagagtttcagggctaacccccagaatactggtaggggccaaggccatgctccccttgggaaacagaaacaagtgcccagtcagcacctaccccttcccccccagggggttgaatatgcaaaagcagttccgctgggaacccccatccaatcaactgctgtacccatgggggtagtggggttactgtagacaccaagaaccatttgccacaccccgtttagttacagctgaactcctccatcttccaaatcaatcaggcccatccatcccatgcctccctcctccccaccccactccaacagttcctctttcccgagtaaggtggttggggtgttgaagtaccaagtaacctacaagcctcctagttctgaaaagttggaagggcatcatgacctcttggcctctcctttgattctcaatcttcccccaaagcatggtttggtgccagccccttcacctccttccagagcccaagatcaatgctcaagttttggaggacatgatcaccatccccatggtactgatgcttgctggatttagggagggcattttgctaccaagcctcttcccaacgccctggggaccagtcttctgttttgtttttcattgtttgacgtttccactgcatgccttgacttcccccacctcctcctcaaacaagagactccactgcatgttccaagacagtatggggtggtaagataaggaagggaagtgtgtggatgtggatggtgggggcatggacaaagcttgacacatcaagttatcaaggccttggaggaggctctgtatgtcctcaggggactgacaacatcctccagattccagccataaaccaataactaggctggacccttcccactacataatagggctcagcccaggcagccagctttgggctgagctaacaggaccaatggattaaactggcatttcagtccaaggaagctcgaagcaggtttaggaccaggtccccttgagaggtcagaggggcctctgtgggtgctgggtactccagaggtgccactggtggaagggtcagcggagccccagcaggaagggtgggccagccaggccattcttagtccctgggttggggaggcagggagctagggcagggaccaaatgaacagaaagtctcagcccaggatggggcttcttcaacagggcccctgccctcctgaagcctcagtccttcaccttgccaggtgccgtttctcttccgtgaaggccactgcccaggtccccagtgcgccccctagtggccatagcctggttaaagttccccagtgcctccttgtgcatagaccttcttctcccacccccttctgcccctgggtccccggccatccagcggggctgccagagaaccccagacctgcccttacagtagtgtagcgccccctccctctttcggctggtgtagaatagccagtagtgtagtgcggtgtgcttttacgtgatggcgggtgggcagcgggcggcgggctccgcgcagccgtctgtccttgatctgcccgcggcggcccgtgttgtgttttgtgctgtgtccacgcgctaaggcgaccccctcccccgtactgacttctcctataagcgcttctcttcgcatagtcacgtagctcccaccccaccctcttcctgtgtctcacgcaagttttatactctaatatttatatggctttttttcttcgacaaaaaaataataaaacgtttcttctgaaaagctg

SEQ ID NO: 2272 - DNA, 1389 bp, Homo sapiens
atgtcaatagcaggagttgctgctcaggagatcagagtcccattaaaaactggatttctacataatggccgagccatggggaatatgaggaagacctactggagcagtcgcagtgagtttaaaaacaactttttaaatattgacccgataaccatggcctacagtctgaactcttctgctcaggagcgcctaataccacttgggcatgcttccaaatctgctccgatgaatggccactgctttgcagaaaatggtccatctcaaaagtccagcttgccccctcttcttattcccccaagtgaaaacttgggaccacatgaagaggatcaagttgtatgtggttttaagaaactcacagtgaatggggtttgtgcttccacccctccactgacacccataaaaaactccccttcccttttcccctgtgcccctctttgtgaacggggttctaggcctcttccaccgttgccaatctctgaagccctctctctggatgacacagactgtgaggtggaattcctaactagctcagatacagacttccttttagaagactctacactttctgatttcaaatatgatgttcctggcaggcgaagcttccgtgggtgtggacaaatcaactatgcatattttgataccccagctgtttctgcagcagatctcagctatgtgtctgaccaaaatggaggtgtcccagatccaaatcctcctccacctcagacccaccgaagattaagaaggtctcattcgggaccagctggctcctttaacaagccagccataaggatatccaactgttgtatacacagagcttctcctaactccgatgaagacaaacctgaggttccccccagagttcccatacctcctagaccagtaaagccagattatagaagatggtcagcagaagttacttcgagcacctatagtgatgaagacaggcctcccaaagtaccgccaagagaacctttgtcaccgagtaactcgcgcacaccgagtcccaaaagccttccgtcttacctcaatggggtcatgcccccgacacagagctttgcccctgatcccaagtatgtcagcagcaaagcactgcaaagacagaacagcgaaggatctgccagtaaggttccttgcattctgcccattattgaaaatgggaagaaggttagttcaacacattattacctactacctgaacgaccaccatacctggacaaatatgaaaaattttttagggaagcagaagaaacaaatggaggcgcccaaatccagccattacctgctgactgcggtatatcttcagccacagaaaagccagactcaaaaacaaaaatggatctgggtggccacgtgaagcgtaaacatttatcctatgtggtttctccttag

SEQ ID NO: 2273 - DNA, 1188 bp, Homo sapiens
atggcgccccgaagcctcctcctgctgctctcaggggccctggccctgaccgatacttgggcgggctcccactccttgaggtatttcagcaccgctgtgtcgcggcccggccgcggggagccccgctacatcgccgtggagtacgtagacgacacgcaattcctgcggttcgacagcgacgccgcgattccgaggatggagccgcgggagccgtgggtggagcaagaggggccgcagtattgggagtggaccacagggtacgccaaggccaacgcacagactgaccgagtggccctgaggaacctgctccgccgctacaaccagagcgaggctgggtctcacaccctccagggaatgaatggctgcgacatggggcccgacggacgcctcctccgcgggtatcaccagcacgcgtacgacggcaaggattacatctccctgaacgaggacctgcgctcctggaccgcggcggacaccgtggctcagatcacccagcgcttctatgaggcagaggaatatgcagaggagttcaggacctacctggagggcgagtgcctggagttgctccgcagatacttggagaatgggaaggagacgctacagcgcgcagatcctccaaaggcacacgttgcccaccaccccatctctgaccatgaggccaccctgaggtgctgggccctgggcttctaccctgcggagatcacgctgacctggcagcgggatggggaggaacagacccaggacacagagcttgtggagaccaggcctgcaggggatggaaccttccagaagtgggccgctgtggtggtgccttctggagaggaacagagatacacatgccatgtgcagcacgaggggctgccccagcccctcatcctgagatgggagcagtctccccagcccaccatccccatcgtgggcatcgttgctggccttgttgtccttggagctgtggtcactggagctgtggtcgctgctgtgatgtggaggaagaagagctcagatagaaacagagggagctactctcaggctgcagtcactgacagtgcccagggctctggggtgtctctcacagctaataaagtgtgagacagcttccttgtgtgggactgagaagcaagatatcaatgtagcagaattgcacttgtgcctcacgaacatacataaattttaaaaataaagaataaa

SEQ ID NO: 2274 - DNA, 927 bp, Homo sapiens
gggcggttggctttgttgggtgagcttgtttgtgtccctgtgggtggacgtggttggtgattggcaggatcctggtatccgctaacaggtcaaaatgcagatcttcgtgaaaacccttaccggcaagaccatcacccttgaggtggagcccagtgacaccatcgaaaatgtgaaggccaagatccaggataaggaaggcattccccccgaccagcagaggctcatctttgcaggcaagcagctggaagatggccgtactctttctgactacaacatccagaaggagtcgaccctgcacctggtcctgcgtctgagaggtggtatgcagatcttcgtgaagaccctgaccggcaagaccatcaccctggaagtggagcccagtgacaccatcgaaaatgtgaaggccaagatccaggataaagaaggcatccctcccgaccagcagaggctcatctttgcaggcaagcagctggaagatggccgcactctttctgactacaacatccagaaggagtcgaccctgcacctggtcctgcgtctgagaggtggtatgcagatcttcgtgaagaccctgaccggcaagaccatcactctggaagtggagcccagtgacaccatcgaaaatgtgaaggccaagatccaagataaagaaggcatccctcccgaccagcagaggctcatctttgcaggcaagcagctggaagatggccgcactctttctgactacaacatccagaaggagtcgaccctgcacctggtcctgcgcctgaggggtggctgttaattcttcagtcatggcattcgcagtgcccagtgatggcattactctgcactatagccatttgccccaacttaagtttagaaattacaagtttcagtaatagctgaacctgttcaaaatgttaataaaggtttcgttgcatggta

SEQ ID NO: 2275 - DNA, 2165 bp, Homo sapiens
tgcgccgcggctgctgctgcgcaggcccagtgctgcgcttcgcggcagaggcgtctgcggtgacagctcagtcagttgagctctgtgtgccaggcgctcgggagggggtagctcttctagtagtgctcggcgtcagacatggcggaggcgatggatttgggcaaagaccccaacgggcccacccattcctcgactctgttcgtgagggacgacggcagctccatgtccttctacgtgcggcccagcccggccaagcgtcggctgtcgacgctcatcctgcacggcggcggcaccgtgtgccgagtgcaggagcccggggccgtgctgctggcccagcccggggaggcgctggccgaggcctcgggtgatttcatctccacgcagcacatcctggactgcgtggagcgcaacgagaggctggagctggaggcctatcggctgggccccgcctcggcggcggacaccggctcggaagcaaagcccggggccctggccgagggcgccgcggagccggagccgcagcggcacgccgggcggatcgccttcacggatgcggacgacgtagccatccttacctacgtgaaggaaaatgcccgctcgcccagctccgtcacaggtaacgccttgtggaaagcgatggagaagagctcgctcacgcagcactcgtggcagtccctgaaggaccgctacctcaagcacctgcggggccaggagcataagtacctgctgggggacgcgccggtgagcccctcctcccagaagctcaagcggaaggcggaggaggacccggaggccgcggatagcggggaaccacagaataagagaactccagatttgcctgaagaagagtatgtgaaggaagaaatccaggagaatgaagaagcagtcaaaaagatgcttgtggaagccacccgggagtttgaggaggttgtggtggatgagagccctcctgattttgaaatacatataactatgtgtgatgatgatccacccacacctgaggaagactcagaaacacagcctgatgaggagtaagaagaagaagaagaaaaagtttctcaaccagaggtgggagctgccattaagatcattcggcagttaatggagaagtttaacttggatctatcaacagttacacaggccttcctaaaaaatagtggtgagctggaggctacttccgccttcttagcgtctggtcagagagctgatggatatcccatttggtcccgacaagatgacatagatttgcaaaaagatgatgaggataccagagaggcattggtcaaaaaatttggtgctcagaatgtagctcggaggattgaatttcgaaagaaataattggcaagataatgagaaaagaaaaaagtcatggtaggtgaggtggttaaaaaaaattgtgaccaatgaactttagagagttcttgcattggaactggcacttattttctgaccatcgctgctgttgctctgtaagtcctagatttttgtagccaagcagagttgtagagggggataaaaagaaaagaaattggatgtatttacagctgtccttgaacaagtatcaatgtgtttatgaaaggaagatctaaatcagacaggagttggtctacatagtagtgatccattgttggaatggaacccttgctatagtagtgacaaagtgaaaggaaatttaggaggcataggccatttcaggcagcataagtaatctcctgtcctttggcagaagctcctttagattgggatagattccaaataaagaatctagaaataggagaagatttaattatgaggccttgaacacggattatccccaaacccttgtcatttcccccagtgagctctgatttctagactgctttgaaaatgctgtattcattttgctaacttagtatttgggtaccctgctctttggctgttctttttttggagcccttctcagtcaagtctgccggatgtctttctttacctacccctcagttttccttaaaacgcgcacacaactctagagagtgttaagaataatgttacttggttaatgtgttatttattgagtattgtttgtgctaagcattgtgttagatttaaaaaattagtggattgactccactttgttgtgttgttttcattgttgaaaataaatataactttgtattcgaaaaaaa

SEQ ID NO: 2276 - DNA, 2476 bp, Homo sapiens
aaaaagccggacgcttccggtggaagggagctgttgcggggcttgctgggatcatggcggagaatcactgcgagctcctgtcgccggcccggggcggcatcggggcggggctggggggcggcctgtgccgccgctgcagcgctgggctcggcgccctggcccagcgccctggcagcgtgtccaagtgggtccgactcaacgtcggcggcacctacttcctcaccactcggcagaccctgtgccgggacccgaaatccttcctgtaccgcttatgccaggccgatcccgacctggactcagacaaggatgaaacaggcgcctatttaatcgacagagaccccacctactttgggcctgtgctgaactacctgagacacggcaagctggtgattaacaaagacctcgcggaggaaggagtgttggaggaagcagaattttacaatatcacctcattaataaaacttgtaaaggacaaaattagagaacgagacagcaaaacatcgcaggtgcctgtgaagcatgtgtaccgtgtgctgcagtgccaggaggaggagctcacgcagatggtgtccaccatgtccgacggctggaagttcgagcagttggtcagcatcggctcctcttacaactatgggaacgaagaccaagccgagttcctctgtgtggtgtccaaggagctgcacaacaccccgtacggtacggccagcgagcccagcgagaaggccaagattttgcaagaacgaggctcaaggatgtgagggacacagtattgacagctgaagaaatgatttacgttttcccgagatgtaatgaactgccatgtccaggaagcttggctgtgagaagaaacctgcttttgatcatttttctagagatctgggtgtgaatccttttttgcctctgaggtgggtggtgagagacgggcccagctgtccaaggccagacgtccccaagttgggggagcacggcggccgggtgggcgctgcctcttgggggggcctcgctctgttttttccaagtgccacgtgggactgaggcagacactcccagtcagcccgctcgatcctgaagatcgtgtgaaggaagcgttcttggtgctacacacagtctggaaaagcagcctgggcttcactggcaggaagcggccgcagccgcgtcagtgtccagcacgtcgtggcctctggtccgaccaccaggccctagtctcggtcagggagtctgctctgcctcccaggcgggatcgctggtttctctcgacctcgcagagctcctgacaaaggcggcttctgcgtcgtcactgcttcccggcgccattccgaggccgggccttcttctgacacgggctccaaccccacctgaccaagcccgggacagtcaaggcttctcaatttgtactttccaggcaagagaactttgtaccccttctctgtgtggatagactccccagcgtttttcctctggaaatgcccacagggcttgccgcgtggagactgatctgttccatccgttagcgcgaggtagcagtgtcgcctcgcccctcccactgcgggctcacggggagctggcgtctgtcagtgccttgtcacgcctggcatagaggttgggctggaggcctgtccactggcttctggagctgaaggtctgcgtcacggtgaaaattcgggatgtttacagagcatcacaaatgcctctctctcgccgctctctcattttctttgtataactatgcagccttccctctctttctgggatgtttgggacttcactcgacctgcacgggctctgcccgacatgccgtgggagctgctgggattcctttagaaaccgctgcccgcatgctttgaaaacagacctttctcagctggctgtggggacctgtcagagtctggggactcggcgtgcagggcgggctccaagcgctttgcttccggaactccggcttcccaaggggtactgtgcagactgaccaccggcctcccgcctgcaggtcagaggctctgacactgtctggtttccaatgcttctggagacttcctgcctaggcctcatcctcctctttgccagtcacctgattaaccaattctccagcattaggacttacctccttctttttgtaaggtctcttgtatgttgttaaatgtttggcttaaacaattataaaagcctttctagaaggcagacttagccccagcagagcctgggaggaaggcggccgctggggctcctgggcatcctctctggggagctgctggccgcttagcgttgtttgatttttgaccttgacatagtagataggcttgtggtttttttaatttaaagatattaagacttaattcactaaaatttattctaaggggatatttatacttttatacttttttaggtatcgtattttatcagcttacagtttaatgcctaagtttcccctggaaatagcaaataaaattgtgtatttatgaaaaaaaaaaaaaaaaaa

SEQ ID NO: 2277 - DNA, 2203 bp, Homo sapiens
ctgatgatcttgaccgacccagtgaggaagttttctctagagatctttcagattttccatctctagaaaatggcatgggaacaaatgatgaagatgaattaagccttggtttgcccactgagctcaagagaaagaaggaacagttggacagtggtcacagaccaagcaaagagacgcaatcagcagctggtctcacccttcctctgaacagtgaccaaacctttcacctgatgagcaacctggctggggatgttatcacagctgcagtgactgcagctatcaaagaccagttagagggtgtgcagcaagcactttctcaggctgcccccatcccagaagaggacacagacactgaagaaggtgatgactttgaactacttgaccagtcagagctggatcaaattgagagtgaattgggacttacacaagaccaggaagcagaagcacagcaaaataagaagtcttcaggtttcctttcaaatctgctgggaggccattaatctaggaatcagctcgcaacagagcacaaaaaacaccaaaaaaatttcaaacaagaaaaaaaaaaaaaaaaaggaaaagaaaaaaattgaactgtaagctttaatgattactttagatttgttttattttccctcctgcagtgaattaattggatatatatcagctgacactgatagattgatatttctgatcgttatttttgtgtaataagcatggaaatgaactttatacacaccactgtgttgtcagagataaatattaggggttgtttttaaagcaaaaagaaaaaaacaaaaaccaaactattaaaatcctcctataaatattctttttctttacagtttttcaagcatgcaaaacagtttattgtaacttactgaaaaatattaacaattaattgtgaatacatgctgttaccagcttccttattcctaatacctggaaaatttttttttcaacggatagattttgatgtaaaaaagaccgaaattatcaaggtatcttagttgaaggacttgggaaatactatcaaaattaatttcttaggaaaaaatttaaaagtatatttaagtactctggatagactgaaacgtttccatgttatttctgcagttgtagacttaggcttatttgtaaagaagcatgctccattgactgccatctctagtcttgcagtgggtggtattaacccatagaaagcaagcagttgtgtatcacatagacaatggttatgatgtaaacagattcagttgttttgttgttcattcgtcatatgtttgtgatagggatgttgggagcacagctctattctgcctgctcagacttaagttagacccttatcttttatattatgtcatgaaaaaagtctcctaaaattgtgaaactagttcttgatgagtgatgtgatcatcagcaataaagatataataactctgttttcttagcctgtatagaggagaggaacctgcttggctttaaaatatatttatttgccatttaagtataaatatggaatctgtttcttattgggaagatagaatatatatattttcctttaaactttttaaggtcacttttaaataaccaaatttgatttatggtttttaacaaaggactaaagagctgaaaccaacctagttttgtttttgtgatataaactttaagtgtcgagggaccatgccagcaactaccaaaaatctcttaaatcttcaggtacagctggcattttggcagatgcatagagacatctgagaccctcagaaaggaaggataatccaagaatataggaaatctgtgttctcttcctttcattttatcccttatatttctaaagactaattataagtaatctgacattttaatgtagctactcttatttattttttctttctgaggtattaaaatatctggactgagttttgccaaatgttaaagggagaagagttactgaagactttgaacacttgctttttgtgattgcttatgtcattagtgcctcatgactgtgtttgatgtcctttattgatacaaagtgagcctgtgccttcattatcttgcccattttaatacaaatggaaacctggtgtttgaaaatctctgaactgtgtgggttttggaggaatatacctgaattttattcaataacagtttctggacaggaagaaaaatacagttacatatttataaaaaaaaaaaaaaaaaa

SEQ ID NO: 2278 - DNA, 1613 bp, Homo sapiens
cggcacgagcgcggtcgcgtcataggccgaacaaccaaacagaaaagtttaataaacagcggacggaggggccggcggtggcggacggaggcaagcaggggttcggcggcattacctgtacccattcaccggcggctaccggcggcggcgcgcagcgtgtcaggcggagagacccgccgccagatcaaaagacactgacttagctgcttaccagaaggggaacttgggtgtgcaactgaggaacatggctcaagaaactaatcacagccaagtgcctatgctttgttccactggctgtggattttatggaaaccctcgtacaaatggcatgtgttcagtatgctataaagaacatcttcaaagacagaatagtagtaatggtagaataagcccacctgttcaatgcacagatggcagtgtgccagaagcccagtcagcattagactctacatcttcatctatgcagcccagccctgtatcaaatcagtcacttttatcagaatctgtagcatcttctcaattggacagtacatctgtggacaaagcagtacctgaaacagaagatgtgcaggcttcagtatcagacacagcacagcagccatctgaagagcaaagcaagtctcttgataaccgaaacaaaaaaagaatcgctgtttcatgtgcaggaagaaagtgggacttactgggtttgaatgccggtgtggaaatgtttactgtggtgtacaccgttactcagatgtacacaattgctcttacaattacaaagccgatgctgctgagaaaatcagaaaagaaaatccagtagttgttggtgaaaagatccaaaagatttgaactcctgctggaatacaaaattcttgagcatctgcaaactaaaaattgacttgaggttttttttttcctagtcattgggaatgtagagcagtgtatcttgcatgtcatcggaagaatagatttttgttttggttttgttttgaaaatgactctgaacatttatttccattgcaatttctgtggctgaggagacttaaactttacaagtattatccttttaagatcattttaattttagttgagtgcagagggcttttataacaaacgtgcagaaattttggagggctgtgatttttccagtattaaacatgcatgcattaatcttgcagtttattttctcattgtgtatgtatatatcgcttttctctgcagcacgatttctcttttgataatgccctttagggcacaactagttatcagtaactgaatgtatcttaatcattatggctgcttctgttttttcattaacaaaggttattcatatgttagcatatagtttctttgcacccactatttatgtctgaatcatttgtcacaagagagtgtgtgcctgatgagattgtaagtttgtgtgtttaaacttttttttgagcgagggaagaaaaagctgtatgcatttcattgctgtctacaggtttctttcagattatgttcatgggtttgtgtgtatacaatatgaagaatgatctgaagtaattgtgctgtatttatgtttattcaccagtctttgattaaataaaaaggaaaaccagaaaaaaaaaaaaaaaaaaaaaaaaaaa

SEQ ID NO: 2279 - DNA, 2966 bp, Homo sapiens
cggggaaaaggagctgggaagaacccaactggatgggctccccacgactgctgaacagggacatgaagacgggcctgagccggtccttgcagacccttcccacagactcctccaccttcgacacaggagaaacttcttacttactaccggaaccgggcagccatccctgctggagagcaggctcgggccaagcaagctgctgtggacatatgtgccgagctccggagcttcctgcgggccaagttgcctgacatgccgcttcgggacatgtacttgagtggcagcctctacgatgacctgcaggtggtgacagctgaccacatccaactcattgtgccccttgtgctggagcagaacctgtggtcatgtattcctggtgaagacaccatcatgaatgtccctggcttcttcctggtgcgtcgtgagaatccagggtactttcctcgtgggagcagttactgggaccgctgtgtagtagggggctacctctctccaaagacagtcgcggatacatttgagaaggtagtggctggctccatcaattggccagccatagggtccctcttggactatgtgatccgcccggccccacccccagaagccctcacactggaggtgcagtatgagcgtgacaaacatctcttcattgacttcctgccatcagtgaccctcggtgacacagtcttggtggccaaaccacaccggctagcccagtatgacaacctgtggcggctgagcctgcgtcccgcggagacggcacgcctgcgggctctggaccaggctgactcgggctgccgatctctgtgcctcaagatcctcaaggccatatgcaagtccaccccggctctgggccacctcactgccagccagctaaccaatgtcatcctccacttggcccaggaggaggctgactggtctccggatatgctggccgaccgtttcctgcaggccttgaggggacttatcagctacttagaggctggagtcctgcccagtgccctaaaccccaaggtgaacttatttgcagagctcacccctgaagaaatagacgaattaggatacactctgtattgctcattgtctgagccggaggtgctgctgcagacgtagggcaggtgaaggccaaagcgggtgttggtggtcaggccctggattctccgttagatacacttggctacctagttggtgcctcacagggttcctgctgcctggtgtcttgctgatcatcaccctggtcacttcatgctgattagaatgacatctctttcgtctcctattttgttacccaactcttcctatttttgttaccaatcactgtgctctctgccgccccctggctccaggctaatttttctggaatgaattgagaaggtggcgtgctggcctgagctgatggaccacttggtgttttgcgttttggcccatgtttgctgcctctatctggtctgccttgcccgtttgcctgttcctattcagtgtcttttctattttttcctctctcgttcatgccttctgttttgctcttgtccctggagcatatctgcctaattaagatgttgccttttagttgaatgccactgaagagctgtgatagcatgtttcaaagctgaactctacagagcgagtgctgagacagtatttagggtttctgggagtgaggctggtagaagagttggcctttgaccacggttcctggagtagaagtccatcctccccccaacctcctgacccattcataaatgctgagaatgtctctcatgggaacactgttaatgacccacacaggataagctgaatgcaaagttatttgcaggttgaatttcttggtggctattagcagaagtgcagagtagggaaccagagctggttaagggcctagtgaagggtttgtgtgcccagtgtctgctcgtcatctgtggctgcaggggtcagacagacaaggatggggactgccagggcaccacttcatcatgaatgctggttttcacaccttttccttattttattgccaatcaggacaaggccttgaaggaacgcagccttagacatcaggtgaggatgatggaggtagacagtcgactgaatgtcagctggaaaatccagtcactagttggggtttggtggccatgttttctacccagacaggccctgcttttctaggatgtggccttagagcaagaacagacccaacagccagcccttcatcctccagcgcctgccataggaatgtgagaggggtgtttgctgagcgctccgggcacggccagagggcaagtgagcatgcacggacctcttccccctgtcctgtttctcacccagcacctggggagatcggtgctaccaaggaagagagcacacagataagacagaggggaggaggtgggcatttcctacattcctccttgtttgccgctgctgagattgcagtatttattgcaatgtaaatgtatcctgaaggtggggaggaatgtttaatctaccatgtccgcgtgtcatcttggtttgtgtttttccctgtttgtagcaagactctgatgataattctgtttctcatctgcccattcagtattttgttttccttccgtcaagttgtcttattttttcaatgactacctctccatcattgaggttctggtgaagctctctgcagctgtctcattccttcccaacgatagtaacaggaaatgactctttagcatcgatacctcaacatcaatttagggtagagattcctgcccctcctttgtcacagattaggaaattgagaactagggttaaccttgactatatttagaggtctttttgcctcttttccccttaacaaggatttcttatggtggtttcagtttcatttgcataaaggtattgagagggaacaaaaaacataaagctgagaatcttgagagagctcatctaccctgtctgttggtcagactcaaatgagagttaaaaaaaaaaaaaaaaaa

SEQ ID NO: 2280 - DNA, 3142 bp, Homo sapiens
ggcacgagggtagtcaggacatcaagtgggccctgcacgagctcaaaggacactatgcaatcacccgaaaggccttgtctgatgccattaaaaaatggcaggagctgtcaccagaaaccagtggaaaaaggaagaagagaaaacaaatgaaccagtattcttacattgatttcaagtttgaacaaggtgacataaaaatagaaaagaggatgttctttcttgaaaataagcgacgacattgtaggtcctatgaccgacgtgctctccttccagctgtgcaacaagagcaggagttctatgagcagaaaatcaaagagatggcagagcatgaagactttttgcttgccctacagatgaatgaagaacagtatcaaaaggatggccagctgattgagtgtcgctgctgctatggggaatttccattcgaggagctgacgcagtgcgcagatgctcacttgttctgcaaagagtgtctcatcagatatgcccaagaggcagtctttggatctggaaagttggagctcagctgcatggaaggcagctgcacgtgttcgttcccaaccagtgagctggagaaggtgctcccccagaccatcctgtataagtactatgagcgaaaagccgaggaggaggttgcggcagcctacgccgacgagcttgtcaggtgcccgtcctgtagctttccggctctgttggacagtgatgtgaagaggttcagctgtcctaatcctcactgccgaaaggaaacctgtaggaagtgtcagggactctggaaagaacataatggcctcacctgtgaagagctggctgaaaaagacgacatcaagtaccgtacctctattgaagaaaaaatgactgctgcccgcattagaaaatgccacaagtgtgggactggcctcatcaaatctgaaggctgcaaccgcatgtcttgccgctgtggtgcccagatgtgctacctctgtcgagtttctattaatggatatgaccatttctgccaacatccccgctcaccaggagccccttgccaggagtgttcaagatgctctctctggaccgatcccactgaagatgatgagaagcttattgaggaaatccagaaggaggctgaagaggaacagaaaagaaagaatggagagaacaccttcaaacgcattggacccccgctggagaagcctgtggagaaggtgcagagggtggaggccctcccgaggcccgttccgcagaacctgccacagccacagatgccaccctatgccttcgcgcacccacccttccccctgcctcccgtgcggcctgtgttcaacaacttcccactcaacatggggcctatcccagccccgtacgtgccccctctgcccaacgtgcgggtcaactatgacttcggtcccatccacatgcccctggagcacaacctgcccatgcactttggcccccagccgcggcatcgcttctgatggccccgaatccccattgagcagcacaaagcccgtttggggtaggagtgtggatggagaaccctcccccaaggctggtgtctgtaccattgcatcctaagtcagcttgaagggtaggctggttttcttcccacccctttcctagaagggctactgctcctggaagagtggacggatccataataaagacgtcccaaatggtggagttcggagagagctgcgatgtgaactgcccctcccctcgcatcccccaggccaccaacggcagtccttctgccttgtccatggcataggccatagaccaggtccctgctgctcacacctgggcctctcctcggagccgacccctgggtagcaaggcagccgagagcatctccctggaggggcccacggttgggccaagggcagagggggctgcacctgcgggcctgggaagcattgctcagggtggggggctgggaccatggcccgcagaggcactgccacagctgtgagggccaagatgctgtccccccatccaaaacccgtgcgccactgcagtgagtgttgagggcacctctcctcccctcttacacctactcagatgaggcagcagcagacccatctcgcggcgggggttttgttctgttgccgcctaactttctcatcctcggtctctggaaagtcaggctgagaaatcctttcccaggccaggccgctgcggtacactggatggttctgaagctggcccattgaaagagcctcttaaggcagctgggacagaggcctggtggccctgctgggcagcccaactgctgggggagacgtttctgccaccctgggtgatgagcagcttttcccccctggctttctgggggaggagtgggcctccttagggagacaggtgaccctgggtgccacccctgccccgtgtgtgccccgggtgttctcagtggttgctgaaggcaggtagagggtgctgtccagtatcccccatgtgaaggtcacttcccttctcatggagtcagctgagcatcagctcagccctgccatgtccccactcaccctcctcgcctcctgtccggccctgggtttctagcggtgcctgaggcatcactctggcccattgacagatgagaggtctgaagccttcctggccacaggcatcactttctcctcctcctcatgccctgccttgtccttgtcgtgttgccatggggttctgagaggctgggagttcacagacctcagacacagctgagtccgacaaccattggggtggggctgcatcagtctccggagtggcccgccacctcctgaagcagggcctggcccacccaaggtgcctggggcaggcgggcaccgtcattcgctgccattggcttctcagatgtatttcaaggactaaagtgggctctaagatctaagatggcccggcgcggtggctcccgcctgtaatcccagcactttgggaggccgaggcgggcggatgagttgaggtcgggagtttgagtccccgtctctactaaaaatacaaaattagccggacaaggtggcgcatgcctataatcccaggtactcaggaggctgaggcaggagaatcacttgaacctgggaggcagaggttgcagtgagccaagattgtgccactgcactccagcctgagcaacaaaagcaaaactctatctttaaaaaaaaaaaaaaaaaaa

SEQ ID NO: 2281 - DNA, 2291 bp, Homo sapiens
ctttctgtgctgatcttggaggcagagtggctgcctgcattcattccacggtccattccacagcttgttccaaagacagtctgctcatgatgtagcttctgcacttgacaaactattttcatgcacgaggcccttgaaaatgttgacagtcttgtgacatccatggagggccttatttgacggtcacaaaggagcggttcctagaaggtgagcgcggacggtatgcaaagttgtgaatccagtggtgacagtgcggatgaccctctcagtcgcggcctacggagaaggggacagcctcgtgtggtggtgatcggcgccggcttggctggcctggctgcagccaaagcacttcttgagcagggtttcacggatgtcactgtgcttgaggcttccagccacatcggaggccgtgtgcagagtgtgaaacttggacacgccacctttgagctgggagccacctggatccatggctcccatgggaaccctatctatcatctagcagaagccaacggcctcctggaagagacaaccgatggggaacgcagcgtgggccgcatcagcctctattccaagaatggcgtggcctgctaccttaccaaccacggccgcaggatccccaaggacgtggttgaggaattcagcgatttatacaacgaggtctataacttgacccaggagttcttccggcacgataaaccagtcaatgctgaaagtcaaaatagcgtgggggtgttcacccgagaggaggtgcgtaaccgcatcaggaatgaccctgacgacccagaggctaccaagcgcctgaagctcgccatgatccagcagtacctgaaggtggagagctgtgagagcagctcacacagcatggacgaggtgtccctgagcgccttcggggagtggaccgagatccccggcgctcaccacatcatcccctcgggcttcatgcgggttgtggagctgctggcggagggcatccctgcccacgtcatccagctagggaaacctgtccgctgcattcactgggaccaggcctcagcccgccccagaggccctgagattgagccccggggtgagggcgaccacaatcacgacactggggagggtggccagggtggagaggagccccgggggggcaggtgggatgaggatgagcagtggtcggtggtggtggagtgcgaggactgtgagctgatcccggcggaccatgtgattgtgaccgtgtcgctaggtgtgctaaagaggcagtacaccagtttcttccggccaggcctgcccacagagaaggtggctgccatccaccgcctgggcattggcaccaccgacaagatctttctggaattcgaggagcccttctggggccctgagtgcaacagcctacagtttgtgtgggaggacgaagcagagagccacaccctcacctacccacctgagctctggtaccgcaagatctgcggctttgatgtcctctacccgcctgagcgctacggccatgtgctgagcggctggatctgcggggaggaggccctcgtcatggagaagtgtgatgacgaggcagtggccgagatctgcacggagatgctgcgtcagttcacagggaaccccaacattccaaaacctcggcgaatcttgcgctcggcctggggcagcaacccttacttccgcggctcctattcatacacgcaggtgggctccagcggggcggatgtggagaagctggccaagcccctgccgtacacagagagctcaaagacagcgcccatgcaggtgctgttttccggtgaggccacccaccgcaagtactattccaccacccacggtgctctgctgtccggccagcgtgaggctgcccgcctcattgagatgtaccgagacctcttccagcaggggacctgagggctgtcctcgctgctgagaagagccactaactcgtgacctccagcctgccccttgctgccgtgtgctcctgccttcctgatcctctgtagaaaggatttttatcttctgtagagctagccgccctgactgccttcagacctggccctgtagcttttctttttctccaggctgggccgtgagcaggtgggccgttgagttacctctgtgctggatcccgtgcccccacttgcctaccctctgtcctgccttgttattgtaagtgccttcaatactttgcattttgggataataaaaaaggctccctcccctgccaaaaaaaaaaaaaaaaaaaaaaaaaaaaaaaaaaaaaaaaaaaaaaaaaaaaaaaaaaaaaaaaaacaaaaaaaaaaaaaaaaagc

SEQ ID NO: 2282 - DNA, 13268 bp, Homo sapiens
ggtcctccccttctcctcccctgctcgctgcagactccctcctcactgtcgctgccgagatccacagtcggttgtggctcagcccctgttgcaggggacaagtgagggagacttccctgtcctgccctgagacgccgccctcccggggttggggacagagcaggtgcagaggcactgcagctgctcggttgcccagcctcctgaatgatgccagcccagtatgctctaacctccagcctggttctcctggtgctgctgagcacagccagagcaggccccttctcttcacggtccaatgtgacactgccagccccccggccccctccccagccagggggccacacagtgggggctggagtgggaagcccctcttctcagctttacgagcacacagtggaaggaggggagaagcaggtggtattcacccaccgcattaacctgcccccttccactggctgtggctgtcccccaggcaccgagcccccagtccttgcttcagaggtacaggccctgagggtccgtctagagatcctggaggagttggtgaaggggctcaaggaacagtgcactgggggatgttgtcctgcctctgcccaagctggcacaggtcagacagatgtgcggaccctctgcagtctccatggtgtgtttgatctgagccgctgcacctgttcctgtgagccaggctggggtgggcccacctgctcagaccccacagatgctgagatccctccctcttccccaccctcagcctcggggtcctgcccagatgactgcaatgatcagggtcgctgtgtccgtggtcgttgcgtgtgctttcccggctacactggccccagctgtggctggccatcctgtcccggggactgccaaggccgtgggcgctgcgtgcagggcgtgtgtgtgtgccgggcaggcttctcaggccccgactgcagccagcgctcctgccctcgaggttgcagccagaggggacgctgtgagggtgggcgctgcgtgtgtgacccaggctacactggtgacgactgtggcatgaggagctgccctcgcggttgcagtcagagggggcgctgtgagaatgggcgctgcgtgtgtaaccccggctacactggcgaggactgtggggtgaggagctgccctcggggctgcagccagcggggacgctgcaaggacgggcgctgcgtgtgtgaccccggctacactggcgaggactgtggtacgcggagctgcccctgggactgtggcgagggcgggcgctgcgtggacggccgctgcgtgtgctggcccgggtacacaggcgaggactgcagcacgcggacatgtccgagggactgccggggccgcgggcgctgcgaggacggcgaatgcatttgcgacacgggctacagcggggacgactgcggcgtgcgcagctgccctggcgactgcaaccaaaggggccgctgcgaggacggccgctgcgtgtgctggccggggtacactggaaccgattgcggctcgcgcgcctgcccacgcgactgtagaggtcgcgggcgctgcgagaacggcgtgtgtgtttgcaatgcgggctacagcggcgaggactgcggtgtgcgcagctgtcctggggactgtcgtggccggggccgctgtgagagtggccgctgcatgtgttggccggggtacacaggccgggactgcggcacgcgcgcctgtcctggcgactgtcgcgggcgcgggcgctgcgtggatggccgctgcgtgtgcaacccgggcttcaccggtgaggactgtgggagccgtcgctgtcccggggactgccgtgggcacggcctttgcgaggatggcgtgtgcgtgtgtgacgcaggctactcaggggaagactgcagcacgcgcagctgccccgggggctgccgaggccgcggccagtgcctagatgggcggtgtgtgtgcgaggacggctactctggcgaggattgcggtgtgaggcagtgcccgaatgactgcagccagcacggcgtgtgccaggacggtgtgtgcatctgttgggaaggctacgtgagtgaggactgcagcatccgcacctgcccctccaactgccacgggaggggccgctgtgaggaagggcgctgcctgtgcgacccaggctacaccggccctacctgtgccacccgcatgtgcccggctgactgccggggacgtgggcggtgtgtgcaaggagtgtgcctgtgccacgtgggctatggcggtgaggactgcgggcaggaagagcctccagccagcgcctgccctggaggctgcgggccccgggaactgtgccgggcaggccagtgtgtgtgtgtagagggcttccgaggccctgactgtgccatccagacatgcccaggggactgccgtggccgaggagagtgtcacgatggcagctgtgtctgcaaagatgggtatgctggcgaagactgcggagaagcacgggttccaagctctgcctcagcctatgaccagagaggactggcccctggacaggagtaccaggtcactgtccgagcccttcgagggaccagctggggccttcctgcctccaagaccatcaccaccatgatcgatgggccccaggacctccgagtggtggctgtgacaccgacaacactggagcttggctggctgcgtccccaggctgaggtggaccgatttgtggtgtcctacgtcagtgccggcaaccagagggtgaggctggaagtgccccctgaagcagacgggacgctgctgactgacctgatgccaggcgtagaatatgtggtgactgtcacagcggagcggggccgggcagtcagctacccagcttctgtcagggccaacacagaggaaagggaggaggagtccccgcccaggccaagcctgtcccagcccccacggcggccttggggcaacctgacggccgagctgagccgtttccgcggcacggtgcaggacctggagcgccacctgcgggctcacggctacccactgcgggccaaccagacttacacgtcggtggcgcgccacatccatgaatacttgcagcggcaggtgctgggcagttccgccgatggcgcgcttctcgtgtctctcgacgggctccgcggccagttcgagcgcgtggtgctgcgctggcggcctcagccgcctgcagagggccccggcggtgagctgactgtgccgggcaccacgcgcaccgtcagcctgcccgacctcaggcccggcaccacctaccacgtggaggtccacggggtgcgggcggggcagacctccaagtcctacgccttcatcaccaccacaggcccctcgacgacgcaaggggcccaggctcctctcctgcagcagcgcccccaggagctgggagagttgagggtgctgggcagagatgagacagggcgcctccgtgtggtctggaccgcccagcctgacacctttgcctacttccaactgcgcatgcgggtgcccgaggggccgggggcacatgaggaagtgctgccaggggacgtccgccaggctctggtgcctccaccccctcctggaaccccgtatgagctgtcacttcatggggtccctcctgggggcaagccctctgaccccatcatctaccaaggcattatggacaaggatgaggagaagcctgggaagtcctcaggcccaccacgcctgggtgagctgacggtgacagacaggacctccgactccttgctcctgcgctggacggtccccgagggcgagtttgactccttcgtgatccagtacaaagacagggacgggcagccccaggtggtgcccgtggaaggaccccagcgctcggccgtcatcacctccctggatcctggccgcaagtacaaatttgtcctgtatgggtttgttggcaagaagaggcatggtccgctggtggctgaagccaagatcttgcctcagagtgacccaagtccagggactccaccccacctgggaaacctgtgggtgacagaccctaccccagattcactgcacctctcctggactgtccctgagggccagtttgacaccttcatggtccagtacagggacagggatggacggccccaggtggtacctgtggaagggcccgagcgttcatttgttgtctcctcactggaccctgaccacaagtacagattcactctgtttggaattgcgaacaagaagcggtatggccccctcacggccgatggcaccactgctccagagaggaaagaggagcccccccgccctgagttcctggagcagcccctcctgggggaactgacagtgaccggcgtgaccccagactccttgcgtctctcatggacagtggcccagggccccttcgactcattcatggtccagtacaaggatgcacaggggcagccccaggcagtgcctgttgcgggggatgagaatgaggttactgtccccggcctggatcccgaccggaagtataagatgaacctctacgggcttcgtggcaggcagcgtgtggggcccgagtctgtggtggccaagactgctcctcaggaggatgtggacgagacccccagccccacagaactgggcacggaggccccggagtcccccgaggagccgctcctgggggagctgacagtgacaggatcctcccctgattcgctgagcctcttctggaccgtcccccagggcagcttcgactctttcaccgtgcagtacaaggacagggatgggcggccccgggcggtgcgtgttgggggcaaggagagtgaggtcaccgtgggaggcctagagcccgggcacaagtacaagatgcacctgtacggcctccacgaggggcagcgcgtgggcccggtgtccgccgtgggcgtgacagccccacaacaagaagagacccctccagccactgagtccccgctggagccacgcctaggagagctgacagtgacagatgtgacccccaactctgtgggcctctcctggacagtccccgagggccagtttgactccttcatagtccagtacaaggacaaggacgggcagccccaggtggtgccggtggcggcagaccagcgagaggtcacagtctacaacctggagcctgagagaaaatataagatgaacatgtatggactacatgatgggcaacgcatgggccccctgtctgtggtcatcgtgacggccccagccacagaggcctccaagcctcccctggagccacgcctaggggagctgacagtgacggatataacccctgactctgtgggcctctcatggacagtccctgagggtgaattcgactcctttgtggttcagtacaaggacagggacgggcagccccaggtggtgcccgtggctgcagatcagcgggaggtcactatccctgacctggaaccctcccgcaagtacaagttcctgctctttgggatccaggatgggaaacgacgcagcccagtctctgtggaggcaaagacggttgcccgaggtgacgccagcccaggggccccaccccgccttggggagctgtgggtgacagaccccaccccagactcactgcgcctctcctggacggttcctgagggccagttcgactcttttgtggtccagttcaaggacaaagacgggccccaggtggtgcccgtggagggccatgagcgctctgtcactgtcacccctctggatgccggccgcaagtacagattcctcctctatggcctcctgggcaagaagcgccatggccctctcactgccgacggcaccacggaagcccggagtgctatggatgatactggaacaaagcgtcccccaaaaccccgtctgggggaggagctgcaggtgaccaccgtgacccagaactccgtgggcctctcctggacagtccctgagggccagtttgactcctttgtggtccagtacaaagacagggacgggcagccccaggtggtgcccgtggagggcagcctcagggaggtcagcgtgccgggcctggaccctgcccacaggtacaagctgctgctctacgggctgcaccacggcaagcgtgtgggccccatctcggccgtcgccattactgccggcagggaagaaacggaaactgagaccacggccccgacccctccagcgcctgagccccacctcggggagttgacagtggaggaggccacgtcacacaccctgcatctctcctggatggtgactgagggagaatttgactccttcgaaatccagtacacagatagagacgggcaactccaaatggtccgcataggaggtgaccggaatgacatcaccctctctggcctggaatccgaccacagatacctggtgaccctgtatggtttcagtgatgggaagcatgtaggtcctgtccatgtcgaggccctgacagtcccggaggaggagaagccttcagaacctcccaccgcaacccccgagccccccatcaagcctcgcctgggggagctgaccgtgacagatgccacccctgactccctcagcctgtcctggacagttcccgagggacagtttgaccacttcctggtccagtacaggaatggagatgggcagcccaaggcagtgagggtgccagggcacgaggaaggggtcaccatctcgggcctggagccagaccataaatacaagatgaacctgtacggcttccacggtggccagcgcatgggccctgtgtctgtcgtcggggtgacagaacccagcatggaggccccggagcccgctgaggagccgctcctgggggagctaacagtgacaggatcctcccctgactcgctgagcctctcctggaccgtcccccagggccgcttcgactccttcaccgtgcagtacaaggacagggacgggcggccccaggtggtgcgtgttgggggcgaggagagtgaagtcaccgtggggggcctggagcctgggcgcaagtacaagatgcacctgtacggcctccacgaggggcggcgcgtgggcccagtgtctgctgtgggcgtcacggcccccgaagaggagtcccctgatgctcctcttgcaaagctgcgcctagggcagatgacagtgagagacatcacctccgactccctcagcctctcctggacagtccccgagggccagtttgaccatttcttggtccagtttaagaatggggacgggcagcccaaggcggtgcgggtgccgggacacgaggatggggtcaccatctcgggcctggagccagaccacaagtacaagatgaacctgtacggcttccacggtggccagcgcgtgggccccgtgtctgctgttggtttaactgcctcgacagaacctcccacccctgaaccccccatcaagcctcgcctggaggagctgaccgtgacagatgcgacccctgactccctcagcctgtcctggacggttcccgagggacagtttgaccacttcctggtccagtacaagaatggggatgggcagcccaaggcaacacgggtgccaggacatgaggacagggtcaccatctccggcctggagccagacaacaagtacaagatgaacctgtacggcttccacggtggccagcgtgtgggccccgtgtctgccatcggggtgacagaggaagagacccccagccccacagaacccagcatggaggccccggagccccctgaggagccgctcctgggggagctaacagtgacaggatcctcccctgactcgctgagcctctcctggaccgtcccccagggccgcttcgactccttcaccgtgcagtacaaggacagggacgggcggccccaggtggtgcgtgttgggggcgaggagagcgaggtcaccgtggggggcctggagcctgggcgcaaatacaagatgcacctgtatggcctccacgaggggcggcgcgtgggcccggtgtccaccgtgggcgtgactgccccacaagaggatgtggacgagacccccagccctacagaaccaggcacagaggccccagagccccccgaggagcctctcctgggggagctgacagtgacaggatcctcccctgactcgctgagcctttcctggaccgtcccccagggccgctttgactccttcaccgtgcagtacaaggacagggacgggcggccccaggcggtgcgtgttgggggccaggagagcaaggtcactgtgaggggcctggagcctgggcgcaagtacaagatgcacctgtacggcctccacgaggggcggcgcctgggcccggtgtctgccgtgggcgtcacagaggatgaagccgagaccacccaagcagtgcctaccatgacccctgagccccccatcaagcctcgcctgggggagctgaccatgacagatgccacccctgactccctcagcctgtcctggacggttcccgagggccagtttgaccacttcctggtccagtacaggaatggggatgggcagcccaaggcggtgcgggtgccggggcacgaggacggggtcaccatctcaggcctggagccagaccataaatacaagatgaacctgtacggcttccacggtggccagcgcgtgggccccatctctgtcattggggtgacggaggaagagacccccagccccacggaactcagcactgaggcccgggagccccctgaggagccgctcctgggggagctgacagtgacaggatcctcccctgactcgctgagcctctcctggaccatcccccagggccacttcgactccttcaccgtgcagtacaaggacagggacgggcggccccaggtgatgcgtgtcaggggcgaggagagcgaggtcaccgtggggggcctggagcccgggcgcaaatacaagatgcacctgtacggcctccacgaggggcggcgtgtgggcccggtgtccaccgtgggtgtgacagtgcccaccacaacccctgagccccccaacaagcctcgcctcggggagctgaccgtgacagatgccacccctgactccctcagcctgtcctggatggtccccgagggccagtttgaccacttcctggtccagtacaggaatggggatgggcagcccaaggtggtgcgggtgccggggcacgaggacggggtcaccatctcaggcctggagccagaccacaagtacaagatgaacctgtacggcttccacggtggccagcgcgtgggccccatctctgtcattggggtgacagaggaagaaactcccgcccccacagaacccagcacggaggccccggagccccctgaggagccgctcctgggggagctgacagtgacaggatcctcccctgactcgctgagcctctcctggaccatcccccagggccgcttcgactccttcactgtgcagtacaaggacagggacgggcggccccaggtggtgcgtgtcaggggcgaggagagcgaggtcaccgtggggggcctggagcccgggtgcaaatacaagatgcacctgtacggcctccacgaggggcagcgcgtgggcccagtgtccgctgtgggtgtgacagctccaaaggatgaagccgagaccacccaagcagtgcctaccatgacccctgagccccccatcaagcctcgcctgggggagctgaccgtgacagatgccacccccgactccctcagcctgtcctggatggttcccgagggccagtttgaccacttcctggtccagtacaggaatggggatgggcagcccaaggcggtgcgggtgccggggcacgaggacggggtcaccatctcaggcctggagccagaccataaatacaagatgaacctgtacggcttccacggtggccagcgcgtaggccctgtgtctgccattggggtgacggaggaagagacccccagccccacagaacccagcactgaggccccggaggcccctgaggagccgctcctgggggagttgacagtgacaggatcctcccctgactcgctgagcctctcctggaccgtcccccagggccgcttcgactccttcaccgtgcagtacaaggacagggacgggcagccccaggtggtgcgtgtcaggggcgaggagagcgaggtcaccgtggggggcctggagcccgggcgcaaatacaagatgcatctgtacggcctccacgaggggcagcgcgtgggcccagtgtccaccgtgggcatcacggcgcccctgcccacaccactgccggtggagccccgcctgggggagctggcggtggcggccgtgacctcggactcagtgggcctctcatggacggtggcccagggcccctttgactccttcctggtacagtacagggacgcgcaggggcagccccaggcagtgcctgtgagcggagacctccgagcggtcgccgtctcggggctggacccggcccgcaagtacaagttcctgctctttggactccagaatgggaaacgccacggcccagtccctgtggaggccaggaccgccccagacaccaaaccgtctccccgcctgggggagctgactgtgacagatgcgacccctgactccgtgggcctctcgtggacggtccctgagggcgaattcgactccttcgtggtccagtacaaggataaggatggtcggctccaggtggtgccggtggcagccaaccagcgggaggtcacagtccagggcctggagcccagtaggaaatacaggttcctgctctatggtctgtcaggcaggaaacgactgggccccatctctgctgacagcaccacagctcccctggagaaggagctacctccccacctgggggaactgaccgtggctgaggagacctccagctctctgcgcctgtcctggacggtagcccagggcccctttgactccttcgtggtccagtacagggacacggacgggcagcccagggcagtgcctgtggccgcagaccagcgcacagtcaccgtagaggacctggagcctggcaagaaatacaagtttctgctctacgggctccttgggggaaagcgcctgggcccggtctctgccctgggaatgacagccccagaagaggacacaccagccccagagttagccccagaggcccctgagcctcctgaagagccccgcctaggagtgctgaccgtgaccgacacaaccccagactccatgcgcctctcgtggagcgtggcccagggcccctttgattccttcgtggtccagtatgaggacacgaacgggcagccccaggccttgctcgtggacggcgaccagagcaagatcctcatctcaggcctggagcccagcaccccctacaggttcctcctctatggcctccatgaagggaagcgcctggggcccctctcagctgagggcaccacagggctggctcctgctggtcagacctcagaggagtcaaggccccgcctgtcccagctgtctgtgactgacgtgaccaccagttcactgaggctcaactgggaggccccaccgggggccttcgactccttcctgctccgctttggggttccatcaccaagcactctggagccgcatccgcgtccactgctgcagcgcgagctgatggtgccggggacacggcactcggccgtgctccgggacctgcgttccgggactctgtacagcctgacactgtatgggctgcgaggaccccacaaggccgacagcatccagggaaccgcccgcaccctcagcccagttctggagagcccccgtgacctccaattcagtgaaatcagggagacctcagccaaggtcaactggatgcccccaccatcccgggcggacagcttcaaagtctcctaccagctggcggacggaggggagcctcagagtgtgcaggtggatggccaggcccggacccagaaactccaggggctgatcccaggcgctcgctatgaggtgaccgtggtctcggtccgaggctttgaggagagtgagcctctcacaggcttcctcaccacggttcctgacggtcccacacagttgcgtgcactgaacttgaccgagggattcgccgtgctgcactggaagcccccccagaatcctgtggacacctatgacgtccaggtcacagcccctggggccccgcctctgcaggcggagaccccaggcagcgcggtggactaccccctgcatgaccttgtcctccacaccaactacaccgccacagtgcgtggcctgcggggccccaacctcacttccccagccagcatcaccttcaccacagggctagaggcccctcgggacttggaggccaaggaagtgaccccccgcaccgccctgctcacttggactgagcccccagtccggcccgcaggctacctgctcagcttccacacccctggtggacagaaccaggagatcctgctcccaggagggatcacatctcaccagctccttggcctctttccctccacctcctacaatgcacggctccaggccatgtggggccagagcctcctgccgcccgtgtccacctctttcaccacgggtgggctgcggatccccttccccagggactgcggggaggagatgcagaacggagccggtgcctccaggaccagcaccatcttcctcaacggcaaccgcgagcggcccctgaacgtgttttgcgacatggagactgatgggggcggctggctggtgttccagcgccgcatggatggacagacagacttctggagggactgggaggactatgcccatggttttgggaacatctctggagagttctggctgggcaatgaggccctgcacagcctgacacaggcaggtgactactccatgcgcgtggacctgcgggctggggacgaggctgtgttcgcccagtacgactccttccacgtagactcggctgcggagtactaccgcctccacttggagggctaccacggcaccgcaggggactccatgagctaccacagcggcagtgtcttctctgcccgtgatcgggaccccaacagcttgctcatctcctgcgctgtctcctaccgaggggcctggtggtacaggaactgccactacgccaacctcaacgggctctacgggagcacagtggaccatcagggagtgagctggtaccactggaagggcttcgagttctcggtgcccttcacggaaatgaagctgagaccaagaaactttcgctccccagcggggggaggctgagctgctgcccacctctctcgcaccccagtatgactgccgagcactgaggggtcgccccgagagaagagccagggtccttcaccacccagccgctggaggaagccttctctgccagcgatctcgcagcactgtgtttacaggggggaggggaggggttcgtacaggagcaataaaggagaaactgaggtacccgg

SEQ ID NO: 2283 - DNA, 1857 bp, Homo sapiens
ggcgggccagccaagatggcggcctcatgcttggtcctgctggcgctgtgtctgctgctgccgctgctgctgctgggaggatggaagcgctggcgccgggggcgggcggcccggcatgtagtagcggtggtgctgggcgacgtgggccgcagcccccgtatgcagtaccacgcgctgtcgttggccatgcacggcttctcggtgaccctcctggggttctgcaactccaaaccccatgatgagctcttgcagaacaacagaattcagattgtggggttgacagaacttcagagtcttgcagttgggccccgagttttccagtacggagtcaaagttgtacttcaggctatgtacttgctgtggaagttgatgtggagggagccaggtgcctatatctttctccagaaccccccaggtctgcctagcattgctgtctgctggttcgtgggctgcctttgtggaagcaagctcgtcattgactggcacaactatggctactccatcatgggtctggtgcatggccccaaccatcccctcgttctgctggccaagtggtacgagaagttctttgggcgcctgtcccacctgaacctgtgtgttaccaatgctatgcgagaagacctggcggataactggcacatcagggctgtgaccgtctacgacaagcccgcatctttctttaaagagacacctctggacctgcagcaccggctcttcatgaagctgggcagcatgcactctccgttcagggcccgctcagaacctgaggacccagtcacggagcggtcggccttcacggagcgggatgctgggagcgggctggtgacgcgtctccgtgagcggccagccctgctggtcagcagcacgagctggacagaggacgaagacttctccatcctgctggcagctttagaaaagtttgaacaactgactcttgatggacacaaccttccttctctcgtctgtgtgataacaggcaaagggcctctgagggagtattatagccgcctcatccaccagaagcacttccagcacatccaggtctgcaccccctggctggaggccgaggactaccccctgcttctagggtcggcggacctgggtgtctgtctgcacacgtcctccagtggcctggacctgcccatgaaggtggtggacatgttcgggtgctgtttgcctgtgtgtgctgtgaacttcaagtgtttacatgagctggtgaaacatgaagaaaatggcctggtctttgaggactcagaggaactggcagctcagctgcagatgcttttctcaaactttcctgatcctgcgggcaagctaaaccagttccggaagaacctgcgggagtcgcagcagctccgatgggatgagagctgggtgcagactgtgctccctttggttatggacacataactcctgggccagaggctaaaaccccaggacccctgctgtccttcccgcagcttcttcttggagtctcagggcaaaccctttcgagcagcacctcccagtggccagaagctgaaatgacagcagtggtactgcctggtaaaagaattggttctgtgacccgggaagctttggttggccttgatttcttctctggaggcttggaaacgcttcctctcttcttctgttcttcacgccccatgcccctgctagcgtattactgttctgtgacttccctgtgacctctgcagaactcctcatcctgcgtttggtctccaggtgtcccctttctgccgtgttcctaacattttgattcctgtcttgaaaaaagcacctgctgcaccgtaagcccagggatgtggcagctgcagtgggcttggctttgtgaggaactgagtgtgtccacgttgg

SEQ ID NO: 2284 - DNA, 1237 bp, Homo sapiens
attcttgtctgttctgcctcactcccgagctctactgactcccaaaagagcgcccaagaagaaaatggccataagtggagtccctgtgctaggatttttcatcatagctgtgctgatgagcgctcaggaatcatgggctatcaaagaagaacatgtgatcatccaggccgagttctatctgaatcctgaccaatcaggcgagtttatgtttgactttgatggtgatgagattttccatgtggatatggcaaagaaggagacggtctggcggcttgaagaatttggacgatttgccagctttgaggctcaaggtgcattggccaacatagctgtggacaaagccaacctggaaatcatgacaaagcgctccaactatactccgatcaccaatgtacctccagaggtaactgtgctcacgaacagccctgtggaactgagagagcccaacgtcctcatctgtttcatcgacaagttcaccccaccagtggtcaatgtcacgtggcttcgaaatggaaaacctgtcaccacaggagtgtcagagacagtcttcctgcccagggaagaccaccttttccgcaagttccactatctccccttcctgccctcaactgaggacgtttacgactgcagggtggagcactggggcttggatgagcctcttctcaagcactgggagtttgatgctccaagccctctcccagagactacagagaacgtggtgtgtgccctgggcctgactgtgggtctggtgggcatcattattgggaccatcttcatcatcaagggagtgcgcaaaagcaatgcagcagaacgcagggggcctctgtaaggcacatggaggtgatgatgtttcttagagagaagatcactgaagaaacttctgctttaatgactttacaaagctggcaatattacaatccttgacctcagtgaaagcagtcatcttcagcgttttccagccctatagccaccccaagtgtggttatgcctcctcgattgctccgtactctaacatctagctggctttccctgtctattgccttttcctgtatctattttcctctatttcctatcattttattatcaccatgcaatgcctctggaataaaacatacaggagtctgtctctgctatggaatgccccatggggctctcttgtgtacttattgtttaaggtttcctcaaactgtgatttttctgaacacaataaactattttgatgatcttgggtggaaaa

SEQ ID NO: 2285 - DNA, 2220 bp, Homo sapiens
ggaaaattacccggtatcgttagagctacaccaaaattgcattgagccaaacttgccaccaagagcccaacaatcaccatgatgctgagcacggaaggcagggaggggttcgtggtgaaggtcaggggcctaccctggtcctgctcagccgatgaagtgatgcgcttcttctctgattgcaagatccaaaatggcacatcaggtattcgtttcatctacaccagagaaggcagaccaagtggtgaagcatttgttgaacttgaatctgaagaggaagtgaaattggctttgaagaaggacagagaaaccatgggacacagatacgttgaagtattcaagtctaacagtgttgaaatggattgggtgttgaagcatacaggtccgaatagccctgatactgccaacgatggcttcgtccggcttagaggactcccatttggctgtagcaaggaagagattgttcagttcttttcagggttggaaattgtgccaaatgggatgacactgccagtggactttcaggggcgaagcacaggggaagcctttgtgcagtttgcttcacaggagatagctgagaaggccttaaagaaacacaaggaaagaatagggcacaggtacattgagatcttcaagagtagccgagctgaagttcgaacccactatgatccccctcgaaagctcatggctatgcagcggccaggtccctatgataggccgggggctggcagagggtataatagcattggcagaggagctgggtttgaaaggatgaggcgtggtgcctatggtggagggtatggaggctatgatgactatggtggctataatgatggatatggctttgggtctgatagatttggaagagacctcaattactgtttttcaggaatgtctgatcatagatacggagatggtgggtccagtttccagagcaccacagggcactgtgtacacatgagggggttaccttacagagccactgagaatgatatttataatttcttctcacctcttaatcccatgagagtacatattgaaattggacccgatggcagagttaccggtgaggcagatgttgaatttgctactcatgaagatgctgtggcagctatggcaaaagacaaagctaatatgcaacacagatatgtggagctcttcttaaattctactgcaggaacaagtgggggtgcttacgatcacagctatgtagaactttttttgaattctacagcaggggcaagtggtggcgcttatggtagccaaatgatgggagggatgggcttatccaaccagtctagttatggaggtcctgctagccagcagctgagtggtggttatggaggtggttatggtggtcagagcagtatgagtggatatgaccaagttctgcaggaaaactccagtgactatcagtcaaaccttgcttaggtagagaaggagcactaaatagctactccagatataaaagctgtacatttgtgggagttgaatagaatgggagggatgtttagtatatccagtatgattggtaaatgggaaatataattgattctgatcactcttggtcagcttctctttctttatctttctttctccttttttaagaaaacgagttaagtttaacagttttgcattacaggcttgtgattcatgcttactgtaaagtggaagttgagattattttaaaacttcaagctcagtaattttgaacactgaaacattcatctaggacataataacaaagttcagtattgaccataactgttaaaacaatttttagctttcctcaagttagttatgttgtaggagtgtacctaagcagtaagcgtatttaggttaatgcagtttcacttatgttaaatgttgctcttataccacaaatacattgaaaacttcggatgcatgttgagaaacatgcctttctgtaaaactcaaatataggagctgtgtctacgattcaaagtgaaaacatttggcatgtttgttaattctagctttttggtttaatatcctgtaaggcacgtgagtgtacactttttttttttttaaggatacgggacaattttaagatgtaataccaatactttagaagtttggtcgtgtcgtttgtatgaaaatctgaggctttggtttaaatctttccttgtattgtgatttccatttagatgtattgtactaagtgaaacttgttaaataaatcttccttttaaaaactggaaa

SEQ ID NO: 2286 - DNA, 2038 bp, Homo sapiens
gacctgccgggacccttgcccgccgcgcacccgcagtcaccgccgagcgggcggccgggccgggacccgcgagtgtgcaccggcggccgggctggcgccgagcccagagcggaccagcagcagctcaagcgctgcggccgccgcctccccgctgaccccgcgatctgaggctgtcagagatgactctggttctgtccatgaatagattctgcgagcccattgtctcggaaggagctgctgaaattgctgggtaccaaacactatgggaggctgacagctacggaggcccaagccccccagggccagcacaagctcctttgcagggagaccggggagctggtcccccactggcaggatcacattacaggggaatttcaaatcctataacaacatccaagatcacatactttaagaggaagtatgtggaagaagaggattttcacccaccactcagcagctgtagccataaaaccatctcaatttttgaggaacgagcccacatcctttatatgtccttagaaaagctaaagtttatcgatgatcctgaagtgtacctccgaagatctgtccttataaacaatttgatgaaaaggatccatggagaaattatcatgcagaataactggtgcttccctgcctgctctttcaatggcacctctgcccaagagtggtttatggctcaagactgcccttaccgaaaacgaccacggatggccaaagaggaatgtgaaaagtttcatgcctgctgcttttaccaagaatgtggtggccactacctaaatttacccctttctgtcaatgctaatgttggaagtgcctccactgctgcctcctctccctccgcctcttcttcctcctcatcttcctcttcctctccccctttgcctttaccgagttgttcccgccaggtggattttgatgtaggtagtgcatctatttacaagagtgatggccagatacctgccaatgaaatctttgtcactaatgtcagatcacttggtgttcaggaaaaggccaaattaaatgatgagaaagcaaatgatgacaccaacagagatggtggccccctcagccacgaacctgtgggaaatgaccttgcttttgagtgcaaaggccaattttatgattattttgagaccggatataatgaaagaaacaatgtaaatgaatcttggaaaaagtccttacggaaaaaggaggcttcaccaccaagtaacaaactgtgctgcagcaaaggaagtaaaatatgagccatcttctcaccgaactttgaagcatgcacagcatgatcagttagctctcgtaaattttattttgaatggattttgtagttttgtacaacagataaaattatgccatgaacatgccatgtcgttttaatgcctggagagcagattgcgtaaaacatctgtatagcaggcatcagcgagcttcttataaatgtggtgatttttaccaaggaaactattgacttaatgcttaaaagtatatcatagttttcttacggaaaagatcagtagatgagattgggggacaatgtgcccttgcaatatttccattgccccccaaggagcctgtcactagctaagaaatttctacatgtttgccagttaattagggagttatttggtaagcaaatcaatataaccagcaaagatacctgcttcttctatatgatacaatattttttttaaataaaagactaaagacagggagctagatgaaatggcttaatggtgctgttaagtatttgtacctaacagtcttgtgtgacagatgaaaataggatgtaacataatgaaacacacctgtctaggggcggcaatcaacagtcttacacagagagggtattccctgcaagtttctggcttgcctgtgatgggtgatgaggcttttagagaggtgttatacagggcgatttttggtgccttacttttatcttaatttttgccaatgtgaaaattaaggataaatcagagttacagcagggatttaacaaacaggacaaaaaaaaaaaaaaaaaaaaaaaaaaaaaaaa

SEQ ID NO: 2287 - DNA, 2205 bp, Homo sapiens
atgtgggggctcctgctcgccctggccgccttcgcgccggccgtcggcccggctctgggggcgcccaggaactcggtgctgggcctcgcgcagcccgggaccaccaaggtcccaggctcgaccccggccctgcatagcagcccggcacagccgccggcggagacagctaacgggacctcagaacagcatgtccggattcgagtcatcaagaagaaaaaggtcattatgaagaagcggaagaagctaactctaactcgccccaccccactggtgactgccgggccccttgtgacccccactccagcagggaccctcgaccccgctgagaaacaagaaacaggctgtcctcctttgggtctggagtccctgcgagtttcagatagccggcttgaggcatccagcagccagtcctttggtcttggaccacaccgaggacggctcaacattcagtcaggcctggaggacggcgatctatatgatggagcctggtgtgctgaggagcaggacgccgatccatggtttcaggtggacgctgggcaccccacccgcttctcgggtgttatcacacagggcaggaactctgtctggaggtatgactgggtcacatcatacaaggtccagttcagcaatgacagtcggacctggtggggaagtaggaaccacagcagtgggatggacgcagtatttcctgccaattcagacccagaaactccagtgctgaacctcctgccggagccccaggtggcccgcttcattcgcctgctgccccagacctggctccagggaggcgcgccttgcctccgggcagagatcctggcctgcccagtctcagaccccaatgacctattccttgaggcccctgcgtcgggatcctctgaccctctagactttcagcatcacaattacaaggccatgaggaagctgatgaagcaggtacaagagcaatgccccaacatcacccgcatctacagcattgggaagagctaccagggcctgaagctgtatgtgatggaaatgtcggacaagcctggggagcatgagctgggggagcctgaggtgcgctacgtggctggcatgcatgggaacgaggccctggggcgggagttgcttctgctcctgatgcagttcctgtgccatgagttcctgcgagggaacccacgggtgacccggctgctctctgagatgcgcattcacctgctgccctccatgaaccctgatggctatgagatcgcctaccaccggggttcagagctggtgggctgggccgagggccgctggaacaaccagagcatcgatcttaaccataattttgctgacctcaacacaccactgtgggaagcacaggacgatgggaaggtgccccacatcgtccccaaccatcacctgccattgcccacttactacaccctgcccaatgccaccgtggctcctgaaacgcgggcagtaatcaagtggatgaagcggatcccctttgtgctaagtgccaacctccacgggggtgagctcgtggtgtcctacccattcgacatgactcgcaccccgtgggctgcccgcgagctcacgcccacaccagatgatgctgtgtttcgctggctcagcactgtctatgctggcagtaatctggccatgcaggacaccagccgccgaccctgccacagccaggacttctccgtgcacggcaacatcatcaacggggctgactggcacacggtccccgggagcatgaatgacttcagctacctacacaccaactgctttgaggtcactgtggagctgtcctgtgacaagttccctcacgagaatgaattgccccaggagtgggagaacaacaaagacgccctcctcacctacctggagcaggtgcgcatgggcattgcaggagtggtgagggacaaggacacggagcttgggattgctgacgctgtcattgccgtggatgggattaaccatgacgtgaccacggcgtggggcggggattattggcgtctgctgaccccaggggactacatggtgactgccagtgccgagggctaccattcagtgacacggaactgtcgggtcacctttgaagagggccccttcccctgcaatttcgtgctcaccaagactcccaaacagaggctgcgcgagctgctggcagctggggccaaggtgcccccggaccttcgcaggcgcctggagcggctaaggggacagaaggattga

SEQ ID NO: 2288 - DNA, 2799 bp, Homo sapiens
gaaactggccctggccctgaaccaaataccttgaaccctcgtaaactccataccctgacccccttgttttggatatacccaggtagaacaactctctctcactgtctgttgtgaggatacgctgtagcccactcattaagtacattctcctaataaatgctttggactgatcaccctgccagtcttttgtcttgggcaatctatacttttctcagaggttcccaaggcctactgaagggacttaacatactcttaatggctttcctctctcttgttttaccttatgccctcacttcctgagttaacctcccaaatacaggatcacctgtacccaagcccttagctcaagaatacaggatcacctgtacccaagcccttagctcaagctctgctttggaagaacccaaactaagacagtgctcctggtgccctccccaagcaacctcaagttctggctgttacttgagcagaggcctttcttttcccttcccccagctctatccatctgccaggcccccctcaaatctcttcatttccaagttttgcttgacttttccaagaggagagggctgcttcttagtatgtccctactcatcctttcctttcttgtcttgtatcctggtgcagcctggtaatggggcctcttcatggttgtgtgtcatgactccctaaccattatgcctccatgcatcccctgttcctcctggaacctagcaccatgccttacatggaaaagctgtcattgacagcccggtgagagccctgagggtggagtgactggggcagggcctgaggcaagaggtgggaggaggtaggaggccaggggctcagccggaccaggagactggaaacaggcaaggataaggcaggtgggggactgagttgtttgggtcacctctgcaggccagagagaccaggcaacatacacactgcagaaggtgggctgggaggattggggccagagctgggggagggatgagaacagaagcaggaccaggattcagcagagtcctcctatttccttccaccaccagggaatcttactgccccacttcagcttgtgctgtttcctggcaaggcaggctctcacatgcctggacgcctgggtgcgttggtgatgggaaggagcagggtgagggaggggccccaggagaggcccaggatgagcctcatcttgtccctccccattcttgtcttaccctctgcaaatgtgataggcacaggacaggagtaggcacctcgcctactgctgcttaacctttcagcttctccaggcccccaatcctgcttgctcccagcttggtaagtagatctgtgcacgtccctttacaccccaccatccagttttgcccagatgtgctagaatggggctggacaaagaaggaggggccagactagaggagtggtggtagagatagtgacagcctggggtgaggactttatgcctgtttaccactgagctctgggaaggaggccaggagtggggcaggtcaactgactgggagcaggggatctgggttccaagaaggagttgtgtttgaggtggggtctgggtcctcgtggaagtcaggactcccaggcagaaaagaggcaggctgcagggaagtaaggaggaggcatggcaccttctcatcgggcatcacaggtggggttttgccccacccctgaacgccctctgtggcgccttccacccacctgtaggcccagaaggatgtcggtctgctaccgtcccccagggaacgagacactgctgagctggaagacttcgcgggccacaggcacagccttcctgctgctggcggcgctgctggggctgcctggcaacggcttcgtggtgtggagcttggcgggctggcggcctgcacgggggcgaccgctggcggccacgcttgtgctgcacctggcgctggccgacggcgcggtgctgctgctcacgccgctctttgtggccttcctgacccggcaggcctggccgctgggccaggcgggctgcaaggcggtgtactacgtgtgcgcgctcagcatgtacgccagcgtgctgctcaccggcctgctcagcctgcagcgctgcctcgcagtcacccgccccttcctggcgcctcggctgcgcagcccggccctggcccgccgcctgctgctggcggtctggctggccgccctgttgctcgccgtcccggccgccgtctaccgccacctgtggagggaccgcgtatgccagctgtgccacccgtcgccggtccacgccgccgcccacctgagcctggagactctgaccgctttcgtgcttcctttcgggctgatgctcggctgctacagcgtgacgctggcacggctgcggggcgcccgctggggctccgggcggcacggggcgcgggtgggccggctggtgagcgccatcgtgcttgccttcggcttgctctgggccccctaccacgcagtcaaccttctgcaggcggtcgcagcgctggctccaccggaaggggccttggcgaagctgggcggagccggccaggcggcgcgagcgggaactacggccttggccttcttcagttctagcgtcaacccggtgctctacgtcttcaccgctggagatctgctgccccgggcaggtccccgtttcctcacgcggctcttcgaaggctctggggaggcccgagggggcggccgctctagggaagggaccatggagctccgaactacccctcagctgaaagtggtggggcagggccgcggcaatggagacccggggggtgggatggagaaggacggtccggaatgggacctttgacagcagaccct

SEQ ID NO: 2289 - DNA, 2646 bp, Homo sapiens
atcagcaacaattaaaatattcacgtggtatctgtagtttaataatggaccaacatcaacatttgaataaaacagcagagtcagcatcttcagagaaaaagaaaacaagacgctgcaatggattcaagatgttcttggcagccctgtcattcagctatattgctaaagcactaggtggaatcattatgaaaatttccatcactcaaatagaaaggagatttgacatatcctcttctcttgctggtttaattgatggaagctttgaaattggaaatttgcttgtgattgtatttgtaagttactttggatctaaactacacagaccgaagttaattggaattggttgtctccttatgggaactggaagtattttgacatctttaccacatttcttcatgggatattataggtattctaaagaaacccatattaatccatcagaaaattcaacatcaagtttatcaacctgtttaattaatcaaaccttatcattcaatggaacatcacctgagatagtagaaaaagattgtgtaaaggaatctgggtcacacatgtggatctatgtcttcatggggaatatgcttcgtggcataggggaaacccccatagtaccattggggatttcatacattgatgattttgcaaaagaaggacattcttccttgtatttaggtagtttgaatgcaataggaatgattggtccagtcattggctttgcactgggatctctgtttgctaaaatgtacgtggatattggatatgtagatctgagcactatcagaataactcctaaggactctcgttgggttggagcttggtggcttggtttccttgtgtctggactattttccattatttcttccataccattttttttcttgccgaaaaatccaaataaaccacaaaaagaaagaaaaatttcactatcattgcatgtgctgaaaacaaatgatgatagaaatcaaacagctaatttgaccaaccaaggaaaaaatgttaccaaaaatgtgactggttttttccagtctttgaaaagcatccttaccaatcccctgtatgttatatttctgcttttgacattgttacaagtaagcagctttattggttcttttacttacgtctttaaatatatggagcaacagtacggtcagtctgcatctcatgctaactttttgttgggaatcataaccattcctacggttgcaactggaatgtttttaggaggatttatcattaaaaaattcaaattgtctttagttggaattgccaaattttcatttcttacttcgatgatatccttcttgtttcaacttctatatttccctctaatctgcgaaagcaaatcagttgccggcctaaccttgacctatgatggaaataattcagtggcatctcatgtagatgtaccactttcttattgcaactcagagtgcaattgtgatgaaagtcagtgggaaccagtctgtgggaacaatggaataacttacctgtcaccttgtctagcaggatgcaaatcctcaagtggtattaaaaagcatacagtgttttataactgtagttgtgtggaagtaactggtctccagaacagaaattactcagcacacttgggtgaatgcccaagagataatacttgtacaaggaaatttttcatctatgttgcaattcaagtcataaactctttgttctctgcaacaggaggtaccacatttatcttgttgactgtgaagattgttcaacctgaattgaaagcacttgcaatgggtttccagtcaatggttataagaacactaggaggaattctagctccaatatattttggggctctgattgataaaacatgtatgaagtggtccaccaacagctgtggagcacaaggagcttgtaggatatataattccgtattttttggaagggtctacttgggcttatctatagctttaagattcccagcacttgttttatatattgttttcatttttgctatgaagaaaaaatttcaaggaaaagataccaaggcatcggacaatgaaagaaaagtaatggatgaagcaaacttagaattcttaaataatggtgaacattttgtaccttctgctggaacagatagtaaaacatgtaatttggacatgcaagacaatgctgctgccaactaacattgcattgattcattaagatgttatttttgaggtgttcctggtctttcactgacaattccaacattctttacttacagtggaccaatggataagtctatgcatctataataaactataaaaaatgggagtacccatggttaggatatagctatgcctttatggttaagattagaatatatgatccataaaatttaaagtgagaggcatggttagtgtgtgatacaataaaaagtaattgtttggtagttgtaactgctaataaaaccagtgactagaatataagggaggtaaaaaggacaagatagattaatagcctaaataaagagaaaagcctgatgcctttaaaaaatgaaacactttggatgtattacttaggccaaaatctggcctggatttatgctataatatatattttcatgttaagttgtatatttttcagaaattataaatattattaatttaaaattcgaaaaaaaaaaaaaaaaaaaaa

SEQ ID NO: 2290 - DNA, 2531 bp, Homo sapiens
  misc_feature (571)..(571): n is a, c, g, or t
ggcacgaggctcttttttttcccggcagatctttgttgtgtgggagggcagcagggatggacttgagcttgcggatcccctgctagagcagccgcgctcggagaaggcgccgcagccgcgaggaggagccgccgccgccgcgcccgaggccccgccgcccgcggcctctgtcggcccgcgccccgctcgccccgtcgcccctcgcctccccgcagagtcccctcgcggcagcagatgtgtgtggggtcagcccacggcggggactatggtgaaattcccggcgctcacgcactactggcccctgatccggttcttggtgcccctgggcatcaccaacatagccatcgacttcggggagcaggccttgaaccggggcattgctgctgtcaaggaggatgcagtcgagatgctggccagctacgggctggcgtactccctcatgaagttcttcacgggtcccatgagtgacttcaaaaatgtgggcctggtgtttgtgagcagcaagagagacaggaccaaagccgtcctgtgtatggtggtggcaggggccatcgctgctgtctttcacacnctgatagcttatagtgatttaggatactacattatcaataaactgcaccatgtggacgagtcggtggggagcaagacgagaagggccttcctgtacctcgccgcctttcctttcatggacgcaatggcatggacccatgctggcattctcttaaaacacaaatacagtttcctggtgggatgtgcctcaatctcagatgtcatagctcaggttgtttttgtagccattttgcttcacagtcacctggaatgccgggagcccctgctcatcccgatcctctccttgtacatgggcgcacttgtgcgctgcaccaccctgtgcctgggctactacaagaacattcacgacatcatccctgacagaagtggcccggagctggggggagatgcaacaataagaaagatgctgagcttctggtggcctttggctctaattctggccacacagagaatcagtcggcctattgtcaacctctttgtttcccgggaccttggtggcagttctgcagccacagaagcagtggcgattttgacagccacataccctgtgggtcacatgccatacggctggttgacggaaatccgtgctgtgtatcctgctttcgacaagaataaccccagcaacaaactggtgagcacgagcaacacagtcacggcagcccacatcaagaagttcaccttcgtctgcatggctctgtcactcacgctctgtttcgtgatgttttggacacccaacgtgtctgagaaaatcttgatagacatcatcggagtggactttgcctttgcagaactctgtgttgttcctttgcggatcttctccttcttcccagttccagtcacagtgagggcgcatctcaccgggtggctgatgacactgaagaaaaccttcgtccttgcccccagctctgtgctgcggatcatcgtcctcatcgccagcctcgtggtcctaccctacctgggggtgcacggtgcgaccctgggcgtgggctccctcctggcgggctttgtgggagaatccaccatggtcgccatcgctgcgtgctatgtctaccggaagcagaaaaagaagatggagaatgagtcggccacggagggggaagactctgccatgacagacatgcctccgacagaggaggtgacagacatcgtggaaatgagagaggagaatgaataaggcacgggacggccatgggcactgcagggacagtcagtcaggatgacacttcggcatcatctcttccctctcccatcgtattttgttcccttttttttgttttgttttggtaatgaaagaggccttgatttaaaggtttcgtgtcaattctctagcatactgggtatgcccttcctgatctaacattctgtttatgatctaggatttagaacgtcgtatgagatcctacaatggaagaataaaatcacctcattcttcatttcagatctgaacattagcagtgatctagatttttttttttttaaacaaaattaagtgtgcttagagtcatccctctacatgggctgtggctgtcagcccataggtttgtcagtttcacatcaaaactgtgggtataaactgttgaaaccaatcacattaaaatatttagctgggcacagtggtgtgcatctgtagtcccagctacttgggaggctgaggcaggaggatcgcttaagcacaggagttggaatccagcctgagcaacagagcaaaaccccgtctctaaaatacaaataaaatatttgtgtagtttttgattaaaattgactacagcggtcagtataaaatacatgtcgcttttaaggaagtgctctttatgtatctaacagatggaagtttttgcattggtaagagcatttatatatgctttgtttcagggtttatggatttgtattcatatattgtcaaataggtttcatactctaattttactttaagtaaagcttaaacacttggcatacaactg

SEQ ID NO: 2291 - DNA, 2123 bp, Homo sapiens
gagctcgcgggcgactgcctgccaggcagacgctgcagctaagctgcgcggtggctgtggcaggtgagagcctccggaagggaggcggcctctggccccgaccctgctccgcgatcgcccactcgggcgcccggccgggcctggcagggaagggccgccgccgccgccgcgcgtttgcgaggcctggcggggccgcggggcccaggaatggcgtaaggggcccccccagactccgagacggcccgagcgggtcgccggctgtgggacggcggcgtgcccttcctttcctccctcccaggttcgcgcccgagctctgctagccacccgtccgacaacttccggactcccagggacagccctgccatcaaggaagacagcacaggactgggacccacccatgaacccttctcaggacaacccaacagcaccagtggggatgttctcctaagccgcagagggcctgggcacgccatccgtcctccaggaagagccatggtgttaatgcaggacaagggcagctctcagcagtggcctggtctggggggcgagggtggtggcacaggtcccttaagcatgctcagagctgccctgctgctcatcagcctgccatggggggcccaagggacagccagcaccagcctcagcactgctgggggtcacaccgtgccaccgactgggggccgctacttgagcattggagatggctctgtgatggagtttgagtttcctgaggacagtgagggcatcatcgtgatctccagccagtacccaggccaggccaacaggacggcgcctggccccatgctcagggtcacctccctggacacagaggtgctgaccatcaagaacgtgagtgctataacctggggaggcgggggtggctttgtggtgagcatccactcaggcctggctgggctggccccactccacatccagctcgtggacgcccatgaggccccgcccacactgattgaggagcggagagacttctgcatcaaggtctcacctgctgaagacacgcctgccaccctcagcgccgacctggcccacttctcggaaaacccaatcctctacctgctcctgcctcttatctttgtcaacaagtgttcgtttgggtgcaaagtggaactcgaggttctgaaggggctcatgcagagcccccagcccatgctgctgggcctcctgggccagtttctggtcatgcccttgtacgctttcctcatggccaaggtcttcatgctgcccaaggccctggctctgggcctcatcatcacctgctcgtcgcctggcggcggggggagctacctcttcagcctccttcttggaggggacgtcaccctggccatctccatgactttcctctctacggtggctgccactggcttcttgcctctgtcttcggccatctacagccgcctgctcagcatccatgagacgctccacgtgcccatctccaagatcctggggaccctgctgttcattgccatccccatagccgtgggcgtgctgatcaagtccaagctccccaagttctcccagctgctgctgcaggtcgtcaagcccttcagctttgtgctcctcctgggcggcctcttcctggcctatcgcatgggggtcttcatcctggcaggcatccggctacccatcgtactggtgggtatcacggtgcccctggttggcctgttggtgggctactgcctagccacgtgtctgaagctgccagtggcccagcggcggacggtcagcattgaggtaggggtgcagaacagcctgctggccttggccatgctgcagctatccctccgccgccttcaagctgactatgcctcccaggcccccttcattgtggcgctgagcggcacctccgagatgctggccttggtcattggccacttcatctacagcagcctgttcccagttccctgaggcctctgggtcaagctttcatcagccccagcccccacactccaccaaagttctcatgcactatgcactcagaaaaatccaggcttatttttttactgattttttattctccagctttcagtgccaaagaggccatgctgagttaggtaggtgggcgctgcccagaaaatatatttcaataaaagagagaagcaagc

SEQ ID NO: 2292 - DNA, 2104 bp, Homo sapiens
cccaatcactcctggaatacacagagagaggcagcagcttgctcagcggacaaggatgctgggcgtgagggaccaaggcctgccctgcactcgggcctcctccagccagtgctgaccagggacttctgacctgctggccagccaggacctgtgtggggaggccctcctgctgccttggggtgacaatctcagctccaggctacagggagaccgggaggatcacagagccagcatgttacaggatcctgacagtgatcaacctctgaacagcctcgatgtcaaacccctgcgcaaaccccgtatccccatggagaccttcagaaaggtggggatccccatcatcatagcactactgagcctggcgagtatcatcattgtggttgtcctcatcaaggtgattctggataaatactacttcctctgcgggcagcctctccacttcatcccgaggaagcagctgtgtgacggagagctggactgtcccttgggggaggacgaggagcactgtgtcaagagcttccccgaagggcctgcagtggcagtccgcctctccaaggaccgatccacactgcaggtgctggactcggccacagggaactggttctctgcctgtttcgacaacttcacagaagctctcgctgagacagcctgtaggcagatgggctacagcagcaaacccactttcagagctgtggagattggcccagaccaggatctggatgttgttgaaatcacagaaaacagccaggagcttcgcatgcggaactcaagtgggccctgtctctcaggctccctggtctccctgcactgtcttgcctgtgggaagagcctgaagaccccccgtgtggtgggtggggaggaggcctctgtggattcttggccttggcaggtcagcatccagtacgacaaacagcacgtctgtggagggagcatcctggacccccactgggtcctcacggcagcccactgcttcaggaaacataccgatgtgttcaactggaaggtgcgggcaggctcagacaaactgggcagcttcccatccctggctgtggccaagatcatcatcattgaattcaaccccatgtaccccaaagacaatgacatcgccctcatgaagctgcagttcccactcactttctcaggcacagtcaggcccatctgtctgcccttctttgatgaggagctcactccagccaccccactctggatcattggatggggctttacgaagcagaatggagggaagatgtctgacatactgctgcaggcgtcagtccaggtcattgacagcacacggtgcaatgcagacgatgcgtaccagggggaagtcaccgagaagatgatgtgtgcaggcatcccggaagggggtgtggacacctgccagggtgacagtggtgggcccctgatgtaccaatctgaccagtggcatgtggtgggcatcgttagctggggctatggctgcgggggcccgagcaccccaggagtatacaccaaggtctcagcctatctcaactggatctacaatgtctggaaggctgagctgtaatgctgctgcccctttgcagtgctgggagccgcttccttcctgccctgcccacctggggatcccccaaagtcagacacagagcaagagtccccttgggtacacccctctgcccacagcctcagcatttcttggagcagcaaagggcctcaattcctgtaagagaccctcgcagcccagaggcgcccagaggaagtcagcagccctagctcggccacacttggtgctcccagcatcccagggagagacacagcccactgaacaaggtctcaggggtattgctaagccaagaaggaactttcccacactactgaatggaagcaggctgtcttgtaaaagcccagatcactgtgggctggagaggagaaggaaagggtctgcgccagccctgtccgtcttcacccatccccaagcctactagagcaagaaaccagttgtaatataaaatgcactgccctactgttggtatgactaccgttacctactgttgtcattgttattacagctatggccactattattaaagagctgtgtaacatcaaaaaaaaaaaaaaaaaaaaa

SEQ ID NO: 2293 - DNA, 1305 bp, Homo sapiens
atgagggaaatcgtgctcacgcagaccgggcagtgcgggaaccagatcggggccaagttctgggaggtgatctctgatgaacatgccatcgactccgctggcacctaccacggggacagccacctgcagctggagcgcatcaacgtgcaccaccacgaggccagcggtggcaggtacgtgccccgcgctgtgctcgtggatctggagccgggcaccatggactctgtgcgctcggggcccttcgcggaggtcttcaggccagacaacttcatttcccgtcagtgtggggccggaaacaactgggccaagggacgctacaccgaaggcgcggagctgatggagtcagtgatggacgttgtcagaaaggaggctgagagctgtgactgcctgcagggtttccagctgacccactccctgggtggggggactgggtctgggatgggtacccttctgctcagtaagatccgggaggagtacccagacaggatcataaacacattcagcatcctgccctcgcccaaggtgtcggacaccgtggtggagccctacaacgccaccctctcagtccaccagctcatagaaaacgcagatgagaccttttgcatagataacgaagcgctatatgacatatgttccaggaccctaaaactgcccacacccacctatggtgacctgaaccacctggtgtctgctaccgtgagtggggtcaccacgtgcctgcgcttcccaggccagctgaatgctgacctgcggaagctggccgtgaacatggtcccgtttccccggctgcatttcttcatgcccggctttgccccactgaccagccagggcagccagcagtaccgggccttgactgtggctgagctcacccagcagatgtttgatgctaagaacatgatggctgcccgtgacccccgtcacggctgctacctaacggcggctgccattttcaggggtcgcatgcccatgagggaggtggatgaacagatgttcaacattcaagataagaacagcagctactttgctgactggctccccaacaacataaaaacagccgtctgtgacatcccaccctgggggctaaaaatgtcagtcaccttcactgggaacaacacagccgtccaggaactcaagcgggtctcagagcagtttacagcaacgttcaggcgcaaggccttcctccactggtacacgggcgagggcatggatgagatggaattcactgaggccgagagcaacatgaacgacttggtgtctgaatatcagcaatatcaggatgccacggccgagggagaaggagtatga

SEQ ID NO: 2294 - DNA, 768 bp, Homo sapiens
atgatcctaaacaaagctctgctgctgggggccctcgccctgactgccgtgatgagcccctgtggaggtgaagacattgtggctgaccatgttgcctcctatggtgtgaacttctaccagtctcacggtccctctggccagtacacccatgaatttgatggagacgaggagttctacgtggacctggagacgaaagagactgtctggcagttgcctatgtttagcaaatttataagttttgacccgcagagtgcactgagaaatatggctgtgggaaaacacaccttggaattcatgatgagacagtccaactctaccgctgccaccaatgaggttcctgaggtcacagtgttttccaagtttcctgtgacgctgggtcagcccaacaccctcatctgtcttgtggacaacatctttcctcctgtggtcaacatcacctggctgagcaatgggcactcagtcacagaaggtgtttctgagaccagcttcctctccaagagtgatcattccttcttcaagatcagttacctcaccttcctcccttctgctgatgagatttatgactgcaaggtggagcactggggcctggacgagcctcttctgaaacactgggagcctgagattccagcccctatgtcagagctcacagagactttggtctgcgccctggggttgtctgtgggcctcatgggcattgtggtgggcactgtcttcatcatccaaggcctgcgttcagttggtgcttccagacaccaagggctcttatga

SEQ ID NO: 2295 - DNA, 1727 bp, Homo sapiens
atggagcgccccccgccccgcgccgccggccgggaccccagtgcgctgcgggccgaggcgccgtggctgcgcgcggagggtccggggccgcgcgccgcgcccgtgacggtgcccacgccgccgcagggctcttccgtgggcggcggcttcgcgggcttggagttcgcgcggccgcaggagtcggagccgcgggcctcggacctgggggccccccggacgtggacgggggcggcggcggggccccggactccgtcggcgcacatccccgtcccagcgcagagagccaccccaggaaaagcccggctggacgaggtcatggctgccgctgcccttacaagcctgtccaccaagccctctccttctggggccccggttgcagccttcagcccagagcctggcctggagccctggaaggaggccctggtgcggcccccaggcagctacagcagcagcagcaacagtggagactggggatgggacctggccagtgaccagtcctctccgtccaccccgtcacccccactgccccccgaggcagcccactttctgtttggggagcccaccctgagaaaaaggaagagcccggcccaggtcatgttccagtgtctgtggaagagctgcgggaaggtgctgagcacggcgtcggcgatgcagagacacatccgcctggtgcacctggggaggcaggcagagcctgatcagagtgatggtgaggaggacttctactacacagagctggatgttggtgtggacacgctgaccgacgggctgtccagcctgactccagtgtcccccacggcctccatgccgcctgccttcccccgcctggagctgccagagctgctggagcccccagccctgcctagtcccctgcggccgcctgccccgcccctgcccccgccccctgtcctgagcaccgttgctaacccccagtcctgtcacagtgaccgtgtctaccagggctgcctgacgcccgcccgcctggagccgcagcccacggaggtcggagcctgcccacccgccttgtcctccaggatcggagtcaccctgaggaagccccgcggcgacgcgaagaagtgccggaaggtgtatggcatggagcgccgggacctctggtgcacagcctgccgctggaagaaagcctgccagcggttcctggactaagtccggctcgttcaagaacataagctaccaccttctccctccccaccccctccaggcccggggctgaaacagcccgaggacagccccaggggctggctttcaccagctgcagggtctgcttttacttggggtgggggggcggggctgaccctgaaccctcccccccgccaggtcggggaggggtcccaccactcaaagtgcctctaaagaaaccagctttttgcactaaagccaaaccacaccgctgtccccttagccccaagggccctgggggcagccaccctcccgcctgtcggcccgtagatttatcaagggtgttatgggcccagctttggggggccagtcccgatgcactttgaggggtgttggagaggggactcccccactcgcacttaactcaacggctctcgggccctggggctgtttttaccatgtttgtttttgaagctcaggtgtctcacgtctgggctgcaccaggcgaagagagaaattaaagatttgaggtttttccagaaaaaaaaaaaaaaaaaaaaaaaaaaaaaaaaaaaaaaaaaaaaaaaaaa

SEQ ID NO: 2296 - DNA, 1595 bp, Homo sapiens
ggacactgcagccggagcccgggaggggccgcgccgccaccgtctgaactaggatgtcccgacatgaaggtgtcagctgtgatgcatgtttaaaaggaaattttcgaggtcgcagatataagtgtttaatttgctacgattacgatctttgtgcatcttgttatgaaagtggtgcaacaacaacaaggcatacaactgaccacccaatgcagtgcatattaacaagggtagattttgatttatactatggtggggaagctttctctgtagagcagccacagtcttttacttgtccctattgtggaaaaatgggctatacggagacatctcttcaagaacatgttacttctgaacatgcagaaacatcaacagaagtgatttgtccaatatgtgcagcgttacctggaggcgatcctaatcatgtcacggatgactttgcagctcatcttacacttgaacacagagcccctagagatttagatgaatcgagtggtgttcgacatgtacgtagaatgtttcaccctggccggggattaggaggtcctcgtgctcgtagatcaaacatgcactttactagcagttctactggtggactttcttcttctcagagttcatattctccaagcaatagggaagccatggatcctatagctgagcttttatctcagttatcaggagtgagacgttctgcaggaggacagcttaattcctctggcccttccgcttctcagttacaacaactgcagatgcagctgcagctagaacggcagcatgccagggcagcacggcaacaactggagaccgcacgcaacgcaacccggcgtactaacacaagcagtgtcaccactacaatcacacaatccacagcaacaaccaacatagctaatacagaaagcagtcagcagactctacagaattcccagtttcttttaacaaggttgaatgatcctaaaatgtctgaaacggagcgccagtccatggaaagcgagcgtgcagaccgcagcctgtttgtccaagagctccttctgtccactttagtgcgtgaagagagctcatcctcagatgaggatgatcggggggagatggcagattttggtgctatgggctgtgtagatattatgcctttagatgttgctttagaaaacctaaatttaaaagagagtaataaaggaaatgagcctccaccacctcctctttgatgacatcccaattcgcagacaatgtcctctgtgctgtatttgccaatgaaagtggacaacaactatcttgggtttgtttggtgattgtaatttcaggtctgtcactcttgttacattgtgtacattcaaaaggaagagagaaaatatatatgataatcatttccacttaactaatttttacttctagcaggtaaatgtaggtagcagtgcaggggtgatctctgcttcctgtaccttgacatgcaaaaggctctcctaatactccacattcaaactgaagaggaaaattgaaatctctaatgaagctgctgtgtgtatttatgaatattaatgaataaaaactgcttggatggtttaccttaaaaaaaaaaaaaaaaaaaaacaacaaaaaaaaaa

SEQ ID NO: 2297 - DNA, 3389 bp, Homo sapiens
ggcacgaggggcgcggaggatgaggccgctgcctggcgctcttggcgtggcggccgccgcgctgtggctgctgctgctgctgctgccccggacccgggcggacgagcacgaacacacgtatcaagataaagaggaagttgtcttatggatgaatactgttgggccctaccataatcgtcaagaaacatataagtacttttcacttccattctgtgtggggtcaaaaaaaagtatcagtcattaccatgaaactctgggagaagcacttcaaggggttgaattggaatttagtggtctggatattaaatttaaagatgatgtgatgccagccacttactgtgaaattgatttagataaagaaaagagagatgcatttgtatatgccataaaaaatcattactggtaccagatgtacatagatgatttaccaatatggggtattgttggtgaggctgatgaaaatggagaagattactatctttggacctataaaaaacttgaaataggttttaatggaaatcgaattgttgatgttaatctaactagtgaaggaaaggtgaaactgggttccaaatactataatccagatgtcatattcagtaaaatggaaaagtcagatgtgaaatttgaagatcgatttgacaatatcttgatcgtccttttttcacatcggattcattggttttcaattttcaactccttcatgatggtgatcttcttggtgggcttagtttcaatgattttaatgagaacattaagaaaagattatgctcggtacagtaaagaggaagaaatggatgatatggatagagacctaggagatgaatatggatggaaacaggtgcatggagatgtatttagaccatcaagtcacccactgatattttcctctctgattggttctggatgtcagatatttgctgtgtctctcatcgttattattgttgcaatgatagaagatttatatactgagaggggatcaatgctcagtacagccatatttgtctatgctgctacgtctccagtgaatggttattttggaggaagtctgtatgctagacaaggaggaaggagatggataaagcagatgtttattggggcattccttatcccagctatgggtgtgcactgccttcttcatcaatttcatagccatttattaccatgcttcaagagccattccttttggaacaatggtggccgtttgttgcatctgtttttttgttattcttcctctaaatcttgttggtacaatacttggccgaaatctgtcaggtcagcccaactttccttgtcgtgtcaatgctgtgcctcgtcctataccggagaaaaaatggttcatggagctgcggttattgtttgcctgggtggaattttaccttttggttcaatctttattgaaatgtatttcatcttcacgtctttctgggcatataagatctattatgtctatggcttcatgatgctggtgctggttatcctgtgcattgtgactgtctgtgtgactattgtgtgcacatattttctactaaatgcagaagattaccggtggcaatggacaagttttctctctgctgcatcaactgcaatctatgtttacatgtattccttttactactattttttcaaaacaaagatgtatggcttatttcaaacatcattttactttggatatatggcggtatttagcacagccttggggataatgtgtggagcgattggttacatgggaacaagtgcctttgtccgaaaaatctatactaatgtgaaaattgactagagacccaagaaaacctggaactttggatcaatttctttttcataggggtggaacttgcacagcaaaaacaaacaaacgcaagaagagatttgggctttaacacactgggtactttgtgggtctctctttcgtcggtggcttaaagtaacatctatttccattgatcctaggttcttcctgactgctttctccaactgttcacagcaaatgcttggattttatgcagtaggcattactacagtacatggctaatcttcccaaaaactagctcattaaagatgaaatagaccagctctcttcagtgaagaggacaaatagtttatttaaagcatttgttccaataaaataaatagagggaaacttggatgctaaaattacatgaataggaatcttcctggcacttagtgtttctatgttattgaaaaatgatgttccagaaagattacttttttcctcttatttttactgccattgtcgacctattgtgggacatttttatatattgaatctgggttcttttttgactttttttttttcccaatccaacagcatccttttttttaaaagagagaattagaaaatattaaatcctgcatgtaatatatctgctgtcatcttagttggaccaacttcccatttatttatcttaaaactatacagttacatcttaattccatccaaagaagatacagtttgaagacagaagtgtactctctacaatgcaatttactgtacagttagaaagcaaagtgttaaatggagaagatacttgtttttattaaacattttgagatttagataaactacattttaactgaatgtctaaagtgattatcttttttccccccaagttagtcttaaatcttttgggtttgaatgaaggttttacataagaaattattaaaaacaaggggggtgggtaataaatgtatataacattaaataatgtaacgtaggtgtagattcccaaatgcatttggatgtacagatcgactacagagtacttttttcttatgatgattggtgtagaaatgtgtgatttgggtgggcttttacatcttgcctaccattgcatgaaacattggggtttcttcaaaatgtgtgtgtcatacttcttttgggaggggggttgttttcttctgtttattttctgagactcctacaggagccaaatttgtaatttagagacacttaattttgttaatcctgtctgggacacttaagtaacatctaaagcattattgctttagaatgttcaaataaaatttcctgaccaaattgttttgtggaaatagatgtgtttgcaatttgaagatatctttctgtccagaaggcaaaattaccgaatgccatttttaaaagtatgctataaactatgctactctcatacaggggacccgtattttaaaatctccagacttgcttacatctagattatccagcacaatcataaagtgaatgacaaaccctttgaatgaaattgtggcacaaaatctgttcaggttggtgtaccgtgtaaagtggggatggggtaaaagtggttaacgtactgttggatcaacaaataaaggttacagttttgtaagagaaaaaaaaaaaaaaaaaaaaa

SEQ ID NO: 2298 - DNA, 1284 bp, Homo sapiens
ggcacgagggtctccgcctgcaggtgcagacatctggaggagagagtcggagagcagaaaccacttggctcccagacaattcccctacaggctttgggcctggaattgaggagaaagtgagctaagttggggtggggtgagtccaaagaagcacgggctgggccaagctaagctgctctgggctgggctgatccctccccactcaggggcgggaccccaggaggagggagaggacagagccactgcagaggaccagactgggaaaacaacgatatggcaggagccagtcttggggcccgcttctaccggcagatcaaaagacatccggggatcatcccgatgatcggcttaatctgcctgggcatgggcagcgctgcgctttacttgctgcgactcgcccttcgcagccccgacgtctgctgggacagaaagaacaacccggagccctggaaccgcctgagccccaatgaccaatacaagttccttgcagtttccactgactataagaagctgaagaaggaccggccagacttctaagccaggctgggctgccagtgccatgcaagccacagccagccagcccatccacttcttccactcctccccgcaggccccaaggcatcactccggccaccctgtcccgctactgcttacacaggccgggttcccacgcagaggggaggctgctccacccctactctcctcccttgctcccagcagcggaagcgcctctgacccttggcttgagtcccacgtgggggaggaggaggcaggcagcaccagcaggggtccaccaagagcccagaccagcccctctgccctcctacccgggcctcgaagggtgtggcacaggctacgtgttgagcgtggcctacgtgagccaacaagaagcaggggcctctgagtgccaagcgacgtggcgggctccacgttagcccaggctctgagagccagcccaggggcggcgctgctcagcttgggctggtccagggcctgcccaggctggggcacctttgcctcctgaggcgcagcgcactcctcccctgcccaagcctactgcctcccgctgccgccagtaccccctccagccccacacctgggcctccccctgccactcccctcccttgctcccctctgtccccagggatcaaacagaagcagccgtgggcaaaatacaatttcatttaacaaattgaaaaaaaaaaaaaaaaaaaaaaaaaaaaaaaaaaaaaaaaaaaaaaaaaaaaaaaaaaaaaaaaaaaaaaaaaaaaaaaaaaaaaaaaa

SEQ ID NO: 2299 - DNA, 1121 bp, Homo sapiens
ggcacgagggcggtcccgggtgctgctggttagtgtgctctgagggagggtccgagccagccgctgttttgccggaggagcccctcaggccgtagtaagcattaataatgtctttcatctttgagtggatctacaatggcttcagcagtgtgctccagttcctaggactgtacaagaaatctggaaaacttgtattcttaggtttggataatgcaggcaaaaccactcttcttcacatgctcaaagatgacagattgggccaacatgttccaacactacatccgacatcagaagagctaacaattgctggaatgacctttacaacttttgatcttggtgggcacgagcaagcacgtcgcgtttggaaaaattatctcccagcaattaatgggattgtctttctggtggactgtgcagatcattctcgcctcgtggaatccaaagttgagcttaatgctttaatgactgatgaaacaatatccaatgtgccaatccttatcttgggtaacaaaattgacagaacagatgcaatcagtgaagaaaaactccgtgagatatttgggctttatggacagaccacaggaaaggggaatgtgaccctgaaggagctgaatgctcgccccatggaagtgttcatgtgcagtgtgctcaagaggcaaggttacggcgagggtttccgctggctctcccagtatattgactgatgtttggacggtgaaaataaaagagttttacttctctggactgatcctattcacagcttcctcatgaacttttctaatagaacaaggaaagctctccaaccatgtctggcgttgagaagccaagagtctctgtcaactctctcattgcccagtggtgacatgtgctcttctccacactgttgggaggtaatgctgccccacgtgctggtgcaggtcagtatcctgggacttggaagctggcaggatttgccgggtaaagctgtatgccatcatggggcacctgaaaagaaaaacacgtctcaccactgtggttgattcaaaagaaagtgattctattttttaaagaaagcgttgttaatgtaaaaaaaaaaaaaaaaaaaaaaaaaaaaaaaaaaaaaaaaaaaaaaaaaaaaaaaa

SEQ ID NO: 2300 - DNA, 1663 bp, Homo sapiens
acgaggcgcgggtgaggcttaacgcgcaggaggtctcacgagagtggaagcaactctcgcgaattttaaaatttatctttttgcctagcgactgacaacaggctggttgcttggcgtggaatcctaaagtggcctggctttgagactggagtgagaccccagccctaggtggtacatttccattatagaggagacggattcagaagggctacagaccaaggttgttgaaaaccagacatatgatgagcgtctagagattaacgactccgaagaggttgcaagtatttatactccaaccccaagacaccaaggacttcctcgttctgcccatcttcctaacaaggctatggctgataacagcagtgatgagtgtgaagaggaaaataacaaggagaagaagaagacctcacagttgacacctcaacggggctttagtgaaaatgaggatgacgatgatgatgatgatgattcatctgaaactgattctgattctgatgatgatgatgaagagcatggagcccctctggaaggggcctatgaccctgcagactatgagcatttgccagtttctgctgaaattaaggaactcttccagtacatcagtaggtacacacctcagttgattgacctggaccacaaactgaagcctttcattcctgattttatcccagctgtcggggatattgatgcattcttaaaggtcccacgtcctgatggaaagcctgacaaccttggcctattggtattggatgaaccttctacaaagcagtcagaccctacggtgctctcactctggttaacagagaattctaagcagcacaacatcacacaacatatgaaagtaaaaagcctagaagatgcagaaaagaatcccaaagccattgacacgtggattgagagcatctctgaattacaccgttctaagccccctgcgactgtgcactacaccaggcccatgcccgacattgacacgctgatgcaggaatggtccccggagtttgaagagcttttgggcaaggtaagcctgcccacggcagagattgattgcagcctggcagagtacattgacatgatctgtgccattctagacatccctgtctacaagagtcggatccagtccctccatctgctcttttccctctactcagaattcaagaactcacagcattttaaagctctcgctgaaggcaagaaagcattcactccttcatccaattccacctcccaagctggagacatggagacattaaccttcagctgagacacttcccaagctgctgtttcaaggctgagctggcccctctgccccagctgagatggacagatcgttgtcagctacttgatgtccttgcccatgccacagcttggctcaggggcagtgcatgtcctgctgccctctctgccagagggcacagaacatgtttgtttaatgaacctgcctgcctcagattgctgtccccggggagttaatgcatctacaccactgtggggatttgagttataagaattggaatttctgagatcccatggaggttagattgggaggaaagcttaaaagatgtcctttttgtgagagggatggaattgttttctttcattcgtaaagttagtgagtaaagattttataaatcaaaaaaaaaaaaaaaaaaaaaaaaaaaaaaaa

SEQ ID NO: 2301 - DNA, 1072 bp, Homo sapiens
cagagctgctgtcatggcggccgctctgtggggcttctttcccgtcctgctgctgctgctgctatcgggggatgtccagagctcggaggtgcccggggctgctgctgagggatcgggagggagtggggtcggcataggagatcgcttcaagattgaggggcgtgcagttgttccaggggtgaagcctcaggactggatctcggcggcccgagtgctggtagacggagaagagcacgtcggtttccttaagacagatgggagttttgtggttcatgatataccttctggatcttatgtagtggaagttgtatctccagcttacagatttgatcccgttcgagtggatatcacttcgaaaggaaaaatgagagcaagatatgtgaattacatcaaaacatcagaggttgtcagactgccctatcctctccaaatgaaatcttcaggtccaccttcttactttattaaaagggaatcgtggggctggacagactttctaatgaacccaatggttatgatgatggttcttcctttattgatatttgtgcttctgcctaaagtggtcaacacaagtgatcctgacatgagacgggaaatggagcagtcaatgaatatgctgaattccaaccatgagttgcctgatgtttctgagttcatgacaagactcttctcttcaaaatcatctggcaaatctagcagcggcagcagtaaaacaggcaaaagtggggctggcaaaaggaggtagtcaggccgtccagagctggcatttgcacaaacacggcaacactgggtggcatccaagtcttggaaaaccgtgtgaagcaactactataaacttgagtcatcccgacgttgatctcttacaactgtgtatgttaactttttagcacatgttttgtacttggtacacgagaaaacccagctttcatcttttgtctgtatgaggtcaatattgatgtcactgaattaattacagtgtcctatagaaaatgccattaataaattatatgaactactatacattatgtatattaattaaaacatcttaatccagaaaaaaaaaaaaaaaaaaaaa

SEQ ID NO: 2302 - DNA, 3294 bp, Homo sapiens
gtgaagagaggcgcggcgtgactgagctacggttctggctgcgtcctagaggcatccggggcagtaaaaccgctgcgatcgcggaggcggcggccaggccgagaggcaggccgggcaggggtgtcggacgcagggcgctgggccgggtttcggcttcggccacagctttttttctcaaggtgcaatgaaagccttccacactttctgtgttgtccttctggtgtttgggagtgtctctgaagccaagtttgatgattttgaggatgaggaggacatagtagagtatgatgataatgacttcgctgaatttgaggatgtcatggaagactctgttactgaatctcctcaacgggtcataatcactgaagatgatgaagatgagaccactgtggagttggaagggcaggatgaaaaccaagaaggagattttgaagatgcagatacccaggagggagatactgagagtgaaccatatgatgatgaagaatttgaaggttatgaagacaaaccagatacttcttctagcaaaaataaagacccaataacgattgttgatgttcctgcacacctccagaacagctgggagagttattatctagaaattttgatggtgactggtctgcttgcttatatcatgaattacatcattgggaagaataaaaacagtcgccttgcacaggcctggtttaacactcatagggagcttttggagagcaactttactttagtgggggatgatggaactaacaaagaagccacaagcacaggaaagttgaaccaggagaatgagcacatctataacctgtggtgttctggtcgagtgtgctgtgagggcatgcttatccagctgaggttcctcaagagacaagacttactgaatgtcctggcccggatgatgaggccagtgagtgatcaagtgcaaataaaagtaaccatgaatgatgaagacatggatacctacgtatttgctgttggcacacggaaagccttggtgcgactacagaaagagatgcaggatttgagtgagttttgtagtgataaacctaagtctggagcaaagtatggactgccggactctttggccatcctgtcagagatgggagaagtcacagacggaatgatggatacaaagatggttcactttcttacacactatgctgacaagattgaatctgttcatttttcagaccagttctctggtccaaaaattatgcaagaggaaggtcagcctttaaagctacctgacactaagaggacactgttgtttacatttaatgtgcctggctcaggtaacacttacccaaaggatatggaggcactgctacccctgatgaacatggtgatttattctattgataaagccaaaaagttccgactcaacagagaaggcaaacaaaaagcagataagaaccgtgcccgagtagaagagaacttcttgaaactgacacatgtgcaaagacaggaagcagcacagtctcggcgggaggagaaaaaaagagcagagaaggagcgaatcatgaatgaggaagatcctgagaaacagcgcaggctggaggaggctgcattgaggcgtgcaaaaaagaagttggaaaagaagcaaatgaaaatgaaacaaatcaaagtgaaagccatgtaaagccatcccagagatttgagttctgatgccacctgtaagctctgaattcacaggaaacatgaaaaacgccagtccatttctcaaccttaaatttcagacagtcttgggcaactgagaaatccttatttcatcatctactctgtttggggtttggggttttacagagattgaagatacctggaaagggctctgtttcaagaatttttttttccagataatcaaattattttgattattttataaaaggaatgatctatgaaatctgtgtaggttttaaatattttaaaaattataatacaaatcatcagtgcttttagtacttcagtgtttaaagaaataccatgaaatttataggtagataaccagattgttgctttttgtttaaaccaagcagttgaaatggctataaagactgactctaaaccaagattctgcaaataatgattggaattgcacaataaacattgcttgatgttttcttgtatgtctacattaaacttgagaaaaagtaaaaattagaacactgtatgtagtaatgaaatttcagggacccagaacataatgtagtatatgtttttaggtgggagatgctgataacaaaattaataggaagtctgtaggcattaggatactgacatgtacatggaaaattctagggacaggagcatcattttttccttacctgataccacgaaccagtgacaacgtgaatgctgtattttaagtggttgtatgtttattttcttgagtaacaaatgcatgaaaaattaatgcttcacctaggtaagatcattggtctgtgtgaaatcacaaatgttttttccttcttggttgctgcagcctgggtggatgttcatggagaagctctgttctctatattatggctgtgtgccgttgcttctccctctgcttttatcttttccacagttgaggctgggtatgttctttcaaagaaatggccatgaatatgtgtaagtatacttttgaaaatgagctttcctaaactattgagagttctttccacctcttgcggaaccaactcttggaggagaggcccatgtatctgcacgagcacttagcttgttcagatctctgcattttataaatgcttcttaccaagaaagcatttttaggtcattgcttgtaccaggtaatttttgccggggatgggtaagggttgggttttctggtgggagtggggtggtgggtattttttgttgatgctttagtgcaggcctgttctgaggcaataacaagttgctgtgaaaacagcatgtgctgctgcctttgtaactgcatggaaacttttcacatgggtttttctccaagttaatacagaaatatgtaaactgagagatgcaaatgtaatatttttaacagttcatgaagttgttattaaaataactaacataaaacttaattactttaatattatataattatagtagtggccttgttttacaaacctttaaattacattttagaaatcaaagttgatagtcttagttatcttttgagtaagaaaagctttcctaaagtcccatacatttggaccatggcagctaattttgtaacttaagcattcatatgaactacctatggacatctattaaagtgattgacaaaatctcaaaaaaaaaaaaaaaaaaaaaaaaaaa

SEQ ID NO: 2303 - DNA, 2400 bp, Homo sapiens
cacgaggccatggcgagcggcgagcattcccccggcagcgcgcggcccggcggccgctgcactccgcgcaggctgcggccgctgcactccgcgcaggctgtggacgtggcctcggcctccaacttccgggcctttgagctgctgcacttgcacctggacctgcgggctgagttcgggcctccagggcccggcgcagggagccgggggctgagcggcaccgcggtcctggacctgcgctgcctggagcccgagggcgccgccgagctgcggctggactcgcacccgtgcctggaggtgacggcggcggcgctgcggcgggagcggcccggctcggaggagccgcctgcggagcccgtgagcttctacacgcagcccttctcgcactatggccaggccctgtgcgtgtccttcccgcagccctgccgcgccgccgagcgcctccaggtgctgctcacctaccgcgtcggggagggaccccgggtttgctgggtggctcccgagcagacagcaggaaagaagaagcccttcgtgtacacccagggccaggctgtcctaaaccgggccttcttcccttgcttcgacacgcctgctgttaaatacaagtattcagctcttattgaggtcccagatggcttcacagctgtgatgagtgcaagacctggggagaagagaggtccaaataagttcttcttccagatgtgtcagcccatcccctcctatctgatagctttggccatcggagatctggtttcggctgaagttggacccaggagccgggtgtgggctgagccctgcctgattgatgctgccaaggagtacaacggggtgatagaagaatttttggcaacaggagagaagctttttggaccttatgtttggggaaggtatgacttgctcttcatgccaccgtcctttccatttggaggaatggagaacccttgtctgacctttgtcaccccctgcctgctagctggggaccgctccttggcagatgtcatcatccatgagatctcccacagttggtttgggaacctggtcaccaacgccaactggggtgaattctggctcaatgaaggtttcaccatgtacgcccagaggaggatctccaccatcctctttggcgctgcgtacacctgcttggaggctgcaacggggcgggctctgctgcgtcaacacatggacatcactggagaggaaaacccactcaacaagctccgcgtgaagattgaaccaggcgttgacccggacgacacctataatgagaccccctacgagaaaggtttctgctttgtctcatacctggcccacttggtgggtgatcaggatcagtttgacagttttctcaaggcctatgtgcatgaattcaaattccgaagcatcttagccgatgactttctggacttctacttggaatatttccctgagcttaagaaaaagagagtggatatcattccaggttttgagtttgatcgatggctgaatacccccggctggcccccgtacctccctgatctctcccctggggactcactcatgaagcctgctgaagagctagcccaactgtgggcagccgaggagctggacatgaaggccattgaagccgtggccatctctccctggaagacctaccagctggtctacttcctggataagatcctccagaaatcccctctccctcctgggaatgtgaaaaaacttggagacacatacccaagtatctcaaatgcccggaatgcagagctccggctgcgatggggccaaatcgtccttaagaacgaccaccaggaagatttctggaaagtgaaggagttcctgcataaccaggggaagcagaagtatacacttccgctgtaccacgcaatgatgggtggcagtgaggtggcccagaccctcgccaaggagacttttgcatccaccgcctcccagctccacagcaatgttgtcaactatgtccagcagatcgtggcacccaagggcagttagaggctcgtgtgcatggcccctgcctcttcaggctctccaggctttcagaataattgtttgttcccaaattcctgttccctgatcaacttcctggagtttatatcccctcaggataatctattctctagcttaggtatctgtgactcttgggcctctgctctggtgggaacttacttctctatagcccactgagccccgagacagagaacctgcccacagctctccccgctacaggctgcaggcacgcagggcagcgggtattctcctcccacctaagtctctgggaagaagtggagaggactgatgctcttcttttttctctttctgtcctttttcttgctgatttatgcaaagggctggcattctgatgcttttcaggtttaatccttattttaataaagttttcaagcaaaaaaa

SEQ ID NO: 2304 - DNA, 4714 bp, Homo sapiens
ctattagagatgctgcaaggagaatgagagagatgcctggttagctagcagttcttccacctagctcagctgaatcaccaggtgtgtgagtggggtaattttggatttcagccccaaatgagtgtgcagaaaactgcttctgcatgaatggcctatgtgagatcagcagaaaagccagccagctgagccttgctcagattgtaaaatcataagcagatacacagtcatgttaagccattaaatttgggagtgttttgttttgtagaaatagatatctgaaatacccagtgacttacacatttacttcatctccatatactgaagaccgagtgttagtttctatcatacctatgcccgtcccaagatactgggccctcaggcaaggtgaggttctagttcctctaggaaaggcaaagaaatttaagggatatggggtgttaaaattagacaagtgaagatgcagttggtataagaaaattcatatcaactatcagaaggctgcttttgcaagaggaatatagttggttttgagaattcaaggaatgggaagataaaacatgttgagaatccacatatgaataaatatatttaacttcagtgtgatgaagctttctttacaggtgcttcacaaaggggctttggctttccaccttgttgagatacgtgactgttgtggaggtgtgcttcttggtcttccttcaagaaagagcttgttcttcagctatgaggaatacagatagatgacaggtcttggctcccaaacctttagaatcctctgcaggattcaagctaaggtcatacttttccagatcatctcccagccaatgactgagcatgatggggtactagggacctgaccatttcttccaatgtaggattcacttgaccagttgtctttttggcagagtgccacatgggttagtcaagacagtgtggaatttttattgcattccctgcattgttctccatgtccaattcttcttaccctcttttttccccccacaaatgtcagatctgccttgtggtctgaaggctttctctgcataaccctttttcattcccctttacctttcctggtgttactcccagcaatctcgtacttctaactctggctcagcatctgcttctgagcaaggtacagttgagagaactaaaatggcaaatctatcagattaatatgatctgtagtttgtttgcttttaggtagagttggataatcattttacaacaattctaagaaaacttagtgtgttttactgcatgagatgccttttgaagtagagaagacatctgtctaaatcaccaactttatactttgggaaatctgtgttttttgccgaattgcaaaattgcattcgtcttatagtccttaaaatttattttacttcctaatatttgtaactacacagagtcatttgaatctgctaaacatagcacaaaaggtggatatacatcagtatttagtaaaagacatctatttaaattaagcaccttgcaacatgtattcagctatgaggaattttccgagcaagtagcattaacattgaaaattattatagagcttatggggggaggagccaagatggccgaataggaacagctctggtctacagctcccagcgtgagcgacgcagaagatgggtgatttctgcattttcgtctgaggtactgggttcatctcactagggagtgccagacagtgggcgcaagtcaatgggtgcgcgcaccatgcacgagccgaagcagggcgaggcattgcctcactcgggaagcgcaaagagtcagggagttccctttcctagtcaaagaaaggggtgacagatggcacctggaaaatcgggtcacttccacccgaatacagcgcttttccgacgggcttaaaaaacgccgcaccaggagattatatcccgcacctggctcggagggtcctacgcccatggagtctcactgattgctagcacagcagtctgagatcaaactgcaaggtggcagcgaggcttggggaggggcgcccgccattgcccaggcttgcttaggtaaacagagcagccgggaagctccaactgggtggagcccaccacagctcaaggaggcctgcctgcctctggaggctccacctctgggggcagggcacacacaaacaaaaagaccgcagtaacctctgcagacttaaatgtccctgtctgacagctttgaagagagcagtgtttctcccagcacgcagctggagatctgagaacgggcagactgcctcctcaagtgggtccctgacccctgacccccgagcagcctaactgggaggcaccccccagcaggggcagactgacacctcacagggctgggtactccaacagacctgcagctgagggtcctgtcagatagaaggaaaactaaaacagaaaggacatccacaccaaaaacccatctgtatatcaccatcatcaaagaccaaaagtagataaaaccaccaagatggggaaaaaacagagcagaaaaactggaaactctaaaacgcagagcgcctctcctcctccaaaggaacataattcatcaccagcaacggaacaaagctggacggagaatgactttgacgagctgagagaagaaggcttcagatgatcaaattactccgagctacaggaggaaattcaaaccaaaggcaaagaagttgaaaactttgagaaaagtttagaagaatgtataactagaataaccaatacagagaagtgcttaaaggagctgatggagctgaagaccaaggctcgagaactacgtgaagaatgcagaagcctcaggagccgatgcgatcaactggaagaaagggtatcagcgatggaagatgaagtgaatgaaatgaagcaagaagggaactttagagaaaaaagaataaaaagaaacgagcaaagcctccaagaaatatgggactacgtgtaaagacgaaatctacgtctgattggtgtaactgaaagtgatggggagaatggaaccaagttggaaaacactctgcaggatgtcatccaggagaacttccccaatctagcaaggcaggccaacattcagattcagaaatacagagaacgccacaaagctactcctcgagaagagcaactccaagacacataattgtcagattcattgaagttgaaatgaaggaaaatatgttaagggcagccagagagaaaggtcgggttacccacaaagggaagcccatcagactgacagcagatctctcagcagaaattctacaagccagaagagagtgggggccaatattcaacattcttaaagaaaagaattttcaacccagaatttcatatccagccaaactaagctttataagtgagggagaaataaaatactttacagacaagcaaatgctgagagattttgtcaccacgaggcctgccctaaaagtgctcctgaaggaagtgccaaacatggaaaggaacaactgataccagccgctgcaaaatcatgccaaaatgtaaagaccatcgagactaggaagaaactgcatgaactaatgagcaaaataaccagctaacatcataatgacaggatcaaattcacacataacaatattacctttaaatgtaactggactaaatgctccaattaaaagacacagactggcaaattggataaagagtcatgacccatcagtgtgctgtattcaggaaacccatctcacatgcagagacacacgtaggctcaaaataaaaggatagaggaagatctacgaagcaaatggaaaacaaaaaaaggcaggggttgcaatcctagtctctgataaaacagactttaaaccaacaaagatcaaaagagacaaagaaggccattacataatgggaaagggatcaattcaacaagaagagctaactatcctaaatatatatgcacccaaaataggagcacccagattcataaggcaagtcctgagcgacctacaaagagacttagactcccacacaataataatgggagactttaacaccccactgtcaacattagacagatcaacgagacagaaagttagcaaggatatccaggagttggactcagctctgcaccaagcggacctaatagacatctacagaactctccaccccatatcaacagaatatacatttttttcagcaccacaccacacctattccaaaattgaccacatacttggaagtaaagctctcctcagcaaatgtaaaagaacagaaattataacaaactgtctctcagaccacagtgcaatcaaactagaactcaggatgaagaaactcactcaaaaccgctcaactacatggaaactgaacaacctgctcctgaatgactactgggtatataacgaaatgaaggcagaaataaagatgttctttgaaaccaacgagaacaaagacacaacataccagaatctctgggatgcattcaaagcagtgtgtagagggaaatttatagcactaaatgcccacaagaggaagcaggaaagatccaaaattgacaccctaacatcacaattaaaagaaccagaaaagcaagagcaaacacattcaaaagctagcagaaggcaagaaataactaaaatcagagcagaactgaaggaaatagagacacaaaaaacccttcaaaaaattaatgaatccaggagctggttttttgaaaggatcaacaaaattgatagaccgctagcaagactaataaagaaaaaaaaaaaaaaaaa

SEQ ID NO: 2305 - DNA, 1910 bp, Homo sapiens
  misc_feature (839)..(839): n is a, c, g, or t
  misc_feature (998)..(998): n is a, c, g, or t
  misc_feature (1005)..(1006): n is a, c, g, or t
  misc_feature (1023)..(1023): n is a, c, g, or t
  misc_feature (1054)..(1054): n is a, c, g, or t
  misc_feature (1067)..(1067): n is a, c, g, or t
  misc_feature (1091)..(1091): n is a, c, g, or t
  misc_feature (1106)..(1106): n is a, c, g, or t
cccgcagcggggaatctgcagtaggtctgccggcgatggagtggtgggctagctcgccgcttcggctctggctgctgttgttcctcctgccctcagcgcagggccgccagaaggagtcaggttcaaaatggaaagtatttattgaccaaattaacaggtctttggagaattacgaaccatgttcaagtcaaaactgcagctgctaccatggtgtcatagaagaggatctaactcctttccgaggaggcatctccaggaagatgatggcagaggtagtcagacggaagctagggacccactatcagatcactaagaacagactgtaccgggaaaatgactgcatgttcccctcaaggtgtagtggtgttgagcactttattttggaagtgatcgggcgtctccctgacatggagatggtgatcaatgtacgagattatcctcaggttcctaaatggatggagcctgccatcccagtcttctccttcagtaagacatcagagtaccatgatatcatgtatcctgcttggacattttgggaagggggacctgctgtttggccaatttatcctacaggtcttggacggtgggacctcttcagagaagatctggtaaggtcagcagcacagtggccatggaaaaagaaaaactctacagcatatttccgaggatcaaggacaagtccagaacgagatcctctcattcttctgtctcggaaaaacccaaaacttgttgatgcagaatacaccaaaaaccaggcctggaaatctatgaaagataccttaggaaagccagctgctaaggatgtccatcttgtggatcactgcaaatcaagtatctgnttaattttcgaggcgtagctgcaagtttcggtttaaacacctcttcctgtgtggctacttgtttccatgttggtgatgaagtgctagaattcttctatccacagctgaagccatgggttcactatatcccagtcaaaacagatctcttcaatgcccaanagctgtnncatttgtaaaagcaatnatatgtagccaaaagattctgaaagggaaanccagtttattagnacccatttgcagatggatgcatcnccttgttactggaanacctcttgagtgaatactctaaattcctgtcttataatgaccgagaagaaaggttatgtcaaattattcccaaaatgttgaaaactgaactatagtagtcatcataggaccatagtcctctttgtggcaacagatctcagatatcctacggtgagaagcttaccataagcttggcwcctataccttgaatatctgctatcaagccaaatacctggttttccttatcatgctgcacccagagcaactcttgagaaagatttaaaatgtgtctaatacactgatatgaagcagttcaactttttggatgaataaggaccagaaatcgtgagatgtggattttgaacccaactctacctttcattttcttaagaccaatcacagcttgtgcctcagatcatccacctgtgtgagtccatcactgtgaaattgactgtgtccatgtgatgatgccctttgtcccattatttggagcagaaaattcgtcatttggaagtagtacaactcattgctggaattgtgaaattattcaaggcgtgatctctgtcactttattttaatgtaggaaaccctatggggtttatgaaaaatacttggggatcattctctgaatggtctaaggaagcggtagccatgccatgcaatgatgtaggagttctcttttgtaaaaccataaactctgttactcaggaggtttctataatgccacatagaaagaggccaattgcatgagtaattattgcaattggatttcaggttccctttttgtgccttcatgccctacttcttaatgcctctctaaagcca

SEQ ID NO: 2306 - DNA, 1062 bp, Homo sapiens
ggctgccctcgttcttgccagggccgcggttagtccctgctggccaccccactgcgaccatgttcgttccctgcggttgaatacctccctctccactcccatcttcaggccagcagtatctgttggaaatgttggccagcttgcaatggatctgattatttctacactgaatatgtctaagattggttacttctataccgattgtcttgtgccaatggttggaaacaatccatatgcgaccacagaaggaaattcaacagaacttagcataaatgctgaagtgtattcattgccttcaagaaagctggtggctctacagttaagatccatttttattaagtataaatcaaagccattctgtgaaaaactgctttcctgggtgaaaagcagtggctgtgcagaagtcattgttctttcaagcagtcattcatatcagcgtaatgatctgcagcttcgtagtactcccttccggtacctacttacaccttccatgcaaaaaagtgttcaaaataaaataaagagccttaactgggaagaaatggacaaaagccggtgcattcctgaaatagatgattccgagttttgtatccgcattccgggaggaggtatcacaaaaacactctatgatgaaagctgttctaaagaaatccaaatggcagttctgctgaaatttgtttcagaaggggacaacatcccagatgcattaggtcttgttgagtaycttaatgagtggcttcagatactcaaaccacttagcgatgaccccacagtatctgcctcacggtggaaaataccaagttcttggagattactctttggcagtggtcttccccctgcacttttctgatctaatttctgttttataccttatacccaaaacacttactaccaacacagctgttaaacattctatacaaaaaaattgtatgatctggtattaggaaattactttcacagtaaatatcaaagaaaaaagattaagggtctctttgccatgcttttcatcatatgcaccaaatgtaaattttgtacaataaaattttatttcctaagtaaaaaaaa

SEQ ID NO: 2307 - DNA, 3462 bp, Homo sapiens
gtgttttcagtctctccgggttgcatgtactgtatgtggagcagtgtacagtgaagcggaggcagagcggctccgcgagcttctctccactttcccatagagaaaccctgactggccgctgagggctagctacacacacgccctcacgcccggcgagcccgcgaggtcactatcatatgacaaaggctttgccgcagttcatcttcctccctgtgtactttccatttgccttcctggaatcctgctgcatcacagaagctggaagttctgatgttccactgaaatcacaatggaaagtcttgacttgactggtcacagtaatgaaaggcagtaatagaaataaggatcattcagcagaaggagaaggggttggaaaacgaccaaaacgaaagtgtcttcagtggcatccattgctagcaaagaaacttcttgatttttcagaagaggaagaagaggaagacgaagaggaggatattgataaggttcaacttcttggggccgatggcctagagcaagatgttggtgaaactgaagatgatgaatcaccagagcagcgagcccggagaccaatgaatgcatttcttttattttgcaaacgccatcgctctcttgtacgtcaggaacaccccaggcttgataaccgaggtgctaccaagatactagctgattggtgggctgttcttgatccaaaggaaaagcagaaatacacagacatggccaaggagtataaggatgcatttatgaaagcaaatcctggctacaaatggtgtcctaccacaaacaagcctgtgaaatccccaacacccactgtcaatccacgaaagaaactttgggccttcccatctgactcttcaagagacttgccaagccccaagaaagcaaagactgaagaaatgcctcagcttaactttggaatggctgatcctactcaaatgggaggcctgagtatgctgctgttagctggagaacatgctcttggcacaccagaggtatcctctggcacatgcaggcctgatgtttcagaatctcctgaattacgtcagaagtcaccattgtttcagtttgccgagatatcttcaagtacgtcccactctgatgcttctacaaagcagtgtcaaacatctgccttgtttcagtttgcagagatttcttcaaacacttcgcagttgggtggtgctgagcctgtaaaacgctgtggaaagtctgcactctttcaactggcagagatgtgcctggcatcagaagggatgaaaatggaagaatcaaagctaataaaagcaaaagaatccgatggtggaagaattaaagaattagagaagggaaaggaagaaaaagaaattaaaatggagaaaacagatgaaactaggttacagaaggaagcagaatttgaaaaatcggctaaggaaaatttaagagattctaaggaattgagaaattttgaggcattgcaaatagatgacataatggctataaaaatggaagatcccaaagaaattagaaaggaagagttagaagaagatcacaaatgtagtcattttcctgatttttcttattctgccagtagcaagataataattagtgatgttcccagtagaaaggatcatatgtgccatcctcatggaattatgatcattgaggatcccgcagcattaaacaagccagaaaagctaaaaaagaaaaagaagaaaagcaaaatggatcgacatggaaatgataaatccacacccaagaagacttgcaaaaagaggcagtcttcggaatctgacattgagagcgtcatatataccattgaagccgtcgcaaaaggagactggggcatagagaaacttggagatacccctcgcaagaaggtccgcacatcctcaagtggcaagggaagcattttggatgccaagccaccaaagaaaaaagtgaaatcaagagagaagaaaatgtcaaaggagaaatcctcagacaccaccaaagagtcaagacctccagatttcattagtatttctgctagcaagaacatttctggtgagacaccagagggtataaaagcagaaccattgacccctatggaagatgcactaccacccagcctatcaggacaggccaagcctgaggacagtgactgtcacagaaaaatagaaacttgtggttccaggaaatccgagaggtcttgcaaaggtgctctttataaaaccctggtgtctgagggcatgctcacctctctgcgagctaatgttgacagaggaaaacgaagctcaggaaaaggaaactcctctgatcatgaagggtgttggaatgaagaaagctggacatttagtcagagtgggaccagtgggagcaagaagttcaagaagacaaagccaaaagaagactgtctccttggctccgcaaagctggatgaagaatttgaaaaaaaattcaacagcctccctcaatatagtcctgttacatttgaccggaaatgtgtacctgtcccaagaaaaaagaagaagactggaaatgtgtcctcagaaccgactaaaaccagcaaaggaagtggggataaatggtcaaacaagcaactcttcttggatgccattcaccctacagaagccatattttcagaagacagaaacaccatggagcctgttcataaggttaaaaatatcccatccattttcaacactccagagccaacaacaacgcaagaacctttggtgggcagccaaaagagaaaagcaaggaaaaccaagattacacaccttgtcaggacagcagatggccgggtatcaccagcaggaggtactttggatgacaaaccaaaggaacaactgcagaggagtctccctaaagcaactgagacagactgcaatgacaaatgctcacacaacaccgaggtcggggagacgcggagcagtactccagaaatgcctgccgtgtctgcgttctttagcctcgctgcgctggctgaagtggcagccatggaaaatgtgcacagaggtcagaggtcaactccgctcacccatgatggacagccaaaagaaatgccgcaggctcctgtacttatttcctgcgctgaccagtgaagcgccctttcattgtaaaacattgtgctttacctactaccctagccttgtctttaccgagggatgctagtgagtccaagtggtggaaaatatagactgcaaacaagtgcttgttgccccacacggcccagattcacttgaagcagaagttagcatcctgggccagtttgttctctcagaacccagaatctttgagggtaaggttatctgtctgatactgagcagaaacagaatgatcctggagctttgctttctattgaaggcttttgacggtaataggtggtaacttggtaaaaggctgcctttactgtagctcacccagcatctcttttaccaaccagagagtgtgaaactagtttcatatattacctagttattctttcaaaacaaaacaaaaaaaacaaaa

SEQ ID NO: 2308 - DNA, 3674 bp, Homo sapiens
gcgggaagcaccatgcagtttgtatcctgggccacactgctaacgctcctggtgcgggacctggccgagatggggagcccagacgccgcggcggccgtacgcaaggacaggctgcacccgaggcaagtgaaattattagagaccctgggcgaatacgaaatcgtgtctcccatccgagtgaacgctctcggagaaccctttcccacgaacgtccacttcaaaagaacgcgacggagcattaactctgccactgacccctggcctgccttcgcctcctcctcttcctcctctacctcctcccaggcgcattaccgcctctctgccttcggccagcagtttctatttaatctcaccgccaatgccggatttatcgctccactgttcactgtcaccctcctcgggacgcccggggtgaatcagaccaagttttattccgaagaggaagcggaactcaagcactgtttctacaaaggctatgtcaataccaactccgagcacacggccgtcatcagcctctgctcaggaatgctgggcacattccggtctcatgatggggattattttattgaaccactacagtctatggatgaacaagaagatgaagaggaacaaaacaaaccccacatcatttataggcgcagcgccccccagagagagccctcaacaggaaggcatgcatgtgacacctcagaacacaaaaataggcacagtaaagacaagaagaaaaccagagcaagaaaatggggagaaaggattaacctggctggtgacgtagcagcattaaacagcggcttagcaacagaggcattttctgcttatggtaataagacggacaacacaagagaaaagaggacccacagaaggacaaaacgttttttatcctatccacggtttgtagaagtcttggtggtggcagacaacagaatggtttcataccatggagaaaaccttcaacactatattttaactttaatgtcaattgtagcctctatctataaagacccaagtattggaaatttaattaatattgttattgtgaacttaattgtgattcataatgaacaggatgggccttccatatcttttaatgctcagacaacattaaaaaacctttgccagtggcagcattcgaagaacagtccaggtggaatccatcatgatactgctgttctcttaacaagacaggatatctgcagagctcacgacaaatgtgataccttaggcctggctgaactgggaaccatttgtgatccctatagaagctgttctattagtgaagatagtggattgagtacagcttttacgatcgcccatgagctgggccatgtgtttaacatgcctcatgatgacaacaacaaatgtaaagaagaaggagttaagagtccccagcatgtcatggctccaacactgaacttctacaccaacccctggatgtggtcaaagtgtagtcgaaaatatatcactgagtttttagacactggttatggcgagtgtttgcttaacgaacctgaatccagaccctaccctttgcctgtccaactgccaggcatcctttacaacgtgaataaacaatgtgaattgatttttggaccaggttctcaggtgtgcccatatatgatgcagtgcagacggctctggtgcaataacgtcaatggagtacacaaaggctgccggactcagcacacaccctgggccgatgggacggagtgcgagcctggaaagcactgcaagtatggattttgtgttcccaaagaaatggatgtccccgtgacagatggatcctggggaagttggagtccctttggaacctgctccagaacatgtggagggggcatcaaaacagccattcgagagtgcaacagaccagaaccaaaaaatggtggaaaatactgtgtaggacgtagaatgaaatttaagtcctgcaacacggagccatgtctcaagcagaagcgagacttccgagatgaacagtgtgctcactttgacgggaagcattttaacatcaacggtctgcttcccaatgtgcgctgggtccctaaatacagtggaattctgatgaaggaccggtgcaagttgttctgcagagtggcagggaacacagcctactatcagcttcgagacagagtgatagatggaactccttgtggccaggacacaaatgatatctgtgtccagggcctttgccggcaagctggatgcgatcatgttttaaactcaaaagcccggagagataaatgtggggtttgtggtggcgataattcttcatgcaaaacagtggcaggaacatttaatacagtacattatggttacaatactgtggtccgaattccagctggtgctaccaatattgatgtgcggcagcacagtttctcaggggaaacagacgatgacaactacttagctttatcaagcagtaaaggtgaattcttgctaaatggaaactttgttgtcacaatggccaaaagggaaattcgcattgggaatgctgtggtagagtacagtgggtccgagactgccgtagaaagaattaactcaacagatcgcattgagcaagaacttttgcttcaggttttgtcggtgggaaagttgtacaaccccgatgtacgctattctttcaatattccaattgaagataaacctcagcagttttactggaacagtcatgggccatggcaagcatgcagtaaaccctgccaaggggaacggaaacgaaaacttgtttgcaccagggaatctgatcagcttactgtttctgatcaaagatgcgatcggctgccccagcctggacacattactgaaccctgtggtacagactgtgacctgaggtggcatgttgccagcaggagtgaatgtagtgcccagtgtggcttgggttaccgcacattggacatctactgtgccaaatatagcaggctggatgggaagactgagaaggttgatgatggtttttgcagcagccatcccaaaccaagcaaccgtgaaaaatgctcaggggaatgtaacacgggtggctggcgctattctgcctggactgaatgttcaaaaagctgtgacggtgggacccagaggagaagggctatttgtgtcaatacccgaaatgatgtactggatgacagcaaatgcacacatcaagagaaagttaccattcagaggtgcagtgagttcccttgtccacagtggaaatctggagactggtcagaggtaagatgggagggctgttatttcccctaggtcatctcttacattctagttctggtgctctctatctgtttaagacaaacccttgtgcacctttctcccacctctccctttctcccttgtctcccttgagaaaacaactccagttctctgcctgcaccatgactgtcgtactggatgtaactagtctaccagtgacctcagggcactttgggcttggctagatcactcactgttgtagcttctgttgtgattttgaagttgcagtccatcaccttccctcctctttgagccctagctaagtcactgaaaggaaatcatggatttattaatcataaagctatactagctcacatctgaagtcaacatgaagtttcctacttccttgtctttgaaataagagaattagaccccagggagtgacctctctgacttacccatccaactgcccaaaaaaaaaaaaaaaaaaaaaaaaa

SEQ ID NO: 2309 - DNA, 1431 bp, Homo sapiens
ggacgtaggaggtggaggttgtggaattcgccgttcgaaagcagggactaaaagccccacttcgtcttacgttccgaaaggaaggcgtctgttgagcctttctctcagtcgtgagggaggcgtcgacggcgtgcggaagtcctgagttgaggcttgcgggatcctttccggagaaagcgcaggctaaagccgcaggtgaagatgtccaactacgtgaacgacatgtggccgggctcgccgcaggagaaggattcgccctcgacctcgcggtcgggcgggtccagccggctgtcgtcgcggtctaggagccgctctttttccagaagctctcggtcccattcccgcgtctcgagccggttttcgtccaggagtcggaggagcaagtccaggtcccgttcccgaaggcgccaccagcggaagtacaggcgctactcgcggtcatactcgcggagccggtcgcgatcccgcagccgccgttaccgagagaggcgctacgggttcaccaggagatactaccggtctccttcgcggtaccggtcccggtcccgtagcaggtcgcgctctcggggaaggtcgtactgcggaagggcgtacgcgatcgcgcggggacagcgctactacggctttggtcgcacagtgtacccggaggagcacagcagatggagggacagatccaggacgaggtcgcggagcagaaccccctttcgcttaagtgaaaaagatcgaatggagctgttagaaatagcaaaaaccaatgcagcgaaagctctaggaacaaccaacattgacttgccagctagtctcagaactgttccttcagccaaagaaacaagccgtggaataggtgtatcaagtaatggtgcaaagcctgaactgtcggaaaaggtaacagaagatggaactcgaaatcccaatggaaaacctacccagcaaagaagcatagcttttagctctaataattctgtagcaaagccaatacaaaaatcagctaaagctgccacagaagaggcatcttcaagatcaccaaaaatagatcagaaaaaaagtccatatggactgtggatacctatctaaaagaagaaaactgatggctaagtttgcatgaaaactgcactttattgcaagttagtgtttctagcattatcccatccctttgagccattcaggggtacttgtgcatttaaaaaccaacacaaaaagatgtaaatacttaacactcaaatattaacattttaggtttctcttgcagatatgagagatagcacagatggaccaaaggttatgcacaggtgggagtcttttgtatatagttgtaaatattgtcttggttatgtaaaaatgaaattttttagacacagtaattgaactgtattcctgttttgtatatttaataaatttcttgttttcattcttaaaaaaaaaaaaaaaaaa

SEQ ID NO: 2310 - DNA, 2346 bp, Homo sapiens
atgaggtcagtgcagatcttcctctcccaatgccgtttgctccttctactagttccgacaatgctccttaagtctcttggcgaagatgtaatttttcaccctgaaggggagtttgactcgtatgaagtcaccattcctgagaagctgagcttccggggagaggtgcagggtgtggtcagtcccgtgtcctacctactgcagttaaaaggcaagaagcacgtcctccatttgtggcccaagagacttctgttgccccgacatctgcgcgttttctccttcacagaacatggggaactgctggaggatcatccttacataccaaaggactgcaactacatgggctccgtgaaagagtctctggactctaaagctactataagcacatgcatggggggtctccgaggtgtatttaacattgatgccaaacattaccaaattgagcccctcaaggcctctcccagttttgaacatgtcgtctatctcctgaagaaagagcagtttgggaatcaggtttgtggcttaagtgatgatgaaatagaatggcagatggccccttatgagaataaggcgaggctaagggactttcctggatcctataaacacccaaagtacttggaattgatcctactctttgatcaaagtaggtataggtttgtgaacaacaatctttctcaagtcatacatgatgccattcttttgactgggattatggacacctactttcaagatgttcgtatgaggatacacttaaaggctcttgaagtatggacagattttaacaaaatacgcgttggatatccagagttagctgaagttttaggcagatttgtaatatataaaaaaagtgtattaaatgctcgcctgtcatcagattgggcacatttatatcttcaaagaaaatataatgatgctcttgcatggtcgtttggaaaagtgtgttctctagaatatgctggatcagtgagtactttactagatacaaatatccttgcccctgctacctggcctgctcatgagctgggtcatgctgtaggaatgtcacatgatgaacaatactgccaatgtaggggtaggcttaattgcatcatgggctcaggacgcactgggtttagcaattgcagttatatctctttttttaaacatatctcttcgggagcaacatgtctaaataatatcccaggactaggttatgtgcttaagagatgtggaaacaaaattgtggaggacaatgaggaatgtgactgtggttccacagaggagtgtcagaaagatcggtgttgccaatcaaattgtaagttgcaaccaggtgccaactgtagcattggactttgctgtcatgattgtcggtttcgtccatctggatacgtgtgtaggcaggaaggaaatgaatgtgaccttgcagagtactgcgacgggaattcaagttcctgcccaaatgacgtttataagcaggatggaaccccttgcaagtatgaaggccgttgtttcaggaaggggtgcagatccagatatatgcagtgccaaagcatttttggacctgatgccatggaggctcctagtgagtgctatgatgcagttaacttaataggtgatcaatttggtaactgtgagattacaggaattcgaaattttaaaaagtgtgaaagtgcaaattcaatatgtggcaggctacagtgtataaatgttgaaaccatccctgatttgccagagcatacgactataatttctactcatttacaggcagaaaatctcatgtgctggggcacaggctatcatctatccatgaaacccatgggaatacctgacctaggtatgataaatgatggcacctcctgtggagaaggccgggtatgttttaaaaaaaattgcgtcaatagctcagtcctgcagtttgactgtttgcctgagaaatgcaatacccggggtgtttgcaacaacagaaaaaactgccactgcatgtatgggtgggcacctccattctgtgaggaagtggggtatggaggaagcattgacagtgggcctccaggactgctcagaggggcgattccctcgtcaatttgggttgtgtccatcataatgtttcgccttattttattaatcctttcagtggtttttgtgtttttccggcaagtgataggaaaccacttaaaacccaaacaggaaaaaatgccactatccaaagcaaaaactgaacaggaagaatctaaaacaaaaactgtacaggaagaatctaaaacaaaaactggacaggaagaatctgaagcaaaaactggacaggaagaatctaaagcaaacattgaaagtaaacgacccaaagcaaagagtgtcaagaaacaaaaaaagtaa

SEQ ID NO: 2311 - DNA, 480 bp, Homo sapiens
atggagctgcctgctgtgaacctgaaggtgattctcctaggtcactggctgctgacaacctggggctgcattgtattctcaggctcctatgcctgggccaacttcaccatcctggccttgggcgtgtgggctgtggctcagcgggactccatcgacgccataagcatgtttctgggtggcttgctggccaccatcttcctggacatcgtgcacatcagcatcttctacccgcgggtcagcctcacggacacgggccgctttggcgtgggcatggccatcctcagcttgctgctcaagccgctctcctgctgcttcgtctaccacatgtaccgggagcgcgggggtgagctcctggtccacactggtttccttgggtcttctcaggaccgtagtgcctaccagacgattgactcagcagaggcgcccgcagatccctttgcagtcccagagggcaggagtcaagatgcccgagggtcctga

SEQ ID NO: 2312 - DNA, 2828 bp, Homo sapiens
cgatcctctccgtgggagccagcgagcctctctccctgatcttacgtgctcaagggagctcacacgttcaccaactcacccttgaagtcatctcaagaacaaaagacaactgaaagacgtttccatacagttcctcgctcagaacagcttcagctgtctatgggaaggcttcacaagacaaagagctaggacttggccatttacacaaaaccaaaagtgaattacccagagtgtgctggcagagagacttgaatgtaaggacatgggaaaatctacacaggttgccaatggtttgtgactgtgagaaaagaaaagaaaaattaaagaaaatcttactagcataattcacattggacaacatgagcacattccagtcaatccactttatagacatgatctcactggtctccccaacatccctacaaggaaatgagggggaccagtatggctccacccttaggtcaaaagcccatccttcactcccacttgtggctgtgagtgggtggaacacatttaaacaggggaacaaattaccatcttccttgcttttgaccctttaacatgcgggtgagcaagtctgccttttccctgcttgaggccatacaattcccaaaacaacttgtctgaaatgttgggggctgagtcattggccagtgatagttttcaaacaactgctggtttgtttctcaaccactgcttggccatgctgacttggacacaatacagcatgtaataaaagtgcctgggatattttcctccttggcccagagaagacttttagaaggaaagacaatggtgaatacggaaggggagatgaatgcactagaaagatatgttgccagcattgtgctcagccgaagagaagctttgagaccaagaaatgtgagcatattgggcatctagaagttctcccagatagtagcgtagatctccatttttctgggttgtttattgttgttgtttgttgttgtcattttctgcactatgctgcctctcaagactcccttatgtgtgctataaaaaaaaatccatgacagaatggtctattctccacaaaaatagttactattgttgttgaggtgttactaatagttactagtagttacaaaaatagttactaatgttgttgaggtgaagtcaatgggaaagatagtagtaaaatagcaaaaatgtattagatagtatttttcacattgggaatataagacaattcattcaaaaaccaactccttaggattcattttattatcttacacttaaaaatatgtttagatttttctttcttgcactagaaattaaattgtcctatatattgagggatgaaaagcacagatgattatccgtataaatattgacacacatactcactctatccacatagctatctgttatggataaagaactcggcaacttctagcagtcatctgagatgagcaccatatgtgcattatttcactaaagctttcagagcttgagaaaaatagcctgaagaataagattgtttctttctgagccaaggttgcaatcttccaagtccaagatgtgcttgaaaatactcattaggtaattgtcaaagcctaggaagaccagtttaagaatatgaaataatattactactgacttctctttttgtgttcaatccagatggaagctggacacatgagaagtgacgtttgtataatagcaaagaaaagaacagagaacaagaaagcaaaacccttcacacctatgttctctttataggatctcattactgtttgctctctataatccccagaaaatagaaaaagtatatctatccaataagttgtggaaagtctccctctgtccttctataatagagtttccagtcattgttagacaactgcatttcattcaccaatagtggcctattgaaatcatcaacaggagaaacagttgttaatatcaaataaagagtcttgcaatggaagtcaaaatactttactctttcactaacttggtgtatgatcttgagcaagtcatttaacctctctaagtttgcttgcctcatctgtcaaacaagagagatgagataaattatctccacaggcattttcagaactattctagtctttttggaaattggtttatatttgtagaaaaggttcaatctgtttctggcatggcagtgaccaagtcagaatttctatttgggagatgagaaaaacacattaacaagattaattactgtagctgaaagatacataaatatggattggggtgtatttttaataccacaaaaacttccattcctgagttacttcattagcaactgttacttcaaccatctaggttgaggttttccagtaattctaggtcagcaattatggaccctacttattttcttttttttattatactttaagttctagggtacatgtgcacaatgtgcaggtctgttacatatgtatacatgtgccatgttggtgtgctgcacccattaactcatcatttacattaggtatatctcctaatgctatccctcccacctcccccaaccccatgacaggccccggtgtgtgacgttccccttcctgtgtccaagtgttctcattgttcaattcccacctatgagtgagaacaggcggtgtttggttttctgtctttgcgatagtttgctcagaatgatggtttccagcttcatctatgtccctacaaaggacatgaactcattcttttttatggctgcatagtattccatggtgtatatgtgccacattttcttaatccagtctaccattgatggacatttgggttggttccaagtctttgctattgtgaatagtgccgcaataaacatacatgtg

SEQ ID NO: 2313 - DNA, 2250 bp, Homo sapiens
gaggccgcggcggggaaaatggcggacgggaaggcgggagacgagaagcctgaaaagtcgcagcgagctggagccgccggaggacctgaagaagaagcagaaaaacctgtgaaaactaagactgtttcttccagtaatggaggggaaagttccagtcgcagcgctgagaagcgatcagctgaagaagaagctgccgacctcccaacaaagcctacaaagatctccaagtttggatttgccataggtagtcagacgacaaagaaagcatcagccatatccatcaaacttggatcaagtaagcctaaagaaactgttccaactcttgctccaaaaactctttcagtagcagcagcttttaatgaagatgaagatagtgaaccagaggaaatgcctccagaagcaaagatgaggatgaagaatattggaagggatacaccaacatcagctggaccaaactccttcaataaaggaaagcatgggttttctgataaccagaagctgtgggagcgaaatataaaatctcatcttggaaatgtccatgaccaagacaattaaatgatgttttgaaattggggtgtggggtgggtgtaaagttaaaaggaacagtttccttttttaaagaatggtataagactatctttggagccgctttttttttctttttcatttttttaaaagattgagtggtacactaataaatgagagtttgaaattagaggtaatttatgttttatatacagatttcaagacatttgctaattttgtagtttcatgtgattagtttccaaaggttacagataataaagaaatcagaaatggtacctttttaagaattgcatatttttttagacacaactattagcacattaagagggaagcaaagttactgtctatttaaaactgcaagcagttaactctcttaactcccttattacctaaacttgtctggctcccaggaacagccttatagagagagggagtattgtattgggaagaaaatgttactgaactattgactgaaagtaaatttagataaaatacagcttttttccttatgggcatttgttttgtttcaagtcatcataaactaggtattgcattgctatccgtggatacagacgcttagctcttaaaagattttttttttatgtaaactgttgaatatttgaaatagtccacttcaccttaatgggtcttgtctatcttcattagtcttcaaagaaaaaccatttgctaccaaagtaaatcagtattttgaatgtgcttctcttgttttttgtttattagctagttcctgtaagcatttccaccagaacttgaggcaaatcgtaaggaagctgtttcttttaaaacacaaaccaccaccaaaaatttaaatgtacatattgcttaagtatttggctgtttttattttttaaaaggtataaacaccaaaaaaaaaattaacattgtatgaagatggaaaataagaagatgcactttctgtaactttgtctaaggatttaaattactaacttatgaactccaatttgaattgaacttaactatcggctttcttactggtaaaattatatggtttattttaaatgcgtacatattgaccaatggcctctgaaaaagcacattttagatactgaaattgaaggaaagaaaatgcatcttcaaacattttttggaatctcaccacatatactttgttagatttgtgtattgtagggtgtttgttttgtatttttgtattgtatatgaactttttttaaatgtgacagttaaacacatctttaaaagcatagtcacagacaaaagcatacagtataaaaatttccttgaaaactcctacaatattatatttggaggcagcttcagactgttttattggtggtagctgcttgctgaggtcttttagttggtaataactccagagaagcagcctgtgtatattcctaacactttgttcactagcatttaagtttagaataagcccaagtaagacaatggaaatgtatatagaactcttagttcttacatgatttaattatatcgatacatgaatttaacttactttaatgtaggcaaactatcaattttttgtccattttcctgtttgttaaaataacatacctctcctacgtattattttcttgacccaaatgaaatattaacctaaggtcaagctgggagagagaaatgactgagatgaatgtctttactaaagtaccaataaatttgtcaaactcaaaaaaaaaaaaa

SEQ ID NO: 2314 - DNA, 2250 bp, Homo sapiens; identical to SEQ ID NO: 2313

SEQ ID NO: 2315 - DNA, 948 bp, Homo sapiens
atgaagtgtctcgggaagcgcaggggccaggcagctgctttcctgcctctttgctggctctttttgaagattctgcaaccggggcacagccacctttataacaaccgctatgctggtgataaagtgataagatttattcccaaaacagaagaggaagcatatgcactgaagaaaatatcctatcaacttaaggtggacctgtggcagcccagcagtatctcctatgtatcagagggaacagttactgatgtccatatcccccaaaatggttcccgagccctgttagccttcttacaggaagccaacatccagtacaaggtcctcatagaagatcttcagaaaacactggagaagggaagcagcttgcacacccagagaaaccgaagatccctctctggatataattatgaagtttatcactccttagaagaaattcaaaattggatgcatcatctgaataaaactcactcaggcctcattcacatgttctctattggaagatcatatgagggaagatgtctttttattttaaagctgggcagacgatcacgactcaaaagagctgtttggatagactgtggtattcatgcaagagaatggattggtcctgccttttgtcagtggtttgtaaaagaagctcttctaacatataagagtgacccagccatgagaaaaatgctgaatcatctatatttctatatcatgcctgtgtttaacgtcgatggataccattttagttggaccaatgatcgattttggagaaaaacaaggtcaaggaactcaaggtttcgctgccgtggagtggatgccaatagaaactggaaagtgaagtggtgtggtaagtttgggaccaactgggatccagatccaaaggtttctgcaggttttactctgcaaaatatgagtccagaggactctcatgggagactcatgtttttctgtatgtga

SEQ ID NO: 2316 - DNA, 633 bp, Homo sapiens
atgtcgcacggtcacagccacggcgggggtggctgccgctgcgccgccgaacgggaggagccgcccgagcagcgcggcctggcctacggcctgtacctgcgcatcgacctggagcggctgcaatgccttaacgagagccgcgagggcagcggccgcgtcttcaagccgtgggaggagcggaccgaccgctccaagtttgttgaaagtgatgcagatgaagagcttctgtttaatattccatttacgggcaatgtcaagctcaaaggcatcattataatgggagaggatgatgactcacacccctctgagatgagactgtacaagaatattccacagatgtcctttgatgatacagaaagggagccagatcagacctttagtctgaaccgggatcttacaggagaattagagtatgctacaaaaatttctcgtttttcaaatgtctatcatctctcaattcatatttcaaaaaacttcggagcagatacgacaaaggtcttttatattggcctgagaggagagtggactgagcttcgccgacacgaggtgaccatctgcaattacgaagcatctgccaacccagcagaccatagggtccatcaggttaccccacagacacactttatttcctaa

SEQ ID NO: 2317 - DNA, 3512 bp, Homo sapiens
ctccacataggcagtggctgtggtttctaccccgggtggccgggsgcagtgctgagctgggactgttgtttgcccagcctgggctgctagaaagcagcagttaaagttcgtttctggtcactgctccaggaagccaccttactctgagggtcaagaattgccgcttccttttagttactgtaagttcctcctctgcccctggtttgtttcccgcggcacttctggatacccccaggtcccagacccttccagactcaaaccatgaactttcggcagctgctgttgcacttgccacgttatcttggagcctcgggttccccgcgtcgcctgtggtggtccccgtccctcgacaccatctcctcggtgggctcttggcgtggtcggtcctccaagtccccggcccactggaatcaggtartgtcagaggcggagaaratcgtggggtaccccacgtccttcatgagccttcgctgcctgctgagcgacragctcagcaacatcgctatgcaggtgcggaagctggtgggcactcagcaccctctgcttaccacagccagggggcttgtacatgacagctggaatagcctccagttgaggggcttggtggtgctccttatctctaaagcagctgggcccagcagcgtgaacacttcatgtcagaactatgacatggtcagtgggatctactcatgtcaaagaagtttggcagagatcacggagctaattcatattgctctccttgtacatcgtgggatagtaaatttaaatgagttgcaatcatctgatggtccactgaaagacatgcaatttggaaataaaattgctatcctgagtggagactttcttctagcaaatgcctgcaatggactagctctgctacagaacaccaaggttgtggaacttttagcaagtgctcttatggacttggtacaaggagtatatcatgaaaattctacttcaaaggaaagttatatcacagatgatattggaatatcgacttggaaggagcagacttttctctcccatggtgccttactagcaaagagctgccaagctgcaatggaattagcaaagcatgatgctgaggttcagaatatggcatttcagtatgggaagcacatggccatgagtcataagataaattctgatgtccagccttttattaaagaaaagaccagtgactccatgacttttaatctaaactcagctcctgtagtcttacatcaggaatttcttggaagagatttgtggattaaacagatcggagaggctcaagaaaaaggaagattggactatgctaagttgcgagaaagaatcaaagctggcaaaggtgtgacttcagctattgacctgtgtcgttaccatggaaacaaggcactggaggccctggagagctttcctccctcggaggccagatctgctttagaaaacattgtgtttgctgtgaccagattttcatgacatcaaattaaaaagacactattgttagttagctgaaaatcctagggaatgaggttgattgggagcgctttcacgatgcgttaatgacttttaaaacatatgcatttttccttccttttatcacattgctaaatgagttctgctttctttttggaactgctacaaacaaaattagaagaaaaaaaggtcaagcagttttcacttgtcacgccagaagcacacttgaggctgcagtcgcagaaataattaatgagattcgctcctgtgacctcagcaaatggacaggaaataagtccttattgattggaccgagccagggatggcgccagggcggtggcctgtggtttttcctgctagaraggacaaagcaagttggaagctgcaggtgtcaaragaaatgctctcaataccaaccaggraggattgtctaatcaaaaactagtgaccaatttgtcataatggagagtagttcaatggattgagaaaaatatgttttatttgttggcttgtaattatgtctctggattattattattttttttttagatgtagttttgctcttgttgcccaggctggagtgcaatggtgcagttttgactcactgcaacctccgcctcctgggttcaagtgattctcctgcctcagcctcccgagtagctggaattacaggcacctgccaccacgcctggctaattttgtatttttagtagagatggggtttcactatgttggtcaggctagtctcgaactcctgacctcaggtgatccgcctgcctcggcctcccaaagtgctgggattagaggcttgagccactgcacctggcctcatgtctctggatttataatgcagtatgaatatactttgtgctttatggtttttataatgtctttttggagaaattgccgaaaagttgccaaatacttgaagtaggagattaaaatgttatcaaatgttaaattggttatattaggaatagtctgtttttctttcctgaagatcagtttttttattcaaacacatttcaaagaaccaaattttttttttctttaaggaaaaaggagctttttttcaagtgaaatgtattcatttgtaatactttggtttaaggcatactttaatttttacgagtttcagaaacagaatttttgtactagggaattcattggtgagagtgttcttttaacctcagaatgtcaaattttggtcttgaaccacagacatccaattacagaaagaatataagcaatctcacaggcctgcaatcggacactgtctctgtgtggttcataggagatgatttttgaggtttgcactcatgcaatttgagaacaccgttgacaagaaggctgagtttacataaatgatctagattgaaactcagctacctttcttcctcatgtggtgtaattacagccctatctggagacagcgaatacagcaaacagattttattacctagttcgctcaaacactacatgaagttattttagttaaagccctcccccaaaagttataaaaccatttttatcagggcccaacatgtggcatgcaatgaagagaaaatgtaaagctacagaggttaatgtattgtattataaaatattttaagtgtactcaaaatatcataattgtacagtttatgccaccataatttgaggcctatagatttagcttaagagaacactgttctgtttgaaatgctttctgtcactgaaattggcttaattagtaaccatggataagatgctttagatcagactaggttttaatcattaacttccacaaagaagtcatactttgcgttaggtgtgctggttggatgtgcaggaacttcagcaagcagtaggttttactaagcagatggtcgggcactgcagggcaccaggcaggatcctagggcgcctcttattctgcgttagcatctggtttgctgtatgaccttgcacaagtcacttccttctgagcctcaattttctcatctgtacaatgagattcaaaagttgacctgaaagtcaagtgtgaaaaaaaaaaagagattaaacaagataat

SEQ ID NO: 2318 - DNA, 1598 bp, Homo sapiens
gtgagttgaccagagaaggatgagagaattgccaagttgtactgaacgccaagctgagaatggtgattctgaagatagaatgcgtttgcaatggctgctactgtgaacttggaacttgatcccatttttttgaaagcactaggtttcttgcattcaaagagtaaagattctgctgaaaagctaaaagcactgcttgatgaatctttggctcggggcattgattccagttaccgtccatctcaaaaggatgtggagccacccaaaatttcaagcacaaaaaacatttccattaagcaagagcccaaaatatcatccagtcttccttctggtaataataatggcaaggtcctcacaactgaaaaggtaaagaaggaagctgaaaagagacctgctgataaaatgaaatcagacatcactgaaggagttgatattccaaagaaacctagattggagaaaccagaaacacagtcatctcccattactgtccaaagtagcaaggatttacctatggctgacctttccagttttgaggagaccagtgctgatgattttgccatggagatgggattggcctgcgttgtttgtaggcaaatgatggtggcatctggcaatcaattagtagaatgtcaggagtgccataatctctaccaccgagattgtcataaaccccaggtgacagacaaggaagcgaatgaccctcgcctggtgtggtattgtgcccgatgtaccagacaaatgaaaagaatggctcaaaaaactcagaaaccaccgcagaaaccagcccctgcagttgtttctgtaactccagctgtcaaagatccattggttaagaaaccagaaactaaactgaaacaagagacaacttttctagcgtttaagagaacagaagtcaagacatccacagttatttcaggaaattcttctagtgccagcgtttcctcgtcagtaactagtggcttaactggatgggcagcttttgcagccaaaacttcctctgctggtccttcaacagcaaaattgagttcaacaacacaaaacaatactgggaaacctgctacttcgtcagctaaccagaaacctgtgggtttgactggtctggcaacatcatccaaaggtggaataggttccaaaataggttccaataacagcactacgcccactgtacctttaaaaccacctccacctctaaccttgggtaaaactggccttagtcgctcagttagttgtgacaatgtcagcaaagtaggtcttcctagtccaagtagtttagttccaggaagcagcagccaactaagtgggaatggaaatagtggaacatcaggacctagtggaagtactaccagcaaaactacttcagaatccagcagctctccctcagcatcccttaaaggcccaacttcacaagatcacagctcaatgctatgaagcgattacagatggtcaagaagaaagctgcccaaaagaaactcaagaagtaatgtggccaagtaggtttttgtatcatattagcctaaagatgaaaggcttattattatgatataatctgtaatacactgtaatttaataaaagtcttcataatcaaaaaaaaaaaaaaaaa

SEQ ID NO: 2319 - DNA, 1950 bp, Homo sapiens
aaaggctggcctctcttcaacatgggatcttctggacttttgagcctcctggtgctattcgtcctcttagcgaatgtccagggacctggtctgactgattggttatttcccaggagatgtcccaaaatcagagaagaatgtgaattccaagaaagggatgtgtgtacaaaggacagacaatgccaggacaacaagaagtgttgtgtcttcagctgcggaaaaaaatgtttagatctcaaacaagatgtatgcgaaatgccaaaagaaactggcccctgcctggcttattttcttcattggtggtatgacaagaaagataatacttgctccatgtttgtctatggtggctgccagggaaacaataacaacttccaatccaaagccaactgcctgaacacctgcaagaataaacgctttccctgattggataaggatgcactggaagaactgccagaatgtggctcatgctctgagtactgttcctgtacctgacggatgctccagactggcttccagtttcactctcagcattccaagatcttagcccttcccagaacagaacgcttgcatctacctcctcttcctccatctttggctcttttgatgcacaatatccatccgttttgatttcatctttatgtcccctttatctccaacttctagaactcccagtttatacctgtgtcactctcaattttttccagtaaagtacttgatgtagtcctgtgccttgaggctgagtgattgacatctttttggcacattacactttgcagagtaagggatcattgaggcttctggtgacatcattcaagggagtgaagacaatcagaactttgagagttcagagttccaggaatattgttattgttatcttcctctgtttctacaaaagattgtaaaaccctttttaggcaagggcccaaggacagtgccttagtttggatcctctagaaactaaccctgggaaaagggcatgggtgcaggtagtttgtttgagagatttcccaggacatacaagatggggagtgagatgagtaattcagggaagagaagggaagagagaagagtctattatgagctggttactactgtggctcaatcctattggggaccttttaaagaatcatgtaaaacaggcttacaaattttctttttaaaaatattttattttattttacgttccgggatacatgtgcaggacctgcaggtttgttacataggtaagcctgtgccatggtggtttgctgcacctatcaacccattacctgggtattaagccccgcatgcattagctatttatcctgatgctttccctccccctgccccctcaacagtccacgtgttctcattgttcatctcccacttgcaagtgagaacatgtggtatttacttttgttcctgcgttactttgctgaggataacggcttccagcttcatccatgtccctgcaaaggacgtgatctcatttctttttatggctgcatagtattccatggcatatatgtaccacattttctttatccagcctatcgttgatggatatttggtttgattccatgtttttgctattgtaaatagtgctgcagtgaacatacacatgcatgtatctttataaaagaatgatttatattcctttgagtgtatacccagtaatgggattgctgggtcaaatggtatttctggttctagatctttcaggaattggcacactctcttccacaatggttgaaccaatttacattcccaacagtgtaaaagcattcatgtttctccacagctttaccagcatctgttgtttctggactttttaataatcaccattctgactggcatgagatggtatctcattgtggttttgatttgcatttctctgatgatcactggtgttgagctttttttcatatgtttgttggccgcataaatgtcttcttttgagaaaaaaaaaaa

SEQ ID NO: 2320 - DNA, 1061 bp, Homo sapiens
cgcgcttctcagccgggccgccgacccaaaggagccgtccgactatgtctaacatggagaaacacctgttcaacctgaagttcgcggccaaagaactgagtaggagtgccaaaaaatgcgataaggaggaaaaggccgaaaaggccaaaattaaaaaggccattcagaagggcaacatggaagttgcgaggatacacgccgaaaatgccatccgccagaagaaccaggcggtgaatttcttgagaatgagtgcgcgagtcgatgcagtggctgccagggtccagacggcggtgacgatgggcaaggtgaccaagtcgatggctggtgtggttaagtcgatggatgcgacattgaagaccatgaatctggagaagatttctgctttgatggacaaattcgagcaccagtttgagactctggacgtccagacgcagcaaatggaagacacgatgagcagcacgacgacgctcaccactccccagaaccaagtggatatgctgctccaggaaatggcagatgaggcgggcctcgacctcaacatggagctgccgcagggccagaccggctccgtgggcacgagcgtggcttcggcggagcaggatgaactgtctcagagactggcccgccttcgggatcaagtgtgacggcagaacccgctctgaggtttcctggccatagccaccctttgaaatgctctctgtgtgttagagagatactataccctagaaactctgaacacgccagaatgctgaaatgcccttctacctttgggtttacagccccctccacataaattaagaaattcagtatttctgcactcttagctggattctaaagttctgtatagctcgtaatgatggtatttttatagcagccttttaacagaactagttaatttcgtgtatatgaatctttctcgaagatctggtcaaaactgtattcagtttcctgcccagaatgatcagattgaaggtggttggtttttattattatttagtgtgattgatagtatctagaatggcaggtggtgcataaaagttaaagagaggggaaagattact

SEQ ID NO: 2321 - DNA, 2967 bp, Homo sapiens
ccggaactgcagttgctgctgcagctgaggtacagcggcggtttctgaggttcttcactcgcgactgacggagctgcggtggcgtctccacacgcaaccatgaagttgaaggacacaaaatcaaggccaaagcagtcaagctgtggcaaatttcagacaaagggaatcaaagttgtgggaaaatggaaggaagtgaagattgacccaaatatgtttgcagatggacagatggatgacttggtgtgctttgaggaattgacagattaccagttggtctcccctgccaagaatccctccagtctcttctcaaaggaagcacccaagagaaaggcacaagctgtttcagaagaagaggaggaggaggagggaaagtctagctcaccaaagaaaaagatcaagttgaagaaaagtaaaaatgtagcaactgaaggaaccagtacccagaaagaatttgaagtgaaagatcctgagctggaggcccagggagatgacatggtttgtgatgatccggaggctggggagatgacatcagaaaacctggtccaaactgctccaaaaaagaagaaaaataaagggaaaaaagggttggagccttctcagagcactgctgccaaggtgcccaaaaaagcgaagacatggattcctgaagttcatgatcagaaagcagatgtgtcagcttggaaggacctgtttgttcccaggccggttctccgagcactcagctttctaggcttctctgcacccacaccaatccaagccctgaccttggcacctgccatccgtgacaaactggacatccttggggctgctgagacaggaagtgggaaaactcttgcctttgccatcccaatgattcatgcggtgttgcagtggcagaagaggaatgctgcccctcctccaagtaacaccgaagcaccacctggagagaccagaactgaggccggagctgagactagatcaccaggcaaggctgaagctgagtctgatgcattgcctgacgatactgtaattgagagtgaagcactgcccagtgatattgcagccgaggccagagccaagactggaggcactgtctcagaccaggcgttgctctttggtgacgatgatgctggtgaagggccttcttccctgatcagggagaaacctgttcccaaacagaatgagaatgaggaggaaaatcttgataaagagcagactggaaatctaaaacaggagttggatgacaaaagcgccacctgtaaggcatatccaaagcgtcctctgcttggactggttctgactcccactcgagagctggccgtccaggtcaaacagcacattgatgctgtggccaggtttacaggaattaaaactgctattttggttggtggaatgtccacgcagaaacagcagaggatgctgaaccgtcgtcctgagattgtggttgctactccaggccggctgtgggaattaattaaagaaaagcattatcatttgaggaaccttcggcagctcaggtgcctggtagtggatgaggctgaccggatggttgagaaaggccattttgctgagctctcacagctgctagagatgctcaatgactcccaatacaacccaaagagacaaacgcttgttttttctgccacactcaccctggtgcatcaggctcctgctcgaatccttcataagaagcacaccaagaaaatggataaaacagccaaacttgacctccttatgcagaaaattggcatgaggggcaagcccaaggtcattgacctcacaaggaatgaggccacggtggagacgctaacagagaccaagatccattgtgagactgatgagaaagacttctacttgtactacttcctgatgcagtatccaggccgcagcttagtgtttgccaacagtatctcctgcatcaaacgcctctctgggctcctcaaagtccttgatatcatgcccttgaccctgcatgcctgtatgcaccagaagcagaggctcagaaacctggagcagtttgcccgtctggaagactgtgttctcttggcaacagatgtggcagctcggggtctggatattcctaaagtccagcatgtcatccattaccaggtcccacgtacctcggagatttatgtccaccgaagtggtcgaactgctcgagctaccaatgaaggcctcagtctgatgctcattgggcctgaggatgtgatcaactttaagaagatttacaaaacgctcaagaaagatgaggatatcccactgttccccgtgcagacaaaatacatggatgtggtcaaggagcgaatccgtttagctcgacagattgagaaatctgagtatcggaacttccaggcttgcctgcacaactcttggattgagcaggcagcagctgccctggagattgagctggaagaagacatgtataagggaggaaaagctgaccagcaagaagaacgtcggagacaaaagcagatgaaggttctgaagaaggagctgcgccacctgctgtcccagccactgtttacggagagccagaaaaccaagtatcccactcagtctggcaagccgcccctgcttgtgtctgccccaagtaagagcgagtctgctttgagctgtctctccaagcagaagaagaagaagacaaagaagccgaaggagccacagccggaacagccacagccaagtacaagtgcaaattaactggtcaagtgtgtcagtgactgcacattggtttctgttctctggctatttgcaaaacctctcccacccttgtgtttcactccaccaccaaccccaggtaaaaaagtctccctctcttccactcacacccatagcgggagagacctcatgcagatttgcattgttttggagtaagaattcaatgcagcagcttaatttttctgtattgcagtgtttataggcttcttgtgtgttaaacttgatttcataaattaaaaacaatggtcagaaaaaaaaaaaaaaaaaaaa

SEQ ID NO: 2322 - DNA, 2121 bp, Homo sapiens
  misc_feature (1524)..(1524): n is a, c, g, or t
atgggggacgagcggccccactactacgggaaacacggaacgccacagaagtatgatcccactttcaaaggacccatttacaataggggctgcacggatatcatatgctgtgtgttcctgctcctggccattgtgggctacgtggctgtaggcatcatagcctggactcatggagaccctcgaaaggtgatctaccccactgatagccggggcgagttctgcgggcagaagggcacaaaaaacgagaacaaaccctatctgttttatttcaacattgtgaaatgtgccagccccctggttctgctggaattccaatgtcccactccccagatctgcgtggaaaaatgccccgaccgctacctcacgtacctgaatgctcgcagctcccgggactttgagtactataagcagttctgtgttcctggcttcaagaacaataaaggagtggctgaggtgcttcgagatggtgactgccctgctgtcctcatccccagcaaacccttggcccggagatgcttccccgctatccacgcctacaagggtgtcctgatggtgggcaatgagacgacctatgaggatgggcatggctcccggaaaaacatcacagacctggtggagggcgccaagaaagccaatggagtcctagaggcgcggcaactcgccatgcgcatatttgaagattacaccgtctcttggtactggattatcataggcctggtcattgccatggcgatgagcctcctgttcatcatcctgcttcgcttcctggctggtattatggtctgggtgatgatcatcatggtgattctggtgctgggctacggaatatttcactgctacatggagtactcccgactgcgtggtgaggccggctctgatgtctctttggtggacctcggctttcagacggatttccgggtgtacctgcacttacggcagacctggttggcctttatgatcattctgagtatccttgaagtcattatcatcttgctgctcatctttctccggaagagaattctcatcgcgattgcactcatcaaagaagccagcagggctgtgggatacgtcatgtgctccttgctctacccactggtcaccttcttcttgctgtgcctctgcatcgcctactgggccagcactgctgtcttcctgtccacttccaacgaagcggtctataagatctttgatgacagcccctgcccatttactgcgaaaacctgcaacccagagaccttcccctcctccaatgagtcccgccaatgccccaatgcccgttgccagttcgccttctacggtggtgagtcgggctaccaccgggccctgctgggcctgcagatcttcaatgccttcatgttcttctggttggccaacttcgtgctggcgctgggccaggtcacgctggccggggcctttgcctcctattactgggccctgcgcaagccggacgacctgccggccttcccgctcttctctgcctttggccgggcgctcaggtaccacacaggctccctggcctttggngcgctcatcctggccattgtgcagatcatccgtgtgatactcgagtacctggatcagcggctgaaaggtgcagagaacaagtttgccaagtgcctcatgacctgtctcaaatgctgcttctggtgcctggagaagttcatcaaattccttaataggaatgcctacatcatgattgccatctacggcaccaatttctgcacctcggccaggaatgccttcttcctgctcatgagaaacatcatcagagtggctgtcctggataaagttactgacttcctcttcctgttgggcaaacttctgatcgttggtagtgtggggatcctggctttcttcttcttcacccaccgtatcaggatcgtgcaggatacagcaccacccctcaattattactgggttcctatactgacggtgatcgttggctcctacttgattgcacacggtttcttcagcgtctatggcatgtgtgtggacacgctgttcctctgcttcttggaggacctggagaggaatgacggctcggccgagaggccttacttcatgtcttccaccctcaagaaactcttgaacaagaccaacaagaaggcagcggagtcctga

SEQ ID NO: 2323 - DNA, 2840 bp, Homo sapiens
gacatcccgcctgcgacacctggcagagacggccgaggagaaggacactgagctgctggatttgcgagaaaccatagactttctgaagaaaaagaactctgaggcccaggcagtcattcagggagcccttaatgcctcagaaaccacacccaaagaacttcggatcaagagacaaaactcctcagatagcatctcaagcctcaacagcatcactagccattccagcatcggcagcagcaaggatgctgatgcgaaaaagaagaaaaaaaagagttggcttcgaagttccttcaacaaagcgttcagtataaaaaaggggcccaagtcagcttcctcatactcggatatagaggagattgctacacccgactcttcagccccctcatcccccaaactacagcatggttctacagagactgcttcaccctccatcaagtcctccacctcgtcctccgtgggcactgatgtcaccgagggccctgctcacccagccccccacactaggctgttccatgcaaatgaggaggaggagccagagaagaaggaggtatcggagctgcgctctgagctatgggagaaggaaatgaagcttacagacatccgcttggaggccctcaactctgcccaccaactggatcagcttcgggagaccatgcacaacatgcagttggaggtggacctgctgaaagcagagaatgaccgactgaaggtagccccaggcccctcatcaggctccactccagggcaggtccctggatcatctgcattatcttccccacgccgctccctaggcctggcactcacccattccttcggccccagtcttgcagacacagacctgtcacccatggatggcatcagtacttgtggtccaaaggaggaagtgaccctccgggtggtggtgaggatgcccccgcagcacatcatcaaaggggacttgaagcagcaggaattcttcctgggctgtagcaaggtcagtggaaaagttgactggaagatgctggatgaagctgttttccaagtgttcaaggactatatttctaaaatggacccagcctctaccctgggactaagcactgagtccatccatggctacagcatcagccacgtgaaacgagtgttggatgcagagccccccgagatgcctccttgccgtcgaggtgtcaataacatatcagtctccctcaaaggtctgaaggagaaatgcgtcgacagcctggtgttcgagacgctgatccccaagccgatgatgcagcactacataagcctcctgctgaagcaccggcgcctcgtcctctcgggccccagcggcacgggcaagacctacctgaccaatcgcttggccgagtacctggtggagcgctctggccgtgaggtcacagagggcatcgtcagcaccttcaacatgcaccagcagtcttgcaaggatctgcaactgtatctttccaacctagccaaccagatagaccgggaaacaggaattggggatgtgcccctggtgattctattggatgacctgagtgaagcaggctccatcagtgagttggtcaatggggccctcacctgcaagtatcataaatgtccctatattataggtaccaccaatcagcctgtaaaaatgacacccaaccatggcttgcacttgagcttcaggatgttgaccttctccaacaacgtggagccagccaatggcttcctggttcgttacctgaggaggaagctggtagagtcagacagcgacatcaatgccaacaaggaagagctgcttcgggtgctcgactgggtacccaagctgtggtatcatctccacaccttccttgagaagcacagcacctcagacttcctcatcggcccttgcttctttctgtcgtgtcccattggcattgaggacttccggacctggttcattgacctgtggaacaactctatcattccctatctacaggaaggagccaaggatgggataaaggtccatggacagaaagctgcttgggaggacccagtggaatgggtccgggacacacttccctggccatcagcccaacaagaccaatcaaagctgtaccacctgcccccacccaccgtgggccctcacagcattgcctcacctcccgaggataggacagtcaaagacagcaccccaagttctctggactcagatcctctgatggccatgctgctgaaacttcaagaagctgccaactacattgagtctccagatcgagaaaccatcctggaccccaaccttcaggcaacactttaagggttcggcaatcactgtcacccccggacagcagaacgctggcatcagctatcttagctcctcctctcccctctcctctttcagagcactggctctccagccccaggaggagaacaggagggaggaggagatgaaagaggagggacaggttcttggtgctgtacctttgagaacttcctaggaaggaatggtggggtggcgtttgggaacttgtgccccctaaacacatttactggcctcctctaatgactttggggaaaagatgattctgggtctttcccttgacttcttgtttcaattacaaactcctgggctttctggggaggggttcagaaaacatcaaaacactgcagcagttcctaaatgattctcacaagcaaccctgagagagacagtcttgtgagggagatctgggggaggcaggaagctcctcagattttctcacagacccttcccaattccatcaccactgccaacaactcctcccccagagatctggctggagcccagaaaaagaagcatgtggtttaaaaaatgtttaaatcaatctgtaaaaggtaaaaaaaaaaaaaaaaaa

SEQ ID NO: 2324 - DNA, 1078 bp, Homo sapiens
gtgtcgcgcggcgcggtggcctcggtcggtaccctgggcgcggacgagctgcctcattagtattcgtacccacgaggcggcgcacggggccctcggggacagcgagcgtcgcgccatggcttatcactcgggctacggagcccacggctccaagcacagggcccgggcagccccggatccccctcccctcttcgatgacacaagcggtggttattccagccagcccgggggatacccagccacaggagcagacgtggccttcagtgtcaaccacttgcttggggacccaatggccaatgtggctatggcctatggcagctccatcgcatcccatgggaaggacatggtgcacaaggagctgcaccgttttgtgtctgtgagcaaactcaagtatttttttgctgtggacacagcctacgtggccaagaagctagggctgctggtcttcccctacacacaccagaactgggaagtgcagtacagtcgtgatgctcctctgcccccccggcaagacctcaacgcccctgacctctatatccccacgaaggccttcattacttacgtgctcctggctgggatggcactgggcattcagaaaaggttctccccggaggtgctgggcctgtgtgcaagcacagcgctggtgtgggtggtgatggaggtgctggccctgctcctgggcctctacctggccaccgtgcgcagtgacctgagcacctttcacctgctggcctacagtggctacaaatacgtgggaatgatcctcagtgtgctcacggggctgctgttcggcagcgatggctactacgtggcgctggcctggacctcatcggcgctcatgtacttcattgtgcgctctttgcggacagcagccctgggccccgacagcatggggggccccgtcccccggcagcgtctccagctctacctgactctgggagctgcagccttccagcccctcatcatatactggctgactttccacctggtccggtgaccccctggccccagatggcactgagtttttcattcattgaagatttgatttccttgaaaaaaaaaaaaaaaaaaaaaaaaa

SEQ ID NO: 2325 - DNA, 3778 bp, Homo sapiens
tttttaaattttgcatttgacttaaagtgccatgagaaaatttgcatactgcaaggtggtcctagccacctccttgatttgggtactcttggatatgttcctgctgctttacttcagtgaatgcaacaaatgtgatgaaaaaaaggagagaggacttcctgctggagatgttctagagccagtacaaaagcctcatgaaggtcctggagaaatggggaaaccagtcgtcattcctaaagaggatcaagaaaagatgaaagagatgtttaaaatcaatcagttcaatttaatggcaagtgagatgattgcactcaacagatctttaccagatgttaggttagaagggtgtaaaacaaaggtgtatccagataatcttcctacaacaagtgtggtgattgttttccacaatgaggcttggagcacacttctgcgaactgtccatagtgtcattaatcgctcaccaagacacatgatagaagaaattgttctagtagatgatgccagtgaaagagactttttgaaaaggcctttagagagttatgtgaaaaaactaaaagtaccagttcatgtaattcgaatggaacaacgttctggattgatcagagctagattaaaaggagctgctgtgtctaaaggccaagtgatcaccttcctggatgcccattgtgagtgtacagtgggatggctggagcctctcttggccaggatcaaacatgacaggagaacagtggtgtgtcccatcatcgatgtgatcagtgatgatacttttgagtacatggcaggctctgatatgacctatggtgggttcaactggaagctcaattttcgctggtatcctgttccccaaagagaaatggacagaaggaaaggtgatcggactcttcctgtcaggacacctaccatggcaggaggccttttttcaatagacagagattactttcaggaaattggaacatatgatgctggaatggatatttggggaggagaaaacctagaaatttcctttaggatttggcagtgtggaggaactttggaaattgttacatgctcacatgttggacatgtgtttcggaaagctacaccttacacgtttccaggaggcacagggcagattatcaataaaaataacagacgacttgcagaagtgtggatggatgaattcaagaatttcttctatataatttctccaggtgttacaaaggtagattatggagatatatcgtcaagagttggtctaagacacaaactacaatgcaaacctttttcctggtacctagagaatatatatcctgattctcaaattccacgtcactatttctcattgggagagatacgaaatgtggaaacgaatcagtgtctagataacatggctagaaaagagaatgaaaaagttggaatttttaattgccatggtatggggggtaatcaggttttctcttatactgccaacaaagaaattagaacagatgacctttgcttggatgtttccaaacttaatggcccagttacaatgctcaaatgccaccacctaaaaggcaaccaactctgggagtatgacccagtgaaattaaccctgcagcatgtgaacagtaatcagtgcctggataaagccacagaagaggatagccaggtgcccagcattagagactgcaatggaagtcggtcccagcagtggcttcttcgaaacgtcaccctgccagaaatattctgagaccaaatttacaaaaaaacgaaaaaaataaggattgactgggctacctcagcatacatttctgccacattcttaagtagcaaaaaaggaaaagtgctttcctcctctgcaggatgtaaggtttatcagccattaaaacttagacttctctagcttttcactagctgtgaaccagccttcctgtccatggacgtgaaactgcatagtaatgagactgtgcacactgatgtttacaagattgaaagagtctttctccgaaaatcatggtaaagaatactgagacaatgaaaaaaaatcaacaaaatatgctttctggagaactgtaccttctatggtttgcttgcacatcagtagtttctgctgaacgtgctgtcataatgaagagatttccaagattttttttcctgattagaacgggtagccagtatattaaatattgatagaaaaataaaagaactggaaccagattcagaatcttgaaaacaacattttttacaacaaacaaaaaaactatattaaacagggtttaaaggaaaattaaaacagaactatgaagaagtacaatttgttatagtatagtatcaaatttctatatagattttatacctcagtggggaaaaataactgattccaatgacattcattttgttttcatctgtgatagtcatggatgcttttattttccttggggtgctgaaattgagctgaaaaaaaaaggctctttgaatatagttttaatttctctctacagttttttttgtttggtttgtgggctgttggaattgtaatttttaattgccttctaaaaaatggaaatttaacaatgtctgatctcagctgaacaaattagatgtttcagttgctcttgggtcaactggcttacagatttacatgtgcacacacacacaaatttcttatcacattttcgacttcttcacttgacctaactgattatgcgaaatacccaagattcatgctactgttccacatttgttttcacagcaataaatcttcagttctgttgtttatgattccacttaacaaggggcctgcaaatgtgatttattatttgggtatttggagataatacatttgagggttttttggaaaacctttttcactccatactcaaatatgcttcattgtcaaatgcatatttaaattaaattattgaattgtaatgtttatctgctgctttttttaaataaaatttgactgaaaatgtttaattggcattttttaatgacttacccaagaaaagtgcagctattattccatattaataggcttgcatttcttttcctaaatcttatttaggctaaatcagttttattgtcctctgattttttttaataccacagaaatcacctgagtgtcaattgaaaagttgtcaattaaaaggtaaccttttaactctcgtaggaggaatctcattaagacatttttcctgatatgtagagcagtctgttggcaaaaatgcatatattttctttcatatttgtaaaattatatttaatggaattcttttctttgattatcaaggactttcactgcaggcagtgctatttcttgtgcctaagaatgtttccaaaagtcgcatcgctaatgatatttgccaagttgagtgtacacaaagtttctcatatcctgttcaagttaatcaacatcaaacacatggggatgctttagggtgagtctataatacaaaatgcataaaccatgtccccaggaaatttgaaaggaagcaagtgctgaatggaatttttttccttttccatgagctgtgttaattctatctccagtaggcctaatgcttgaaataagcaagatgtctaatcaataaattattttcatgctcagaatttcaggtttttgtactccagcatagcttggtcttatttcttactgtatgaaagcttaacagcaatgtgatttaaggttttgttttaaatgggagatgtaagtgatttaattcatgggtacttttagaacctgatagataatcccattgcctttatttttctaattaaagaatcctaaatactttgaaaatacaaaatattcctg

SEQ ID NO: 2326 - DNA, 3213 bp, Homo sapiens
gaccgaagcaagagctggttcaggtggcagccacagcagcctcagggacctcagcaactatggcctcctgcccagactctgataatagctgggtgcttgctggctccgagagcctgccagtggagacactgggcccggcatccaggatggacccagaatctgagagagccctgcaggcccctcacagcccctccaagacagatgggaaagaattagctgggaccatggatggagaagggacgctcttccagactgaaagccctcagtctggcagcattctaacagaggagactgaggtcaagggcaccctggaaggtgatgtttgtggtgtggagcctcctggcccaggagacacagtagtccagggagacctgcaggagaccaccgtggtgacaggcctgggaccagacacacaggacctggaaggccagagccctccacagagcctgccttcaacccccaaagcagcttggatcagggaggagggccgctgctccagcagtgacgatgacaccgacgtggacatggagggtctgcggagacggcggggccgggaggccggcccacctcagcccatggtgcccctggctgtggagaaccaggctgggggtgagggtgcaggcggggagctgggcatctccctcaacatgtgcctccttggggccctggttctgcttggcctgggggtcctcctcttctcaggtggcctctcagagtctgagactgggcccatggaggaagtggagcggcaggtcctcccagaccccgaggtgctggaagctgtgggggacaggcaggatgggctaagggaacagctgcaggccccagtgcctcctgacagtgtccccagcctgcaaaacatgggtcttctgctggacaagctggccaaggagaaccaggacatccggctgctgcaggcccagctgcaggcccaaaaggaagagcttcagagcctgatgcaccagcccaaagggctagaggaggagaatgcccagctccggggggctctgcagcagggcgaagccttccagcgggctctggagtcagagctgcagcagctgcgggcccggctccaggggctggaggccgactgtgtccggggcccagatggggtgtgcctcagtgggggtagaggcccacagggtgacaaggccatcagggagcaaggccccagggagcaggagccagaactcagcttcctgaagcagaaggaacagctggaggctgaggcacaggcattaaggcaagagttagagaggcagcgacggctgctggggtctgtacagcaggatctggagaggagcttgcaggatgccagccgcggggacccagctcatgctggcttggctgagctgggccacagattggcccagaaactgcagggcctggagaactggggccaggaccctggggtctctgccaatgcctcaaaggcctggcaccagaagtcccacttccagaattctagggagtggagtggaaaggaaaagtggtgggatgggcagagagaccggaaggctgagcactggaaacataagaaggaagaatctggccgggaaaggaagaagaactggggaggtcaggaggacagggagccagcaggaaggtggaaggagggcaggccaagggtggaggagtcggggagcaagaaggagggcaagcgacagggcccgaaggaacccccaaggaaaagtggtagcttccactcctctggagaaaagcagaagcaacctcggtggagggaagggactaaggacagccatgaccccctgccatcctgggcagagctgttgaggcccaagtaccgggcaccccagggctgctcaggtgtggacgagtgtgcccggcaggagggcctgactttctttggcacagagctagccccagtgcggcaacaggagctggcctctctgctaagaacatacttggcacggctgccctgggctgggcagctgaccaaggagctacccctctcacctgctttctttggtgaggatggcatcttccgtcatgaccgcctccgcttccgggattttgtggatgccctggaggacagcttggaggaggtggctgtgcaacagacaggtgatgatgatgaagtagatgactttgaggacttcatcttcagccacttctttggagacaaagcactgaagaagaggtcagggaagaaggacaagcactcacagagcccaagagctgcggggcccagggaggggcacagccatagccaccaccaccaccaccggggctgacaccctgccccacagggaatggccttggcctggcccagcccaagatcccagcgttatctaactcctggagggtggactctgtcctggcttgtttggtgtcctcagatatctttcacacagtagagcaaaatcaccagccctgcactgatgtcactttatgtagaaaaaggccttagctggacctgcgttgccgtctatgcaaatgcatgcaaatactccaggccctgggatgtgggcttgtgttttgtcactgtgaagggggagatgggagaggagcctgttttggggtggggtctggggaaggcaatctgattctgaagctaaagagctttcatcctcttgagtgtatgtccccatagtgggccccttgacccacatgctgaccggtgccttgggatttgactagagttgctggctcgaggcccagcacgaggacttaccctggggttttgttaggtttggaagcagctgtccctagggggtgaagtcccccccctttttttttttacccctgcttctcccacggcttcacctccctatgtgaactgtagactcagatcccaataaagtgctgttgcagctatgatgctaggtggtttctaagcacaggggacaccccacaccccctgcctgaatggatgggtccatcccaggcactggtacttgcccccttgttctgtatccccctttgcccttgccttgcccttccaacaaaccctaggcccttgagaagctgatacttctccttttgctcacagctgccttggccccacccctgggagatgtagcaaattgagtgtgggttttggagtctgagcctcaggctcaaatccaggccaagtgatcttgggcaagttaatctctgggaactttgggtttcttatcctcaaaaaaggcgatggaagggctggggaagtgattaaataaaagcaacgcaagaaaaaaaaaaaaaaaaaaa

SEQ ID NO: 2327 - DNA, 1550 bp, Homo sapiens
tgccgccgtcccgcccgccagcgccccagcgaggaagcagcgcgcagcccgcggcccagcgcacccgcagcagcgcccgcagctcgtccgcgccatgttccaggcggccgagcgcccccaggagtgggccatggagggcccccgcgacgggctgaagaaggagcggctactggacgaccgccacgacagcggcctggactccatgaaagacgaggagtacgagcagatggtcaaggagctgcaggagatccgcctcgagccgcaggaggtgccgcgcggctcggagccctggaagcagcagctcaccgaggacggggactcgttcctgcacttggccatcatccatgaagaaaaggcactgaccatggaagtgatccgccaggtgaagggagacctggctttcctcaacttccagaacaacctgcagcagactccactccacttggctgtgatcaccaaccagccagaaattgctgaggcacttctgggagctggctgtgatcctgagctccgagactttcgaggaaatacccccctacaccttgcctgtgagcagggctgcctggccagcgtgggagtcctgactcagtcctgcaccaccccgcacctccactccatcctgaaggctaccaactacaatggccacacgtgtctacacttagcctctatccatggctacctgggcatcgtggagcttttggtgtccttgggtgctgatgtcaatgctcaggagccctgtaatggccggactgcccttcacctcgcagtggacctgcaaaatcctgacctggtgtcactcctgttgaagtgtggggctgatgtcaacagagttacctaccagggctattctccctaccagctcacctggggccgcccaagcacccggatacagcagcagctgggccagctgacactagaaaaccttcagatgctgccagagagtgaggatgaggagagctatgacacagagtcagagttcacggagttcacagaggacgagctgccctatgatgactgtgtgtttggaggccagcgtctgacgttatgagtgcaaaggggctgaaagaacatggacttgtatatttgtacaaaaaaaaagttttatttttctaaaaaaagaaaaaagaagaaaaaatttaaagggtgtacttatatccacactgcacactgcctagcccaaaacgtcttattgtggtaggatcagccctcattttgttgcttttgtgaactttttgtaggggacgagaaagatcattgaaattctgagaaaacttcttttaaacctcacctttgtggggtttttggagaaggttatcaaaaatttcatggaaggaccacattttatatttattgtgcttcgagtgactgaccccagtggtatcctgtgacatgtaacagccaggagtgttaagcgttcagtgatgtggggtgaaaagttactacctgtcaaggtttgtgttaccctcctgtaaatggtgtacataatgtattgttggtaattattttggtacttttatgatgtatatttattaaagagatttttacaaatg

SEQ ID NO: 2328 - DNA, 4826 bp, Homo sapiens
gggtcgaggtcgacggtatcgataagttttttttttttttttttttttttttttcctttcccctccccctccctctccaagccggaggggtcctgaggtgacagcgcctgcaactgaaatttcagcagcgggagaagatggacaagagaaagctcgggcgacggccatcttcatccgaaatcatcacagaaggaaaaaggaaaaagtcatcttctgatttatcggagataagaaagatgttaaatgcaaaaccagaggatgtccatgttcaatcaccactgtccaaattcagaagctcagaacgctggactctccctttgcagtgggaaagaagcctaaggaataaagtcatctctctagaccataaaaataaaaaacatatccgagggtgtcctgttacttccaggtcatcaccagaaaggatacccagagttatattgacgaatgtcctgggaacggagttaggaagaaaatacataaggaccccacctgtaactgagggaagtttgagtgatacagacaacttgcaatcagagcaactttcttcatcatctgatggcagcctagaatcttatcaaaatctaaaccctcacaagagctgttatttatctgaaaggggctcacaacgaagtaagacagtagatgacaattctgcaaagcagactgcgcacaataaagaaaaacgaagaaaggatgatggcatttctcttttaatatctgatactcagcctgaagaccttaacagtggaagtagaggttgtgatcatctcgaacaggaaagcagaaacaaggatgttaaatattctgattcaaaagtggaactcactctgatttccaggaagacaaagagaaggcttagaaataatttacctgattctcaatattgtacttctttggataagtcaacagaacagacaaaaaaacaagaagatgactcaacaatatccactgagtttgaaaggccaagtgaaaactatcatcaggatccaaaactgcctgaagaaattacaactaaacctacaaaaagtgattttactaagctatcctcacttaacagtcaggagttgactttgagtaatgccaccaaaagtgcctctgccggttcaaccactgaaaccgttgagtactctaattccattgatattgtggggatttcttccctggttgagaaggatgagaatgagttgaataccatagaaaagcctattctaagaggacataatgaagggaaccaatcactgatctcagctgaaccaattgttgtttccagtgatgaagaaggacctgttgaacataaaagttcagaaattcttaagttacaatctaagcaagaccgtgagacaactaatgaaaatgagagtacttctgaatcagcattgttagaactaccattgattacatgtgaatctgtacagatgtcatctgaattatgcccatataatcctgtcatggagaacatttccagtattatgcctagtaatgagatggatctacaactggattttatatttacttctgtttatattggtaaaataaaaggagcttctaaaggttgtgttacaatcacaaaaaaatatattaagatcccatttcaagtgtccctgaatgagatttcattgctagtggataccacacatttaaagcggtttgggttatggaaaagtaaggatgataatcacagtaaaaggagtcatgctattcttttcttctgggtctcttcagattatcttcaagagattcagacccaattagaacactctgtattaagccagcaatcaaaatctagtgaattcattttccttgaactacacaatcctgtttcacagagagaagaattgaagctgaaagatattatgacggaaataagtataatcagtggagaattagagctttcttacccgttgtcttgggttcaggcatttcctttgtttcagaacctctcttcaaaagaaagttcttttattcattattactgtgtttcaacttgttctttccctgctggtgttgctgttgctgaagaaatgaagctgaaatcagtatctcagccctcaaacacagatgcggccaagcctacttacaccttcctgcagaagcaaagtagcggttgctactccctttctattacatctaatccagatgaagaatggcgggaagtcaggcacactggacttgttcagaagttgattgtatatcctccaccacctactaaggggggattgggagtaactaatgaagatctggagtgtttagaagaaggagagtttcttaatgatgtaatcattgatttttaccttaagtatcttatattggagaaggcatcagatgaacttgttgaacgaagtcacatttttagtagctttttctataaatgcttgacaagaaaggaaaataatttaacagaagataatccaaatctttcaatggcacagagaagacataaaagagtaagaacatggactcgtcacataaacatttttaataaagattacatctttgtacctgtaaatgagtcgtctcactggtatctcgcagtcatttgttttccatggttagaagaagctgtgtatgaagattttccacaaactgtatcccagcagtcccaggctcagcagtcccaaagtgacaacaaaacaatagataatgatctacgtactacttcgacactgtctttgagtgcagaggattcccaaagtaccgagtcgaatatgtcagtaccaaagaaaatgtgtaaaaggccatgtattcttatactagactccttgaaagctgcttctgtacgaaacacagttcagaatttacgagagtatttagaggtagagtgggaagttaaactaaaaactcatcgtcaattcagcaaaacaaacatggtggatctatgccctaaagttcctaaacaggacaatagcagtgattgtggagtatatttattgcagtatgtggaaagcttcttcaaggatcctattgttaactttgaacttccaattcatttggagaagtggtttcctcgtcatgtaataaagaccaaacgggaagatattcgagagctcatcttgaaacttcatttacagcaacagaagggcagcagtagctagttaatctgtacaaacatgacacagatgttctctaagattactggaaagccccttaccagcatttgtgttagccagctcacagagaagaaaataacttgcagtagttttataataagtcattggaacattatttaaaatatgtaggacacattattagaattgttgggatctcatagatggaatgggaatgggggtgatatagataaacttactagatataaattaaaattttataaatatttcatatttttctgagtaaatatgattggattatgcaacagcatatgtaatatgggaatgttttgtagataataaaacttacatgatctgtacttccacgtgactgggtgctgaggggagttaaagcctccctggtgccagccccagtgcttgtcaaatttgctgacaggtcacatcatattgtaattctattctttgcagctcaagcatgcagtatgaatactgtgtattttttaaaaaaataatttagtatcaaggcttcagaaaatgccatttacggcatcccttctgtatgtaacaaaaagacattcataatgttaggaagatgataaaaattcgctcttttaaagtgcagcttattattctcaattgctaaatacgattactctgctttttttttttcatttcttttgatgtcatatgtgagtatcttataatttagttcatttgttcagggtaaaatttgaaacaaaaaattttacctgtgcaaaatagttttttaaaaattatacatgtagctcaacttgaggtactgctatataaatattcactcacattatcacggaatttatgtatagtttctctaatatagaagataaaattggtgtcctcataactttaacaaagaaaaccctcagtcctatttattaatgggtagaattaaatatataattttatagctcagtttacccagtattcatctgcaaagccagattgctctcattgcttttatatttttaaattgtagcttttagagacctatgatcctcatggaacttaattttttattaaatattcaggtaacagttctgaattcatgtgataatggtggcattatatatgattaaacacttcagaactttctaatgttatcaggagtattttgagggagatatgattatattgtattttctcagataagaaaaatgttttttaacaatattattttaatctgttttaagcatctcttagatttacattataactacataaagcagtgaagcaaaggcaaattaagataaagctagaaagtctgaacattttatttcaaaatcatacgaatcggggtcagttaagcctcagtattcttagcttttgttgattttggcactatctttatattattaaatatatttgttgtttggatatttcatataaagatggctataattacatatttcattcccaatttgtgtgtgttggggggtacttttaaaggtgactattgttttgtacatctaattttgggaaaccaagtctataagacatcttgtgatttcttaatgtttttgtttgtatgtttttcaaagatatcactgtcctttatcatgttttgaagattgtttaaaattcattttcctaaattaatgtgcaagtaatgttttgaggatatcggtgttttatattaaacatatttccaattcaaaaaaaaaaaaaaaaaaacttatcgataccgtcgacctcgatgatgatgatgatgatgatgatgtcgac

SEQ ID NO: 2329 - DNA, 1305 bp, Homo sapiens
atggggcggggcctctgggaggcgtggcctccggccggctcctctgctgttgccaagggaaactgccgcgaggaggcggaaggagcagaggaccggcagccggcgtcgaggcggggcgcgggaacgacggcggccatggcggcctcggggcccgggtgtcgcagctggtgcttgtgtcccgaggtgccatccgccaccttcttcactgcgctgctctcgctgctggtttccgggcctcgcctgttcctgctgcagcagcccctggcgccctcgggcctcacgctgaagtccgaggcccttcgcaactggcaagtttacaggctggtaacctacatctttgtctacgagaatcccatctccctgctctgcggcgctatcatcatctggcgctttgctggcaatttcgagagaaccgtgggcaccgtccgccactgcttcttcaccgtgatcttcgccatcttctccgctatcatcttcctgtcattcgaggctgtgtcatcactgtcaaagctgggggaagtggaggatgccagaggtttcaccccagtggcctttgccatgctgggagtcaccaccgtccgttctcggatgaggcgggccctggtgtttggcatggttgtgccctcagtcctggttccgtggctcctgctgggtgcctcgtggctcattccccagacctctttcctcagtaatgtctgcgggctgtccatcgggctggcctatgctcacctactgctattccatcgacctctcagagcgagtggcgctgaagctcgatcagaccttccccttcagcctgatgaggaggatatccgtgttcaagtacgtctcagggtcttcagccgagaggagggcagcccagagccggaaactgaacccggtgcctggctcctaccccacacagagctgccaccctcacctgtccccaagccaccctgtgtcccagacgcagcacgccagtggtcagaagctggcctcctggcctcctgcacccccgggcacatgcccaccttgcctccgtaccagcctgcctccggcctgtgctatgtgcagaaccactttggtccaaaccccacctcctccagtgtctacccagcttctgcgggcacctccctgggcatccagccccccacgcctgtgaacagccctggcacggtgtattctggggccttgggacaccaggggctgcaggctccaaggagtcctccagggtccccatgccctgagagaatttctagggaagtcatctcacttggccttctgaaggtcctccctaagagtctcctgacaaaagttacttattga

SEQ ID NO: 2330 - DNA, 797 bp, Homo sapiens
agggctcagaggcgggctcgggcaagcactttaaccttttaagcccaaccagatgagttgcctgcagttttggaggccttcagagcatttcactagacctctgtctgtgtcggtccagtgtctttagccaagctttgattaaagatgacttccttgtttgctcaagaaattcgcctttctaaaagacatgaagaaatagtatcacaaagattaatgttacttcaacaaatggagaataaattgggtgatcaacacacagaaaaggcatctcaactccaaactgttgagactgcttttaaaaggaaccttagtcttttaaaggatatagaagcagcagaaaagtcactacagaccaggattcacccacttccacggcctgaggtggtttctcttgagactcgttactgggcatcagtagaagaatatattcccaaatgggaacagtttcttttaggaagagcaccatatccttttgctgttgaaaatcaaaatgaagcagaaaataccattcaaaatgaggcacagcgataacttcttcacatgctatttcaaaaagcctgtttaataaagctgaatgttaaggtgtatgtaggttattgcaggaactttaggaattaaatatgttcatattcttcgattatctcctaagtgacagtgaagatatgagaatttactggcaagtcacatgttatcacctactactatttcaaggtcatgaatttgctttctaccaaacccatagatgtgttaaacacgaatattaaaaggtggactctttattaattaaaaaaaaaaaa

SEQ ID NO: 2331 - DNA, 3624 bp, Homo sapiens
tcggccatgactgcggagctgcagcaggacgacgcggccggcgcggcagacggccacggctcgagctgccaaatgctgttaaatcaactgagagaaatcacaggcattcaggacccttcctttctccatgaagctctgaaggccagtaatggtgacattactcaggcagtcagccttctcactgatgagagagttaaggagcccagtcaagacactgttgctacagaaccatctgaagtagaggggagtgctgccaacaaggaagtattagcaaaagttatagaccttactcatgataacaaagatgatcttcaggctgccattgctttgagtctactggagtctcccaaaattcaagctgatggaagagatcttaacaggatgcatgaagcaacctctgcagaaactaaacgctcaaagagaaaacgctgtgaagtctggggagaaaaccccaatcccaatgactggaggagagttgatggttggccagttgggctgaaaaatgttggcaatacatgttggtttagtgctgttattcagtctctctttcaattgcctgaatttcgaagacttgttctcagttatagtctgccacaaaatgtacttgaaaattgtcgaagtcatacagaaaagagaaatatcatgtttatgcaagagcttcagtatttgtttgctctaatgatgggatcaaatagaaaatttgtagacccgtctgcagccctggatctattaaagggagcattccgatcatctgaggaacagcagcaagatgtgagtgaattcacacacaagctcctggattggctagaggacgcattccagctagctgttaatgttaacagtcccaggaacaaatctgaaaatccaatggtgcagctgttctatggtactttcctgactgaaggggttcgtgaaggaaaacccttttgtaacaatgagaccttcggccagtatcctcttcaggtaaacggttatcgcaacttagacgagtgtttggaaggggccatggtggagggtgatgttgagcttcttccctccgatcactcggtgaagtatggacaagagcgttggtttacaaagctacctccagtgttgacctttgaactctcaagatttgagtttaatcagtcccttgggcagccagagaaaattcacaataagctggaatttcctcagattatttatatggacaggtacatgtacaggagcaaggagcttattcgaaataagagagagtgtattcgaaagttgaaggaggaaataaaaattctgcagcaaaaattggaaaggtatgtgaaatatggctcaggcccagctcggttcccgctcccggacatgctgaaatatgttattgaatttgctagtacaaaacctgcctcagaaagctgtccacctgaaagtgacacacatatgacattaccactttcttcagtgcactgctcggtttctgaccagacatccaaggaaagtacaagtacagaaagctcttctcaggatgttgaaagtaccttttcttctcctgaagattctttacccaagtctaaaccactgacatcttctcggtcttccatggaaatgccttcacagccagctccacgaacagtcacagatgaggagataaattttgttaagacctgtcttcagagatggaggagtgagattgaacaagatatacaagatttaaagacttgtattgcaagtactactcagactattgaacagatgtactgcgatcctctccttcgtcaggtgccttatcgcttgcatgcagttcttgttcatgaaggacaagcaaatgctggacactattgggcctatatctataatcaaccccgacagagctggctcaagtacaatgacatctctgttactgaatcttcctgggaagaagttgaaagagattcctatggaggcctgagaaatgttagtgcttactgtctgatgtacattaatgacaaactaccctacttcaatgcagaggcagccccaactgaatcagatcaaatgtcagaagtggaagccctatctgtggaactcaagcattacattcaggaggataactggcggtttgagcaggaagtagaggagtgggaagaagagcagtcttgcaaaatccctcaaatggagtcctccaccaactcctcatcacaggactactctacatcacaagagccttcagtagcctcttctcatggggttcgctgcttgtcatctgagcatgctgtgattgtaaaggagcaaactgcccaggctattgcaaacacagcccgtgcctatgagaagagcggtgtagaagcggcactgagtgaggtgatgctgagccctgccatgcaaggggtcatcctggccatagctaaagcccgtcagacctttgaccgagatgggtctgaagcagggctgattaaggcattccatgaagaatactccaggctctatcagcttgccaaagagacccccacctctcacagtgatcctcgacttcagcatgtccttgtctactttttccaaaatgaagcacccaaaagggtagtagaacgaacccttctggaacagtttgcagataaaaatcttagctatgatgaaagatcaatcagcattatgaaggtggctcaagcgaaactgaaggaaattggtccagatgacatgaatatggaagagtacaagaagtggcatgaagattatagtttgttccgaaaagtgtctgtgtatctcctaacaggcctagaactctatcaaaaaggaaagtaccaagaggcactttcctacctggtatatgcctaccagagcaatgctgccctgctgatgaaggggccccgccggggggtcaaagaatccgtgattgctttataccgaagaaaatgccttctggagctgaatgccaaagcagcttctctttttgaaacaaatgatgatcactccgtaactgagggcattaatgtgatgaatgaactgatcatcccctgcattcaccttatcattaataatgacatttccaaggatgatctggatgccattgaggtcatgagaaaccattggtgctcttaccttgggcaagatattgcagaaaatctgcagctgtgcctaggggagtttctacccagacttctagatccttctgcagaaatcatcgtcttgaaagagcctccaactattcgacccaattctccctatgacctatgtagccgatttgcagctgtcatggagtcaattcagggagtttcaactgtgacagtgaaataagctcccacatgttcaaggcccattctggttcctggctgcctgcctcttgcacagaagttcgttgtcatagtgctcaccttgggaaaaggattaggtgggcacataagattccgatcagaccccaaccatgctgcatgtgtaaagaaggattgaaaataaaattgcactttttaggtacaaaatcataaaagctgtttcactagaaaaggcagaaagcagtgtattaaggtgttgaattacgccagaagacctgaaatgccttgtacctacaacaatgcttaggcttttctaagcctcttgccacttttaaaattatccttcaggcataaatatttttgacagcagaatagaagaatgattcatgagaacctgaaccagatgaac

SEQ ID NO: 2332 - DNA, 3284 bp, Homo sapiens
gtgcttttcttctttaggttacataaagaaaggatgatatctctaaaggtatgtggattcatccaaatttggagccagaagactgggatgactaagctgaaagaagctctcattgaaacagtgcaaagacaaaaggaaattaaactggtggtcactttcaaatctggaaaatttataagaatttttcagctgagcaacaacattagaagtgtggtccttagacattgtaaaaaaagacaaagtcacctgcgtttaactttgaaaaacaacgtgttcttgtttattgacaaattatcctacagagatgctaaacagttgaatatgttcctggacataatccaccaaaacaaatctcagcaacccatgaaatctgatgatgattggagtgtgtttgaaagcaggaatatgctgaaggaaattgacaaaacttcattttacagcatttgtaacaagccaagttatcagaagatgcctttgtttatgtcaaaatcaccaacacatgtgaaaaaggggatattagaaaatcaaggtgggaaggggcaaaacacactatcatctgatgtacagacaaatgaggacattctgaaggaagataaccctgtaccaaacaagaaatataagacagattccttgaaatatatacaaagcaataggaagaacccatcaagtttagaggatttagaaaaagatagagatttgaaactcgggccttcattcaataccaactgtaatggaaatcctaacctagatgagactgttcttgcaacccagactctcaatgccaaaaatggtttgacatctccattggaaccagagcacagccagggtgacccaagatgcaacaaagcccaggtgcctcttgactctcattcacagcaactgcagcaggggttccccaatttgggaaacacctgttacatgaatgcagttttacaatcgctatttgcaattccatcttttgctgatgacttactcactcaaggtgtcccatgggaatatattccctttgaggctcttattatgaccttgacccagctgcttgctttgaaagatttctgtagtacaaagatcaagagagaattacttgggaatgttaaaaaagtcatttcagcagttgcagaaatattttctggcaacatgcagaatgatgctcatgagtttttaggtcagtgtttagaccagctgaaagaagacatggaaaaattaaatgccactttgaatactgggaaagaatgtggggatgaaaattcatctccacaaatgcatgttggtagtgctgccaccaaagtgtttgtttgccctgttgttgctaattttgagtttgaattgcagctctcccttatttgtaaagcttgtggtcatgctgttctcaaggtagaacctaataattatctctccatcaacctgcaccaagaaacaaaaccacttcctttgtccattcagaattctttagatcttttctttaaagaagaagagcttgaatataactgtcagatgtgtaagcagaagagttgtgttgcaaggcatacatttagtaggctctccagggtccttatcattcatctgaaacgctatagcttcaacaatgcttggttgctggtgaagaataacgagcaagtttatattcccaaatctttaagtttatcttcttattgcaatgaaagcaccaaaccacctcttcccttgagcagtagtgcacctgttgggaaatgtgaagtcctggaagtctctcaggagatgatttctgagatcaacagcccattgacaccatcaatgaagctgacctcagaatccagtgattccctggttctacccgttgaaccagacaagaatgccgacctacaaagattccagagagactgtggagatgcaagccaagagcagcatcagagagacctggaaaatggctctgcactagagtcagaattggtccactttagagatagggcaatcggtgaaaaggagcttccagtggctgactcactgatggaccagggagacatttctcttcctgtgatgtatgaagatggagggaagctgatcagcagcccagacacaaggcttgtcgaggttcatcttcaagaggtgcctcaacatccagaacttcagaagtatgagaaaaccaatacattcgtagagttcaattttgacagtgtcactgagtccaccaatggcttttatgactgtaaagaaaacaggattccagaaggatctcaaggaatggctgaacagctccagcagtgtattgaggagagcatcatagatgaatttcttcagcaggcaccacctccaggtgttaggaagctggatgcccaggaacatacagaagagaccctcaatcagtctacagaattaagacttcaaaaggctgacctgaatcaccttggggcactgggttctgacaacccaggaaacaaaaacattttagatgcagagaacacaagaggtgaagccaaggaactaacaagaaacgtgaagatgggggatcctctccaggcctacagactcatcagtgttgtcagccatatcgggagctccccaaattcaggccattacatcagcgatgtgtatgactttcagaagcaggcctggttcacatacaacgatctatgtgtatcagaaatctcagagaccaaaatgcaggaggcgaggcttcactctgggtatatcttcttttacatgcacaatgggatttttgaggagctgttaagaaaagcagagaactctcggctacctagcacacaggcaggggtgatccctcagggggaatacgaaggtgactctttgtacagacctgcttgacagactcactcggcctcacttcatccttgcaaagagaatcctgtacttcatccttgcaaagagaatcctgtacttcactcagaatgaaggaacaagtatctcaggatgaaatctcaatgaaaaacacttattttgggggaatatctattttaactgcttcagacacctagatcccagaactcaggcgcatatgcatattttccctgcaagattagaatggtgctcttcacgttttgacggtggttttcaaaatgttgttcttcaaccagcaacagcaacagctagggactgattagaaatgcaaattcttgggtcactctctagaccaactgatgcagaaacaggaggtgtgagccagcaatcagatggagattctagtgctcatgaaagtttgaagaacactggtaatgtgtggagtatcttggtgtattttgctactgttgatatggattgcttatgttatataaacgattttcattaaa

SEQ ID NO: 2333 - DNA, 1786 bp, Homo sapiens
gctggaacaaacatggccgctctggcgcccgtcggctcccccgcctcccgcggtcctaggctggccgcgggcctccggctgctcccaatgctgggtttgctgcagttgctggccgagcctggcctgggccgcgtccatcacctggcactcaaggatgatgtgaggcataaagttcatctgaacacctttggcttcttcaaggatgggtacatggtggtgaatgtcagtagcctctcactgaatgagcctgaagacaaggatgtgactattggatttagcctagaccgtacaaagaatgatggcttttcttcttacctggatgaagatgtgaattactgtattttaaagaaacagtctgtctctgtcacccttttaatcctagacatctccagaagtgaggtaagagtaaagtctccaccagaagctggtacccagttaccaaagatcatcttcagcagggatgagaaagtccttggtcagagccaggagcctaatgttaaccctgcttcagcaggcaaccagacccagaagacacaagatggtggaaagtctaaaagaagtacagtggattcaaaggccatgggagagaaatccttttctgttcataataatggtggggcagtgtcatttcagtttttctttaacatcagcactgatgaccaagaaggcctttacagtctttattttcataaatgccttggaaaagaattgccaagtgacaagtttacattcagccttgatattgagatcacagagaaggatcctgacagctacctctcagcaggagaaattcctctccccaaattatacatctcaatggcctttttcttctttctttctgggaccatctggattcatatccttcgaaaacgacggaatgatgtatttaaaatccactggctgggctttcattaagcacatcctttctgataaagacaaaaagatcttcatgattgtcattccactccaggtcctggcaaatgtagcctacatcatcatagagtccaccgaggagggcacgactgaatatggcttgtggaaggactctctatttctggtcgacctgttgtgttgtggtgccatcctcttcccagtggtgtggtcaatcagacatttacaagaagcatcagcagccaggggtagtttggagaaggaggtgttgagtcagttgtataaggaggaggttgggggtgactgctgcttattaagatgattcatttcatttccactcgtggttgtgattttcaccttctcaaaactgagtcagcaagagaaaatcttgtcttagaagggccagataacacttcgctgtgagaacaggagggataatggattggagatggctatgtgtaaagcagccctgcctgctgatttaacacactttcaaaatagatgtgtcagtattcatttaaagcaagactctgatgacagaaggaaccttgaaaactacctgatattgaaatggttgtgccctttatagcccttttgcatctccttgactttccagtcatgcctcctaaatcagaagaaaagctgcaaagaaaatgttttgtgtggttctgggcttatttgaataatgttcatgaccacaggctgccatagcacaagtgagaatttcagaccacaagggtttaaggagcagtgctctcttctctcaaagctcagaacggtctctggatccatggtatcgtacacccagtgtggatattaacattctttaatgcaggttatgaataataaataaaacaggtttttgttaaaaaaaaaaaaaaaaaaaaaaaaaaaa

SEQ ID NO: 2334 - DNA, 1077 bp, Homo sapiens
actgctcttccagaggcaagaccaaccaagatgagtgacctgggagctgtcatttccctcctgctctggggacgacagctttttgcactgtactcaggcaatgatgtcacggatatttcagatgaccgcttcccgaagccccctgagattgcaaatggctatgtggagcacttgtttcgctaccagtgtaagaactactacagactgcgcacagaaggagatggagtatacaccttaaatgataagaagcagtggataaataaggctgttggagataaacttcctgaatgtgaagcagtatgtgggaagcccaagaatccggcaaacccagtgcagcggatcctgggtggacacctggatgccaaaggcagctttccctggcaggctaagatggtttcccaccataatctcaccacaggtgccacgctgatcaatgaacaatggctgctgaccacggctaaaaatctcttcctgaaccattcagaaaatgcaacagcgaaagacattgcccctactttaacactctatgtggggaaaaagcagcttgtagagattgagaaggtggttctacaccctaactaccaccaggtagatattgggatcatcaaactcaaacagaaggtgcttgttaatgagagagtgatgcccatctgcctaccttcaaagaattatgcagaagtagggcgtgtgggttacgtgtctggctggggacaaagtgacaactttaaacttactgaccatctgaagtatgtcatgctgcctgtggctgaccaatacgattgcataacgcattatgaaggcagcacatgccccaaatggaaggcaccgaagagccctgtaggggtgcagcccatactgaacgaacacaccttctgtgtcggcatgtctaagtaccaggaagacacctgctatggcgatgcgggcagtgcctttgccgttcacgacctggaggaggacacctggtacgcggctgggatcctaagctttgataagagctgtgctgtggctgagtatggtgtgtatgtgaaggtgacttccatccaggactgggttcagaagaccatagctgagaactaa

SEQ ID NO: 2335 - DNA, 2219 bp, Homo sapiens
agccagaaggatggggtggctcccactcctgctgcttctgactcaatgcttaggggtccctgggcagcgctcgccattgaatgacttccaagtgctccggggcacagagctacagcacctgctacatgcggtggtgcccgggccttggcaggaggatgtggcagatgctgaagagtgtgctggtcgctgtgggcccttaatggactgccgggccttccactacaacgtgagcagccatggttgccaactgctgccatggactcaacactcgccccacacgaggctgcggcgttctgggcgctgtgacctcttccagaagaaagactacgtacggacctgcatcatgaacaatggggttgggtaccggggcaccatggccacgaccgtgggtggcctgccctgccaggcttggagccacaagttcccgaatgatcacaagtacacgcccactctccggaatggcctggaagagaacttctgccgtaaccctgatggcgaccccggaggtccttggtgctacacaacagaccctgctgtgcgcttccagagctgcggcatcaaatcctgccgggaggccgcgtgtgtctggtgcaatggcgaggaataccgcggcgcggtagaccgcacggagtcagggcgcgagtgccagcgctgggatcttcagcacccgcaccagcaccccttcgagccgggcaagttcctcgaccaaggtctggacgacaactattgccggaatcctgacggctccgagcggccatggtgctacactacggatccgcagatcgagcgagagttctgtgacctcccccgctgcgggtccgaggcacagccccgccaagaggccacaactgtcagctgcttccgcgggaagggtgagggctaccggggcacagccaataccaccactgcgggcgtaccttgccagcgttgggacgcgcaaatcccgcatcagcaccgatttacgccagaaaaatacgcgtgcaaagaccttcgggagaacttctgccggaaccccgacggctcagaggcgccctggtgcttcacactgcggcccggcatgcgcgcggccttttgctaccagatccggcgttgtacagacgacgtgcggccccaggactgctaccacggcgcaggggagcagtaccgcggcacggtcagcaagacccgcaagggtgtccagtgccagcgctggtccgctgagacgccgcacaagccgcagttcacgtttacctccgaaccgcatgcacaactggaggagaacttctgccggaacccagatggggatagccatgggccctggtgctacacgatggacccaaggaccccattcgactactgtgccctgcgacgctgcgctgatgaccagccgccatcaatcctggaccccccagaccaggtgcagtttgagaagtgtggcaagagggtggatcggctggatcagcggcgttccaagctgcgcgtggttgggggccatccgggcaactcaccctggacagtcagcttgcggaatcggcagggccagcatttctgcggggggtctctagtgaaggagcagtggatactgactgcccggcagtgcttctcctcctgccatatgcctctcacgggctatgaggtatggttgggcaccctgttccagaacccacagcatggagagccaagcctacagcgggtcccagtagccaagatggtgtgtgggccctcaggctcccagcttgtcctgctcaagctggagagatctgtgaccctgaaccagcgtgtggccctgatctgcctgccccctgaatggtatgtggtgcctccagggaccaagtgtgagattgcaggctggggtgagaccaaaggtacgggtaatgacacagtcctaaatgtggcctttctgaatgttatctccaaccaggagtgtaacatcaagcaccgaggacgtgtgcgggagagtgagatgtgcactgagggactgttggcccctgtgggggcctgtgagggtgactacgggggcccacttgcctgctttacccacaactgctgggtcctggaaggaattataatccccaaccgagtatgcgcaaggtcccgctggccagctgtcttcacgcgtgtctctgtgtttgtggactggattcacaaggtcatgagactgggttaggcccagccttgatgccatatgccttggggaggacaaaacttcttgtcagacataaagccatgtttcctcttta

SEQ ID NO: 2336 - DNA, 2329 bp, Homo sapiens
gcaggggccgagtctctcggaagccctcgtgaggactcggacctattcggactgattcggcttcccacttcggggaacttcgaccctcctcggttcaggactcggtctcggctcggcggcttcgtgcaggttcggctcctactcgggcagcctctgttcgcctcggctccgctccgcgggcggactcggctcggctctgctcggcggctggctgccttttcggtccctattcgggcggcggcttcgggcggcctcggcccagctcgggcgtcctcttcgggccccgcttcgggctccgcgaccggcgcttcgggcggtcccggacggcgccttcgggaaggctcggcggagtccggatggaggactcggactcggcggcaaagcagctgggcctggctgacgcggccgcggcaggaggcgaggcggaggagccggtgctgagcagggacgaggactcggaggaggacgcagactcggaggcggagcgggagacgccgcgggtcacggcagtggcggtgatggcggcggagcccgggcacatggacatgggcgccgaggccctgcccggccccgacgaggccgccgctgccgcagccttcgcagaggtgaccacagtgacagtggccaacgtgggggctgctgcagacaatgtcttcaccacgtctgtggcgaacgcggcatccatctcaggacatgttctgtctggtaggacggcccttcagatcggggacagcctgaacaccgaaaaagcgacactgattgtcgtccacacagatgggagcatcgtggagaccaccgggctgaaaggcccggcagctcccctcaccccaggtcctcagtctcctccaacccctctggctcccggccaagaaaaaggtggaactaaatacaactgggacccttctgtgtacgacagtgagctgcccgtacggtgccggaacatcagcggcactctgtacaagaacaggctcggctcaggcggccggggacggtgcatcaagcagggggagaactggtacagtcccaccgagtttgaggccatggcaggaagagccagcagtaaggactggaaaagaagcattcgctacgcgggccgacccttgcagtgcctcatccaggatgggatcttaaaccctcacgctgcctcttgcacctgtgctgcctgctgcgacgacatgaccttaagtggcccagtcaggctttttgtgccttacaaaaggcgcaagaaggagaatgaactgcccacaactcccgtgaagaaggactcccccaagaacatcacattgcttccagccaccgcggctaccaccttcaccgtgaccccctcgggacagatcacgacctcgggggcactgacctttgaccgagcgtccacggtagaggccactgctgtcatatcagagagtccggcccagggcgacgtcttcgcaggggccacagtccaagaggccagcgtgcagcccccatgcagggccagccaccctgagcctcactaccccggctatcaggacagctgccagatcgcaccgtttccagaagctgcgttgccaacgtcacatcccaaaatagtgttgacatccctgcctgcgctggcggtcccacccccgactcccaccaaagcggcacctcccgcgttggtcaatgggctggagctgtcagagccgcggagctggctgtacctagaagagatggtcaactccttgctcaacacagcgcagcagctgaagacgctgtttgagcaagccaagcatgccagcacctaccgagaagctgccacaaaccaggccaagatccacgctgacgcagagcggaaggagcagtcctgcgttaactgcggccgggaggctatgagcgagtgcaccggctgccacaaggtcaactactgctccaccttctgccaacgcaaggactggaaggatcaccagcacatatgcggccagtcagcagctgtcaccgtccaggcagacgaagtccacgtggctgaaagcgtgatggagaaggtgaccgtgtgaggctccatcggccgccctgggagctggggcccctcgcactcctgtgaggcttttgcaggtcgaaggcccccctgaggactctggggggacgttgagaagaggggtgtgggaaggtaaagaaacttgctggacaagtcattaacacactttaagcgaatggtgccctgggaagcgcactccccctgcccgggccccctgcccgctcgcggacagattttttatccctgggatcatgagcgtccggtctggcccacagggcctgtgctgcgacgcacatacatacgtgttgtgtctgtcaataaagtgtaaataaggtc

SEQ ID NO: 2337 - DNA, 704 bp, Homo sapiens
attactgcaggaaaaggtcccggagagctgagcagtcaagatgtgtgacttcaccgaagaccagaccgcagagttcaaggaggccttccagctgtttgaccgaacaggtgatggcaagatcctgtacagccagtgtggggatgtgatgagggccctgggccagaaccctaccaacgccgaggtgctcaaggtcctggggaaccccaagagtgatgagatgaatgtgaaggtgctggactttgagcactttctgcccatgctgcagacagtggccaagaacaaggaccagggcacctatgaggattatgtcgaaggacttcgggtgtttgacaaggaaggaaatggcaccgtcatgggtgctgaaatccggcatgttcttgtcacactgggtgagaagatgacagaggaagaagtagagatgctggtggcagggcatgaggacagcaatggttgtatcaactatgaagcgtttgtgaggcatatcctgtcggggtgacgggcccatggggcggagctcgtccgcatggtgctgaatggctgaggaccttcccagtctccccagagtccgtgcctttccctgtgtgaattttgtatctagcctaaagtttccctaggctttcttgtctcagcaactttcccatcttgtctctcttggatgatgtttgccgtcagcattcaccaaataaacttgctctctgggcctc

SEQ ID NO: 2338 - DNA, 1269 bp, Homo sapiens
ggcacgagctgagaatatctaacatgttgttactaatcaatgtcattctgaccttgtgggtttcctgtgctaatggacaagtgaaaccttgtgattttccagacattaaacatggaggtctatttcatgagaatatgcgtagaccatactttccagtagctgtaggaaaatattactcctattactgtgatgaacattttgagactccgtcaggaagttactgggattacattcattgcacacaaaatgggtggtcaccagcagtaccatgtctcagaaaatgttattttccttatttggaaaatggatataatcaaaattatggaagaaagtttgtacagggtaactctacagaagttgcctgccatcctggctacggtcttccaaaagtccgtcagaccacagttacatgtacggagaatggctggtctcctactcccagatgcatccgagacagaacatgctcaaaatcagatatagaaattgaaaatggattcatttctgaatcttcctctatttatattttaaataaagaaatacaatataaatgtaaaccaggatatgcaacagcagatggaaattcttcaggatcaattacatgtttgcgaaatggatggtcagcacaaccaatttgcattaattcttcagaaaagtgtggacctcctccacctattagcaatggtgataccacctcctttctactaaaagtgtatgtgccacagtcaagagtcgagtaccaatgccagtcctactatgaacttcagggttctaattatgtaacatgtagtaatggagagtggtcggcaccacctagatgcatacatccatgtataataactgaagaaaacatgaataaaaataacataaagttaaaaggaagaagtgacagaaaatattatgcaaaaacaggggataccattgaatttatgtgtaaattgggatataatgcaaatacatcaattctatcatttcaagcagtgtgtcgggaagggatagtggaataccccagatgcgaataaggcagcattgttaccctaaatgtatgtccaacttccacttttccacttctcactcttatggtctcaaagcttgcaaagatagcttctgatattgttgtaatttctactttatttcaaagaaaattaatataatagtttcaatttgcaacttaatatattctcaaaaatatattaaaacaaactaaattattgcttatgcttgtactaaaataataaaaactactcttataaaaaaaaaaaaaaaaaaaaa

SEQ ID NO: 2339 - DNA, 425 bp, Homo sapiens
gcggtttctttctttccgcgccgatagcgctcacgcaagcatggttaacgtccctaaaacccgccggactttctgtaagaagtgtggcaagcaccaaccccataaagtgacacagtacaagaagggcaaggattctctgtacgcccagggaaagcggcgttatgacaggaagcagagtggctatggtgggcaaactaagccgattttccggaaaaaggctaaaactacaaagaagattgtgctaaggcttgagtgcgttgagcccaactgcagatctaagagaatgctggctattaaaagatgcaagcattttgaactgggaggagataagaagagaaagggccaagtgatccagttctaagtgtcatcttttattatgaagacaataaaatcttgagtttatgttcaaaaaaaaaaaaaaaaaa

SEQ ID NO: 2340 - DNA, 808 bp, Homo sapiens
tgctcccttgggctctagagaggaggcccctcttagccctcagcccctccttcctctctatcttaaagtaatttgatcctcaggaatttgttccgccctcatctggcccggccaaatcccgatttgacaaatgccaggaaaaggaaactgttgagaaaccgaaactactggggaaagggagggctcactgagtaaccatcccagtaacccgaccgccgctggtcttcgctggacaccatgagtcacactgtccaaaccttcttctctcctgtcaacagtggccagccccccaactatgagatgctcaaggaggagcacgaggtggctgtgctgggggggccccacaaccctgctcccccgacgtccaccgtgatccacatccgcagcgagacctccgtgcccgaccatgtcgtctggtccctgttcaacaccctcttcatgaacccctgctgcctgggcttcatagcattcgcctactccgtgaagtctagggacaggaagatggttggcgacgtgaccggggcccaggcctatgcctccaccgccaagtgcctgaacatctgggccctgattctgggcatcctcatgaccattctgctcatcgtcatcccagtgctgatcttccaggcctatggatagatcaggaggcatcactgaggccaggagctctgcccatgacctgtatcccacgtactccaacttccattcctcgccctgcccccggagccgagtcctgtatcagccctttatcctcacacgcttttctacaatggcattcaataaagtgcacgtgtttctggtgctgctg

SEQ ID NO: 2341 - DNA, 5940 bp, Homo sapiens
cttgccggcttccttgcaaagcccggtgcaagggcctctttcaaaatgaacccactggtgtgcctagcagtcggtagaagaagcgggagggcgtccggtctgcacgcccgccgcgaggttacaatgctgaacgcatgagatggaagataccaacgggaggccgaggggatccacggcgcccgcgcgggctccggcttcctcctgctctcggcgccgctgggcgaccgcccatgacccgctcttgcgggctctgtccggttgacaggcgaccctgtggcccggggaagcgcgggagggcgccggcggaaagttgaagagcgtttttctcgccgccgcgtgcattaggagctcgacgagtccgccctgggcttcctggtggggctgggcgggcgggggaggggccgcgcagcagcagcggaagccagacctcggcgataagaggctgcacagcgacatgcaacagtcttttcactgcagctgaatgagttgtggcgcccacaatgctcccatgacaaggagctgacaagttccattttccgtcgcgggcatcttggaatcatgactcccacaatgccttgggcacttggtcgacagtggggccgcctctgaaaaaaaaaatgtgagaggttggtactaagaagtgcctttcctgacgtctctgctgcttggaaccgcttctagagcagtctctgcttttgccttgcttgctgccagctagactgtgacgacagcacatccaccctccacctctagcccagacacccccatttctacttataatcaagagaaaagctctaagtatctggcattgccctaggctgctttagtgttaaaagaaaagtttgctgaaaaagtaagatatcttctgccaggaaatcaaggaggaaaaaaaaaatcattttctcgattttgctctaaactgctgcatctgtctatgccaaactaatcaataccgattgcaccaccaaactccattgcaaattcagctgtgaggagattccctttcagacaactttgctgaaagcagcttggaaattcggtgtcgaagggtctgccacgttttcatgcttgcattttgggctccaaattggcactgggaaggggttactgagagcacaaggctgataccaggccctacttttaaacgttcatctacttacaatcctagtatttctctaaaaaccaaaacctctttgaattaacagtttcatgctgtgaatttctagtgggagatcttttccttgatattgacgacacaattttccatgtacttttaaagcagggagtggggaaaagtattttgaggggacattttcatcatcagttcagcttttttttttggttgttgctcttttttgggggggttgggtttgttggtttcactgaaacatttaactacctgtaaaatctaaacatggctgttagtgtcacaccaattcgggacacaaaatggctaacactggaagtatgtagagagttccagagggggacttgctcacggccagacacggaatgtaaatttgcacatccttcgaaaagctgccaagttgaaaatggacgagtaatcgcctgctttgattcattgaaaggccgttgctccagggagaactgcaaatatcttcatccacccccacatttaaaaacgcagttggagataaatggacgcaataacttgattcagcagaagaacatggccatgttggcccagcaaatgcaactagccaatgccatgatgcctggtgccccattacaacccgtgccaatgttttcagttgcaccaagcttagccaccaatgcatcagcagccgcctttaatccctatctgggacctgtttctccaagcctggtcccggcagagatcttgccgactgcaccaatgttggttacagggaatccgggtgtccctgtacctgcagctgctgcagctgctgcacagaaattaatgcgaacagacagacttgaggtatgtcgagagtaccaacgtggcaattgcaaccgaggagaaaatgattgtcggtttgctcatcctgctgacagcacaatgattgacaccaatgacaacacagtcactgtgtgtatggattacatcaaagggagatgctctcgggaaaagtgcaaatactttcatccccctgcacatttgcaagccaagatcaaggctgcccaataccaggtcaaccaggctgcagctgcacaggctgcagccaccgcagctgccatgggaattcctcaagctgtacttcccccattaccaaagaggcctgctcttgaaaaaaccaacggtgccaccgcagtctttaacactggtattttccaataccaacaggctctagccaacatgcagttacaacagcatacagcatttctcccaccagttcccatggtgcacggtgctacgccagccactgtgtccgcagcaacaacatctgccacaagtgttcccttcgctgcaacagccacagccaaccagatacccataatatctgccgaacatctgactagccacaagtatgttacccagatgtagaattttcatcactaaacaatcatgctaaagaggaaaggacagtgtgcttggttagagtaaaggacgaggtcattagccatattgtatatatcgtcaagcaacacacacaaaagttcctcagccacaagacatccacatattgcatgttaaccagaagaaaagacaacattttccggaaatccactgcacactgttgcctatacactttgtacatttaattgatatttgtgctgaggtgatattcctgtctaaaagaacaacattgtctttcttttctagcacagagttatgcattcaaagatgcatacctagttagtttcctatatattcatgccatcttgaaaagacagactatggtgtaaccatgattctattatgtattggtacgtctgtagaccaagatataattttttaaaaataagtttatttctttcaaggtttacaaataacaaaggtgcaccttgtatttaaaattgccattatagatgagagcgtgcatgcacagtcatttttgtttaagagtaatatttttaatgtaatagattgtaagacgtggtgagggagggatctgacagagatgaatgtgccaagcaaaaccacaactgtgtatattttaaagcacatcatggctttaagtaccatgttgttaaggattctcatgaagtgccatagactgtacatcaaattagagtattatttcttcagtgttattgttttcagagccacattttgttgcatatttgctagtactaatcagtcaaagggcaccattctttttttttttttttgaaaccaaagctgtctcagaaatggccaatttaactttacagtaacaatagacagcacaacacaaactctctcaatacagataaactcacacatactggagatatatatataatagatatatataaaattattttaatgcattgtagtgtaatatttatgcatactatactgtataacatgttattcaaaagggattgccatttctgagacacagtaacaaaaaaatgaggaaattattttgcttctatttatagcctctgtcaaaagtcaaaagactataaatgctttgcaaaaatggtttcacgtttgcttaaatgcttcatcacagtcacattcaaaatagtgactctaaacaaagaagaaagcagcactgtcatcagatgcatgataaaccaaaatatgaaaatgggaaatgtttaattaacctagtaattgggtgggttaagtacatgggtgaattttatatgtgatttttgttttgttttgttttgttcagattaactgcttatagccttagaaagccttttacaaaattaaaaaaaaaatagatgtgcattcagtttttaagaatggaatcatccaaaggaattcctttttttgaggtttggatgttgcagctagtaaaggatatttttgctctgttcagcagttctaaaaattgctgaagtaggggccaggtcactggtagttatagtatggaatgggagaagtgaaagttcagttatagaactttccatacttccaagtttactgcaagtttttatgcttgagagagatgctttctaatataagactgatgtgttgattttactgattgtactgtacatctattaaagccttagattattacattacgggttggaacccataccaatgtaatttcaatcgtgttaagaaagtaatggtgacttcacatgttattgtagttagttacattatagaatattacttatttttcttgttaaaatgtagtttttcatttcctacatttattagattttcattttctattaacaattgaataccatttcagtttatagacttgttttattagattttaccaatgaatttttcaaaatacaaaaaaaagtagtttttccttcataacatactcagttttgaattacatgtagtgtcacatgaatattcgtattgttaactaaatgatttatattttactgatttaatattacagtgtaagaatgtcagtcattgttagttcttgtctagttttcattaaaagaacaaagatcttttatatggatatcttataaatatataatcattgctaagtaagaagttaagttgttgctatcgcaacaatcctggcagacaattgagtaatattttgatgatttattttgtttgtaattagttattataagaagatctagatcctagatattagaataaaatttattttctactgtatccatttcaaatgttaaaatattgtttaatatttttgaaatccctgagtatcaggccttgttataaataagctgcataatcaataaatagaacaagggactttttgttgataatccaaatactcaaagtttacgtaatgaaaattatagcgtgtgtgcaaactcttgagggttgattatgctgcaatttagcatgttggaacgtctagggagaaggttgactttttgcacttctgtatatagtcaaaagagagaaacctgtataatagtaagatcttattttgaataaaaacgtctataattacaaggagttttgttaaggctaatacaatgacagactgagcaaaattgcttgcaaaagtggcacagagttagcactccataccccttcaaacatgttgctttgctttcttgtggacagcttgtagtttgccaggattttttcagctggaaagatacgccatcctttcaaaccctcatgactgacaaaaactccatggggccaaatctgcctgaagatcattaccaaaaatagcaggtacttctaccattaaggtgaaatcatggatcagatattccttacatttttcaaaactactgcatgtttaaaacttcaacaaaaaaagagagaaagaactatactaagaacatatattattcagatcagtttctgccaatttcagtggtttattgttcacaaaaaaatcttcaaaacaagtattgactttcacaaaatttaaatcataaacaggcaaaccaaacagcacactgtagctatagttgttatgtgattgttttttaattgctgtaggatcctgttctttcagcaggtgaaaaataaaacgcagttcaaatttcatggttttaattttcaactcagaagcactcaaaaatgcaaaatgtgataatgggcacttgtttaaaagaattagtgtatccagccttcactccagctggttaaaaatgttgcacttatcagcaaccctaccactttcatctgctgaaaggacaaatgtgcttggttttactattatgtaatcacaacttactttctgcttgtagttgcttaaaattatgtattttgtcttgggctgcaatttgttttatgcttattttattattactgcagtagttgactttgctgtatggaaaaataaagtgaaattgccctaataaaacttctctttcttaagt

SEQ ID NO: 2342 - DNA, 4064 bp, Homo sapiens
atgcccgggccccgaggggctgctggcggcctggcccctgagatgcgcggggcgggggcggcggggctgctggcgctgctgctgctgctgctgctgctgctgctgggcctgggcggcagggtcgagggggggccggccggcgagcggggcgcaggcgggggcggggcgctggcccgcgagcgcttcaaggtggtctttgcgccggtgatctgcaagcggacctgtctcaagggccagtgtcgggacagttgtcagcagggctccaacatgacgctcatcggagagaacggccacagcacagacacgctcacgggctccggcttccgcgtggtggtgtgccctctcccctgcatgaatggcggccagtgctcctcgcgaaaccagtgcctgtgtcccccggacttcactgggcgcttctgccaggtgcccgcaggaggagccggtgggggtaccggcggctcaggccccggcctgagcaggacaggggccctgtccacaggggcgctgccgcccctggctccggagggcgactctgtggccagcaagcacgccatctacgccgtccaggtgatcgctgaccctcctgggcccggggaggggcctcctgcccagcacgcagccttcctggtgcccctaggcccgggacagatctcagcagaagtgcaggccccgccccccgtggtgaatgtgcgcgtccatcacccgcccgaggcctcagtccaggtgcaccgcattgagagctcgaacgccgagagcgcagccccctcccagcacctgctgccgcaccccaagccctcgcacccccggccgcccacccagaagcccctgggccgctgctttcaggacactctgcccaagcagccgtgtggcagcaaccccctccccggcctcaccaagcaggaagactgctgcggtagcatcggcactgcctggggccagagcaagtgccacaagtgtccccagctgcagtacacaggagtgcagaagccagggcctgtacgtggggaagtgggcgctgactgtccccagggctacaagaggcttaacagcacccactgccaggacatcaacgagtgcgcaatgccgggcgtgtgtcgccatggtgactgcctcaacaaccctggctcctatcgctgtgtctgcccacctggccatagtttaggcccctcccgtacacagtgcattgcagacaaaccggaggagaagagcctgtgtttccgcctggtgagccctgagcaccagtgccagcacccactgaccacccgcctgacccgccagctctgctgctgcagtgtcggcaaggcctggggcgcgcggtgtcagcgctgcccaacagatggcaccgctgcgttcaaggagatctgcccagctgggaagggataccacattctcacctcccaccagacgctcaccattcagggcgagagtgacttttcccttttcctgcaccctgacgggccacccaagccccagcagcttccggagagccctagccaggctccaccacctgaggacacagaggaagagagaggggtgaccacggactcaccggtgagtgaggagaggtcagtgcagcagagccacccaactgccaccacgactcctgcccggccctaccccgagctgatctcccgtccctcgcccccgaccatgcgctggttcctgccggacttgcctccttcccgcagcgccgtagagatcgctcccactcaggtcacagagactgatgagtgccgactgaaccagaacatctgtggccacggagagtgcgtgccgggcccccctgactactcctgccactgcaaccccggctaccggtcacatccccagcaccgctactgcgtggatgtgaacgagtgcgaggcagagccctgtggcccggggaggggcatctgcatgaacaccggcggctcctacaattgccactgcaaccgcggctaccgcctgcacgtgggcgccggggggcgctcgtgcgtggacctgaacgaatgcgccaagccccacctgtgcggcgacggcggcttctgcatcaactttcccggtcactacaagtgcaactgctaccccggctaccggctcaaagcctcccggcctcctgtgtgcgaagacatcgacgagtgccgggacccaagctcttgcccggatggcaaatgcgagaacaagcccgggagcttcaagtgcatcgcctgtcagcctggctaccgcagccaggggggcggggcctgtcgcgacgtgaacgagtgcgccgagggcagcccctgctcgcctggctggtgcgagaacctcccgggctccttccgctgcacctgtgcccagggctacgcgcccgcgcccgacggccgcagttgcttggatgtggacgagtgtgaggctggggacgtgtgtgacaatggcatctgcagcaacacgccaggatctttccagtgtcagtgcctctctggctaccatctgtccagggaccggagccactgcgaggacattgatgagtgtgacttccctgcagcctgcattgggggtgactgcatcaataccaatggctcctacagatgtctttgcccccaggggcatcggctggtgggtggcaggaaatgccaagacatagatgagtgcagccaggacccgagcctgtgccttccccatggggcctgcaagaaccttcagggctcctatgtgtgtgtctgcgatgagggcttcactcccacccaggaccagcacggttgtgaggaggtggagcagccccaccacaagaaggagtgctacctgaacttcgatgacacagtgttctgcgacagcgtattggccaccaacgtgacccagcaggagtgctgctgctctctgggggccggctggggcgaccactgcgaaatctacccctgcccagtctacagctcagccgagttccacagcctctgcccagacggaaagggctacacccaggacaacaacatcgtcaactacggcatcccagcccaccgtgacatcgacgagtgcatgttgttcgggtcggagatttgcaaggagggcaagtgcgtgaacacgcagcctggctacgagtgctactgcaagcagggcttctactacgacgggaacctgctggaatgcgtggacgtggacgagtgcctggacgagtccaactgccggaacggagtgtgtgagaacacgcgcggcggctaccgctgtgcctgcacgccccctgccgagtacagtcccgcgcagcgccagtgcctgagcccggaagagatggagcgtgccccggagcggcgcgacgtgtgctggagccagcgcggagaggacggcatgtgcgctggccccctggccgggcctgccctcaccttcgacgactgctgctgccgccagggccgcggctggggcgcccaatgccgaccgtgcccgccgcgcggcgcggggtcccattgcccgacatcgcagagcgagagcaattccttctgggacacaagccccctgctgttggggaagcccccaagagatgaggacagttcagaggaggattcagacgagtgtcgctgcgtgagtggccgctgcgtgccgcggccgggcggcgccgtgtgcgagtgtcccggcggcttccagctcgacgcctcccgcgcccgctgcgtggatatcgacgagtgccgagagctgaaccagcgcgggctgctgtgcaagagcgagcgctgcgtgaacaccagcggctccttccgctgcgtctgcaaagccggcttcgcgcgcagccgcccgcacggggcctgcgttccccagcgccgccgctgacgccgccgacgccgccctcggcccagacctcggtgatcactgagggatttccgcgagctcggcctcacttctgccccgacttgtggctcggacccagggaccttcagggcccgcagaccctcccggcgccttgagacccgaggcgcccctaccggcccccctccccggttagcgggcggttgtaaggtctccggcgggcgctgcctgccttcctcccagagggtgtttcctagaaactgataaatcagatcgtgcctctttacccttggctttcgaaaaaaaaaaaaaaaaaa

SEQ ID NO: 2343 - DNA, 1544 bp, Homo sapiens
  misc_feature (1358)..(1358): n is a, c, g, or t
gcacgagttgggaggtgtagcgcggctctgaacgcgctgagggccgttgagtgtcgcaggcggcgagggcgcgagtgaggagcagacccaggcatcgcgcgccgagaaggccgggcgtccccacactgaaggtccggaaaggcgacttccgggggctttggcacctggcggaccctcccggagcgtcggcacctgaacgcgaggcgctccattgcgcgtgcgcgttgaggggcttcccgcacctgatcgcgagaccccaacggctggtggcgtcgcctgcgcgtctcggctgagctggccatggcgcagctgtgcgggctgaggcggagccgggcgtttctcgccctgctgggatcgctgctcctctctggggtcctggcggccgaccgagaacgcagcatccacgacttctgcctggtgtcgaaggtggtgggcagatgccgggcctccatgcctaggtggtggtacaatgtcactgacggatcctgccagctgtttgtgtatgggggctgtgacggaaacagcaataattacctgaccaaggaggagtgcctcaagaaatgtgccactgtcacagagaatgccacgggtgacctggccaccagcaggaatgcagcggattcctctgtcccaagtgctcccagaaggcaggattctgaagaccactccagcgatatgttcaactatgaagaatactgcaccgccaacgcagtcactgggccttgccgtgcatccttcccacgctggtactttgacgtggagaggaactcctgcaataacttcatctatggaggctgccggggcaataagaacagctaccgctctgaggaggcctgcatgctccgctgcttccgccagcaggagaatcctcccctgccccttggctcaaaggtggtggttctggcggggctgttcgtgatggtgttgatcctcttcctgggagcctccatggtctacctgatccgggtggcacggaggaaccaggagcgtgccctgcgcaccgtctggagctccggagatgacaaggagcagctggtgaagaacacatatgtcctgtgaccgccctgtcgccaagaggactggggaagggaggggagactatgtgtgagctttttttaaatagagggattgactcggatttgagtgatcattagggctgaggtctgtttctctgggaggtaggacggctgcttcctggtctggcagggatgggtttgctttggaaatcctctaggaggctcctcctcgcatggcctgcagtctggcagcagccccgagttgtttcctcgctgatcgatttctttcctccaggtagagttttctttgcttatgttgaattccattgcctccttttctcnatcacagaagtgatgttggaatcgtttcttttgtttgtctgatttatggtttttttaagtataaacaaaagttttttattagcattctgaaagaaggaaagtaaaatgtacaagtttaataaaaaggggccttcccctttagaataaatttccagcatgttgctttcaaaaaaaaaaaaaaaaaaa

SEQ ID NO: 2344 - DNA, 478 bp, Homo sapiens
acccggcgctccattaaatagccgtagacggaacttcgcctttctctcggccttagcgccatttttttggaaacctctgcgccatgagagccaagtggaggaagaagcgaatgcgcaggctgaagcgcaaaagaagaaagatgaggcagaggtccaagtaaaccgctagcttgttgcaccgtggaggccacaggagcagaaacatggaatgccagacgctggggatgctggtacaagttgtgggactgcatgctactgtctagagcttgtctcaatggatctagaacttcatcgccctctgatcgccgatcacctctgagacccaccttgctcataaacaaaatgcccatgttggtcctctgccctggacctgtgacattctggactatttctgtgtttatttgtggccgagtgtaacaaccatataataaatcacctcttccgctgttttagctgaagaattaaatcaaaaaaaaaa

SEQ ID NO: 2345 - DNA, 2867 bp, Homo sapiens
ttctcggctgatctctctgggtaggtgccctctgggggcagtacccctgcctgagtggcacttcccctcctggctttgtttggtttggcctcgatttagaacagggttggcagaggcaggctgacttgcatttctggttttgggtttgttgctgcactttccccaaggggtgggcgggctctgactgacagtcaccactgggacaggcctgggccccaccctcaccacccaggaaaggggaaatgcggcccgctccccactcagtgccactctgtgccactccgtgccaggccctgagggcacccggttgctgcttccttccgtctttccccaaggactatcagagatgccagcgtgacccctgacacgtgtgtgcagcagcctgcagctgccccaagccatggctgaacactgactcccagctgtgggcttcaccattacagactccccagggcttcaaagacttctcagcttcgagcatggcttttggctgtcagggcagctgtacaatagtggatgtttgagacggaggcagatgagaagagggagatggccttggaggaagggaaggggcctggtgccgaggattccccacccagcaaggagccctctcctggccaggagcttcctccaggacaagaccttccacccaacaaggactccccttctgggcaggaacccgctcccagccaagaaccactgtccagcaaagactcagctacctctgaaggatcccctccaggcccagatgctccgcccagcaaggatgtgccaccatgccaggaaccccctccagcccaagacctctcaccctgccaggacctacctgctggtcaagaacccctgcctcaccaggaccctctactcaccaaagacctccctgccatccaggaatcccccacccgggaccttccaccctgtcaagatctgcctcctagccaggtctccctgccagccaaggcccttactgaggacaccatgagctccggggacctactagcagctactggggacccacctgcggcccccaggccagccttcgtgatccctgaggtccggctggatagcacctacagccagaaggcaggggcagagcagggctgctcgggagatgaggaggatgcagaagaggccgaggaggtggaggagggggaggaaggggaggaggacgaggatgaggacaccagcgatgacaactacggagagcgcagtgaggccaagcgcagcagcatgatcgagacgggccagggggctgagggtggcctctcactgcgtgtgcagaactcgctgcggcgccggacgcacagcgagggcagcctgctgcaggagccccgagggccctgctttgcctccgacaccaccttgcactgctcagacggtgagggcgccgcctccacctggggcatgccttcgcccagcaccctcaagaaagagctgggccgcaatggtggctccatgcaccacctttccctcttcttcacaggacacaggaagatgagcggggctgacaccgttggggatgatgacgaagcctcccggaagagaaagagcaaaaacctagccaaggacatgaagaacaagctggggatcttcagacggcggaatgagtcccctggagcccctcccgcgggcaaggcagacaaaatgatgaagtcattcaagcccacctcagaggaagccctcaagtggggcgagtccttggagaagctgctggttcacaaatacgggttagcagtgttccaagccttccttcgcactgagttcagtgaggagaatctggagttctggttggcttgtgaggacttcaagaaggtcaagtcacagtccaagatggcatccaaggccaagaagatctttgctgaatacatcgcgatccaggcatgcaaggaggtcaacctggactcctacacgcgggagcacaccaaggacaacctgcagagcgtcacgcggggctgcttcgacctggcacagaagcgcatcttcgggctcatggaaaaggactcgtaccctcgctttctccgttctgacctctacctggaccttattaaccagaagaagatgagtcccccgctttaggggccactggagtcgagctcagcgttcacaccaggcgggctgggtcccctgcccacctgcctccctgccccctgtgacggagggggcaagcaagcccccagaggccgtgtctctggacagacggatagacatacggaagcgaggcctggaccaagagaggcccaggctactggaggagtagaaggatgggccccgtggggtccccactgccccggtacgagggggcccaagaccctggcaggtcaggggccctggccaagccagatctggagctgctgctccctgctgcggagaccgcggaggcttcgcgttgaccaagttccttaaagaactggctgatggggcaggaggtccaggcctgggctctcgggccctcctagagggccattggagcttgcagctcagacccccactttgagttttatttatttaaatagtagttggatgcttggcacgtcgtcctgtaataggaaacccttgcctcatcagttttcctgatttacaagtgcaatattttagccaatgccttgggagaagctgccatgcaaaggtggacaccattctccagcttcaggggatatgctcgtcccgggcaccggtggcaggcagctggccttctggactaaggcagcctggggggacactgcagtctggctacacacagagatctggcaccccctgggtggagtgtccctcgggggctttgggaaagcatggcaccctcagaccacacagtagccaagttctggagcaaataaaaggcctgtgttatttcttgttcttgaaaaaaa

SEQ ID NO: 2346 - DNA, 556 bp, Homo sapiens
acaactcggtggtggccactgcgcagaccagacttcgctcgtactcgtgcgcctcgcttcgcttttcctccgcaaccatgtctgacaaacccgatatggctgagatcgagaaattcgataagtcgaaactgaagaagacagagacgcaagagaaaaatccactgccttccaaagaaacgattgaacaggagaagcaagcaggcgaatcgtaatgaggcgtgcgccgccaatatgcactgtacattccacaagcattgccttcttattttacttcttttagctgtttaactttgtaagatgcaaagaggttggatcaagtttaaatgactgtgctgcccctttcacatcaaagaactactgacaacgaaggccgcgctgcctttcccatctgtctatctatctggctggcagggaaggaaagaacttgcatgttggtgaaggaagaagtggggtggaagaagtggggtgggacgacagtgaaatctagagtaaaaccaagctggcccaagtgtcctgcaggctgtaatgcagtttaatcagagtgccattttttttt

SEQ ID NO: 2347 - DNA, 4414 bp, Homo sapiens
cccacgcgtccggcggcggcggtagcggcggcagcggctgcggccaagctgggtccgagcatcccgcggctctggagccgcccggcccggacatggcgaccgtccgggcctctctgcgaggtgcgctgctccttctgctggccgtggcgggggtcgcggaggtggcagggggcctggctccgggcagtgcgggtgcattgtgttgtaatcattcaaaggataaccaaatgtgccgtgatgtatgtgaacagattttctcctcaaaaagtgaatcccgactaaaacatctgttgcagcgagccccagattattgcccagagacaatggttgaaatttggaattgtatgaattcatctttgccaggtgtgtttaagaagtctgatggctgggttggcttaggctgctgtgaactggctattgccttggagtgtcgacaggcatgcaagcaggcatcttcaaagaatgatatttccaaagtttgcagaaaagaatatgagaatgctcttttcagttgcattagcagaaatgaaatgggctcggtttgttgcagttatgcaggtcatcacacaaactgccgagaatactgtcaagccatttttcgaacagactcttctcctggtccatctcagataaaagcagtggaaaattattgcgcctctattagtccacaattaatacattgtgtgaacaattatactcaatcttatccaatgaggaacccaacggatagtttatattgctgtgacagagctgaagaccatgcttgccaaaatgcctgcaagagaatcctgatgtccaagaaaacggaaatggagattgttgatggtctcatcgagggttgtaagacccagcccttgcctcaagatcctctttggcaatgttttcttgaaagctcacaatctgttcaccctggagtcactgtacaccctcctccctctacaggcctcgatggggctaaattgcattgttgttctaaagcaaacacttcaacatgtagggaactctgcactaaactttacagcatgagctggggcaatacacagagttggcaagagtttgatcgcttttgtgaatataatccagtggaagtgtccatgttgacctgtttagcggatgtccgggaaccttgccagttgggctgtagaaaccttacttactgtactaattttaacaacaggccaacagaacttttcaggagttgtaatgcacagtcagatcaaggagccatgaatgacatgaagttgtgggagaaaggaagcataaagatgccatttatcaatatacctgttcttgatattaaaaagtgccagccagagatgtggaaagcaatagcttgttcactgcagattaaaccttgtcatagtaaatctcggggaagtattatttgcaaatcagattgtgtggagattcttaaaaaatgtggagaccagaacaaattccctgaagaccacacagctgaaagtatttgtgagcttctgtcacctacagatgatctgaagaattgtatacctttggatacatacctcaggccaagtactttaggtaacattgtagaagaagtgactcatccctgtaacccaaatccttgccctgccaatgagctctgtgaagtaaaccgaaaaggatgtccatctggagatccctgtcttccatacttttgtgttcaaggttgcaaactgggagaagcttctgatttcattgtccgtcaagggacactaatccaggtgccatcatctgcaggggaagttggttgttataaaatctgttcatgtggacaaagtggactcttagaaaactgtatggaaatgcactgtatagacctccagaagtcttgtattgttggaggaaaaagaaaaagtcatggaacatcctttagtattgactgcaatgtctgttcttgttttgctggcaatttggtgtgctctacccgcctttgcctcagtgagcacagttcagaagatgaccgtcgtaccttcacaggtctgccctgtaactgtgcagatcagtttgtccctgtatgtgggcagaatgggcgcacttaccccagtgcctgcattgctcgctgtgtgggcctccaagaccatcagtttgagtttggatcatgcatgtcaaaggatccatgtaatcctaatccctgccaaaaaaaccaaaggtgcatacccaaaccacaggtctgcctgacgacttttgataaatttggatgtagccagtatgagtgtgtaccaagacagctcgcgtgtgaccaggtccaagatcctgtttgtgacacagaccacatggagcacaacaatctctgcactttataccaaagaggaaaaagcctctcttacaaaggtccctgccagcccttttgcagagcaaccgagcccgtatgtgggcacaatggtgagacctacagcagtgtgtgtgctgcctactcggatcgcgtggcagtcgattactatggggactgccaggccgtcggagtcctctcagagcacagctccgtcgccgagtgtgcttctgtcaagtgtccttcgctcttggcagctggatgcaaacccatcatcccaccgggtgcttgttgcccattatgtgctgggatgttaagagttttatttgacaaagaaaaactggatactattgctaaggtaacaaataaaaagccaataacagttctggaaatacttcagaaaatccgcatgcacgtgtctgtcccacagtgtgatgtgtttggatacttcagcattgaatcagaaattgtgatcctgatcattcccgtcgatcactatccaaaagctctgcagattgaagcctgcaataaagaagcagagaagattgagtcccttatcaactctgacagcccgactttggcgtcccatgtccctctctctgccctcatcatttcccaggtacaggtctccagcagtgtgccatcggccggtgtcagggccaggccttcttgccactccctcctccttcccctcagcttgggccttgccttgcacttgctctggacatataactgactgcccacggaaagtgcagaatgctcctccacctcactctcctgccttgaaaaagacattcaggactgctggtttgtagttgaatattggccaaggaaaggcacatgtcacctctattcgccacacagtatttttttttttaatccgccaatattagtaggatttttgttttgtttttacaaatgttaaaatgtgttgttccaaatactaatgaaaacagaatgtctcttcctggtagaccactgccatatgatttacatttcctcaccataagggtcccccactctaaagcaaatttatcgctgggaaatgagatgaccactttttagaaagataattcactgtactatcaggttcacaaacttcatttcagagttctttttgaagtatttaaggttcccgttgcatttgttttgtttacagataattacctactctggctagaagctaggggtcccagtgaagagccactgccattaaagaatatgaaacatagataaaacatctttgaaattatgtaaattatgtaaattatcaggcaaatttgcattaaattacagaaatttaattcagaaccccaactactgtgttatgcaaaagcaagctgattaaatgacactcatataattatatgttgtaagcaacaggctcactggtcacggatttgtgtctgtgacttttgtgaaagggagaagtgacattgcatcaaagcatcttgcattatgcaatttttatattaaccagatatatattcatcggtattcatccaagttaaatgtagagtttttaaacatcaatctttaaaccaattgctgctacttatataattgccaaaaagtgaaataatgtgtagttcatgtaaataatacattatatttctattttattatgaagaaggtgaatagccatatttgtaaaatgacaatcatgtgtgttaacccagtgctttccattcgtgaaaacacatttgctttttgtgatatgcacaatgtagataagtgttctgtctgactttcttttttgatatagaagtataaagaattgtggtttatatatttaaaagtgtcaagctgagtattaaaatgtatgcatgttgtctaagaaattgaatacttgaatgtgtctcacagtttgaaataagctatttgatgtaatacttcttgtgtgtatgcacatgaaacttagattttacatgaagtattttttcagtattatatgtaccctctgaaatacatagggatatgcgtattataccaaaatgttgctgaaaaatgggcacttaaagctttcagaatatgtcagtgctgatgtagcatgcttgttgcaattgccttttttctgtataaatgtctttaatgcaatatactggaaagcttttctattttaataaaaataatttttatatg

SEQ ID NO: 2348 - DNA, 594 bp, Homo sapiens
ggggagcgctccctgcgagtggcgcaggtaacagaccgcaggggcaagacagccggcgcgggaggaggatggcgctgtcggtgctgcgcttggcgctgctgctcctggcagtcaccttcgcagcctctctgatccctcaatttggtctgttttcaaaatatagaacgccaaactgctctcagtatagattaccaggatgtcccagacactttaaccctgtgtgtggcagtgacatgtccacttatgccaatgaatgtactctgtgcatgaaaatcagggaaggtggtcataatattaaaatcattcgaaatggaccctgctgatggagcagtttacagaaaagaagatggagagaccaccttcactggcagactagataaattgcatttcccctttttctcttttcctgtgtttctttacatgagatttgttaacacacattttctgagagcaggtatggaagacagccatgtgtagtgatggataatttaaagaaaaaaagaatccttgtttcttggcttttgctcctggagttaagcttactgcccaggtgacttgtgcattgctttatttagttgaaataaaatcagcatt

SEQ ID NO: 2349 - DNA, 753 bp, Homo sapiens
gttttgcagacgccaccgccgaggaaaaccgtgtactattagccatggtcaaccccaccgtgttcttcgacattgccgtcgacggcgagcccttgggccgcgtctcctttgagctgtttgcagacaaggtcccaaagacagcagaaaattttcgtgctctgagcactggagagaaaggatttggttataagggttcctgctttcacagaattattccagggtttatgtgtcagggtggtgacttcacacgccataatggcactggtggcaagtccatctatggggagaaatttgaagatgagaacttcatcctaaagcatacgggtcctggcatcttgtccatggcaaatgctggacccaacacaaatggttcccagtttttcatctgcactgccaagactgagtggttggatggcaagcatgtggtgtttggcaaagtgaaagaaggcatgaatattgtggaggccatggagcgctttgggtccaggaatggcaagaccagcaagaagatcaccattgctgactgtggacaactcgaataagtttgacttgtgttttatcttaaccaccagatcattccttctgtagctcaggagagcacccctccaccccatttgctcgcagtatcctagaatctttgtgctctcgctgcagttccctttgggttccatgttttccttgttccctcccatgcctagctggattgcagagttaagtttatgattatgaaataaaaactaaataacaattgtc

SEQ ID NO: 2350 - DNA, 3310 bp, Homo sapiens
ggcgggcgaccaaagcgcctgaggaccggcaacatggtgcggtcggggaataaggcagctgttgtgctgtgtatggacgtgggctttaccatgagtaactccattcctggtatagaatccccatttgaacaagcaaagaaggtgataaccatgtttgtacagcgacaggtgtttgctgagaacaaggatgagattgctttagtcctgtttggtacagatggcactgacaatcccctttctggtggggatcagtatcagaacatcacagtgcacagacatctgatgctaccagattttgatttgctggaggacattgaaagcaaaatccaaccaggttctcaacaggctgacttcctggatgcactaatcgtgagcatggatgtgattcaacatgaaacaataggaaagaagtttgagaagaggcatattgaaatattcactgacctcagcagccgattcagcaaaagtcagctggatattataattcatagcttgaagaaatgtgacatctccctgcaattcttcttgcctttctcacttggcaaggaagatggaagtggggacagaggagatggcccctttcgcttaggtggccatgggccttcctttccactaaaaggaattaccgaacagcaaaaagaaggtcttgagatagtgaaaatggtgatgatatctttagaaggtgaagatgggttggatgaaatttattcattcagtgagagtctgagaaaactgtgcgtcttcaagaaaattgagaggcattccattcactggccctgccgactgaccattggctccaatttgtctataaggattgcagcctataaatcgattctacaggagagagttaaaaagacttggacagttgtggatgcaaaaaccctaaaaaaagaagatatacaaaaagaaacagtttattgcttaaatgatgatgatgaaactgaagttttaaaagaggatattattcaagggttccgctatggaagtgatatagttcctttctctaaagtggatgaggaacaaatgaaatataaatcggaggggaagtgcttctctgttttgggattttgtaaatcttctcaggttcagagaagattcttcatgggaaatcaagttctaaaggtctttgcagcaagagatgatgaggcagctgcagttgcactttcctccctgattcatgctttggatgacttagacatggtggccatagttcgatatgcttatgacaaaagagctaatcctcaagtcggcgtggcttttcctcatatcaagcataactatgagtgtttagtgtatgtgcagctgcctttcatggaagacttgcggcaatacatgttttcatccttgaaaaacagtaagaaatatgctcccaccgaggcacagttgaatgctgttgatgctttgattgactccatgagcttggcaaagaaagatgagaagacagacacccttgaagacttgtttccaaccaccaaaatcccaaatcctcgatttcagagattatttcagtgtctgctgcacagagctttacatccccgggagcctctacccccaattcagcagcatatttggaatatgctgaatcctcccgctgaggtgacaacaaaaagtcagattcctctctctaaaataaagaccctttttcctctgattgaagccaagaaaaaggatcaagtgactgctcaggaaattttccaagacaaccatgaagatggacctacagctaaaaaattaaagactgagcaagggggagcccacttcagcgtctccagtctggctgaaggcagtgtcacctctgttggaagtgtgaatcctgctgaaaacttccgtgttctagtgaaacagaagaaggccagctttgaggaagcgagtaaccagctcataaatcacatcgaacagtttttggatactaatgaaacaccgtattttatgaagagcatagactgcatccgagccttccgggaagaagccattaagttttcagaagagcagcgctttaacaacttcctgaaagcccttcaagagaaagtggaaattaaacaattaaatcatttctgggaaattgttgtccaggatggaattactctgatcaccaaagaggaagcctctggaagttctgtcacagctgaggaagccaaaaagtttctggcccccaaagacaaaccaagtggagacacagcagctgtatttgaagaaggtggtgatgtggacgatttattggacatgatataggtcgtggatgtatggggaatctaagagagctgccatcgctgtgatgctgggagttctaacaaaacaagttggatgcggccattcaaggggagccaaaatctcaagaaattcccagcaggttacctggaggcggatcatctaattctctgtggaatgaatacacacatatatattacaagggataatttagaccccatacaagtttataaagagtcattgttattttctggttggtgtattattttttctgtggtcttactgatctttgtatattacatacatgctttgaagtttctggaaagtagatcttttcttgacctagtatatcagtgacagttgcagcccttgtgatgtgattagtgtctcatgtggaaccatggcatggttattgatgagtttcttaaccctttccagagtcctcctttgcctgatcctccaacagctgtcacaacttgtgttgagcaagcagtagcatttgcttcctcccaacaagcagctgggttaggaaaaccatgggtaaggacggactcacttctctttttagttgaggccttctagttaccacattactctgcctctgtatataggtggttttctttaagtggggtgggaaggggagcacaatttcccttcatactccttttaagcagtgagttatggtggtggtctcatgaagaaaagaccttttggcccaatctctgccatatcagtgaacctttagaaactcaaaaactgagaaatttacttcagtagttagaattatatcacttcactgttctctacttgcaagcctcaaagagagaaagtttcgttatattaaaacacttaggtaacttttcggtctttcccatttctacctaagtcagctttcatctttgtggatggtgtctcctttactaaataagaaaataacaaagcccttattctctttttttcttgtcctcattcttgccttgagttccagttcctctttggtgtacagacttcttggtacccagtcacctctgtcttcagcaccctcataagtcgtcactaatacacagttttgtacatgtaacattaaaggcataaatgactc

SEQ ID NO: 2351 - DNA, 3767 bp, Homo sapiens
gcggccgcagctccgtttccggtggctcgtcgcgctcgctcactccagctgcagccactctcgcccgtggctgcttcctccatcctggtattttttggagcttccatcctggttcttccaaagtgcccggacccaaaacaggaaagtgttgcggagataggaacatgggagagaaacaatctgggtaacatgaaagtgatgctggttgctaagggaaggcaacttgattctgtgggaagggctgtagctgatccatccgttgtctagatttgagtatgagcacagtggaagaggattctgacacagtaacagtagaaactgtgaactctgtgactttgactcaggacacagaagggaatctcattcttcactgccctcagaatgaagcggatgaaatagactcagaagatagtattgaacctccacataaaaggctttgtttgtcctctgaggatgatcagagtattgatgattctactccttgcatatcagttgttgcacttccactttcagaaaatgatcagagctttgaagtgaccatgactgcaaccacagaagtagcagatgatgaggttactgaggggactgtgacacagatacagattttgcagaatgagcaactagatgaaatatctcccttgggtaacgaggaagtttcagcagttagccaagcatggtttacaactaaagaagataaggattctctgactaataaaggacataaatggaagcaggggatgtggtccaaggaagaaattgatattttgatgaacaatattgaacgctatcttaaggcacgcggaataaaagatgctacagaaatcatctttgagatgtcaaaagacgaaagaaaagatttctacaggactatagcatggggtctgaaccggcctttgtttgcagtttatagaagagtgcttcgcatgtatgatgacagaaaccatgtgggaaaatatacacctgaagaaattgagaagctcaaggagctccggataaagcatggcaatgactgggcaacaataggggcggcgctaggaagaagtgcatcttctgtcaaagatcggtgccgactgatgaaggatacttgcaacacagggaagtggacagaagaagaagaaaagagacttgcagaagtggttcatgagttgacaagcactgagccaggtgacatagtcacacagggtgtgtcttgggcagctgtggctgaacgagtcggtacccgctcagaaaagcaatgtcgttctaaatggctcaactacctgaattggaaacagagtgggggtactgaatggaccaaggaagatgaaatcaatctcatcctcaggatagcagaacttgatgtagctgatgaaaatgacattaactgggatctgttagctgagggatggagtagtgtccgttcaccacaatggctacgaagtaaatggtggaccatcaaaaggcaaattgcaaaccataaggatgtttcgttccctgtcttaataaaaggtcttaaacagttacatgagaaccaaaaaaacaacccaacgcttttggagaataaatcaggatctggagttccaaacagtaataccaattccagtgtgcagcatgttcagataagagttgcccgcttggaagataatacagccatctcttctagccccatggcagcattgcagattccagtccagatcacccatgtttcttcagcagactctcctgctaccgttgactcagaaacaataacactaaacagtggaacactacagacatttgagattcttccctctttccatctacagcccactggcactccaggcacctacctacttcaaacaagctcaagccaaggccttcccctaactctgactgctagtcccacagtaaccctgacagctgctgctcctgcttctcctgaacagattattgttcatgctttatccccagaacatttgttgaacacaagtgataatgttacagtgcagtgtcacacaccaagagtcatcattcagactgttgccacagaggacatcacttcttccatatcccaagcagaactgacagtcgatagtgatattcagtcatctgattttcctgagcctccagacgccctagaagcagacactttcccagatgaaattcatcaccctaagatgactgtggagccatcatttaatgatgctcatgtatccaaattcagtgaccaaaatagcacagaactgatgaatagtgttatggtcagaacagaagaagaaatctctgacaccgaccttaaacaagaggaatcaccctctgatttagccagtgcttatgttactgagggtttagagtctcccactatagaagaacaagttgatcaaacaattgatgatgaaacaatacttatcgttccttcaccacatggctttatccaggcatctgatgttatagatactgaatctgtcttgcctttgacaacactaacagatcccatactccaacatcatcaggaagaatcaaatatcattggatcatccttgggcagtcctgtttcagaagattcaaaggatgtcgaagatttggtaaactgtcattagaataattcttagaaataggcagttcaagcaaagaaggcacactgttaattacaacctcttcaaagaaataggagcaaacccccaagaggcttaatttaccaatttaaatagccacagtccttaagccacacacattgttgctgctatgactttttacctcctttaaacacatcatctgaggttgagttttatgacagtatgtagttgagtggaggctgggagttttaagcataaatccctgtttagtgttacatgggaataaggaatttcattcacttcagccactaagaaaagtttagaatcacgaaagcttaactgctgtggtttaaagtacagtttctctaaagatcagacatggcactgtctcctctcaagcctggttgtagttcagatgagtcttttcaacatggtcttcaacatggtctagagcttaccagtgatcttctgatcttcaagaagactaagtttgagacttgaccagcatacaagtatagagacctaggaggtggtcttgtggtggtacatttggttaacccattgctggcagtgggagctgatttaggcagggtaaacaggaaagcattaaaagttaaaattcactacaggttttttgttacttttaaagggaatatggataagcatagtaacaaaacccaccagaatctaagcagttttcaccccctcagaaaccactgtcattagtttacaaagttagcactttgaagtaaaactaaatgaggaaggaagtaatgttacctatccttgataccatgaccatttattagatgttttgctatataaattaccgagagaatagtttgtcatccacttagtgtgttagctggtggggtacaatataacctctcatctcaggctattttaaaaaaacaatatttgcttctataacaaaaggaaacaaatctaagaatcattcctgtactacagaagggttaaggcaaaggtagccttttgggctttttaatgaatatgacccctatagaaaagtcaagaaaaaaaaacccttgtataaattattttatttattattgtaattagatcttcacaaagttgtcttttcactgtgttttgtcaacgtgaaattaaattgtagttataagcaaaagttggttgcctagggaacaattgtatattcagtttaacagaaataaaagaatatttgtcttaaaaaaaaaaaaaaaaaaactcgag

SEQ ID NO: 2352 - DNA, 2255 bp, Homo sapiens
cttgtggagcattcgggcttggaaggaaagctataggctacccattcagctcccctgtcagagactcaagctttgagaaaggctagcaaagagcaaggaaagagagaaaacaacaaagtggcgaggccctcagagtgaaagcgtaaggttcagtcagcctgctgcagctttgcagacctcagctgggcatctccagactcccctgaaggaagagccttcctcacccaaacccacaaaagatgctgaaaaagcctctctcagctgtgacctggctctgcattttcatcgtggcctttgtcagccacccagcgtggctgcagaagctctctaagcacaagacaccagcacagccacagctcaaagcggccaactgctgtgaggaggtgaaggagctcaaggcccaagttgccaaccttagcagcctgctgagtgaactgaacaagaagcaggagagggactgggtcagcgtggtcatgcaggtgatggagctggagagcaacagcaagcgcatggagtcgcggctcacagatgctgagagcaagtactccgagatgaacaaccaaattgacatcatgcagctgcaggcagcacagacggtcactcagacctccgcagatgccatctacgactgctcttccctctaccagaagaactaccgcatctctggagtgtataagcttcctcctgatgacttcctgggcagccctgaactggaggtgttctgtgacatggagacttcaggcggaggctggaccatcatccagagacgaaaaagtggccttgtctccttctaccgggactggaagcagtacaagcagggctttggcagcatccgtggggacttctggctggggaacgaacacatccaccggctctccagacagccaacccggctgcgtgtagagatggaggactgggagggcaacctgcgctacgctgagtatagccactttgttttgggcaatgaactcaacagctatcgcctcttcctggggaactacactggcaatgtggggaacgacgccctccagtatcataacaacacagccttcagcaccaaggacaaggacaatgacaactgcttggacaagtgtgcacagctccgcaaaggtggctactggtacaactgctgcacagactccaacctcaatggagtgtactaccgcctgggtgagcacaataagcacctggatggcatcacctggtatggctggcatggatctacctactccctcaaacgggtggagatgaaaatccgcccagaagacttcaagccttaaaaggaggctgccgtggagcacggatacagaaactgagacacgtggagactggatgagggcagatgaggacaggaagagagtgttagaaagggtaggactgagaaacagcctataatctccaaagaaagaataagtctccaaggagcacaaaaaaatcatatgtaccaaggatgttacagtaaacaggatgaactatttaaacccactgggtcctgccacatccttctcaaggtggtagactgagtggggtctctctgcccaagatccctgacatagcagtagcttgtcttttccacatgatttgtctgtgaaagaaaataattttgagatcgttttatctattttctctacggcttaggctatgtgagggcaaaacacaaatccctttgctaaaaagaaccatattattttgattctcaaaggataggcctttgagtgttagagaaaggagtgaaggaggcaggtgggaaatggtatttctatttttaaatccagtgaaattatcttgagtctacacattatttttaaaacacaaaaattgttcggctggaactgacccaggctggacttgcggggaggaaactccagggcactgcatctggcgatcagactctgagcactgcccctgctcgccttggtcatgtacagcactgaaaggaatgaagcaccagcaggaggtggacagagtctctcatggatgccggcacaaaactgccttaaaatattcatagttaatacaggtatatctatttttatttactttgtaagaaacaagctcaaggagcttccttttaaattttgtctgtaggaaatggttgaaaactgaaggtagatggtgttatagttaataataaatgctgtaaataagcatctcactttgtaaaaataaaatattgtggttttgttttaaacattcaacgtttcttttccttctacaataaacactttcaaaatgtgaaaaaaaaaaaaaaaaaa

SEQ ID NO: 2353 - DNA, 1224 bp, Homo sapiens
gtttccgggttgagtctggactcctaccgaactcgggcaagttatttaacacccctgagcttctttcttcatctgcaaaatggaacccctcccttcctttgaattgctgagcccattacgcgaggtaacgttgtacgacgctctctgcacagcgccaggtcccaatcccggtgttccggctcagcaggccaggagcgtttccagtttccattgcgtttctctttctgaactcttcttgcccctctcctgggaagctccccgattcttcttggcccttccttcccttccacagctccctctccaccctaagcccagcgggcccgcctccccccctccttcccggcaggtgacggcggaatcccgctgtaagctgctcagctggctgatcccggtgcaccgccaattcggcctctccttcgagtcgctgtgcctgacggtgaacactctggaccgcttcctcaccaccacgccggtgctgcagactgcttccagctgcttggggtcacctccttgctcatcgcttgcaaacaggtggaggtgcacccgccgcgcgtggaagcagcttctggccctctgctgcggcgccttctcccggcagcagctctgcaacctcgagtgcatccgtgctgcacaagctgcacttcaccctgggtgcgccaccattagcttcttcctgacatttcagcacctcctgagcgcagctaggcctccgaagctctggaagcgcaagccctggcgccggggggtggcagagctgagtctggccgactatgccttcaccagctactccccttccctcctggcgatctgctgcctggcgctggcggaccgcatgctgcgtctcgcggcccgtggacttgcgactgggagaccacccggaggcggcgctggaggactgtatgggcaagttgcagctgctggtggccataaacagtacttccttgactcacatgctgcccgttcagatctgcgagaagtgcagcctgcccccgagctcgaaataaaacagatccttcgtttccttttagtccctggcccggctgctggacctctcccgtagcctcagaagagtgcagtactggtccacagagaaggcttcaggacctgcttggtcagctgcaggttgtaaatagtgtacgatactagcatctggtattttatttattttgcagcgagcacatgaggaagctgagtctttcaccaataaacagttgtggtttgtct

SEQ ID NO: 2354 - DNA, 4229 bp, Homo sapiens
ccagtggacgagaatcgcggagcctgcggggctggaggttgagcgcccgggccagcacctaggcgggcgcgggggtgtgcaggccagggttcgcgcgggccgggtggaggcttgagcggggacccccgagcttgagccccggagccggcggcgctggggccagaggggccggacgggaggtggcggaggtggcggcggaggcgaaggggcggcgggacgcgggcctggcccgtgtgtgtcctggcggcctggcccaggctgccgctgtacggtgagcccgagggaggcggatctgggtcccgggaaggacacccgcctggatttgccccttaggcccggcccgggcccctcgggagcagaacaaccttagtgaggtggacaggaggggacctcgcgagcagacgcgcgccagcgacagcagccccgccccggcctctcgggagccgtggggcagaggctgcggagccccagaagggtctaccagccacagtctctgcacgtttccaagagcagcagaaaatgaacacattgcaggggccagtgtcattcaaagatgtggctgtggatttcacccaggaggagtggcagcagctggaccctgatgagaagataacttacagggatgtgatgttggagaactatagccatctagtttctgtgggatatgataccaccaagccaaacgtcatcattaagttggagcagggagaggagccgtggataatgggaggtgaatttccatgtcaacatagtccagaagcctggagagttgatgacctgatagagagaatccaagaaaacgaagacaaacattcaaggcaagctgcttgtatcaatagcaaaaccctgactgaagagaaagagaatacatttagtcaaatttacatggaaacaagccttgttccttcaagcataatagctcataattgtgtctcatgtggaaagaatttagaatctatttcgcaattaattagtagtgatggaagctatgctaggacaaaacctgatgagtgtaatgaatgtgggaaaacatatcatggagagaaaatgtgtgaatttaatcaaaatggggatacctattctcacaatgaagaaaatattcttcagaaaattagtattttggagaaaccctttgaatataatgaatgcatggaagccttagacaatgaggctgtttttattgctcataagagagcttacataggggagaagccctatgagtggaatgattctggaccagacttcatacagatgtcaaattttaatgcatatcagagatcacaaatggaaatgaagccctttgaatgcagtgaatgtggaaaatccttctgtaaaaagtcaaaattcatcatccaccagagggctcacacaggagagaaaccttatgaatgtaatgtatgtgggaaatccttcagccaaaagggaaccctcactgtacatcggagatcacacttagaggagaagccctataaatgtaatgaatgtgggaaaaccttttgtcagaagttacacctcactcaacacctaagaactcattcaggagagaaaccctacgaatgtagcgaatgtgggaaaaccttctgccaaaagacacatctcaccctgcaccagaggaatcattcaggagagaggccctatccatgtaacgaatgtgggaaatccttctcccgcaagtctgctctcagtgaccatcagagaactcacacgggagagaagctttataaatgtaatgaatgtgggaaatcctactaccgaaagtctactctgattacacatcagagaacacacacgggagagaagccctatcagtgtagcgagtgtgggaaattcttttctcgggtgtcatacctcactatacattatagaagtcatttagaagagaaaccctatgaatgtaatgaatgtggcaaaaccttcaatttaaattcagccttcattagacatcggaaagtacacacagaagagaaatcccatgaatgtagtgaatgtggaaagttctctcagttgtatctcaccgaccatcatacagctcatttagaagagaaaccctatgaatgtaatgaatgtgggaaaaccttccttgtaaattcagccttcgatgggcaccagccacttccaaaaggggagaaatcctatgaatgtaatgtatgtggaaagttattcaatgagttgtcatactatactgaacattatagaagtcattcagaagagaaaccttatggatgtagcgaatgtgggaaaaccttttcccataattcatccctcttcagacatcaaagagtacacacaggcgagaaaccctatgaatgttacgaatgtggaaaattcttctctcagaaatcatatctcactatacatcatcgaattcattcaggagagaaaccctatgaatgtagtaaatgtggaaaagtcttctctcggatgtcaaacctcactgtccactacagaagccattcaggagagaaaccctatgaatgtaatgaatgtgggaaagtcttttctcagaagtcatacctcactgtacactatagaactcattcaggagagaaaccctatgaatgtaacgagtgtgggaaaaaattccaccacagatcagccttcaatagccatcagagaattcatagaagaggaaatatgaacgtacttgatgtggaaaatctctgaagtcagatctcaatttttagaaaactctctgaatataatgaatatggggaatccaataggaagtcaaagcgtttatctgagagttcgtgttcctgaacggtgagaagcatttaggcattagagtcattttaatccaaattttcacagagaagaatcccgaagaatgtaacaagaagcaaagccttcagcaagatcatacgactcatcggacactaatttatataggagtgaagttttataaatatttaatatttattttggattcaaattgtatttacatatcagggaatcatacaaaggcaaaatctgtcaatatggtgaatgtggaaaatatattgtcttggaaatttgttgtaaaagccatatttctaatggaaaatcaggtgtttacaggaaagatctcagaggctatgagctctgaataaatcttcattgtataaaatgaagtttttaaattgtcaggagttgatcatgaggacagtagcattaaataagtatatggccgttttttatcatgtcttaaaaatgcaatctaatggtaattctatgcaagtttggaattggatgacttgtgaagaggcagttttcttatttgagtattaggatggcaaaatgtattaagacaggacatattgttggtgagataatatttaataggtataaaatggtaaaatacctagttttctatttagaggaatttacaaatgggtttttaacaaatgcctcattagtacaggaggcagtcgttttgtaaagttttcaactgcatctgagtaagataagattttctaaaagactattttgataaactatacatacataatttggaattgtttaagtctatttcagtgaaagagaacaagcatactgcccatactctaaaatatccccagctctcacaccacccttgttttttaacccataggtttgagtgtgcctagtgccaatattttgtaatttagaaattttattcacaaacttctgtttggtacaaatacagtgtcattgttttgtgcattctcctttttcccagtatttcagaacaaattgattcaagtttctagcagatattttttgatcaattaacttaatgtcctcgctccatttcttgctggaacagtttaggtacctaccacttcttcacatgacacaggggaatcctgattagtcaaaataataatgatttcattctctttgccagtaacttgttttatagtggtcatatgacctgatactgggtaaacaaaacaaagatggacttgttctgggaaaaggtaaaatggtaatcaaatagattgtgttccaggaatgcaaaggtggcttaatattcacaagtcagttgctattatacaccacctgtagaaaagtaatctggcatgcagaacattcttgtggtacaattaatgttcgtttatgatcttagcaaatgatggattgaaagggacttacttaactgcataaagagacttaaactacaacaaacaatatgcttaatgatgaaatagtgaacatttctcctaagattataaaaataagacaaggatatctgctgtcaatgattttat

SEQ ID NO: 2355 - DNA, 1396 bp, Homo sapiens
agccaccatcgaggaaggggcatgtgctggacgcggacacatgatccgagggaccctgctgggtggaactaagaaagtccagcagactgtgcatgctcctgtccccactcacaggcccacgcagcgaggggggcccctcttctgtgtgcgtctggaaggtcgctgcccagggaggaaatgcctttaaccggcgtggggccgggcagctgcaggaggcagatcatccgggctctgtgcctcttgctacttctcctccacgccggctctgccaagaatatctggaaacgggcattgcctgcgaggctggccgagaaatcccgtgccgaggaggcgggcgcgcccggcggcccccggcagccccgagcagaccgctgcccgccgcctccgcggacgctgccccccggcgcctgccaggccgcgcgctgtcaggcggactccgagtgcccgcggcaccggcgctgctgctacaacggatgcgcctacgcctgcctagaagctgtgccgcccccgccagtcttagactggctggtgcagccgaaacctcgatggcttggtggcaatggctggctcctggatggccctgaggaggtgttacaagcagaggcgtgcagcaccacggaggatggggccgaacccctgctctgtccctcgggctatgagtgccacatcctgagcccaggtgacgtggccgaaggtatccccaaccgtgggcagtgcgtcaagcagcgccggcaagcagatgggcgaatcctacgacacaaactttacaaagaatatccagaaggtgactcaaagaatgtggcagaacctggaaggggacaacagaagcactttcagtaaagcaacggcaagcagctaggttgcaagaacattcctctactttctgctaagccttggaaacagttgggaaaagtagtttgaccctcacagttcacattcagctcagcagagcaagaccccagagatgcttagagacaggacacctggccctcaaacccagtttggcccagcctggttgggtgactttgtgggagccacttaacagctctgggtccctgttttaccatcctgggagcaaggccctgcagctccacgagacctttaccccgggaagaagccgccgcccatgaaagcatttctgaagcccctttctaagacaaggctcagcatcttgatatttttgacagattcctcccaagtctggctctgggaggtatgtacccatctcaaatgttcccaagataaattcatccttcaggaaatggaaatgaacttgcttactaatgtgtgattcctagttgtagccaccggatgtgctgaggcctaaatgttagcaggtgggaggaggccacagaacaataaaaacaaccaaataagaaaaaaaaaaaaaaaaaaa

SEQ ID NO: 2356 - DNA, 1745 bp, Homo sapiens
accacgcgtctcatccatggcttccgcggactcgcgccgggtggcagatggcggcggtgccgggggcaccttccagccctacctagacaccttgcggcaggagctgcagcagacggacccaacgctgttgtcagtagtggtggcggttcttgcggtgctgctgacgctagtcttctggaagttaatccggagcagaaggagcagtcagagagctgttcttcttgttggcctttgtgattccgggaaaacgttgctctttgtcaggttgttaacaggcctttatagagacactcagacgtccattactgacagctgtgctgtatacagagtcaacaataacaggggcaatagtctgaccttgattgaccttcccggccatgagagtttgaggcttcagttcttagagcggtttaagtcttcagccggggctattgtgtttgttgtggatagtgcagcattccagcgagaggtgaaagatgtggctgagtttctgtatcaagtcctcattgacagtatgggtctgaagaatacaccatcattcttaatagcctgcaataagcaagatattgcaatggcaaaatcagcaaagttaattcaacagcagctggagaaagaactcaacaccttacgagttacccgttctgctgcccccagcacactgtacagttccagcactgcccctgctcagctggggaagaaaggcaaagagtttgaattctcacagttgcccctcaaagtggagttcctggagtgcagtgccaagggtggaagaggggacgtgggctctgctgacatccaggacttggagaaatggctggctaaaattgcctgagaggcagctctaaagcacaagacctggatgtgtgacacacagttttggaaaaaggtctgtggtagtctggagttgatgaggaaggggtacaagatgtggttagaaacatttctttgttctggaaacaaagtactgttgaaaccagcttggaattttttttttttttttttttaagttcagttctcccttatggctgcctttcaaacaagtaccttttatctgatgcctgtatcttccctttgttaaggtgtaacttgatgtagggtcaaggtttttgtgacaacaggcagactccacacagagaggatatgatgagaatatggccatcacctgaaaagttttcttatcttctgtgcttttggtccctggaaacaaatccgcctatgtatgaagctagttgatttccagttgcactatttccagttgcctctgaagttcacaggcaatacattgtctagtcctttgcgaatttctctgatttgtgggcacagttatgaagtttccccacatgtgaagacaggtacaaaatagcagagccaagcagacagtgggtctattcttcattagctcagtgacttgtccacactcgtcttagcacttacgtttcaaaagcttgtcacaaacccttggagtcattcccagataatagaactggaaatgataaatcccctaatgccaagggtctagtgtgttcttagtggttatactgggaagtgtgtggagatttaggtgctgctctgctgctctggatggctgaaggctcctgggccatcttcatgtgctgcttgaagagctcctattttgtactcctggctagaatgctgtggaacaaatacaaagtgaaaaaagttctctgtagatttctgaagtgcatattcattgatgccaagaaaaaaaaaaagttgcctttttg

SEQ ID NO: 2357 - DNA, 4346 bp, Homo sapiens
gcgtgggcgccagaaagcggaacctcccgggccagtcgcgcggtggtcaccctcttgggagctggggaggaggctgcggaggctggcccggctccttcgggcgtcgcttcccggaccgggtgcgcggggtcccccggaacgtgtgttccaggtcctcccgcgccagtgttcgcagtccccgcctggtcgcggcggcgcctcgggcgcgggtgcaggcgcgcggcgcgcaggcggggggcgctgtggtcttggcgcggggaccgagccgctcggccagacccgcctcttttccctccccgccagcccgcccgcctgcccgccccccacgcgtcgtgtcgccgggaagccgggcggagacagagcgcttgggatccacggcgctcggaccgctgtcctccaacagcgcagggcagagcggctggcgccgccggagcgcggagccacgaccctccctggccgcctttgtctactggccgtgcggcccggaaccgccactctccagggccggggacgcgcccgcagctgtcggtgacagctcctccctaccgcaaccctccggggcggaggggcggtcgggccgggccctgctagcccgcgaccgcaagcccgcgctcgcggatcgatgcccccgcagcagggggaccccgcgttccccgaccgctgcgaggcgcctccggtgccgccgcgtcgggagcgcggtggacgcgggggacgcgggcctggggagccggggggccgggggcgtgcggggggtgccgaggggcgcggcgtcaagtgcgtgctggtcggcgacggcgcggtgggcaagacgagcctggtggtgagctacaccaccaacggctaccccaccgagtacatccctactgccttcgacaacttctccgcggtggtgtctgtggatgggcggcccgtgagactccaactctgtgacactgccggacaggatgaatttgacaagctgaggcctctctgctacaccaacacagacatcttcctgctctgcttcagtgtcgtgagcccctcatccttccagaacgtcagtgagaaatgggtgccggagattcgatgccactgtcccaaagcccccatcatcctagttggaacgcagtcggatctcagagaagatgtcaaagtcctcattgagttggacaaatgcaaagaaaagccagtgcctgaagaggcggctaagctgtgcgccgaggaaatcaaagccgcctcctacatcgagtgttcagccttgactcaaaaaaacctcaaagaggtctttgatgcagccatcgtcgctggcattcaatactcggacactcagcaacagccaaagaagtctaaaagcaggactccagataaaatgaaaaacctctccaagtcctggtggaagaagtactgctgtttcgtatgatgctggcaagacacccagaaaggctattttcagatgaaatcgatattagaagctatattagctgaaacaactccttttactgcgtagaacctatatcgagagtgtgtgtatatgtattataggaggagctctcaattttatgtattctttctgcctttaattttcttgtttgtttgagcttagggatgagatacttatgcaagatatttttgaagtaaattaaacatttttcacatctctggaaatttagagttctagacctctggttaatttatatctaatatgaagaagacacctctaatctggatgttaagaatgaagttctgctacattataatgtacagaagagcaaaagggaggaacactatggttaaccctctcttgattaagggctacttaatgcacagtgcattatgtacacaggtcaaccatggtaacaatagttcttagctttgaaactccatgcaaaccatgccttttttttaaggagcaaaaatctgagaaaaaaagtgagagacctctgcctacaaaacctcaaaccagtcacttttgtcaattgctaatacccagttacttatgatttaaaaacaaccaacagaaaacatcccactgactgtatggcactctgtagtcaaaaaaggaaacttccttattgggacttttctttcttagtccagttgtgttgacacatatgaacacagacaaagtgctatgcggaggaaagcaagtgttggtcagtagtttcatgttttagggagtggttcctgtggagatcagaaagtgacatttgctttcggtactgtaatacgtgcaccaaactgcctcaatcctaggtaacgagggcaacagggagcacctgtctggattgtttttaaacctccatactcaagctgtctcttcggcagggaggtgaatactcttgaaaggccaacagcaagtgtttgtgggacacaacacagataattttttcttaagtcggccaagatgtacttctctgtgtgcacacccatgcacactcatgcacacagatacataggtctgtatggctgtatttgctgttgattcagactttcacaccattaatggggaaaagcgtggccacaaaaacagatgctaggaagcttggcttcctcttcttgttgacccttttttgaaccaacatcttttttattatattcagagtatgtttttaagtgtatcttaatatatacattttttaggacatcttaaatctaaacaaaaaataaaatgaacatctcttgaaacctgttaaaacaaccagttaaagccacagatggctttcagggcagtagcagcagaggccagtggactctgaggactcctgaggggcggggcgtgtagccagccaggtgcatgccgggaccatggcccccatacttggctgcttcctgtgacagtgaaatacatccttcaaggtggcagctgttagggctgaatcttctggagaaaaaggtgccatctcaggagaatagcttttactctggtaggaatgcttccgagacaccacaaggcagcctgaacactcagttgcagggtcgggcttgcggtgggtgacccagagccaccaaagtcacatccacaactaatgagggaaatctgtaaagccagttagatagaagaattttatttttctgtgggttttgtgttgtcttttttatgttaaaaagaaatccagtttgtgtttttctatagaaaaagtaaaagatcaggttatactttaggttaggggttctatttattcctgttagtaaataaaattaacaaatttctttgtttaacaaaagattaatctttaaaccactaaaatacatagactgattgattattcaacacattggaattgatgtcggtcatagtttcctgaagcatttagttacaacctgaaggaataaaatgatttgtggaaatgcttaaaatagacctaactgaatacagtctcatcttgccgcgcctggcttacctatctgtggaaagctaggcttcccaggctgggctctgcctgtctggtgcctggaggtgtgggagggaagatgagttatttaactggtaagcgatttgaaacactatttttatattaaagtaaatggcatggagtatagtgcaaattcatttttaagatagaacacaaaacttgaaagaagttttatgcgtgtgacagtgtatggggctgcagttggtctccctggaggggacttccacacctcctgcctttaggcatgggtggaaagtgctcagtgaagtacacctgtgtggcccagttctgaaagctttatacagttgaattttaagtggggttgataacaccttggactgttagtgttaaaaatctagtgggttgacctttaaatgcaacagtttttaaaatatattgctgcattttatagaatagtaaaggtacgattatacttgagattttcctccatttttatttcttcgtgaacatagagtttggggccgaaaatgtttttaaagtatgtgtttgagttaaatataaagttggttcacttcaaagctaaaaaattgttaaacttgcagcttggtattgcagagaagattttataagaattttgctttagagaatgccactttggctgaactacaagtgtaggccaccattataatttataaatacagcatacttcaaaactgtttgttatctcttgttaccatgtatgtataaatggaccttttataaccttgttctctgcttgacagactcaagagaaactacccaggtattacacaagccaaaatgggagcaaggccttctctccagactatcgtaacctggtgccttaccaagttgtgcttttctgttttcaagtgtaaatgatgttgagcagaatgttgtacttgaaaatgctataagtgagatggtatgaaataaattctgacttatgaataaaaaaaaaaaaaaaaaaaaaaa

SEQ ID NO: 2358 - DNA, 3396 bp, Homo sapiens
cgcccgggcaggtgtttatactccggagggtgtccccgtgcgtcatcggtggagtggaccaaaactggtgatctgtttgccctgtgtgaccttgcccagaaccctgctgactgagagaacacatctgctggaagtcctctgggattcaaggtacagggaatgaagagtagttttacagaaaaaagaggacaatattgggatcacctttgacctttccatttggaaataatattttctattgtgttatagaaaggtgggaagctttcatccagaacaatgaatttcataaaggacaatagccgagcccttattcaaagaatgggaatgactgttataaagcaaatcacagatgacctatttgtatggaatgttctgaatcgcgaagaagtaaacatcatttgctgcgagaaggtggagcaggatgctgctagagggatcattcacatgattttgaaaaagggttcagagtcctgtaacctctttcttaaatcccttaaggagtggaactatcctctatttcaggacttgaatggacaaagtctttttcatcagacatcagaaggagacttggacgatttggctcaggatttaaaggacttgtaccataccccatcttttctgaacttttatccccttggtgaagatattgacattatttttaacttgaaaagcaccttcacagaacctatcctgtggaggaaggaccaacaccatcaccgcgtggagcagctgaccctgaatggcctcctgcaggctcttcagagcccctgcatcattgaaggggaatctggcaaaggcaagtccactctgctgcagcgcattgccatgctctggggctccggaaagtgcaaggctctgaccaagttcaaattcgtcttcttcctccgtctcagcagggcccagggtggactttttgaaaccctctgtgatcaactcctggatatacctggcacaatcaggaagcagacattcatggccatgctgctgaagctgcggcagagggttcttttccttcttgatggctacaatgaattcaagccccagaactgcccagaaatcgaagccctgataaaggaaaaccaccgcttcaagaacatggtcatcgtcaccactaccactgagtgcctgaggcacatacggcagtttggtgccctgactgctgaggtgggggatatgacagaagacagcgcccaggctctcatccgagaagtgctgatcaaggagcttgctgaaggcttgttgctccaaattcagaaatccaggtgcttgaggaatctcatgaagacccctctctttgtggtcatcacttgtgcaatccagatgggtgaaagtgagttccactctcacacacaaacaacgctgttccataccttctatgatctgttgatacagaaaaacaaacacaaacataaaggtgtggctgcaagtgacttcattcggagcctggaccaccgtggagacctagctctggagggtgtgttctcccacaagtttgatttcgaactgcaggatgtgtccagcgtgaatgaggatgtcctgctgacaactgggctcctctgtaaatatacagctcaaaggttcaagccaaagtataaattctttcacaagtcattccaggagtacacagcaggacgaagactcagcagtttattgacgtctcatgagccagaggaggtgaccaaggggaatggttacttgcagaaaatggtttccatttcggacattacatccacttatagcagcctgctccggtacacctgtgggtcatctgtggaagccaccagggctgttatgaagcacctcgcagcagtgtatcaacacggctgccttctcggactttccatcgccaagaggcctctctggagacaggaatctttgcaaagtgtgaaaaacaccactgagcaagaaattctgaaagccataaacatcaattcctttgtagagtgtggcatccatttatatcaagagagtacatccaaatcagccctgagccaagaatttgaagctttctttcaaggtaaaagcttatatatcaactcagggaacatccccgattacttatttgacttctttgaacatttgcccaattgtgcaagtgccctggacttcattaaactggacttttatgggggagctatggcttcatgggaaaaggctgcagaagacacaggtggaatccacatggaagaggccccagaaacctacattcccagcagggctgtatctttgttcttcaactggaagcaggaattcaggactctggaggtcacactccgggatttcagcaagttgaataagcaagatatcagatatctggggaaaatattcagctctgccacaagcctcaggctgcaaataaagagatgtgctggtgtggctggaagcctcagtttggtcctcagcacctgtaagaacatttattctctcatggtggaagccagtcccctcaccatagaagatgagaggcacatcacatctgtaacaaacctgaaaaccttgagtattcatgacctacagaatcaacggctgccgggtggtctgactgacagcttgggtaacttgaagaaccttacaaagctcataatggataacataaagatgaatgaagaagatgctataaaactagctgaaggcctgaaaaacctgaagaagatgtgtttatttcatttgacccacttgtctgacattggagagggaatggattacatagtcaagtctctgtcaagtgaaccctgtgaccttgaagaaattcaattagtctcctgctgcttgtctgcaaatgcagtgaaaatcctagctcagaatcttcacaatttggtcaaactgagcattcttgatttatcagaaaattacctggaaaaagatggaaatgaagctcttcatgaactgatcgacaggatgaacgtgctagaacagctcaccgcactgatgctgccctggggctgtgacgtgcaaggcagcctgagcagcctgttgaaacatttggaggaggtcccacaactcgtcaagcttgggttgaaaaactggagactcacagatacagagattagaattttaggtgcattttttggaaagaaccctctgaaaaacttccagcagttgaatttggcgggaaatcgtgtgagcagtgatggatggcttgccttcatgggtgtatttgagaatcttaagcaattagtgttttttgactttagtactaaagaatttctacctgatccagcattagtcagaaaacttagccaagtgttatccaagttaacttttctgcaagaagctaggcttgttgggtggcaatttgatgatgatgatctcagtgttattacaggtgcttttaaactagtaactgcttaaataaagtgtactcgaagccaaaaaaaaaaaaaaaaaaaaaaaaaa

SEQ ID NO: 2359 - DNA, 1887 bp, Homo sapiens
atggggagctgcgcgcggctgctgctgctctggggctgcacggtggtggccgcaggactgagtggagtagctggagtgagttcccgctgtgaaaaagcctgcaaccctcggatgggaaatttggctttggggcgaaaactctgggcagacaccacctgcggtcagaatgctaccgaactgtactgcttctacagtgagaacaaggatctgacttgtcggcagcccaaatgtgacaagtgcaatgctgcctatcctcacctggctcacctgccatctgccatggcagactcatccttccggtttcctcgcacatggtggcagtctgcggaggatgtgcacagagaaaagatccagttagacctggaagctgaattctacttcactcacctaattgtgatgttcaagtcccccaggccggctgccatggtgctggaccgctcccaggactttgggaaaacatggaagccttataagtactttgcgactaactgctccgctacatttggcctggaagatgatgttgtcaagaagggcgctatttgtacttctaaatactccagtccttttccatgcactggaggagaggttattttcaaagctttgtcaccaccacacgatacagagaacccttacagtgccaaagttcaggagcagctgaagatcaccaaccttcgcgtgcagctgctgaaacgacagtcttgtccctgtcagagaaatgacctgaacgaagagcctcaacattttacacactatgcgatctatgatttcattgtcaagggcagctgcttctgcaatggccacgccgatcaatgcatacctgttcatggcttcagacctgtcaaggccccaggaacattccacatggtccatgggaagtgtatgtgtaagcacaacacagcaggcagccactgccagcactgtgccccgttatacaatgaccggccatgggaggcagctgatggcaaaacgggggctcccaacgagtgcagagcctgcaagtgtaatgggcatgctgatacctgtcacttcgacgttaatgtgtgggaggcatcagggaatcgtagtggtggtgtctgtgatgactgtcagcacaacacagaaggacagtattgccagaggtgcaagccaggcttctatcgtgacctgcggagacccttctcagctccagatgcttgcaaaccgtgttcctgccatccagtaggatcagctgtccttcctgccaactcagtgaccttctgcgaccccagcaatggtgactgcccttgcaagcctggggtggcagggcgacgttgtgacaggtgcatggtgggatactggggcttcggagactatggctgtcgaccatgtgactgtgcggggagctgtgaccctatcaccggagactgcatcagcagccacacagacatagactggtgtcatgaagttcctgacttccgtcccgtgcacaataagagcgaaccagcctgggagtgggaggatgcgcaggggttttctgcacttctacactcaggtaaatgcgaatgtaaggaacagacattaggaaatgccaaggcattctgtggaatgaaatattcatatgtgctaaaaataaagattttatcagctcatgataaaggtactcatgttgaggtcaatgtgaagattaaaaaggtcttaaaatctaccaaactgaagattttccgaggaaagcgaacattatatccagaatcatggacggacagaggatgcacttgtccaatcctcaatcctggtttggaataccttgtagcaggacatgaggatataagaacaggcaaactaattgtgaatatgaaaagctttgtccagcactggaaaccttctcttggaagaaaagtcatggatattttaaaaagagagtgcaagtag

SEQ ID NO: 2360 - DNA, 12689 bp, Homo sapiens
aaaattccttagttgctggctttgaccttttatgttgctgagttttacacatctattttctcaactgccatatcctagggggcttggagtacccataatacagtgagcccaccttcctggtccccagacatttcagaaggtcgggaaatttttaaacccaggcagcttcctggcagtgccatttggagcatcaaagtgggccgtgggtctggatttccaggaaagcggagacctcgaggtgcaggactgtcggggcgaggtggccgaggcaggtcaaagctgaaaagtggaatcggagctgttgtattacctggggtgtctactgcagatatttcatcaaataaggatgatgaagaaaactctatgcacaatacagttgtgttgttttctagcagtgacaagttcactttgaatcaggatatgtgtgtagtttgtggcagttttggccaaggagcagaaggaagattacttgcctgttctcagtgtggtcagtgttaccatccatactgtgtcagtattaagatcactaaagtggttcttagcaaaggttggaggtgtcttgagtgcactgtgtgtgaggcctgtgggaaggcaactgacccaggaagactcctgctgtgtgatgactgtgacataagttatcacacctactgcctagaccctccattgcagacagttcccaaaggaggctggaagtgcaaatggtgtgtttggtgcagacactgtggagcaacatctgcaggtctaagatgtgaatggcagaacaattacacacagtgcgctccttgtgcaagcttatcttcctgtccagtctgctatcgaaactatagagaagaagatcttattctgcaatgtagacaatgtgatagatggatgcatgcagtttgtcagaacttaaatactgaggaagaagtggaaaatgtagcagacattggttttgattgtagcatgtgcagaccctatatgcctgcgtctaatgtgccttcctcagactgctgtgaatcttcacttgtagcacaaattgtcacaaaagtaaaagagctagacccacccaagacttatacccaggatggtgtgtgtttgactgaatcagggatgactcagttacagagcctcacagttacagttccaagaagaaaacggtcaaaaccaaaattgaaattgaagattataaatcagaatagcgtggccgtccttcagacccctccagacatccaatcagagcattcaagggatggtgaaatggatgatagtcgagaaggagaacttatggattgtgatggaaaatcagaatctagtcctgagcgggaagctgtggatgatgaaactaagggagtggaaggaacagatggtgtcaaaaagagaaaaaggaaaccatacagaccaggtattggtggatttatggtgcggcaaagaagtcgaactgggcaagggaaaaccaaaagatctgtgatcagaaaagattcctcaggctctatttccgagcagttaccttgcagagatgatggctggagtgagcagttaccagatactttagttgatgaatctgtttctgttactgaaagcactgaaaaaataaagaagagataccgaaaaaggaaaaataagcttgaagaaactttccctgcctatttacaagaagctttctttggaaaagatcttctagatacaagtagacaaagcaagataagtttagataatctgtcagaagatggagctcagcttttatataaaacaaacatgaacacaggtttcttggatccttccttagatccactacttagttcatcctcggctccaacaaaatctggaactcacggtcctgctgatgacccattagctgatatttctgaagttttaaacacagatgatgacattcttggaataatttcagatgatctagcaaaatcagttgatcattcagatattggtcctgtcactgatgatccttcctctttgcctcagccaaatgtcaatcagagttcacgaccattaagtgaagaacagctagatgggatcctcagtcctgaactagacaaaatggtcacagatggagcaattcttggaaaattatataaaattccagagcttggcggaaaagatgttgaagacttatttacagctgtacttagtcctgcgaacactcagccaactccattgccacagcctcccccaccaacacagctgttgccaatacacaatcaggatgctttttcacggatgcctctcatgaatggccttattggatccagtcctcatctcccacataattctttgccacctggaagcggactgggaactttctctgcaattgcacaatcctcttatcctgatgccagggataaaaattcagcctttaatccaatggcaagtgatcctaacaactcttggacatcatcagctcccactgtggaaggagaaaatgacacaatgtcgaatgcccagagaagcacgcttaagtgggagaaagaggaggctctgggtgaaatggcaactgttgccccagttctctacaccaatattaatttccccaacttaaaggaagaattccctgattggactactagagtgaagcaaattgccaaattgtggagaaaagcaagctcacaagaaagagcaccatatgtgcaaaaagccagagataacagagctgctttacgcattaataaagtacagatgtcaaatgattccatgaaaaggcagcaacagcaagatagcattgatcccagctctcgtattgattcggagctttttaaagatcctttaaagcaaagagaatcagaacatgaacaggaatggaaatttagacagcaaatgcgtcagaaaagtaagcagcaagctaaaattgaagccacacagaaacttgaacaggtgaaaaatgagcagcagcagcagcaacaacagcaatttggttctcagcatcttctggtgcagtctggttcagatacaccaagtagtgggatacagagtcccttgacacctcagcctggcaatggaaatatgtctcctgcacagtcattccataaagaactgtttacaaaacagccacccagtacccctacgtctacatcttcagatgatgtgtttgtaaagccacaagctccacctcctcctccagccccatcccggattcccatccaggatagtctttctcaggctcagacttctcagccaccctcaccgcaagtgttttcacctgggtcctctaactcacgaccaccatctccaatggatccatatgcaaaaatggttggtacccctcgaccacctcctgtgggccatagtttttccagaagaaattctgctgcaccagtggaaaactgtacacctttatcatcggtatctaggccccttcaaatgaatgagacaacagcaaataggccatcccctgtcagagatttatgttcttcttccacgacaaataatgacccctatgcaaaacctccagacacacctaggcctgtgatgacagatcaatttcccaaatccttgggcctatcccggtctcctgtagtttcagaacaaactgcaaaaggccctatagcagctggaaccagtgatcactttactaaaccatctcctagggcagatgtgtttcaaagacaaaggatacctgactcatatgcacgacccttgttgacacctgcacctcttgatagtggtcctggaccttttaagactccaatgcaacctcctccatcctctcaggatccttatggatcagtgtcacaggcatcaaggcgattgtctgttgacccttatgaaaggcctgctttgacaccaagacctatagataatttttctcataatcagtcaaatgatccatatagtcagcctccccttaccccacatccagcagtgaatgaatcttttgcccatccttcaagggctttttcccagcctggaaccatatcaaggccaacatctcaggacccatactcccaacccccaggaactccacgacctgttgtagattcttattcccaatcttcaggaacagctaggtccaatacagacccttactctcaacctcctggaactccccggcctactactgttgacccatatagtcagcagccccaaaccccaagaccatctacacaaactgacttgtttgttacacctgtaacaaatcagaggcattctgatccatatgctcatcctcctggaacaccaagacctggaatttctgtcccttactctcagccaccagcaacaccaaggccaaggatttcagagggttttactaggtcctcaatgacaagaccagtcctcatgccaaatcaggatcctttcctgcaagcagcacaaaaccgaggaccagctttacctggcccgttggtaaggccacctgatacatgttcccagacacctaggccccctggacctggtctttcagacacatttagccgtgtttccccatctgctgcccgtgatccctatgatcagtctccaatgactccaagatctcagtctgactcttttggaacaagtcaaactgcccatgatgttgctgatcagccaaggcctggatcagaggggagcttctgtgcatcttcaaactctccaatgcactcccaaggccagcagttctctggtgtctcccaacttcctggacctgtgccaacttcaggagtaactgatacacagaatactgtaaatatggcccaagcagatacagagaaattgagacagcggcagaagttacgtgaaatcattctccagcagcaacagcagaagaagattgcaggtcgacaggagaaggggtcacaggactcacccgcagtgcctcatccagggcctcttcaacactggcaaccagagaatgttaaccaggctttcaccagacccccacctccctatcctgggaacattaggtctcctgttgcccctcctttaggacctagatatgctgttttcccaaaagatcagcgtggaccctatcctcctgatgttgctagtatggggatgagacctcatggatttagatttggatttccaggaggtagtcatggtaccatgccgagtcaagagcgcttccttgtgcctcctcagcaaatacagggatctggagtttctccacagctaagaagatcagtatctgtagatatgcctaggcctttaaataactcacaaatgaataatccagttggacttcctcagcatttttcaccacagagcttgccagttcagcagcacaacatactgggccaagcatatattgaactgagacatagggctcctgacggaaggcaacggctgcctttcagtgctccacctggcagcgttgtagaggcatcttctaatctgagacatggaaacttcattccccggccagactttccgggccctagacacacagaccccatgcgacgacctccccagggtctacctaatcagctacctgtgcacccagatttggaacaagtgccaccatctcaacaagagcaaggtcattctgtccattcatcttctatggtcatgaggactctgaaccatccactaggtggtgaattttcagaagctcctttgtcaacatctgtaccgtctgaaacaacgtctgataatttacagataaccacccagccttctgatggtctagaggaaaaacttgattctgatgacccttctgtgaaggaactggatgttaaagaccttgagggggttgaagtcaaagacttagatgatgaagatcttgaaaacttaaatttagatacagaggatggcaaggtagttgaattggatactttagataatttggaaactaatgatcccaacctggatgacctcttaaggtcaggagagtttgatatcattgcatatacagatccagaacttgacatgggagataagaaaagcatgtttaatgaggaactagaccttccaattgatgataagttagataatcagtgtgtatctgttgaaccaaaaaaaaaggaacaagaaaacaaaactctggttctctctgataaacattcaccacagaaaaaatccactgttaccaatgaggtaaaaacggaagtactgtctccaaattctaaggtggaatccaaatgtgaaactgaaaaaaatgatgagaataaagataatgttgacactccttgctcacaggcttctgctcactcagacctaaatgatggagaaaagacttctttgcatccttgtgatccagatctatttgagaaaagaaccaatcgagaaactgctggccccagtgcaaatgtcattcaggcatccactcaactacctgctcaagatgtaataaactcttgtggcataactggatcaactccagttctctcaagtttacttgctaatgagaaatctgataattcagacattaggccatcggggtctccaccaccaccaactctgccggcctccccatccaatcatgtgtcaagtttgcctcctttcatagcaccgcctggccgtgttttggataatgccatgaattctaatgtgacagtagtctctagggtaaaccatgttttttctcagggtgtgcaggtaaacccagggctcattccaggtcaatcaacagttaaccacagtctggggacaggaaaacctgcaactcaaactgggcctcaaacaagtcagtctggtaccagtagcatgtctggaccccaacagctaatgattcctcaaacattagcacagcagaatagagagaggccccttcttctagaagaacagcctctacttctacaggatcttttggatcaagaaaggcaagaacagcagcagcaaagacagatgcaagccatgattcgtcagcgatcagaaccgttcttccctaatattgattttgatgcaattacagatcctataatgaaagccaaaatggtggcccttaaaggtataaataaagtgatggcacaaaacaatctgggcatgccaccaatggtgatgagcaggttcccttttatgggccaggtggtaactggaacacagaacagtgaaggacagaaccttggaccacaggccattcctcaggatggcagtataacacatcagatttctaggcctaatcctccaaattttggtccaggctttgtcaatgattcacagcgtaagcagtatgaagagtggctccaggagacccaacagctgcttcaaatgcagcagaagtatcttgaagaacaaattggtgctcacagaaaatctaagaaggccctttcagctaaacaacgtactgccaagaaagctgggcgtgaatttccagaggaagatgcagaacaactcaagcatgttactgaacagcaaagcatggttcagaaacagctagaacagattcgtaaacaacagaaagaacatgctgaattgattgaagattatcggatcaaacagcagcagcaatgtgcaatggccccacctaccatgatgcccagtgtccagccccagccacccctaattccaggtgccactccacccaccatgagccaacccacctttcccatggtgccacagcagcttcagcaccagcagcacacaacagttatttctggccatactagccctgttagaatgcccagtttacctggatggcaacccaacagtgctcctgcccacctgcccctcaatcctcctagaattcagcccccaattgcccagttaccaataaaaacttgtacaccagccccagggacagtctcaaatgcaaatccacagagtggaccaccacctcgggtagaatttgatgacaacaatccctttagtgaaagttttcaagaacgggaacgtaaggaacgtttacgagaacagcaagagagacaacggatccaactcatgcaggaggtagatagacaaagagctttgcagcagaggatggaaatggagcagcatggtatggtgggctctgagataagtagtagtaggacatctgtgtcccagattcccttctacagttccgacttaccttgtgattttatgcaacctctaggaccccttcagcagtctccacaacaccaacagcaaatggggcaggttttacagcagcagaatatacaacaaggatcaattaattcaccctccacccaaactttcatgcagactaatgagcgaaggcaggtaggccctccttcatttgttcctgattcaccatcaatccctgttggaagcccaaatttttcttctgtgaagcagggacatggaaatctttctgggaccagcttccagcagtccccagtgaggccttcttttacacctgctttaccagcagcacctccagtagctaatagcagtctcccatgtggccaagattctactataacccatggacacagttatccgggatcaacccaatcgctcattcagttgtattctgatataatcccagaggaaaaagggaaaaagaaaagaacaagaaagaagaaaagagatgatgatgcagaatccaccaaggctccatcaactccccattcagatataactgccccaccgactccaggcatctcagaaactacctctactcctgcagtgagcacacccagtgagcttcctcaacaagccgaccaagagtcggtggaaccagtcggcccatccactcccaatatggcagcaggccagctatgtacagaattagagaacaaactgcccaatagtgatttctcacaagcaactccaaatcaacagacgtatgcaaattcagaagtagacaagctctccatggaaacccctgccaaaacagaagagataaaactggaaaaggctgagacagagtcctgcccaggccaagaggagcctaaattggaggaacagaatggtagtaaggtagaaggaaacgctgtagcctgtcctgtctcctcagcacagagtcctccccattctgctggggcccctgctgccaaaggagactcagggaatgaacttctgaaacacttgttgaaaaataaaaagtcatcttctcttttgaatcaaaaacctgagggcagtatttgttcagaagatgactgtacaaaggataataaactagttgagaagcagaacccagctgaaggactgcaaactttgggggctcaaatgcaaggtggttttggatgtggcaaccagttgccaaaaacagatggaggaagtgaaaccaagaaacagcgaagcaaacggactcagaggacgggtgagaaagcagcacctcgctcaaagaaaaggaaaaaggacgaagaggagaaacaagctatgtactctagcactgacacgtttacccacttgaaacaggtgaggcagctctctctgctccctctaatggaaccaatcattggagtgaactttgcgcactttcttccttatggcagtggccaatttaatagtgggaatcgacttctaggaacttttggcagtgctaccctggaaggggtttcggactactattctcagttgatctacaagcagaataatttaagtaatcctccaacaccccctgcctctcttcctcctacaccacctcctatggcttgtcagaagatggccaatggttttgcaacaactgaagaacttgctggaaaagccggagtgttagtgagccatgaagttaccaaaactctaggacctaaaccatttcagctgcccttcagaccccaggacgacttgttggcccgagctcttgctcagggccccaagacagttgatgtgccagcctccctcccaacaccacctcataacaatcaggaagaattaaggatacaggatcactgtggtgatcgagatactcctgacagttttgttccctcatcctctcctgagagtgtggttggggtagaagtgagcaggtatccagatctgtcattggtcaaggaggagcctccagaaccggtgccgtcccccatcattccaattcttcctagcactgctgggaaaagttcagaatcaagaaggaatgacatcaaaactgagccaggcactttatattttgcgtcaccttttggtccttccccaaatggtcccagatcaggtcttatatctgtagcaattactctgcatcctacagctgctgagaacattagcagtgttgtggctgcattttccgaccttcttcacgtccgaatccctaacagctatgaggttagcagtgctccagatgtcccatccatgggtttggtcagtagccacagaatcaacccgggtttggagtatcgacagcatttacttctccgtgggcctccgccaggatctgcaaaccctcccagattagtgagctcttaccggctgaagcagcctaatgtaccatttcctccaacaagcaatggtctttctggatataaggattctagtcatggtattgcagaaagcgcagcactcagaccacagtggtgttgtcattgtaaagtggttattcttggaagtggtgtgcggaaatctttcaaagatctgacccttttgaacaaggattcccgagaaagcaccaagagggtagagaaggacattgtcttctgtagtaataactgctttattctttattcatcaactgcacaagcgaaaaactcagaaaacaaggaatccattccttcattgccacaatcacctatgagagaaacgccttccaaagcatttcatcagtacagcaacaacatctccactttggatgtgcactgtctcccccagctcccagagaaagcttctccccctgcctcaccacccatcgccttccctcctgcttttgaagcagcccaagtcgaggccaagccagatgagctgaaggtgacagtcaagctgaagcctcggctaagagctgtccatggtgggtttgaagattgcaggccgctcaataaaaaatggagaggaatgaaatggaagaagtggagcattcatattgtaatccctaaggggacatttaaaccaccttgtgaggatgaaatagatgaatttctaaagaaattgggcacttcccttaaacctgatcctgtgcccaaagactatcggaaatgttgcttttgtcatgaagaaggtgatggattgacagatggaccagcaaggctactcaaccttgacttggatctgtgggtccacttgaactgcgctctgtggtccacggaggtctatgagactcaggctggtgccttaataaatgtggagctagctctgaggagaggcctacaaatgaaatgtgtcttctgtcacaagacgggtgccactagtggatgccacagatttcgatgcaccaacatttatcacttcacttgcgccattaaagcacaatgcatgttttttaaggacaaaactatgctttgccccatgcacaaaccaaagggaattcatgagcaagaattaagttactttgcagtcttcaggagggtctatgttcagcgtgatgaggtgcgacagattgctagcatcgtgcaacgaggagaacgggaccatacctttcgcgtgggtagcctcatcttccacacaattggtcagctgcttccacagcagatgcaagcattccattctcctaaagcactcttccctgtgggctatgaagccagccggctgtactggagcactcgctatgccaataggcgctgccgctacctgtgctccattgaggagaaggatgggcgcccagtgtttgtcatcaggattgtggaacaaggccatgaagacctggttctaagtgacatctcacctaaaggtgtctgggataagattttggagcctgtggcatgtgtgagaaaaaagtctgaaatgctccagcttttcccagcgtatttaaaaggagaggatctgtttggcctgaccgtctctgcagtggcacgcatagcggaatcacttcctggggttgaggcatgtgaaaattataccttccgatacggccgaaatcctctcatggaacttcctcttgccgttaaccccacaggttgtgcccgttctgaacctaaaatgagtgcccatgtcaagaggcctcacaccttaaacagcaccagcacctcaaagtcatttcagagcacagtcactggagaactgaacgcaccttatagtaaacagtttgttcactccaagtcatcgcagtaccggaagatgaaaactgaatggaaatccaatgtgtatctggcacggtctcggattcaggggctgggcctgtatgctgctcgagacattgagaaacacaccatggtcattgagtacatcgggactatcattcgaaacgaagtagccaacaggaaagagaagctttatgagtctcagaaccgtggtgtgtacatgttccgcatggataacgaccatgtgattgacgcgacgctcacaggagggcccgcaaggtatatcaaccattcgtgtgcacctaattgtgtggctgaagtggtgacttttgagagaggacacaaaattatcatcagctccagtcggagaatccagaaaggagaagagctctgctatgactataagtttgactttgaagatgaccagcacaagattccgtgtcactgtggagctgtgaactgccggaagtggatgaactgaaatgcattccttgctagctcagcgggcggcttgtccctaggaagaggcgattcaacacaccattggaattttgcagacagaaagagatttttgttttctgttttatgactttttgaaaaagcttctgggagttctgatttcctcagtcctttaggttaaagcagcgccaggaggaagctgacagaagcagcgttcctgaagtggccgaggttaaacggaatcacagaatggtccagcacttttgcttt

SEQ ID NO: 2361 - DNA, 1017 bp, Homo sapiens
gactagcgggccggcgtactggcctggtccagcacctgcggggccctcgggcttggagggctgggccgggcggggaacgggcggggcgggccggaggcggcggcggctgactcgccttctctccggggctgcgaccccgaggcaaccggctgcagatgggagcccgcggagccgaggatgcgggcgggccggggcgcgacgccggcgagggagctgttccgggacgccgccttccccgccgcggactcctcgctcttctgcgacttgtctacgccgctggcccagttccgcgaggacatcacgtggaggcggccccaggtcccagagggtggaaggagccaggacgcacccccactgctgctgcaggagccgctgctgagctgcgtgccacatcgctacgcccaggaggtgagccggctctgcctcctgcctgcaggcacctacaaggttgtgccctccacctacctgccggacacagagggggccttcacagtgaccatcgcaaccaggattgacaggccatccattcacagccaggagatgctgggccagttcctccaagaggtctccgtcatggcagtgatgaaaacctaacagggtggccccctgtgccagctcaggtgactggagcccgagggcctgacaggttcccagcagctgggccggccagccttgcactgtgggggctggtcctgagtcttggcctgcctcccagccctgccagggggctgcggcctaggggtccacgggaagcctccgtcaggagagacgcagccctgggggccagctggtgctgcaaggaagggtgggaagcttgctggcttctgttgcgccactgagacggcagagaccccaggatcccagagcttcccaggatccctcccagatcctctgctgactccatatggaggcctcacacccagagggtagggcagcagatcttctttataactatttattgttcgaatcacttttaggatgtaactttataaataaacatgagcgctgatgatttgc

SEQ ID NO: 2362 - DNA, 2168 bp, Homo sapiens
gcacgagattcctttcttgtctgttagaaacgtatgtcaaacgaggatacagtgtctggaactattggttctaagatataagtggaatgagcctggatcaggagaagtatgctgagctagagttgaaggaagcttctctttctaacaagagaaagcagagttaaattatggcagagacaagtctgttagaggctggggcctctgcagcctctacagctgcggctttggagaacttacaggtggaggcgagctgctctgtgtgcctggagtatctgaaggaacctgtcatcattgagtgtgggcacaacttctgcaaagcttgcatcacccgctggtgggaggacctagagagggacttcccttgtcctgtctgtcgaaagacatcccgctaccgcagtctccgacctaatcggcaactaggcagtatggtggaaattgccaagcagctccaggccgtcaagcggaagatccgggatgagagcctctgcccccaacaccatgaggccctcagccttttctgttatgaggaccaggaggctgtatgcttgatatgtgcaatttcccacacccaccggccccacaccgttgtgccactggacgatgctacacaggagtacaaggaaaaactgcagaagtgtctggagcccctggaacagaagctgcaggagatcactcgctgcaagtcctctgaggagaagaagcctggtgagctcaagagactagtggaaagtcgccgacagcagatcttgagggagtttgaagagcttcataggcggctggatgaagagcagcaggtgttgctttcacgactggaagaagaggaacaggacattctgcagcgactccgagaaaatgctgctcaccttggggacaagcgccgggacctggcccacttggctgccgaggtggagggcaagtgcttacagtcaggcttcgagatgcttaaggatgtcaaaagtaccctggaaaagaatattcctagaaagttcggaggctcactctcaacgatctgtccacgggatcataaggctctccttggattagtaaaagaaatcaacagatgtgaaaaggtgaagaccatggaggtgacttcagtatccatagagctggaaaagaacttcagcaattttccccgacagtactttgccctaaggaaaatccttaaacagctaattgcggatgtgaccctggaccctgagacagctcatcctaacctagtcctgtcagaggatcgtaagagcgtcaagttcgtggagacaagactccgggatctccctgacacaccaaggcgtttcaccttctacccttgcgtcctggctactgagggtttcacctcaggtcgacactactgggaggtggaggtgggcgacaagacccactgggcagtgggtgtatgccgggactccgtgagccgaaagggcgagttgactccactccctgagactggctactggcgggtgcggctatggaatggggacaaatatgcagccaccaccacaccttttacccctttgcacatcaaggtgaaacccaagcgggtaggcatattcctagactatgaggccggcacactgtctttctacaatgtcacagaccgctctcatatctacaccttcactgatacttttactgagaaactttggcccctcttctacccaggcatccgggctggacggaagaatgctgcaccacttaccatcaggcccccaacagattgggagtgacaggttgggatgtgggaatgactggggtgaggcagggtcaagtgctacgggcctccttcccgtgtcctgctggaacgtcttcgtgtccacctgggtccagtcctgaatcatcttggagaaacaccttggtttctaggatggttttgtgtggagggggaggtaggactgggctggatgagagagcacagctgtgacttcctcctaactgtcagggtggggagctggttcccagaggattgtctaccctgaagtccatcaggttttctgtgcacaaggacgggtcaggaaggaaggagaggcttttccagaaacaaaaaatctgtgagggtctgacttgctcaaaccagaggaggaaacagaaacccctgcacatctttttagggggttctttgacccaggatagtcttgcttcttgaggtagatcacaggggtctgtgtacctct

SEQ ID NO: 2363 - DNA, 5786 bp, Homo sapiens
tcccagcttttcaaaagtttattttaagtttggagactagacaaggtcatactggttttacatcctacgtgatataagtatatatacaaagaaaaaaacaacattggaatattacacagcttgaaggtttgcaaaggttatttgtgtcttagttatttctgcacttaatgacacatcagacgcattgagtatatttcataagttgttgactagcaaagatacaatcattagtaacccaagtcttcaaaattcacaccaaactttatgaagtcattcagaaagagaaagtcaatcctaaaattaaaattggcaactatgataaataccttcaaaaggatgtagatataatggagatgtttaaaagtttagtttcattaattgtaaaattagcatgttatatttactcaatatagtgaagactagggggattcttacatgtattctacttatgggactgtactgggtttaggggggaatttacatagaataaatttacttcactttcatggtcatcgacatgaatgacacaaaagctacttcataatactactttacaatagttttcaacatttccatatggtgcgacccctttgctctcatcaattttgggtgtcatgagaacaataggtatcccgttggacatgatgtattgcgaagagcatataaagcagagggaaaatgaaaaagcaagagaaactcatttcaatgctttttctaaaaggtaacaaatataattttaatcaacttccttggaaaatatttttaaaacaggtatcaatagaaaaaattacaaaacatcatatgaagctataaataattttgaaaaactatatcatcataaagcgtaagtaataatcttaaaaatacactcttaagaaggtatgtaatttgcaaaggaaaatggctagatatctgatgggacagtaaaccttgaaagaaactggctaaagagtaagtgtgtgtatatttctgaacctaagtaattatttgtcacgactttaaaatttagccagttacaaatattttaaaatcctaactttaaagttatctaaaaaaggcaatatggaggaaatagtaattttgtttttgaaagatgttgaaaactgatcaccatttcagaggcttcaaattcataatttcataataagaacaagaagtagaaagcatatgggcaaggaacaaatatgtggccagccagtccccttagacgaactaattttgttcttattaaaaatgccaatacaattgactttctctttaaattcttcactatgattgaagaccactccatatatacatcattaagaaatgctgttaacacatggacagacaagacagtaacagtctagtggcttttgttatgcagcacaaatattaaaggaaaaaaatagcagtgttgcgtaggatcttaacatttcatacacataccatcctttcttttccaatacacttaatttaaaactccaataattctgtctaagccttataaaataaatacttgtaaagcttataaattagatgttgaagacttttatggaggcagtgtgagctttaatttgagagacatgtcaatgaaacctccagtatcaataacaaattgttatgataattgcttattttttcaggacctttgaagcaaaataaatagaaatcagttttcatcttgaaaatggtttactactttgtcattagtaaacactttgcttctcacaaataactccacctgtgccttcctgggaaactaccaccagtttcaaatctcaataagatgttagtttcacaggaaatgtggagctgaacaaagaaatgatgagtatgcttggccgaactatgcagcactatattaatatttctttgctaaatttttataaaataaacaaataagccgattttttaaagtaaatataaggatatgtaattaccatctaaatgaagatttaaatttaaagagacatatatattttttgttcttttgtgcaaactgagagtatgggattctttatgaagcaattatttggaaattaaatagttatggcttccttcaaaaataaaactgcagatttaattaacgaatattaaatacagatcaatctactgataggcagtcatgttctacatatatgagtaaacatgacacttcttttagtcaactaataggaaattcaattagaaaaaaattgaattattcaggtaatatacaatattaagaatgtagaatagaactaaaagaaaaagaagtcacataatctcttattagaaataatgaaagtaaaatgagaattataatatcagtactgcatgttacatattcttctttaaaattttgtaataaacattgacagtgtttggtaggcacagggaaacaggataacgtagagtcattacagaagaaaaaaacttattgctaacattgcagtattccttttatcagaattaggtgagtattgattgtaaaagctctatcaactcttgctcttatttgatgactttgagacttttttactcttgctataaaaagaaggctactttctttccctaatatatttctaccaatgcgaataattcaggaaacaatgagagaaaagtaattcacacttaatgtgttgttacttaagagatttgacggataaaataaaatcaaattaaatcattgaaaaggcaggcttagacccccttaaaaacaccgttagttgcctaccataatttgagcactttttcatgaaaaaaaaaaaaaaaccattcagtttcctacagattttgcacagttcattccatggagatacttttagggaaatagggaagagggttgtgaaatgtagcctcccctcattcctcctctgtgcagcccagcagctctgaccgcaatgtgatcctcccgtaccaggaccaaggaaggattcttatgtgtcgtgcatagatgggagggtcgatgacattttttctgtgagtgtcattgtcaaaatttccctggaaaacctaataaagaagagcagaaaaatgtcagtcacctcgtgccgaattcggcacgagcggacgtgctagatcttcacgaggctgggggcgaagatttcgccatggatgaggatggggacgagagcattcacaaactgaaagaaaaagcgaagaaacggaagggtcgcggctttggctccgaagaggggtcccgagcgcggatgcgtgaggattatgacagcgtggagcaggatggcgatgaacccggaccacaacgctctgttgaaggctggattctctttgtaactggagtccatgaggaagccaccgaagaagacatacacgacaaattcgcagaatatggggaaattaaaaacattcatctcaacctcgacaggcgaacaggatatctgaaggggtatactctagttgaatatgaaacatacaaggaagcccaggctgctatggagggactcaatggccaggatttgatgggacagcccatcagcgttgactggtgttttgttcggggtccaccaaaaggcaagaggagaggtggccgaagacgcagcagaagtccagaccggagacgtcgctgacaggtcctctgttgtccaggtgttctcttcaagattccatttgaccatgcagccttggacaaataggactggggtggaacttgctgtgtttatatttaatctcttaccgtatatgcgtagtatttgagttgcgaataaatgttccatttttgttttctacatttaatgttactttcctgtcctaaaattgaaagttctaaagcatagcaaggctgtatggatcattgtgaagatacttctagggactgaactctatgtatttcttttttttcttttttttgagatagagtcttgctgtgttacccagggtggattgcagctgatcatagctcactgcagcttcaaactcttgggctcaagccatccttctgcctcactgtccctagtagttgggattacaggcacatgccaccatgcccagctaaatttttaatatttttgtagagatggggtcttgctgtgttacctgggctagttatgtgagtttctatattagacatagtctcaagtttcaagtaggggtttaaagtagagacactggtcagtatttcttttttggggggaactaggagagcaggagtagaagtgagatgttaagatcttatggcactaaagacttactattctgttcctacatactctgttaggatcagatagatgttatagaaatgccttttgtttctcctgcccttcttgatgtcacagttttttgtacttccagctgtctaaaggcatgaatctcctcttggagcattctcccagacccttctttagaagagtctatactaagttcttggtgccctcttcggcagccaagggtgaaggccccatagaggagaggatccaaaggagcattgaggaggcccaagaggaaaaggatgtggctcaggctgggagggacttcagttagcatggtgggggagaaccagtaccacatacccagtaggtaataaggtgtccagcagaggatgaaggtcagcaagataagcagggccagtctcagggcccggagacgaacacggggacaattgtcaaaggagcgggggagggcaaattcaccagcaggggctaggaatttagaaaatatactgtaattcagacactcagcttctgatctgagtatagggtgaattgatggaggggcatagctagtgagacagagctcgcctcctacaaggaggagaatgttgcaaaccgttttccccttcccaacctgggactatatgatttcttacccccagggattatgatagaaatatgaagccaccaagtctagacttgatggtgttcaagaataaataatactgattgcctccctagtccttgtccagctaactcagctgtttataattgaagggattcaacaaaattatctctagcatcaggtgctagacatggttagaatctcaccatggtttagtgactggtagatagctattaggtaggtagataaataaatgatgctagaggcaacaggtctagggttaaggattaaggcctgggaattggagtctcaccatggctccccttccttgtctggggcctggacacactgaggacaatgcggctatagcagatggccatggcagtcagtggcagcagaaagaggcagcagaaggtgaagaggttataggtggtctcttgccattgagccttgaagctgcctttggtgacacactgagtgaaagggactgggccagctcagtggaccgtgtggaacaggaacagctggagtggagttgaggactattagaactggttcccctcaccacccaacctacccacctatgtcatactgtctcctcccaattcatccttaattccaagtgaagcagcacagtgctgagaaacagtttcatccatggtgccatgttaaagaagttggaaatatatcttgaaaatcctatcttccttttaggcttgaatatgatgctgaacagtaagtttgttaaatcttggaacttaaaacaatcctgctttctcaagtactattctaacattgcgctttataagggatgatatttctaccacctcactcatatttttagctgaaatgattttcctggtatgtctgttattttgtggaaaaagaaatattgtgtaaaatgggtgctgccaaaattccaggccattttgcagggactctgaagtgacctttagtagtaatagtcttatgtgcagtaactataatggtaaagaatgttaaataataaaatttaacattttccaaatgct

SEQ ID NO: 2364 - DNA, 1410 bp, Homo sapiens
tttggtgcagtttagcatgttcctctgtgttctgcatctcctgtagtgtaatgttcaagctcagaaatgccttatgtggatcgtcagaatcgcatttgtggttttctagacattgaagaaaatgaaaacagtgggaaatttcttcgaaggtacttcatactggataccagagaagatagtttcgtgtggtacatggataatccacagaacctaccttctggatcatcacgtgttggagccattaagcttacctacatttcaaaggttagcgatgctactaagctaaggccaaaggcggagttctgttttgttatgaatgcaggaatgaggaagtacttcctacaagccaatgatcagcaggacctagtggaatgggtaaatgtgttaaacaaagctataaaaattacagtaccaaagcagtcagactcacagcctaattctgataacctaagtcgccatggtgaatgtgggaaaaagcaagtgtcttacagaactgatattgttggtggcgtacccatcattactcccactcagaaagaagaagtaaatgaatgtggtgaaagtattgacagaaataatctgaaacggtcacaaagccatcttccttactttactcctaaaccacctcaagatagtgcggttatcaaagctggatattgtgtaaaacaaggagcagtgatgaaaaactggaagagaagatattttcaattggatgaaaacacaataggctacttcaaatctgaactggaaaaggaacctcttcgcgtaataccacttaaagaggttcataaagtccaggaatgtaagcaaagcgacataatgatgagggacaacctctttgaaattgtaacaacgtctcgaactttctatgtgcaggctgatagccctgaagagatgcacagttggattaaagcagtctctggcgccattgtagcacagcggggtcccggcagatctgcgtcttctgagcatccccccggtccttcagaatccaaacacgctttccgtcctaccaacgcagccgccgccacctcacattccacagcctctcgcagcaactctttggtctcaacctttaccatggagaagcgaggattttacgagtctcttgccaaggtcaagccagggaacttcaaggtccagactgtctctccaagagaaccagcttccaaagtgactgaacaagctctgttaagacctcaaagtaaaaatggccctcaggaaaaagattgtgacctagtagacttggacgatgcgagccttccggtcagtgacgtgtgaggcagaagcgcacggagcctgcctgcctctgccgtcctcagttacctttcatgaggcttctagccaaagatgataaagggggaaatggtttttagtgcgtatattatactgcctcttaggtgtactctt

SEQ ID NO: 2365 - DNA, 2843 bp, Homo sapiens
atggcggattccagcgaaggcccccgcgcggggcccggggaggtggctgagctccccggggatgagagtggcaccccaggtggggaggcttttcctctctcctccctggccaatctgtttgagggggaggatggctccctttcgccctcaccggctgatgccagtcgccctgctggcccaggcgatgggcgaccaaatctgcgcatgaagttccagggcgccttccgcaagggggtgcccaaccccatcgatctgctggagtccaccctatatgagtcctcggtggtgcctgggcccaagaaagcacccatggactcactgtttgactacggcacctatcgtcaccactccagtgacaacaagaggtggaggaagaagatcatagagaagcagccgcagagccccaaagctcccgcccctcagccgccccccatcctcaaagtcttcaaccggcccatcctctttgacatcgtgtcccggggctccactgctgacctggacgggctgctcccattcttgctgacccacaagaaacgcctaactgatgaggagtttcgggaaccatctacggggaagacctgcctgcccaaggccttgctgaacctgagcaatggccgcaacgacaccatccctgtgctgctggacatcgcggagcgcaccggcaacatgagggagttcattaactcgcccttccgtgacatctactatcgagggcagacagccctgcacatcgccattgagcgtcgctgcaaacactacgtggaacttctcgtggcccagggagctgatgtccacgcccaggcccgtgggcgcttcttccagcccaaggatgaggggggctacttctactttggggagctgcccctgtcgctggctgcctgcaccaaccagccccacattgtcaactacctgacggagaacccccacaagaaggcggacatgcggcgccaggactcgcgaggcaacacagtgctgcatgcgctggtggccattgctgacaacacccgtgagaacaccaagtttgttaccaagatgtacgacctgctgctgctcaagtgtgcccgcctcttccccgacagcaacctggaggccgtgctcaacaacgacggcctctcgcccctcatgatggctgccaagacgggcaagattggggtctttcagcacatcatccggcgggaggtgacggatgaggacacacggcacctgtcccgcaagttcaaggactgggcctatgggccagtgtattcctcgctttatgacctctcctccctggacacgtgtggggaagaggcctccgtgctggagatcctggtgtacaacagcaagattgagaaccgccacgagatgctggctgtggagcccatcaatgaactgctgcgggacaagtggcgcaagttcggggccgtctccttctacatcaacgtggtctcctacctgtgtgccatggtcatcttcactctcaccgcctactaccagccgctggagggcacaccgccgtacccttaccgcaccacggtggactacctgcggctggctggcgaggtcattacgctcttcactggggtcctgttcttcttcaccaacatcaaagacttgttcatgaagaaatgccctggagtgaattctctcttcattgatggctccttccagctgctctacttcatctactctgtcctggtgatcgtctcagcagccctctacctggcagggatcgaggcctacctggccgtgatggtctttgccctggtcctgggctggatgaatgccctttacttcacccgtgggctgaagctgacggggacctatagcatcatgatccagaagattctcttcaaggaccttttccgattcctgctcgtctacttgctcttcatgatcggctacgcctcagccctggtctccctcctgaacccgtgtgccaacatgaaggtgtgcaatgaggaccagaccaactgcacagtgcccacttacccctcgtgccgtgacagcgagaccttcagcaccttcctcctggacctgtttaagctgaccatcggcatgggcgacctggagatgctgagcagcaccaagtaccccgtggtcttcatcatcctgctggtgacctacatcatcctcacctttgtgctgctcctcaacatgctcattgccctcatgggcgagacagtgggccaggtctccaaggagagcaagcacatctggaagctgcagtgggccaccaccatcctggacattgagcgctccttccccgtattcctgaggaaggccttccgctctggggagatggtcaccgtgggcaagagctcggacggcactcctgaccgcaggtggtgcttcagggtgaatgaggtgaactggtctcactggaaccagaacttgggcatcatcaacgaggacccgggcaagaatgagacctaccagtattatggcttctcgcataccgtgggccgcctccgcagggatcgctggtcctcggtggtaccccgcgtggtggaactgaacaagaactcgaacccggacgaggtggtggtgcctctggacagcatggggaacccccgctgcgatggccaccagcagggttacccccgcaagtggaggactgatgacgccccgctctagggactgcagcccagccccagcttctctgcccactcatttctagtccagccgcatttcagcagtgccttctggggtgtccccccacaccctgctttggccccagaggcgagggaccagtggaggtgccagggaggccccaggaccctgtggtcccctggctctgcctccccaccctggggtgggggctcccggccacctgtcttgctcctatggagtcacataagcca

SEQ ID NO: 2366 - DNA, 1921 bp, Homo sapiens
cctgttgctgatgctgccgtgcggtacttgtcatggagctggcactgcggcgctctcccgtcccgcggtggttgctgctgctgccgctgctgctgggcctgaacgcaggagctgtcattgactggcccacagaggagggcaaggaagtatgggattatgtgacggtccgcaaggatgcctacatgttctggtggctctattatgccaccaactcctgcaagaacttctcagaactgcccctggtcatgtggcttcagggcggtccaggcggttctagcactggatttggaaactttgaggaaattgggccccttgacagtgatctcaaaccacggaaaaccacctggctccaggctgccagtctcctatttgtggataatcccgtgggcactgggttcagttatgtgaatggtagtggtgcctatgccaaggacctggctatggtggcttcagacatgatggttctcctgaagaccttcttcagttgccacaaagaattccagacagttccattctacattttctcagagtcctatggaggaaaaatggcagctggcattggtctagagctttataaggccattcagcgagggaccatcaagtgcaactttgcgggggttgccttgggtgattcctggatctcccccgtggattcggtgctctcctggggaccttacctgtacagcatgtctcttctcgaagacaaaggtctggcagaggtgtctaaggttgcagagcaagtactgaatgccgtaaataaggggctctacagagaggccacagagctgtgggggaaagcagaaatgatcattgaacagaacacagatggggtgaacttctataacatcttaactaaaagcactcccacgtctacaatggagtcgagtctagaattcacacagagccacctagtttgtctttgtcagcgccacgtgagacacctacaacgagatgccttaagccagctcatgaatggccccatcagaaagaagctcaaaattattcctgaggatcaatcctggggaggccaggctaccaacgtctttgtgaacatggaggaggacttcatgaagccagtcattagcattgtggacgagttgctggaggcagggatcaacgtgacggtgtataatggacagctggatctcatcgtagataccatgggtcaggaggcctgggtgcggaaactgaagtggccagaactgcctaaattcagtcagctgaagtggaaggccctgtacagtgaccctaaatctttggaaacatctgcttttgtcaagtcctacaagaaccttgctttctactggattctgaaagctggtcatatggttccttctgaccaaggggacatggctctgaagatgatgagactggtgactcagcaagaataggatggatggggctggagatgagctggtttggccttggggcacagagctgagctgaggccgctgaagctgtaggaagcgccattcttccctgtatctaactggggctgtgatcaagaaggttctgaccagcttctgcagaggataaaatcattgtctctggaggcaatttggaaattatttctgcttcttaaaaaaacctaagattttttaaaaaattgatttgttttgatcaaaataaaggatgataatagatattattttttcttatgacagaagcaaatgatgtgatttatagaaaaactgggaaatacaggtacccaaagagtaaatcaacatctgtatacccccttcccaggggtaagcactgttaccaatttagcatatgtccttgcagaatttttttttctatatatacatatatattttttaccaaaatgaatcattactctatgttgttttactatttgtttgacatatcagtatatctgaaacaccttttcatgtcaataaatgttcttctctaacattaa

SEQ ID NO: 2367 - DNA, 2497 bp, Homo sapiens
gggcctctggtagccctggggacgctgtatctgtgggctcttgaatcgcgtcacaaatcagcgaccgaactctggcggtggtggttaagacggcgaaggcggcagcggcggcgacagctctggggtttgcgtctcggggtgtgtcggccgccgctgctgcttgggcctggtatgtacagatggctggttaggattctcggcaccattttccgtttctgcgaccggtcggtgccccctgcccgggccctcctgaagaggcggcgctcagacagcactctgttttctacagcagtggacactgatgaaataccagccaaaagaccaagattagattgctttattcaccaagtgaaaaacagtctctacaatgctgccagcttatttggattcccattccagctgaccacaaagcccatggtaacttctgcttgtaatggaacaaggaatgtggccccttcaggagaggtattttcgaactcttcatcttgtgaactgacaggttctggatcctggaacaacatgctgaaactgggtaataaatctcctaatggaataagtgactatccaaagatcagagtgacagttacccgagatcagccacgcagagtcctgccttcctttggttttactttgaactcagaaggctgtaatagaagaccaggtggccgtcgccatagcaaaggtaatccagagagttctttaatgtggaaacctcaggaacaggctgtaacagagatgatttctgaagagagtggcaagggtctgaggcgtccccattgtactgtggaggagggtgttcaaaaagaggaaagagagaagtaccgaaagttattggaacgacttaaagaaagtggtcatggaaactctgtctgtcctgtaacttcaaattatcacagttctcaaagaagtcagatggacacattaaagaccaaaggctggggggaagagcaaaatcacggagtcaaaacaactcagtttgttccaaaacaatatagacttgttgaaacaaggggacctctatgttcattgagaagtgaaaagaggtgttcaaaggggaaaattactgatacagagaagatggtcggaatcagatttgaaaatgaaagtaggaggggataccaactggagcctgacctatcagaagaagtgtcggcccgactccgcctgggcagtggaagcaatggcttactcaggaggaaagtgtcaataattgagacaaaggaaaagaattgctcaggcaaagagagggacagaagaacggacgatctccttgaacttacagaggacatggaaaaggaaatcagtaatgccctaggccatggcccacaggatgaaatcctaagtagtgctttcaaattgcgaattactcgaggagatattcagacattaaagaactatcactggctcaatgatgaagtcattaatttttacatgaatcttctggtggaaagaaataaaaagcaaggctatccagcacttcatgtattcagtactttcttctatcctaaattaaagtctgggggttaccaagcagtgaaacgatggaccaaaggggtaaatctctttgaacaagaaattattctggtgcctattcatcggaaggtacattggagcctggtggtgattgacctaagaaaaaagtgtcttaaatatctggattctatgggacaaaagggccacaggatctgtgagattctccttcagtatttacaggatgaaagtaagaccaaaagaaatagtgatctgaatcttttagagtggacccatcacagcatgaaaccacacgagattcctcaacagctgaatgggagtgattgtggaatgtttacttgtaaatatgcagattatatttctagggacaaacctatcacatttactcagcaccagatgcctctcttccggaagaagatggtgtgggaaatccttcatcagcagttgctgtgagaaaactttgcctggtccctctagctgctggtggttctttcacagacatttccatatacctcatgcattgtgggttaaaaagtccctgcatcacttctgttctcacaggtactgagctgtcaaaagtgcatgaaggcctctcactgtactctagtcctgacttggggtgcagagggctgcttgcaatcctgtttgtaaggctgtgcctgctcagagctttggactgttcaacccacacaagaacaaacgctaactaatattttttttaagagattcttttccctatgaatgtgggaaatgcaggatttattctgtgaattgttgtttctgtgtgttgtccagcgtattcattcactcactcgttttgcaaacataatgggcagtgggcatttactgctgctctttaacagttagctctaaattacttgttttgaactatttatttctgaaaggacatgttactcaagctgcatccctgtgagaagcaggaggggaattctcactggggcgaaggagtggactggagcgtaactgccacttaagcggcggttgg

SEQ ID NO: 2368 - DNA, 1530 bp, Homo sapiens
aggcaagaattcggcacgaggaagcccctgagtagctgctccgggagctgtggtgccctctccttctccctttggctcctctcctgctgccttacagtgcccccagagccggctaggggcatggacttcacctcctggtcctctcttcctcaggtatggcgttgacggtggatgtggccgggccagcgccctggggcttccgtatcacagggggcagggatttccacacgcccatcatggtgactaaggtggccgagcggggcaaagccaaggacgctgacctccggcctggagacataatcgtggccatcaacggggaaagcgcggagggcatgctgcatgccgaggcccagagcaagatccgccagagcccctcgcccctgcggctgcagctggaccggtctcaggctacgtctccagggcagaacaatggggacagctccttggaagtgctggcgactcgcttccagggctccgtgaggacatacactgagagtcagttctccttaaggtcctcctactccagcccaacctccctcagccgagggccggcagccccttctcaccaccaccctctagcagctccctcactggagaggcagccatcagccgcaggcggcctcggccgcgctggcgactcggcggtgctggtgctgccgccttccccgggccctcgttcctccaggcccagcatggactcggaagggggaagcctcctcctggacgaggactcggaagtcttcaagatgctgcaggaaaatcgcgagggacgggcggccccccgacagtccagctcctttcggctcttgcaggaagccctggaggctgaggagagaggtggcacgccagccttcttgcccagctcactgagcccccagtcctccctgcccgcctccagggccctggccacccctcccaagctccacacttgtgagaagtgcagtaccagcatcgcgaaccaggctgtgcgcatccaggagggccggtaccgccaccccggctgctacacctgtgccgactgtgggctgaacctgaagatgcgcgggcacttctgggtgggtgacgagctgtactgtgagaagcatgcccgccagcgctactccgcacctgccaccctcagctctcgggcctgagcccgccatgccctcagcctgcctcactgctgggccagggtcatgcctatataagttggcatggcagggacaatggtgggcagttgctcttacatgagctaagtttggagacctgaggcccctttgtcctcgctgggtgggccaaggtctgggacctgtcttggactgtgggagactcaccctcaccttgccaggcctctcccctgcaggactggcattgcactagtctgaggtggccactgcctttgatcaacctttgtgtgcgagggtctaagtagggtcgaacacagaagtgggaaggagaggggtgggccaggggctaatggtgtcactgtgtaaagtttttgacatactagctctataaatatatgaatatggacaaaaaaaaaaaaaaaaa

SEQ ID NO: 2369 - DNA, 2768 bp, Homo sapiens
ccgaggcgctccctgggatcacatggtacctgctccagtgccgcgtgcggcccgggaaccctgggctgctggcgcctgcgcagagccctctgtcccagggaaaggctcgggcaaaaggcggctgagattggcagagtgaaatattactgccgagggaacgtagcagggcacacgtctcgcctctttgcgactcggtgccccgtttctccccatcacctacttacttcctggttgcaacctctcttcctctgggacttttgcaccgggagctccagattcgctaccccgcagcgctgcggagccggcaggcagaggcaccccgtacactgcagagacccgaccctccttgctaccttctagccagaactactgcaggctgattccccctacacactctctctgctcttcccatgcaaagcagaactccgttgcctcaacgtccaacccttctgcagggctgcagtccggccaccccaagaccttgctgcagggtgcttcggatcctgatcgtgagtcgcggggtccactccccgcccttagccagtgcccagggggcaacagcggcgatcgcaacctctagtttgagtcaaggtccagtttgaatgaccgctctcagctggtgaagacatgacgaccctggactccaacaacaacacaggtggcgtcatcacctacattggctccagtggctcctccccaagccgcaccagccctgaatccctctatagtgacaactccaatggcagcttccagtccctgacccaaggctgtcccacctacttcccaccatcccccactggctccctcacccaagacccggctcgctcctttgggagcattccacccagcctgagtgatgacggctccccttcttcctcatcttcctcgtcgtcatcctcctcctccttctataatgggagcccccctgggagtctacaagtggccatggaggacagcagccgagtgtcccccagcaagagcaccagcaacatcaccaagctgaatggcatggtgttactgtgtaaagtgtgtggggacgttgcctcgggcttccactacggtgtgcacgcctgcgagggctgcaagggctttttccgtcggagcatccagcagaacatccagtacaaaaggtgtctgaagaatgagaattgctccatcgtccgcatcaatcgcaaccgctgccagcaatgtcgcttcaagaagtgtctctctgtgggcatgtctcgagacgctgtgcgttttgggcgcatccccaaacgagagaagcagcggatgcttgctgagatgcagagtgccatgaacctggccaacaaccagttgagcagccagtgcccgctggagacttcacccacccagcaccccaccccaggccccatgggcccctcgccaccccctgctccggtcccctcacccctggtgggcttctcccagtttccacaacagctgacgcctcccagatccccaagccctgagcccacagtggaggatgtgatatcccaggtggcccgggcccatcgagagatcttcacctacgcccatgacaagctgggcagctcacctggcaacttcaatgccaaccatgcatcaggtagccctccagccaccaccccacatcgctgggaaaatcagggctgcccacctgcccccaatgacaacaacaccttggctgcccagcgtcataacgaggccctaaatggtctgcgccaggctccctcctcctaccctcccacctggcctcctggccctgcacaccacagctgccaccagtccaacagcaacgggcaccgtctatgccccacccacgtgtatgcagccccagaaggcaaggcacctgccaacagtccccggcagggcaactcaaagaatgttctgctggcatgtcctatgaacatgtacccgcatggacgcagtgggcgaacggtgcaggagatctgggaggatttctccatgagcttcacgcccgctgtgcgggaggtggtagagtttgccaaacacatcccgggcttccgtgacctttctcagcatgaccaagtcaccctgcttaaggctggcacctttgaggtgctgatggtgcgctttgcttcgttgttcaacgtgaaggaccagacagtgatgttcctaagccgcaccacctacagcctgcaggagcttggtgccatgggcatgggagacctgctcagtgccatgttcgacttcagcgagaagctcaactccctggcgcttaccgaggaggagctgggcctcttcaccgcggtggtgcttgtctctgcagaccgctcgggcatggagaattccgcttcggtggagcagctccaggagacgctgctgcgggctcttcgggctctggtgctgaagaaccggcccttggagacttcccgcttcaccaagctgctgctcaagctgccggacctgcggaccctgaacaacatgcattccgagaagctgctgtccttccgggtggacgcccagtgacccgcccggccggccttctgccgctgcccccttgtacagaatcgaactctgcacttctctctcctttacgagacgaaaaggaaaagcaaaccagaatcttatttatattgttataaaatattccaagatgagcctctggccccctgagccttcttgtaaatacctgcctccctcccccatcaccgaacttcccctcctcccctatttaaaccactctgtctcccccacaaccctcccctggccctctgatttgttctgttcctgtctcaaatccaatagttcacagctgagctggg

SEQ ID NO: 2370 - DNA, 1009 bp, Homo sapiens
gacaaatgagggtttggcatgcagctcgtcatcttaagagttactatcttcttgccctggtgtttcgccgttccagtgccccctgctgcagaccataaaggatgggactttgttgagggctatttccatcaatttttcctgaccgagaaggagtcgccactccttacccaggagacacaaacacagctcctgcaacaattccatcggaatgggacagacctacttgacatgcagatgcatgctctgctacaccagccccactgtggggtgcctgatgggtccgacacctccatctcgccaggaagatgcaagtggaataagcacactctaacttacaggattatcaattacccacatgatatgaagccatccgcagtgaaagacagtatatataatgcagtttccatctggagcaatgtgacccctttgatattccagcaagtgcagaatggagatgcagacatcaaggtttctttctggcagtgggcccatgaagatggttggccctttgatgggccaggtggtatcttaggccatgcctttttaccaaattctggaaatcctggagttgtccattttgacaagaatgaacactggtcagcttcagacactggatataatctgttcctggttgcaactcatgagattgggcattctttgggcctgcagcactctgggaatcagagctccataatgtaccccacttactggtatcacgaccctagaaccttccagctcagtgccgatgatatccaaaggatccagcatttgtatggagaaaaatgttcatctgacataccttaatgttagcacagaggacttattcaacctgtcctttcagggagtttattggaggatcaaagaactgaaagcactagagcagccttggggactgctaggatgaagccctaaagaatgcaacctagtcaggttagctgaaccgacactcaaaacgctactgagtcacaataaagattgttttaaagagtaaaaaaaaaaaaaaaaaaaa

SEQ ID NO: 2371 - DNA, 3405 bp, Homo sapiens
cgcccaacccaagttcaaaggctgataagagagaaaatctcatgaggaggttttagtctagggaaagtcattcagtggatgtgatcttggctcacaggggacgatgtcaagctcttcctggctccttctcagccttgttgctgtaactgctgctcagtccaccattgaggaacaggccaagacatttttggacaagtttaaccacgaagccgaagacctgttctatcaaagttcacttgcttcttggaattataacaccaatattactgaagagaatgtccaaaacatgaataatgctggggacaaatggtctgcctttttaaaggaacagtccacacttgcccaaatgtatccactacaagaaattcagaatctcacagtcaagcttcagctgcaggctcttcagcaaaatgggtcttcagtgctctcagaagacaagagcaaacggttgaacacaattctaaatacaatgagcaccatctacagtactggaaaagtttgtaacccagataatccacaagaatgcttattacttgaaccaggtttgaatgaaataatggcaaacagtttagactacaatgagaggctctgggcttgggaaagctggagatctgaggtcggcaagcagctgaggccattatatgaagagtatgtggtcttgaaaaatgagatggcaagagcaaatcattatgaggactatggggattattggagaggagactatgaagtaaatggggtagatggctatgactacagccgcggccagttgattgaagatgtggaacatacctttgaagagattaaaccattatatgaacatcttcatgcctatgtgagggcaaagttgatgaatgcctatccttcctatatcagtccaattggatgcctccctgctcatttgcttggtgatatgtggggtagattttggacaaatctgtactctttgacagttccctttggacagaaaccaaacatagatgttactgatgcaatggtggaccaggcctgggatgcacagagaatattcaaggaggccgagaagttctttgtatctgttggtcttcctaatatgactcaaggattctgggaaaattccatgctaacggacccaggaaatgttcagaaagcagtctgccatcccacagcttgggacctggggaagggcgacttcaggatccttatgtgcacaaaggtgacaatggacgacttcctgacagctcatcatgagatggggcatatccagtatgatatggcatatgctgcacaaccttttctgctaagaaatggagctaatgaaggattccatgaagctgttggggaaatcatgtcactttctgcagccacacctaagcatttaaaatccattggtcttctgtcacccgattttcaagaagacaatgaaacagaaataaacttcctgctcaaacaagcactcacgattgttgggactctgccatttacttacatgttagagaagtggaggtggatggtctttaaaggggaaattcccaaagaccagtggatgaaaaagtggtgggagatgaagcgagagatagttggggtggtggaacctgtgccccatgatgaaacatactgtgaccccgcatctctgttccatgtttctaatgattactcattcattcgatattacacaaggaccctttaccaattccagtttcaagaagcactttgtcaagcagctaaacatgaaggccctctgcacaaatgtgacatctcaaactctacagaagctggacagaaactgttcaatatgctgaggcttggaaaatcagaaccctggaccctagcattggaaaatgttgtaggagcaaagaacatgaatgtaaggccactgctcaactactttgagcccttatttacctggctgaaagaccagaacaagaattcttttgtgggatggagtaccgactggagtccatatgcagaccaaagcatcaaagtgaggataagcctaaaatcagctcttggagataaagcatatgaatggaacgacaatgaaatgtacctgttccgatcatctgttgcatatgctatgaggcagtactttttaaaagtaaaaaatcagatgattctttttggggaggaggatgtgcgagtggctaatttgaaaccaagaatctcctttaatttctttgtcactgcacctaaaaatgtgtctgatatcattcctagaactgaagttgaaaaggccatcaggatgtcccggagccgtatcaatgatgctttccgtctgaatgacaacagcctagagtttctggggatacagccaacacttggacctcctaaccagccccctgtttccatatggctgattgtttttggagttgtgatgggagtgatagtggttggcattgtcatcctgatcttcactgggatcagagatcggaagaagaaaaataaagcaagaagtggagaaaatccttatgcctccatcgatattagcaaaggagaaaataatccaggattccaaaacactgatgatgttcagacctccttttagaaaaatctatgtttttcctcttgaggtgattttgttgtatgtaaatgttaatttcatggtatagaaaatataagatgataaagatatcattaaatgtcaaaactatgactctgttcagaaaaaaaattgtccaaagacaacatggccaaggagagagcatcttcattgacattgctttcagtatttatttctgtctctggatttgacttctgttctgtttcttaataaggattttgtattagagtatattagggaaagtgtgtatttggtctcacaggctgttcagggataatctaaatgtaaatgtctgttgaatttctgaagttgaaaacaaggatatatcattggagcaagtgttggatcttgtatggaatatggatggatcacttgtaaggacagtgcctgggaactggtgtagctgcaaggattgagaatggcatgcattagctcactttcatttaatccattgtcaaggatgacatgctttcttcacagtaactcagttcaagtactatggtgatttgcctacagtgatgtttggaatcgatcatgctttcttcaaggtgacaggtctaaagagagaagaatccagggaacaggtagaggacattgctttttcacttccaaggtgcttgatcaacatctccctgacaacacaaaactagagccaggggcctccgtgaactcccagagcatgcctgatagaaactcatttctactgttctctaactgtggagtgaatggaaattccaactgtatgttcaccctctgaagtgggtacccagtctcttaaatcttttgtatttgctcacagtgtttgagcagtgctgagcacaaagcagacactcaataaatgctagatttacacactcaaaaaaaaaaaa

SEQ ID NO: 2372 - DNA, 3031 bp, Homo sapiens
gtggtagcggttattcggcggcccgcggcggaccatggccctggccctggcccggcgtcgctgggctttcctcacggcgtccccgagcagcgtcgcagagcgggccgacttccgggaaggaactgaccagcgactgagcggcggccggcgcgcttagcgccctgaacatgcggcagtccctgcgggcgaccccgggctccggacaggcggcggcggaggcggcggctcgggagggaaggaggcggcggcgccggcggaggtggcggcggagacggccggcgcccggcgcggagccctagggaggcagttcagcgcggcctcgggcctcgtcgagaaggatgctgtcccgaaagaaaaccaaaaacgaagtgtccaagccggccgaggtgcaggggaagtacgtgaagaaggagacgtcgcctctgcttcggaatcttatgccttcattcatccggcatggtccaacaattccaagacgaactgatatctgtcttccagattcaagccctaatgccttttcaacttctggagatgtagtttcaagaaaccagagtttccttagaactccaattcaaagaacacctcatgaaataatgagaagagaaagcaacagattatctgcaccttcttatcttgccagaagtctagcagatgtccctagagagtatggttcttctcagtcatttgtaacggaagttagttttgctgttgaaaatggagactctggttcccgatattattattcagacaatttttttgatggtcagagaaagcggccacttggagatcgtgcacatgaagactacagatattatgaatacaaccatgatctcttccaaagaatgccacagaatcaggggaggcatgcttcaggtattgggagagttgctgctacatctttaggaaatttgactaaccatggttctgaagatttaccccttcctcctggctggtctgtggactggacaatgagagggagaaaatattatatagatcataacacaaatacaactcactggagccatcctcttgagcgagaaggacttcctcctggatgggaacgagttgagtcatccgaatttggaacctattatgtagatcacacaaataagaaggcccaatacaggcatccctgtgctcctagtgtacctcggtatgatcaaccacctcctgtcacataccagccacagcaaactgaaagaaatcagtcccttctggtacctgcaaatccatatcatactgcagaaattcctgactggcttcaggtttacgcacgagcccctgtgaaatatgaccacattctgaagtgggaactcttccagctggctgacctggatacataccagggaatgctaaagttgctcttcatgaaagaattggagcagattgttaaaatgtatgaagcatacagacaagcccttcttacagagttggaaaaccgaaagcagagacagcagtggtatgcccaacaacatggaaaaaatttttgagctgattttttaaaaatttaagttttgtaagagctttaaaatattttcacagataaaaaattgcaaacaagtactctggttaataaatgctgcttcctttgtggaaattataaaattctaactttacatgtattttgttattagaaattttcttttattgaatgagaaaaattagtctatcattttaagagccaatatggcaaacactttcaaatactgtatattaggaaactgttttggtattcttgatggaaaaaaacgcagcggaaatgtcattatgaacagatgttaaataggaaattattacttgttaacttcttacagcagtagtaccttctttaaaaaaaaaaaagaatctgcggtatttttttaaaaaaaaagtttaccgctgtagtgtgaaatattgtctggaaagggatggtttaaatattaccatgatgtagttgaaatataaaataggatttggaaccttattgtgataaatatttatatatgatgtatgtttgtctcccctctccaaagtaaggaacccagctgggcgtggtggctcactcctgtaatcccagcattttgggaggccgaggtgggtggaccgcttgagtccacgagtttaagaccagcctgggcaacatggtgaagccccatctctacaaaaaatacaaaaaaattagccgggtatgatggtgtgtgcctctagtcccagctacttgggaggctgaggtcagaggatggcttgagcccaagaggcagaggttgcagggtcaagatcgcaccacttgcactgcagcctgagagagagagagccagaccttgtctcaaaaaataaaaaataaaaaaataaaaacaaaataaggaatccttttaaagcatgttgagaaagtattttttggtatgaatgggtgacgggccttttaatctttcaggaatacatataagcaggaatacttagcctgtattgggaaggtgcgtgaaactcaaagttgctaacatcatcttccttattttcagccagtgctgttactgcatttagcatggctctgacgaggcagtggagagttcctgacagcatagcatactgccttctgacagactgggttaagctaccaaaaatgacaaccagggattcaaaaaaaatttttggtcattaaatcgaatgtatattattactttttaattttctaagtatttatcacaggactttaacaccatatatttccctcccagtttttctccccttttggtttaatagttaaaacatttttcataattagtgctgtacatttgattgcaaacaaattggtgatacttctaaactataactataaatctctagaattctgtgaatttcaacattatttgaagtagttcttcagttatatttacatgtgttgtaaatatgtaaatatacttttagcttaggaagtcttccagaatacaaactactcccagttagatatcagtgagtttgaataactgaagaaatgttgacaatgttaagtgtttgattttatataacaagcttattaaatatatttttgtgg

SEQ ID NO: 2373 - DNA, 3252 bp, Homo sapiens
ggcacgaggggcaccgcggcgctcgggtgtttttgggggcccgggtggagggcccgggtgccggggcccaaggtgcggcctcgctagcgggagagggagcgggatcaccggcccggagagagctctcagggccagagcggggcaggaggatgctttcccagccccaccatggagctgcgctgtgggggattgctgttcagttctcgctttgattcagggaatctagcccacgtggagaaggtggaatctttgtccagtgatggggaaggggtaggaggtggggcgtcagccctgaccagtggcattgcctcttcccctgactatgaattcaacgtgtggacccgaccagactgtgctgaaacggaatttgagaatgggaacaggtcatggttctacttcagcgtccggggaggaatgccaggaaaactcatcaagatcaacattatgaacatgaacaagcagagcaagctgtattcccagggcatggccccctttgtgcgcacactgcccacccggccacgctgggaacgcattcgagaccggcccacctttgagatgacagagacgcagtttgtgttatcctttgttcatcgtttcgtggagggccgtggggccaccaccttcttcgccttctgctaccccttctcctacagtgactgccaggaactgctaaaccagctagaccagcgctttccggagaaccaccctacccatagcagccccctggataccatctattaccatcgggagctcctttgctattctctggatggacttcgtgtagatctgctgacgatcacttcctgccatgggcttcgagaagatcgagagccccgtctagagcagctatttcctgataccagcacccctcgaccattccgtttcgcaggcaagaggatattcttcttaagcagtagagtacacccaggggagactccatctagctttgtcttcaatggctttctggacttcatcctccgacctgatgatccccgggcccaaaccctccgtcgcctcttcgtctttaagctgattcccatgttgaaccccgatggtgtggtccggggacactaccgcacagactcacgtggagtgaatctgaaccgtcagtacctgaagcctgatgccgtcctgcacccggccatctatggggccaaagctgtgcttctctaccaccatgtgcactctcgtctgaactcccagagttcctctgagcaccagcccagttcctgtctccctcctgatgctcctgtttctgacctggagaaagccaacaatctccaaaatgaagctcagtgtgggcactcagctgacaggcataacgctgaagcctggaaacaaacagagccagcagaacagaagctcaacagtgtgtggattatgccacaacagtctgcggggcttgaagagtcagcccctgataccatcccccccaaagagagtggcgttgcttactatgtggacctgcatggacatgcttccaaaaggggctgcttcatgtacggaaacagctttagtgatgagagcacccaggtggaaaacatgctatatccaaagctcatctccttgaattcagcccacttcgacttccagggctgcaatttctcagagaagaatatgtatgcccgagaccgtagagatggccagtctaaagagggaagcggccgtgttgcaatctacaaagcctcagggataatccacagctacacacttgaatgcaactacaacactggacgctcagtaaacagcatccctgctgcctgccatgacaatgggcgtgccagcccccctcccccgccggctttcccctccagatacactgtggaactatttgagcaggtgggacgagctatggccattgcagccctggacatggcggaatgtaatccgtggccccgaattgtactgtcagagcacagcagccttactaatctacgggcctggatgctgaaacatgtacgcaacagccgaggcctaagcagcactctgaatgtgggtgtcaacaagaagaggggccttcgaactccacccaaaagtcacaatgggttgcctgtctcctgctccgaaaacaccttgagtcgggcacgaagttttagcaccggcacaagtgccggtggtagcagcagcagccaacaaaattctccacagatgaagaattcccccagctttccttttcatggcagtcggcctgcagggctgccaggcctgggctctagtacccaaaaggtcacccaccgggtgctgggccccgtcagagagccccgaagccaggacaggagacggcagcagcagcccctgaaccatcgtcctgcaggcagcctcgctccatccccagctcctactagttctggcccagcctcctcacacaagctgggctcctgtctactgcctgattcattcaacataccagggagcagttgctcactcttgtcctctggagacaaaccagaggctgtcatggtaatcgggaaaggtctgctagggactggagctcggatgccctgcatcaagactcgattgcagacctgtccgaggagagtttccgccaggaggggtcccggattccccaggctaggcccaggttgggccggggctcaccgccgactcgcagagggatgaaaggctcttcaggccccacatcccctaccccccggaccagggagagcagtgagctggagctgggatcctgctctgctacaccagggctgcctcaggccaggcccccacggccccgctctgcccctgccttttctcctatatcctgtagtctatctgactccccatcctggaattgttacagcaggggtcccttgggccaacctgaggtttgttttgtccctaaatctcccccactgactgtttctccccgggtctgataatgcctttatgttcaatcccaggatatagccccaagatggggtaacagtgggaaatatgctagttcccctccaggccgctgattccatgtgacagccgttaagtccttggaatgccagccacgctgtccaaggcattacagagtatcaccttgagacagaacaaaacagggacctgccaccccttccctccctccgcagcacaagattttgggaccacaaaaaaaagtctatatttttatattggggggagggagtagaaaagcaagcccctatactgggccctattcagtggcagcttcttgttccataggattaaggaagactctgaggaaataaaagttgtttggaaaaatccaaaaaaaaaaaaaaaaaa

SEQ ID NO: 2374 - DNA, 3145 bp, Homo sapiens
ccccaggtccggacaggccgagatgacgccgagccccctgttgctgctcctgctgccgccgctgctgctgggggccttcccaccggccgccgccgcccgaggccccccaaagatggcggacaaggtggtcccacggcaggtggcccggctgggccgcactgtgcggctgcagtgcccagtggagggggacccgccgccgctgaccatgtggaccaaggatggccgcaccatccacagcggctggagccgcttccgcgtgctgccgcaggggctgaaggtgaagcaggtggagcgggaggatgccggcgtgtacgtgtgcaaggccaccaacggcttcggcagccttagcgtcaactacaccctcgtcgtgctggatgacattagcccagggaaggagagcctggggcccgacagctcctctgggggtcaagaggaccccgccagccagcagtgggcacgaccgcgcttcacacagccctccaagatgaggcgccgggtgatcgcacggcccgtgggtagctccgtgcggctcaagtgcgtggccagcgggcaccctcggcccgacatcacgtggatgaaggacgaccaggccttgacgcgcccagaggccgctgagcccaggaagaagaagtggacactgagcctgaagaacctgcggccggaggacagcggcaaatacacctgccgcgtgtcgaaccgcgcgggcgccatcaacgccacctacaaggtggatgtgatccagcggacccgttccaagcccgtgctcacaggcacgcaccccgtgaacacgacggtggacttcggggggaccacgtccttccagtgcaaggtgcgcagcgacgtgaagccggtgatccagtggctgaagcgcgtggagtacggcgccgagggccgccacaactccaccatcgatgtgggcggccagaagtttgtggtgctgcccacgggtgacgtgtggtcgcggcccgacggctcctacctcaataagctgctcatcacccgtgcccgccaggacgatgcgggcatgtacatctgccttggcgccaacaccatgggctacagcttccgcagcgccttcctcaccgtgctgccagacccaaaaccgcaagggccacctgtggcctcctcgtcctcggccactagcctgccgtggcccgtggtcatcggcatcccagccggcgctgtcttcatcctgggcaccctgctcctgtggctttgccaggcccagaagaagccgtgcacccccgcgcctgcccctcccctgcctgggcaccgcccgccggggacggcccgcgaccgcagcggagacaaggaccttccctcgttggccgccctcagcgctggccctggtgtggggctgtgtgaggagcatgggtctccggcagccccccagcacttactgggcccaggcccagttgctggccctaagttgtaccccaaactctacacagacatccacacacacacacacacacactctcacacacactcacacgtggagggcaaggtccaccagcacatccactatcagtgctagacggcaccgtatctgcagtgggcacgggggggccggccagacaggcagactgggaggatggaggacggagctgcagacgaaggcaggggacccatggcgaggaggaatggccagcaccccaggcagtctgtgtgtgaggcatagcccctggacacacacacacagacacacacactacctggatgcatgtatgcacacacatgcgcgcacacgtgctccctgaaggcacacgtacgcacacacgcacatgcacagatatgccgcctgggcacacagataagctgcccaaatgcacgcacacgcacagagacatgccagaacatacaaggacatgctgcctgaacatacacacgcacacccatgcgcagatgtgctgcctggacacacacacacacacggatatgctgtctggacgcacacacgtgcagatatggtatccggacacacacgtgcacagatatgctgcctggacacacagataatgctgccttgacacacacatgcacggatattgcctggacacacacacacacacgcgtgcacagatatgctgtctggacaggcacacacatgcagatatgctgcctggacacacacttccagacacacgtgcacaggcgcagatatgctgcctggacacacgcagatatgctgtctagtcacacacacacgcagacatgctgtccggacacacacacgcatgcacagatatgctgtccggacacacacacgcacgcagatatgctgcctggacacacacacagataatgctgcctcaacactcacacacgtgcagatattgcctggacacacacatgtgcacagatatgctgtctggacatgcacacacgtgcagatatgctgtccggatacacacgcacgcacacatgcagatatgctgcctgggcacacacttccggacacacatgcacacacaggtgcagatatgctgcctggacacacgcagactgacgtgcttttgggagggtgtgccgtgaagcctgcagtacgtgtgccgtgaggctcatagttgatgagggactttccctgctccaccgtcactcccccaactctgcccgcctctgtccccgcctcagtccccgcctccatccccgcctctgtcccctggccttggcggctatttttgccacctgccttgggtgcccaggagtcccctactgctgtgggctggggttgggggcacagcagccccaagcctgagaggctggagcccatggctagtggctcatccccactgcattctccccctgacacagagaaggggccttggtatttatatttaagaaatgaagataatattaataatgatggaaggaagactgggttgcagggactgtggtctctcctggggcccgggacccgcctggtctttcagccatgctgatgaccacaccccgtccaggccagacaccaccccccaccccactgtcgtggtggccccagatctctgtaattttatgtagagtttgagctgaagccccgtatatttaatttattttgttaaacatgaaagtgcatcctttccctccaaaaaaaaaaaaaaaaaaaaaaaaaaaaaaaaaaaaaaaaaaaaaaaaaaaaaaaaaa

SEQ ID NO: 2375 - DNA, 2457 bp, Homo sapiens
cggggccggcgaactgcggcccggaacggctgaggaagggcccgtcccgccttccccggcgcgccatggagccccgggcggttgcagaagccgtggagacgggtgaggaggatgtgattatggaagctctgcggtcatacaaccaggagcactcccagagcttcacgtttgatgatgcccaacaggaggaccggaagagactggcggagctgctggtctccgtcctggaacagggcttgccaccctcccaccgtgtcatctggctgcagagtgtccgaatcctgtcccgggaccgcaactgcctggacccgttcaccagccgccagagcctgcaggcactagcctgctatgctgacatctctgtctctgaggggtccgtcccagagtccgcagacatggatgttgtactggagtccctcaagtgcctgtgcaacctcgtgctcagcagccctgtggcacagatgctggcagcagaggcccgcctagtggtgaagctcacagagcgtgtggggctgtaccgtgagaggagcttcccccacgatgtccagttctttgacttgcggctcctcttcctgctaacggcactccgcaccgatgtgcgccagcagctgtttcaggagctgaaaggagtgcgcctgctaactgacacactggagctgacgctgggggtgactcctgaagggaaccccccacccacgctccttccttcccaagagactgagcgggccatggagatcctcaaagtgctcttcaacatcaccctggactccatcaagggggaggtggacgaggaagacgctgccctttaccgacacctggggacccttctccggcactgtgtgatgatcgctactgctggagaccgcacagaggagttccacggccacgcagtgaacctcctggggaacttgcccctcaagtgtctggatgttctcctcaccctggagccacatggagactccacggagttcatgggagtgaatatggatgtgattcgtgccctcctcatcttcctagagaagcgtttgcacaagacacacaggctgaaggagagtgtagctcccgtgctgagcgtgctgactgaatgtgcccggatgcaccgcccagccaggaagttcctgaaggcccaggtgctgccccctctgcgggatgtgaggacacggcctgaggttggggagatgctgcggaacaagcttgtccgcctcatgacacacctggacacagatgtgaagagggtggctgccgagttcttgtttgtcctgtgctctgagagtgtgccccgattcatcaagtacacaggctatgggaatgctgctggccttctggctgccaggggcctcatggcaggaggccggcccgagggccagtactcagaggatgaggacacagacacagatgagtacaaggaagccaaagccagcataaaccctgtgaccgggagggtggaggagaagccgcctaaccctatggagggcatgacagaggagcagaaggagcacgaggccatgaagctggtgaccatgtttgacaagctctccaggaacagagtcatccagccaatggggatgagtccccggggtcatcttacgtccctgcaggatgccatgtgcgagactatggagcagcagctctcctcggaccctgactcggaccctgactgaggatggcagctcttctgctcccccatcaggactggtgctgcttccagagacttccttggggttgcaacctcgggaagccacatcccactggatccacacccgcccccacttctccatcttagaaaccccttctcttgactcccgttctgttcatgatttgcctctggtccagtttctcatctctggactgcaacggtcttcttgtgctagaactcaggctcagcctcgaattccacagacgaagtactttcttttgtctgcgccaagaggaatgtgttcagaagctgctgcctgagggcagggcctacctgggcacacagaagagcatatgggagggcaggggtttgggtgtgggtgcacacaaagcaagcaccatctgggattggcacactggcagagccagtgtgttggggtatgtgctgcacttcccagggagaaaacctgtcagaactttccatacgagtatatcagaacacacccttccaaggtatgtatgctctgttgttcctgtcctgtcttcactgagcgcagggctggaggcctcttagacattctccttggtcctcgttcagctgcccactgtagtatccacagtgcccgagttctcgctggttttggcaattaaacctccttcctactggtttagactacacttacaacaaggaaaatgcccctcgtgtgaccatagattgagatttataccacataccacacatagccacagaaacatcatcttgaaataaagaagagttttggacaaaaaaaaaaaaaaaaaaaaaaaaaaaaaaaaaaaaaa

SEQ ID NO: 2376 - DNA, 3032 bp, Homo sapiens
gaattccggagaaaggcgcaggggtgggagctgttgccgaagctgccacagcaaaagttctcccccctccccccttcccctcctctcaaggcccctagaaaggttggagctgccggccctgcagtcggtgaccgctgacgacttcggccgcgcccgcggatagcgggaggaatcagcagcttggaaattcaagcacgtgatctggcgggatgggcgtttgcctaacgtatttaatggaggaatcggatggcataagtgattaaggtggtattgaggatttctgaagcctatgaaaggtagaaactcaaccatgatttctttttcaactctacagcattcctttccttgaagtcttcgtttttaccttagtctcgggcagttatacttaagcatgaacattgacgacaaactggaaggattgtttcttaaatgtggcggcatagacgaaatgcagtcttccaggacaatggttgtaatgggtggagtgtctggccagtctactgtgtctggagagctacaggattcagtacttcaagatcgaagtatgcctcaccaggagatccttgctgcagatgaagtgttacaagaaagtgaaatgagacaacaggatatgatatcacatgatgaactcatggtccatgaggagacagtgaaaaatgatgaagagcagatggaaacacatgaaagacttcctcaaggactacagtatgcacttaatgtccctataagcgtaaagcaggaaattacttttactgatgtatctgagcaactgatgagagacaaaaaacaaatcagagagccagtagacttacagaaaaagaagaagcggaaacaacgttctcccgcaaaaatccttacaataaatgaggatggatcacttggtttgaaaacccctaaatctcacgtttgtgagcactgcaatgctgcctttagaacgaactatcacttacagagacatgtcttcattcatacaggtgaaaaaccatttcaatgtagtcaatgtgacatgcgtttcatacagaagtacctgcttcagagacatgagaagattcatactggtgaaaaaccatttcgctgtgatgaatgtggtatgagattcatacaaaaatatcatatggaaaggcataagagaactcatagtggagaaaaaccttaccagtgtgaatactgtttacagtatttttccagaacagatcgtgtattgaaacataaacgtatgtgccatgaaaatcatgacaaaaaactaaatacatgtgccatcaaaggtggccttctgacatctgaggaagattctggcttttctacatcaccaaaagacaactcactgccaaaaaagaaaaggcagaaaacggagaaaaaatcatctggaatggacaaagagagtgctttggacaaatctgacctgaaaaaagacaaaaatgattacttgcctgtttattcttcaagtactaaagtaaaagatgagtatatggttgcagaatatgctgttgaaatgccacattcgtcagttgggggctcgcatttagaagatgcgtcaggagaaatacacccacctaagttagttctcaaaaaaattaatagtaagagaagtctgaaacagccactggagcaaaatcaaacaatttcacctttatccacatatgaagagagcaaagtttcaaagtatgcttttgaacttgtggataaacaggctttactggactcagaaggcaatgctgacattgatcaggttgataatttgcaggaggggcccagtaaacctgtgcatagtagtactaattatgatgatgccatgcagtttttgaagaagaagcggtatcttcaagcagcaagtaacaacagcagggaatatgcgctgaatgtgggtaccatacgttctcagccttctgtaacacaagcagctgtggcaagtgtcattgatgaaagtaccacggcatccatattagagtcacaggcactgaatgtggagattaagagtaatcatgacaaaaatgttattccagatgaggtactgcagactctgttggatcattattcccacaaagctaatggacagcatgagatatccttcagtgttgcagatactgaagtgacttctagcatatcaataaattcttcagaagtaccagaggtcaccccatcagagaatgttggatcaagctcccaagcatcctcatcagataaagccaacatgttgcaggaatactccaagtttctgcagcaggctttggacagaactagccaaaatgatgcctatttgaatagcccgagccttaactttgtgactgataaccagaccctcccaaatcagccagcattctcttccatagacaagcaggtctatgccaccatgcccatcaatagctttcgatcaggaatgaattctccactaagaacaactccagataagtcccactttggactaatagttggtgattcacagcactcatttcccttttcaggtgatgagacaaaccatgcttctgccacatcaacacaggactttctggatcaagtcacttctcagaagaaagctgaggcccagcctgtccaccaagcttaccaaatgagctcctttgaacagcccttccgtgctccctatcatggatcaagagctggaatagctactcaatttagcactgccaatggacaggtgaaccttcggggaccagggacaagtgctgaattttcagaatttcccttggtgaatgtaaatgataatagagctgggatgacatcttcacctgatgccacaactggccagacttttggctaaaaaaaaaaaaaaagtgaaataatactggcactttagaacagattaatcaagagtggggttactatgtgtaaatggagtgctgtacagatttaagagcaatgcgtaataacaagttaagctgatatacgatgataataactgcatttcgtttggttagtcagcattctttgaactgccttacatgttgtcacctttatagaagcaatgcattacttgttttagatcagaaacttgctattccacccacaccaagtaa

SEQ ID NO: 2377 - DNA, 3149 bp, Homo sapiens
gacgcctgtgagacccgcgagcggcctcggggaccatggggagcgatcgggcccgcaagggcggagggggcccgaaggacttcggcgcgggactcaagtacaactcccggcacgagaaagtgaatggcttggaggaaggcgtggagttcctgccagtcaacaacgtcaagaaggtggaaaagcatggcccggggcgctgggtggtgctggcagccgtgctgatcggcctcctcttggtcttgctggggatcggcttcctggtgtggcatttgcagtaccgggacgtgcgtgtccagaaggtcttcaatggctacatgaggatcacaaatgagaattttgtggatgcctacgagaactccaactccactgagtttgtaagcctggccagcaaggtgaaggacgcgctgaagctgctgtacagcggagtcccattcctgggcccctaccacaaggagtcggctgtgacggccttcagcgagggcagcgtcatcgcctactactggtctgagttcagcatcccgcagcacctggtggaggaggccgagcgcgtcatggccgaggagcgcgtagtcatgctgcccccgcgggcgcgctccctgaagtcctttgtggtcacctcagtggtggctttccccacggactccaaaacagtacagaggacccaggacaacagctgcagctttggcctgcacgcccgcggtgtggagctgatgcgcttcaccacgcccggcttccctgacagcccctaccccgctcatgcccgctgccagtgggccctgcggggggacgccgactcagtgctgagcctcaccttccgcagctttgaccttgcgtcctgcgacgagcgcggcagcgacctggtgacggtgtacaacaccctgagccccatggagccccacgccctggtgcagttgtgtggcacctaccctccctcctacaacctgaccttccactcctcccagaacgtcctgctcatcacactgataaccaacactgagcggcggcatcccggctttgaggccaccttcttccagctgcctaggatgagcagctgtggaggccgcttacgtaaagcccaggggacattcaacagcccctactacccaggccactacccacccaacattgactgcacatggaacattgaggtgcccaacaaccagcatgtgaaggtgcgcttcaaattcttctacctgctggagcccggcgtgcctgcgggcacctgccccaaggactacgtggagatcaatggggagaaatactgcggagagaggtcccagttcgtcgtcaccagcaacagcaacaagatcacagttcgcttccactcagatcagtcctacaccgacaccggcttcttagctgaatacctctcctacgactccagtgacccatgcccggggcagttcacgtgccgcacggggcggtgtatccggaaggagctgcgctgtgatggctgggccgactgcaccgaccacagcgatgagctcaactgcagttgcgacgccggccaccagttcacgtgcaagaacaagttctgcaagcccctcttctgggtctgcgacagtgtgaacgactgcggagacaacagcgacgagcaggggtgcagttgtccggcccagaccttcaggtgttccaatgggaagtgcctctcgaaaagccagcagtgcaatgggaaggacgactgtggggacgggtccgacgaggcctcctgccccaaggtgaacgtcgtcacttgtaccaaacacacctaccgctgcctcaatgggctctgcttgagcaagggcaaccctgagtgtgacgggaaggaggactgtagcgacggctcagatgagaaggactgcgactgtgggctgcggtcattcacgagacaggctcgtgttgttgggggcacggatgcggatgagggcgagtggccctggcaggtaagcctgcatgctctgggccagggccacatctgcggtgcttccctcatctctcccaactggctggtctctgccgcacactgctacatcgatgacagaggattcaggtactcagaccccacgcagtggacggccttcctgggcttgcacgaccagagccagcgcagcgcccctggggtgcaggagcgcaggctcaagcgcatcatctcccaccccttcttcaatgacttcaccttcgactatgacatcgcgctgctggagctggagaaaccggcagagtacagctccatggtgcggcccatctgcctgccggacgcctcccatgtcttccctgccggcaaggccatctgggtcacgggctggggacacacccagtatggaggcactggcgcgctgatcctgcaaaagggtgagatccgcgtcatcaaccagaccacctgcgagaacctcctgccgcagcagatcacgccgcgcatgatgtgcgtgggcttcctcagcggcggcgtggactcctgccagggtgattccgggggacccctgtccagcgtggaggcggatgggcggatcttccaggccggtgtggtgagctggggagacggctgcgctcagaggaacaagccaggcgtgtacacaaggctccctctgtttcgggactggatcaaagagaacactggggtataggggccggggccacccaaatgtgtacacctgcggggccacccatcgtccaccccagtgtgcacgcctgcaggctggagactggaccgctgactgcaccagcgcccccagaacatacactgtgaactcaatctccagggctccaaatctgcctagaaaacctctcgcttcctcagcctccaaagtggagctgggaggtagaaggggaggacactggtggttctactgacccaactgggggcaaaggtttgaagacacagcctcccccgccagccccaagctgggccgaggcgcgtttgtgtatatctgcctcccctgtctgtaaggagcagcgggaacggagcttcggagcctcctcagtgaaggtggtggggctgccggatctgggctgtggggcccttgggccacgctcttgaggaagcccaggctcggaggaccctggaaaacagacgggtctgagactgaaaatggtttaccagctcccaggtgacttcagtgtgtgtattgtgtaaatgagtaaaacattttatttctttttaaaaaaaaaaa

SEQ ID NO: 2378 - DNA, 2327 bp, Homo sapiens
ggcacgaggggctgccccctccgccaccgccgccgcccgccggcaggttccctggtcagcgtcccatcccggtcgggagttctctccaggcggcacgatgccgaggaaacagtgaccctgagcgaagccaagccgggcggcaggaacttctgcaatgtcccatcaacctctcagctgcctcactgaaaaggaggacagccccagtgaaagcacaggaaatggacccccccacctggcccacccaaacctggacacgtttaccccggaggagctgctgcagcagatgaaagagctcctgaccgagaaccaccagctgaaagaagccatgaagctaaataatcaagccatgaaagggagatttgaggagctttcggcctggacagagaaacagaaggaagaacgccagttttttgagatacagagcaaagaagcaaaagagcgtctaatggccttgagtcatgagaatgagaaattgaaggaagagcttggaaaactaaaagggaaatcagaaaggtcatctgaggaccccactgatgactccaggcttcccagggccgaagcggagcaggaaaaggaccagctcaggacccaggtggtgaggctacaagcagagaaggcagacctgttgggcatcgtgtctgaactgcagctcaagctgaactccagcggctcctcagaagattcctttgttgaaattaggatggctgaaggagaagcagaagggtcagtaaaagaaatcaagcatagtcctgggcccacgagaacagtctccactggcacggcattgtctaaatataggagcagatctgcagatggggccaagaattacttcgaacatgaggagttaactgtgagccagctcctgctgtgcctaagggaagggaatcagaaggtggagagacttgaagttgcactcaaggaggccaaagaaagagtttcagattttgaaaagaaaacaagtaatcgttctgagattgaaacccagacagaggggagcacagagaaagagaatgatgaagagaaaggcccggagactgttggaagcgaagtggaagcactgaacctccaggtgacatctctgtttaaggagcttcaagaggctcatacaaaactcagcgaagctgagctaatgaagaagagacttcaagaaaagtgtcaggcccttgaaaggaaaaattctgcaattccatcagagttgaatgaaaagcaagagcttgtttatactaacaaaaagttagagctacaagtggaaagcatgctatcagaaatcaaaatggaacaggctaaaacagaggatgaaaagtccaaattaactgtgctacagatgacacacaacaagcttcttcaagaacataataatgcattgaaaacaattgaggaactaacaagaaaagagtcagaaaaagtggacagggcagtgctgaaggaactgagtgaaaaactggaactggcagagaaggctctggcttccaaacagctgcaaatggatgaaatgaagcaaaccattgccaagcaggaagaggacctggaaaccatgaccatcctcagggctcagatggaagtttactgttctgattttcatgctgaaagagcagcgagagagaaaattcatgaggaaaaggagcaactggcattgcagctggcagttctgctgaaagagaatgatgctttcgaagacggaggcaggcagtccttgatggagatgcagagtcgtcatggggcgagaacaagtgactctgaccagcaggcttaccttgttcaaagaggagctgaggacagggactggcggcaacagcggaatattccgattcattcctgccccaagtgtggagaggttctgcctgacatagacacgttacagattcacgtgatggattgcatcatttaagtgttgatgtatcacctccccaaaactgttggtaaatgtcagattttttcctccaagagttgtgcttttgtgttatttgttttcactcaaatattttgcctcattattcttgttttaaaagaaagaaaacaggccgggcacagtggctcatgcctgtaatcccagcactttgggaggtcgaggtgggtggatcacttggggtcagggtttgagaccagcctggccaacatggcggaaccctgtctctaccaaaattacaaaaattagccgagcatggtggcgcatgcctgtagtcgcagctactcgcgaggttgaggcaggagaattgcttgaacccaggaagtggcagttgcagtgagccgagacgacaccactgcactccagcctgggtgacagagggagactctgtctcgaaagaaaaaaaaaaaaaaaaaaaaaa

SEQ ID NO: 2379 - DNA, 1141 bp, Homo sapiens
gaccactggtcttgtcctcttctccagcatggtgtgtctgaagctccctggaggctcctgtatggcagcgctgacagtgacattgacggtgctgagctccccactggctttggctggggacacccaaccacgtttcttggagcaggctaagtgtgagtgtcatttcctcaatgggacggagcgagtgtggaacctgatcagatacatctataaccaagaggagtacgcgcgctacaacagtgacctgggggagtaccaggcggtgacggagctggggcggcctgacgctgagtactggaacagccagaaggacctcctggagcggaggcgggccgaggtggacacctactgcagatacaactacggggttgtggagagcttcacagtgcagcggcgagtccaacctaaggtgactgtgtatccttcaaagacccagcccctgcagcaccacaacctcctggtctgctctgtgaatggtttctatccaggcagcattgaagtcaggtggttccggaacagccaggaagagaaggctggggtggtgtccacaggcctgatccagaatggagactggaccttccagaccctggtgatgctggaaacagttcctcggagtggagaggtttacacctgccaagtggagcatccaagcatgatgagccctctcacggtgcaatggagtgcacggtctgaatctgcacagagcaagatgctgagtggagtcgggggctttgtgctgggcctgctcttccttgggacagggctgttcatctacttcaggaatcagaaaggacactctggacttcagccaacaggactcttgagctgaagtgcagatgaccacattcaaggaagaaccttctgccccagctttgcaagatgaaaagctttcccacttggctcttattcttccacaagagctttgtcaggaccaggttgttactggttcagcaactctgcagaaaatgtcctcccttgtggcttccttagctcctgttcttggcctgaagcctcacagctttgatggcagtgcctcatcttcaacttttgtgcttccctttacctaaactgtcctgcctcccatgcatctgtaccccccttgtgccacacattgcattattaaatgtttctcaaacatgga

SEQ ID NO: 2380 - DNA, 1843 bp, Homo sapiens
gcgagatccctaccgcagtagccgcctctgccgccgcggagcttcccgaacctctcagccgcccggagccgctcccggagcccggccgtagaggctgcaatcgcagccgggagcccgcagcccgcgccccgagcccgccgccgcccttcgagggcgccccaggccgcgccatggtgaaggtgacgttcaactccgctctggcccagaaggaggccaagaaggacgagcccaagagcggcgaggaggcgctcatcatcccccccgacgccgtcgcggtggactgcaaggacccagatgatgtggtaccagttggccaaagaagagcctggtgttggtgcatgtgctttggactagcatttatgcttgcaggtgttattctaggaggagcatacttgtacaaatattttgcacttcaaccagatgacgtgtactactgtggaataaagtacatcaaagatgatgtcatcttaaatgagccctctgcagatgccccagctgctctctaccagacaattgaagaaaatattaaaatctttgaagaagaagaagttgaatttatcagtgtgcctgtcccagagtttgcagatagtgatcctgccaacattgttcatgactttaacaagaaacttacagcctatttagatcttaacctggataagtgctatgtgatccctctgaacacttccattgttatgccacccagaaacctactggagttacttattaacatcaaggctggaacctatttgcctcagtcctatctgattcatgagcacatggttattactgatcgcattgaaaacattgatcacctgggtttctttatttatcgactgtgtcatgacaaggaaacttacaaactgcaacgcagagaaactattaaaggtattcagaaacgtgaagccagcaattgtttcgcaattcggcattttgaaaacaaatttgccgtggaaactttaatttgttcttgaacagtcaagaaaaacattattgaggaaaattaatatcacagcataaccccaccctttacattttgtgcagtgattattttttaaagtcttctttcatgtaagtagcaaacagggctttactatcttttcatctcattaattcaattaaaaccattaccttaaaatttttttctttcgaagtgtggtgtcttttatatttgaattagtaactgtatgaagtcatagataatagtacatgtcaccttaggtagtaggaagaattacaatttctttaaatcatttatctggatttttatgttttattagcattttcaagaagacggattatctagagaataatcatatatatgcatacgtaaaaatggaccacagtgacttatttgtagttgttagttgccctgctacctagtttgttagtgcatttgagcacacattttaattttcctctaattaaaatgtgcagtattttcagtgtcaaatatatttaactatttagagaatgatttccacctttatgttttaatatcctaggcatctgctgtaataatattttagaaaatgtttggaatttaagaaataacttgtgttactaatttgtataacccatatctgtgcaatggaatataaatatcacaaagttgtttaactagactgcgtgttgtttttcccgtataataaaaccaaagaatagtttggttcttcaaatcttaagagaatccacataaaagaagaaactattttttaaaaattcacttctatatatacaatgagtaaaatcacagattttttctttaaataaaaataagtcattttaataactaaaccagattctttgtggatactattaaagtaacatttaagcctcaaccttg

SEQ ID NO: 2381 - DNA, 1677 bp, Homo sapiens
cccaggctcctcgggactcggcgggtcctcctgggagtctcggaggggaccggctgtgcagacgccatggagttggtgctggtcttcctctgcagcctgctggcccccatggtcctggccagtgcagctgaaaaggagaaggaaatggacccttttcattatgattaccagaccctgaggattgggggactggtgttcgctgtggtcctcttctcggttgggatcctccttatcctaagtcgcaggtgcaagtgcagtttcaatcagaagccccgggccccaggagatgaggaagcccaggtggagaacctcatcaccgccaatgcaacagagccccagaaagcagagaactgaagtgcagccatcaggtggaagcctctggaacctgaggcggctgcttgaacctttggatgcaaatgtcgatgcttaagaaaaccggccacttcagcaacagccctttccccaggagaagccaagaacttgtgtgtcccccaccctatcccctctaacaccattcctccacctgatgatgcaactaacacttgcctccccactgcagcctgcggtcctgcccacctcccgtgatgtgtgtgtgtgtgtgtgtgtgtgtgactgtgtgtgtttgctaactgtggtctttgtggctacttgtttgtggatggtattgtgtttgttagtgaactgtggactcgctttcccaggcaggggctgagccacatggccatctgctcctccctgcccccgtggccctccatcaccttctgctcctaggaggctgcttgttgcccgagaccagccccctcccctgatttagggatgcgtagggtaagagcacgggcagtggtcttcagtcgtcttgggacctgggaaggtttgcagcactttgtcatcattcttcatggactcctttcactcctttaacaaaaaccttgcttccttatcccacctgatcccagtctgaaggtctcttagcaactggagatacaaagcaaggagctggtgagcccagcgtttgacgtcaggcaggctatgcccttccgtggttaatttcttcccaggggcttccacgaggagtccccatctgccccgccccttcacagagcgcccggggattccaggcccagggcttctactctgcccctggggaatgtgtcccctgcatatcttctcagcaataactccatgggctctgggaccctaccccttccaaccttccctgcttctgagacttcaatctacagcccagctcatccagatgcagactacagtccctgcaattgggtctctggcaggcaatagttgaaggactcctgttccgttggggccagcacaccgggatggatggagggagagcagaggcctttgcttctctgcctacgtccccttagatgggcagcagaggcaactcccgcatcctttgctctgcctgtcggtggtcagagcggtgagcgaggtgggttggagactcagcaggctccgtgcagcccttgggaacagtgagaggttgaaggtcataacgagagtgggaactcaacccagatcccgcccctcctgtcctctgtgttcccgcggaaaccaaccaaaccgtgcgctgtgacccattgctgttctctgtatcgtgatctatcctcaacaacaacagaaaaaaggaataaaatatcctttgtttcctagtga

SEQ ID NO: 2382 - DNA, 1844 bp, Homo sapiens
cgggcaggtggggaacctccctgaagagtgccctggtcaccgggcaggtacgagtcggctcagcctggagggacccaaccagagcctggcctgggagccaggatggccatccacaaagccttggtgatgtgcctgggactgcctctcttcctgttcccaggggcctgggcccagggccatgtcccacccggctgcagccaaggcctcaaccccctgtactacaacctgtgtgaccgctctggggcgtggggcatcgtcctggaggccgtggctggggcgggcattgtcaccacgtttgtgctcaccatcatcctggtggccagcctcccctttgtgcaggacaccaagaaacggagcctgctggggacccaggtattcttccttctggggaccctgggcctcttctgcctcgtgtttgcctgtgtggtgaagcccgacttctccacctgtgcctctcggcgcttcctctttggggttctgttcgccatctgcttctcttgtctggcggctcacgtctttgccctcaacttcctggcccggaagaaccacgggccccggggctgggtgatcttcactgtggctctgctgctgaccctggtagaggtcatcatcaatacagagtggctgatcatcaccctggttcggggcagtggcgagggcggccctcagggcaacagcagcgcaggctgggccgtggcctccccctgtgccgtcgccaacatggactttgtcatggcactcatctacgtcatgctgctgctgctgggtgccttcctgggggcctggcccgccctgtgtggccgctacaagcgctggcgtaagcatggggtctttgtgctcctcaccacagccacctccgttgccatatgggtggtgtggatcgtcatgtatacttacggcaacaagcagcacaacagtcccacctgggatgaccccacgctggccatcgccctcgccgccaatgcctgggccttcgtcctcttctacgtcatccccgaggtctcccaggtgaccaagtccagcccagagcaaagctaccagggggacatgtaccccacccggggcgtgggctatgagaccatcctgaaagagcagaagggtcagagcatgttcgtggagaacaaggccttttccatggatgagccggttgcagctaagaggccggtgtcaccatacagcgggtacaatgggcagctgctgaccagtgtgtaccagcccactgagatggccctgatgcacaaagttccgtccgaaggagcttacgacatcatcctcccacgggccaccgccaacagccaggtgatgggcagtgccaactcgaccctgcgggctgaagacatgtactcggcccagagccaccaggcggccacaccgccgaaagacggcaagaactctcaggtctttagaaacccctacgtgtgggactgagtcagcggtggcgaggagaggcgggcggatttggggagggccctgaggacctggccccgggcaagggactctccaggctcctcctccccctggcaggccagcaacatgtgccccagatctggaagggcctccctctctgccagtgtttgggtgggtgtcatgggtgtccccacccactcctcagtgtttgtggagtcgaggagccaaccccagcctcctgccaggatcacctcggcggtcacactccagccaaatagtgttctcggggtggtggctgggcagcgcctatgtttctctggagattcctgcaacctcaagagacttcccaggcgctcaggcctggatcttgctcctctgtgaggaacaagggtgcctaataaatacatttctgctttattaaaaaaaaaaaaaaaaaa

SEQ ID NO: 2383 - DNA, 1283 bp, Homo sapiens
ccgcccccctcgtctctggtccctacctctctgctgtgtcttcatgtccctgagggtcttgggctctgggacctggccctcagcccctaaaatgttcctcctgctgacagcacttcaagtcctggctatagccatgacacagagccaagaggatgagaacaagataattggtggccatacgtgcacccggagctcccagccgtggcaggcggccctgctggcgggtcccaggcgccgcttcctctgcggaggcgccctgctttcaggccagtgggtcatcactgctgctcactgcggccgcccgatccttcaggttgccctgggcaagcacaacctgaggaggtgggaggccacccagcaggtgctgcgcgtggttcgtcaggtgacgcaccccaactacaactcccggacccacgacaacgacctcatgctgctgcagctacagcagcccgcacggatcgggagggcagtcaggcccattgaggtcacccaggcctgtgccagccccgggacctcctgccgagtgtcaggctggggaactatatccagccccatcgccaggtaccccgcctctctgcaatgcgtgaacatcaacatctccccggatgaggtgtgccagaaggcctatcctagaaccatcacgcctggcatggtctgtgcaggagttccccagggcgggaaggactcttgtcagggtgactctgggggacccctggtgtgcagaggacagctccagggcctcgtgtcttggggaatggagcgctgcgccctgcctggctaccccggtgtctacaccaacctgtgcaagtacagaagctggattgaggaaacgatgcgggacaaatgatggtcttcacggtgggatggacctcgtcagctgcccaggccctcctctctctactcaggacccaggagtccaggccccagcccctcctccctcagacccaggagtccaggcccccagcccctcctccctcagacccgggagtccaggcccccagcccctcctccctcagacccaggagccccagtccccagcatcctgatctttactccggctctgatctctcctttcccagagcagttgcttcaggcgttttctccccaccaagcccccacccttgctgtgtcaccatcactactcaagaccggaggcacagagggcaggagcacagaccccttaaaccggcattgtattccaaagacgacaatttttaacacgcttagtgtctctaaaaaccgaataaataatgacaataaaaatggaatcatcctaaattgta

SEQ ID NO: 2384 - DNA, 3258 bp, Homo sapiens
gccgaatagccgtgtttgggacctgggctcgggcttcttgcgtccccgctaagaacatgtcacggggccgaatcgtccgtattctctcagcttcaagctcctctacttttcaaccaggtcactagcccttgactcctcttatcaaacttccggaactgccaccccaccagtgactccacaggcaccagggcatgcaacagggctgggacaggaaggctctcttcttcacctcaagcctgctgggctaacacttgcgatttttactagagttaactttgtaatgtatgtctctgactctagaatttcaagagaagttccacttagtgactcctaagtggaagttctaagatggcttcccagtgaggtgatgaagaggtttgagctttagagtgcagttgcaaagctcttctctgacctgaacaatggctgtagctgtggaccaacaaatccagactccttcagtacaagatctccaaatagttaaactggaagaagattcccactgggagcaggaaatttcccttcaagggaattaccctggaccagagacatcctgccagagcttttggcatttccgttaccaagaagcatcacgaccccgagaggccctcctccagctccagaagctctgttgtcagtggctaaggccagagaagtgtacaaaagagcagatcctggagttgctggtcctagaacagttcccgactgtccttctccaggagatccagatctgggtcagacagcagcatccggagagtggagaggaggcagtggccctggtggaagacttgcagaaagaacctggaagacagaggctggagcctcgggcgaggccgtccggccgcacccctcctgctcagctgcggtcgccatggccaatgacagctgcgggcccggcgagccgagctcgagcgagcgagaccggcagtactgcgagctgtgcgggaagatggagaacctgctgcgctgcagccgcagctccttctgctgcaaggagcgccagcgccaggactggaagaagcacaagctcgtgtgccagggcagcgagggcgccctcggccacggagggggccctcaccaggactccggccccgcgccgcccgctgcagcgccgccgtccagggaccgggccctggaggccaggaaggcagcgaggcgccgggacagcgcctccggggacgcagccaaggcaaaggccaagtccgcggccgaccccgcggcggccgcgtccccgcctcgcgcgtccccgggccggacaaaagccatggctgcttgttatccggtcaatggaacgggttatgtacgtcatgttgataatccaaatggagacggaagacgtgtgaaatgtattacattacgttaaagaacgggatgccaaggtaagtggaggtatacttcgaatttttctagaaggtaaagcctagtttgctgacattgaacccaaatttgatagactgctgtttttctggtctgaccatcgcaaccctcatgaagtacaaccagcatatgctacaaagtacgcaataactgtttggtatttgatgcagatgagagagcacgagctaaagtaaaatatctaacaggtgaaaaaggtgtgaggattgaactcaataaaccttcagattcagtcagtaaagacgtcttatagagcctttgatccagcaataccccacttcacctacaataattgttgacgctatttgttaatttgtgaatacgaataaatgggataaagaaaaatagacaaccagttcgcattttagtaaggaaacaaacaactttgtgtgttgcatcaaacagaagattctgactgctgtgactttgtaccgcatgatcaacttagaatctgtgattgcttacaggaagaagataagctactaatagaaaatgtttttacctctggatatgaaataagtgccctgtgtagaatttttttcattcttatattttgccagatctgttacgtagctgagttaatttcatctctacttttttaatatatgtcaagtttgaattggaataatttttctatgattaggtacaatttatcaaaactgaattgagaaaaaattacagtatttctcaaaataacgtcaatctatttttgtaaacctcttcatactattaaattttgccctaaaagacctcttaataatgattgttgccagtgactgattaattttattttacttaaaataagaaaaggagcactttaattacaactgaaaaatcagattgttttgcagtccttcctatcttacactaatttgaactcttaaagattgctgcttttttttgatattgtcaataatgaaacccaattgtaaaacagtcaccatttactaccagtaacttttagttaatgtcttacaaggaaaaagacacaataagaagagtttaattttttttttttttttgagcctgggcgacagagtgagactccgtctcaaaaaaaaaaaaaaaaagaaatgtttcattttggtttttcaccaaccttcctttgataggacaaagcagatactaagagggggaggaaaggctgttctgtgtctgaacccagttgggctagtccccaagaggagctgagagccatgtactctaatgcctcccttttcttcccccagccctgcctgatgtggctctgggaattcctgcagagaagagcaggggtggccaggagatagtgagcagctcccaggaggcatggagggatccagaacctggactgaagaaccacctagaaataactcagcagaattctgaaaatgaggtcacgctgggtaagaatgcctttttttttttttcatagtcaaagttagctatggagtttctgtagtattcactactccagacctttttcaagttgaattttttttctttttccctatgtctgttcttacgtattttttttaaacttttatttcagtagtgtttggggaacaagtagtgtttggttgcatggaaaagttcttcagtggtgatttctgagattttggtgcacccatcacccaagggtagtcttttttatccatcaagtctgtacccaatgtgtagtctttgtttttttctttttttttttttttgagactgagtctcattctatcacccaggctggagtggagtggtatgatcttgactcactgcaacatctgcctcccgggttcaagtgattctcctgcctcagcctcctgagtcgctgggattactgagattgtgccactgcactccagcctgggcgacagagtgagactccgtctc

SEQ ID NO: 2385 - DNA, 5163 bp, Homo sapiens
ttaggggcagaaaaacatttgtaataattaatggctttgagagacacaaggctttgtttgccccagagtattagttaacccacctagtgctcctaatcatacaatattaaggattgggagggacattcattgcctcactctctatttgtttcaccttctgtaaaattggtagaataatagtacccacttcatagcattgtatgatgattaaattggttaatatttttaaaatgcttagaacacagattgggcacataacagcaagcaccacatgtgtttataagataaattcctttgtgttgccttccgttaaagtttaaataagtaaataaataaataaatacttgcatgacattttgaagtctctctataacatctgagtaagtggcggctgcgacaatgctactggagttccagaatcgtgttggtgacaagattgttcaccagcatatggtgtggtgaaaactcactaatttggaattagttcagattattaagcctgaataggtgaaaatcctgaaatcaaggatctttggaactatttgaaatcagtattttatattttcctgttgtattcattaaagtgttgcaagtgttctatttgatggattaagtatatttaggatatacatgttcaatttgtgattttgtatacttaattggaacaagaaagctaataaaggttttgatatggacatctattcttttaagtaaacttcaatgaaaatatatgagtagagcatatagagatgtaaataatttgtggacacaccacagactgaaatagcaaatttaaaagaaattgttggaagaatcaagtgtttgtggaatgagtcctcctagtaaagttcctgctcttgtgaataattaagcctcatgtataattactatagcaaaaggaagcctaagaagtattagactctacttgtatttaaattacattttacataatttatgtgtatgaaaaatgttttaaatgcttattttcgtaagccatgagatagctcctttatattttaagaatttctgaattaatttgcttggattttattagtgcaaatggcagagctagcaattcctttttctgtgttcccattccatcctattcatccctcttttaggaaactctgaactctggattgtccttgtttacatacctgcctcctgcattggactatgtgtctctgagtgtagtatgactaattcatttgtttgtcaaggactctcaatgcatttgttgaacagcctaattagtaatgtctgcaacaatgacattttactgtatttaataaagctctgggaaagtaggatacacataagacaggtctaggtctaaattctttacagaaacttggatttttagttcggtttgaaatttgaagatgtgagtatatttatctcagtttcccaaaggacaagctaattggaattatcatcctctttcacttgattggatccccagaatgccatttacgcatgcagcaggattttataacagttttaaattctgtatatttgatgaagaggttttatatttttggattcaagcctctttttaaacttctacaatatggtttacaataattccttatatcctgcttttgaaatacatattacaactttttaagtttggaaggctatatttcaaggactgaagttacagtatactcaagtgatacacaagcctagcaccccactttccacatagtgttcgataaagattgataaactcgaaatcacagaccttttaattcttaagacaaatagcagcagaaagaaacatctttggcttatttctggtaaggtttttatgctctgtaaaacaaagaattgtattcatccgcgcagcacagattctattaaaaataaatgtgagagtcgttaatgtagtactgctcatttaccatcaaaattcacttttcaggaataatcccatcagtttaaattggatattggaatgagcattgattacatttaacttggtagcccaaaatttcttcatggggttttgaactcggcgggatttcaaaggttttaaaaatgagtttttgattttttttaaaaccctcaaatttcattacctttaaactaggtcgaaacggggcgcaagagattggattaacaccatagtaatacttattttgttcttaaccatttcagggcttcttgaaatagaggctgtatggtgtaatggaaaaaacagccttggaatctgggagcctgattcctggattcagtcccagttttgcgtgaccttgggcaagttactttacttctctgaatttccgtttcctcctctgcaaaatgaggatcgcaatagccaccttgcaaccttgactggagcgagcctcgcacaccccgcgccggcctggaggaagagcagccatgattacgccgccttcgctccgctacccgcttgcggctggcgccctcctccagcaggtgtaggcgctgccgcgctgccccacgcctttccgccgctcgcgggcctgcgcctcggcgtccccgaggaggccgctgcgggctgaggtagcgcaccggcctctcggcgtcccagtccggtcccgggcggagggaaagcgggcgacccacctccgaggcagaagccgaggcccggccccgccgagtgcggaggagcgcaggcagcccccgcccctcggccctccccccggccctcccggccctccctccgccccctccgccctcgcgcgccgcccgcccgggtcgccgcggggccgtggtgtacgtgcagagcgcgcagagcgagtggcgcccgtatgccctgcgctcctccacagcctgggccgggccgcccgggacgctgaggcggcggcggcggccgagggggccggtcttgcgctccccaggcccgcgcgcctgagcccaggttgccattcgccgcacaggccctattctctcagccctcggcggcgatgaggcgctgaggcggctgccggcgctgcgccggagcttaggactcggaagcggccgggccgagggcgtggggtgccggcctccctgaggcgagggtagcgggtgcatggcgcagtaacggcccctatctctctccccgctccccagcctcgggcgaggccgtccggccgctacccctcctgctcggccgccgcagtcgccgtcgccgccgccgccgccgccatggccaatgacagcggcgggcccggcgggccgagcccgagcgagcgagaccggcagtactgcgagctgtgcgggaagatggagaacctgctgcgctgcagccgctgccgcagctccttctactgctgcaaggagcaccagcgtcaggactggaagaagcacaagctcgtgtgccagggcagcgagggcgccctcggccacggagtgggcccacaccagcattccggccccgcgccgccggctgcagtgccgccgcccagggccggggcccgggagcccaggaaggcagcggcgcgccgggacaacgcctccggggacgcggccaagggaaaagtaaaggccaagcccccggccgacccagcggcggccgcgtcgccgtgtcgtgcggccgccggcggccagggctcggcggtggctgccgaagccgagcccggcaaggaggagccgccggcccgctcatcgctgttccaggagaaggcgaacctgtaccccccaagcaacacgcccggggatgcgctgagccccggcggcggcctgcggcccaacgggcagacgaagcccctgccggcgctgaagctggcgctcgagtacatcgtgccgtgcatgaacaagcacggcatctgtgtggtggacgacttcctcggcaaggagaccggacagcagatcggcgacgaggtgcgcgccctgcacgacaccgggaagttcacggacgggcagctggtcagccagaagagtgactcgtccaaggacatccgaggcgataagatcacctggatcgagggcaaggagcccggctgcgaaaccattgggctgctcatgagcagcatggacgacctgatacgccactgtaacgggaagctgggcagctacaaaatcaatggccggacgaaagccatggttgcttgttatccgggcaatggaacgggttatgtacgtcatgttgataatccaaatggagatggaagatgtgtgacatgtatatattatcttaataaagactgggatgccaaggtaagtggaggtatacttcgaatttttccagaaggcaaagcccagtttgctgacattgaacccaaatttgatagactgctgtttttctggtctgaccgtcgcaaccctcatgaagtacaaccagcatatgctacaaggtacgcaataactgtttggtattttgatgcagatgagagagcacgagctaaagtaaaatatctaacaggtgaaaaaggtgtgagggttgaactcaataaaccttcagattcggtcggtaaagacgtcttctagagcctttgatccagcaataccccacttcacctacaatattgttaactatttgttaacttgtgaatacgaataaatgggataaagaaaaatagacaaccagttcgcattttaataaggaaacagaaacaactttttgtgttgcatcaaacagaagattttgactgctgtgactttgtactgcatgatcaacttcaaatctgtgattgcttacaggaggaagataagctactaattgaaaatggtttttacatctggatatgaaataagtgccctgtgtagaatttttttcattcttatattttgccagatctgttatctagctgagttcatttcatctctcccttttttatatcaagtttgaatttgggataatttttctatattaggtacaatttatctaaactgaattgagaaaaaattacagtattattcctcaaaataacatcaatctatttttgtaaacctgttcatactattaaattttgccctaaaagacctcttaataatgattgttgccagtgactgatgattaattttattttacttaaaataagaaaaggagcactttaattacaactgaaaaatcagattgttttgcagtccttccttacactaatttgaactcttaaagattgctgctttttttttgacattgtcaataacgaaacctaattgtaaaacagtcaccatttactaccaataacttttagttaatgttttacaagg

SEQ ID NO: 2386 - DNA, 2746 bp, Homo sapiens
gtcctaagatggctgctgggcgaccacttcctgacagctccagttaacgggactgccagcaggctagacatccttcgccggaatgtgcagcgcttagttctgtgcccgggaggggcttctctctcttttgggattggagtgtggcattgccgccagaaagcctgcagaattccgggttgtgcagccaagcaggaacggtgtacctttctagacccatcctcttgcaatcttggaccctaagaaaagatgtggagtgggctgctacctcctggcctaaatgaaagtgacgctgagtcaaactcggaagatgaagctacgttggagaactctggacttaacttacaggaagataaagaggatgagagcatcagaaaaacagaaatcatagatttctcaacagatgaaccaaaaactgaaacagagtcaaatgtaaatgcctatgaagagtgtccttctggaattcccatagatatgtggaataaatttcaagaattgcataaaaaacattctgaacagaaaagcacaacctcaagattcagagggaaaagaagaaaacgctccagaaaagataaattgaagaatgaaaaagaattacatagtgaaccgtcctcaaatgaaacccagtggaaagagcttactcagtattttggagtcaatgatagatttgacccgcctgttaaaaggaaaaaagttgagaagtcaggccttgaaaagaggatagaccaggctgtggaggagtggaatattgagaaggctgaggaactcagcaaccagctagctactcgagagcttggtgtaaaaattgccaaagcagttgcctgccacaactttgtaaaagccaaaaaggaggttgaaaattcacaggctgcccgaaaaaagaagaaacttgcatgggggtttgaagcaaagaagagatgggaaaccaaaagcaacatgggatacatgtaacttgccagagtgcttcaagacatttgtagactcaaatgctcaatttactgagaatgttttcctgcctatgttaatatgtcagaaaattgatagcactaaaacaaaaataagcataaaatttgggattttgattatcagctcttttcagtctttctttaaggactttgtcctattgaagtgaataaaatgaagcattctgttatttgtataagaaatgtaagaaaaaaaatatagaaagaagaggataggattttgttcatttgtatggatggacccttggtataaaatcacttttggcgctttccattcatttggtttagcacagccagtgagcttctcgtactttctttcttttttttttttttttgagacagagcctcgcttgctctgtcacccaggctagagtgcagtagcacgatcttggctcactgcaaccactgcttcctgggttcaagtgattctcatgcctcagcctcctgagtagctgggattatggacaaatgccaccacacccggctaatttttttttttttttttgtatttttagtagagacagagttttgctgtgttggtcaggctggtcttgaactcctggcctcatatgattcacctgcctctgcctcccaaagttctgggagtacagacatgagctaccatgctgcccttgtattttcttatctgtacccagtgtaactacacgtttactggaactgtgtttttaagactgacagttgtttataatggattagtcgtaagtgccaaaaagtctcagttgatattatctttacaaatgacttgaccttaatgttataaaagtagttactgttttttttttaattggaggcagacttgatatttcagagttgcatagtaaaagcaatttgttaatttttgtgtattttcagataaactattacaataaagaaaggagcagaatgtagtatttggaagatgatttaaattcagcaacgcctaaaaatgtcttcctaagtatttttctcagccatgtcattctttaaattatgagatggttcttagaagagaaaatggtgtaattgtattaaacagacaattataactcaagataatataactttgaaccttctaagaactgatttgtttggttttcctcccattccccattcctccttaaaagattgaatgaattaatgagcagaaagagaggattggtaacatgggaaatcgttttcattagatgtacatttcctggttctgacaggaaaggggctccggaaaatcataaaacaagcaggtgaacaagaccaggtgtgtcggcacctccctgctcagtgcccagcggaggtaaagaaccactcagcatggtttttgtcagttcacctcttctgtcgttgtcagaggtttcctacctgtctgatataaactttctctgggttgataatataaattcagaaacatgtaaaatgaatcatgattatattactgttatttttagacttaaaatagtaacaaaattttatttatggtggcacatttaatggctttttttttctgtgttctggaataagagaatacctagctactatttaagcatccaaaaatcatatcttgctttcatttagttgagaaaagccagcatagagaaagcaaagttttagaatattatgtgtcatactaattcagtatccagaccaaatgttggaaagtcttattttatgatttaatatcccttgttccattttacagatatgatcatgtaaaacttacctacaatattcatttcaaactgctaaattaggtaaatacagacttttagtat

SEQ ID NO: 2387 - DNA, 2770 bp, Homo sapiens
gagtctggccgcagtcgcggcagtggtggcttcccatccccaaaaggcgccctccgactccttgcgccgcactgctcgccgggccagtccggaaacgggtcgtggagctccgcaccactcccgctggttcccgaaggcagatcccttctcccgagagttgcgagaaactttcccttgtccccgacgctgcagcggctcgggtaccgtggcagccgcaggtttctgaaccccgggccacgctccccgcgcctcggcttcgcgctcgtgtagatcgttccctctctggttgcacgctggggatcccggacctcgattctgcgggcgagatgcccctgggacacatcatgaggctggacctggagaaaattgccctggagtacatcgtgccctgtctgcacgaggtgggcttctgctacctggacaacttcctgggcgaggtggtgggcgactgcgtcctggagcgcgtcaagcagctgcactgcaccggggccctgcgggacggccagctggcggggccgcgcgccggcgtctccaagcgacacctgcggggcgaccagatcacgtggatcgggggcaacgaggagggctgcgaggccatcagcttcctcctgtccctcatcgacaggctggtcctctactgcgggagccggctgggcaaatactacgtcaaggagaggtctaaggcaatggtggcttgctatccgggaaatggaacaggttatgttcgccacgtggacaaccccaacggtgatggtcgctgcatcacctgcatctactatctgaacaagaattgggatgccaagctacatggtgggatcctgcggatatttccagaggggaaatcattcatagcagatgtggagcccatttttgacagactcctgttcttctggtcagatcgtaggaacccacacgaagtgcagccctcttacgcaaccagatatgctatgactgtctggtactttgatgctgaagaaagggcagaagccaaaaagaaattcaggaatttaactaggaaaactgaatctgccctcactgaagactgaccgtgctctgaaatctgctggccttgttcattttagtaacggttcctgaattctcttaaattctttgagatccaaagatggcctcttcagtgacaacaatctccctgctacttcttgcatccttcacatccctgtcttgtgtgtggtacttcatgttttcttgccaagactgtgttgatcttcagatactctctttgccagatgaagttatttgctaactccagaaattcctgcagacatcctactcggccagcggtttacctgatagattcggtaatactatcaagagaagagcctaggagcacagcgagggaatgaaccttacttgcactttatgtatacttcctgatttgaaaggaggaggtttgaaaagaaaaaaatggaggtggtagatgccacagagaggcatcacggaagccttaacagcaggaaacagagaaatttgtgtcatctgaacaatttccagatgttcttaatccagggctgttggggtttctggagaattatcacaacctaatgacattaatacctctagaaagggctgctgtcatagtgaacaatttataagtgtcccatggggcagacactccttttttcccagtcctgcaacctggattttctgcctcagctccattttgctgaaaataatgactttctgaataaagatggcaacacaattttttctccattttcagttcttacctgggaacctaattccccagaagctaaaaaactagacattagttgttttggttgctttgttggaatggaatttaaatttaaatgaaaggaaaaatatatccctggtagttttgtgttaaccactgataactgtggaaagagctaggtctactgatatacaataaacatgtgtgcatcttgaacaatttgagaggggaggtggagttggaaatgtgggtgttcctgtttttttttttttttttttttttttttagttttcctttttaatgagctcaccctttaacacaaaaaaagcagggtgatgtattttaaaaaaggaagtggaaataaaaaaatctcaaagctatttgagttctcgtctgtccctagcagtctttcttcagctcacttggctctctagatccactgtggttggcagtatgaccagaatcatggaacttgctagaactgtggaagcttctactcctgcagtaagcacagatcgcactgcctcaataacttggtattgagcacgtattttgcaaaagctacttttcctagttttcagtattactttcatgttttaaaaatccctttaatttcttgcttgaaaatcccatgaacattaaagagccagaaatattttcctttgttatgtacggatatatatatatatatagtcttccaagatagaagtttactttttcctcttctggttttggaaaatttccagataagacatgtcaccattaattctcaacgactgctctattttgttgtacggtaatagttatcaccttctaaattactatgtaatttactcacttattatgtttattgtcttgtatcctttctctggagtgtaagcacaatgaagacaggaattttgtatatttttaaccaatgcaacatactctcagcacctaaaatagtgccgggaacatagtaagggctcagtaaatacttgttgaataaactcagtctcctacattagcattctaaaaaaaaaaaaaaaaaaaaaaaaaaaaaaaaaaaaaaaaaag

SEQ ID NO: 2388 - DNA, 1332 bp, Homo sapiens
cccccgccccaccagccatggtggtttctggagcgcccccagccctgggtgggggctgtctcggcaccttcacctccctgctgctgctggcgtcgacagccatcctcaatgcggccaggatacctgttcccccagcctgtgggaagccccagcagctgaaccgggttgtgggcggcgaggacagcactgacagcgagtggccctggatcgtgagcatccagaagaatgggacccaccactgcgcaggttctctgctcaccagccgctgggtgatcactgctgcccactgtttcaaggacaacctgaacaaaccatacctgttctctgtgctgctgggggcctggcagctggggaaccctggctctcggtcccagaaggtgggtgttgcctgggtggagccccaccctgtgtattcctggaaggaaggtgcctgtgcagacattgccctggtgcgtctcgagcgctccatacagttctcagagcgggtcctgcccatctgcctacctgatgcctctatccacctccctccaaacacccactgctggatctcaggctgggggagcatccaagatggagttcccttgccccaccctcagaccctgcagaagctgaaggttcctatcatcgactcggaagtctgcagccatctgtactggcggggagcaggacagggacccatcactgaggacatgctgtgtgccggctacttggagggggagcgggatgcttgtctgggcgactccgggggccccctcatgtgccaggtggacggcgcctggctgctggccggcatcatcagctggggcgagggctgtgccgagcgcaacaggcccggggtctacatcagcctctctgcgcaccgctcctgggtggagaagatcgtgcaaggggtgcagctccgcgggcgcgctcaggggggtggggccctcagggcaccgagccagggctctggggccgccgcgcgctcctagggcgcagcgggacgcggggctcggatctgaaaggcggccagatccacatctggatctggatctgcggcggcctcgggcggtttcccccgccgtaaataggctcatctacctctacctctgggggcccggacggctgctgcggaaaggaaaccccctccccgacccgcccgacggcctcaggccccgcctccaaggcatcaggccccgcccaacggcctcatgtccccgcccccacgacttccggccccgccccgggccccagcgcttttgtgtatataaatgttaatgatttttataggtatttgtaaccctgcccacatatcttatttattcctccaatttcaataaattatttattctc

SEQ ID NO: 2389 - DNA, 2669 bp, Homo sapiens
gcctgctgccgcctgggccccgccgagcggagctagcgccgcgcgcagagcacacgctcgcgctccagctcccctcctgcgcggttcatgactgtgtcccctgaccgcagcctctgcgagcccccgccgcaggaccacggcccgctccccgccgccgcgagggccccgagcgaaggaaggaagggaggcgcgctgtgcgccccgcggagcccgcgaaccccgctcgctgccggctgcccagcctggctggcaccatgctgcccgcgcgctgcgcccgcctgctcacgccccacttgctgctggtgttggtgcagctgtcccctgctcgcggccaccgcaccacaggccccaggtttctaataagtgaccgtgacccacagtgcaacctccactgctccaggactcaacccaaacccatctgtgcctctgatggcaggtcctacgagtccatgtgtgagtaccagcgagccaagtgccgagacccgaccctgggcgtggtgcatcgaggtagatgcaaagatgctggccagagcaagtgtcgcctggagcgggctcaagccctggagcaagccaagaagcctcaggaagctgtgtttgtcccagagtgtggcgaggatggctcctttacccaggtgcagtgccatacttacactgggtactgctggtgtgtcaccccggatgggaagcccatcagtggctcttctgtgcagaataaaactcctgtatgttcaggttcagtcaccgacaagcccttgagccagggtaactcaggaaggaaagatgacgggtctaagccgacacccacgatggagacccagccggtgttcgatggagatgaaatcacagccccaactctatggattaaacacttggtgatcaaggactccaaactgaacaacaccaacataagaaattcagagaaagtctattcgtgtgaccaggagaggcagagtgccctggaagaggcccagcagaatccccgtgagggtattgtcatccctgaatgtgcccctgggggactctataagccagtgcaatgccaccagtccactggctactgctggtgtgtgctggtggacacagggcgcccgctgcctgggacctccacacgctacgtgatgcccagttgtgagagcgacgccagggccaagactacagaggcggatgaccccttcaaggacagggagctaccaggctgtccagaagggaagaaaatggagtttatcaccagcctactggatgctctcaccactgacatggttcaggccattaactcagcagcgcccactggaggtgggaggttctcagagccagaccccagccacaccctggaggagcgggtagtgcactggtatttcagccagctggacagcaatagcagcaacgacattaacaagcgggagatgaagcccttcaagcgctacgtgaagaagaaagccaagcccaagaaatgtgcccggcgtttcaccgactactgtgacctgaacaaagacaaggtcatttcactgcctgagctgaagggctgcctgggtgttagcaaagaaggacgcctcgtctaaggagcagaaaacccaagggcaggtggagagtccagggaggcaggatggatcaccagacacctaaccttcagcgttgcccatggccctgccacatcccgtgtaacataagtggtgcccaccatgtttgcacttttaataactcttacttgcgtgttttgtttttggtttcattttaaaacaccaatatctaataccacagtgggaaaaggaaagggaagaaagactttattctctctcttattgtaagtttttggatctgctactgacaacttttagagggttttgggggggtgggggagggtgttgttggggcctgagaagaaagagatttatatgctgtatataaatatatatgtaaattgtatagttcttttgtacaggcattggcattgctgtttgtttatttctctccctctgcctgctgtgggtggtgggcactctggacacatagtccagctttctaaaatccaggactctatcctgggcctactaaacttctgtttggagactgacccttgtgtataaagacgggagtcctgcaattgtactgcggactccacgagttcttttctggtgggaggactatattgccccatgccattagttgtcaaaattgataagtcacttggctctcggccttgtccagggaggttgggctaaggagagatggaaactgccctgggagaggaagggagtccagatcccatgaatagcccacacaggtaccggctctcagagggtccgtgcattcctgctctccggacccccaaagggcccagcattggtgggtgcaccagtatcttagtgaccctcggagcaaattatccacaaaggatttgcattacgtcactcgaaacgttttcatccatgcttagcatctactctgtataacgcatgagaggggaggcaaagaagaaaaggacacacggaagggcctttaaaaaagtagatatttaatatctaagcaggggaggggacaggacagaaagcctgcactgaggggtgcggtgccaacagggaaactcttcacctccctgcaaacctaccagtgaggctcccagagacgcagctgtctcagtgcccaggggcagattgggtgtgacctctcca

SEQ ID NO: 2390 - DNA, 2312 bp, Homo sapiens
ggcacgaggggaacgctccgtctggaacggcgcaggtcccagcagctggggttccccctcagcccgtgagcagccatgtccaaccccagcgccccaccaccatatgaagaccgcaaccccctgtacccaggccctctgccccctgggggctatgggcagccatctgtcctgccaggagggtatcctgcctaccctggctacccgcagcctggctacggtcaccctgctggctacccacagcccatgccccccacccacccgatgcccatgaactacggcccaggccatggctatgatggggaggagagagcggtgagtgatagcttcgggcctggagagtgggatgaccggaaagtgcgacacacttttatccgaaaggtttactccatcatctccgtgcagctgctcatcactgtggccatcattgctatcttcacctttgtggaacctgtcagcgcctttgtgaggagaaatgtggctgtctactacgtgtcctatgctgtcttcgttgtcacctacctgatccttgcctgctgccagggacccagacgccgtttcccatggaacatcattctgctgaccctttttacttttgccatgggcttcatgacgggcaccatttccagtatgtaccaaaccaaagccgtcatcattgcaatgatcatcactgcggtggtatccatttcagtcaccatcttctgctttcagaccaaggtggacttcacctcgtgcacaggcctcttctgtgtcctgggaattgtgctcctggtgactgggattgtcactagcattgtgctctacttccaatacgtttactggctccacatgctctatgctgctctgggggccatttgtttcaccctgttcctggcttacgacacacagctggtcctggggaaccggaagcacaccatcagccccgaggactacatcactggcgccctgcagatttacacagacatcatctacatcttcacctttgtgctgcagctgatgggggatcgcaattaaggagcaagcccccattttcacccgatcctgggctctcccttccaagctagagggctgggccctatgactgtggtctgggctttaggcccctttccttccccttgagtaacatgcccagtttcctttctgtcctggagacaggtggcctctctggctatggatgtgtgggtacttggtggggacggaggagctagggactaactgttgctcttggtgggcttggcagggactaggctgaagatgtgtcttctccccgccacctactgtatgacaccacattcttcctaacagctggggttgtgaggaatatgaaaagagcctattcgatagctagaagggaatatgaaaggtagaagtgacttcaaggtcacgaggttcccctcccacctctgtcacaggcttcttgactacgtagttggagctatttcttcccccagcaaagccagagagctttgtccccggcctcctggacacataggccattatcctgtattcctttggcttggcatcttttagctcaggaaggtagaagagatctgtgcccatgggtctccttgcttcaatcccttcttgtttcagtgacatatgtattgtttatctgggttagggatgggggacagataatagaacgagcaaagtaacctatacaggccagcatggaacagcatctcccctgggcttgctcctggcttgtgacgctataagacagagcaggccacatgtggccatctgctccccattcttgaaagctgctggggcctccttgcaggcttctggatctctggtcagagtgaactcttgcttcctgtattcaggcagctcagagcagaaagtaaggggcagagtcatacgtgtggccaggaagtagccagggtgaagagagactcggtgcgggcagggagaatgcctgggggtccctcacctggctagggagataccgaagcctactgtggtactgaagacttctgggttctttccttctgctaacccagggagggtcctaagaggaaggtgacttctctctgtttgtcttaagttgcactgggggatttctgacttgaggcccatctctccagccagccactgccttctttgtaatattaagtgccttgagctggaatggggaagggggacaagggtcagtctgtcgggtgggggcagaaatcaaatcagcccaaggatatagttaggattaattacttaatagagaaatcctaactatatcacacaaagggatacaactataaatgtaataaaatttatgtctagaagttaaaacccaaaaaaaaaaaaaaaaaaaa

SEQ ID NO: 2391 - DNA, 3246 bp, Homo sapiens
  misc_feature (2530)..(2530): n is a, c, g, or t
agtgtggttttagtttttcctaagaagtggcgtggtttggggctttatatccgggaggagcatatgtacgcaaatcctggggcgtttgcaaacccggatccggggcgtctggccccatgcccggccgggcgtttgagggctactgccacgcagcgtttctggagcctgccggctggtgccctggtggcctttatctctgtccccctttgtcctctttatctcaggctctccaggaggccggggggcccactccgcctatcgctcccctcggctacgctgccactccaatgccccgcaggtcgcgagctgctgttctttcgaaggcgccggagaaccaggggcgtcccgcgccacctctgactcggagcagcgccgagcactgacgctcccgcccttgggcaaggacgccagtgcgcccgcgcgcgtccctctgcgcggcagcccgtcgcgggccctcaaggggaagcccaggccaggatggccccgggtcgcgcggtggccgggctcctgttgctggcggccgccggcctcggaggagtggcggaggggccagggctagccttcagcgaggatgtgctgagcgtgttcggcgcgaatctgagcctgtcggcggcgcagctccagcacttgctggagcagatgggagccgcctcccgcgtgggcgtcccggagcctggccagctgcacttcaaccagtgtttaactgctgaagagatcttttcccttcatggcttttcaaatgctacccaaataaccagctccaaattctctgtcatctgtccagcagtcttacagcaattgaactttcacccatgtgaggatcggcccaagcacaaaacaagaccaagtcattcagaagtttggggatatggattcctgtcagtgacgattattaatctggcatctctcctcggattgattttgactccactgataaagaaatcttatttcccaaagattttgaccttttttgtggggctggctattgggactcttttttcaaatgcaattttccaacttattccagaggcatttggatttgatcccaaagtcgacagttatgttgagaaggcagttgctgtgtttggtggattttacctacttttcttttttgaaagaatgctaaagatgttattaaagacatatggtcagaatggtcatacccactttggaaatgataactttggtcctcaagaaaaaactcatcaacctaaagcattacctgccatcaatggtgtgacatgctatgcaaatcctgctgtcacagaagctaatggacatatccattttgataatgtcagtgtggtatctctacaggatggaaaaaaagagccaagttcatgtacctgtttgaaggggcccaaactgtcagaaatagggacgattgcctggatgataacgctctgcgatgccctccacaatttcatcgatggcctggcgattggggcttcctgcaccttgtctctccttcagggactcagtacttccatagcaatcctatgtgaggagtttccccacgagttaggagactttgtgatcctactcaatgcagggatgagcactcgacaagccttgctattcaacttcctttctgcatgttcctgctatgttgggctagcttttggcattttggtgggcaacaatttcgctccaaatattatatttgcacttgctggaggcatgttcctctatatttctctggcagatatgtttccagagatgaatgatatgctgagagaaaaggtaactggaagaaaaaccgatttcaccttcttcatgattcagaatgctggaatgttaactggattcacagccattctactcattaccttgtatgcaggagaaatcgaattggagtaatagaaaatggaagatggtgttgttaataaaggcatttaatagataaaaacatctccaaaaaggattttgaagctgatcctatttagttaaaaagataattttgctttcaactgtaggtccagaaaactaattattggcatcagtctgtgaaatagtccattatttgttgttaaaaatgcttcaaaaggttttcagtgtcagtctgagatgcctggtatataggagcctttgggaaatacttatttttcagtattccatgcatattagatatcaccatgaagcaagagacatgcattctataatcatgtagacactcagactcaggggaaaatacaagttatatcctgaaagcctttaaaactctatggtaggatcaaagattcaaatggtttcagagaggttttatttcaattaatttgttctagtgctttcaagagcaagtacatcaaaatgtagaaggtaaaatgtatgcaacactaatataaattattccaagtctttaaggagccaaagaaaaaaaagatttctcacagctttttgttctgttttgtatttcaattaggaacttgcagtattattttgaaaaccattctaaaataataggagttaggaaataaataaagttttgctagccctgctaagttcaggcttagaggcttatcgctaagtntaaacttcaccagattccacgaaaagctggatagctttttttctgacttatgttgtggttgcacccctcacaaatggcagaacagtatgtaaagctggtaacacctcggtttcagtgcaccatgtgtttgctttgtgaaggtgaagaatatgttggtttagagaaagaaattggatgtaattttatgcaatttacttttaaagacaaacataactatttagcagagaatattttaataaatgcaaaacaacagctggactgctgtacatcaaggacagattaactggaaaacatatgttccttatgtgtgattgagagccattcagaaaagacttcctttgtgttcagcctatacttttccatatggtataccttgaaaaaaattagcacaccatggttatttttctaccttttataaaagacagagcctgtttactcatttagaagatagagaaaattggtctaaaattgaacatcctagattcacactcccaagtcacttaaggtgatttgatggtgaggaaaatgattgacaaagcccaacaatgatctcaggaattacattttccaacagaccaaaaaatgttttcatgtagcagcaatgcagatttggtgaatatttaatatatattttagtatgtatttcactttatgactgacaattaaaaaatattgtttggccaaatagtaaacacccttttgaaaccatgaaaaaa

SEQ ID NO: 2392 - DNA, 2177 bp, Homo sapiens
gcgggccagcctgggccccagcccacaccttcaccagggcccaggagccaccatgtggcgatgtccactggggctactgctgttgctgccgctggctggccacttggctctgggtgcccagcagggtcgtgggcgccgggagctagcaccgggtctgcacctgcggggcatccgggacgcgggaggccggtactgccaggagcaggacctgtgctgccgcggccgtgccgacgactgtgccctgccctacctgggcgccatctgttactgtgacctcttctgcaaccgcacggtctccgactgctgccctgacttctgggacttctgcctcggcgtgccacccccttttcccccgatccaaggatgtatgcatggaggtcgtatctatccagtcttgggaacgtactgggacaactgtaaccgttgcacctgccaggagaacaggcagtggcagtgtgaccaagaaccatgcctggtggatccagacatgatcaaagccatcaaccagggcaactatggctggcaggctgggaaccacagcgccttctggggcatgaccctggatgagggcattcgctaccgcctgggcaccatccgcccatcttcctcggtcatgaacatgcatgaaatttatacagtgctgaacccaggggaggtgcttcccacagccttcgaggcctctgagaagtggcccaacctgattcatgagcctcttgaccaaggcaactgtgcaggctcctgggccttctccacagcagctgtggcatccgatcgtgtctcaatccattctctgggacacatgacgcctgtcctgtcgccccagaacctgctgtcttgtgacacccaccagcagcagggctgccgcggtgggcgtctcgatggtgcctggtggttcctgcgtcgccgaggggtggtgtctgaccactgctaccccttctcgggccgtgaacgagacgaggctggccctgcgcccccctgtatgatgcacagccgagccatgggtcggggcaagcgccaggccactgcccactgccccaacagctatgttaataacaatgacatctaccaggtcactcctgtctaccgcctcggctccaacgacaaggagatcatgaaggagctgatggagaatggccctgtccaagccctcatggaggtgcatgaggacttcttcctatacaagggaggcatctacagccacacgccagtgagccttgggaggccagagagataccgccggcatgggacccactcagtcaagatcacaggatggggagaggagacgctgccagatggaaggacgctcaaatactggactgcggccaactcctggggcccagcctggggcgagaggggccacttccgcatcgtgcgcggcgtcaatgagtgcgacatcgagagcttcgtgctgggcgtctggggccgcgtgggcatggaggacatgggtcatcactgaggctgcgggcaccacgcggggtccggcctgggatccaggctaagggccggcggaagaggccccaatggggcggtgaccccagcctcgcccgacagagcccggggcgcaggcgggcgccagggcgctaatcccggcgcgggttccgctgacgcagcgccccgcctgggagccgcgggcaggcgagactggcggagcccccagacctcccagtggggacggggcagggcctggcctgggaagagcacagctgcagatcccaggcctctggcgcccccactcaagactaccaaagccaggacacctcaagtctccagccccactaccccaccccactcctgtattctttttttttttttttagacagggtcttgctccgttgcccaggttggagtgcagtggcccatcagggctcactgtaacctccgactcctgggttcaagtgaccctcccacctcagcctctcaagtagctgggactacaggtgcaccaccacacctggctaatttttgtattttttgtaaagaggggggtctcactgtgttgcccaggctggtctcgaactcctgggctcaagcggtccacctgcctccgcctcccaaagtgctgggattgcaggcatgagccactgcacccagccctgtattcttattcttcagatatttatttttcttttcactgttttaaaataaaaccaaagtattgataaaaaaaaaaaaaaaaa

SEQ ID NO: 2393 - DNA, 2546 bp, Homo sapiens
gacggcaaatggcggacttcgacacctacgacgatcgggcctacagcagcttcggcggcggcagagggtcccgcggcagtgctggtggccatggttcccgtagccagaaggagttgcccacagagcccccctacacagcatacgtaggaaatctacctttcaatacggttcagggcgacatagatgctatctttaaggatctcagcataaggagtgtacggctagtcagagacaaagacacagataaatttaaaggattctgctatgtagaattcgatgaagtggattcccttaaggaagccttgacatacgatggtgcactgttgggcgatcggtcacttcgtgtggacattgcagaaggcagaaaacaagataaaggtggctttggattcagaaaaggtggaccagatgacagaggaatgggtagctctcgagaatctagaggtggatgggattcccgggatgacttcaattctggcttcagggatgacttcttagggggcaggggaggtagtcgcccaggcgaccggcgaacaggcccccccatgggcagccgcttcagagatggccctcccctccgtggatccaacatggatttcagagaacccacagaagaggaaagagcacagagaccacgactccagcttaaacctcgaacagtcgcgacgcccctcaatcaagtagccaatcccaactctgctatcttcgggggtgccaggcctagagaggaagtcgttcaaaaggagcaagaatgagcctgcggttgggagggaatggggcgtggggggttagagcaggaccacagcctggtgagtccccgggcagccgtcctgcagccgccactcctgcgcctgccattggcctcctcacagcggaaacacagcttgtgagtgcatgtcagctgttaacaagtggtttttagtacattctgggctttgctgtatctatctagtgcctgtttgtgcgtttttttctttcttccgctgcttccccattttccttctgtcctttttctcctgctccttgttttcccagcagcacatggggttcctcggaggagcagaggtggccgccgtgggggggcgtttgggctgcggtgctgcgtcatttttcctttgctttctctttactttagacactggcccaactccaggcgtttcctttcattccctcagtgcttctcttctgacctgcatgttgagttctgtattgctggggcttccaacaaaaaccagagtcactgacagagggaacagcagagaccttgttggtattcagctgtgatggatatagagaatcagaggcaccttgttttcacaactaggataaaaatatctgcagggtcctttccattcctatttagagggagtcctggctccatgaccccctcccgagtggactgtccaagcagataggctcacacgagaaacagtgaggctgaaagggggggctatggaagagcggtagggagtccacggagaagatgcagtgaatgcttgcatgcattcacacgtgtgtgtgtcccagctagttcactcctttcgccgtgcgtggtggaggctggcctctctggctgggtgcagtgaatggccagcgggtttcttttctgctgggccaaggcgctttgggggtggagggggtggtgctggtgctgcactgggctgactgcggcgctgacgcagcgtttccccccatccctgttgcctgtgtgttgtgtggatctgttcctagtataggcaacataatgagatactgtgcttcccacctccccttcagttcagagccaaaatgggtctagaatctggcactttactcatttcctttgataaattgtactatgcagagctgtcaggaaccttcagatagcagtagaggactgcagctgtctaggtctgcggccacatcttggggacacactggactgttcccatgtgcagggttcagcagttatgtgggagtgctaggggttaggcttttgagcttgaacgcctgcgtgtgaacagatgaaaaatccttcagtacccaagtcccagtctgtcctatggggagcagtttgggggcggccggcagcaggagcctgggaaagaggccctcgccaggtgatggcagggccagggtggcctggggcacccagcggaatgtgcttagtatttggtcaccagccgtcatcctgggcttttcctactgtgtcttgttacaaggcctcagcaatccacagaactctctctccttccttccacctgtcagcttctctgcttctgagataagaaccatttgtgtaacaccaacacttaacttcagaaagacatgcattatgtggtgtaatcaaacccgatgctttcagatgacctacttacatcttcaatgtggataagataaagaacaaaacacatgcatctaaactgctgggcaatccagttgacttttaaatgtaagaatggaattccaaacacttaacacattcagctatatgacagaaagtaaatctatggatatggtattttgtgaatgatcttttaaataaaagaaaaccttacgtaatattt

SEQ ID NO: 2394 - DNA, 2058 bp, Homo sapiens
ggcacgaggcctgggttgcgctgccggccacgtccccgcgccgggcctcaggctccttcctactgtccgagggccaccaggccgccgggggcctgctgcgcccggatgcgtctgttactagagtggagagtctaccttcgtctcacatgtgccacaaaggatggcatggcccgggagtgccccaccacgtggctttcaccccctgcaaagccagacttcgcccagcgacacagtgtcaagcccacagctctccaaggaggaagatggtccaggctgggagcatccccttagcagcagcctctgatcccttggccaagcaggagggaaccattagcagcctgaggagctggctggctgggagcctcggggaccgcccagccttgctcccagctcacccacaagatgtggacagctcttgtgctcatttggattttctccttgtccttatctgaaagccatgcggcatccaacgatccacgcaactttgtccctaacaaaatgtggaagggattagtcaagaggaatgcatctgtggaaacagttgataataaaacgtctgaggatgtaaccatggcagcagcttctcctgtcacattgaccaaagggacttcggcagcccacctcaactctatggaagtcacaacagaggacacaagcaggacagatgtgagtgaaccagcaacttcaggaggtgcagctgatggtgtgacctccattgctcccacggctgtggcctccagtacgactgcggcctccattacgactgcggcctccagtatgactgtggcctccagtgctcccacgactgcagcctccagtacaactgtggcctccattgctcccacgactgcagcctccagtatgactgcggcctccagcactcccatgacacttgcactccccgcgcccacgtccacttccacagggcggaccccgtccactaccgccactgggcatccatctctcagcacagccctcgcacaagtgccaaagagcagcgcgttgccaagaacagcaaccctggccacattggccacacgtgctcagactgtagcgaccacagcaaacacaagcagccccatgagcactcgtccaagtccttccaagcacatgcccagtgacaccgcggcaagccctgtaccccctatgcgtccccaagcacaaggtcccattagccaggtgtcagtggaccagcctgtggttaacacaacaaataaatccacacccatgccctcaaacacaaccccagagcccgcccccacccccacagtggtgaccaccaccaaggcacaagccagggagccaactgccagcccagtgccagtacctcacaccagcccaatccctgagatggaggccatgtcccccacgacacagccaagccccatgccatatacccagagggccgctgggccaggcacatcccaggcaccggagcaggtagagactgaagccacaccaggtactgattccactgggccaacacccaggagctcagggggcactaagatgccagccacggactcgtgccagcccagcacccaaggccagtacatggtggtcaccactgagcccctcacccaggccgtggtagacaaaactctccttctggtggtgctgttactcggggtgacccttttcatcacagtcttggttttgtttgccctgcaggcctatgagagctacaagaagaaggactacacccaggtggactacttaatcaacgggatgtatgcggactcagaaatgtgaggggggcgggggcctggcgggaggcctggccccttcctcgtcctttccttttgcctttgagaccaaaccaagtgcttccaaattcttttggtgcaattgaggagatatgccagatgcttaaacacatttaattgctgtcagattaattccatgatcactaaagagttgctgcttttttcatatttatttttgtaaatgattctgtgcccaggagcagctgggggttccacctcagggtggggcgggcaggaccccgtctccccaggtgtcggagcctgacctgaattaaagtactgactgctcgcc

SEQ ID NO: 2395 - DNA, 1982 bp, Homo sapiens
aaaaaaaaaaaaaaaaactcagttgcctctggccagtgcagggctcagccagggatggcttctagctgacagtgggaggaattaattcatctgaccggaatattcttttctcttctgggctgttggtttttcaagtgcaacaaagattccatacagctccaaggaaggagccaagaaaaacattctgtgccaaagtgagatcctggaagtgaaaccccggaataaagctgaaaagcgggctccagttgggtgccaggaaatgcaggactggaatgtgacttgacttccggcagcgcgcaggtgctcccgggtcacctgctttgaggtccagcctcctgccctgcctcaggtgaccacatgaccactgtggactttgccctgaaaccttctgggaggagaagaggcctgaccttggcgctggggtccagtgggcattgctctggtccgaggctgctgctcttgacctctgctctgcggctgttttccattggagtagaggctcctcctgtcctgtcctgcctgtggagggaagcaaaccttcccctggaccagagagaggagaaagcggagacaggtagcaacgctgtggactggtgatgacaggctcttcagctccctgcaagtgaccgggcctggggaacagggcatggcacaggcacacaggaccccccagcccagggctgcccccagccagccccgtgtgttcaagctggttctcctgggaagtggctccgtgggtaagtccagcttggctcttcggtacgtgaagaacgacttcaagagtatcctgcctacggtgggctgtgcgttcttcacaaaggtggtggatgtgggtgccacctctctgaagcttgagatctgggacacagctggccaggagaagtaccacagcgtctgccacctctacttcaggggtgccaacgctgcgcttctggtgtacgacatcaccaggaaggattccttcctcaaggctcagcagtggctgaaggacctggaggaggagctgcacccaggagaagtcctggtgatgctggtgggcaacaagacggacctcagccaggagcgggaggtgaccttccaggaagggaaggagtttgccgacagccagaagttgctgttcatggaaacttcggccaaactgaaccaccaggtgtcggaggtgttcaatacagtggcccaagagctactgcagagaagcgacgaggagggccaggctctacggggggatgcagctgtggctctgaacaaggggcccgcgaggcaggccaaatgctgcgcccactaggtgcagccactcctgggggctgtggggaagacaccccctgcctgggccatggccagctctaggtggattctgattcactgtcaatgctgggttgctcccgagccctagatgttcctggaagttggccccctttatgaaaaccacttcccacagccagtgggaactgccagaggaagatctggcgtcacatggctcccaggaaagtgctgtgccctatccccactgataccatctgattccccgatgcctgtgcctgttccacctggacggtggccccctcagcctggcagcctctggacagagaggaaggaaggattggaaaagtccccgcagcacagcgacggtgggaagatgccttacgtctgatcttgatgggggcactggcctggagcctgggcccacctgcttctggggggttggggagcaggccagatggaggtggtggtgccaggaagaaatggagcgatgactgactgtggggtgggcccaggatttccacatcttggtgaagttgcccctgggaagggcagctgggggcagtggcgccagttcccttccatggtctcccggctggcaatgtggtgaagctgagtttctgtccaatgagcaggaagattctgagacatttcgcctgagatataagttgtactgcgtatgcagtttttcctccaaaaattaaattgcttttgacaatctg

SEQ ID NO: 2396 - DNA, 2465 bp, Homo sapiens
gaagattctgaagctgtggggatctccagcattatcagcaacctgataaccgtgttcccacgaaatgttttaactgccattccaagtgaacttttctcctcctttgttaactgcctcacacacctcacttgttcttttgggcgaagtgctgcattggaagaagtgcttgataaagatgacatggtatacatggaagcatatgataaattgttggagtcctggttaactttggttcaagatgacaaacatttccataaaggcttttttacccaacatgcagttcaagttttcaattcctatattcagtgccacctagctgctccagatggcacaagaaatttgactgccaatggtgtggcctctcgtgaggaggaagaaataagtgaacttcaagaggatgatcgagaccagttttctgatcaactggccagtgtaggaatgctaggaagaattgctgcagaacactgtatacctcttctgacaagtttattagaagaaagagtaacaagactccatggtcagtcacaacgacatcagcaacagttacttgcttcaccgggttcaagcactgttgacaacaaaatgcttgatgatctctatgaagatattcactggcttattttagttacaggctacctcttagctgatgatactcagggagagactccgctaatacctccagaaataatggaatattccattaagcattcatctgaagttgacattaatacaacacttcaaattttgggatctccaggagaaaaggcttcttccatcccagggtacaacagaacagattctgtgattaggctgttgtctgccattctcagagtttcagaagttgaatctcgagcaataagagcagatctcactcatctactaagtccccagatgggcaaagatattgtttggtttttaaaacgctgggcaaagacttatctcctggtggatgaaaaactgtatgatcagataagtctgccattcagtacagcgttcggagcagatacagagggttctcagtggataattggctacctcttacaaaaagtcatcagtaacctctcagtctggagtagtgagcaggaccttgcaaatgacactgtgcagctccttgtcactttggtggaaagaagagaaagggcaaacttagtaattcaatgtgagaactggtggaatttagctaagcagtttgcaagccgaagcccacctcttaatttcttgtcaagtcctgtgcagaggacattgatgaaggctctagtcttaggaggttttgcacatatggacacagaaaccaaacagcagtattggacagaggttcttcagccacttcagcagcgattcttaagagtgataaaccaagaaaacttccagcagatgtgtcagcaagaggaagtcaagcaggaaatcactgccacactagaggccctgtgtggcattgctgaggctacccagattgacaacgtagcaatcctgtttaattttttaatggacttccttaccaattgcattggattgatggaagtttacaagaataccccagagactgtcaatctcattatagaagtttttgttgaagttgcacataaacagatatgctatcttggagagtccaaagctatgaacttatatgaagcctgccttactttgttgcaagtgtattctaagaataatttagggcggcaaagaatagatgttacagcagaagaagagcaataccaagacctgcttctcattatggaacttcttactaacctgctgtcaaaagaattcatagatttcagtgatacagatgaagtgtttagaggacatgagccaggtcaagcagcaaacagatctgtgtcagcagcggatgttgtgttgtatggagtaaacctaattctgcccttgatgtcacaggatctcttgaagtttccaaccctttgtaatcagtactacaaattaatcacatttatctgtgagatttttcctgaaaaaataccacagcttcctgaggatctgtttaaaagtctgatgtactccctagaattaggaatgacatcaatgagttcggaggtttgccagctttgcctggaggccttgacaccgttagctgaacagtgtgcaaaagcacaagaaacagactcaccactttttctagcaacacggcactttcttaagctggtttttgatatgctggttttgcaaaagcacaacacagagatgaccactgcggctggcgaagctttctacacgttggtgtgtttgcaccaggctgaatattctgaactggtcgaaacattactatcaagtcagcaagacccagttatttaccagagattagcagatgccttcaacaagctcactgcaagcagcactcctcctacgctggatcggaagcagaagatggccttcttaaagagtttagaagaatttatggcaaatgttggtggtctcctttgtgtaaaataaacaacagaactttaaag

SEQ ID NO: 2397 - DNA, 1702 bp, Homo sapiens
  misc_feature (1610)..(1614): n is a, c, g, or t
  misc_feature (1627)..(1629): n is a, c, g, or t
  misc_feature (1632)..(1632): n is a, c, g, or t
  misc_feature (1634)..(1635): n is a, c, g, or t
  misc_feature (1643)..(1643): n is a, c, g, or t
  misc_feature (1652)..(1652): n is a, c, g, or t
  misc_feature (1665)..(1666): n is a, c, g, or t
  misc_feature (1668)..(1668): n is a, c, g, or t
  misc_feature (1681)..(1683): n is a, c, g, or t
gttatcctgtacaggtggagctggtcgccgccgcggcgctggaattgtgggagttgtgtctgccactcggctgccggaggccgaaggtccctgactatggctccccagagcctgccttcatctaggatggctcctctgggcatgctgcttgggctgctgatggccgcctgcttcaccttctgcctcagtcatcagaacctgaaggagtttgccctgaccaacccagagaagagcagcaccaaagaaacggagagaaaagaaaccaaagccgaggaggagctggatgccgaagtcctggaggtgttccacccgacgcatgagtggcaggcccttcagccagggcaggctgtccctgcaggatcccacgtacggctgaatcttcagactggggaaagagaggcaaaactccaatatgaggacaagttccgaaataatttgaaaggcaaaaggctggatatcaacaccaacacctacacatctcaggatctcaagagtgcactggcaaaattcaaggagggggcagagatggagagttcaaaggaagacaaggcaaggcaggctgaggtaaagcggctcttccgccccattgaggaactgaagaaagactttgatgagctgaatgttgtcattgagactgacatgcagatcatggtacggctgatcaacaagttcaatagttccagctccagtttggaagagaagattgctgcgctctttgatcttgaatattatgtccatcagatggacaatgcgcaggacctgctttcctttggtggtcttcaagtggtgatcaatgggctgaacagcacagagcccctcgtgaaggagtatgctgcgtttgtgctgggcgctgccttttccagcaaccccaaggtccaggtggaggccatcgaagggggagccctgcagaagctgctggtcatcctggccacggagcagccgctcactgcaaagaagaaggtcctgtttgcactgtgctccctgctgcgccacttcccctatgcccagcggcagttcctgaagctcggggggctgcaggtcctgaggaccctggtgcaggagaagggcacggaggtgctcgccgtgcgcgtggtcacactgctctacgacctggtcacggagaagatgttcgccgaggaggaggctgagctgacccaggagatgtccccagagaagctgcagcagtatcgccaggtacacctcctgccaggcctgtgggaacagggctggtgcgagatcacggcccacctcctggcgctgcccgagcatgatgcccgtgagaaggtgctgcagacactgggcgtcctcctgaccacctgccgggaccgctaccgtcaggacccccagctcggcaggacactggccagcctgcaggctgagtaccaggtgctggccagcctggagctgcaggatggtgaggacgagggctacttccaggagctgctgggctctgtcaacagcttgctgaaggagctgagatgaggccccacaccaggactggactgggatgccgctagtgaggctgaggggtgccagcgtgggtgggcttctcaggcaggaggacatcttggcagtgctggcttggccattaaatggaaacctgaaggccnnnnnaaaaaaaaaaaannnaanannaaaaaaanaaaaaaaanaaaaaaaaaaaannanaaaaaaaaaaaannnaaaaaaaaaaaaaaaaaaa

SEQ ID NO: 2398 - DNA, 3557 bp, Homo sapiens
gattcccgggcccacccgacccagcggcgcaaccctggccctccgggaccctccgctgactccaccgcgcacttcccgggacccccacacacatcccagccctccggccgatccctccctactcggtgccgggtgccccccgccctctccaggcccggatctcctcccccaggtccccggggcggccccagccaggcccccttcgaaccccgccggcggcccgggctggggcgcaccatgcggctgcggctccggcttctggcgctgctgcttctgctgctggcaccgcccgcgcgcgccccgaagccctcggcgcaggacgtgagcctgggcgtggactggctgactcgctatggttacctgccgccaccccaccctgcccaggcccagctgcagagccctgagaagttgcgcgatgccatcaaagtcatgcagaggttcgcggggctgccggagaccggccgcatggacccagggacagtggccaccatgcgtaagccccgctgctccctgcctgacgtgctgggggtggcggggctggtcaggcggcgtcgccggtacgctctgagcggcagcgtgtggaagaagcgaaccctgacatggagggtacgttccttcccccagagctcccagctgagccaggagaccgtgcgggtcctcatgagctatgccctgatggcctggggcatggagtcaggcctcacatttcatgaggtggattccccccagggccaggagcccgacatcctcatcgactttgcccgcgccttccaccaggacagctaccccttcgacgggttggggggcaccctagcccatgccttcttccctggggagcaccccatctccggggacactcactttgacgatgaggagacctggacttttgggtcaaaagacggcgaggggaccgacctgtttgccgtggctgtccatgagtttggccacgccctgggcctgggccactcctcagcccccaactccattatgaggcccttctaccagggtccggtgggcgaccctgacaagtaccgcctgtctcaggatgaccgcgatggcctgcagcaactctatgggaaggcgccccaaaccccatatgacaagcccacaaggaaacccctggctcctccgccccagcccccggcctcgcccacacacagcccatccttccccatccctgatcgatgtgagggcaattttgacgccatcgccaacatccgaggggaaactttcttcttcaaaggcccctggttctggcgcctccagccctccggacagctggtgtccccgcgacccgcacggctgcaccgcttctgggaggggctgcccgcccaggtgagggtggtgcaggccgcctatgctcggcaccgagacggccgaatcctcctctttagcgggccccagttctgggtgttccaggaccggcagctggagggcggggcgcggccgctcacggagctggggctgcccccgggagaggaggtggacgccgtgttctcgtggccacagaacgggaagacctacctggtccgcggccggcagtactggcgctacgacgaggcggcggcgcgcccggaccccggctaccctcgcgacctgagcctctgggaaggcgcgcccccctcccctgacgatgtcaccgtcagcaacgcaggtgacacctacttcttcaagggcgcccactactggcgcttccccaagaacagcatcaagaccgagccggacgccccccagcccatggggcccaactggctggactgccccgccccgagctctggtccccgcgcccccaggccccccaaagcgacccccgtgtccgaaacctgcgattgtcagtgcgagctcaaccaggccgcaggacgttggcctgctcccatcccgctgctcctcttgcccctgctggtggggggtgtagcctcccgctgatggggggagccatccagaccgaacagcgccctccacggccgagtcccccgccgctggacctggtcgggggttgtgaggcgctgcggaggccccttgtctgttcccacggacgggggctcgggcgcggactaagcaggggggatctcccgcgcaggggcggcggcggcggggaccggtcgcctggcgctgggctcagtctcctcagggtctgagaccccggcgctgccaccggaacccgccttcaggggcgcacgcgcgctgggaccatgcgtcggtcgtcgcccccgtcgttccctcccggctgccgccagggggcggtcggaccccgcctcccgagcccggggaggggcggggaggacaaggggcgggcccgcggcctcacccggagggacggcagccccggtcgcgcgctggccccgcaggaccttccttttccaggaagagccagcttttctcggagcgcagtcctgggactctccgcagccccgccccgcctggccactgcgtctggcattcctgggtcgttagaggacaggcctgactgcgaagctgtgccttgcccctctcccacccgcagtttctcaccccgttctgctcccacaaggcccccctacagtcactgccacactggtggggacctgggacccagacccggaaccagcccagatatcacccctgaggacccatgcgccacgtcctgggtggtggaatcagtggctggagggacgacccttgctctccaggctgttaaccttttccgttgctcccccgccacccacctcctcctccccaggccacccaacttgggcacctccctgggcccagaactgccttccattcaatggggaacccttctatccccaagaaccccttccctgcttgcaccctggagagaacagcttgactcccatcaactcaacgctggtggaaagacagggaccgaaccctggctcaggcctggtcattgcctcctcagcactccctcctgggaggccttagctctagagtgaggggtgggtggaacctgggggcacctcgttcaccctgtccccactccccacagttttaggatctaaatgattgcctctggaactattcttctagactatcccacatcagaatcactgggaaatttaagtttgcagatcccacactcaccctgaatcctcactcagggtggggtcaggaatctgcattttaactagtcgcggggattgtggggggcagtagctggctgtttcgtggcatttctgtggctctgcagtgttcctccaccccaggaccaatatgttcaggccacaccgatggcctgaaccccatgggtagagtcacttaggggccacttcctaagttgctgtccagcctcagtgaccccctagtgcttcctggagctgaggctgtgggcggctgtcccagcaaccawgcgaggggttgccccagttgctcatacaaacagatcagcatgaggacagaaggcaggagactttggtcagttacctgggaattctgggctgccaggaaacgatttgggcctctgtcagtttcttttccatgtatgaggagggggaaatttgtatattagatacttattcatcccactctggacaataaaaacgaatgtacaaaaaaaa

SEQ ID NO: 2399 - DNA, 1731 bp, Homo sapiens
aaaacaactacggctgcggtgtggttggtggtgagatgacgaccttagtgctggataatggagcttacaacgccaaaatcggttacagccatgaaaatgtgtcggttattcctaattgtcagttccggtcaaaaacagcacgtcttaaaacttttactgccaaccagatagatgaaataaaagacccttctggactcttttacatcctcccttttcaaaagggctacttggtgaattgggatgttcagagacaagtttgggattacctttttggaaaagaaatgtatcaggttgattttttagatactaatattattatcactgaaccatactttaacttcacttcaattcaagaatcaatgaatgaaattctatttgaagaataccagtttcaagcagtattaagagtaaatgctggggctctcagtgcacataggtatttccgagataatccttccgaattatgctgtatcattgttgatagtggatattcctttacacatatagttccttattgtagaagtaaaaagaaaaaagaagcaattattcggataaatgtgggaggaaaactcttaaccaatcatctaaaggagatcatatcttacaggcagctacatgttatggatgaaacacatgtgattaatcaagtgaaagaagatgtatgctatgtgtctcaggatttttatagagacatggatattgcaaagttgaaaggagaagaaaatacagtaatgatagactatgtcttgcctgacttcagtacaattaaaaagggcttttgtaagccaagggaagagatggtgttgagtggaaaatacaaatctggggaacaaattcttcgtttggccaatgagagatttgctgttccggaaatactctttaatccttctgatataggcattcaagaaatgggaattccagaagctattgtctattcaattcaaaatctacctgaagaaatgcagccgcatttttttaagaacattgtcttgacaggaggaaattcccttttcccaggatttagggatcgggtttactcagaagttcgatgtcttactccaacagattatgatgtttctgttgtgctgcctgaaaaccctattacttatgcctgggaaggtggaaaattgatatcagagaatgatgattttgaagatatggtggtaacaagagaagattacgaagaaaatggacatagcgtctgtgaagagaaatttgatatttaagcaacatttttgaatgaaagttgtgaccataaggtttaatttcaaagttccttttaaaagaggttaaggaactgtgttaccttttgtcctaagaaaaaggcttgaatttatgtaaatactttgatcgattgctaattttcaaaggcttcttaggtaggttactacagtaaactgtaactcagtccacattttcatttaggagctagactaccataacaatgcttatgctgtttccaagggtaggttatttttcattaaaagaagaatgaatgcattttaagtttaattcttcatagctgaaagcacaaatttaacggcttcactggacagttttccttagaaggtagttttgtgtgactgtgactaaactattttattttaaaatgtcattcttatttatacattctaaagttggaaagactgatcttatatgtgtataatgtttattttgtacctagagtacatttaaaagggtggagactaagctaataaagtttttttggcc

SEQ ID NO: 2400 - DNA, 549 bp, Homo sapiens
ctctcttccacaggaggcctacacgccgccgcttgtgctgcagccatgtctctagtgatccctgaaaagttccagcatattttgcgagtactcaacaccaacatcgatgggcggcggaaaatagcctttgccatcactgccattaagggtgtgggccgaagatatgctcatgtggtgttgaggaaagcagacattgacctcaccaagagggcgggagaactcactgaggatgaggtggaacgtgtgatcaccattatgcagaatccacgccagtacaagatcccagactggttcttgaacagacagaaggatgtaaaggatggaaaatacagccaggtcctagccaatggtctggacaacaagctccgtgaagacctggagcgactgaagaagattcgggcccatagagggctgcgtcacttctggggccttcgtgtccgaggccagcacaccaagaccactggccgccgtggccgcaccgtgggtgtgtccaagaagaaataagtctgtaggccttgtctgttaataaatagtttatatacaaaaaaa

SEQ ID NO: 2401 - DNA, 2769 bp, Homo sapiens
ctaggtgggtgtcccctcggtgcttcccagctgccgtctgcaccagccatggactgctacacggcgaactggaacccactcggggactctgccttttaccggaaatatgagctgtacagcatggactgggacctgaaggaggaactcagggattgcctggtggctgctgcaccctatgggggccccattgcactgctgaggaacccctggcggaaggagaaagctgctagtgtgaggccagtgctcgatatatactctgcttccggcatgcctctggccagcctgctgtggaagagtggacccgtggtgtccctgggctggtcagctgaggaggagctgctctgtgtgcaggaagatggtgctgtactggtttatgggcttcatggtgacttccggagacacttcagcatgggcaatgaagtgctccagaaccgggttctggatgcccggatctttcacactgagtttggttccggagtggccatcctcacaggggcccaccgcttcaccctcagtgccaatgtgggtgacctcaaactccgccggatgccagaggtgccaggtctgcaaagtgcaccctcctgctggactgtgctgtgccaggaccgagtggcacacattcttctggctgtggggcctgacctttacctcttggaccatgcagcctgctccgcagtgacgccccctggcctggccccaggagtaagcagcttcctacagatggctgtctccttcacctaccgacacctggcactcttcacagacacaggctacatctggatggggacagcatcactcaaggagaagctatgtgagttcaactgcaacatccgggcacctccaaagcagatggtctggtgcagccgtcctcgtagcaaggagagggccgtggtggtggcctgggaaaggcggctgatggtggtgggcgatgcacccgagagcatccagtttgtgctggatgaggactcctacctggtgcctgagctcgatggggtccgcatcttctcccgcagcacccacgagttcctgcatgaggttccagcggccagcgaggaaatcttcaaaattgcctcaatggcccccggggcgctgctcctggaggctcagaaggagtatgagaaagagagccagaaggcggacgagtacctgcgggagatccaggagctgggccagctgacccaggccgtgcagcagtgcattgaggctgcaggacatgagcaccagccagacatgcagaagagtctgctcagggccgcctccttcggaaagtgtttcctggacagatttccacccgacagcttcgtgcacatgtgtcaggacctgcgtgtgctcaatgctgttcgggactatcacatcgggatcccgctcacctatagccaatataagcagctcaccatccaggtgctgctggacaggctcgtgttgcggagactttaccccctggccatccagatatgcgagtacttgcgccttcctgaagtacagggcgtcagcaggatcctggcccactgggcctgctacaaggtgcaacagaaggatgtctcagatgaggatgtggctcgagccattaaccagaagctgggggacacgcctggtgtctcttactccgacattgctgcacgagcctatggttgtggccgcacggagctggccatcaagctgctggagtatgagccacgctcaggggagcaggtaccccttctcctaaagatgaagaggagcaaactggcactaagcaaggccatcgagagcggggacactgacctggtgttcacggtgttgctgcacctgaagaacgagctgaaccgaggagattttttcatgacccttcggaatcagcccatggccctcagtttgtaccgacagttctgtaagcatcaggagctagagacgctgaaggacctttacaatcaggatgacaatcaccaggaattgggcagcttccacatccgagccagctatgctgcagaagagcgtattgaggggcgagtagcagctctgcagacagccgccgatgccttctacaaggccaagaatgagtttgcagccaaggctacagaggatcaaatgcggctcctacggctgcagcggcgcctagaagacgagctggggggccagttcctagacctgtctctacatgacacagttaccaccctcattcttggcggtcacaacaagcgtgcagagcagctggcacgtgacttccgcatccctgacaagaggctctggtggctgaagctgactgccctggcagatttggaagattgggaagagctagagaagttttccaagagcaagaaatcacccattggctacctgccttttgtggagatctgcatgaaacaacataacaaatacgaagccaagaagtatgcttcccgcgtgggtcccgagcagaaggtcaaggctttgcttcttgttggcgatgtggctcaggctgcagatgtggccatcgaacaccggaatgaggctgagctgagcctcgtattgtcccactgcacgggagccacagatggggccacagctgacaagattcaacgggccagggcacaagcccagaagaagtgaggagtccatcctgtacatctcaagcaaggggttcctcccctagcacctgggcttggcagaagggccatagttcatccagctcctcccctagagcaatgctgaggagcgggggcatggtagcagggctgtctggttttaaataaagttggaacacttcaaaaaaaaaaaaaaaaaaaaaaaaaaaaaaaaaaaaaaaaaaaa

SEQ ID NO: 2402 - DNA, 2220 bp, Homo sapiens
ggcacgagggcgtccctggtctaggcggagaaccgcctgggcgatgagtgagaacctcgacaacgagggcccgaagcccatggagagctgtggccaggagagcagcagtgccctgagctgccctaccgtctcggtgccccctgcagccccggcagccctggaggaggtggagaaagagggcgctggggcggctacagggccggggcctcagcccgggctctacagctacatcagggatgacttgtttacctctgagatctttaaactggagctgcagaacgtgcctcgccacgccagcttcagcgacgtccggcgcttcctgggccgctttggtctgcagccccacaaaaccaaactctttgggcaaccaccctgcgcctttgtgacattccgcagcgctgcagagagggacaaggccctgcgcgttttgcatggtgccctctggaaaggccgcccactcagtgtgcgcctggcccggcccaaggccgaccccatggccaggaggaggcgacaggagggtgagagtgagccaccagtaacacgagtggccgacgtggtgacccctctatggacagtgccctatgctgagcagcttgagcggaagcagctggagtgcgagcaggtgctgcagaaacttgccaaggaaatcgggagcaccaaccgtgccttgctgccctggctgctcgagcagaggcacaagcacaacaaggcctgctgcccgctggagggggtcaggccatcaccccagcagactgagtatcgtaataagtgtgagtttctggttggcgtcggggtggatggggaggataacaccgtgggctgtcggctcggcaagtacaagggcgggacgtgtgctgtggcagccccgtttgacaccgtgcacatccccgaagccaccaagcaggtggtgaaggccttccaggagttcatccggtccactccatactcggcatacgacccagagacgtacacaggccactggaagcagctgactgtgcgcaccagccgccgccaccaggccatggccattgcctacttccacccccagaagctgagccctgaggagctggcagagctgaagacctccctagcgcagcacttcacagcagggccaggcagggccagtggagtgacctgcctctacttcgtggaggagggacagcgaaagactcctagccaggagggcctgcccctggagcatgtggctggggaccggtgcatccacgaggacctgctagggctgaccttccggatctctccacacgccttcttccaggtgaacacacccgcagccgaggtgctctacacagtcatccaggactgggcccaattggatgcggggagcatggtgctggacgtgtgctgtggcaccggcaccattggcctggccctggcccggaaggtaaagagggtcattggggtcgagctatgcccagaggctgtggaggacgcccgggtgaacgcccaggacaatgagttgagtaatgtggagttccactgcgggagggccgaggacctggtgcccaccctggtgagcagactggcctcccagcacctcgtggccatcctggacccaccccgtgctggcttgcattccaaggtgatcctggccatccggagagctaagaacctcaggcggctgctgtacgtctcatgcaacccccgggcagccatgggcaactttgtggacctctgcagagccccatctaaccgggtgaagggcattcccttccggccggtcaaggctgtggcagtggacctgttcccgcagaccccgcactgtgagatgctcatcctgtttgagagggtggagcaccccaatggcacaggggtcttggggccccacagccctccagctcaacccacaccaggacccccagataacaccctacaagaaactgggaccttcccctcatcctaggcccaggacccattatggggacaggagctgaagggctcccagggccccaggggcggggaaggcatggcttgctggccaggatattcagaggtaggcagccaaagggcacagaaccctgtgccccaccaggattggcctgctgctaggggccaggggccctgaccaggaagacaggtgggttcctgtagcctgttgcccatccccagggcctttgtggactagccaaggctgtgagggccagaataaacaactgctcaacaaaaaaaaaaaaaaaaaaaaaaaaaaaaaaaaaaaaaaaa

SEQ ID NO: 2403 - DNA, 1977 bp, Homo sapiens
ggggtgatcatggacgcttgacaacctgcgggcaggcgccgggaggccgagccagcgactaagaggaccgagaggtggcgtggacagatttcaaggccagagaatggcaggggaacagaaaccctcaagtaatctcctggagcagtttattttactagccaaaggtaccagtggctcagccctcactgctctcataagccaggtcttagaggctcccggagtgtatgtctttggagaacttctggagctggccaacgtgcaggagcttgcggaaggagctaatgctgcttatttgcagttgttgaacctgtttgcctatgggacatacccagattacatagccaacaaggagagcctgccagaactgagcacagctcagcagaacaagctgaagcatcttaccatcgtgagcttggcatcaagaatgaagtgtatcccctactccgtgttgctgaaagacctggagatgcggaatctccgggaactagaagaccttatcattgaggctgtctacactgacatcatccagggcaagctggaccagcgaaaccagctgctggaagtggatttctgcattggccgtgacatccgaaagaaggatatcaataatattgtcaagaccctgcatgaatggtgtgatggctgtgaagcagttctactgggcatcgagcagcaagttctgagagccaaccagtacaaagagaaccacaaccgaactcagcagcaggtagaagcagaggttaccaacatcaagaagacactcaaagccaccgcatcctcctcggctcaggagatggagcagcagctggctgaacgggagtgtccccctcacgctgagcagaggcagcccaccaagaagatgtccaaagtgaaaggtctggtctccagccgccactagggccggctggggcagctggcactcaccaggcctgggtcaggtggggaggggacaccaagggcccatttcctcccctctctacctgcagtgagttccagacctgcccgtcccctcaccagcgcctccccaccctgttggtactgttccagaaaaactgttactccccctcacccactccctccttccccagttgttcccttcagactcaggggctccaccaatgccatcccaaaacagggtcagacactgctcagcttccctccaggaggttcttgtctctgtgtaagggcttgtctccctcccagtttttcttttgctccacgtcattttgtcaggctggttataagccggaggcagctttaaccagcccccagggatgattgtgaaggaggcccctccccttgtgaggagggggcactcctctccagcccctggtaccacagtcctcacgatggtgcagtgatttctagccaggcgtcaagatgcgctgctttccctctcctgcctcattccttgttggcagctccagttcaggccgtggagggacgtgatgctgggctgtgtttactaaacccacgggttttcagcctcttaagcccagctccgatctccaattagttgagagcgctgggttgactaacctctggtatctgagcacagacagagggtgctgtgggtctgctgggtggcagaaatggttccttccggcttggcgttctctcctggccactcttcctgctgcctctgactactcagccttgttttcggtgtgtaggccccagctgcccactggaactgccggctaatgcttgctctcccaagatctttaactcctcctggctgcacctgggtagggatggtggcatcgatgcccctctgtctgctgaaggacctgttgctgcttctgtcttttcacccctccttggctgatgacccagagccctctgatgatggcattctcctggcaagagaaaaagacttaactagacttctgaacttgaacagtttcaggttatattttaatttttttttttttgtacaggttctgattctaatacatttcaacatgcttttgtccc

SEQ ID NO: 2404 - DNA, 1811 bp, Homo sapiens
gagcgcgcggggtggggggggtcctggtctttggcttctcgactcggtcctgtttcgacagcgaacatgtcgcggcctgtcagaaataggaaggttgttgattactcacagtttcaggaatctgatgatgcagatgaagattatggaagagattcgggccctcccactaagaaaattcgatcatctccccgagaagctaaaaataagaggcgatctggaaagaattcacaggaagatagtgaggactcagaagacaaagatgtgaagaccaagaaggatgattctcactcagcagaggatagtgaagatgaaaaagaagatcataaaaatgtgcgccaacaacggcaggcggcatctaaagcagcttctaaacagagagagatgctcatggaagatgtgggcagtgaggaagaacaagaagaggaggatgaggcaccattccaggagaaagattccggcagcgatgaagatttcctaatggaagatgatgacgatagtgactatggcagttcgaaaaagaaaaacaaaaagatggttaagaagtccaaacctgaatgaaaagaaaagaaaatgcccaaacccagactaaaggctacagtgacgccaagtccagtgaaaggcaaagggaaagtgggtcgccccacagcttcaaaggcatcaaaggaaaagactccttctcccaaagaagaagatgaggaaccggaaagcctgccagaaaagaaaacatctacaagccccccacccgagaaatctggggatgaagggtctgaagatgaagccccttctggggaggattaaaagtgatgatggtctggggagagattttattaaaaaaaaaaagaaaaaaaaagaaaaaagagggaggaaaaaaaaagaacctacttaagatagaacatggttttggctatggcttgactcatgggctttcagtgcttttttccatttgtcgaaagtaacatttctctctctctctcttttttttttttttttttttaaagcaaaccattgtatgtgtaagtgtttaagttacctttttgtctattggtctctttgccagccctcccctttcccaatgaaagccatgtcaaattaatcactggattgactgcttcatctttttatttttaatgaaaggtgtaccacggttgtaaagcaataagatttgagatgaacactattgaaacttcgctttttgctaaaaaatagcaagttgaatagtaatcaaaaaacatagaaagattttagttcaaaatgattgctcctttctctacctggacttttaaaaaatcaattgtcatctaatatgagtttatttgtctatagacacaagtatcaatgtctaaaaaaaatcatgactttaaacttccaccgatgaggcaggtaggagataaagatgaattctgaactgttactaaaagtactcattttttaccttgtagggagggtgggcaatggggttacccgaccttatttgagggtatgggctttcttttttatttcatcacttgttatctcaaagagactcggagccagtgatccttttatcctgctacagtctttagggagctaaaaaaaaaaaaaaagcaggggctgccaaaactcttgatttcatatttccttctctaaatatatatgtatcctgttttttggataaaattttaccaagaatccaaaaaaaaaaaaaccctagaatttaatcaacaagatcagtctacaggtcacagtggatttcttttcaaactgacaatgtttaggttttaagcaaataaagttccagttaatgtgaaactcagaaaaaaaaaaaaaaaaaa

SEQ ID NO: 2405 - DNA, 2760 bp, Homo sapiens
caaaagctcggcatggctgacgacgcgggtttggagaccccgctgtgttccgagcagttcggctccggggaggcacggggctgccgcgccgccgcggacgggagcctgcagtgggaggtcgggggctggcgctggtgggggctctccagggccttcacggtcaaacctgaaggacgagatgcgggcgaagtgggggcttccggggccccctcaccgcccctctccgggctccaggccgtgttcctgcctcagggcttccctgatagcgtcagcccggactacttgccctaccagctgtgggattccgtgcaggcgtttgcttccagcctctccggctccctagccacccaggcagtcttgctgggcataggggtggggaacgcaaaagccactgtttcagctgccacggccacctggctcgtgaaagattcaactggcatgctgggccgcatcgtctttgcctggtggaaagggagcaaactggactgcaatgccaagcagtggaggctttttgcggacatcctcaatgacgtagccatgttccttgagattatggctcctgtatacccaatctgtttcaccatgaccgtctccaccagcaacctagccaagtgcatcgtgagtgttgctggtggggccactcgggctgccctgaccgtgcaccaggctcggaggaacaacatggctgacgtgtcagccaaggacagcagccaggagacgctggtgaacctggcggggctcttggtcagcctcctgatgctccctctggtgtcaggttgccctggcttcagccttggatgtttcttcttcctcactgccctccacatctacgccaactaccgcgcggtccgagccctggtcatggagaccttgaacgaaggccggctccggctggtcctgaagcactaccttcagaggggagaggtactcgacccaactgcagccaatcgcatggagccgctgtggacaggtttctggccagctccgtctctatccctgggggtccccttacaccgcttggtctccagtgtctttgagctgcagcagctggttgaggggcaccaagaatcctacctcctctgctgggaccagtcacaaaaccaggtacaggtagttctgaaccagaaggcaggccccaagaccatcctaagggccgccacacatgggctgatgcttggggccctgcagggagatggaccccttccagcagagctggaggagctgaggaaccgggtgcgggcaggtcctaagaaagagagctgggtcgtcgtcaaggagacacacgaagtgttggacatgctgttcccaaagttcttgaaaggactgcaggatgccggctggaagaccgagaagcaccagctagaggtgggtgagtggagggccacatggcttctgtctcccgaaaagaaggtcttgtgagcagcccagacggaggcccaagcccagggcaggaacctggagcaaggacactttggccacagcaggacaggggaaaggcagctttatttttccttagggcaactgcagcgggtgggccaggccctcatgggaagtgactgccaatcagatgcagtgggccccaggcagaggaaggccgggagaaggggagccaggaccttctcaccccactgccccttccccttttctggggagcaccgcaggctcctcacccccacttcctgtgaggctgtggcttatggtgtccaacgcagttggtcttaggcatagaagccccagaggaacacggccactgccatcatgagcagggcattgaggttgaccacacgggcccagctcgggtcctcgctgatgtcctccagccgcctggctgctgccgctgcctcctcctgggtaaggggcggaggactgcccaccccacctctgctcattccacaaaaccagagcaggcactggcggaagaggcttggtgccggggcctggggctctgagggaaattgaggccctgcagttagtttgcgggaactcagctcctccagccccacctcccagcatggtgccctaccattcatctccatggcactctctgggcacccattctgtacagggagtgaggagccttgctgctcatcagcatccaggtcctcccgttcctccttgctatgccggagactgaagaccaggcggtggagctggggagggtgggagcacgaacgaggtgggagttctgtccccccatgcctggccctaaagtctcttgcacaccagctcgtcactgcctgccctacccacctctgtccagtctacacacccagcccaggcttaactcatgccaactccaccctacatggctgccctgtgccctcgggataaaccccaagcccctgagcttgtgtttaaagccgttggccttgctcccccagctttgtcagctcaggtctgtctacacccagatggtagcgcttgtgacactggcctggcagtcctgctcacagtgttctgtgcctgtgtgctcccaccctttcctcctgctgctgcagaaacccggccatccttccacacccagatctcttgtcctgtcctcaccccaccctgccaccatcagccctgcctggagccacctgccctttggcaacaaaaccaaacctttttgtgggcgttcaagatggtattgtgcccaccagtcagatcctgtgttttgagtcccaaaggccatgccaaggattggctttgggaggctttaatcaccaacccatcaacatcaagcctcccccaggccggttcaaataaatgtatttaaat

SEQ ID NO: 2406 - DNA, 6702 bp, Homo sapiens
ccccgactagcccgacagtccccgactagcccgacagccccagcaggatctgcatcgtcatcgagccggcccagcttctgaagggagatgtcatggtgaaatgctaccacaagaaataccgctcggccacccgtgacgtcattttccgcctgcagtttcacactggggctgtgcagggctacgggctggtgtttgggaaggaggatctggacaatgccagcaaagatgaccgttttcctgactatgggaaggttgaattagtcttctctgccacgcctgagaagattcaagggtccgaacacttgtacaacgaccacggtgtgattgtggactacaacacaacagacccactgatacgctgggactcgtacgagaacctcagtgcagatggagaagtgctacacacgcagggccctgtcgatggcagcctttacgcgaaggtgaggaagaaaagctcctcggatcctggcatcccaggtggcccccaggcaatcccggccaccaacagcccagaccacagtgaccacaccttgtctgtcagcagtgactccggccactctacagcctctgccaggacggataagacggaagagcgcctggccccaggaaccaggaggggcctgagtgcccaggagaaggcagagttggaccagctgctcagtggctttggcctggaagatcctggaagctccctcaaggaaatgactgatgctcgaagcaagtacagtgggacccgccacgtggtgccagcccaggttcacgtgaatggagacgctgctctgaaggatcgggagacagacattctggatgacgagatgccccaccacgacctgcacagtgtggacagccttgggaccctgtcctcctcggaagggcctcagtcggcccacctgggtcccttcacctgccacaagagcagccagaactcactcctatctgacggttttggcagcaacgttggtgaagatccgcagggcaccctcgttccggacctgggccttggcatggacggcccctatgagcgggagcggacttttgggagtcgagagcccaagcagccccagcccctgctgagaaagccctcagtgtccgcccagatgcaggcctatgggcagagcagctactccacacagacctgggtgcgccagcagcagatggttgtagctcaccagtatagcttcgccccagatggggaggcccggctggtgagccgctgccctgcagacaatcctggcctcgtccaggcccagcccagagtgccactcacccccacccgagggaccagcagtagggtggctgtccagaggggtgtaggcagtgggccacatccccctgacacacagcagccctctcccagcaaagcgttcaaacccaggtttccaggagaccaggttgtgaatggagccggcccagagctgagcacaggcccctccccaggctcgcccaccctggacatcgaccagtccatcgagcagctcaacaggctgatcctggagctggatcccaccttcgagcccatccctacccacatgaacgccctcggtagccaggccaatggctctgtgtctccagacagcgtgggaggtgggctccgggcaagcagcaggctgcctgacacaggagagggccccagcagggccaccgggcggcaaggctcctctgctgaacagcccctgggcgggagactcaggaagctgagcctggggcagtacgacaacgatgctggggggcagctgcccttctccaaatgtgcatggggaaaggctggtgtggactatgccccaaacctgccgccattcccctcaccagcggacgtcaaagagacgatgacccctggctatccccaggacctcgatattatcgatggcagaattttaagtagcaaggagtccatgtgttcaactccagcatttcctgtgtctccagagacaccgtatgtgaaaacagcgctgcgccatcctccgttcagcccacctgagcccccgctgagcagcccagccagtcagcacaaaggaggacgtgaaccacgaagctgccctgagacgctcactcacgctgtggggatgtcagagagccccatcggacccaaatccacgatgctccgggctgatgcgtcctcgacgccctcctttcagcaggcttttgcttcttcctgcaccatttccagcaacggccctgggcagaggagagagagctcctcttctgcagaacgccagtgggtggagagcagccccaagcccatggtttccctgctggggagcggccggcccaccggaagtcccctcagcgctgagttctccggtaccaggaaggactccccagtgctgtcctgcttcccgccgtcagagctccaggctcctttccacagccatgagctgtccctagcagagccaccggactccctggcgcctcccagcagccaggccttcctgggcttcggcaccgccccagtgggaagtggccttccgcccgaggaggacctgggggccttgctggccaattctcatggagcgtcaccgacccccagcatcccgctgacagcgacaggggctgccgacaatggcttcctgtcccacaactttctcacggtggcgcctggacacagcagccaccacagtccaggcctgcagggccagggtgtgaccctgcccgggcagccacccctccctgagaagaagcgggcctcggagggggatcgttctttgggctcagtctctccctcctccagtggcttctccagcccgcacagcgggagcaccatcagtatccccttcccaaatgtccttcccgacttttccaaggcttcagaagcggcctcacctctgccagatagtccaggtgataaacttgtgatcgtgaaatttgttcaagacacttccaagttctggtacaaggcggatatttcaagagaacaagccatcgccatgttgaaggacaaggagccgggctcattcattgttcgagacagccattccttccgaggggcctatggcctggccatgaaggtggccacgcccccaccttcagtcctgcagctgaacaagaaagctggagatttggccaatgaactcgtccggcactttttgatcgagtgtaccccgaagggagtgcggttgaaagggtgctcgaatgaaccatatttcgggagcctgacggccttggtgtgccagcattccatcacgcccttggccttgccgtgcaagctgcttatcccagagagagatccattggaggaaatagcagaaagttctccccagacggcagccaattcagcagctgagctgttgaagcagggggcagcctgcaacgtgtggtacttgaactctgtggagatggagtccctcaccggccaccaggcgatccagaaggccctgagcatcaccctggtccaggagcctccacctgtgtccacagttgtgcacttcaaggtgtcagcccagggcatcaccctgacagacaatcagaggaagctcttcttccggaggcattaccccgtgaacagtgtgattttctgtgccttggacccacaagacaggaagtggatcaaagatggcccttcctcaaaagtctttggatttgtggcccggaagcagggcagtgccacggataatgtgtgccacctgtttgcagagcatgaccctgagcagcctgccagtgccattgtcaacttcgtatcaaaggtcatgattggttccccaaagaaggtctgagaactcccctccctccctggacccaccgatgcctctcgaagccctggagacagccgttgggtgagggtggggcccccactttttaccaaactagtaaacctgacattccaggcccatgaggggaaagaggatcttccagctctgcaaaaacaagaacaaacaacatcaccgtgaattggcctttcctgaaagtgacttatctgacacatctctgtagccacatgctttttgggtagaagaagctgggcatgggtgcaccccaccccctagggtccccatgggaaagggacatgcaaggaaacagcacagaacacgaggtggtccccatgtccctggcacactagcattccgggggatgaggaatccccagcccttgaggcagaggtgccgagtgactgccatgcttcgcccgtccgcatgggcgcttctgtccagctgcacccgaggccgggggtttccctcacctcggtcttcccaagatggagatgctaacgaaactgagaagggggcgtatgtttgacgaaggtttgtgcaagtcaggcccttctggaacacagcagggcctacaacgaggggcctttgcgatgggctgtgaggatgggggtggtgggaagaattggccacgttagagaccccatgccaccccaccatggtgagtgctctgtgcctcctgctcacctgtggtgagctgggcgagctgggcgagctgggcgagctgggctggggagagcctgtgaggaccgagaggagaaatgagaagaaggaacaaaaatattatttctatgtaatttatattttacttatgccaaattatttatgataatttgccattgctatactgtaccagtgtcaaatgctgcagcctgccaagctgtgattttgtgaggcttgtccctatgtaggatgcaccgcaggcccctggccactgaaagagtgtgcagtggactgtgggtctcccatatgcggtgccgcccaaaggtggctttgcctcaagcaacctaccctgatgttttactcattggaatgtttttccccgattgtggatgacttcttttctgatggagagagtccaggagggatggaaaactcctggatttaagctcagcatcccccacatgggcttttcgatcatcttcaggcctgaagctgcacgacctgaagttcgcctgcatttatcagccctctttgtgctgctccttgccaccttggggttcctgctggggaccatgtgtggttgtggcatgtgtgagcagaagggaggatgaggaaaaagagaagaaaccccggtactgacaagctgtttttgagtgccactgtttgccatcatctaagccactgaatcaagtgtatttcaggcttatttcaacattccaatgccctggttttcctgcttgaatctgttcgtggtcaaaggtttgggggaatttgtgaccctggaacatccccagagtgaaagatggagctgggccacatcagaataaggccttggccccatcctctcacagcctaggtgctctgcaggcatgctgactgtcctgattgcgatccagcccgaaattccctcctctgctttcaaaagtcaaatcccccattcttaggccacactggtgtcacaagctcctgtcagggagctggggtttgggaatgtgctttgtgaactctgctttaaagtgaggggccgaggaaaacttagaaacaggcagagttggaagcagccaaatcacagtgggtgttgtgtgtgtgtgcgtgtgtgcatgcgtgcgtgtatgcgtgtgtgaaagcaggtggaccattccactttttagctcctattgatgcaccaaaccaagtgcctcatttctgtgccaaatgtttgccttggtcgttgtggacctccttctctaacttgcggtggcatgactgtcaggaggtgctggcattttcagcagatcctcatgtgttgaccctgatgtctttagcagaggcctctagcatctcggtttttcatccactgcaggaatgtggccacagggagcagaggtttgtactttccccaagaggtcctcatcctgagacggtctctacccatgtttaacccaaagagtgcaggccaggttccttatccttctgatgaaggatgagagagctcatttagaagtcagagcaaactagggtctcagtattgagaaacgcagcctgccagggaatcacagagacatcggggtgcccgcgatggccctcatgaagccatgcctcgacggcattcaggaagccctgcaaacgtgctttttgaactcattggccaggtgtgatttttacacaaggtaaacgtggtcaagggcatcggggaatttgctccaagcagatagctccctctgaggaaccaaaggaagcaagtttccacgatttctgaagagctggtataggaagtttctttcttccttttgtgttacatgtgcattaaacagaacaagctgtgtgtcatcacagattgtactgtgggctcagaaaccgtgagagagcccccaccgtggacaccggctctagggccacaggaaaaggaacgtttccaggcattttgtctccagggctcccgctggacaggcacgtactgccctggggagtaaatgcggagagttcacgaactgtgcccaacgcatgttatagccagggtcctactaactactcagtaaaagaacgtattgttgtattcctccagtgttaagctatagccatgttaaaagtcactgtgcatttattctcagcatcaaataccttgtaacgtcttctctgccttgttagtgcatatttttacttttctgatactgtaaagaatatatccagtatgtaaatgaatgttctataaatcttttgtatagtcattttctctgctccttaaatatcatctctattcagagtataataaaattatgaacttggtaaaaaaaaaaaaaaaaaaaaaaaaaaaaaaaaaaaaaaaaaaaaaaaaaaaaaaaaaaaaaaaaaaaaaaaa

SEQ ID NO: 2407 - DNA, 2642 bp, Homo sapiens
aaaaatctatgattcagcttttcatcctgacactggtgagaagatgattttgataggaagaatgtcagcccaggttcccatgaacatgaccatcacaggttgtatgatgacgttttacaggactacgccggctgtgctgttctggcagtggattaaccagtccttcaatgccgtcgtcaattacaccaacagaagtggagacgcacccctcactgtcaatgagttgggaacagcttacgtttctgcaacaactggtgccgtagcaacagctctaggactcaatgcattgaccaagcatgtctcaccactgataggacgttttgttccctttgctgccgtagctgctgctaattgcattaatattccattaatgaggcaaagggaactcaaagttggcattcccgtcacggatgagaatgggaaccgcttgggggagtcggcgaacgctgcgaaacaagccatcacgcaagttgtcgtgtccaggattctcatggcagcccctggcatggccatccctccattcattatgaacactttggaaaagaaagcctttttgaagaggttcccatggatgagtgcacccattcaagttgggttagttggcttctgtttggtgtttgctacacccctgtgttgtgccctgtttcctcagaaaagttccatgtctgtgacaagcttggaggccgagttgcaagctaagatccaagagagccatcctgaattgcgacgcgtgtacttcaataagggattgtaaagcagggaggaaacctctgcagctcattctgccactgcaaagctggtgtagccatgctggtgagaaaaatcctgttcaacctgggttctcccagttacggaaaccttttaaagatccacattagccttttagaataaagctgctactttaacagagcacctggcgtgggccaagtgcctgatactcccttacactgaatcatgttatgatttatagaaatacctttcctgtagcttttatagtcattgtttttcaaagacgatataccagccctcacccaggttttaaaaaagcactggtaggcatagaataggtgctcagtatatggtcagtaaatgttctattgattatcaatcagtgaaaaaagaaatctgtttaaaatactgaattttcatctcactcccattgcaaatcaaggagatctcagcagtgaactgggaaaatacaaaagctctgggctaatctataaaaacttaccctgaaatattaagggcagtttgcttctagtttggggattgcgctagcccaatgaaggtgatgaagcttttggatttggagggtaaaagctccttcacaccccttccaaaagtcagtcacagaccactgcaacatgccttccctgctggatcattatatacattcagattgtgagtggattgccttggttgacttttaatttattgttttttgttcttataaagatgataatcttaccttgcagttattgactttatattcaattatttacatcaaataatgaaataactgaaatgtacaaatgtcaaattttggaagtatattcaataccaatgctgtatgagtgggctgaatccagttcattgttttttttttggtaagaagtgagactacagttccagctacctacatgtcttttcttgtcatccttatagatctctttggctttcagaaagatacagtgataatgtgtgtatgaatcagtcacaatgaattttacttgaatattgtatgttgcattccacttcatttgaaaataatgaaaccatgtaccactgtttacatcatctgtagtgatttcatagataatatatttaatatgacagattatgtttcaactctgtagatgtttaacgtcatagacagttggccctctgtatccgtgagctctatatctgtgaattcaaccaagtttggatggaaaattttttttttttttttttttttttttgagacggagtctcgctctgtcacccaggctggagtgcagtggcgtagtctcggctcactgcaagccccgcctcctgggttcacgccgttctcctgcctcagcctctctgagaagctgggactacaggcgcccgccaccacgcccggctaatttttttgtatttttagtagagacggggtttcactgtggtctcgatctcctgacctcgtgatccgcccgccttggcctcccaaggtgctgggattacaagcgtgagccaccgcacccggcctgaaaatattttctaaaaagataaaaaatatacataacgatgaaaaataatacaaatttaaaaaccaatacagtataacaactatttacatagtgcttacattgtattaggtgttataagcaatctagagatgatttagcaagtatacaggaggatgtgcctaggttatatgcaaatactgtgccattttatatcaggaacttgagcatctgcagatattggtatcggagggcggtcctggaaccaagcatccacggatactgaggggtgacatttcatgaagtgtagatcattgtattcagagattgtaaatgaaaaaaatatagaaactatttagttttggtagattttttttctgacaatgtgaccagactgaatttcctcataaagaaaaaatggcgtgccttgtg

SEQ ID NO: 2408 - DNA, 1558 bp, Homo sapiens
gggggcgccgccgccgcccgcctcagcccaacatggcgatgcacaacaaggcggcgccgccgcagatcccggacacccggcgggagctggcggagctcgtgaagcggaagcaggagctggcggaaacattggcaaatttggagcgacagatctatgcttttgagggaagctacctggaagacactcagatgtatggcaatattattcgtggctgggatcggtatctgaccaaccaaaaaaactccaatagcaaaaatgatcgaaggaaccggaagtttaaggaagctgagcggctcttcagtaaatcctcggttacctcagcagctgcagtaagtgcattggcaggagttcaggaccagctcattgaaaagagggagccaggaagtgggacggaaagtgacacttctccagacttccacaatcaggaaaatgagcccagccaggaggaccctgaggatctggatggatctgtgcagggagtgaaacctcagaaggctgcttcttctacttcctcagggagtcaccacagcagccataaaaagcgaaagaataaaaaccggcacaggattgatctgaagttaaacaaaaaaccacgagctgactattagaagacacattagtgcagaagcttccaggctgtagagccctgcttcccttctctgacctcacaaagataaacatccttcacctgagttcgtggccatccacctctgctctcccagacccagtgcctgtgactttgagtagtttgttctaaatgtggtgacaaacaagtcatttctgtaagacattgggtcttactttatgtcatttttagtaacagaactgcaggaagatgaagacaatgttgtaatcccagcaagttgctaactgtgcgtttctcccttcttagaatgaatgtctcccccaaaactggctggcaccagcttcatctgtgatacccttcaagaaatgttctctggttttgttttatgctgaaagtagaacacaagtcacatttcagatggaggctgtaaatatctggcattttcttatattgttttatgttttcttgtttttctcttgttgtttttatcttattttctttggggtttttttgtaatgcctttgtacagctcatactttcctgctgacatatctgatcatctctttcatgcagttgccaatattcataactgaaaataatctggtttatcataagtaaaatgggaaacttgcctctgttttttgcaaggggaggtaaagagtgtttagtaattacctatcttaaatctttctgagttggtagtagattcatgttcaaggaacaggaaaaatggaaaaacataagtttaaatcagttctttttaaataactttttattcttttgtataaataaaatttcacaggcttcaaattctcatgctttacttttaaacccgagattgttttttcacttatttattcatatcatgccttatggaaatttctttttctgtattttctctctttgctggtattcacctgattaaatattgctctaaaaaacaaaaaaaaaaaaaaaaaaaaaaaaaaaaaa

SEQ ID NO: 2409 - DNA, 1706 bp, Homo sapiens
gatcccgcccccctcggagcgcccctgtggtctgacttcagcagcactttccggcaggagactgggcactcgctgtcacccgcgagctgcctccctcagcgagatctgagcatctttccggaggctaacagacctgggcttcggggtgaccactgtgcttgcctcagtttccttttctggagcaggggaaggcccggctccctgcccaaaggcggctgtgcgctaagtggcagacgctcggggagagccggcgcggggcggaccccagcgccagtagtgacaggggcgaacgccgccgggagactccagccggcgggcgagcaggcctgtcgttgctggtggcggcatggtcttctgtctgtcgagcgaggagccgcgccgcccgctgcgaagcgacatggtccacttccaggcctcggaagtccagcagctgctacacaacaagttcgtggtcatcttgggggactccattcagagggctgtgtacaaggacctggtgctcttgctccagaaagactcactgctcacagctgcccagctgaaagccaagtaccttgaggatgttctggaagagctgacatatggacctgccccggacctggtgatcatcaactcctgcctctgggatctctccagatatggtcgctgctcaatggagagctaccgggagaacctggagcgggtgtttgtgcgcatggaccaagtattgccagactcctgcctgctggtgtggaacatggcgatgcccctcggggaacgtatcactgggggtttcctcctgccagagctccagcccctggcaggctccctgcggcgggatgtggttgaagggaacttctacagtgctacgctggccggggaccactgctttgatgtcctagacctccactttcacttccggcatgcagtacagcaccgtcatcgggatggtgtccactgggaccagcatgcacaccgccacctctcacacctgcttctgacccatgtggctgacgcctggggcgtggagctgcccaagcgtggctatccccctgacccgtggattgaggactgggcagagatgaatcatccattccagggaagccataggcagaccccagacttcggggagcacctggccttgctcccacccccaccttcttctttgcctcctcccatgccttttccctacccgcttcctcagccctcgccacctcccctcttcccacccctgccccaggataccccttttttcccaggccagcccttcccaccccatgaattcttcaactataatccagtggaggacttctcgatgccaccccacttaggatgtggccctggagtgaactttgtgcctggccctctgccacctccaatccctggccctaatccccatggtcagcactggggcccagtggtccaccgggggatgccacgctatgttcctaacagcccctaccatgtgcggagaatgggggggccctgcaggcagcggctcagacactcagagagactgatccacacatacaaactggacagacggcctcctgcccattcggggacatggcctgggtagactggatcttgggctgggactggatgtgccaatggcccttcagggcctgcctggcacctcaggtactgggctagggtgtctgctatgcctggtattgttcttgtccattgctgtcaccaataaaggcatggaagaacagagtgacaaa

SEQ ID NO: 2410 - DNA, 2012 bp, Homo sapiens
tctgaagcgaatcagtgggaagtggcctacagtgggtcggctaccgaatacaccttcacccacttgaaaccaggcactttgtacaaactccgagcatgctgcatcagtaccggcggacacagccagtgttctgaaagtctccctgttcgcacactaagcattgcaccaggtcaatgtcgaccaccgagggttttgggtagaccaaagcacaaagaagtccacttagagtgggatgttcctgcatcggaaagtggctgtgaggtctcagagtacagcgtggagatgacggagcccgaagacgtagcctcggaagtgtaccatggcccagagctggagtgcaccgtcggcaacctgcttcctggaaccgtgtatcgcttccgggtgagggctctgaatgatggagggtatggtccctattctgatgtctcagaaattaccactgctgcagggcctcctggacaatgcaaagcaccttgtatttcttgtacacctgatggatgtgtcttagtgggttgggagagtcctgatagttctggtgctgacatctcagagtacaggttggaatggggagaagatgaagaatccttagaactcatttatcatgggacagacacccgttttgaaataagagacctgttgcctgctgcacagtattgctgtagactacaggccttcaatcaagcaggggcagggccgtacagtgaacttgtcctttgccagacgccagcgtctgcccctgaccccgtctccactctctgtgtcctggaggaggagccccttgatgcctaccctgattcaccttctgcgtgccttgtactgaactgggaagagccgtgcaataacggatctgaaatccttgcttacaccattgatctaggagacactagcattaccgtgggcaacaccaccatgcatgttatgaaagatctccttccagaaaccacctaccggatcagaattcaggctataaatgaaattggagctggaccatttagtcagttcattaaagcaaaaactcggccattaccacccttgcctcctaggctagaatgtgctgctgctggtcctcagagcctgaagctaaaatggggagacagtaactccaagacacatgctgctgaggacattgtgtacacactacagctggaggacagaaacaagaggtttatttcaatctacagaggacccagccacacctacaaggtccagagactgacggaattcacatgctactccttcagaatccaggcagcaagcgaggctggagaagggcccttctcagaaacctataccttcagcacaaccaaaagtgtcccccccaccatcaaagcacctcgagtaacacagttagaaggaaattcatgtgaaattttatgggagacggtaccatcaatgaaaggtgaccctgttaactacattctgcaggtattggttggaagagaatctgagtacaaacaggtgtacaagggagaagaagccacattccaaatctcaggcctccagaccaacacagactacaggttccgcgtatgtgcgtgtcgtcgctgtttagacacctctcaggagctaagcggagccttcagcccctctgcggcttttgtattacaacgaagtgaggtcatgcttacaggggacatggggagcttagatgatcccaaaatgaagagcatgatgcctactgatgaacagtttgcagccatcattgtgcttggctttgcaactttgtccattttatttgcctttatattacagtacttcttaatgaagtaaacccaacaaaactagaggtatgaattaatgctacacattttaatacacacatttattcagatactcccctttttaaagcccttttgttttttgatttatatactctgttttacagatttagctagaaaaaaaatgtcagtgttttggtgcacctttttgaaatgcaaaactaggaaaaggttaaactggatttttttttttaaaaaaaaaaaaaaaaaaaaaaaaaaaaaaaaaaaaaaaaa

SEQ ID NO: 2411 - DNA, 3102 bp, Homo sapiens
agacctggcgccccggccgaggcgcgaacagacggacgcaccggcgagcgccgaggggacaggccgagcgcggggcgccggatgcaggtgtgggacaggcactggcctcagaccggggccacactgaggtctgcccttctcccgctggccgccacccaggacaccatgagccagtccggggccgtgagctgctgcccgggtgccaccaatggcagcctgggccggtccgacggtgtggccaagatgagccccaaggacctgtttgagcagaggaagaagtattccaactccaacgtcatcatgcacgagacctcgcagtaccacgtccagcacctggccacattcatcatggacaagagcgaagccatcacgtctgtggacgacgccatccggaagctggtgcagctgagctccaaggagaagatctggacccaggagatgctgctgcaggtgaacgaccagtcgttgcggctgctggacatcgagtcacaggaggagctggaagacttcccgctgcccacggtgcagcgcagccagacggtcctcaaccagctgcgctacccgtctgtgctgctgctcgtgtgccaggactcggagcagagcaagccggatgtccacttcttccactgcgatgaggtggaggcagagctggtgcacgaggacatcgagagcgcgttggccgactgccggctgggcaagaagatgcggccgcagaccctgaagggacaccaggagaagattcggcagcggcagtccttcctgcctcctccccagggcccggcgcccatccccttccagcaccgcggcggggattccccggaggccaagaatcgcgtgggcccgcaggtgccactcagcgagccaggtttccgccgtcgggagtcgcaggaggagccgcgggccgtgctggctcagaagatagagaaggagacgcaaattctcaactgcgccctggacgacatcgagtggtttgtggcccggctgcagaaggcagccgaggctttcaagcagctgaaccagcggaaaaaggggaagaagaagggcaagaaggcgccagcagagggcgtcctcacactgcgggcacggcccccctctgagggcgagttcatcgactgcttccagaaaatcaagctggcgattaacttgctggcaaagctgcagaagcacatccagaaccccagcgccgcggagctcgtgcacttcctcttcgggcctctggacctgatcgtcaacacctgcagtggcccagacatcgcacgctccgtctcctgcccactgctctcccgagatgccgtggacttcctgcgcggccacctggtccctaaggagatgtcgctgtgggagtcactgggagagagctggatgcggccccgttccgagtggccgcgggagccacaggtgcccctctacgtgcccaagttccacagcggctgggagcctcctgtggatgtgctgcaggaggccccctgggaggtggaggggctggcgtctgcccccatcgaggaggtgagtccagtgagccgacagtccataagaaactcccagaagcacagccccacttcagagcccacccccccgggggatgccctaccaccagtcagctccccacatactcacaggggctaccagccaacaccagccatggccaagtacgtcaagatcctgtatgacttcacagcccgaaatgccaacgagctatcggtgctcaaggatgaggtcctagaggtgctggaggacggccggcagtggtggaagctgcgcagccgcagcggccaggcggggtacgtgccctgcaacatcctaggcgaggcgcgaccggaggacgccggcgccccgttcgagcaggccggtcagaagtactggggccccgccagcccgacccacaagctacccccaagcttcccggggaacaaagacgagctcatgcagcgcatggacgaggtcaacgacgagctcatccggaaaatcagcaacatcagggcgcagccacagaggcacttccgcgtggagcgcagccagcccgcgagccagccgctcacctacgagtcgggtccggacgaggtccgcgcctggctggaagccaaggccttcagcccgcggatcgtggagaacctgggcatcctgaccgggccgcagctcttctccctcaacaaggaggagctgaagaaagtgtgcggcgaggagggcgtccgcgtgtacagccagctcaccatgcagaaggccttcctggagaagcagcaaagtgggtcggagctggaagaactcatgaacaagtttcattccatgaatcagaggaggggggaggacagctaggcccagctgccttgggctggggcctgcggaggggaagcccacccacaatgcatggagtattatttttatatgtgtatgtattttgtatcaaggacacggagggggtgtggtgctggctagaggtccctgcccctgtctggaggcacaacgcccatccttaggccaaacagtacccaaggcctcagcccacaccaagactaatctcagccaaacctgctgcttggtggtgccagccccttgtccaccttctcttgaggccacagaactccctggggctggggcctctttctctggcctcccctgtgcacctggggggtcctggcccctgtgatgctcccccatccccacccacttctacatccatccacaccccagggtgagctggagctccaggctggccaggctgaacctcgcacacacgcagagttctgctccctgaggggggcccgggaggggctccagcaggaggccgtgggtgccattcgggggaaagtgggggaacgacacacacttcacctgcaagggccgacaacgcaggggacaccgtgccggcttcagacactcccagcgcccactcttacaggcccaggactggagctttctctggccaagtttcaggccaatgatccccgcatggtgttgggggtgctggtgtgtcttggtgcctggacttgagtctcaccctacagatgagaggtggctgaggcaccagggctaagcaattaaaccagttaagtctcccaggaaaaaaaaaaaaaaaaaaaaaaaaaaaaaaaaaaaaaaaaaaaa

SEQ ID NO: 2412 - DNA, 2217 bp, Homo sapiens
ttttttgcgagtggcgggccgactgtgtagtccgctccggcagcgcgctctgcccggcttcctcagtctcctcgccgggagcgtccgggagcagctccgaggccgcggcgaaaccagccttgtcatttcagcattctggccttccctatgaggaggaagatcaacgaagtcacagggcccttctagcccaatccagagctgtaccatggcagagacaagagaagaggagacagtgtcagcagaagcctcagggttctcagacttgagtgactcagagttcctggagtttctggacctagaagatgcccaagagtcaaaggctttagttaacatgcctggcccatcttctgaatcccttgggaaggatgacaaacccataagcttacaaaactggaaaagaggattggatatattatcacccatggagagattccaccttaaatatttatatgtcactgacctggctactcagaactggtgtgaactgcaaacagcatatgggaaggagcttcctggtttcttggcacctgagaaggcagctgtgttggacactggtgccagcatacacctagctagagaactagaacttcatgatcttgtgactgtcccagtcaccactaaagaagatgcttgggcaattaagtttctgaacatacttttgctgattcctaccctgcagtcagaagggcacatcagagagtttccagtgtttggggaaggggagggtgtacttcttgttggagtgattgatgagctgcactatacagccaagggggaactggagctggcggaactcaagacacgcaggcgccctatgctccctctggaagctcagaagaagaaagactgttttcaagtcagcctatacaaatatatctttgatgccatggtacaaggaaaagtgacccctgctagcctaatccaccacacaaagttgtgtctagaaaagccactggggccatcagtgctgaggcatgcccagcagggaggcttctctgtgaagtctttgggtgacctcatggaacttgtcttcttgtctctaacactgtcagacctcccagttattgatatcttgaagattgagtatatccaccaagagactgccactgtgctgggtactgagattgtagccttcaaagagaaggaggtgagagccaaggtgcagcattatatggcctactggatgggccaccgagagccccagggagttgacgtggaggaggcttggaagtgccggacgtgtacctatgcagacatttgtgagtggagaaagggcagtggagtgctcagctctacactggcgccccaagtcaaaaaagccaaatgaatagaaggtatgctttcaagaatgttgatccttcctgctcctgttgtacctaagcaaaagaggaccagtctctgagcttggcttttatggagagtgttcttattttggttcttttttttatttccacaacctctaaccacattcagtccaggaccaaggctcagggatgagtgggagagatgggttatactgtccctggagcttcatcatgattgcctgagaagacagatgctcatcatggctggaatgaaggtatccttcagtaaactttgctttcctaagaaaattcttcagtttctgataagtcatccctatttttatcttgatcaaggctttctacagttacataataaaatgaaatgctgtccaggacagttgaactgatggttttttcataactgcagtccttcaaagatgaccaccatatatagttgtgtacgtgttattccaagcctttaaatatatacataaacatattttggaatcagaatgagcagaccaaaacataaacaataaatattctcaaagagacaagggaagatgaagtagaaacaggaagtcataaatattagatacgaaaaacataatacatggctgggtgcggtggcacatgcctgtaatcccagcactttgggaagctgagatgggtggatcacctgagctcaggagttcaagagcaacctgaccaatacggtgaaagcccgtctctactaaaaatacaaaaattagcctggggtggtggcgtgcgcctgtagtcccagctacttgggaggctgagagaggagaatagcttgaacctgagaggcagaggttacagtgagctgagatcatgccactgcactccagcctgggcaacagagtgagactctgtcttaaaaaaaaaaaaaaaa

SEQ ID NO: 2413 - DNA, 1825 bp, Homo sapiens
agagtgcgaccgagatgttccactcgctggcgtccgggccgctggtgatctccggtagcactcgggccggcggacagtgagggcgcgacaacaagggaggtgtcacagttttccatttagatcaacaacttcaagttcttaccatggaaaattccgagaagactgaagtggttctccttgcttgtggttcattcaatcccatcaccaacatgcacctcaggttgtttgagctggccaaggactacatgaatggaacaggaaggtacacagttgtcaaaggcatcatctctcctgttggtgatgcctacaagaagaaaggactcattcctgcctatcaccgggtcatcatggcagaacttgctaccaagaattctaaatgggtggaagttgatacatgggaaagtcttcagaaggagtggaaagagactctgaaggtgctaagacaccatcaagagaaattggaggctagtgactgtgatcaccagcagaactcacctactctagaaaggcctggaaggaagaggaagtggactgaaacacaagattctagtcaaaagaaatccctagagccaaaaacaaaagctgtgccaaaggtcaagctgctgtgtggggcagatttattggagtcctttgctgttcccaatttgtggaagagtgaagacatcacccaaatcgtggccaactatgggctcatatgtgttactcgggctggaaatgatgctcagaagtttatctatgaatcggatgtgctgtggaaacaccggagcaacattcacgtggtgaatgaatggatcgctaatgacatctcatccacaaaaatccggagagccctcagaaggggccagagcattcgctacttggtaccagatcttgtccaagaatacattgaaaagcataatttgtacagctctgagagtgaagacaggaatgctggggtcatcctggcccctttgcagagaaacactgcagaagctaagacataggaattctacagcatgatatttcagacttcccatttggggatctgaaacaatctgggagttaataactggggaaagaagttgtgatctgttgcctaaactaaagcttaaaagtttagtaaaaatcgtctgggcacagtggctcacgcctgtagtcccagctacttgggaggctgaggcaggagaatcacttgaccccaggtggtggaggttgcagtgagccaagattgcaccattgcactccagcctggcgacagagcaagactctgtctcaaaaaaaaaaaaaaaatttagtaaaaatcaatggtaagctaaaataagtttttgtttgtttatttgtttttgagatggagtctctactaaaaatacaaaaaattagccaggcatggtgccgcataactataatcccagctacttgggaggctgaggcaggagaatcgcttgaacccgggaggcacaggttccagtgggccaaggttgtgccactgcactccagcctgggcaaaaaagcaaaactccatctcaaagagaaaaaaaaaaaagaccgggtgtggtggctcacacctgtaatcccagcactttgggaggcctaagtgggtggatcacgtgaggtcaagagttcaagaccagcctggccaatatggtgaaaccccatctctactaagaatacaaaaaattagctgagcatggtggtgggctcctgtagtcccagctacttgggaggctgaggcaggagaatcgcttgaacctgggaggcagaggttgcagtaagccaagatcgtgccattgcactccagcctgggtgacagagcgagactccatctcaaaaaaaaaaaaaaaaaaaa

SEQ ID NO: 2414 - DNA, 1751 bp, Homo sapiens
caccaagggctggccgcagccactgtagctgagctcagagccttctgtgtggtttgcgggggcaaggtcagctgccccctgccctctctctggggctatttgaggaatgcggcctttttgcataagaaaggcttttctctacagtaactgtggtcgctgatcaatgacaccttcctggtaacatttcatattgcttttttggagatgtaagtgggatctgtggatctgaaaattcacagtggccagctcaccaccacctgatgaaagatacaccacagggtgagagcatcctaacagcaaactgcaaatgagatactttgacgaaggtaattgggactcccatcaagtctccacacagctagcagccacgtggggcacttctccagcatatgtaagtggaactcagaaggcaacattccctgaacatactcttccaccagaatctcctctacagatttttgctgccccttttaccagtggctgaatctactttctcctatggatcgcttacacctgagacgaactacagaacagcacgtaccagaggtggaagtccaagtcaaacgcagaaggactgcctcactgagcaaccaagagtgtcagttgtacccgaggcgttctcagcagcagcaagtacctgtggtggatttccaggctgaactgaggcaggcattcttagctgagacaccaagaggtggttaaagccatattggagtagcgaggaatctgattccaagcaaaaaccaggctccatctactctttgaagcttctgcccagcttgcattgtttctaggagaacccgcgtcatacctttatctatagccttcccctaggtcttcagaagcatcaagttttaactgtggacattggatttggtggaacagcaatcatgactgttggcaagagtagcaagatgctgcagcacattgactatagaatgagatgtatcctgcaagatggccgaatcttcattggcacctttaaggcttttgacaagcatatgaatttgatcctctgtgattgtgatgagttcagaaagatcaagccaaagaatgcgaagcaaccagagcgtgaagaaaagcgggttttgggtctggtgttgctgcgtggggagaacttggtatccatgactgtggaggggccaccccccaaagatactggcattgctcgggtaccacttgctggagctgctggaggccctggggttggtagggcagctggtagaggagtaccagctggtgtgccaattccccaggcccctgctggattggcaggccctgtccgaggagttgggggaccatcccagcaggtaatgactccacagggaagaggcactgtagcagctgctgctgttgctgcgactgccagtattgctggagccccaacacagtacccaccaggacggggcactccgcccccacccgtcggcagagcaaccccacctccaggcattatggctcctccacctggtatgagaccacccatgggcccaccaattgggcttccccctgctcgagggacgccaataggcatgccgcctccgggaatgagaccccctccaccaggcattagaggtccacctcccccaggaatgcgtccaccaagaccttagcatactgttgatccatctcagtcactttttcccctgcaatgcgtcttgtgaaattgtgtagagtgtttgtgagctttttgttccctcattctgcattaataatagctaataataaatgcatagagcaattaaactgtg

SEQ ID NO: 2415 - DNA, 2155 bp, Homo sapiens
attcgccgccgcagcagccgccgcccccgggagccgccgggaccctcgcgtcgtcgccgccgccgccgcccagatccccgcaccatgccgtcggagaagaccttcaagcagcgccgcaccttcgaacaaagagtagaagatgtccgacttattcgagagcagcatccaaccaaaatcccggtgataatagaacgatacaagggtgagaagcagcttcctgttctggataaaacaaagttccttgtacctgaccatgtcaacatgagtgagctcatcaagataattagaaggcgcttacagctcaatgctaatcaggccttcttcctgttggtgaacggacacagcatggtcagcgtctccacaccaatctcagaggtgtatgagagtgagaaagatgaagatggattcctgtacatggtctatgcctcccaggagacgttcgggatgaaattgtcagtgtaaaaccagaaaaaatgcatctcttctagaattgtttaaacccttaccaaggaaaaaaaaggggtgttaccaactgagatcgatcagttcatccaatcacagatcatgaaacagtagtgttcccacctaggagtgttaggaagttgtgtttgtgtttcaagcagaaaaactgagctccaagtgagcacattcagctttggaaactatattatttaatgtaggctagcttgttttcaaattttaaaagtttaaaaataaaatactttgcattctaagttgccaataaaatagaccttcaagttattttaatgctcttttctcactaataggaacttgtaattccagcagtaatttaaaggctttcagagagaccctgagtcttctcttcaggttcacagaacccgccgcctttttgggtagaagttttctactcagctagagagatctccctaagaggatctttaggcctgagttgtgaagcgcaacccccgcaaaacgcatttgccatcacagttggcacaaacgcagggtaaacgggctgtgtgagaaaacggccctgactgtaaactgctgaaggtccctgactcctaagagaaccacacccaaagtcctcactcttgcaggggtagacatttctggtttggtttgttctctagatagttacacacataaagacaccactcaaaaggaaacttgaataatttataattttgatcgagtttcttaaaagaccctggagaaagagtggcatttcttctgtttcaggttttgtctgagttcaaactagtgcctgtgttgttacggaaagcagcagtgtaccagtgtcactctggagtacagcgggagaaacacaaaatagtataactgaaaacattaacattcagacacactcccttctgccttccggcttaaagctgtggatgatccacgtttttgtttttttaatgttaaatgtgtaactcagtattactgaaaaggtacccacattttgaatagtagttatcactcttaggtcagacagccatcagaattctcccacaccaagtgcatgtcagttgtggagaaaacatagcaaaaagagccgtacgctctttacagatactaatgtcaagagttaaacctcctcaggttcaacctgtgataaaagactagtgcttcccagtacttgcatggggttcactatttatagttttcttgggagtatcacaggaaaatcacaattacaccactttagaccctatgtgtagcaggtcacaacttacccttgtgtgtttagatgtgtatgaaatacctgtatacgttagtgaaagctgtttactgtaacggggaaaaccagattctttgcatctgggccctctactgattgttaaaggagttcctgtcacctgctccccccacccccgcatgcgtctgtccacttggctaacttttaatatgtgtatttttacattatgtatattcttaactggactgtctcgtttagactgtatacatcatatctgacattattgtaactaccgtgtgatcagtaagattcctgtaagaaatactgctttttaagaaaaaaaataacatgctgaggggtgacctatatcccatgtgagtggtcactttatttataggatctttaaaacatttttaatgaactaagttgaataaaggcacaattaaaaactgtcaaaaaaaaaaaaaaaaa

SEQ ID NO: 2416 - DNA, 2485 bp, Homo sapiens
ggcaaatgggcttgggcggctcctcggcgggtggcggtggtggccgtagcggttcctcctggccctgttaatgtcggggccaggccgggggaggatggcgccctagaacccggccttgctggggtaggggcgggaggggacggggtggggaccggccatgtcggaggtgacccggagtctgctgcagcgctggggcgccagttttaggagaggcgccgacttcgactcttggggccagctggtggaggcgatagacgagtatcagatattagcaagacatctacaaaaggaggcccaagctcaacacaataattctgaattcacagaagaacaaaagaaaaccataggcaaaattgcaacatgcttggaattgcgaagtgcagctttacagtccacacagtctcaagaagaatttaaactggaggacctgaagaagctagaaccaatcctaaagaatattcttacatataataaagaattcccatttgatgttcagcctgtcccattaagaagaattttggcacctggtgaagaagagaatttgggatttgaagaagatgaagaagagggtggtgctggagcagggtctcctgattcttttcctgctagagttcccggtactttattaccaaggttgccatcggaaccaggaatgacattactcactatcagaattgagaaaattggtttgaaagatgctgggcagtgcatcgatccctatattacagttagtgtaaaggatctgaatggcatagacttaactcctgtgcaagatactcctgtggcttcaagaaaagaagatacatatgttcattttaatgtggacattgagctccagaagcatgttgaaaaattaaccaaaggtgcagctatcttctttgaattcaaacactacaagcctaaaaaaaggtttaccagcaccaagtgttttgctttcatggagatggatgaaattaaacctgggccaattgtaatagaactatacaagaaacccactgactttaaaagaaagaaattgcaattattgaccaagaaaccactttatcttcatctacatcaaactttgcacaaggaatgatcctgacatgatgaacctggaacttctgtgaattttaccactcagtagaaaccatcatagctctgtgtagcatattcacccttcaacaggcaggaagcaagccgtacccagaccagtaggccggacggagtccaatgcaaagctgtaccacagaattcagagtccagcacatcacactgacgtataggactccttgggatacaggtttattgtagattttgaaacatgtttttacttttctattaattgtgcaattaatagtctattttctaatttaccactactcctaccctgcttcctggaacaatactgttgtgggtaggatgtgctcatcttcagacttaatacagcaataagaatgtgctagagtttacacatctgttcacttttgctccaatatgctcttttgacttaacgtcaagctttgggttgatgtgggtagggtagtgtcaaactgctttgagaggaatgggaccagttctgctgcctaagaaggtctgtctggatgtttataggcagcacctctgaagtggcctaaattcaccctgatctgatagttttcctgcttagaaagtgtgccttggccagatcagtatcccacatgggagtgttccctaggttgtagctgtgattgtttccagatgaccagattgtttttctgaaaatgagcatatttttagtcatgtcgattagctgttcttctacatcacattgttactctttctgatgatgattctagggttaacattggaaccatctcaaaataattacaaagttttagatgggtttacaatgtcttctaaacaatgtaatctaaaaataattgagtcagatgctaacgagatactgcaggcataactgctgtttttctgacaactgattgtgaaaccttaaaacctgcatacctcttcttacagtgaggagtatgcaaaatctggaaagatattctattttttttatataggtagataggatcgccatttatttcctatttagatatactgacattcatccatatgaaaatatgcaggtcattagcttactataatttacttttgacttaatggggcataaataaaactttcatagtacacatgaggtggatatttgatacacagaacatttgcggtgggctttctgtgggttagatgtaaagcccacatattttaatattcactattttaaatgagcaatgcatgaggggaatgcagtgtcagtacctggcctatttttaaactagtgtaatcaccctagtcataccattcagtatgtttgctttttaaaataagtaaccacaattaagttgttgtagcccttgcacttcaagagatctagtctttactttcagttgtctgttaggtccattctgtttactagacggatgttaataaaaactatgcgagcctg

SEQ ID NO: 2417 - DNA, 1844 bp, Homo sapiens
ccgtgttcattgtcagcaccggccgaggcaacttcctggagctgtcagccgctgcctcagcccctgccgagaagcacctgcactttgtggacgtggatgacctgcacatcattgtccaagagctgaggggctccattctcgacgcgatgcggccgcagcagctccatgccacggagatcacgtccagcggcttccgcctggcctggccacccctgctgaccgcagactcgggctactatgtgctggagctggtgcccagcgcccagccgggggctgcaagacgccagcagctgccagggaacgccacggactggatctgggccggcctcgacccggacacggactacgacgtggcgctagtgcctgagtccaacgtgcgcctcctgaggccccagatcctgcgggtgcgcacgcggcccggtgaggcagggccgggggcttcgggcccggagtcgggggctgggccggcccccacgcagctcgccgccctccccgccccagaggaggccgggccagagcgcatcgtcatctcccacgcccggccgcgcagcctccgcgtgagttgggccccagcgctgggctcagccgcggcgctcggctaccacgtgcagttcgggccgctgcggggcggggaggcgcagcgggtggaggtgcccgcgggccgcaactgcaccacgctgcagggcctggcgccgggcaccgcctacctggtgaccgtgaccgccgccttccgctcgggccgcgagagcgcgctgtccgccaaggcctgcacgcccgacggcccgcgcccgcgcccacgccccgtgccccgcgccccgaccccggggaccgccagccgtgagccgtaagccggcgtccccgcccagccgagagggccggcgcctacctgagggcccctgtgtcccgaacccggagcggaggcgcccaacccggcagacgggtgcaggcccggcctttccccacgcggactccgcgcgaccccggccctctccctgcggccgcagggcttccccgcctggcgcctgccctccagggctggggcctcgcctggcgggaccccgcagcagccccggccccatccccgcccagagccgggcgtcgtgtgggtccgtgggtgataattgagagcgtcagacccaggactgttcagggaggagccccggtcagactcccacgtgtgaagaccgggccccaagtggcaagggctggcctggggcgggcagcttgggtcctggacgttgataggaagcggaaggggaatcgcgggaagctggcccaggtcaggtccgcaaaggcttctgaagaagaggaagggcgagtaggggcacctggacgctgatggtggccaggatgctcagctggccaggagggcagcacctgctggggacggtggccctgccttcatgcccaggacaccagctgggtccagctagcagccactgggaatcagaggaatggggcagagctgggcattcaggaccttgaggacacgtgaccccacccgcccaccgccactatcaggccccgggaccgcactgacaggaaaccttccgtcgtgagggagcacttcccaggggccgcagggacgacactctccagggaggccccagcaaccacaccatcttcttgctgtgagaggtctcaccccgggctacctcctgtcactactcactgccctggggtccgtgggcaagttgcccagggtgggggtgcctagccaggtgcagtccccgccccgcctagtcctcggcgtcacgcaatgctcacctcgcctcttccccactaacatcccagactttaaaattcagtaaatcagatgtacaccgaaaaaaaaaaaaaaaaaa

SEQ ID NO: 2418 - DNA, 1690 bp, Homo sapiens
atcgttttctctcgtgcaatggcgtccgggctggtaagattgctgcagcagggacatcgctgcctcctggctccagtcgcccccaagctggtccctccggttcggggagtgaagaagggattccgcgccgccttccgcttccagaaggagttagagcggcagcgccttctgcggtgcccgccgccgcccgtgcgccgttcagagaagccgaactgggattaccatgcagaaatacaagcttttggacatcggttacaggaaaacttttccttagatcttctcaaaactgcttttgttaatagctgctatattaaaagtgaggaggccaaacgccaacaacttgggatagagaaagaagctgttcttctgaatcttaaaagtaatcaagaactatccgaacaagggacatctttttcacagacttgccttacacagtttcttgaagacgagtacccagacatgcccactgaaggcataaaaaatcttgttgactttctcactggtgaggaagtcgtgtgtcacgtggctagaaacttggctgtggagcagttaacactgagtgaagaattcccagtgcccccagctgtgttacagcagactttctttgcagttattggagccctgttacagagcagtggacctgagaggactgcacttttcatcagggacttcttaattactcaaatgactggaaaagagctctttgagatgtggaagataataaatcccatggggctattggtagaagaactgaagaaaaggaatgtttcagctcctgaatcaagacttactaggcagtctggtggcaccacagctttgcctttgtattttgttggcttatactgtgataaaaagttgattgcagaaggacctggggaaacagtattggttgcagaagaagaggctgctcgagtggcccttagaaaactttatggattcacagaaaatagacggccgtggaactattccaagcccaaagaaaccttgagagcagaaaagagcatcactgccagctagccgccatggatgcagcagcctgaaacttgagagcgaaagtgagataaatgtcaaaggtgtttcaagccagacattttcacaattgtgaagaaatagatgttttgtttctgttttttactgtgttcccaaaattaaataaatgttaaccaagtcacagtgtttttggttttgtttttctgaaatcttggtttgatcaaatctttttttttttctcttgagatggagtcttactctgtcgcccaggctggactgcagtggtgcgatctcggctcactgcaacctccacctcacaggttcaagcgattctcgtggctcagcctccctagtagctgggattacaggcacacaccaccatacctggctaatttttgtatttttggtagagatggggtttcaccaagttggctagactagtcttgaactcctgacctcaggtgatccacccgccttggcctcccaaagtgctgggattacaggtgtgagccactatacccgaccagatcaaatctttttttgacatttttgcaaaaaaattttcctaatgttcttgatttaattgtatagaatttgtataattaggtgtattttatttgcctctagctttgaggtatcttaatttatgtatcttatgtgaattttttgctgtaataccaataaagttttttttctccac

SEQ ID NO: 2419 - DNA, 4574 bp, Homo sapiens
gagcgggcgagggagcgcgcgcggccgccacaaagctcgggcgccgcggggctgcatgcggcgtacctggcccggcgcggcgactgctctccgggctggcgggggccggccgcgagccccgggggccccgaggccgcagcttgcctgcgcgctctgagccttcgcaactcgcgagcaaagtttggtggaggcaacgccaagcctgagtcctttcttcctctcgttccccaaatccgaggcagcccgcgggcgtcatgcccgcgctcctccgcagcctggggtacgcgctgaagcccgggaggcttggcgccggcgaagacccaaggaccactcttctgcgtttggagttgctccccacaaccccgggctcgtcgctttctccatcccgacccagccggggcgcggggacaacacaggtcgcggaggagcgttgccattcaagtgactgcagcagcagcggcagcgcctcggttcctgagcccaccgcaggctgaaggcattgcgcgtagtccatgcccgtagaggaagtgtgcagatgggattaacgtccacatggagatatggaagaggaccggggattggtaccgtaaccatggtcagctggggtcgtttcatctgcctggtcgtggtcaccatggcaaccttgtccctggcccggccctccttcagtttagttgaggataccacattagagccagaagagccaccaaccaaataccaaatctctcaaccagaagtgtacgtggctgcgccaggggagtcgctagaggtgcgctgcctgttgaaagatgccgccgtgatcagttggactaaggatggggtgcacttggggcccaacaataggacagtgcttattggggagtacttgcagataaagggcgccacgcctagagactccggcctctatgcttgtactgccagtaggactgtagacagtgaaacttggtacttcatggtgaatgtcacagatgccatctcatccggagatgatgaggatgacaccgatggtgcggaagattttgtcagtgagaacagtaacaacaagagagcaccatactggaccaacacagaaaagatggaaaagcggctccatgctgtgcctgcggccaacactgtcaagtttcgctgcccagccggggggaacccaatgccaaccatgcggtggctgaaaaacgggaaggagtttaagcaggagcatcgcattggaggctacaaggtacgaaaccagcactggagcctcattatggaaagtgtggtcccatctgacaagggaaattatacctgtgtggtggagaatgaatacgggtccatcaatcacacgtaccacctggatgttgtggagcgatcgcctcaccggcccatcctccaagccggactgccggcaaatgcctccacagtggtcggaggagacgtagagtttgtctgcaaggtttacagtgatgcccagccccacatccagtggatcaagcacgtggaaaagaacggcagtaaatacgggcccgacgggctgccctacctcaaggttctcaagcactcggggataaatagttccaatgcagaagtgctggctctgttcaatgtgaccgaggcggatgctggggaatatatatgtaaggtctccaattatatagggcaggccaaccagtctgcctggctcactgtcctgccaaaacagcaagcgcctggaagagaaaaggagattacagcttccccagactacctggagatagccatttactgcataggggtcttcttaatcgcctgtatggtggtaacagtcatcctgtgccgaatgaagaacacgaccaagaagccagacttcagcagccagccggctgtgcacaagctgaccaaacgtatccccctgcggagacaggtaacagtttcggctgagtccagctcctccatgaactccaacaccccgctggtgaggataacaacacgcctctcttcaacggcagacacccccatgctggcaggggtctccgagtatgaacttccagaggacccaaaatgggagtttccaagagataagctgacactgggcaagcccctgggagaaggttgctttgggcaagtggtcatggcggaagcagtgggaattgacaaagacaagcccaaggaggcggtcaccgtggccgtgaagatgttgaaagatgatgccacagagaaagacctttctgatctggtgtcagagatggagatgatgaagatgattgggaaacacaagaatatcataaatcttcttggagcctgcacacaggatgggcctctctatgtcatagttgagtatgcctctaaaggcaacctccgagaatacctccgagcccggaggccacccgggatggagtactcctatgacattaaccgtgttcctgaggagcagatgaccttcaaggacttggtgtcatgcacctaccagctggccagaggcatggagtacttggcttcccaaaaatgtattcatcgagatttagcagccagaaatgttttggtaacagaaaacaatgtgatgaaaatagcagactttggactcgccagagatatcaacaatatagactattacaaaaagaccaccaatgggcggcttccagtcaagtggatggctccagaagccctgtttgatagagtatacactcatcagagtgatgtctggtccttcggggtgttaatgtgggagatcttcactttagggggctcgccctacccagggattcccgtggaggaactttttaagctgctgaaggaaggacacagaatggataagccagccaactgcaccaacgaactgtacatgatgatgagggactgttggcatgcagtgccctcccagagaccaacgttcaagcagttggtagaagacttggatcgaattctcactctcacaaccaatgaggaatacttggacctcagccaacctctcgaacagtattcacctagttaccctgacacaagaagttcttgttcttcaggagatgattctgttttttctccagaccccatgccttacgaaccatgccttcctcagtatccacacataaacggcagtgttaaaacatgaatgactgtgtctgcctgtccccaaacaggacagcactgggaacctagctacactgagcagggagaccatgcctcccagagcttgttgtctccacttgtatatatggatcagaggagtaaataattggaaaagtaatcagcatatgtgtaaagatttatacagttgaaaacttgtaatcttccccaggaggagaagaaggtttctggagcagtggactgccacaagccaccatgtaacccctctcacctgccgtgcgtactggctgtggaccagtaggactcaaggtggacgtgcgttctgccttccttgttaattttgtaataattggagaagatttatgtcagcacacacttacagagcacaaatgcagtatataggtgctggatgtatgtaaatatattcaaattatgtataaatatatattatatatttacaaggagttattttttgtattgattttaaatggatgtcccaatgcacctagaaaattggtctctctttttttaatagctatttgctaaatgctgttcttacacataatttcttaattttcaccgagcagaggtggaaaaatacttttgctttcagggaaaatggtataacgttaatttattaataaattggtaatatacaaaacaattaatcatttatagttttttttgtaatttaagtggcatttctatgcaggcagcacagcagactagttaatctattgcttggacttaactagttatcagatcctttgaaaagagaatatttacaatatatgactaatttggggaaaatgaagttttgatttatttgtgtttaaatgctgctgtcagacgattgttcttagacctcctaaatgccccatattaaaagaactcattcataggaaggtgtttcattttggtgtgcaaccctgtcattacgtcaacgcaacgtctaactggacttcccaagataaatggtaccagcgtcctcttaaaagatgccttaatccattccttgaggacagaccttagttgaaatgatagcagaatgtgcttctctctggcagctggccttctgcttctgagttgcacattaatcagattagcctgattctcttcagtgaattttgataatggcttccagactctttgcgttggagacgcctgttaggatcttcaagtcccatcatagaaaattgaaacacagagttgttctgctgatagttttggggatacgtccatctttttaagggattgctttcatctaattctggcaggacctcaccaaaagatccagcctcatacctacatcagacaaaatatcgccgttgttccttctgtactaaagtattgtgttttgctttggaaacacccactcactttgcaatagccgtgcaagatgaatgcagattacactgatcttatgtgttacaaaattggagaaagtatttaataaaacctgttaatttttatactgacaataaaaatgtttctacagatattaatgttaacaagacaaaataaatgtcacgcaactt

SEQ ID NO: 2420 - DNA, 1878 bp, Homo sapiens
gcttcggagcggccggtactgttgaaagcgacaagtggaggcgccgctctagcggccgggactctgaactatggcggctagtgatacagagcgagatggactagccccagaaaagacatcaccagatagagataagaaaaaagagcagtcagaagtatctgtttctcctagagcttcaaaacatcattattcaagatcacgatcaaggtcaagagaaagaaaacgaaagtcagataatgaaggaagaaaacacaggagccggagcagaagcaaagagggaagaagacatgaatccaaagataaatcctctaagaaacataagtctgaggaacataatgacaaagaacattcttctgataaaggaagagagcgactaaattcatctgaaaatggtgaggacaggcacaaacgcaaagaaagaaagtcatcaagaggcagaagtcactcaagatctaggtctcgtgaaagacgccatcgtagtagaagcagggagcggaagaagtctcgatccaggagtagggagcggaagaaatcgagatccagaagcagagagaggaagaaatcgagatccagaagcagggaaagaaaacggcggatcaggtctcgttcccgctcaagatcaagacacaggcataggactagaagcaggagtaggacaaggagtaggagtcgagatagaaagaagagaattgaaaagccgagaagatttagcagaagtttaagccggactccaagtccacctcccttcagaggcagaaacacagcaatggatgcacaggaagctttagctagaaggttggaaagggcaaagaaattacaagaacagcgagaaaaggaaatggttgaaaaacaaaaacaacaagaaatagctgcagctgcagctactggaggttctgttctcaatgttgctgccctgttggcatcaggaacacaagtaacacctcagatagccatggcagctcagatggcagccctgcaagctaaagctttggcagagacaggaatagctgttcctagctactataacccagccgctgttaatccaatgaaatttgctgaacaagagaaaaaaaggaaaatgctttggcagggcaagaaagaaggggacaaatcccaatctgctgaaatatgggaaaaattgaattttggaaacaaggaccaaaatgtcaaatttaggaaattgatgggtattaagagtgaagatgaagctggatgtagctcagttgatgaagaaagttacaagactctgaagcagcaggaagaagtatttcgaaatttagatgctcagtatgaaatggcaagatcacaaacccacacacaaagaggaatgggtttgggtttcacatcttcaatgcgaggaatggatgcagtttgaaaatgatcacacttgtaaagtttgggacttatagacttcttgttctgatgtcacgtccttgttcaccaaacagctagcactctagcttgcatgggtgttgcattgactttaatttattgaaaaatacaaatttttgtaaatatcagatcagtgatactggtgttagtgttgtaatcaggttaaacccacttccattaaacttgacaggactatagaaggataatattttttagttcatgaattctacttttcaaatatataaaagctgcaggtggggataaaatctcatacatggattttttcgtgtccgctgtcttgtgtacttttgtacttaaccttgtacagttattttcatctcttgaaacatgaaagaaatgttatgtagatgttctttagaagatctggccatttggtacataatccagcacagataagctgggtggtaatgataataaaaatggttttctcaaaaaaaaaaaaaaaaaaaaaaaaaaaaaaaaaaa

SEQ ID NO: 2421 - DNA, 3676 bp, Homo sapiens
aaatcccccaagttctcatgatccttgcttccctttccagtcacccttggtgccctgtacttcactgtggtcctgaactgaagagctgtgtttttcaggaagacttggccaggccgtgttccgtgtctctggattcaagtcccaggagtcctgaccagagagcaggcatcagtgtttttctgaccgaagtgctcatttcctgacaatggaaatggaacaagaaaaaatgaccatgaataaggaattgagtccagacgcggctgcttactgctgctcggcctgccacggcgatgagacctggagttacaaccaccccatccggggccgggccaagtctcgcagcctgtctgcctcgcccgccctggggagcaccaaggagttcaggaggacacgctctcttcatgggccatgcccggtgaccacttttggaccaaaggcctgtgtgctgcagaacccccagaccatcatagccactcctttgtcactcgcatctcagctgctgccttcaccagccgtcagtcactcgggccagggcggggtcaccggacaggtgcatgttctgcctcagccctcagaccagggcgtactcagtggtccccgagctgcccgaggccagacagccccgcaggaggaagcggtgacccaggaagaggtcgaggcgctggtttgtggtcacacacagcggtgggtgcctgggccggtgtacgacgccgctgctggtggctctggctgggctcagctgagcctcagggctggaatgggtgtaggccaggccactgggcacattcaggaccccgcgagccagcggctgacgtggaacaagtccccaaagagcgtccttgtcatcaagaagatgagagatgccagcctactgcagccgttcaaggagctctgcacgcacctcatggaggcacgcggggcaggggggaagggggcctggggtgcacatggagttgggggggcctccatccacatcaccgccccgagggtggggtctgcaggtggaatgagcaggttggcactttgcttccaggagaacatgatcgtgtatgtggaaaagaaagtgctagaagaccctgccatcgccagcgatgaaagctttggggcagtgaagaagaaattctgtacctttcgagaagattatgatgacatttccaatcagatagacttcatcatctgcctggggggagacgggacgctgctgtacgcttcctcgcttttccagggcagcgtccctccggtcatggccttccacctgggctccctgggcttcctgaccccattcagctttgagaactttcagtcccaagttactcaggtgatagaggggaacgcagctgttgttctccggagtcggctgaaggtcagggtggtgaaggagctccgggggaagaagacggccgtgcacaatgggctgggtgagaacggctcgcaggctgcaggcctggacatggatgtcgggaagcaggccatgcagtaccaggtcctgaatgaggtggtgattgacagaggcccctcctcctacctgtccaatgtggatgtctacctggacggacacctcatcaccacggtgcagggcgacggagtgatcgtgtccaccccgacgggcagcacggcgtatgcggccgcggccggggcctccatgatccaccccaacgtgccggccatcatgatcacgcccatctgcccccactcgctgtccttccggcccatcgtggtccccgcagtcgagctgaagatcatgctgtcacctgaagcaaggaacacagcatgggtgtcctttgatggacggaagagacaagagatccgccatggagacagcatcagcatcactacctcatgctacccgctcccctccatctgtgtgcgggaccccgtgagcgactggtttgagagcctcgcccagtgcctgcattggaacgtccggaagaagcaagcccacttcgaggaggaggaggaggaggaggaggagggctaggtcaagcccctatccaggcccgaatccttccgctgccctccaagcgccctctggggacagaccaatctgcgtgtgtctgtgaccgcctgtcatcagtggcacggccacttcctttctgtagctgggttagagcctgggtctgccttttgtccagatcagctgtttttttaaaatctctgactttttttgcatttctaaagaagcgtgagaaatgggctgggagtgcttctgtcctgctgacaccccgcggtgggtccctggagcgcggcctccagctgccgcaatttccatgccaggatatttttccgcaaatcagtcggttgaaattcagaggagtcagaatgactcgacctgtccttcaatgttgataataaatgtctcagccaaaaaccttccttgagctgccatgcttttccccttgacctgcacctcttcccctaaaatttctgcagggaagcccctggcggaggcgccattgaaagcatggtcttgccagtggctggcaaggcggttttgttctgctcagtttctggagagggttggatgcgtcccctgccatccagccctccccgcttgaggccagcactgagtctgggacactcagcgggaagggggctggcatcgccacggacccacacattcctcacgtagcttctgctcccaggaaggtagtttaaatcctgtatatactttttagagactcttttaaactttctgaagtgctgatgtacatactttctcgtacacacttttgtgaagatttcaaggggaagggagttgtctgccattcaatgtttacatttatgttctgcaagacgctgtcctcagggaccattaggggaccattctgttcagtgcgatcctgatggtccgggagatgagggtttccggggctagtgatcgtgatcccttttatttgcaactgtaatgagaatttttcacactaacacagcgagggactcaacacgctgattctcctcctgcctctcccgtgagtctccagcctgcccagcaccagcagctgtggagcacgtggatgctgcctaccccggcgcccgcgtcttccacgggcacaggtgtgtggaggccgtggtcggaccctggtgtcctggttactgctgcccgggtgtcttttttttgagtaactgctctctgagttttgcacacgaagttgccctcatctgctggagatcgataaggaaggcacaagacgttctcctctgcccgtgaggagcttcccgcagccgcctggcccagcctgggcacgttctccgaggcatgtgtctccctgctcaccctcgtctgggcacctcagcatctgtggacttgagcgtccaaaaaccctgagtgtgattctgggcagccggcctggcttgaagtccgccatgaccctgggcacaggggaagcccagccgtgggcttaggagagagggaccagcgcccagcgttagggctggaagacggcagtgttcagaattccagccgctcatctgaacacagaaggtgtgaactgacctctaaagcagcgtgagatgggaatgatctagaaaactttggatttttgaagtaaattttaatgtttcatattaatttcttgaaaatgtattaaatgtcattgaaagccttattacgcttttcagatcctttcaataaacaagacttgtagaaaataaaaaaaaaaaaaaaaaaaaaaaaaaa

SEQ ID NO: 2422 - DNA, 3312 bp, Homo sapiens
tggctgagggcgtgtgagcgccgagcgctaagggccgccgccaccatgccagggggcgcaggcgccgccaggctctgcttgctggcgtttgccctgcagcccctccggccgcgggcggcgcgggagcctggatggacaagtaaaggaagtgaggaaggcagccccaagctgcagcatgaacttatcatacctcagtggaagacttcagaaagccccgtgagagaaaagcatccactcaaagctgagctcagggtaatggctgaggggcgagaactgatcctggacctggagaagaatgagcaactttttgctccttcctacacagaaacccattatacttcaagtggtaaccctcaaaccaccacacggaaattggaggatcactgcttttaccacggcacggtgagggagacagaactgtccagcgtcacgctcagcacttgccgaggaattagaggactgattacggtgagcagcaacctcagctacgtcatcgagcccctccctgacagcaagggccaacaccttatttacagatctgaacatctcaagccgcccccgggaaactgtgggttcgagcactccaagcccaccaccagggactgggctcttcagtttacacaacagaccaagaagcgacctcgcaggatgaaaagggaagatttaaactccatgaagtatgtggagctttacctcgtggctgattatttagagtttcagaagaatcgacgagaccaggacgccaccaaacacaagctcatagagatcgccaactatgttgataagttttaccgatccttgaacatccggattgctctcgtgggcttggaagtgtggacccacgggaacatgtgtgaagtttcagagaatccatattctaccctctggtcctttctcagttggaggcgcaagctgcttgcccagaagtaccatgacaacgcccaattaatcacgggcatgtccttccacggcaccaccatcggcctggcccccctcatggccatgtgctctgtgtaccagtctggaggagtcaacatggaccactccgagaatgccattggcgtggctgccaccatggcccacgagatgggccacaactttggcatgacccatgattctgcagattgctgctcggccagtgcggctgatggtgggtgcatcatggcagctgccactgggcacccctttcccaaagtgttcaatggatgcaacaggagggagctggacaggtatctgcagtcaggtggtggaatgtgtctctccaacatgccagacaccaggatgttgtatggaggccggaggtgtgggaacgggtatctggaagatggggaagagtgtgactgtggagaagaagaggaatgtaacaacccctgctgcaatgcctctaattgtaccctgaggccgggggcggagtgtgctcacggctcctgctgccaccagtgtaagctgttggctcctgggaccctgtgccgcgagcaggccaggcagtgtgacctcccggagttctgtacgggcaagtctccccactgccctaccaacttctaccagatggatggtaccccctgtgagggcggccaggcctactgctacaacggcatgtgcctcacctaccaggagcagtgccagcagctgtggggacccggagcccgacctgcccctgacctctgcttcgagaaggtgaatgtggcaggagacacctttggaaactgtggaaaggacatgaatggtgaacacaggaagtgcaacatgagagatgcgaagtgtgggaagatccagtgtcagagctctgaggcccggcccctggagtccaacgcggtgcccattgacaccactatcatcatgaatgggaggcagatccagtgccggggcacccacgtctaccgaggtcctgaggaggagggtgacatgctggacccagggctggtgatgactggaaccaagtgtggctacaaccatatttgctttgaggggcagtgcaggaacacctccttctttgaaactgaaggctgtgggaagaagtgcaatggccatggggtctgtaacaacaaccagaactgccactgcctgccgggctgggccccgcccttctgcaacacaccgggccacgggggcagtatcgacagtgggcctatgccccctgagagtgtgggtcctgtggtagctggagtgttggtggccatcttggtgctggcggtcctcatgctgatgtactactgctgcagacagaacaacaaactaggccaactcaagccctcagctctcccttccaagctgaggcaacagttcagttgtcccttcagggtttctcagaacagcgggactggtcatgccaacccaactttcaagctgcagacgccccagggcaagcgaaaggtgatcaacactccggaaatcctgcggaagccctcccagcctcctccccggccccctccagattatctgcgtggtgggtccccacctgcaccactgccagctcacctgagcagggctgctaggaactccccagggcccgggtctcaaatagagaggacggagtcgtccaggaggcctcctccaagccggccaattccccccgcaccaaattgcatcgtttcccaggacttctccaggcctcggccgccccagaaggcactcccggcaaacccagtgccaggccgcaggagcctccccaggccaggaggtgcatccccactgcggccccctggtgctggccctcagcagtcccggcctctggcagcacttgccccaaaggtgagtccacgggaagccctcaaggtgaaagctggtaccagagggctccaggggggcaggtgtagagttgagaaaacaaagcaattcatgcttcttgtggtctggactgaacttccagaacaaaagccaagggcaaaacattcatgtttcttggtgcccgcttgactgtggagttttggcttcatgtgaaaggtgattcttagaatcctgagctgtggtggcttcagtcctgcccctgcacctgacctggggagggaccctgagcaagtccctcttgagtctgtttcctcatttgtacagaggctatgatgagcagtagtaccagccccatcaggttgttgtgaagagcaaggaagtgcattagtagaagccacctggcctgcgggaggctgtgtacacttggcccctcctcgtacttcttctgtgtggctgacagtctcagtttgccagtcttgcaatcaggtcagaaagggatgagtgaagaagctggcttgacatgctgtattccacgaggcattgagaaaactatggactgtgctgctgccttaacagggaagggaa

SEQ ID NO: 2423 - DNA, 1809 bp, Homo sapiens
agtgacgtcgcggccaaaacaagcccgggcttggaggcctgtactgaagctggcctcagatgggaaggcccgactcgctgtctgctgtcgtcggtggtcgcgagaccttgcactctcaccgggtcggcctccagcccctgtgcccgggatccgctcgccgcggatgagcgagagtttcttcctgggacttttcgggcacagctggccggtggcgacataacggactttctttcctgcaagagtctcccctccagcgggagacagcgggctcctgtctcgggacgctgggacacctgtcgcctatttttaaatatccagattccaagaacacactggatactgctcttacaaaaccaagaggaaatcatgaagaaatgttttagttattgaaactacagttgaaatcatggatacatcaacaaatctggatattggagcccagcttatcgtggaagagtgtcccagcacttatagcctaactggcatgccagacattaaaatagaacatccactggacccaaattcagaagaagggtcagctcagggtgttgccatgggaatgaaattcatattgcctaaccgatttgatatgaatgtgtgttctcgatttgtgaagtccttaaatgaagaagatagtaaaaatattcaagatcaggttaactctgacctggaggtggcatctgtcctatttaaagctgaatgcaatatccatacatctccttctccgggaattcaagtaaggcatgtctacaccccctctacaacaaagcatttctcacccataaaacagtcaaccactttaaccaacaaacacagaggaaatgaggtctctaccacacctctgttagcaaattctttgtctgttcaccagttggctgctcagggagagatgctctatctggctactcgtatcgaacaagaaaatgttatcaatcacacggatgaagaaggatttactcctctgatgtgggctgcagcacacgggcaaatagctgtggtagagttcctacttcagaatggtgctgatccccaacttttaggaaaaggtcgagaaagtgcactgtcgttggcctgtagtaaaggctacacagatattgtcaaaatgctgcttgattgtggagttgatgtaaatgaatatgattggaatggaggaacacctctgctttatgctgtacatggaaatcatgtgaaatgtgtaaagatgctcttagaaagtggggctgatccaacaattgaaactgactctggatataattctatggatctagctgtagccctaggctatagaagtgttcaacaggttattgagtcacatttgttgaagctgcttcaaaatatcaaggagtagacacagtcatcagaaaatgtctgcccttttgtttacttcttggtccttataaatgatagttttgtttacttataaatttttacctcagttgcaatatttactggtttttagtaggttttaataaatatttctctgagtaattcactggtttataataaatgtaatactctttttataactatgttttactgtatatttaaaattataaattaatgttttcgtggcatgtaaatttttatggtacagatagttatcatcagtctttgtatcaagtgctgtaatttgacattttcagaaattattctaccctagtcatcttcactcgtgtattaagtcattcactttatatagggtttgctataaatccctagaaaaaaattgttcttattgttgaataaaaaagtgcacagtgtgattgtttacaaaatgatattataaataaataaaatacttcttctgtc

SEQ ID NO: 2424 - DNA, 2385 bp, Homo sapiens
  misc_feature (149)..(149): n is a, c, g, or t
ccctaacgacagctcgcccgtgcttcgccctcgcagctctcctgtgtccccaaaatgcccttcccgcgtcccccgcccttcagcggtgactgcccaggggactctgtaacgcgacactcagactgccgagcctgccaggcacttcgcgnagggcgctaggggccgggacgcggccgccgagcgtaggttccggcctttactccgagttgcgcacggagccccagctgcggttgtccgctctggggatcacaggccgcggagacccgggagccacccgccgggccccttcagacgacccgcttccgcaaaccggccgtgggactccggcgccgggcggacgaagcggcgccgggcggacgaagcggctccgggaagactcggtcttccccgcccgcctgaggtcgccggggcggggcttcagtgacaggcccgcgcgctaccgcggaaacaggaagttggctgggtgcgcgccggctccggctgcagttcccgggtccctcggccaccgaagccaccctgccctggtgaaagggctcccgcaccgcccggtgctccccatctgcctggcgttgtgcgcagagctggaaagcatggctgttataaatgaattctgattttggggagcagatgccaacttagagcctcgtaccaatctctctgtctttaaaagatgaggtgacttggtgattttcctggaaaattataggtgcccagctaagacctgaatgccatcaccctccccagggctctgcagttttctcgtggtgaacccttgatggatttgttgttgcttgagaaatggcgatgatcgaattggggtttggaagacagaattttcatccattaaagaggaagagttcattgctgttgaaactcatagctgttgtctttgctgtgcttctattttgtgaatttttaatctattacttagcgatctttcagtgtaattggcctgaagtgaaaaccacagcctctgatggtgaacagaccacacgtgagcctgtgctcaaagccatgtttttggctgacacccatttgcttggggaattcctaggccactggctggacaaattacgaagggaatggcagatggagagagcgttccagacagctctgtggttgctgcagccggaagtcgtcttcatcctgggggatatctttgatgaagggaagtggagcacccctgaggcctgggcggatgatgtggagcggtttcagaaaatgttcagacacccaagtcatgtacagctgaaggtagttgctggaaaccatgacattggcttccattatgagatgaacacatacaaagtagaacgctttgagaaagtgttcagctctgaaagactgttttcttggaaaggcattaactttgtgatggtcaacagcgtggcgctgaacggggatggctgtggcatctgctctgaaacagaagcagagctcattgaagtttctcacagactgaactgctcccgagaggcacgtggctccagccggtgtggacctgggcctctgctgcccacgtctgcccctgtcctcctgcagcattatcctctgtatcggagaagtgatgctaactgttctggggaagacgctgctcctgcagaggaaagggacatcccatttaaggagaactatgacgtgctttcacgggaggcatcacaaaagctgctgtggtggctccagccgcgcctggttctcagtggccacacgcacagcgcctgcgaggtgcaccacgggggccgagtccccgagctcagcgtcccatctttcagttggaggaacagaaacaaccccagtttcatcatgggtagcatcacgcccacagactacaccctctccaagtgctacctcccacgtgaggatgtggttttgatcatctactgtggagaggtgggcttccttgtggtcctcacactcactcactttgggcttctagcctcaccttttctttctggtttgaacttgctcggaaagcgtaagacaagatgaagagcaggcgccattataaatatcaaagcccaagaaatggaactttgggcagagatcatgttagaatcaagtggatgatgagaccaattacaggccgtctctctgcacagcacagaaattctcaatcactgaaatgagtaactgcaaaataaatagttgattgtactgttctcatgctataaaagtggacaggtactctacaacaaatctgttttctcatttttatcaaatatatgtatcatcaaaggttgcatctgtacagtatgtaaatgctattaatgtcgtcactcacatgcacgagagtccttgttcccccaggaagggcctggtggccccagcacacacttgggattatgtgtatacataaataaatattgggctgtttccctcttcctg

SEQ ID NO: 2425 - DNA, 3053 bp, Homo sapiens
gcgatggcggagagtccgactgaggaggcggcaacggcgggcgccggggcggcgggccccggggcgagcagcgttgctggtgttgttggcgttagcggcagcggcggcgggttcgggccgcctttcctgccggatgtgtgggcggcggcggcggcagcgggcggggccgggggcccggggagcggcctggctccgctgcccgggctcccgccctcagccgctgcccacggggccgcgctgcttagccactgggaccccacgctcagctccgactgggacggcgagcgcaccgcgccgcagtgtctactccggatcaagcgggatatcatgtccatttataaggagcctcctccaggaatgttcgttgtacctgatactgttgacatgactaagattcatgcattgatcacaggcccatttgacactccttatgaagggggtttcttcctgttcgtgtttcggtgtccgcccgactatcccatccacccacctcgggtcaaactgatgacaacgggcaataacacagtgaggtttaaccccaacttctaccgcaatgggaaagtctgcttgagtattctaggtacatggactggacctgcctggagcccagcccagagcatctcctcagtgctcatctctatccagtccctgatgactgagaacccctatcacaatgagcccggctttgaacaggagagacatccaggagacagcaaaaactataatgaatgtatccggcacgagaccatcagagttgcagtctgtgacatgatggaaggaaagtgtccctgtcctgaacccctacgaggggtgatggagaagtcctttctggagtattacgacttctatgaggtggcctgcaaagatcgcctgcaccttcaaggccaaactatgcaggacccttttggagagaagcggggccactttgactaccagtccctcttgatgcgcctgggactgatacgtcagaaagtgctggagaggctccataatgagaatgcagaaatggactctgatagcagttcatctgggacagagacagaccttcatgggagcctgagggtttagaccctgctcccatctccccttcccccactcaagagtcccagcagaatcccttccccccaccccagggatggagaggcactgtgtatctccctccagactcgaagtcatcctgcaagatggcaagaaccaagcaagctccgatcccagggtgtgggagtgggggcctgttcccggtctgacctccttggcactggagcatctggggcttcgttcatccattcatcccgtatcaggggccaaggtacctttacaggagcacctagagcgagggcctttggcaaaaacaaaacaaccaacacacctctccacagggccagctccttagggataagtggaagatggaaattgcaattccaagagggagtgtgcccaaatgatttatggggatacctggaagggagcttggggtgggggctgtctgtgacacttaagcagtctgggtggttgtctatttgtctgtcttcagtcttgaagcagggcttcccaatgcccttttcctccctgccttccttcccccattatttcccacaggccagcataattttgtttttcctaatttatagtcactgttctagacagaccaaagagaaggaacagtggtggagtctaggctgctgatcagtaagctttacctagcacctgagcacctttctcccctcccctctttcctcacccttttctagatgtaagacagaaggtaaatgtgactgggacttaaccaaggtcttggtaaagcctgcatggcaccgtaagaagctgaaaatactgtttgttcccgcaatcactgatttgaaaagttcccaacacaggcagctgctgtgtatatgggattagagccactacatagaatagtctcttacagattttcataaatactagtcacaataagggtatttttcttgggggtggagtaagggggagactgatgctagtccttgttgtattttgttgggctgtccttgtgtattttcaccccagcctgtagtcctcctcacttcaaccccagggatttgtggggagcaagggtagccaatggcagagggggttggggctgggactctggaggctcctccccttctttctcttccttctgcctcccccgtgcccccagctgctcttgtcactgtctctgatgggtatttgcctggctttgttgcttctctatctgtatttagctgcagtgatcctttagctggttggctcagaaaaaaaaaaatgtgctttaggtgccctgtaatcctgggcatcaagggaatccatccttcccctttttgatatgttctccccgtacttccagatttattgttatggctcccagtgggtattggcgattcttgtgatgcagggcctcagtcagtgtccagccatgcataagggagaggatagtgtgtacctgccctgccctctgctatgaaggtctctgccttgtggatcatgggactccccttggaggatctgtgcaaaggggggctgggcacaaaggagaatgtcctatttgggagggcaggaagcaaaggaactggacagggattggtgggcttggggaacggaagtttatcttggatacccttgaagaggctgggtctcttcacatgaagatcgaaaagggaccctgcttccaatttccctcttccattcctcgagctactccagggcttagaagaatgctcttggtctgtgggtccagtgttgtctgtcatccatttaagtgttcccactttcaagtgacaatcctctccttggccctgccatagggcagagcatgtctggcatagcagcctgacttttatgccctaatcttgagttgaggaaatatatgcacaggagtcaaagagatgtctttatatctgactgtatataaatgaagtttttttgttttttttgttttcctttttggtgcaataaagtttgttttggcagaaaaaaaaaaaaaaaaaaaaaaaaaaaaaaaaaaaaaaaaaaaaaaaaaaaaaaaaaaaaaaaaa

SEQ ID NO: 2426 - DNA, 3786 bp, Homo sapiens
cctcttgcggccacaggcgcggcgtcctcggcggcgggcggcagctagcgggagccgggacgccggtgcagccgcagcgcgcggaggaacccgggtgtgccgggagctgggcggccacgtccggacgggaccgagacccctcgtagcgcattgcggcgacctcgccttccccggccgcgagcgcgccgctgcttgaaaagccgcggaacccaaggacttttctccggtccgagctcggggcgccccgcaggcgcacggtacccgtgctgcagtcgggcacgccgcggcgccgggggcctccgcagggcgatggagccggtctgcaaggaaagtgaggcgccgccgctgcgttctggaggaggggggcacaaggtctggagaccccgggtggcggacgggagccctccccccgccccgcctccggggcaccagctccggctccattgttcccgcccgggctggaggcgccgagcaccgagcgccgccgggagtcgagcgccggccgcggagctcttgcgaccccgccaggacccgaacagagcccgggggcggcgggccggagccggggacgcggagccggggacgcacacgcccgctcgcacaagccacggcggactctcccgaggcggaacctccacgccgagcgagggtcagtttgaaaaggaggatcgagctcactgtggagtatccatggagatgtggagccttgtcaccaacctctaactgcagaactgggatgtggagctggaagtgcctcctcttctgggctgtgctggtcacagccacactctgcaccgctaggccgtccccgaccttgcctgaacaagatgctctcccctcctcggaggatgatgatgatgatgatgactcctcttcagaggagaaagaaacagataacaccaaaccaaaccccgtagctccatattggacatccccagaaaagatggaaaagaaattgcatgcagtgccggctgccaagacagtgaagttcaaatgcccttccagtgggaccccaaaccccacactgcgctggttgaaaaatggcaaagaattcaaacctgaccacagaattggaggctacaaggtccgttatgccacctggagcatcataatggactctgtggtgccctctgacaagggcaactacacctgcattgtggagaatgagtacggcagcatcaaccacacataccagctggatgtcgtggagcggtcccctcaccggcccatcctgcaagcagggttgcccgccaacaaaacagtggccctgggtagcaacgtggagttcatgtgtaaggtgtacagtgacccgcagccgcacatccagtggctaaagcacatcgaggtgaatgggagcaagattggcccagacaacctgccttatgtccagatcttgaagactgctggagttaataccaccgacaaagagatggaggtgcttcacttaagaaatgtctcctttgaggacgcaggggagtatacgtgcttggcgggtaactctatcggactctcccatcactctgcatggttgaccgttctggaagccctggaagagaggccggcagtgatgacctcgcccctgtacctggagatcatcatctattgcacaggggccttcctcatctcctgcatggtggggtcggtcatcgtctacaagatgaagagtggtaccaagaagagtgacttccacagccagatggctgtgcacaagctggccaagagcatccctctgcgcagacaggtaacagtgtctgctgactccagtgcatccatgaactctggggttcttctggttcggccatcacggctctcctccagtgggactcccatgctagcaggggtctctgagtatgagcttcccgaagaccctcgctgggagctgcctcgggacagactggtcttaggcaaacccctgggagagggctgctttgggcaggtggtgttggcagaggctatcgggctggacaaggacaaacccaaccgtgtgaccaaagtggctgtgaagatgttgaagtcggacgcaacagagaaagacttgtcagacctgatctcagaaatggagatgatgaagatgatcgggaagcataagaatatcatcaacctgctgggggcctgcacgcaggatggtcccttgtatgtcatcgtggagtatgcctccaagggcaacctgcgggagtacctgcaggcccggaggcccccagggctggaatactgctacaaccccagccacaacccagaggagcagctctcctccaaggacctggtgtcctgcgcctaccaggtggcccgaggcatggagtatctggcctccaagaagtgcatacaccgagacctggcagccaggaatgtcctggtgacagaggacaatgtgatgaagatagcagactttggcctcgcacgggacattcaccacatcgactactataaaaagacaaccaacggccgactgcctgtgaagtggatggcacccgaggcattatttgaccggatctacacccaccagagtgatgtgtggtctttcggggtgctcctgtgggagatcttcactctgggcggctccccataccccggtgtgcctgtggaggaacttttcaagctgctgaaggagggtcaccgcatggacaagcccagtaactgcaccaacgagctgtacatgatgatgcgggactgctggcatgcagtgccctcacagagacccaccttcaagcagctggtggaagacctggaccgcatcgtggccttgacctccaaccaggagtacctggacctgtccatgcccctggaccagtactcccccagctttcccgacacccggagctctacgtgctcctcaggggaggattccgtcttctctcatgagccgctgcccgaggagccctgcctgccccgacacccagcccagcttgccaatggcggactcaaacgccgctgactgccacccacacgccctccccagactccaccgtcagctgtaaccctcacccacagcccctgctgggcccaccacctgtccgtccctgtcccctttcctgctggcaggagccggctgcctaccaggggccttcctgtgtggcctgccttcaccccactcagctcacctctccctccacctcctctccacctgctggtgagaggtgcaaagaggcagatctttgctgccagccacttcatcccctcccagatgttggaccaacacccctccctgccaccaggcactgcctggagggcagggagtgggagccaatgaacaggcatgcaagtgagagcttcctgagctttctcctgtcggtttggtctgttttgccttcacccataagcccctcgcactctggtggcaggtgccttgtcctcagggctacagcagtagggaggtcagtgcttcgtgcctcgattgaaggtgacctctgccccagataggtggtgccagtggcttattaattccgatactagtttgctttgctgaccaaatgcctggtaccagaggatggtgaggcgaaggccaggttgggggcagtgttgtggccctggggcccagccccaaactgggggctctgtatatagctatgaagaaaacacaaagtgtataaatctgagtatatatttacatgtctttttaaaagggtcgttaccagagatttacccatcgggtaagatgctcctggtggctgggaggcatcagttgctatatattaaaaacaaaaaagaaaaaaaaggaaaatgtttttaaaaaggtcatatattttttgctacttttgctgttttatttttttaaattatgttctaaac

SEQ ID NO: 2427 - DNA, 3374 bp, Homo sapiens
tttttccccctccccgggggccaagggctccggctgctgcctggcggccaacgggccaggtaggatttccgggagaggctgctgtggaggctgaggaggcggcggcggagatctggaaacagtatctcacctccctaaactggttaatagtggcatggaagatccatttgagatggggttttaccatgttacccaggctggtcttgaactcctggactcaagcaacccccgcttggcctcccaaagtgctgggattagaggcgtgagccactgcacctgacctaagaggaagcagaccagcccactacagagccaggcatggtcctggatagtgtggaagcaggagacacaacacctcctaccaaaaggaagagcaagttctcaggctttggcaagatcttcaagccctggaaatggaggaaaaaaaaagtagtgataaatttaaagagacttcagaagttttagaacggaaaatatctatgcgaaagccaagagaagagctggttaaaagaggggttctgttggaagaccctgagcaaggtggtgaggatccaggaaagccaagcgatgccatgttaaagaatggccataccacccccatagggaatgccagatcatctagtccagtccaagtagaggaagagccagtaagattagcaagtcttaggaaagctattccagaagaggacctaaagaaacgactaggctcaactggaagccagcctaattctgaagcagagtctgttcctgagaatgtacccaaaccacctttacttcctcccaaaagacccttgtcctcttctcatgaagcaagtgaagggcaagcaaaggatgccacttcctctggcggcacggcaaggttcatcatctccacctccatcaccacagcacccgctgccaccactgctgccacaagccttgcaaagactgttaatctctctgtcaccccttccccagcacccaggactctgcctgctgctcctgccagcactaacactactgctaccccaagcctcactcatatggtccctgccaagcagccccctatccctccccctaaaccagctcacagaaatagcaaccctgtcattgctgaactgtcccaagcaataaacagtggtacattgttatcaaaaccgtccccacccttaccacctaagagaggcattccatcaacctcagtacccaccttggagtctgctgctgccatcaccacaaaaacaccaagtgatgaaagagagaagagcacgtgttctatgggctcggaactactaccaatgatctcacctcgctctccgtcccccccactgcctactcatatacctccagagcctccacgcacccctccattccctgctaagacttttcaagttgtgccagaaattgagtttccaccatccttagatctacaccaggagattccccagcaggaagatcagaaaaaggaagtccccaagaggatactggaccagaactttggggagccccatataccctctaggctgcctccactcccactgcatattcgaatccagcaggccctcaccagcccacttcccatgactcctattctggagggttctcacagagctcattcgttgctttttgaaaacagtgacagcttttctgaggacagcagtacgctgggtcggaccaggtctcttcccatcactattgaaatgctaaaagttccagacgatgaagaagaagaggagcaaacctgtccatccacattcagtgaagaaatgacacctacctcagtcattcctaaattaccacagtgtctacgggaggaagaagagaaggagagcgactctgattcagaaggtcccattcagtaccgagatgaagaagatgaagatgaaagctatcagagtgctctcgccaacaaagtgaagaggaaagacacactggcaatgaagttgaaccacagacccagtgaaccagagttgaacctgaattcttggccttgtaaaagcaaggaggagtggaatgaaatacggcaccagattggaaacacactgatccggcgactgagtcaaagaccaacaccagaagaactagaacaacgcaatatattgcaacctaaaaatgaagctgatcgtcaggcagaaaaacgagaaattaaacgtcggctcactagaaagctcagtcaaaggccaactgtcgctgaactccttgccaggaagattctgaggtttaatgaatatgtagaggtaacagatgctcaagattatgaccggcgagccgacaaaccttggaccaaactgacccctgctgacaaggctgccataagaaaagaattaaatgaatttaaaagctccgagatggaggttcatgaagagagcaaacattttacacgctaccatcgtccatgatgccaaaggttgagagaggaatcaacatggctgctttgctgcttccttctccaaagtgacatatggagggaactttagcacttcccagcacagccagaattgcatcctctgggatcttctgaggtggacagcactttgaatgtagcatttcactggaacagagtcttatgtgctgcaccgggggcaaaacaacactttgtcagtgcttttgaacctttcaatattgtagcatgcttgaggagtttttcccttactggccaccaaagttctgaaccacttgcaggttccaggttttactggctgcaccacaccccttcccctagatgactgcctgtgcagagacacagtttgcaccattagccttacctgccctgccctgattgtgagacccaaatgtgtaggctctaaattccagccatcaaatccaattcctggtggggaaaaccttctggagacccccaaccttctgataaaagagtctctacctccagggaaagccttcttaccacactggcatatcagatgaaagcattgcactgtacctctcgtaacacagcaatacagtcctcttgaggcactcaagcctgagaggaagctcaggatctgacatgttcttccttttcctcacaagtcatcatgattttttattttaaaataatctggaagtaatgggaacttagtttttcctgaactccaaccagaatccaaattggttagatgaggccaggcgcggtggctcacgcctgtaatcccagcactttgggaggccgaggtgggtggatcacctgaggtcaggagttcaagaccagcctggccaacatggtgaaaccccatctctactaaaaatacaaaaattagccaggtgtggtggcgcctggttgaggcatgagaatcgcttgaacccaggaggtggaggttgcagtgagccaagatcatgcctactgcactccagcctgggcaacaaagtgggactctgtcttaaaaaaaaaaaaaaaa

SEQ ID NO: 2428 - DNA, 417 bp, Homo sapiens
atggaaacatctgccccacgtgccggaagccaagtggtggcgacaactgcgcgccactccgcggcctaccgcgcagatcctctacgtgtgtcctcgcgagacaagctcaccgaaatggccgcgtccagtcaaggaaactttgagggaaattttgagtcactggaccttgcggaatttgctaagaagcagccatggtggcgtaagtgttcgggcaggaatctggaccttcagcagaaaagtatagcgtggcaacccagctgttcattggaggtgtcactggatggtgcacaggtttcatattccagaaggttggaaagttggctgcaacagctgtgggaggtggattttttctccttcagcttgcaaaccatactgggtacatcaaagttgactggcaacgagtggagaaggacatga

SEQ ID NO: 2429 - DNA, 1020 bp, Homo sapiens
gctgaggacgcggacccgccatggcgcggaagaaggtgcgtccgcggctgatcgcggagctggcccgccgcgtgcgcgccctgcgggagcaactgaacaggccgcgcgactcccagctctacgcggtggactacgagaccttgacgcggccgttctctggacgccggctgccggtccgggcctgggccgacgtgcgccgcgagagccgcctcttgcagctgctcggccgcctcccgctcttcggcctgggccgcctggtcacgcgcaagtcctggctgtggcagcacgacgagccgtgctactggcgcctcacgcgggtgcggcccgactacacggcgcagaacttggaccacgggaaggcctggggcatcctgaccttcaaagggaagactgagagcgaggcgcgggagatcgaacacgtcatgtaccatgactggcggctggtgcccaagcacgaggaggaggccttcaccgcgttcacgccggcgccggaagacagcctggcctccgtgccgtacccgcctctcctccgggccatgattatcgcagaacgacagaaaaatggagacacaagcaccgaggagcccatgctgaatgtgcagaggatacgcatggaaccctgggattaccctgcaaaacaggaagacaaaggaagggccaagggcacccccgtctagaatgccagaaccagcgggtggccttaggggctgtgaggcagtggggaccttattgatgaaagaaaccgtctttgcgttacacccgagtctgcctctcggagcagggagctcaccttccgcgacgtgttctgagggtctgcatcttaggggggagggctggggcaaatcgccacctgtgcctttcctctggccctgctgcccccacacccaactccgagggcccacgctggggaaagcgggaagcgctcgctccctttcccccattagtgctctctctgcctggatcccggcagaagctatgaaagggaataaagagaaaagaagtaaaaaaaaaaaaaaaaaa

SEQ ID NO: 2430 - DNA, 1509 bp, Homo sapiens
ggcacgaggccggcctccctgacatgcagatttccacccagaagacagagaaggagccagtggtcatggaatgggctggggtcaaagactgggtgcctgggagctgaggcagccaccgtttcagcctggccagccctctggaccccgaggttggaccctactgtgacacacctaccatgcggacactcttcaacctcctctggcttgccctggcctgcagccctgttcacactaccctgtcaaagtcagatgccaaaaaagccgcctcaaagacgctgctggagaagagtcagttttcagataagccggtgcaagaccggggtttggtggtgacggacctcaaagctgagagtgtggttcttgagcatcgcagctactgctcggcaaaggcccgggacagacactttgctggggatgtactgggctatgtcactccatggaacagccatggctacgatgtcaccaaggtctttgggagcaagttcacacagatctcacccgtctggctgcagctgaagagacgtggccgtgagatgtttgaggtcacgggcctccacgacgtggaccaagggtggatgcgagctgtcaggaagcatgccaagggcctgcacatagtgcctcggctcctgtttgaggactggacttacgatgatttccggaacgtcttagacagtgaggatgagatagaggagctgagcaagaccgtggtccaggtggcaaagaaccagcatttcgatggcttcgtggtggaggtctggaaccagctgctaagccagaagcgcgtgggcctcatccacatgctcacccacttggccgaggctctgcaccaggcccggctgctggccctcctggtcatcccgcctgccatcacccccgggaccgaccagctgggcatgttcacgcacaaggagtttgagcagctggcccccgtgctggatggtttcagcctcatgacctacgactactctacagcgcatcagcctggccctaatgcacccctgtcctgggttcgagcctgcgtccaggtcctggacccgaagtccaagtggcgaagcaaaatcctcctggggctcaacttctatggtatggactacgcgacctccaaggatgcccgtgagcctgttgtcggggccaggtacatccagacactgaaggaccacaggccccggatggtgtgggacagccaggcctcagagcacttcttcgagtacaagaagagccgcagtgggaggcacgtcgtcttctacccaaccctgaagtccctgcaggtgcggctggagctggcccgggagctgggcgttggggtctctatctgggagctgggccagggcctggactacttctacgacctgctctaggtgggcattgcggcctccgcggtggacgtgttcttttctaagccatggagtgagtgagcaggtgtgaaatacaggcctccactccgtttgctgtgaaaaaaaaaaaaaaaaaaaaaaaaaaaaaaaaaaaaaaaaaaaaaaaaaaaaaaaa

SEQ ID NO: 2431 - DNA, 2468 bp, Homo sapiens
accgggcaccggacggctcgggtactttcgttcttaattaggtcatgcccgtgtgagccaggaaagggctgtgtttatgggaagccagtaacactgtggcctactatctcttccgtggtgccatctacatttttgggactcgggaattatgaggtagaggtggaggcggagccggatgtcagaggtcctgaaatagtcaccatgggggaaaatgatccgcctgctgttgaagcccccttctcattccgatcgctttttggccttgatgatttgaaaataagtcctgttgcaccagatgcagatgctgttgctgcacagatcctgtcactgctgccattgaagttttttccaatcatcgtcattgggatcattgcattgatattagcactggccattggtctgggcatccacttcgactgctcagggaagtacagatgtcgctcatcctttaagtgtatcgagctgatagctcgatgtgacggagtctcggattgcaaagacggggaggacgagtaccgctgtgtccgggtgggtggtcagaatgccgtgctccaggtgttcacagctgcttcgtggaagaccatgtgctccgatgactggaagggtcactacgcaaatgttgcctgtgcccaactgggtttcccaagctatgtgagttcagataacctcagagtgagctcgctggaggggcagttccgggaggagtttgtgtccatcgatcacctcttgccagatgacaaggtgactgcattacaccactcagtatatgtgagggagggatgtgcctctggccacgtggttaccttgcagtgcacagcctgtggtcatagaaggggctacagctcacgcatcgtgggtggaaacatgtccttgctctcgcagtggccctggcaggccagccttcagttccagggctaccacctgtgcgggggctctgtcatcacgcccctgtggatcatcactgctgcacactgtgtttatgacttgtacctccccaagtcatggaccatccaggtgggtctagtttccctgttggacaatccagccccatcccacttggtggagaagattgtctaccacagcaagtacaagccaaagaggctgggcaatgacatcgcccttatgaagctggccgggccactcacgttcaatgaaatgatccagcctgtgtgcctgcccaactctgaagagaacttccccgatggaaaagtgtgctggacgtcaggatggggggccacagaggatggagcaggtgacgcctcccctgtcctgaaccacgcggccgtccctttgatttccaacaagatctgcaaccacagggacgtgtacggtggcatcatctccccctccatgctctgcgcgggctacctgacgggtggcgtggacagctgccagggggacagcggggggcccctggtgtgtcaagagaggaggctgtggaagttagtgggagcgaccagctttggcatcggctgcgcagaggtgaacaagcctggggtgtacacccgtgtcacctccttcctggactggatccacgagcagatggagagagacctaaaaacctgaagaggaaggggacaagtagccacctgagttcctgaggtgatgaagacagcccgatcctcccctggactcccgtgtaggaacctgcacacgagcagacacccttggagctctgagttccggcaccagtagcaggcccgaaagaggcacccttccatctgattccagcacaaccttcaagctgctttttgttttttgtttttttgaggtggagtctcgctctgttgcccaggctggagtgcagtggcgaaatccctgctcactgcagcctccgcttccctggttcaagcgattctcttgcctcagcttccccagtagctgggaccacaggtgcccgccaccacacccaactaatttttgtatttttagtagagacagggtttcaccatgttggccaggctgctctcaaacccctgacctcaaatgatgtgcctgcttcagcctcccacagtgctgggattacaggcatgggccaccacgcctagcctcacgctcctttctgatcttcactaagaacaaaagaagcagcaacttgcaagggcggcctttcccactggtccatctggttttctctccaggggtcttgcaaaattcctgacgagataagcagttatgtgacctcacgtgcaaagccaccaacagccactcagaaaagacgcaccagcccagaagtgcagaactgcagtcactgcacgttttcatctctagggaccagaaccaaacccaccctttctacttccaagacttattttcacatgtggggaggttaatctaggaatgactcgtttaaggcctattttcatgatttctttgtagcatttggtgcttgacgtattattgtcctttgattccaaataatatgtttccttccctcaaaaaaaaaaaaaaaaaaaaaaaaaaaaaaa

SEQ ID NO: 2432 - DNA, 1498 bp, Homo sapiens
cagagtttgggcgccaggcgagacggcagggcttaaagttccgggaatcaaagatcaactcccactgaggacaaatggacctgtaattccgggtgtgacgagagaacgagatttaccttcctgaattaaaaaacaggtcattaagcttgggccctgacttttctttgtgagaaggtacagagatggaaaccttacaatccgagactaaaacgagggtccttccctcatggctgacagcccaggtggctacaaagaatgtggcaccaatgaaggcccccaagaggatgagaatggcagcagtgccagtggcagcagcaagactccctgcgacaaggactgtgtactgcatgaatgaggctgagatagttgatgttgctctgggaatcctgattgagagccgcaaacaggaaaaggcctgcgagcagccggccctggcgggggctgataacccagagcactcccctccctgctccgtgtcgcctcacacaagttctgggagcagcagtgaggaagaggacagtgggaaacaggcactggctccaggcctcagcccttcccagaggccggggggttccagctctgcctgtagcaggagccctgaggaggaggaggaagaggatgtgctgaaatacgtccgggagatctttttcagctagggcataaactgtgcactgaactgtctgccgagagcagctggaggacagctgagcttccactggtgctgctgggccgcccgcctgtgggaatggggctctctgtgctcctacctttgtgccttcttgggcctggcagattcacctcaggccagaagcccctggacactccgggccttggggctgccgttctgagtgtgcggaaggcaggactcaaaatgagatcccatttgactccctctgtatgtactgtgccctctcctggctcttgaggctctggagtcccaattgtctgtgttagtcagtgaccaggttccagggaaaatgatgtcatgtggtggtccaacttactggaaccaaagagacagtactttgcaaagaaaaggatcactgccaggtgcactggaattgctacagtttagtccgcatgatctctcctgaaggaggaagcctgtttcaaaaatagtttccatcatgagtctatcaatgagctcccacctctccagccagcctagaaagcaaacgagctgcccacagttctctgccctgtctgggaggttgaggccacagtgtatagactggtaagccagacaggcctcctcccgcaagctgctaccttgctttcacctgtaccttggtccccgggcagctagctataaagcaagagggacaggagcccagaagagacactgaggacaagagatcacaccagagtacatgtctctgcctctgttttcagtgtggctttggacaggaatatatgaataaatcactgccatacaggttttccaatacacaagtgctagaaaatacacacaattccccaatgaaaaaaaaaaaaaaaa

SEQ ID NO: 2433 - DNA, 1195 bp, Homo sapiens
ggcacgaggcgccagtcccctaaccctgaggctgccgcgcggcggtcactgcgccggggtagtgggccccagtgttgcgctctctggccgttccttacactttgcttcaggctccagtgcaggggcgtagtgggatatggccaactcgggctgcaaggacgtcacgggtccagatgaggagagttttctgtactttgcctacggcagcaacctgctgacagagaggatccacctccgaaacccctcggcggcgttcttctgtgtggcccgcctgcaggattttaagcttgactttggcaattcccaaggcaaaacaagtcaaacttggcatggagggatagccaccatttttcagagtcctggcgatgaagtgtggggagtagtatggaaaatgaacaaaagcaatttaaattctctggatgagcaagaaggggttaaaagtggaatgtatgttgtaatagaagttaaagttgcaactcaagaaggaaaagaaataacctgtcgaagttatctgatgacaaattacgaaagtgctcccccatccccacagtataaaaagattatttgcatgggtgcaaaagaaaatggtttgccgctggagtatcaagagaagttaaaagcaatagaaccaaatgactatacaggaaaggtctcagaagaaattgaagacatcatcaaaaagggggaaacacaaactctttagaacataacagaatatatctaagggtattctatgtgctaatataaaatatttttaacacttgagaacagggatctgggggatctccacgtttgatccgttttcagcagtgctctgaaggagtatcttacttgggtgattccttgtttttagactataaaaagaaactgggataggagttagacaatttaaaaggggtgtatgagggcctgaaatatgtgacaaatgaatgtgagtaccccttctgtgaacactgaaagctattctcttgaattgatcttaagtgtctccttgctctggtaaaagatagatttgtagctcacttgatgatggtgctggtgaattgctctgctctgtctgagatttttaaaaatcagcttaatgagagtaatctgcagacaattgataataacattttgaaaattggaaagatggtatactgtttttagaggaataaacgtatttgtggtttaaaaaaaaaaaaaaaaaaaaaaa

SEQ ID NO: 2434 - DNA, 1472 bp, Homo sapiens
cgctccgccgaccgaagaggctggacatgacaccagtggcatatcacggccatggggtctcagcattccgctgctgctcgcccctcctcctgcaggcgaaagcaagaagatgacagggacggtttgctggctgaacgagagcaggaagaagccattgctcagttcccatatgtggaattcaccgggagagatagcatcacctgtctcacgtgccaggggacaggctacattccaacagagcaagtaaatgagttggtggctttgatcccacacagtgatcagagattgcgccctcagcgaactaagcaatatgtcctcctgtccatcctgctttgtctcctggcatctggtttggtggttttcttcctgtttccgcattcagtccttgtggatgatgacggcatcaaagtggtgaaagtcacatttaataagcaagactcccttgtaattctcaccatcatggccaccctgaaaatcaggaactccaacttctacacggtggcagtgaccagcctgtccagccagattcagtacatgaacacagtggtcagtacatatgtgactactaacgtctcccttattccacctcggagtgagcaactggtgaattttaccgggaaggccgagatgggaggaccgttttcctatgtgtacttcttctgcacggtacctgagatcctggtgcacaacatagtgatcttcatgcgaacttcagtgaagatttcatacattggcctcatgacccagagctccttggagacacatcactatgtggattgtggaggaaattccacagctatttaacaactgctattggttcttccacacagcgcctgtagaagagagcacagcatatgttcccaaggcctgagttctggacctacccccacgtggtgtaagcagaggaggaattggttcacttaactcccagcaaacatcctcctgccacttaggaggaaacacctccctatggtaccatttatgtttctcagaaccagcagaatcagtgcctagcctgtgcccagcaaatagttggcactcaataaagatttgcagaatttaatacagatcttttcagctgttcttagggcattataaatggaaatcataacgtggttctaggttatcaaaccatggagtgatgtggagctaggattgtgagtgacctgcaggccattatcagtgcctcatctgtgcagaagtggcagcagagagggaccatccaaatacctaagagaaaacagacctagtcaggatatgaatttgtttcagctgttcccaaaggcctgggagctttttgaaaagaaagaaaaaagtgtgttggcttttttttttttttagaaagttagaattgtttttaccaagagtctatgtggggcttgattcacccttcatccattggctggaacatggattggggatttgatagaaaaataaaccctgcttttgattcaaaaaaaaaaaaaaaaaaa

SEQ ID NO: 2435 - DNA, 1048 bp, Homo sapiens
cggagctgctctgccgcggggactgcaccgcccgccctgccagacccgcccggaacggggctcgtcgccgccagtagccgcagcaccgcagccttgggcctcgcgccggctatggccgtgccctggggctgagccctcaggttgtgaccgagattcccgacgagagagactgaggggaagagaggaaggaggggcgggctcctggcaaggcattcgctcctgagcggaatcctgcaaagatggagaaggaggaggagacaacccgggagctgctgctgcccaactggcagggtagtggctcccacgggctgaccatcgcccagagggacgacggcgtctttgtgcaggaggtgacgcagaactcccctgcggcccgcactggggtggtcaaggagggggaccagattgtgggtgccaccatctactttgacaacctgcagtcgggtgaggtgacccagctgctgaacaccatggggcaccacacggtgggcctgaagctgcaccgcaagggggaccgctctcccgagcctggccagacctggacccgtgaagtcttcagctcctgcagctctgaagtggttctgaacacaccacagccatcagcactggaatgcaaagaccagaacaaacagaaggaagccagcagccaagccggggcagtttcagtctccaccccaaatgcaggactgtagaagcggccaggaagaaaaccaccccctcttaaggttgtttttgtgaccgttctttggagcattgttctaaaaatgggaaattacatattgctgtgccaagggcaacaaacacctgcagttaaaggaataccttccgcgaggcggcttttcggagcatgcatgtttatagctccagccaggccagaccgagggctgctgcataagccctgcttggtgcatttcttcacttgcaaggggacagagtgtgggcttaggtttgggactagagggggctttggcaactatggtgctcaggtgattatccttcgctcgtttatccaataaacatttatcaagcatctgaaaaaaaaaaaaaa

SEQ ID NO: 2436 - DNA, 1341 bp, Homo sapiens
ggcacgaggaggggttgaggctgcctgaccccagcctaatggggtaggtaggccttgggaagtggagcatgggggcaaaggatccaagcattgagccttcatcctctattccccatccagtggggtgccgaggctcaggcagcatgacgacggagacctttgtgaaggatatcaagcctgggctcaagaatctgaaccttatcttcattgtgctggagacaggccgagtgaccaagacaaaggacgggcatgaggttcggacctgcaaagtggcggacaaaacaggcagcatcaatatctctgtctgggacgatgttggcaatctgatccagcctggggacattatccggctcaccaaagggtacgcttcagttttcaaaggttgtctgacactatatactggccgtgggggtgatctgcagaagattggagaattctgtatggtttattctgaggttcctaacttcagtgagccaaacccagagtacagcacccagcaggcacccaacaaggcggtgcagaacgacagcaacccttcagcttcccagcctaccactggaccctctgctgcctctccagcctctgagaaccagaatgggaatggactgagtgccccaccaggtcccggtggtggcccacatccccctcatactccctcccacccacccagcacccgaatcactcgaagccagcccaaccacacacctgcaggcccgcctggcccttccagcaaccctgttagtaacggcaaagaaacccggaggagcagcaagagatagcatgacattctttcttcctgccaccaaccacatcccaagtgtcccctggagagcaagatagccttccactgattggctggtgtagcagtattttagccactgaacttcagtggagggtggtgagcagtgtccttatccaccctaatctcatactccctcattgtccagctgaactacctgtcccctgggagtcaggaccctctgcctgctctctttcctctttagaaatggcagttactggctgggcgcagtggctcacgcttgtaatcccagcactttgggaagccgaggtgggcggatcacctgaggtcgggagttcaagaccagcctgaccaacatggagaaaccccgtgtctactaaaaatacagaattagccaggcatggtggcgtatgcctgtaatcccagctacttaggaggctgaggcaggagaatctcttgaaaccgggaggcggaggttgaggtgagccgaaattgcaccattgcactccagcctgggcaataagagcgaaactccatctcaaaaaaaaaaaaaaaaaaaaaaaaaaaaaaaaaaaaaaaaa

SEQ ID NO: 2437 - DNA, 1675 bp, Homo sapiens
ggcacgagggatcccggatgtggatcaagttggtgggaagcgtgcggtgccgcagcaatggcggcgctcacaattgccacgggtactggcaattggttttcggctttggcgctcggggtgactcttctcaaatgccttctcatccccacataccattccacagattttgaagtacaccgaaactggcttgctatcactcacagtttgccaatatcacagtggtattatgaggcaacttcagagtggacgttggattacccccctttctttgcatggtttgagtatatcctgtcacatgttgccaaatattttgatcaagaaatgctgaatgtccataatttgaattactccagctcaaggaccttacttttccagagattttccgtcatctttatggatgtactctttgtgtatgctgtccgtgagtgctgtaaatgcattgatggaaaaaaagtgggtaaagaacttacagaaaagccaaaatttattctgtcggtattacttctgtggaacttcgggttattaattgtggaccatattcattttcagtacaatggctttttatttggattaatgctactctccattgcacgattatttcagaaaaggcatatggaaggagcatttctctttgctgttctcctacatttcaagcatatctacctctatgtagcaccagcttatggtgtatatctgctgcgatcctactgtttcactgcaaataaaccagatgggtctattcgatggaagagtttcagctttgttcgtgttatttccctgggactggttgttttcttagtttctgctctttcattgggtcctttcctggccttgaatcagctgcctcaagtcttttcccgactctttcctttcaagaggggcctctgtcatgcatattgggctccaaacttctgggctttgtacaatgctttggacaaagtgctgtctgtcatcggtttgaaattgaaatttcttgatcccaacaatattcccaaggcctcaatgacaagtggtttggttcagcagttccaacacacagtccttccctcagtgactcccttggcaaccctcatctgcacactgattgccatattgccctctattttctgtctttggtttaaaccccaagggcccagaggctttctccgatgtctaactctttgtgccttgagctcctttatgtttgggtggcatgttcatgaaaaagccatacttctagcaattctcccaatgagccttttgtctgtgggaaaagcaggagacgcttcgatttttctgattctgaccacaacaggacattattccctctttcctctgctcttcactgcaccagaacttcccattaaaatcttactcatgttactattcaccatatatagtatttcgtcactgaagactttattcagaaaagaaaaacctctttttaattggatggaaactttctacctgcttggcctggggcctctggaagtctgctgtgaatttgtattccctttcacctcctggaaggtgaagtaccccttcatccctttgttactaacctcagtgtattgtgcagtaggcgtcacatatgcttggttcaaactgtatgtttcagtattgattgactctgctattggcaagacaaagaaacaatgaataaaggaactgcttagaaaaaaaaaaaaaaaaaaaa

SEQ ID NO: 2438 - DNA, 3509 bp, Homo sapiens
cttcttctctcgagtttataatctgcaccagaagaatggcttcacatgtatgctcatcggggagatctttgagctcatgcagttcctctttgtggttgccttcactaccttcctggtcagctgcgtggactatgacatcctatttgccaacaagatggtgaaccacagtcttcaccctactgaacccgtcaaggtcactctgccagacgcctttttgcctgctcaagtctgtagtgccaggattcaggaaaatggctcccttatcaccatcctggtcattgctggtgtcttctggatccaccggcttatcaagttcatctataacatttgctgctactgggagatccactccttctacctgcacgctctgcgcatccctatgtctgcccttccgtattgcacgtggcaagaagtgcaggcccggatcgtgcagacgcagaaggagcaccagatctgcatccacaaacgtgagctgacagaactggacatctaccaccgcatcctccgtttccagaactacatggtggcactggttaacaaatccctcctgcctctgcgcttccgcctgcctggcctcggggaagctgtcttcttcacccgtggtctcaagtacaactttgagctgatcctcttctggggacctggctctctgtttctcaatgaatggagcctcaaggccgagtacaaacgtggggggcaacggctagagctggcccagcgcctcagcaaccgcatcctgtggattggcatcgctaacttcctgctgtgccccctcatcctcatatggcaaatcctctatgccttcttcagctatgctgaggtgctgaagcgggagccgggggccctgggagcacgctgctggtcactctatggccgctgctacctccgccacttcaacgagctggagcacgagctgcagtcccgcctcaaccgtggctacaagcccgcctccaagtacatgaattgcttcttgtcacctcttttgacactgctggccaagaatggagccttcttcgctggctccatcctggctgtgcttattgccctcaccatttatgacgaagatgtgttggctgtggaacatgtgctgaccaccgtcacactcctgggggtcaccgtgaccgtgtgcaggtcctttatcccggaccagcacatggtgttctgccctgagcagctgctccgcgtgatcctcgctcacatccactacatgcctgaccactggcagggtaatgcccaccgctcgcagacccgggacgagtttgcccagctcttccagtacaaggcagtgttcattttggaagagttgctgagccccattgtcacacccctcatcctcatcttctgcctgcgcccacgggccctggagattatagacttcttccgaaacttcaccgtggaggtcgttggtgtgggagatacctgctcctttgctcagatggatgttcgccagcatggtcatccccagtggctatctgctgggcagacagaggcctcagtgtaccagcaagctgaggatggaaagacagagttgtcactcatgcactttgccatcaccaaccctggctggcagccaccacgtgagagcacagccttcctaggcttcctcaaggagcaggttcagcgggatggagcagctgctagcctcgccaagggggtctgctccctgaaaatgccctctttacgtctatccagtccttacaatctgagtctgagcccctgagccttatcgcaaatgtggtagctggctcatcctgccggggccctccactgcccagagacctgcagggctccaggcacagggctgaagtcgcctctgccctgcgctccttctccccgctgcaacccgggcaggcgcccacaggccgggctcacagcaccatgacaggctctggggtggatgccaggacagccagctccgggagcagcgtgtgggaaggacagctgcagagcctggtgctgtcagaatatgcatccacagagatgagcctgcatgccctctatatgcaccagctccacaagcagcaggcccaggctgaacctgagcggcatgtatggcaccgccgggagagtgatgagagtggagaaagcgcccctgatgaagggggagagggcgcccgggccccccagtctatccctcgctctgctagctatccctgtgcagcaccccggcctggagctcctgagaccaccgccctgcatgggggcttccagaggcgctacggtggcatcacagatcctggcacagtgcccagggttccctctcatttctctcggctgcctcttggagggtgggcagaagatgggcagtcggcatcaaggcaccctgagcccgtgcccgaagagggctcggaggatgagctaccccctcaggtgcacaaggtatagacaaggctgagcagggttcctgtggcccaggatggaggccaccgctgccctgccatcccgtctgcctgccatgggacggctcctctgagtgttccctggccccacgtgtgtggtgtttgtgtgtctgtgcctggccaagggaggtgccaacactgggcttgccacagccccaggagaggaatttggggcctaggaaccgagggcacacgggactctagcctcatccccaggacccccttggctcagagtgtggtgctagaaactggtccccagcccagccccagtactgccacctttacacctacccctgcaagtccccagagggctgcccacgatagaagctgccaagcagggagaacctgtgccaactgtggagtggggaggttgggcctggaccctcaacccctgcaaccttccctagccccctcaatagatgagcaggtcaggctgtggcccttacctcacccgcagttctcgcccagtgctgcagccggctcacctctctccgcttcttgcacatcactggcctgtgtgtgctgcttgctcctgttctgttcgcttgctcccgttccgttcggcttttgctttgcgttagggtgaagaccctagcgtccagctcccctcaacgctatattttgacactaaaaaagaaggtttctaaattgtaggagcaggatggaaatactttgctgcccttgccatcttttaggatgggcccccaggagactgaggtcttcctgggccctcattgctgcttatcgtaccccccatcacctgcacatgggacagaccgggctggagggtgaccttggctgtgtacgtcccagcaaaagagctctggcccgcatctcgctgtgccctgaagggggatgaagggcgatgcctcgcccgaggctttgggctgctgcactgcatgctgggactgctcctactctctgtcccacccctcacccagctgtggtccggctttgggagagtggtgaattgcgctgcccgaactcggagcggagcagggtagggaccgtgtacagcttgataacccttaataaaaagggagtttgaccagaaaaaaaaaaaaaaaaaaaaaaaaaaaaaaaaaaaaaaaaaaaaaaaaaaaaaaaaaa

SEQ ID NO: 2439 - DNA, 2097 bp, Homo sapiens
ggcgcgggtttggtggcgcgtttcagcgaagtcgcacgtgaaggatagcagtggcctgagaaagacccagtcatggcagcctccagcatcagttcaccatggggaaagcatgtgttcaaagccattctgatggtcctagtggcccttatcctcctccactcagcattggcccagtcccgtcgagactttgcaccaccaggccaacagaagagagaagccccagttgatgtcttgacccagataggtcgatctgtgcgagggacactggatgcctggattgggccagagaccatgcacctggtgtcagagtcttcgtcccaagtgttgtgggccatctcatcagccatttctgtggccttctttgctctgtctgggatcgccgcacagctgctgaatgccttgggactagctggtgattacctcgcccagggcctgaagctcagccctggccaggtccagaccttcctgctgtggggagcaggggccctggtcgtctactggctgctgtctctgctcctcggcttggtcttggccttgctggggcggatcctgtggggcctgaagcttgtcatcttcctggccggcttcgtggccctgatgaggtcggtgcctgacccttccacccgggccctgctactcctggccttgctgatcctctacgccctgctgagccggctcactggctcccgagcctctggggcccaactcgaggccaaggtgcgagggctggaacgccaggtggaggagctgcgctggcgccagaggcgagcggccaagggggcccgcagtgtggaggaggagtgagccggatgccccacacaccgccagtgtcataccaaagagctgagctgcttcggggccatgcagccctcctgccagccccctgcccttttcttgccctgtctctgaaccttcagaacattgatccttgccgcagccccactagccaagagaaacagagaaagaccattccccctgcctgtccttgcggccctgtcttctgaggttctctgtctggggttggctctcttaaccctttctctgctcccagcctgcctcaccagggaaggttggaggggcctccctctggcttctgcatctgcgccagcaaacatcactgccgttggtctctcatgacttaactggcttccctctgctgctgccttggcttcctcctaatgctcgtgctctcctgtccttctgaagttgctccttggccaaatctccagctcccttcttgttttcctcatcctcctaccctgtactcccaccaaaccatggtcctttaaggcacgctcctgtcctcctcattgcccagcagtagggaggggcaggggtaaggggacctgaggataaagggtggggaaacagggtcccctgaggcctgtgggggctgcaggggaggaggatgtaccttgtgtctctttcaagtgccttaatccgagccagcagggccttctgcttgcctgctgccatactgtatgtaggaaagtgttctgtggctgctttgtgtcaaaagagcagtcactctcagaatcttgattccccatcagccaaagcaaaagatggctgctgctttgtaggcatgtgcctgcaagtgggaccttgctgggcattatatgccctgtgggggtttcagagaccctgaaagaggagggaggacccgcctccttgtctgcacaactgcatgcacttctctccccatcgctccacaacctgaaaccgagaaggagttgctgaccagtgcccaccccggcagcccgggaggaacacaggcagctcctttcccttcacgtggtctgcagagagcagggtgagctgccagctgcccctctccaccagggtaccctgtcttggtggttaggggccacttttcctttgaggctctagtggaggtggatgtccttctctgccaggcttggcacatgatgtgaagaataaatgcccaattcttactgttcaggtttgatgtggaatcacagctgcagtgatatatattttttatcagtgcttggttggttttaaataaagtgcacgctattttattatcttgttctgaataaaatgtatttactccaaaaaaaaaaaaaaaaaaaa

SEQ ID NO: 2440 - DNA, 1910 bp, Homo sapiens
aggtttcggcgggggctgcacgtgcgcaggggtgtggaaacttaccggctgagccatggatacaccgttaaggcgcagccgacggctgggaggcctaaggcccgaatcccccgagagcctcacctcagtttcgcggacgagacgggcccttgtggagttcgagtcgaacccagaagaaacgagggagcccgggtctcctccgagtgtgcagcgggctggcctggggtcccccgaaaggccgccgaagacaagcccaggatcaccccgtctgcagcagggtgcaggcttggagtcaccccaagggcagccagagccaggcgcagcgtccccccagcgtcagcaagacctacacctggagtcgcctcaaagacagccagagtacagtcctgaatccccacgatgtcagccgaagccaagtgaggaggcaccaaagtgttctcaggaccagggagtactggcctcggagttggcccagaataaggaggagctgaccccgggggccccccagcatcagctaccgccggtcccaggatcaccagagccttaccccggtcagcaagctcccggtccggagccctctcagccactactggagctgacacccagggcacctggctccccccggggtcagcatgagccgagcaagccacctccagctggggagacggtgacaggcggcttcggggcaaagaagcgaaaaggttcttcatcccaggccccagcgtccaagaagttgaataaagaggagcttcctgtaatcccgaaggggaagcccaaatcggggcgagtgtggaaggaccgctccaagaaaagattctcccagatgcttcaggacaagcccctgcgcacatcgtggcagcggaagatgaaggaacgacaggagaggaagctggccaaggactttgcccgtcacctggaggaggagaaggagaggcgccgccaggagaagaaacagcgccgggctgagaacctgaaacgccgcctggagaatgagcggaaggcagaggtcgtccaagtgatccgaaaccccgccaagctcaagcgggcaaagaagaagcagctgcgctccattgagaagcgggacaccctggccctgctgcagaagcagccgccccagcagccggcagccaagatctgagctcaggacggcccgaggccttccatggccaacgaccatgtcagacacagcacctcaggccgctgctcagatgcctctgctggagctggcactccaaacccatggctccagaacggggacccccaccccgaccggggctcctcggcctttgaaggcttccaggcaggtctgtgtgggacagaagcccagagggggcctgggacctggcagagatgggggcgggaagagattcagctcccatccctccttcctctccttctccaagtgccttcaaaccaagaactgtacattcttctggttcctcagtgagctggtgactggcaggtgactccctcagcagtgtatgccctttctcagcatcctaggtccatcccaggcctggaggctgacagttgggaatccagcttcccccacaccttcccaaaggctgctctgagcacctccacaccccactgcctctgtccccagcaaactgaatccggttcctctccacttttcaatactgaaagattaaaatggggaggttgcagggagcagagcttttccctagcacccactttcccaaaccagtctctgcagaagccccagagaatctaactcatgcctgtccagtctacagcaaaaatatttattgagtgcctgttgcatacaggcacaatcctaggcaccggcaaatacagacaatagaccaaagtccctgccctcgaggagctttcattctgatggagagaaaacataataaacaagcaaaatgcaaaaaaaaaaaaaaaaa

SEQ ID NO: 2441 - DNA, 2089 bp, Homo sapiens
ggaggctgcggagccggcggccgcgggagctgaccctgcggggtcccggggggggagggggagccgcgaagcccccactgaggccgccgctgccgggcctcccctcccccccgggcgggcgccatgcgggggagcccgggcgacgcggagcggcggcagcgctggggtcgcctgttcgaggagctggacagtaacaaggatggccgcgtggacgtgcacgagttgcgccaggggctggccaggctgggcgggggcaacccagaccccggcgcccaacagggtatctcctctgagggtgatgctgacccagatggcgggctcgacctggaggaattttcccgctatctgcaggagcgggaacagcgtctgctgctcatgtttcacagtcttgaccggaaccaggatggtcacattgatgtctctgagatccaacagagtttccgagctctgggcatttccatctcgctggagcaggctgagaaaattttgcacagcatggaccgagacggcacaatgaccattgactggcaagaatggcgcgaccacttcctgttgcattcgctggaaaatgtggaggacgtgctgtatttctggaagcattccacgctctcttctgctgggttctctgcctggataaaagattctacggctgaacagaatcgttcaaaaaccacggtcttggccaggcgcagtggctcacacctgaaatcccagcactttgggaggccgaagtgggcggatcacgaggtcctggacattggcgagtgcctgacagtgccggacgagttctcaaagcaagagaagctgacgggcatgtggtggaaacagctggtggccggcgcagtggcaggtgccgtgtcacggacaggcacggcccctctggaccgcctcaaggtcttcatgcaggtccatgcctcaaagaccaaccggctgaacatccttggggggcttcgaagcatggtccttgagggaggcatccgctccctgtggcgcggcaatggtattaatgtactcaagattgcccccgagtcagctatcaagttcatggcctatgaacagatcaagagggccatcctggggcagcaggagacactgcatgtgcaggagcgcttcgtggctggctccctggctggtgccacagcccaaaccatcatttaccctatggaggtgctgaagacgcggctgaccttgcgccggacgggccagtataaggggctgctggactgcgccaggcgtatcctggagagggaggggccccgtgccttctaccgcggctacctccccaacgtgctgggcatcatcccctatgcgggcatcgacctggccgtctacgagactctgaagaactggtggcttcagcagtacagccacgactcggcagacccaggcatcctcgtgctcctggcctgcggtaccatatccagcacctgcggccagatagccagttacccgctggccctggtccggacccgcatgcaggcacaaggctggagtacagtggctcgatttcagatcactgcaacctctgccttccaggttcaagcgattctcctgcctcagcctccagagtagctggtattacaggatttcatcatgttgcccaggctcatctcgaactcgtggggtcaaggaattcgccagccttcagcctcccaacgtgctgggattacagccggtggtcatgccatgagcagccttatggagaggaccatgtggtaaggaactcagccaatagccatgtaactgagcttggaagaggatcttgctgtcctggccaacatctcactgcaattctatcagttgaattccctggatagtccaagctttgtggatccctccaccagaacaactggatcccagtacctgaatcctgaatcttagactcttatacttcaaacactgatcacgggaacagccggctcagcagctcctgagttcctaatgctcagaacatggatgagatgataaatgtttgttgtgttaagctgccaacctttggcgggggggtaattcgtcacatggcaacagctggctaatacatatatacctacatgtaaaaaaaaaaaaaaaaaaaaaaaaaaaaaaaaaa

SEQ ID NO: 2442 - DNA, 1171 bp, Homo sapiens
ggcacgaggggaacatcttcatgatgttctgcatgattgtgctgttcggctcttgaatcccagcgatgaaaccaggaactcactttcccgggatgccgagtctccattcctccattcctgatgacttcaagaatgtttttgaccagaaaaccgacaaccttcccagaaagtccaagctcgtggtgggtggaaaagtgttcgccgaggtgtgcatggtttcccagccacgtccctgttttcaaagatagtttcactttggtctctgaattgaaatgctgtctactgaaagggtttcaggagcgtttatgtaaggggctgtgatgaaattgcattccccatagataaaagaaaaatcatttctatccagagatctgagcagaaggattggcttgttagtttaacacagccgtatttttggacattcagtgttacttgctgagtctgacagcctctgggcccggccaggggccctgttaacaaactgctttcacatcccaacagggtctgcttggccactcagtgcagctgcgattaaccctaaaggctttaaggaacgggccacctgtaacagagacaccagccttcctgtatagacactaaattgttagcaagagtgttgagctagttcctggtgaagtgtttccacagaagacatgtggagcagttgtggggatattaagggaaactttcctctgccttgacccctttgttaaataaaatgactttgggagccattcattgtacagttgcaggaatgagagtgattttatgatgtggtacattgggaccatgttctaaaaccttgggtttctgagtctgctttttgagtaggtgattttgaggttgaaaaaccaggggccttcatctaggaaatacagcattttccagaagcttctttgaaagggaatcctggttttgttgccaaaatgaaacgcccggggttggcgctgaatcccacaactgtgtgatttgcttgttgagttttttgttgtctggtttttttgtttgtttgtttataccaataagaatgagcctgaatgttggtggtttttgaaatcctgacttggaggtaaacctggaggaaggaaaaaaagtaaatatgcaggcttttaggactgagtagccttgaaaataaacctcatttctaaaaaggaaaaaaaaaaaaaaaaaa

SEQ ID NO: 2443 - DNA, 1694 bp, Homo sapiens
caagtattttgcttcgatgatttcacgtcatcttcaaaacaacctcatgagggctgggtcagttagaacctaaacaaactagagacctggttgcaacccctcaggctctgctgatgctgtccccctttgttcctgcagcgtggaccctgccagcagccaggccatggagctctctgatgtcaccctcattgagggtgtgggtaatgaggtgatggtggtggcaggtgtggtggtgctgattctagccttggtcctagcttggctctctacctacgtagcagacagcggtagcaaccagctcctgggcgctattgtgtcagcaggcgacacatccgtcctccacctggggcatgtggaccacctggtggcaggccaaggcaaccccgagccaactgaactcccccatccatcagaggcaaatacttccctggacaagaaagccagatgaaactgatctaccagggccgcctgctacaagacccagcccgcacactgcgttctctgaacattaccgacaactgtgtgattcactgccaccgctcacccccagggtcagctgttccaggcccctcagcctccttggccccctcggccactgagccacccagccttggtgtcaatgtgggcagcctcatggtgcctgtctttgtggtgctgttgggtgtggtctggtacttccgaatcaattaccgccaattcttcacagcacctgccactgtctccctggtgggagtcaccgtcttcttcagcttcctagtatttgggatgtatggacgataaggacataggaagaaaatgaaaggcatggtctttctcctttatggcctccccacttttcctggccagagctgggcccaagggccggggagggaggggtggaaaggatgtgatggaaatctcctccataggacacaggaggcaagtatgcggcctccccttctcatccacaggagtacagatgtccctcccgtgcgagcacaactcaggtagaaatgaggatgtcatcttccttcacttttagggtcctctgaaggagttcaaagctgctggccaagctcagtggggagcctgggctctgagattccctcccacctgtggttctgactcttcccagtgtcctgcatgtctgcccccagcacccagggctgcctgcaagggcagctcagcatggccccagcacaactccgtagggagcctggagtatccttccatttctcagccaaatactcatcttttgagactgaaatcacactggcgggaatgaagattgtgccagccttctcttatgggcacctagccgccttcaccttcttcctctaccccttagcaggaatagggtgtcctcccttctttcaaagcactttgcttgcattttattttatttttttaagagtccttcatagagctcagtcaggaaggggatggggcaccaagccaagcccccagcattgggagcggccaggccacagctgctgctcccgtagtcctcaggctgtaagcaagagacagcactggcccttggccagcgtcctaccctgcccaactccaaggactgggtatggatcgctgggccctaggctcttgcttctggggctattggagggtcagtgtctgtgactgaataaagttccattttgtggtcctgcaaaaaaaaaaataaaaaaaaaaaaaaaaaaaaaaaaaaaaaaaaaaaa

SEQ ID NO: 2444 - DNA, 1148 bp, Homo sapiens
ggccaggatgctgaatctgctgctgctggcgctgcccgtcctggcgagccgcgcctacgcggcccctgccccaggccaggccctgcagcgagtgggcatcgttgggggtcaggaggcccccaggagcaagtggccctggcaggtgagcctgagagtccacggcccatactggatgcacttctgcgggggctccctcatccacccccagtgggtgctgaccgcagcgcactgcgtgggaccggacgtcaaggatctggccgccctcagggtgcaactgcgggagcagcacctctactaccaggaccagctgctgccggtcagcaggatcatcgtgcacccacagttctacaccgcccagatcggagcggacatcgccctgctggagctggaggagccggtgaaggtctccagccacgtccacacggtcaccctgccccctgcctcagagaccttccccccggggatgccgtgctgggtcactggctggggcgatgtggacaatgatgagcgcctcccaccgccatttcctctgaagcaggtgaaggtccccataatggaaaaccacatttgtgacgcaaaataccaccttggcgcctacacgggagacgacgtccgcatcgtccgtgacgacatgctgtgtgccgggaacacccggagggactcatgccagggcgactccggagggcccctggtgtgcaaggtgaatggcacctggctgcaggcgggcgtggtcagctggggcgagggctgtgcccagcccaaccggcctggcatctacacccgtgtcacctactacttggactggatccaccactatgtccccaaaaagccgtgagtcaggcctgggttggccacctgggtcactggaggaccaacccctgctgtccaaaacaccactgcttcctacccaggtggcgactgccccccacaccttccctgccccgtcctgagtgccccttcctgtcctaagccccctgctctcttctgagccccttcccctgtcctgaggacccttccccatcctgagcccccttccctgtcctaagcctgacgcctgcaccgggccctccggccctcccctgcccaggcagctggtggtgggcgctaatcctcctgagtgctggacctcattaaagtgcatggaaatc

SEQ ID NO: 2445 - DNA, 413 bp, Homo sapiens
ggcacgagctcgggtgaggagctggtggcgtcggcaggttcgaggcgattcgagctccagctaggatgatcgaggttgtttgcaacgaccgtctggggaagaaggtccgcgttaaatgcaacacggatgataccatcggggaccttaagaagctgattgcagcccaaactggtacccgttggaacaagattgtcctgaagaagtggtacacgatttttaaggaccacgtgtctctgggggactatgaaatccacgatgggatgaacctggagctttattatcaatagatgagaatcctcatcttcctgccccgctttcctctcccatcctcatcccccacactgggatagatgcttgtttgtaaaaactcaccttaataaagacttagatgttgaaaaaaaaaaaaaaaaaaa

SEQ ID NO: 2446 - DNA, 2005 bp, Homo sapiens
aaaaaaaaaaaagagggaggtggcggcagcggctagcggactcgagtctcaaccgggctgaggcggacacttctgtggagcgaagcagtgggagcatcgagcactagaggcggcaccgggatccccggctccggggaggggggcgccggaccgggaggaggggagggggcgatgctggaagccatggcggagcccagtcccgaagatccacctccgacccttaagccagagactcagccaccagagaaacggcggagaacaattgaggatttcaacaaattctgcagttttgttttggcatatgctggttacattccccctagcaaagaggaaagtgactggccagcctctggctccagctctccattgcgaggagagagtgcggccgacagtgatggctgggactcggccccctcagatcttcgaaccatccagacttttgttaagaaagcaaagtcatccaagagaagggcagctcaagcaggtcccacccagccaggacccccaaggtccactttctctcgtctgcaggcccccgacagtgctaccttgcttgagaagatgaagctcaaggactctctctttgatctggatgggcccaaagtggcatctcctttgtcccccacatccctgacacatacctcccggccccctgctgctcttacccccgtgcccctttcccagggggacctctcccatcctcctcgaaagaaggaccgaaagaaccgaaagttggggccaggagctggggctggctttggggtgcttcggaggcctcggccaactcctggggatggggaaaagagatctcgaatcaagaagagcaagaagcggaagttaaaaaaggcagaacggggggatagactcccacctcctgggcctccccaggcacccccagtgatacagactctgaagaggaggaggaagaggaggaagaggaagaagaagaagagatggcaacagtggtagggggtgaagccccagtccctgtgctgccaacaccccctgaggctcctaggccccctgccacagtgcaccctgaaggagtccctcctgctgacagtgaaagcaaggaggtgggcagcactgaaacaagccaagatggagatgccagctccagtgaaggcgagatgcgggtcatggacgaggacatcatggtagaatcaggtgatgactcatgggatctgatcacatgttactgtcgaaagccctttgcagggcggcccatgattgagtgcagcctgtgtgggacgtggatccacctctcctgtgctaagattaagaagaccaacgtccccgacttcttttattgccagaaatgcaaggaactgaggccagatgcccggcggttaggggggccccccaaatctggagagccctgatggcaccaactttagcctggaacttccaaatgacaacatgatttgggaactgagcctcagggtcctcagcctatcccctggagcttggatactgtctgcacttcaaggcaggaattctcaagggagacttgtttgaaaatgagtgtctcactttcccaccctatccttcctccccactctgtggacttgaaattgaatccattacggttggggatgggaggctgtctgtgtcccgacacataatctctgtctcttggacctgccaccatcactttctgggtcaggattggaattgggatggaatgggacagttgtctataaaactctagtgtaaatattagcactcccctccctcatcttttcttctatttcactccccatttattttcttctacaccggttgtatttttaattttggacttcccctattgggcatggcagctcaaaggtggagtactagagcctggccaagtgaggaaggaaagcagaaaggtgacgattctcactcacctcttttgtttttaataatatcggccgctgtttgtacagacagcctgcgtgttgtaaataaagcagggtgggctctttaaaaaaaaaaaaaaaaaaaaaaaaaaaaaaaaaaa

SEQ ID NO: 2447 - DNA, 3486 bp, Homo sapiens
ggcacgagggttgacccttgttgccagagaggctccacccgccggcacctgcattgctaggcaagtcgcacggccatagctgtggactctcttgtggctgaggaagtattgcccccgtgttgctagggagatggcacccccggcaaccaggagtagactgcccttgtgttcctgacagctgcagtcagccttcccccaggggcttggactgcggctgggggaacagcctgttgatgtaaatgatgaactactactccctgctagggttgtcccctagtcgtcacaaactgccattctgttgtgggggtagtgacacccccacgggaatttgttaccactgccctaataaccgtgccctgacctccagctgctagagagaggatgtccccctagtaaagccaagcaggaattgaaggtttttctaaatctgctcggtcctcactcctaaaggatggctcccctcctgtcatcagaggccaccaaggcttcatatgggccagtgtttcccactgctggggctgtcgacatgagtgatgagggagccactgtattgctagaggtgacacttctccaataatcactgcgaccaggaaaaaagccccttcctaaaagcctttctaaacatcctaggcattgttgctaaggaatgccttttccttagcaacaaagatcatggggaccccactggcgcctggaacatctccctagcaaccgtgaagcaccttgttattagggatgataaccacaacttccctggcaactgcagtgtccgacaatttagaagggaccatccttggcggcttctctgaatatactgagtttggttgctaaaggactcatagcttagcaaccatagcccttcaaggcttttcatggctgtggcgggccccattaggtaccaaaagaagaagaaccccattgtcagtgaactgtaccacccagcccacccaccttcctaccctacaggcaccctctgggccaccctcccttgctgccctagcaagtctgacagccagagggccattgcctggccaggatcccttccttagcatccggggctgggacactagcaggcgtcgggagggggcctggctgagctgcatgtctgtcccccaccctcatcctccaccccccagtccggagaaggcggcttccttggagtatgactatgagaccatccgcaacatcgactgctacagcacagatttctgcgtgcgggtgcgcgatggcatgcggtactggaacatgacggtgcagtggtggctggcgcagtatatctacaagagcgcacctgcccgttcctatgtcctgcggagcgcctggaccatgctgctgagcgcctactggcacggcctccacccgggctactacctgagcttcctgaccatcccgctgtgcctggctgccgagggccggctggagtcagccctgcgggggcggctgagcccagggggccagaaggcctgggactgggtgcactggttcctgaagatgcgcgcctatgactacatgtgcatgggcttcgtgctgctctccttggccgacacccttcggtactgggcctccatctacttctgtatccacttcctggccctggcagccctggggctggggctggctttaggtgggggcagccccagccggcggaaggcagcatcccagcccaccagccttgccccggagaagctccgggaggagtaagctgtcacgacgctccctctgccagctggtcccgggaattctgtgaaccaggctgctgtctcctccccagaaagagtccttaccttggagagggtcctggagagaatttcctcttccccagctaaataccctgcctgcaactgaagcagacccgggggtgtcctccctgccctctgcccagaggccacctccactcctacaaaatcaaagtattgtccagacaagagtcactggcccctgctccagcttctgggtatccagagagcactgcacttccccaaaacggaaggggcccctgggcagtgggttttgggcaaattccctttctttgcatccacaatgtggggtcggagcttgggggcaggtcctgggagtgggaagcctcttccttgtgtctttcgctccacttttagctcatcgcaccaatattgcagacttggaaggaagcataagcttcccatttcacaaaggggaaactgaggtgcgggtgcgcgggcctggggacggccgtcccatggcttccatctgagccacctcgggaccccagcactcctggcgccctcttctcatcgcttggcctatgacaggtcaccgtgtgtaaatctttcccaataaagtgttgcacaaagaaaaaaaaaaaaaaaaaacggcagccctgggcggctgggagcacggacggggcgcccgcgcagctgcctctcgtgctcaccgcgctgtgggccgcggccgtgggcctggagctggcttacgtgctggtgctcggtcccgggccgccgccgctgggacccctggcccgggccttgcagctggcgctggccgccttccagctgctcaacctgctgggcaacgtggggctcttcctgcgctcggatcccagcatccgtggcgtgatgctggccggccgcggtctgggccggggctgggcttactgctaccaatgccaaagccaggtgccgccacgcagcggacactgctctgcctgccgcgtctgcatcctgcgtcgggaccaccactgccgcctgctgggccgctgcgtgggcttcggcaactaccggcccttcctgtgcctgctgcttcatgccgccggcgtcctgctccacgtctctgtgctgctgggccctgcactgtcggccctgctgcgagcccacacgcccctccacatggctgccctcctcctgcttccctggctcatgttgctcacaggcagagtgtctctggcacagtttgccttggccttcgtgacggacacgtgcgtggcgggtgcgctgctgtgcggggctgggctgctcttccatgggatgctgctgctgcggggccagaccacatgggagtgggctcggggccagcactcctatgacctgggtccctgccacaacctgcaggcagccctggggccccgctgggccctcgtctggctctggcccttcctggcctccccattgcctggggatgggatcaccttccagaccacagcagatgtgggacacacagcctcctgactccaggaagagccagagctgtgcagggaggaaggggtgagaggggggcccccacacctagactcagtaaggaagtcgggttggaccttaacatctgcattggacaactccaccccttccttggccttgcccctgcccgcctacactcctacgtgtccagggcttgggccgtgacttaggcagaggagtgcagaggagggtctggcaggggctgctcaggccgcctagctgcccctttgccaggttaataaagcactgacttgttaaaaaaaaaaaaaaaaaaaaa

SEQ ID NO: 2448 - DNA, 2481 bp, Homo sapiens
gcgtccgcccacgcgtccgctcggtccccggggccggcggacccgcgggcaggcactgcccgggctggacgacgtctggccggctcccggcgaagggcagcggaggagcggcccagagcgcgcagctagggcactggcgaaaccccgggacagtccctctccgtgcgggggcggcgcagagcagtcccatccccggggtcccgggcgcggctgactgccggctggttccctgcgcgcagtagctccccgagccgggctgcaccggaggcggcgagatggtcgcgcgcgtcggcctcctgctgcgcgccctgcagctgctactgtggggccacctggacgcccagcccgcggagcgcggaggccaggagctgcgcaaggaggcggaggcattcctagagaagtacggatacctcaatgaacaggtccccaaagctcccacctccactcgattcagcgatgccatcagagcgtttcagtgggtgtcccagctacctgtcagcggcgtgttggaccgcgccaccctgcgccagatgactcgtccccgctgcggggttacagataccaacagttatgcggcctgggctgagaggatcagtgacttgtttgctagacaccggaccaaaatgaggcgtaagaaacgctttgcaaagcaaggtaacaaatggtacaagcagcacctctcctaccgcctggtgaactggcctgagcatctgccggagccggcagttcggggcgccgtgcgcgccgccttccagttgtggagcaacgtctcagcgctggagttctgggaggccccagccacaggccccgctgacatccggctcaccttcttccaaggggaccacaacgatgggctgggcaatgcctttgatggcccagggggcgccctggcgcacgccttcctgccccgccgcggcgaagcgcacttcgaccaagatgagcgctggtccctgagccgccgccgcgggcgcaacctgttcgtggtgctggcgcacgagatcggtcacacgcttggcctcacccactcgcccgcgccgcgcgcgctcatggcgccctactacaagaggctgggccgcgacgcgctgctcagctgggacgacgtgctggccgtgcagagcctgtatgggaagcccctagggggctcagtggccgtccagctcccaggaaagctgttcactgactttgagacctgggactcctacagcccccaaggaaggcgccctgaaacgcagggccctaaatactgccactcttccttcgatgccatcactgtagacaggcaacagcaactgtacatttttaaagggagccatttctgggaggtggcagctgatggcaacgtctcagagccccgtccactgcaggaaagatgggtcgggctgccccccaacattgaggctgcggcagtgtcattgaatgatggagatttctacttcttcaaagggggtcgatgctggaggttccggggccccaagccagtgtggggtctcccacagctgtgccgggcagggggcctgccccgccatcctgacgccgccctcttcttccctcctctgcgccgcctcatcctcttcaagggtgcccgctactacgtgctggcccgagggggactgcaagtggagccctactacccccgaagtctgcaggactggggaggcatccctgaggaggtcagcggcgccctgccgaggcccgatggctccatcatcttcttccgagatgaccgctactggcgcctcgaccaggccaaactgcaggcaaccacctcgggccgctgggccaccgagctgccctggatgggctgctggcatgccaactcggggagcgccctgttctgaaggcacctcctcacctcagaaactggtggtgctctcagggcaaaatcatgttccccacccccggggcagaacccctcttagaagcctctgagtccctctgcagaagaccgggcagcaaagcctccatctggaagtctgtctgcctttgttccttgaagaatgcagcattgtctttgtctgtccccaccacatggaggtgggggtgggatcaatcttaggaaaagcaaaaaagggtcccagatcccttggccctttcctccgaggacttctatcctccccaggcctttgtttcttcggctaaaggtacagttcctttcaagaggtaacagcactgggatccaagcagggggatgaaaaactcagcagagaaattcgagaccattttgcaagactgtgcccttctcctcaggaccccctggctcagttcttgaaaaacggtgtcatatttagtcagaggccccacccccaggaagcatggatggggatgaaggcacaggcgtctccaacctcagaggccctttgtggggtcaggacacagagtgggagggagactgatgcaggcctaccagtccctggctttttgtctggggctggaataaagaggtgccttcagctggtgggccgagaggcaggaagcagcctt

SEQ ID NO: 2449 - DNA, 1736 bp, Homo sapiens
ggcacgaggggtgtggactcgagggctgggcgcggggccggcgcagaagccgccagctggagacgatggtggaccacttggccaacacggagatcaacagccagcgcatcgcggcagtggagagctgcttcggggcctcggggcagccgctggcgctgccaggccgagtgctgctgggcgagggcgtgctgaccaaagagtgccgcaagaaggccaagccgcgcatcttcttcctctttaacgacatcctggtgtatggcagcatcgtgctcaacaagcgcaagtaccgcagccagcacatcatccccctggaggaggtcacactggagctgttgccggagacgctgcaggccaagaaccgctggatgatcaagacggccaagaagtcctttgtggtgtcggccgcctccgctacggagcgccaggaatggattagccacatcgaggagtgcgtgcggcggcaactgagggccacgggccgcccgcccagcacggagcacgcggcaccctggatccccgacaaggccacggacatctgcatgcgctgcacgcagacgcgcttctctgccctcacgaggcgccaccactgccgcaagtgcggcttcgtggtctgcgctgagtgctcgcgccagcgcttcctgctcccgcgcctgtcccccaagcccgtgcgcgtctgcagcctctgctaccgcgaactggccgcccagcagcggcaggaggaggcggaggagcagggcgcggggtccccagggcagccagcccacctggcccggcccatctgcggagcgtccagtggagatgacgatgactccgacgaggacaaggagggcagcagggacggcgactggcccagcagcgtggagttctacgcctcgggggtggcctggtctgccttccacagctgacccccggcctgcagaacatctgtccccaagccagctccactgcccaggcccccaagagggcagctccagaagctgcccagggctccgggaccccatcccatggtggcaggtgcagcggtggggagtggctctttctggactcccagtgcctttttgctggacactgtgtccttatggcttcactgcaggtaatgcctttcccttcaggaagccccagaacacccacaggtcttggtaacaaacgccaccttacactctgcaggctgcagcggcagctccagatggcctcctgagctggacgaccccaggtctccagacatctagggaccagagcaggtttgggaacacagagggaagacaggatgggagtgtagccacagaacccacctgcaccctgacaggcacaccccactgaagagcctgagtcccaggaggcctcctggaagcccaggactgcccacccaccacgctggtgcccaccgcctggccagccaagccctgccgatcagacatgtgggctccccgaagcccagccagagactgccgtgctgtgggtgccaccaggcccagggactgcagcctgagctccccgaggcccagggcagccgggtgaggactctgtcctgtgtcacctctctccaggtgtccagctgtctcatgcctttttgtcctgtcctcagctctccgtgtggtcagcgaaaccattgttttctgttaggactcagttgcaagaacagaaaccctgcccccacttaataataaaaaagaaagtttattgatgggtggttgcaaaacaaaaaaaaaaaaaaaaaaaaaaaaaaaaaaaaaaaa

SEQ ID NO: 2450 - DNA, 2547 bp, Homo sapiens
ggcacgaggcccgtctccgtctgaagagtgcttctgccctcatttgcctctccctgtgaccccggccccctcagactccgctgcgtcgtctctcggccccgtccagccgttcctgactgctcttcgccggagtccgcttcccaaccccctttcgccagagcccgagagctccgtcggctctgcgtcctggcggattgtcagtggcttcgccccgaggagagctgactgccctgggctgctgcctccggcagagctgagccaaaatgtccccggaatctaaaaagcttttcaacatcattattttaggagttgcctttatgtttatgttcactgcctttcaaacttgtggaaatgtggcgcaaactgtcatcaggagcttaaataggacagattttcacggcagtggatataccagcatggctattatctatggagtgttctctgcttcaaatttgattacaccgtcagtggttgccattgtaggacctcaactctctatgtttgccagtggtttattttacagcatgtacattgccgttttcatccagcctttcccgtggtccttctacacagcctctgttttcattggaattgctgctgctgtgctttggacagcacaaggaaactgcctgacaatcaattcggatgagcacagcattgggagaaacagtgggattttctgggcacttctgcagtctagcttgttctttggaaatctctacatatattttgcctggcaagggaaaactcagatatcagagagtgaccgaagaacagtgtttattgccctaacggtgattagccttgtggggacagttctattctttctcattcggaaaccagattctgaaaatgtcctaggagaagatgagtcttctgatgaccaggacatggaagtcaacgagtctgcccagaacaatctgacaaaggcagtagatgcttttaaaaagtcttttaagttatgtgtcaccaaggagatgctccttcttagtattacaactgcttatacaggtctggaattaactttcttctctggtgtatatggaacctgtattggtgctacaaataaatttggagcagaagagaaaagccttattggactttctggcattttcatcggcattggagaaattttaggtggaagcctcttcggcctgctgagcaagaacaatcgttttggtagaaatccagttgtgctgttgggcatcctggtgcacttcatagctttttatctaatatttctcaacatgcctggagatgccccgattgctcctgttaaaggaactgacagcagtgcttacatcaaatccagcaaagaagttgccattctctgcagttttctgttgggccttggagacagctgctttaatacccagctgcttagtatcttgggctttctgtattctgaagacagcgccccagcatttgccatcttcaagtttgttcagtctatttgcgcagccgtggcatttttctacagcaactaccttctccttcactggcaactcctggtcatggtgatatttgggttttttggaacaatttctttcttcactgtggaatgggaagctgccgcctttgtagcccgcggctctgactaccgaagtatctgatctggtgtccgtgaggggacacgtatgacctcagaaacacagctggacacagagcttggtggaagaagtcgcctttgatcttcactatatattgggtgatgttcagtatggaaaatcaagggattaagactgttaaatcagccagagttggtgttcaagtttacagatatgagttatttaaagcaagtagaataagggaaagctgttctgtcaactgtaattgttcaaagatgttgtttttcatttcatctatctcaattcttataatcatgttatagaatgtaaatgttttcttctctctcctgctcttgttggaagatcctgccttgatttagaatactaggccatatgtcatataaatattttttctggatatggagtatgttttgctatgtaataatgggaagcatatgtcattccccatatgtgttggagaatgacatttaaataaatagcaaagctgggtgtggtgttgcaccgctatactcccagctgttggggaggctgagacggaaggatcgcttcagcccgggagattgaggctgcggtgagctatgatcgcgccactgcactccaggctgggcaacggagtgagaccctgtcttgaaaataataataggctggtcacggtggctcatgcctgtggtcccagcactttgggaggctgaggtgggtggatcgcctgaggtcgggggtttgagaccggcctggccagcgtggtgaagcctcatctctgctgagaatgcagagatgtgttgggtttggtggtgcatgcctgtgatcctagctgctggggaggctgaggtaggagaattcgcttgagcctgggaggcggaggttgcagtgagccgagatcgtgccattgcactccagcctggatgacaagagtgaaactccatctcaaaaaaaaaaaaaaaaaaaaaaaaaaaaaaaa

SEQ ID NO: 2451 - DNA, 1256 bp, Homo sapiens
acgaggggagctccggctgcgtcttcccgcagcgctacccgccatgcgcctgccgcgccgggccgcgctggggctcctgccgcttctgctgctgctgccgcccgcgccggaggccgccaagaagccgacgccctgccaccggtgccgggggctggtggacaagtttaaccaggggatggtggacaccgcaaagaagaactttggcggcgggaacacggcttgggaggaaaagacgctgtccaagtacgagtccagcgagattcgcctgctggagatcctggaggggctgtgcgagagcagcgacttcgaatgcaatcagatgctagaggcgcaggaggagcacctggaggcctggtggctgcagctgaagagcgaatatcctgacttattcgagtggttttgtgtgaagacactgaaagtgtgctgctctccaggaacctacggtcccgactgtctcgcatgccagggcggatcccagaggccctgcagcgggaatggccactgcagcggagatgggagcagacagggcgacgggtcctgccggtgccacatggggtaccagggcccgctgtgcactgactgcatggacggctacttcagctcgctccggaacgagacccacagcatctgcacagcctgtgacgagtcctgcaagacgtgctcgggcctgaccaacagagactgcggcgagtgtgaagtgggctgggtgctggacgagggcgcctgtgtggatgtggacgagtgtgcggccgagccgcctccctgcagcgctgcgcagttctgtaagaacgccaacggctcctacacgtgcgaagatgtggacgagtgctcactagcagaaaaaacctgtgtgaggaaaaacgaaaactgctacaatactccagggagctacgtctgtgtgtgtcctgacggcttcgaagaaacggaagatgcctgtgtgccgccggcagaggctgaagccacagaaggagaaagcccgacacagctgccctcccgcgaagacctgtaatgtgccggacttaccctttaaattattcagaaggatgtcccgtggaaaatgtggccctgaggatgccgtctcctgcagtggacagcggcggggagaggctgcctgctctctaacggttgattctcatttgtcccttaaacagctgcatttcttggttgttcttaaacagacttgtatattttgatacagttctttgtaataaaattgaccattgtaggtaatcaggaaaaaaaaaaaaaaaaaaaaa

SEQ ID NO: 2452 - DNA, 3254 bp, Homo sapiens
ggtaactgcagtaagtcccgcttggccctggagtccacgcggattttcgaagctggggctggcaagaggccgctggacaccacgctccagtcgtcagcccacttcctagctgaacagcgcgaggcggcggcagcgagccgggtcccaccatggccgcgaattattccagtaccagtacccggagagaacatgtcaaagttaaaaccagctcccagccaggcttcctggaacggctgagcgagacctcgggtgggatgtttgtggggctcatggccttcctgctctccttctacctaattttcaccaatgagggccgcgcattgaagacggcaacctcattggctgaggggctctcgcttgtggtgtctcccgacagcatccacagtgtggctccggagaatgaaggaaggctggtgcacatcattggcgccttacggacatccaagcttttgtctgatccaaactatggggtccatcttccggctgtgaaactgcggaggcacgtggagatgtaccaatgggtagaaactgaggagtccagggagtacaccgaggatgggcaggtgaagaaggagacgaggtattcctacaacactgaatggaggtcagaaatcatcaacagcaaaaacttcgaccgagagattggccacaaaaaccccagtgccatggcagtggagtcattcatggcaacagccccctttgtccaaattggcaggtttttcctctcgtcaggcctcatcgacaaagtcgacaacttcaagtccctgagcctatccaagctggaggaccctcatgtggacatcattcgccgtggagactttttctaccacagcgaaaatcccaagtatccagaggtgggagacttgcgtgtctccttttcctatgctggactgagcggcgatgaccctgacctgggcccagctcacgtggtcactgtgattgcccggcagcggggtgaccagctagtcccattctccaccaagtctggggataccttactgctcctgcaccacggggacttctcagcagaggaggtgtttcatagagaactaaggagcaactccatgaagacctggggcctgcgggcagctggctggatggccatgttcatgggcctcaaccttatgacacggatcctctacaccttggtggactggtttcctgttttccgagacctggtcaacattggcctgaaagcctttgccttctgtgtggccacctcgctgaccctgctgaccgtggcggctggctggctcttctaccgacccctgtgggccctcctcattgccggcctggcccttgtgcccatccttgttgctcggacacgggtgccagccaaaaagttggagtgaaaagaccctggcacccgcccgacacctgcgtgagccctaggatccaggtcctctctcacctctgacccagctccatgccagagcaggagccccggtcaattttggactctgcactccctctcctcttcaggggccagacttggcagcatgtgcaccaggttggtgttcaccagctcatgtcttccccacatctcttcttgccagtaagcagctttggtgggcagcagcagctcatgaatggcaagctgacagcttctcctgctgtttccttcctctcttggactgagtgggtacggccagccactcagcccattggcagctgacaacgcagacacgctctacggaggcctgctgataaagggctcagccttgccgtgtgctgcttctcatcactgcacacaagtgccatgctttgccaccaccaccaagcacatctgtgatcctgaagggcggccgttagtcattactgctgagtcctgggtcaccagcagacacactgggcatggacccctcaaagcaggcacacccaaaacacaagtctgtggctagaacctgatgtggtgtttaaaagagaagaaacactgaagatgtcctgaggagaaaagctggacatatactgggcttcacacttatcttatggcttggcagaatctttgtagtgtgtgggatctctgaaggccctatttaagtttttcttcgttactttgctgcttcatgtgtactttcctaccccaagaggaagttttctgaaataagatttaaaaacaaaacaaaaaaaacacttaatatttcagactgttacaggaaacaccctttagtctgtcagttgaattcagagcactgaaaggtgttaaattggggtatgtggtttgattgataaaaagttacctctcagtattttgtgtcactgagaagctttacaatggatgcttttgaaacaagtatcagcaaaaggatttgttttcactctgggaggagagggtggagaaagcacttgctttcatcctctggcatcggaaactcccctatgcacttgaagatggtttaaaagattaaagaaacgattaagagaaaaggttggaagctttatactaaatgggctccttcatggtgacgccccgtcaaccacaatcaagaactgaggcctgaggctggttgtacaatgcccacgcctgcctggctgctttcacctgggagtgctttcgatgtgggcacctgggcttcctagggctgcttctgagtggttctttcacgtgttgtgtccatagctttagtcttcctaaataagatccacccacacctaagtcacagaatttctaagttccccaactactctcacacccttttaaagataaagtatgttgtaaccaggatgtcttaaatgattctttgtgtaccttttctgtcatattcagaaaccgttttgtgcctgctgggagtaattcctttagcaattaagtatttggtagctgaataaggggtcagaacttctgaaaccagagatctgtaatcatctctattggcctggggtgcctgtgctataaatgagtttcttcacatgaaaaacacagccagcccaagatgacttatctgggtttaggattcaatagtattcactaactgcttattacatgagcaatttcatcaaatctccaaactcttaaaggatgctttcggaaaacacgctgtatacctagatgatgactaaatgcaaaatccttgggctttggtttttttctagtaaggattttaaataactgccgacttcaaaagtgttcttaaaacgaaagataatgttaagaaaaatttgaaagctttggaaaaccaaatttgtaatatcattgtattttttattaaaagttttgtaataaatttctaaattataaaaaaaaaaaaaaaaaa

SEQ ID NO: 2453 - DNA, 11189 bp, Homo sapiens
gcgaccgagaagatgcccgccctgcgccccgctctgctgtgggcgctgctggcgctctggctgtgctgcgcgacccccgcgcatgcattgcagtgtcgagatggctatgaaccctgtgtaaatgaaggaatgtgtgttacctaccacaatggcacaggatactgcaaatgtccagaaggcttcttgggggaatattgtcaacatcgagacccctgtgagaagaaccgctgccagaatggtgggacttgtgtggcccaggccatgctggggaaagccacgtgccgatgtgcctcagggtttacaggagaggactgccagtactcgacatctcatccatgctttgtgtctcgaccctgcctgaatggcggcacatgccatatgctcagccgggatacctatgagtgcacctgtcaagtcgggtttacaggtaaggagtgccaatggaccgatgcctgcctgtctcatccctgtgcaaatggaagtacctgtaccactgtggccaaccagttctcctgcaaatgcctcacaggcttcacagggcagaaatgtgagactgatgtcaatgagtgtgacattccaggacactgccagcatggtggcacctgcctcaacctgcctggttcctaccagtgccagtgccttcagggcttcacaggccagtactgtgacagcctgtatgtgccctgtgcaccctcgccttgtgtcaatggaggcacctgtcggcagactggtgacttcacttttgagtgcaactgccttccaggttttgaagggagcacctgtgagaggaatattgatgactgccctaaccacaggtgtcagaatggaggggtttgtgtggatggggtcaacacttacaactgccgctgtcccccacaatggacaggacagttctgcacagaggatgtggatgaatgcctgctgcagcccaatgcctgtcaaaatgggggcacctgtgccaaccgcaatggaggctatggctgtgtatgtgtcaacggctggagtggagatgactgcagtgagaacattgatgattgtgccttcgcctcctgtactccaggctccacctgcatcgaccgtgtggcctccttctcttgcatgtgcccagaggggaaggcaggtctcctgtgtcatctggatgatgcatgcatcagcaatccttgccacaagggggcactgtgtgacaccaaccccctaaatgggcaatatatttgcacctgcccacaaggctacaaaggggctgactgcacagaagatgtggatgaatgtgccatggccaatagcaatccttgtgagcatgcaggaaaatgtgtgaacacggatggcgccttccactgtgagtgtctgaagggttatgcaggacctcgttgtgagatggacatcaatgagtgccattcagacccctgccagaatgatgctacctgtctggataagattggaggcttcacatgtctgtgcatgccaggtttcaaaggtgtgcattgtgaattagaaataaatgaatgtcagagcaacccttgtgtgaacaatgggcagtgtgtggataaagtcaatcgtttccagtgcctgtgtcctcctggtttcactgggccagtttgccagattgatattgatgactgttccagtactccgtgtctgaatggggcaaagtgtatcgatcacccgaatggctatgaatgccagtgtgccacaggtttcactggtgtgttgtgtgaggagaacattgacaactgtgaccccgatccttgccaccatggtcagtgtcaggatggtattgattcctacacctgcatctgcaatcccgggtacatgggcgccatctgcagtgaccagattgatgaatgttacagcagcccttgcctgaacgatggtcgctgcattgacctggtcaatggctaccagtgcaactgccagccaggcacgtcaggggttaattgtgaaattaattttgatgactgtgcaagtaacccttgtatccatggaatctgtatggatggcattaatcgctacagttgtgtctgctcaccaggattcacagggcagagatgtaacattgacattgatgagtgtgcctccaatccctgtcgcaagggtgcaacatgtatcaacggtgtgaatggtttccgctgtatatgccccgagggaccccatcaccccagctgctactcacaggtgaacgaatgcctgagcaatccctgcatccatggaaactgtactggaggtctcagtggatataagtgtctctgtgatgcaggctgggttggcatcaactgtgaagtggacaaaaatgaatgcctttcgaatccatgccagaatggaggaacttgtgacaatctggtgaatggatacaggtgtacttgcaagaagggctttaaaggctataactgccaggtgaatattgatgaatgtgcctcaaatccatgcctgaaccaaggaacctgctttgatgacataagtggctacacttgccactgtgtgctgccatacacaggcaagaattgtcagacagtattggctccctgttccccaaacccttgtgagaatgctgctgtttgcaaagagtcaccaaattttgagagttatacttgcttgtgtgctcctggctggcaaggtcagcggtgtaccattgacattgacgagtgtatctccaagccctgcatgaaccatggtctctgccataacacccagggcagctacatgtgtgaatgtccaccaggcttcagtggtatggactgtgaggaggacattgatgactgccttgccaatccttgccagaatggaggttcctgtatggatggagtgaatactttctcctgcctctgccttccgggtttcactggggataagtgccagacagacatgaatgagtgtctgagtgaaccctgtaagaatggagggacctgctctgactacgtcaacagttacacttgcaagtgccaggcaggatttgatggagtccattgtgagaacaacatcaatgagtgcactgagagctcctgtttcaatggtggcacatgtgttgatgggattaactccttctcttgcttgtgccctgtgggtttcactggatccttctgcctccatgagatcaatgaatgcagctctcatccatgcctgaatgagggaacgtgtgttgatggcctgggtacctaccgctgcagctgccccctgggctacactgggaaaaactgtcagaccctggtgaatctctgcagtcggtctccatgtaaaaacaaaggtacttgcgttcagaaaaaagcagagtcccagtgcctatgtccatctggatgggctggtgcctattgtgacgtgcccaatgtctcttgtgacatagcagcctccaggagaggtgtgcttgttgaacacttgtgccagcactcaggtgtctgcatcaatgctggcaacacgcattactgtcagtgccccctgggctatactgggagctactgtgaggagcaactcgatgagtgtgcgtccaacccctgccagcacggggcaacatgcagtgacttcattggtggatacagatgcgagtgtgtcccaggctatcagggtgtcaactgtgagtatgaagtggatgagtgccagaatcagccctgccagaatggaggcacctgtattgaccttgtgaaccatttcaagtgctcttgcccaccaggcactcggggcctactctgtgaagagaacattgatgactgtgcccggggtccccattgccttaatggtggtcagtgcatggataggattggaggctacagttgtcgctgcttgcctggctttgctggggagcgttgtgagggagacatcaacgagtgcctctccaacccctgcagctctgagggcagcctggactgtatacagctcaccaatgactacctgtgtgtttgccgtagtgcctttactggccggcactgtgaaaccttcgtcgatgtgtgtccccagatgccctgcctgaatggagggacttgtgctgtggccagtaacatgcctgatggtttcatttgccgttgtcccccgggattttccggggcaaggtgccagagcagctgtggacaagtgaaatgtaggaagggggagcagtgtgtgcacaccgcctctggaccccgctgcttctgccccagtccccgggactgcgagtcaggctgtgccagtagcccctgccagcacgggggcagctgccaccctcagcgccagcctccttattactcctgccagtgtgccccaccattctcgggtagccgctgtgaactctacacggcaccccccagcacccctcctgccacctgtctgagccagtattgtgccgacaaagctcgggatggcgtctgtgatgaggcctgcaacagccatgcctgccagtgggatgggggtgactgttctctcaccatggagaacccctgggccaactgctcctccccacttccctgctgggattatatcaacaaccagtgtgatgagctgtgcaacacggtcgagtgcctgtttgacaactttgaatgccaggggaacagcaagacatgcaagtatgacaaatactgtgcagaccacttcaaagacaaccactgtgaccaggggtgcaacagtgaggagtgtggttgggatgggctggactgtgctgctgaccaacctgagaacctggcagaaggtaccctggttattgtggtattgatgccacctgaacaactgctccaggatgctcgcagcttcttgcgggcactgggtaccctgctccacaccaacctgcgcattaagcgggactcccagggggaactcatggtgtacccctattatggtgagaagtcagctgctatgaagaaacagaggatgacacgcagatcccttcctggtgaacaagaacaggaggtggctggctctaaagtctttctggaaattgacaaccgccagtgtgttcaagactcagaccactgcttcaagaacacggatgcagcagcagctctcctggcctctcacgccatacaggggaccctgtcataccctcttgtgtctgtcgtcagtgaatccctgactccagaacgcactcagctcctctatctccttgctgttgctgttgtcatcattctgtttattattctgctgggggtaatcatggcaaaacgaaagcgtaagcatggctctctctggctgcctgaaggtttcactcttcgccgagatgcaagcaatcacaagcgtcgtgagccagtgggacaggatgctgtggggctgaaaaatctctcagtgcaagtctcagaagctaacctaattggtactggaacaagtgaacactgggtcgatgatgaagggccccagccaaagaaagtaaaggctgaagatgaggccttactctcagaagaagatgaccccattgatcgacggccatggacacagcagcaccttgaagctgcagacatccgtaggacaccatcgctggctctcacccctcctcaggcagagcaggaggtggatgtgttagatgtgaatgtccgtggcccagatggctgcaccccattgatgttggcttctctccgaggaggcagctcagatttgagtgatgaagatgaagatgcagaggactcttctgctaacatcatcacagacttggtctaccagggtgccagcctccaggcccagacagaccggactggtgagatggccctgcaccttgcagcccgctactcacgggctgatgctgccaagcgtctcctggatgcaggtgcagatgccaatgcccaggacaacatgggccgctgtccactccatgctgcagtggcagctgatgcccaaggtgtcttccagattctgattcgcaaccgagtaactgatctagatgccaggatgaatgatggtactacacccctgatcctggctgcccgcctggctgtggagggaatggtggcagaactgatcaactgccaagcggatgtgaatgcagtggatgaccatggaaaatctgctcttcactgggcagctgctgtcaataatgtggaggcaactcttttgttgttgaaaaatggggccaaccgagacatgcaggacaacaaggaagagacacctctgtttcttgctgcccgggaggggagctatgaagcagccaagatcctgttagaccattttgccaatcgagacatcacagaccatatggatcgtcttccccgggatgtggctcgggatcacatgcaccatgacattgtgcgccttctggatgaatacaatgtgaccccaagccctccaggcaccgtgttgacttctgctctctcacctgtcatctgtgggcccaacagatctttcctcagcctgaagcacaccccaatgggcaagaagtctagacggcccagtgccaagagtaccatgcctactagcctccctaaccttgccaaggaggcaaaggatgccaagggtagtaggaggaagaagtctctgagtgagaaggtccaactgtctgagagttcagtaactttatcccctgttgattccctagaatctcctcacacgtatgtttccgacaccacatcctctccaatgattacatcccctgggatcttacaggcctcacccaaccctatgttggccactgccgcccctcctgccccagtccatgcccagcatgcactatctttttctaaccttcatgaaatgcagcctttggcacatggggccagcactgtgcttccctcagtgagccagttgctatcccaccaccacattgtgtctccaggcagtggcagtgctggaagcttgagtaggctccatccagtcccagtcccagcagattggatgaaccgcatggaggtgaatgagacccagtacaatgagatgtttggtatggtcctggctccagctgagggcacccatcctggcatagctccccagagcaggccacctgaagggaagcacataaccacccctcgggagcccttgccccccattgtgactttccagctcatccctaaaggcagtattgcccaaccagcgggggctccccagcctcagtccacctgccctccagctgttgcgggccccctgcccaccatgtaccagattccagaaatggcccgtttgcccagtgtggctttccccactgccatgatgccccagcaggacgggcaggtagctcagaccattctcccagcctatcatcctttcccagcctctgtgggcaagtaccccacacccccttcacagcacagttatgcttcctcaaatgctgctgagcgaacacccagtcacagtggtcacctccagggtgagcatccctacctgacaccatccccagagtctcctgaccagtggtcaagttcatcaccccactctgcttctgactggtcagatgtgaccaccagccctacccctgggggtgctggaggaggtcagcggggacctgggacacacatgtctgagccaccacacaacaacatgcaggtttatgcgtgagagagtccacctccagtgtagagacataactgacttttgtaaatgctgctgaggaacaaatgaaggtcatccgggagagaaatgaagaaatctctggagccagcttctagaggtaggaaagagaagatgttcttattcagataatgcaagagaagcaattcgtcagtttcactgggtatctgcaaggcttattgattattctaatctaataagacaagtttgtggaaatgcaagatgaatacaagccttgggtccatgtttactctcttctatttggagaataagatggatgcttattgaagcccagacattcttgcagcttggactgcattttaagccctgcaggcttctgccatatccatgagaagattctacactagcgtcctgttgggaattatgccctggaattctgcctgaattgacctacgcatctcctcctccttggacattcttttgtcttcatttggtgcttttggttttgcacctctccgtgattgtagccctaccagcatgttatagggcaagacctttgtgcttttgatcattctggcccatgaaagcaactttggtctcctttcccctcctgtcttcccggtatcccttggagtctcacaaggtttactttggtatggttctcagcacaaacctttcaagtatgttgtttctttggaaaatggacatactgtattgtgttctcctgcatatatcattcctggagagagaaggggagaagaatacttttcttcaacaaattttgggggcaggagatcccttcaagaggctgcaccttaatttttcttgtctgtgtgcaggtcttcatataaactttaccaggaagaagggtgtgagtttgttgtttttctgtgtatgggcctggtcagtgtaaagttttatccttgatagtctagttactatgaccctccccacttttttaaaaccagaaaaaggtttggaatgttggaatgaccaagagacaagttaactcgtgcaagagccagttacccacccacaggtccccctacttcctgccaagcattccattgactgcctgtatggaacacatttgtcccagatctgagcattctaggcctgtttcactcactcacccagcatatgaaactagtcttaactgttgagcctttcctttcatatccacagaagacactgtctcaaatgttgtacccttgccatttaggactgaactttccttagcccaagggacccagtgacagttgtcttccgtttgtcagatgatcagtctctactgattatcttgctgcttaaaggcctgctcaccaatctttctttcacaccgtgtggtccgtgttactggtatacccagtatgttctcactgaagacatggactttatatgttcaagtgcaggaattggaaagttggacttgttttctatgatccaaaacagccctataagaaggttggaaaaggaggaactatatagcagcctttgctattttctgctaccatttcttttcctctgaagcggccatgacattccctttggcaactaacgtagaaactcaacagaacattttcctttcctagagtcaccttttagatgataatggacaactatagacttgctcattgttcagactgattgcccctcacctgaatccactctctgtattcatgctcttggcaatttctttgactttcttttaagggcagaagcattttagttaattgtagataaagaatagttttcttcctcttctccttgggccagttaataattggtccatggctacactgcaacttccgtccagtgctgtgatgcccatgacacctgcaaaataagttctgcctgggcattttgtagatattaacaggtgaattcccgactcttttggtttgaatgacagttctcattccttctatggctgcaagtatgcatcagtgcttcccacttacctgatttgtctgtcggtggccccatatggaaaccctgcgtgtctgttggcataatagtttacaaatggttttttcagtcctatccaaatttattgaaccaacaaaaataattacttctgccctgagataagcagattaagtttgttcattctctgctttattctctccatgtggcaacattctgtcagcctctttcatagtgtgcaaacattttatcattctaaatggtgactctctgcccttggacccatttattattcacagatggggagaacctatctgcatggacctctgtggaccacagcgtacctgcccctttctgccctcctgctccagccccacttctgaaagtatcagctactgatccagccactggatattttatatcctcccttttccttaagcacaatgtcagaccaaattgcttgtttctttttcttggactactttaatttggatcctttgggtttggagaaagggaatgtgaaagctgtcattacagacaacaggtttcagtgatgaggaggacaacactgcctttcaaactttttactgatctcttagattttaagaactcttgaattgtgtggtatctaataaaagggaaggtaagatggataatcactttctcatttgggttctgaattggagactcagtttttatgagacacatcttttatgccatgtatagatcctcccctgctatttttggtttatttttattgttataaatgctttctttctttgactcctcttctgcctgcctttggggataggtttttttgtttgtttatttgcttcctctgttttgttttaagcatcattttcttatgtgaggtggggaagggaaaggtatgagggaaagagagtctgagaattaaaatattttagtataagcaattggctgtgatgctcaaatccattgcatcctcttattgaatttgccaatttgtaatttttgcataataaagaaccaaaggtgtaatgttttgttgagaggtggtttagggattttggccctaaccaatacattgaatgtatgatgactatttgggaggacacatttatgtacccagaggcccccactaataagtggtactatggttacttccttgtgtacatttctcttaaaagtgatattatatctgtttgtatgagaaacccagtaaccaataaaatgaccgcatattcctgactaaacgtagtaaggaaaatgcacactttgtttttacttttccgtttcattctaaaggtagttaagatgaaatttatatgaaagcatttttatcacaaaataaaaaaggtttgccaagctcagtggtgttgtattttttattttccaatactgcatccatggcctggcagtgttacctcatgatgtcataatttgctgagagagcaaattttcttttctttctgaatcccacaaagcctagcaccaaacttctttttttcttcctttaattagatcataaataaatgatcctggggaaaaagcatctgtcaaataggaaacatcacaaaactgagcactcttctgtgcactagccatagctggtgacaaacagatggttgctcagggacaaggtgccttccaatggaaatgcgaagtagttgctatagcaagaattgggaactgggatataagtcataatattaattatgctgttatgtaaatgattggtttgtaacattccttaagtgaaatttgtgtagaacttaatatacaggattataaaataatattttgtgtataaatttgttataagttcacattcatacatttatttataaagtcagtgagatatttgaacatgaaaaaaaaaa

SEQ ID NO: 2454 - DNA, 4500 bp, Homo sapiens
atggagcgggagccggcggggaccgaggagcccgggcctccgggacggcggaggcgccgagagggcaggacgcgcacggtgcgctccaacctgctgccgcccccgggcgccgaggaccctgcggctggcgcggccaagggcgagcggcgacggcggcgcgggtgtgcccagcacctggccgacaaccggctcaagactaccaagtacacgctgctgtccttcctgcccaagaacctgttcgagcagttccaccgcccggccaacgtgtactttgtcttcatcgcgctgctcaacttcgtgccggcggtgaacgccttccagcccggcctggcactggcgccggtgctcttcatcctggccatcacggccttcagggacctgtgggaggactacagccgccaccgctccgaccacaagatcaaccacctgggctgcctggtcttcagcagggaagaaaagaaatacgtgaaccgattctggaaagaaatccacgtgggagactttgtgcgtcttcgctgcaacgaaatcttccctgcggacattctgctgctctcctccagtgaccccgacgggctatgccacatcgagaccgccaacctggatggagagaccaacctgaagcggcggcaggtggtccgcggcttctcggagcttgtctccgaattcaatcctttgacgttcaccagcgtgatcgaatgcgagaagccaaacaacgacctgagtaggtttcgcggctgcatcatacatgacaacgggaaaaaggccgggctgtataaagaaaacctgctgctgaggggctgcacccttaggaacacggacgcagtcgtcggcattgtcatctacgcaggacatgaaaccaaggctctgctgaacaacagtgggccccgctacaagcgcagcaagctggagaggcagatgaactgcgacgtgctctggtgtgtcctgctccttgtttgcatgtctctgttttcagcagtcggacatggactgtggatatggcggtatcaagagaagaagtcattattttatgtccccaagtctgatggaagctccttatccccagtcacagctgcagtttactcatttttaacaatgataatagttctgcaggttttgatcccaatttccttatacgtttccattgaaattgttaaagcatgccaagtgtacttcattaaccaggacatgcagttgtatgacgaagaaacagactcgcagctgcagtgccgagctctgaacatcacggaagacttaggacagatacagtacattttctcagataaaactggcactttgacagagaataagatggttttccgaagatgcactgtgtctggtgtagaatattctcatgatgcaaatgcgcagcgtctggccaggtaccaagaggcagactcggaggaggaggaggtggtgcccagagggggctcggtgtcccagcgcggcagcatcggcagccaccagagtgtccgggtggtgcacagaacccagagcaccaagtcccaccggcgcacgggcagccgggccgaggccaagagggccagcatgctgtccaagcacacggccttcagcagccccatggagaaggatatcacgcccgacccaaagctgctggagaaggtgagtgagtgtgacaagagcctagccgtggcgaggcatcaggagcacctgctggcccacctctcgcccgagctgtctgacgtctttgatttcttcatcgcactcaccatctgcaacacagtcgtcgtcacgtccccggatcagccacgaacaaaggtgagggtgaggtttgagctgaagtccccggtgaagacgatagaagacttcctgcggaggttcacacccagctgcctgacctcaggctgcagcagcatcgggagcctggccgccaacaagtccagccacaagttgggctccagcttcccgtccaccccgtccagcgacggcatgcttctcaggctggaggagaggctgggccagcccacctcggccatcgccagcaacggctacagcagccaggcggacaactgggcctcggagcttgctcaggagcaggagtcagagcgcgagctgcggtacgaggcggagagcccggatgaggccgcactggtgtatgcggccagagcctacaactgcgtgcttgtggagcggctgcacgaccaagtgtcagtggagctgccccacctgggcaggctcaccttcgagctcctgcacacactgggtttcgattccgtccgcaagaggatgtcagtggtgatccggcacccgcttaccgatgagatcaacgtctacaccaagggggccgactcagtggtcatggatctcctgcagccctgctcttcagttgacgccagagggaggcatcaaaaaaagattcggagcaaaactcagaattacctcaacgtgtatgcggcggaaggcctgcgcaccttgtgcatcgccaagagagttctgagtaaagaagagtatgcctgctggttgcaaagccacctagaagccgaatcctccctggaaaacagcgaggagctcctcttccagtctgccattcgcctggagaccaacctgcacttgttaggtgccactgggattgaagaccgcctgcaggacggagtccctgaaactatttctaaattgcgtcaagcgggcctgcagatttgggttctcactggtgacaaacaagaaacagctgtcaacattgcatatgcctgcaaactgctggaccacgacgaggaggtcatcaccctgaatgccacctcccaggaggcgtgtgcagccctgctagaccagtgcctatgctacgtgcagtccagaggcctccagagagcccctgagaagaccaagggcaaagtgagcatgaggttctcctctctctgcccaccctccacgtccactgcctctggccgcagacccagcctcgtgatcgatgggagaagcctggcctacgctctcgagaaaaacctggaggacaaattcctcttccttgccaagcagtgccgctccgtcctctgctgtcggtcgacgcctctgcagaagagcatggtggtgaagctggtgcggagcaagctcaaggccatgaccctggccataggtgatggagccaatgatgtcagcatgatccaggtggcagatgtgggtgtgggaatctccggccaggagggtatgcaggcagtgatggccagcgactttgcagtgccgaaattccgatacctggagaggctcttgattcttcacgggcattggtgctactcccgacttgccaacatggtgctgtacttcttctacaaaaacacaatgttcgtgggcctcctgttttggttccagtttttctgtggcttctctgcatctaccatgattgaccagtggtatctaatcttctttaatctgctcttctcgtcacttcccccgctcgtgactggggtgctggacagggatgtgccagccaatgtgctgctgaccaacccgcagctctacaagagtggccagaacatggaggaataccggccacgaacgttctggtttaacatggccgacgccgccttccagagcctggtttgcttttccattccttacctggcctactatgactcgaacgtggacctgtttacctgggggacccctattgtgacaatcgcgctgctcactttcctgctccacctgggcattgaaaccaaaacctggacctggctcaactggataacgtgtggcttcagtgtccttttgtttttcaccgtggctttgatttacaatgcgtcttgtgccacgtgctatcctccgtccaacccttactggactatgcaagccttactgggtgacccagtgttttacttgacttgcctgatgacgcctgtcgctgcactgctgcccagattgtttttcagatccctccaggggagggttttccccacacaacttcagctggcacgtcagttgaccaggaagtcccccaggagatgcagtgctcccaaagagacctttgctcagggacgcctcccgaaggactcgggaaccgagcactcatcagggaggacagtcaagacctctgtgcccctgtcccagccttcttggcacacacagcagccggtctgctccctggaggccagcggggagcccagcacagtggacatgagcatgccagtgagggagcacaccctgctggaggggctgagcgcaccggcccccatgtcctctgcgccaggggaggctgtcctgaggagtccaggagggtgtcctgaggagtccaaggtgagagctgccagcaccggcagggtgacccccctgtcttccctcttcagcctgcctaccttcagcttactcaactggatttcctcctggtcgctggtcagcaggctggggagtgtcttacagttctcccggacggagcagcttgcagatggacaagcgggacgtggacttcctgtccagccccactcaggccgatcaggacttcaagggccagaccacagactacttataggagcatcttcaaggcggtcacagtga

SEQ ID NO: 2455 - DNA, 2032 bp, Homo sapiens
ggcacgagggaccgctgtgctctcgacccctcctcctgtagagagtggtgctgccctctcgggatgtacctgcaggtggagacccgcaccagctcccgcctccatctgaagagggctccaggcatccggtcctggtccctgctggttggaatcttgtcgattggcctggctgctgcctactacagcggagatagcctgggctggaagctcttctacgtcacaggctgcctgtttgtggctgtgcagaacttggaggactgggaggaagccatcttcgacaagagcacagggaaggttgttttgaagacgttcagcctctacaagaagctgctgactcttttcagagctggccacgaccaggtggtggtcctgctccatgatgtccgtgatgtgagcgtggaggaggagaaggtccggtacttcgggaaaggctacatggtggtgctccggcttgcgacgggcttctcccaccccctcacgcagagtgcagtcatgggccaccgcagtgatgtggaagccatcgccaagctcatcaccagcttcctggagctgcactgccttgagagccccacagagctgtctcagagcagcgacagtgaggccggtgaccctgcaagccagagctgacagccccactgtgcctgagcccgtgcaccgcccacaggacccatggcacattcccggtgtgcctgagcccgtgcaccgcccacaggacccgtggcacattcccggtgtgcctgagcccgtgcaccgcccacaggacccgtggcacattcccggtgtgcctgagcccgtgcaccgcccacaggacccgtggcacattcccggtgtgcctgagcccgtgcaccgcccacaggacccgtggccttggcttcagttggtgcctccagccgagttggcctattgcctgctcatgctgctgcttgcacactgcatgaaacagcaggccagaccaggacatccagactttctccatcgtgaggcctgggcctgcctttctgcagccggaggtctcgccagccctggactcctgctttgggccacagcaagacctcgggcgagtggagaggcggggccaggccgggcccttgtgggtgctgatgctgcatgttgtccccgacacagcgtcctctccctggtggacatccccagcggtcaggtgcttccccaagggcagtgaggggtgaacatccagggcctacctggctgtgcacgctgcagccacactgtggaagctgcccctccccgaggacccgcctcccttgctgatgccaggatctcggcgcatagaccactctgccccagcggtcgtcacagaaaggtctctctgttcctcacactcagcttcagcataagctgtgaggccagaaaaaaggtcagctcttctagtatcgtgcagtgcttaaaaaccgggagctccagccgggcgcagtggttcatgccagtaatcccagcactttcggaggccgaggtgggaggattgcttgaggccaggagttcaagaccagcctgggcaacacagcaagatcctgtctttgtaaaaaaactaaccaaacaggaaaaactgggagattttctgcagaaattgagttccagcctctctcgaacctgggaagacctggcaggagggggctgggctctcggctacagacttctccccaccccgtaggagctgaacgccaaccatcctgacccgccagtgctcttggtctcctgagtgtacccaggtcctcccaggtgcggtgtgcaccgagcgcgcctggcctgatgccctggcctgtgagctggggactcctgggccctgtgagcccctaggcggcaggcccaggaatggctgggtaggacagggaacacctttgccccacgtctggctgtgacctcggtgaaagccgacaggagagagatgggaccctcctcctcagtagtggctgccagtccctcgttgcaggacagggtcatcataaccataaataacccttcacgtgtcaaaaaaaaaaaaaaaaaaaaaaaaaaaaaaaaaaaaaaaaaaaaa

SEQ ID NO: 2456 - DNA, 4860 bp, Homo sapiens
cctgttagcgcacaggcacgggaggcttcttccggctcggccgtgctgctcagcgggtgtaaacagcctctgcggtgtaaacagcctctgcggtgtaaacagccgcggcgggcaggccaggactgtcagtgcccgcccctcggggcaggtaatttcatgctcccaaaatgggacataaagtggttgtcttcgacatttctgtcatcagagccttgtgggaaactcgtgtcaagaagcacaaagcttggcagaagaaggaggtggaaaggcttgagaagagcgccttggagaagataaaggaggagtggaactttgtggccgaatgcaggaggaagggcatcccccaggctgtatactgcaagaatggcttcatagacaccagcgtgcggcttctggacaagattgaaaggaacactctcacaaggcagagttcacttcccaaggacagaggcaaacggagcagtgcgtttgtgtttgaactttctggggagcactggacggagctcccagattcattgaaggagcagacacacctgagagaatggtacataagcaataccttgattcaaatcattcctacatatattcagttatttcaagagatgagaattctggatctgccaaaaaaccaaatctcacatcttccagcagaaatcggttgtttgaagaacctgaaagaactcaatgtgggtttcaactatctgaagagcattcctccagaattgggagattgtgaaaatctagagagactggattgttctggaaatctagaattaatggagctgccctttgaattaagtaatttgaagcaagttacatttgtagatatctcagcaaacaagttttccagtgtcccaatctgtgtcctgcggatgtcgaatttgcagtggttggatatcagcagcaataacctgaccgacctgccgcaagatatagacaggctagaggagctgcagagctttctcttgtataaaaacaagttgacctaccttccctattccatgctgaacctgaagaagctcactctgttagtcgtcagtggggaccatttggtggagctcccaactgccctttgtgactcatccacacctttaaaatttgtaagccttatggacaatcctattgataatgcccaatgtgaagatggcaatgaaataatggaaagtgaacgggatcgccaacattttgataaagaagttatgaaagcctatattgaagaccttaaagaaagagaatctgttcccagctataccaccaaagtgtcttttagccttcaactttgatatccatcagaagactgcaaatctcactattctctggagctatatataaatctttgttatgatcatgtcatataggaagaatggcttgtgcttaaggacaaagtctagaaaccactatcatagttgctaaaaaaaatggttttcaaatgtcaaatacatgagtatctccctccatggactggagaattgaaaaattggtttgtatattgatatttccaggttcatttgcatatacttttttccaaataatgcacatttaatatgttttaaaatgtcttatttttaagaattataactaaaagaccaaatactgaagttaagtgcattgttttcaggaatcaaaagataaaggggccgggtgtggtggctcacacctgtaatcccagcactttgggaggccgaagtgggtggatcacctgaggtccggagttcgaggctggtttggccagcatggcgaaaccccatctctactaaaaatacaaaaaattagctgggcatggtggcagttgcctgtaatcctagctactcaggaggctgaggcaggagaatcgcttgaacctgggaggtggagttgcagtgagccgagatcatgggactgcactccagcctgggtgacagagccagactctgtctcaaaaaaaaaaaaaaagaaaagaaaaagataaagggattgtgaaaagagcatttatattggactaatcagatgagagtgttttgttattttgaaagagtttcttttactgagaataatcttccttgagtttatataaactgctatttccatatgttttaagttatattttggcaagtgtagactcccaggagagacttgtaggtacaatctaggccttgaagaaacaaaggctggaatatctgcccatgctttgggcatgagatgctcagatggtgcgtgggtagatctagttgaggaagtgtgggcctggctgttcatgggaagtcttcagtggccttcatggatggccatccagtcctgagtggtcaccctgggggtcctgggacacacctcagtaaagagcaaaggcaacgccctcagggtcccttcctccaagatggccatgtagggtaatggagatgaccagtccacactgataaggagttcctagcaaggcttccttgtgggtaccacaggacaactctgcccatagcaaagatgcttcagtccagagggagcccatgggctgtttgaatttgggagaggtgggattcattacaagactttgggctcttatgtcacatcacatgatttggagaaattagacacaatctcttatttttataccactgtcttgggctaaaataaacaggttgtggctgatggtgttgaagataaataagcttaaacaaataactttggccgggcacggtggctcacacctataatcccagcactatgggaggctgaggcaagcaggttgtttgagcccaggaatttgagaacaggattttgagaacagcttggacatcatgacgaaaccccatctccacaaaaaaattcaaaaaattagccaggtgtggtggcatgtgcctgtggtcccagctactcaggaggctgaggtgggaaaatcacttgagcccaggaggtcgaggctgcagtgtgctgtgattgtgacactgccctccagcctgggtgacagagtgagaccctgtctcaaaagcaaaacaaacagcaataacaatattattattgttataactaaaaaaaaaaaaacaaaaacaagcagcttttgtgactaagaaggaaaatatgcatatagtggcatatttttatatgaatcatctcctctgtggtcttgcccagtaccatccagtggagctttctgcagtgacggaaatgttctgtatttgcgttgtccaacgtggtaaaccagacacatgtgattcttgagcacttgaacaatgactgatgtgattgaagaacccatctttcaattcaattaaatttaaatagccacatttaactccagccttgggtttgacctgatggaaaattcccatgagagagtgctccaaaccgttccaaggtggggccagttgcgattctaaaggaagaagcactaaatggcagggtgatcagtccaaagcatttatgaggggagcttacatacagcatgggctgcagcgtccttgtgatgggcagtgagacaagggatgttctacctgggcatgtccccagcgagggggttgggggatggagttcacatgaagatgtaaggaatttgggtgggggctgggctggcttctacatgtttagcaacacggctgatctttcagtgtttccagcaacaacctaagcaccgttatcagtgcctaggaatgttcaaggcccaggctggggttcagacctgcagaggaaaacatcagctggctgggtcaaggcaccatgtgttacttggtcaggacagagacaaaaatgaggaaaactaggggaccccacacacatgtggctaccatactcctgaacaggtctagctagttatttgtttttttggaagttaatctggggtagaaatgtatggtgatttttattttctctgtctgaagaaccagccatttttaaaaaggttattattgacatcccaatattttgtcttggtgggcttactcataagtccaaacattttattctcaacaggtgtaaaacaggcagagcattctaaaaccacatggtagtgctttggtggaggactgcttccacttagaaacaaactctgagaagtaggctaagagaagacaagagggccgggcgcggtgactcacgcctataatcccagcactttgggaggccgagatgggtgaatcatgaggtcaggagttcgagaccagcctaaacaacatagtgaaaccctgtctctattaaaaatgcaaaaaattagccgggcgtggtgggcacccgtaatcccagctactcaggaggctgaggcaggagaattgcttgaacccaggaagcagaggttgcagtaagctgagatcccaccattgcactccagcctgggcaacagagtgagactccatctcaaaaaaaaaaagagagagagatgaaaagagtaggaaaatgagaaatcaccttcgttgaatcttaaatagttacatttttttctttttaacactaaaaatacaattcaaatttattagctctactacttgaatgattttggaattttatgtcatgctaaggtatgtgttacatatggccaagtggaaaatatatctgaagaggggctttcatacaaatagactgttcataatttatgtaaattttattttaataaaatcagttttttgtttaaaaaccttgtttcactgtcacatatgaaaaaaatactgcattgatatataattatttcatgttacataataacccaaaacaaataattacttgaatatgtttgtagagatactatttaatttattcatataaatgtgcagaaagattccaaaggagaatatatatcttgtgaaaatatggagatttgaaaatttgacatgatgcaaatagactgatacataatttggaaaggttctttacatggcagaatacatgtatgaatattaaagt

SEQ ID NO: 2457 - DNA, 3591 bp, Homo sapiens
ctgcgacgactggagttccatgccagcaagatcgatgagctgtatgaggcatactgtgtccagcggcgtctccgggatggtgcctacaacatggtccgtgcctacaccactgggtccccgggaagccgagaggcccgggacagcctggcagaggccactcgggggcatcgcgagtacacggagagcatgtgtctgctggagagcgagctggaggcacagctgggcgagtttcatctccgaatgaaagggctggctggcttcgccaggctgtgtgtaggcgatcagtatgagatctgcatgaaatatgggcgtcagcgctggaaactacggggccgaattgagggtagtggaaagcaggtgtgggacagttaagaaaccatctttctccctctactcacggaatttctgtctattaaggtgacagaactgaagggcctggccaaccatgtggttgtgggcagtgtctcctgtgagaccaaggacctgtttgccgccctgccccaggttgtggctgtggatatcaatgaccttggtaccatcaagctcagcctggaagtcacatggagccccttcgacaaggatgaccagccctcagctgcttcttctgtcaacaaggcctccacagtcaccaagcgcttctccacctatagccagagcccaccggacacaccctcacttcgggaacaggctttctataacatgctgcgacggcaggaggagctggagaatgggacagcatggtccctgtcatctgaatcttcagacgactcatccagcccacagctctcaggcactgcccgccactcaccagcccctaggcccctggtgcagcagcccgagccccttcccatccaagttgccttccgcaggcctgagacccccagctctgggcccttggatgaggagggggccgtggccccagtcctggcaaatgggcatgcaccctacagtcggactctgagccacatcagtgaggctagtgtagatgctgccttggctgaggcttcagtggaggccgttggcccagaaagcctagcctggggacctagcccacctacacacccagctcccacccatggagagcaccccagtcctgttcctcctgccctggaccctggccactctgccacaagctctaccctcggtacaacaggctctgtccccacatctacagaccctgccccatctgcacacctagactcagttcataagtccacagactctggcccttcagaactgccaggccccactcacaccactacaggctctacctatagtgccattaccactacccacagtgctccaagccccctcactcacactactacaggctccacccacaagcccataatctctacccttactactacaggccctaccctcaatatcataggcccagtccagactaccacaagccccacccacactatgccaagccctacccataccacagcaagccccactcatacttccacaagccccacccatacccccacaagtcccacccacaaaaccagtatgtcacctcccaccactacaagtcctacccccagtggtatgagcctagtccagactgccacaagtcccacccatcctaccacaagccccacccatcccaccacaagccccatccttataaatgtaagcccttccacttctctagaacttgctaccctctccagcccctccaaacactcagaccccaccctcccaggcactgactcccttccctgtagtcccccagtctccaattcctacactcaggcagaccctatggcccccagaactccccacccaagtcctgcccattccagtaggaaacccctcacaagccctgccccagatccctcagagtctacggttcagagtctaagccccactccctcacccccaacccctgcaccccagcattcagacctttgcctggccatggctgtccagaccccagtcccaacggcagccggagggtctggggacaggagcctggaggaggcactgggggccctaatggctgccctggatgactaccgtggccagtttcctgagctgcagggcctggagcaggaggtgacccgcctagaaagtctgctcatgcagagacaaggtctgactcgcagccgggcctccagtctcagcatcactgtggaacatgccttggagagcttcagcttcctcaatgaagacgaagatgaagacaatgatgttcctggggacaggcctccaagcagcccggaggctggggctgaggacagcatagactcacccagtgcccgccccctcagcacggggtgtccagctctggatgctgccttggtccggcacctgtaccactgcagtcgcctcctgctgaaactgggcacatttgggcccctgcgctgccaggaggcatgggccctggagcggctgctgcgggaagcccgagtactggaggcagtatgcgagttcagcaggcggtgggagatcccggccagctctgcccaggaagtggtgcagttctcggcctctcggcctggcttcctgaccttctgggaccagtgcacagagagactcagctgcttcctctgcccggtggagcgggtgcttctcaccttctgcaaccagtatggtgcccgcctctccctgcgccagccaggcttgactgaggctgtgtgtgtgaagttcctggaggatgccctggggcagaagctgcccagaaggccccagccagggcctggagagcagctcacagtcttccagttctggagttttgtggaaaccttggacagccccaccatggaggcctacgtgactgagaccgctgaggaggtgctactggtgcggaatctgaactcggatgatcaggctgttgtgctgaaggccctgagattggcgcccgaggggcgtctgcgaagggacgggctgcgggccctcagctccctgctcgtccatggcaacaacaaggtcatggctgctgtcagcacccagctccggagcctgtcactgggccctaccttccgggagagggccctcctgtgcttcctggaccagctggaggatgaggacgtgcagactcgagtggctggctgcctggccctaggctgcatcaaggctcccgagggcattgagcccctggtgtacctctgccaaactgacacagaagctgtgagggaagctgcccggcaaagcctacagcagtgtggagaagagggacagtctgcccatcgacggctggaggagtccctggacgccctgccccgcatctttgggcctggcagcatggccagcacagcattctaaactattcacccatgggttcctggtgcccctttccccccactttcagggctcaccaggcactggcagggagggtaagggctggctccagatacccctcccccacagattcctagcaatgaaaatctaatatatccttctgttgcccctggggttggagagtcagtgcctgcagtcaagtgcctcccagcctcggctcagcacatcccttgccaaaatcagtgtctggggcttggccaccctgccgctgcccagccacatcccttggttttgtattttatttacagagttttacagaaaataaaaaagcaaaatgtc

SEQ ID NO: 2458 - DNA, 2946 bp, Homo sapiens
ggcacgagggttagaagagacccgagaagccttggcaggacgagcatatgcagctgaacagatggaaggatttgaactgcagaccaagcagctgacccgtgaggtggaggagctgaaaagtgaactgcaggccattcgagatgagaagaatcagccagatccccggctgcaagaacttcaggaagaggctgcccgccttaagagccatttccaggctcagttacagcaggaaatgagaaagacagctcttgcagaggatcaactccgtcagcaatctcaggtagaagaacagagggtggcagccctggagaatcaaatatccgaggtgtctgagctgctaggcacctacgagaaagccaagcagaaggaccagctggccattcagaagctgaaggagcgcattctgcagctggacctggagaacaagacactggctctagcagcctccagcaggtcccctttagacagccatggagaggagtccagtctggatgtcaatgtcctgaaagataagatggagaagctgaagaggctgctgcaggttgcggccaggaaaagccaggtgaccctggatgtggagaagctctgtgacctggagataatgcccagctcggaggctgctgatggggagaaggctactgcactctattaccaacaggagctgaaacagctgaaggaagagtttgagaggtacaagatgagagcccaggttgtcctcaaaagcaagaataccaaagatggtaacctgggaaaggagctggaggcagcccaggaacagcttgcagagctgaaggagaagtatatttccctgcggctctcctgcgaggagctggagcaccaacaccagcaggaggctgatgactggaagcaggagctggcccggctgcagcagctccaccggcaggagctggagcggtgccagctggacttcagggaccgcacactgaaactggaggaggagctgcacaagcagcgggatcgtgccctagctgtgctcaccgagaaggacttggaactggagcaactgcgttctgtggccttggcctctgggctgccaggacgcagaagtcctgtgggtggtggcggtcctggggacccagctgacacatcatcctctgatagcctgacccaagcattacaacttgcagcggccaatgagcccactttctttctgtacgctgagcaactggcccgcaaggaggtggagatcacatcactgaggaagcagaagcacaggctggaggtcgaggtgcatcagctgcaggatcggctgctggaggagggcgaacggcatcgtgaggaggttgcagccctgcagagccacatcgaaaagaacatcagggaccagagcagggagggagccaatctggagtacctcaaaaacatcatctaccgcttcctgaccttacctgactccctgggccgccagcagactctcacagccatactgactatcttgcacttcagtccagaggagaaacaagtgataatgcgactcccaaccagtgccagctggtggccttctggcaagagatgatgccattttcatgaattcctggaatttctgtgcctcttttatgtgggaaagggcaggctctggtttctgctgcctcttctcttacattgtcatttatttcttcactgtgttgagctgggaggagtcttcaatgtgggaagggattttctgccaaatgccattaatgctgctttatccttaggccctagagatactgaaagtcctggggcagtatcttctgatggtgtgcatgtgaggagaagatgaggttaggactgagaagtgcagaagttggaacagtggtaaggctgttttaaaataagatgttttgttttaataatatgctcctggcacaaagctaggagtaaatgtgactccaaagggagttcagttaatctctgaaatgcacaaaacctagctattttctccctctcatcacagtctgagtctggtccattgctaccccaattctctggggacataaaaccaggctggaaagggaccaggaagtttgaaatagtgacatatcatccactagtcccaagggctaaggaatagtgagtttattctggaaggaactgggaagcttagtctaattagtgcctggggatgacctatgcaatcacaccgcttatgaccatcctagagagggccctgagcaccagcttgatcttagggatttccaaagtaacctgctttttgcctggatagggttaaaatagacctttcttgcctatccttgccttaacctatctgcctgaggttggcctgagattgtgagtcaacgactttgctatcttttcctcagtgttgaactttcattaagaaataaagtcctagcttcttacagagaggggtccaaatggtgaatgctcatcctgcctggattcaaggaattagctcagagattggcccctagcttttctgcctttgtagggacagcaaaaggggaaaatttgctgcagaaaattccaaaagattgctgtagctctcacagggaagtggtaaagatcagctaaacctgggttggggtgctttctgcccagtgggtcttggcataagtagattaatcctgctcttttaagaaaaggcaacttattcaggcagtctggaaagggggttctcagaaaactcagtttctttattccttcttttctcccaactactgttactggttatagaggtctttggactctaaagaccaatgtttggccactaactggactaatatgtatctttctgtgatttcatcatagaggtctgttttgtgagggtttggggtgcagaaaactttgattaaatcttaatgggaggctgggtgacctggattatctacagtgagcagacttaaatggaacagaagtttatgtgtccaaatgatggaatcattaaacctgagtgacttgaaaaaaaaaaaaaaaaaaaaaaaa

SEQ ID NO: 2459 - DNA, 2311 bp, Homo sapiens
ggcacgaggctgtcgcgcatgctgctgcaacaactgcgcccccacctggaaggctgccgcaacgacatcgtcagtgcgcgccctgacgagtggctgggtcgctgcattctcgatgccaccggggtgggctgcactggtgaccacgagggggtgcactatagccatctggagctgagccctggggagccagtgcaggagggggaccctcatttccgaagtgccctgacagcccaccctgtgcgtgaccctgtgcacatgtaccagctgcacaaagctttcgcccgagctgaactggaacgcacgtaccaggagatccaggagttacagtgggagatccagaataccagccatctggccgttgatggggaccgggcagctgcttggcccgtgggtattccagcaccatcccgcccggcctcccgctttgaggtgctgcgctgggactacttcacggagcagcatgctttctcctgcgccgatggctcaccccgctgcccactgcgtggggctgaccgggctgatgtggccgatgttctggggacagctctagaggagctgaaccgccgctaccacccggccttgcggctccagaagcagcagctggtgaatggctaccgacgctttgatccggcccggggtatggaatacacgctggacttgcagctggaggcactgaccccccagggaggccgccggcccctcactcgccgagtgcagctgctccggccgctgagccgcgtggagatcttgcctgtgccctatgtcactgaggcctcacgtctcactgtgctgctgcctctagctgcggctgagcgtgacctggcccctggcttcttggaggcctttgccactgcagcactggagcctggtgatgctgcggcagccctgaccctgctgctactgtatgagccgcgccaggcccagcgcgtggcccatgcagatgtcttcgcacctgtcaaggcccatgtggcagagctggagcggcgtttccccggtgcccgggtgccatggctcagtgtgcagacagccgcaccctcaccactacgcctcatggatctactctccaagaagcacccgctggacacactgttcctgctggccgggccagacacggtgctcacgcctgacttcctgaaccgctgccgcatgcatgccatctccggctggcaggccttctttcccatgcatttccaagccttccacccagctgtggccccaccacaagggcctgggcccccagagctgggccgtgacactggccgctttgatcgccaggcagccagcgaggcctgcttctacaactccgactacgtggcagcccgtgggcgcctggcggcagcctcagaacaagaagaggagctgctggagagcctggatgtgtacgagctgttcctccacttctccagtctgcatgtgctgcgggcggtggagccggcgctgctgcagcgctaccgggcccagacgtgcagcgcgaggctcagtgaggacctgtaccaccgctgcctccagagcgtgcttgagggcctcggctcccgaacccagctggccatgctactctttgaacaggagcagggcaacagcacctgaccccaccctgtccccgtgggccgtggcatggccacaccccaccccacttctcccccaaaaccagagccacctgccagcctcgctgggcagggctggccgtagccagaccccaagctggcccactggtcccctctctggctctgtgggtccctgggctctggacaagcactgggggacgtgcccccagagccacccacttctcatcccaaacccagtttcccttttccatttgaaagaaaggactctggggtttttactgttacctgatcaatgacagagccttctgaggacattccaagacagtatacagtcctgtggtctccttggaaatccgtctagttaacatttcaagggcaataccgtgttggttttgactggatattcatataaactttttaaagagttgagtgatagagctaacccttatctgtaagttttgaatttatattgtttcatcccatgtacaaaaccattttttcctacaaatagtttgggttttgttgttgtttcttttttttgttttgtttttgtttttttttttttttgcgttcgtggggttgtaaaagaaaagaaagcagaatgttttatcatggtttttgcttcagcggctttaggacaaattaaaagtcaactctggtgccaaaaaaaaaaaaaaaaaaaaaaaaaaaaaaaaaaaaaaaaaaaaaaaaaaaaaaaaaaaaaaaaaaaaaaaaaaaaaaaaaaa

SEQ ID NO: 2460 - DNA, 951 bp, Homo sapiens
atgtgctgaaaatccgaagtgccgcggaaagtggaggtgagggccgcccgccctagaggtgcccgtccgagaggcagagctgacaaggaaggtttcgagcgttttgctggcaaagggatttcttacaacctccaggcatgcgtctttctgccctgctggccttggcatccaaggtcactctgcccccccattaccgctatgggatgagccccccaggctctgttgcagacaagaggaagaaccccccatggatcaggcggcgcccagtggttgtggaacccatctctgatgaagactggtatctgttctgtggggacacggtggagatcctagaaggcaaggatgccgggaagcagggcaaagtggttcaagttatccggcagcgaaactgggtggtcgtgggagggctgaacacacattaccgctacattggcaagaccatggattaccggggaaccatggtccctagtgaagcccccttgctccaccgccatgtcaaacttgtggatcctatggacaggaaacccactgagatcgactggagatttactgaagcaggacagcgggtaagagtctccacacgatcagggagaattatccctaaacccgaatttcccagagctgatggcatcgtccctgaaacgtggattgatggccccaaagacacatcagtggaagatgctttagaaagaacctatgtgccctgtctaaagacactgcaggaggaggtgatggaggccatggggatcaaggagacccggaaatacaagaaggtctattggtattgagcctggggcagagcagctcctccccaacttctgtcccagccttgaaggctgaggcacttctttttcagatgccaataaagagcactttatgagtcaaaaaaaaaaaaaaaaaaaaaaaaaaaaaaaaaaaaaaaaaaaaaaaaaaaaaaaaaaaaaaaaaaaa

SEQ ID NO: 2461 - DNA, 1704 bp, Homo sapiens
ggcacgagggagagatcgtccaggaggcggtgttgatgcggcaaagggcaacaggaagggcattaggacttgaaatcggagacgcacgcaggggagggagtcagtgtcggaacctggtaggccctgggagaactccggcttttcgtctgcgtgagctggagaagagccgaaggtttctgcgcacagcacggacctgcgtgcctcagctttaaggaaatcaccgtggccgccgctgtgaacgcagagaagggcgcgagcgtgggagcaggaacccaaggcggtgggaaacggtggggctttctgagtgtattggaaagtagagcccacagatctgctgcagaccagaaaggggcgcgagaaagagcggacagaggcagacgccggggctggcggcgatggagcagcagtcggaggacgcggaaggcctgcgagagtcgcccgcggcccagcgccggccttcgggtcccaccttgcgggtgatgttgtgcacgtaggggcacgtgttgcaggcgaagcggtggcagcgttgtccctcctccacgatcagcccgttcccgcagccggggcagaacagcagcatggtctcgaactccgcaggctccaactcccggcagctcccactgccgctcagcgccgatgcgccgcccgcctcgagctcacattggtcctggcagccttcccgccacaccaaccaaccaatagacagggcgattctgcgctcccggccctgctgcaggctgtctcgcacttgtcattggtcactgcagccgccccaccccccccggcgcgccagtggctgggcggcctcgctggggcgggccgcagttcctgcgcgtgcgcgcttggcctccctagtgcgggctggcagtgcgggcagagcccggctgagaggggcggccctggaggagacggaggccgcgggtgggcccgaggcgcaagaggaagatgaggacgaagaagaggcgctgccgcactccgaggccatggacgtgttccaggagggtctggctatggtggtgcaggacccgctgctctgcgatctgccgatccaggttactctggaagaagtcaactcccaaatagccctagaatacggccaggcaatgacggtccgagtgtgcaagatggatggagaagtaatgcccgtggttgtagtgcagagtgccacagtcctggacctgaagaaggccatccagagatacgtgcagctcaagcaggagcgtgaagggggcattcagcacatcagctggtcctacgtgtggaggacgtaccatctgacctctgcaggagagaaactcacggaagacagaaagaagctccgagactacggcatccggaatcgagacgaggtttccttcatcaaaaagctgaggcaaaagtgagcctccagacaggacaaccctcttcatcactggtggctgagctttttcccagcaggaatgggtcctcgaatcatcgtgcctctttcacagaaaggacgttgtggtggcctcaccccaggcatgcccaacagtaactgtcagcataaacctgggggccctcaggactaggacagggtgagccagtgctccctcctttcatgtacttggcctgagactgacctctccctaggtccaaatgccctagtcacatggcagacccacggcctggcccactgtataaaataaacctgtttgcttcttaaaaaaaaaaaaaaaaaaaaaa

SEQ ID NO: 2462 - DNA, 2005 bp, Homo sapiens
acaatgatgttgagtattttatatcgtctagttccccatccggtttatatcagttggatcttctttcaacagagaaagacacacatttcaaagtatatgccaccacaactccagaatctgatcagccataccctgagttaccctatgacccaagagtagatgtgacctcactggggcgcaccacggtcactttggcctggaaaccaagccccactgcctctttgctgaaacaacccattcagtactgtgtggtcatcaacaaagagcacaatttcaaaagtctctgtgcagtggaagcaaaactgagtgcagatgatgcttttatgatggcaccgaaacctggtctggacttcagcccctttgactttgcccactttggatttccttctgataattcaggtaaagaacgcagtttccaggcaaagccttctccaaaactggggcgtcatgtctactccaggcccaaggttgatattcagaaaatctgcataggaaacaagaacatcttcaccgtctctgatctgaaacccgacacgcagtactactttgatgtatttgtggtcaacatcaacagcaacatgagcaccgcttatgtaggtacctttgccaggaccaaggaagaagccaaacagaagacagtcgagctaaaagatgggaagataacagatgtatttgttaaaaggaagggagcaaagtttctacaggtttgctccagtctcttctcaccaaaaagtcaccttctttattcactcttgtctggatgctgtccaaatccaagtgagaagagatgggaaacttcttctgtctcagaatgtggaaggcattcagcagtttcagcttagaggaaaacctaaagctaaatacctcgttcgactgaaaggaaacaagaaaggagcatctatgttgaaaattctagcctaccacaaggcctactaagcagtcatttccctctcttcctgaagacacaagaatcaaagcctttgacaagctccgtacctgttcctcagccaccgtggcttggctaggcactcaggaaaggaacaagttttgcatctacaaaaaagaagtggatgataactacaatgaagaccagaagaaaagagagcaaaaccaatgtctaggaccagatataaggaagaagtcagaaaaggtcctctgtaaatatttccacagtcaaaacctgcagaaagcagtgaccacagaaacaattaaaggtcttcagcctggcaaatcttacctgctggatgtttatgtcataggacatggggggcactctgtaaagtatcagagtaaggttgtgaaaactagaaagttctgttagttaccttcttatagagatatattatgtagaactccaggagggacattaaatcactttaagtataaactgactactcccacagttgagagaagttgtgacctgtacttgtactatggaaggaaggatatcaacgtgtgtatattgatgtttatataagtaactcttgaaggagacttgttctagcgtgccccatggtacctagtgtgtgtctgatgccggttggtgtcaaagatagagggcttcttgaaggaacttgccattccttgctttgaccactgcatgaactgcttctaaattattttattacctaaaaatttaaaatatgccattcattgcacacacccacaaatgcaaatcattcctctctgtagatgctaggatatatataaattattttataaattcttgttttaaatgtcagtgtttctatgattgtaaactattaaattcttttcctattaaagtacagatctaatctaagtattattaagttgatagccctctagtcagttatattgctattgtaaattcttgtttgttgagtaaaatgtttaaatactatatgtatctcatgtacaaagttgacatacattatattcatgtacataaaattaaagagattagattatatactgaaaaaaaaaaaaaaaaaaaaaaaaaaaaaaaaaaaaaaaaaaaaaaaaa

SEQ ID NO: 2463 - DNA, 1871 bp, Homo sapiens
agcccgttggcctactggagtgtgtaaggaacttgtgcacatcactgactggtaccccactctcatttcactggctgaaggagagattgatgaggacattcaactagatggctatgatatctgggagaccataagtgagggtcttcgctcaccccgagtagatattttgcataacattgaccccatatacaccaaggcaaaaaatggctcctgggcagcaggctatgggatctggaacactgcaatccagtcagccatcagagtgcagcactgggagattgcttacaggaaatcctggctacagcgactgggtcccccctcagtctttcagcaacctgggaccgaaccggtggcgcaatgaacggatcaccttgtcaactggcaaaagtgtatggcttttcaacatcacagccgacccatatgagagggtggacctatctaacaggtatccaggaatcgtgaagaagctcctacggaggctctcacagttcaacaaaactgcagtgccggtcaggtatccccccaaagaccccagaagtaaccctaggctcaatggaggggtctggggaccatggtataaagaggaaaccaagaaaaagaagccaagcaaaaatcaggctgagaaaaagcaaaagaaaagcaaaaaaaagaagaagaaacagcagaaagcagtctcaggttcaacttgccattcaggtgttacttgtggataagcacaaatatttcctgtttggttaaactttaatcagttcttatctttcatctgtttcctaggtaaaccagcaaatttggctcgataatatcgctggcctaagcgtcaggcttgttttcatgctgtgccactccagagacttctgccacctggccgccacactgaaaactgtcctgctcagtgccaaggtgctactcttgcaagccacacttagagagagtggagatgtttatttctctcgctcctttagaaaacgtggtgagtcctgagttccactgctgtgcttcagtcaactgaccaaacactgctttgaattataggaggagaacaataacctaccatccgcaagcatgctaatttgatggaagttacagggtagcatgattaaaactacctttgataaattacagtcaaagattgtgtcacctcaaaggccttgaagaatatattttcttggtgaatttttgtatgtctgtcatatgacacttgggttttttaattaattctattttatatatataaatatatgtttcttttcctgtgaaaagctgtttttctcacatgtgaacagcttgcacctcattttaccatgcgtgagggaatggcaaataagaatgtttgagcacactgcccacaatgaatgtaactattttctaaacactttactagaagaacatttcagtataaaaaacctaatttatttttacagaaaaatattttgttgtttttataaaaagttatgcaaatgacttttatttttatttcctgcataccattagaagaattttatttcatttcttcaaattatcaagcactgtaatacctataaattaatgtaatactgtgtgaattcagactattaaaaacatcattcagaaaactttataatcgtcattgttcaatcaagattttgaatgtaataagatgaatatattccttacaaattacttggaaattcaatgtttgtgcagagttgagacaactttattgtttctatcataaactatttatgtatcttaattattaaaatgatttactttatggcactagaaaatttactgtggcttttctgatctaacttctagctaaaattgtatcattggccctaaaaaataaaaatctttactaataggcaaaaaaaaaaaaaaaaaaaaaaaaa

SEQ ID NO: 2464 - DNA, 1386 bp, Homo sapiens
tatgctttgttggaagatttttcggacgccgcccgatactacattccctgagcccacctgcctgtcagcatcacccccaaatgcgccaccaaggcagtcgaagagacaaggccagagaaccaagaggcccgtggccgtctacaatctttgtctggagctggaagatggtgacaatccttacccttccaaggaggacacccctaccagcagtctggactcactttcctccccgtctcccgtgactacagctgtccctgggcctcctggaccagacaaaaaccaccttctggcagatggagggagctttggagactgggcatccactatcccaggccagacccgatcgtctatggtccagtggcttaacccacagtctccaaccacaacaagctccaactcagctgtgacacctctttcacccgggtcgtcccctttccccttttctcctcctgctactgtagcggacaagccacctgaaagcatccgcagtcggaaggctcgagccgtgtatccgtgtgaagcagaacacagctcggaattatcttttgaaataggagcaatttttgaggatgtacaaacctccagggaacctggctggctagaagggactctgaacggcaagagggggctgattccacagaactacgtcaagctgctgtagctcctggcctcagagcccctgctgaccctggcacccagggacctgcctgggggcagagagctgtcttcctcctccgaggctctgggctgcacccacaggtacctccacacttgggagttaccatcatcacagtcagccctgggggtggggggtggtgggcagggatgggacgcaccacacagaactgtgattgtggatcaggaggggaatgtcaggattcgcaaaatggacttttcatttgtcaagtattgggacttgtgatttttaattatccagcatatagaatgagagggagggcagccttctgccacctgtgtcgcctccactggcagtcacgccaccagagccaccctggctccctctcctccctgagcacctgctgctgcgattttaaagggaactgtactactcgcagtgataggtttgcagagtgtgtgcttggctgtggcagcctagcttggagaacgctgctgttggtgcaagggagatggtctcaagtcagagggaagcagagacgcgcgtctcaagcctgcccttcctagacggccacctgcaggaccccacactcactgcactggcagggtgcaatggggtatttgtaacaggcttttcggtgctcctcacccgtgtgctgttttccaaacaccacctttttgcctcaaggtctctgtaaatgaaataaactgtaattttctaaaaaaaaaaaaaaaaaaaaaaaaaaaaaa

SEQ ID NO: 2465 - DNA, 2140 bp, Homo sapiens
aactcattgatgaagacctgtgcttgggcaaagctaagaaacaagaacaaactgttgaggagaagaagaagatgcctatggaaaatgagaaccaccaggtattcagtaatccaccaaagatccttactgttcaagaaatggctggattgaataacaagacaattggatatgagggaattcatagccctagtgtgcttccttctggtggagaagaaagcagatcaccatctcttcaacttaagcctctggattccagtgttttacagttttccagtaagtacaaatggatcctaggtgaagaaccggtggagaaacgaagaaggctccagaatgagatgacaacaccttctctagattattccatgcctgctccttacaggagggtagaagcacctgttgcctacccagaaggggagaacagccatgataaatcgagttctgagagaagtacaccaccataccttttcccagaatacccagaagcaagcaagaatacaggtcagaatagggaggtttcaattctgtatccaggggccaaagaccaacgccaggggtccctgcttcctgaagaattagaagatcagatgccaagattggtggcagaagaatctaacagaggtagcacaaccataaacaaagaagaagtcaacaagggaccttttgtagctgttgtgggtgttgccaaaggtgttagagattcaggagctcccattcagctgatcccttttaacagagaggagcttgctgagagacgaaaagcagttgaatcctggaacccagtgccttattctgtggcctctgctgcaatccctgctgcagccattggggagaaagcaagaggctatgaggagagcgaaggtcataatacaccaaagttgaagaaccagagagagctggaagaattgaagagaaccacagaaaaattggaacgtgttttggctgaaaggaatttgttccagcaaaaggtggaggagctggaacaggagaggaatcactggcagtctgaattcaagaaagtccaacatgaattggtgatctacagtacccaggaggcggaaggcttgtactggagcaagaaacacatgggttatcgccaagctgaattccagattctgaaagctgagctggaaagaaccaaagaggaaaagcaagagttaaaagagaaactgaaggaaacagagacacacctggaaatgctgcagaaggctcaggtctcctaccggaccccagagggagatgacctagaaagggctttggcaaagcttacgcggctacgtatccacgtcagctatctccttacttctgtcctccctcacttggagcttcgtgagatcgggtatgactcagaacaagtggatgggatcctgtacacggtgctggaggcaaatcacatactggattgagcaccagactgtatacccttctcttctcttatcttctgtctgttctcttttctctccctccctcacgtctctctctctctctctctctctctctctctctcaccctcacctttatgccttatatagagaatctctgtgtaaatcctggctcataatcagtctcctttttatcagttttggtgtggagaaagaggccagtttaaataggctttcaagagtctagggtcagagaagcaatagtcactaagctaggtgacctgaaagctttaattttcatgacctggatatgtggtctattgtatatctttttctgaaatggtttgtattcatttaggttagatcaatcagcagatattgggtccggtataccaggtattattttggggtaagctaacaagtacaactcatgtttgcagccttcgaagatgtaacaatctcgttggaaacataagacatacatcacattatacacaaaagtgtatgatatgtacaactgagtggtacagatatgacatggaagatctgggggaggaagttcaaggaaggcaccacaccagaaatgggacctaaattaaggcttaaagaatgagcatggccacactgtcagtgagtgttctttaggtggtaggactatggttgatatttttcttcttcctatcttcctgcctttttcagattttcaatattaaacttgttattcttacattggaaaaaaataaattgtttttaaaaagatc

SEQ ID NO: 2466 - DNA, 1378 bp, Homo sapiens
agacgattggtcgggccacgccagcccaggcccaagccagcccggagagaaaagacctgaggaggtggccctggggctgcaccaccgcctcccagcactgggaagagccctggggcacagcattcagcaacgagcgacctccacagccaagacttggtgggacagatatgaagagtttgttggactcaacgaggttcgagaggcccagggaaaggtgacagaggctgagaaagtgttcatggtggctcgagggcttgtccgagaggctcgggaggacttggaagttcaccaggccaagctgaaggaggtgagggaccgcttggaccgtgtctccagggaggacagtcagtacttggaactggctactctcgagcacaggatgctgcaggaggagaagaggcttcgcacagcctatctgcgtgcagaagactctgagcgagagaagttctccctcttctctgcagctgtgcgggaaagtcatgagaaggagcgcacaagggctgagaggaccaagaactggtccctcattggctcagtcctgggggccctgattggtgtggctggctccacctatgtgaaccgtgtgcgactacaggagctgaaggctttactcctggaggcgcagaaggggcctgtgagtctccaagaggccattcgagaacaggcgtctagctactcccgccagcagagggacctccacaatctcatggtggacctgaggggcctggtacatgctgctgggccagggcaggactctgggtcacaggcaggtagtcccccgaccagagacagagatgtagatgtcctttcagctgccttgaaagagcagcttagtcattccaggcaagtccattcatgtctagaaggcttacgagagcagcttgatggcctagaaaagacttgtagccaaatggctggggtggttcagcttgtaaagtctgcagcacacccaggcctggtggaaccagcagacggggctatgcccagcttcttgctggagcaggggagcatgatcttggcactgtcagacacggagcagagactagaagcccaagtcaacaggaacaccatctatagcaccctggtcacctgtgtgacatttgtggccacactgcctgtgctctacatgctattcaaagccagctaacccctggcccctcctccagagggtctgaggcaatagctgtgaatgtggatttaagtagagaatcgtagcaatgaagcgagcctttgggggcatgtacaacctcaatctgaaggagcagtatctgtgtggctcaccagcaggcatgcttcgctttgtagacaaggttcatttacattaattatcaaaactttgtgctaatgtccaattaaaatatcctgagttttattattt

SEQ ID NO: 2467 - DNA, 2738 bp, Homo sapiens
gtcacgtgtcccccccgcggggggcggcccttgagggcggcgcttccggtcggcggagcctggtggccgcagcggcggtggcgacgacggccgagacgtggggatggcgggcgccgggagcgaagcccggttcgccgggctgtcgctggtgcagctcaacgagctgctggaggacgagggccagctgacggagatggtgcagaagatggaggagacacagaatgttcagcttaacaaagaaatgacacttgccagcaaccggagcctggcagaaggaaaccttttgtaccagccccagctggacacgttgaaagcacgcttgacccagaaataccaggaactccaggttctctttgaagcctatcagataaagaagaccaaattagacagacagtctagcagtgcttccttggagaccctgttagcacttcttcaggcagaaggggccaagattgaggaagacactgagaacatggcagagaagtttctggatggagaacttcctctggattccttcattgatgtctatcagagcaaacggaaactggcccacatgcgacgggtgaaaatcgagaagctccaggagatggtcctaaaggggcagagactcccacaggccctggccccgctgccccccaggctgcccgaactggcacctaccgccccccttccctaccctgccccagaggccagtgggcctcctgccgttgcacctcggcgcatcccccccccaccacccccggtgcctgcgggacgcttagccaccccgtttactgcggccatgagttcgggacaggccgtgccgtacccaggattacagtgcccgcccctgcccccccgcgtgggcctccccactcagcaaggattctcttcgcagttcgtgtccccatatccgccacctctccctcagagacccccgccccggctccctccacaccagccgggtttcatcctccagtgagcgccggcgcggtccttcccgggagacttcttccacctggcgtgttgtgctctgctcacgggaaggaggctggaggtccgctctgtgccaagggctctggggccctgggccagcgtgtctgtctgattttagaactgtaggtcagtggtgagtagtaggagcccaggctttgggcatcaaggcagttgtgtgtgccgggttacagcctgacacctgtgcgttgcatcggtttgcattatccgtgtgatttctaagtatcttagcgttgatgaactcatgtttgggaagaaataggcctctcccccagtcccatttagaatcgtggtccttctgttgcagctttatttaatgagcatggttcatgatacttattttattttcgaaagacagtcctatgtgtctcacccaccggccactgcagccctggtgagggcgggtgggcgccggccggcctggaagagcgccgtggctgggccaccacctgtggctgcgttgttgctcactgaatctgttggggagaggtcaccatagtcaccgcctgacctggctgctgctcttgcttcagagccacaagcaaagtttgcactgggcccactgccgagtccagaggccggagaacggccactggtgtgggaggggagcgcacgagtgggactttgcacagcaaattgtgtccccagctcctcctctcccgcctgcctggagccggccctgaaggtttctatgaagaaataatcccccaatatttttactacgtgtgtgattttcctgttttatattgaaaaaacttttttgacactcccaagaccattcagggaaattttataaaaaatgcagatactgtcttgagcagatcgaaatgccgatgaagtggatgcaatttccttttgtgcaagcagtgcacggtgcccccccctcgggtgtccgtgctgtgccttagcttccccaggtgccgggactcacacctgctaggggctgggcaaggccccggctctgctttctctgaagggcttgtccaagttcattgccctgttacaggtggtcaagacgtccggccgccttgacccaggctacccttagccaatatcctctgcccctgggtggctggtggctgggcctcagggtgggcaacgttaggggtttggcgaaagcccgccccatgggattgagggacggggctgcactccaaccgtctgcacctgctcttcccccacccctgtgggacctcatcttcacgtgccatgtgtgctgaaggcccagggcccagcagggggcagtggcacctgttgacggaaaaggccgaggtgcttaccagtggaccttctggcccgcccctcccctgtcacttgtcgggcatccagggccccgacctgtgcctagccgccagggtgacagaaggcagaactgaagcggggtctgggccacgggccaggccactgccttttgtcctcagtgaccatacattcctgctctcggacttgaactctactgtaactgttttcttgaaatgaagctgtacaggacgattcactgccatgccagtcaggcgggcttgccatgttctgtgaatctcgagtgagcggtgccacccgcccccatacctccgccaccggccgctgtcggggatgccacagcctgccacggtcgcagccagacgtgagcttggcattgaagttgcaaagcggcccctggccgggctcgccgtcgctgtccagggccgtgtccggtgctgtggctgtaaagctgtaggaccctttttaataaatagagaattatt

SEQ ID NO: 2468 - DNA, 2236 bp, Homo sapiens
cccttctgaaaaatggtttcacccgctccgtctctagaacgggtcgggccgctaccactgtccggcccggaggggaactgttttctccggaagtgacaacacgctgactaggaaaaggaggaggcggggcagtggggccttcggcggcgactatggaaggagccggctacagggtggtgtttgagaagggcggagtgtacctgcacaccagcgctaagaagtatcaggaccgagactctctcatcgctggtgtcatccgtgtcgtggaaaaggacaatgacgtcctcctgcactgggctcctgtagaggaggctggagattccacccaaatcctcttctccaagaaggactccagtgggggtgactcatgtgcttctgaggaggaaccaacctttgaccccggctatgaacctgactgggctgtcatcagcactgtgcggccacagccctgccactcagagcccacgagaggtgcagagcccagctgcccccagggctcctgggccttctcagtgagtctgggggagctaaagtccatccgccgctccaagccaggcctcagctgggcctacctggttctggtgacccaggctggaggttccctgcccgcactgcacttccaccgcgggggcacccgcgccctgctccgcgtcctcagccgctacctgctgttggccagctccccgcaggactcccgcctctaccttgtcttcccccacgactcctctgctctctccaactccttccaccacctgcagctctttgaccaggacagctccaatgtggtgtcacgcttcctccaggatccctactccaccaccttcagcagcttctcccgagtgaccaacttcttccggggtgccctgcagccacagcctgagggagccgcctccgaccttcccccgccacccgacgatgagcccgagcctggattcgaggtcatttcctgtgtggagctggggcctcggccaaccgtggagcggggccctccagttacagaggaggagtgggcacgccacgtgggccctgaaggtcgcctgcagcaggtccctgagctgaagaaccggatcttctcggggggtctgagccccagcctgcggcgcgaggcctggaagttcctcctagggtacctcagctgggaaggcacagctgaggagcacaaggcccacatacgcaagaaaacggatgagtatttccgcatgaagctgcagtggaaatctgtgagccctgagcaggagcggagaaactcacttctgcatggataccgcagcctcatcgaaagggatgtgagccgcactgacaggaccaacaagttctacgagggtcccgagaacccggggctgggcctgctgaacgatatcctcctcacctactgcatgtatcacttcgacctcggctacgtccagggcatgagtgatcttctctccccgatcctctacgtcattcagaacgaggtggatgctttctggtgtttctgtggcttcatggagctcgtgcaagggaactttgaagagagccaggagaccatgaagcggcaactcgggcgactgctgctgctcctgagggtgctggaccccctgctctgcgacttcctggattcccaggactccggctctctctgcttctgtttccggtggctgctcatctggttcaagagggaattccccttcccggatgtccttcggctgtgggaggtgctgtggacagggctccctggccccaatctgcacctgctggtggcctgcgccatcctggacatggagagggacaccctcatgctgtccggcttcggctccaatgagatcctcaagcacatcaacgagctgactatgaagctgagcgtggaggacgtgctgacccgcgccgaggccctgcaccgccagctaaccgcctgccccgagctgccccacaacgtgcaggagatcctggggctggccccgcccgcagagccccacagcccctcgcccaccgcctccccgctgcctctgtcgcccacccgggccccgcccaccccgccgccctccacggacacagccccgcagcccgacagcagcctggagatcctgcccgaggaggaggacgagggcgccgactcctaaccccgccaggcagcctcgttctgcacaggcactttagcccgagccaggcacacctgcgagggggcaggtgtgctccgccgccctgctgataagctggcttcattaaactgacacttctcaaaaaaaaaaaaaaaaaa

SEQ ID NO: 2469 - DNA, 2507 bp, Homo sapiens
cagatcctgaattccagcaaaacagccgacaccaaccagtttgaagacccccacagaggaatgtgatcagcatgaaaatacagcttcgtctccctctcccatgactccaccctgcacacttcgaccaatcaaccatctccacactccagtctccactcccaaacccttaaaaaccccagccccaaactcctcagggagatggatttgacgtttcctcccatttcctccttcggtggccctacgatgaaacctctttctctgctacaaccctatgcctcggcgtattcactttctggtcccatccagcgatggacccatcgtggttaccgtggctggccaagcctgctgtgcttcacagaccccactcaggatcacaccacttcgttccactgtttggagatgccatgtttgcttatcccttcatcagctgatgagcatttgtgctgttttcactttttggctattacgaaaatgttgctacgagcatccatgatattcgcccatttaaaaaagtgtttttcaccattactgctgtgggaaatttctccctggctctgtcctttctttgtagcccagccttcccccaggttttggctctccctctctggctcaatgtcagctccttgtctcacctcctagagcaattccactctcccacctcctgctgcggcatttccaaagcctctgcttagcaagggaccacccattctgcacctctccccttagggctgcaagcacctgcacaaacttggtggttatcctatgcctcaactcaatcaaattctctcagttttccatcagcaatctttttaagccaaagggaaggcaaggacttgatcttcacatcacatgaatcatgacacctgccttagaaggcagaagcaactgtagttggaatagcaattgtttttcaacatatgggatgatatcaaggctctttcctccccatatgtcctgccctgttagtggctggggctgagggttttcccaggaagccagattgtcctcacaagttcctcaggaccctagggcttccacagatagtaggactgttatcagaaagaagtctcgatccagacgccgagagagggttcttggatatcgcccaagaaagaattcagggggagtccatagagtgaagtgaaagcaagtttgttaagaaaacaaaggagtaaagaatggctactccataggcagagcagctccgagggctgctggttgcccatttttttttttttttttctttgagatggagtctggctctgtcgcccaggctggagtgcggtggcacaatctcggctcactgcaagctccgcctcccgggttcacgccattctcctgcctcagcctcccgagtagctgggactacaggcgcccgccaccatgcccggctaattttttgtatttttagtagagatgaggtttcacatgttagccaggatggtctcgatctcctgacctcgtgatccacccgcctcggcctcccaaagtgctgggatgacaggcgtgactcgtgatccacccgcctcggcctcccaaagtgctgggattacaggcgtgagtcaccacgccgggccggttgcccatttttatgattatttcttgattatatgctaaacaagagctggattattcatgagggaaaggggtgggcaattcctggaacggagggttcctcccccttttagaccgtgtaggataacttcttgacattgccctggcatttgtaaactgtcatggcgcaggtgggagtgtctcttagcatgctaatgcattataattagcatataatgagcagtgaggtcgaccagaggccactctcatcaccattttgggtttggtgggttttggccacttatctactgcaacctgttttatcagtaaggtctttatgacctgtatcttgtggtgacctcctgtctcatcctgtgacttagaatgcctaacaggctggggacgcagcccagcagatctcagcctcattttactcagcccctcatcactctgattcaaatgcctctgacatgaccacgcagatttgagaaacaggccctcagccaaccagactctggctctacgacacacttaatactgtgaaaagaagattacgggtcatagtcacaaataccaggggtgcaaaacttcagattagaagacacttgtcagactcagaggctcatccaactccacggagatcattatcaccacaagttcttcagacaggtgtggaggttttctaagggatatttttattttctggattgcaattttgtttaggaagagatgaaagtgaggatcaactactttgaggattgtacaactttgtaaattgcacaaatatgacggcatatttatatctgcctgcatttgtgaaaacaaacttgtcaaggagcttatttctggaaagggtcaatgattctagaaaaaaaaaaaagataaatatgagacccttcagtaaaaagaaaaaaaaaaaaaaaaaaaaaaaaaaaaaaaaaaaaaaaaaaaaa

SEQ ID NO: 2470 - DNA, 2806 bp, Homo sapiens
tttacagtgattgaacattcagatggaagaccagacacacaagtacctcgggacatccatcaccagcatcaaatcaaagtgaaacccaggaggagagcctccatcctgtcttcatcctcaagtggaaattaatagcagagtacaaattgttgctagtgtatcagttcttaagatgtgtgaaatggcattgccaccatctttatttagattattggtttccttgttctatttcagtaaacttgaaaacatctctgtgggttttcacacgtccaagtccaatcacagtcttctagcacaatttttccagtaaagttttaaggtcttcaagtattaaaattcaagtatattttagcgacctaaccccacaggtggggaaggactattctggcaaagcctaaaggaaaattccagctggtgacattgacaacgccgggtgagctgccaacagcaacagcagagagatttgtcccctggcttgggcctggaccacaatgccagccctcagggaggggaaccagcaccagagagacaacaggggcaccagccaggtcactgggcaggagcaaggcagagcccccgggaaaggaatgatactggccattctagccccacgtgtgttagatatcggagtgcgggcacctcatggagtgtggaccaactcagggaacaggatgggagacagtcatcccagaaaggagctgaggtctacaaggcacttcacttctcaggacaggattattctgggtagtgggatgagtctgagccagcaggccttgaggttatggggtcaggagaaggggagctgggcaggaggaggcagagaaagagaagcgtggctgggctgtctgtggccttacaaaatagccaagagtcttaaaaaaggcatttctgtattcgaaaatgagcggtttataactgatgagtacagcagcacttcctgaaggtggaatggtgtatgctgttggtggatagggaagttagtcattaaacttcagccagaaagcagagtggcatcacatcttcatgcctgcacagtagctttctagactaaatggcattccacaacagtgctgcgacccgtggggcatgcaagcctcagtgagcagggggacactttggtgtcccactggcctcggtccagtgaagtcagtggagtccttccctttagaacgagcgttgggttgagaacatgggtttctacatcttccctcctgggaatggtttggtgtttgatcaaatgtgggtgcaccctgcctgccactttacaagctgggtgctctcctcaagtatggctttagttccttcttttctcctacttcccatttgacttcctttcttctttcaggctttctttaccttcatgtcatttgttcaagaaacaagtgataataagaaagatgtagtagggatagagggaggagtaagtcagctgctctgtccccagggactcacagttcagtgcagtgggtgagagacgagtcagtaagcattcattcattagtaagcagcaatcttccagaagtggcgtgaactgtcaggagttctagataaaacgctgagtgtgttcggggaggaagagatggctgctgagcaaggggatcagggaagacttcgtggaggagaaagtaccaacacctctgcagtgcctgcttcttacctggccctaagccgggcgcttcccttgtggtgtattgtgaggtcctaccgacaaccctgagaagtggctggtacaacccccattctacagaggaggaagccggggctctttctttctgtaactcctttgtgctaccaacttactgctcttttgtaaattcttaaaaagacctagcgatgaaccacagagccttcaggaaccctacctgccatgaccaccacccataccgcccgtggaaaaatcatggagtttagagatagactcggcttgaatctcagctgcctgccacttactggaagtgagaccaagaagtctctctttcctctctgtgcctctctgtaaaatgggggatgatagtcaacaacatatttgtaaggattaagtgaaataacgggtatggcagaatctagcatgatgccttgaaataaatatttacttacttttccctaaattcccctaaaattatatgctggcttttaattttccccatgctactataatcatgttctggtaaaaatggagagatttactatttaaaattgcttaggatgatctcagacagtgactgaaatggttgtgattaggatggttaggagcatgatgactttgatgtaacctcattctcattaaggtgtttatgtctctgcaaaggctgacagattctgtggccaaggctcccactgtttatccattattcattgattctttttttctttatagaagagctaccagatggtgttcttgaatctgatgatgatgaagatgaagatgatgaagaggaccatgacatcatggaagccgatttggacaaagacgaactgatccagccccagctcggagaactctcaggagagaagcttttgaccacggagtacctggggatcatgaccaacacggggaagccaaggcggaaggggctggctaatgtgcagtggagcggggatgagcccctgcaaaggcccgtcacccccggcggccacagaaacgggtacccagtgtaagtcagggctaaaggaagcgggaattgactttcttaagctttgttttgattacagtgtaagatgtatgtatttttaaaattcaaaataaagcattcattttgaaaagcaaaaaaaaaaaaaaaaaaaaaaaaaaaaaaaaaaaaaaaaa

SEQ ID NO: 2471 - DNA, 1832 bp, Homo sapiens
ggcacgaggcctgggcgggccctgcgtcaggttgcagtttcacttttagctctgggcacctccagctcctgctcgccggacggctcccagggagagcagacgcgccagacgcgccaccctcggggcgccgacggtcacggagcatggggtcggcctttgagcgggtagtccggagagtggtccaggagctggaccatggtggggagttcatccctgtgaccagcctgcagagctccactggcttccagccctactgcctggtggttaggaagccctcaagctcatggttctggaaaccccgttataagtgtgtcaacctgtctatcaaggacatcctggagccggatgccgcggaaccagacgtgcagcgtggcaggagcttccacttctacgatgccatggatgggcagatacagggcagcgtggagctggcagccccaggacaggcaaagatcgcaggcggggccgcggtgtctgacagctccagcacctcaatgaatgtgtactcgctgagtgtggaccctaacacctggcagactctgctccatgagaggcacctgcggcagccagaacacaaagtcctgcagcagctgcgcagccgcggggacaacgtgtacgtggtgactgaggtgctacagacacagaaggaggtggaagtcacgcgcacccacaagcgggagggctcgggccggttttccctgcccggagccacgtgcttgcagggtgagggccagggccatctgagccagaagaagacggtcaccatcccctcaggcagcaccctcgcattccgggtggcccagctggttattgactctgacttggacgtccttctcttcccggataagaagcagaggaccttccagccacccgcgacaggccacaagcgttccacgagcgaaggcgcctggccacagctgccctctggcctctccatgatgaggtgcctccacaacttcctgacagatggggtccctgcggagggggcgttcactgaagacttccagggcctacgggcagaggtggagaccatctccaaggaactggagcttttggacagagagctgtgccagctgctgctggagggcctggagggggtgctgcgggaccagctggccctgcgagccttggaggaggcgctggagcagggccagagccttgggccggtggagcccctggacggtccagcaggtgctgtcctggagtgcctggtgttgtcctccggaatgctggtgccggaactcgctatccctgttgtctacctgctgggggcactgaccatgctgagtgaaacgcagcacaagctgctggcggaggcgctggagtcgcagaccctgttggggccgctcgagctggtgggcagcctcttggagcagagtgccccgtggcaggagcgcagcaccatgtccctgccccccgggctcctggggaacagctggggcgaaggagcaccggcctgggtcttgctggacgagtgtggcctagagctgggggaggacactccccacgtgtgctgggagccgcaggcccagggccgcatgtgtgcactctacgcctccctggcactgctatcaggactgagccaggagccccactagcctgtgcccgggcatggcctggcagctctccagcagggcagagtgtttgcccaccagctgctagccctaggaaggccaggagcccagtagccatgtggccagtctaccatggggcccaggagttggggaaacacaataaaggtggcatacgaaggaaaaaaaaaaaaaaaaaaaaaccaaaaaaaaaaaaaaaaaaaaaaaaaaaaaaaaaaaaaaaaaaaaaaaaaaaaaaaa

SEQ ID NO: 2472 - DNA, 2252 bp, Homo sapiens
ggaatattttgatctgaagagacatgagctgtgtggagattacattaaagacatcctttgccaggagtgctcgccctacgcagcccacctctacgacgccgaaaacacccagacgcctctccggaatctcccgggcctctgctctgattactgctctgccttccattctaactgtcactcagccatttccctgctgaccaatgaccgcggcctccaggagtctcatggaagggacggtacccgcttctgccacctcctggaccttcctgacaaggactattgcttccctaatgtcctgaggaacgactatctcaaccgccacctgggcatggtggcccaagatcctcagggctgcctgcagctctgcctgagcgaggtggccaacgggctgaggaaccccgtctccatggtccatgctggggacggcacccatcgcttctttgttgccgagcaggtaggagtggtgtgggtctacctccctgatgggagtcgcctggagcaacccttcctggacctcaagaacatcgtgttgaccaccccatggatcggggatgagagaggcttcttggggttggcttttcaccccaaattccgccacaatcgcaagttctatatttattattcgtgcctggacaagaagaaggtagaaaagatccgaattagtgagatgaaggtttctcgggctgatcctaacaaagctgacctgaaatcagagagggtcatcttggagattgaagaaccagcctcaaaccataatggcggacaacttctttttggcctggatggctatatgtacatattcactggggacgggggacaggctggagatccctttggcctgtttggaaatgctcagaacaaaagttccctgctgggaaaagttttaaggatcgatgtgaacagggcaggctcacatggcaagcggtaccgagtcccctcggacaatccatttgtttctgagccaggggcccaccccgccatctatgcctatgggatcaggaacatgtggcgttgtgctgtggaccgaggggaccccatcacgcgccagggccgaggccggatattctgtggggacgtgggccagaacaggtttgaagaggttgacctcattttgaaaggtggaaactatggctggagagcaaaggaagggtttgcatgttatgacaaaaaactttgtcacaatgcctctttggatgatgttctgccaatctatgcttatggccatgcagtggggaagtcagtcactggaggttatgtctatcgtggttgtgaatccccaaatctcaatggcctgtatatctttggagacttcatgagtggtcgacttatggctttgcaggaagatagaaaaaacaagaaatggaagaagcaggatctttgcctgggcagcaccacgtcctgtgccttcccagggctgatcagcacccatagcaagttcatcatctcctttgctgaagatgaagcaggggagctgtatttcctggcgacctcttacccaagtgcctatgcaccacgtggatctatttacaagtttgttgacccctcaaggcgagcacccccaggcaagtgcaaatacaagccagtgcccgtgagaaccaagagtaagcggatcccgttcagaccactcgccaagacagtcttggacttgctaaaggaacaatcagagaaagctgctagaaaatcttccagtgcaaccttagcttctggcccagcccagggtttgtctgagaaaggctcctccaagaagctggcttctcctacaagcagcaagaatacattgcgagggcctggtacaaagaagaaagccagagtggggccccacgtccgccagggcaagaggaggaagagcctgaaaagccacagtggcaggatgaggccatcagcagagcagaagcgagctggcagaagtctcccttgacctattggtcaaggtggccgacagggtgacgtgagagaggagagccacctcatcaaatgaaagtcactgctgaataaagaccttagaagtctgggaagccagggtagaggtggggcagggcggttttcctctccctgggaaatcttgctgtctactgaataaataaatgcaccttctctgtatgcagtgcttctgtgggagaccatatcccagattgctggtgcacctgggttatggtaagcactagtccatgagcctgcttggaatcacactggatgtctccgttttgtcttgtaaatgcctacaacctgaggtaataaatcaacatttgctc

SEQ ID NO: 2473 - DNA, 1890 bp, Homo sapiens
gtgcggggtcaagctctccgccttgatggtggccactgggcgggcgcgtggagcccggcgggctgggcagcagccgccgccgccgctgcgagtcaacgtggtgctcagcggcctcctcggcaagttgtttccaggcccagcgcgagcgtcgcaactccggcacgagggcaaccgactgtaccgcgagcgccaggtggaggcggcactgctcaagtacaacgaggcagttaagttggctccaaatgaccacttgctttatagcaatcggtctcagatttatttcaccttggagtctcatgagaatgcactgcatgatgcagaaatagcatgtaagctccgcccgatgggttttaaggacaatctggagctcccacattgttctagtcaggaggaagcagcagccaggggagatggcagcagtctgatggacccagctaaagtgaagggggatggtcagcagcaccacatgaaagaccaggaagaagaggaggagaagtgggatgctacctctccaaaagctgcttccagcaagactggaaaatgccaggaaaagaaaaggaaacattgccagattgaatcccaagaagaaacggggatgcctaataaagcctccaagcaagatcctcccactgatcagggggacaaacctgctctcagtttaccacttgcatctttcgacgcatctgaccttgaatgcgctctatgtatgagattattctatgagccagtcacaacaccttgcgggcatactttttgcttaaaatgcctagaaagatgcctagatcacaacgcaaagtgtccattgtgcaaagacggtctttcacagtgcttggcatcaagaaaatacagcaaaaatgtaataatggaggagctcatagctaaattccttccagaagaactgaaggaacgaaggaagctttatgaagaggaaatggaagaactttctaaccttaataagaatgtgcctattttcgtgtgtactatggcctatcccaccgttccttgtcccctgcacatctttgagccttgttaccgcctgatgattcgtagatgcattgagacaggcacgagacagtttggcatgtgccttggagatcctgtcaaagggtttgcagaatatggctgcatcctagagatcagaaatgttcaattctttgctgatggccgctcagtggttgacagcataggcaagaggcgcttcagggtgctccatcagagccagcgggatggctacaacacagccgacattgaatacattgaagaccaaaaggttcagggagaggattgtgctgagctcatgggattacataactgtgtctatcagcaagcgtcattgtggtttcattcgctcaaattatccctaaagaatcggatactcaatcactttggtcccatgccggagaaagacgccgatcctcagatgaacccgaatggcccagcctggtgctggtggatgttagcagttcttcccttggaaagccgagctcagctccccttcctagcaatgaggtccttaaaggacagactgaatggtattcgacgagtcctggccttcatatcccgaaaccaaaactagtgagtggattgccgaagaggagctcccaccttccccactgccgtcggggggagtcttcttgtaaatatatctaattgcaataacatcttaacagaagggggtgtcaaacagaggcatcagcctgctgttgatcacagagagaaattgagtagaaagaccaaaagaatgtgacctatttgaaactttctgtcttaagatgcttcttgacatgctgcataactacataaacagcagaggtgtttaagagcccagaaaaacataatttgattttaacattaaaatttccaaaagtttaaaaaaaaaaaaaaaaaaaa

SEQ ID NO: 2474 - DNA, 3545 bp, Homo sapiens
aaatgcagctccagggttgcgaggcacccaccagcatcattccccgtgcgaggtggcaaatgcaacatgctctccagtttggggtgtctacttctctgtggaagtattacactagccctgggaaatgcacagaaattgccaaaaggtaaaaggccaaacctcaaagtccacatcaataccacaagtgactccatcctcttgaagttcttgcgtccaagtccaaatgtaaagcttgaaggtcttctcctgggatatggcagcaatgtatcaccaaaccagtacttccctcttcccgctgaagggaaattcacagaagctatagttgatgcagagccgaaatatctgatagttgtgcgacctgctccacctccaagtcaaaagaagtcatgttcaggtaaaactcgttctcgcaaacctctgcagctggtggttggcactctgacaccgagctcagtcttcctgtcctggggtttcctcatcaacccacaccatgactggacattgccaagtcactgtcccaatgacagattttatacaattcgctatcgagaaaaggataaagaaaagaagtggatttttcaaatctgtccagccactgaaacaattgtggaaaacctaaagcccaacacagtttatgaatttggagtgaaagacaatgtggaaggtggaatttggagtaagattttcaatcacaagactgttgttggaagtaaaaaagtaaatgggaaaatccaaagtacctatgaccaagaccacacagtgccagcatatgtcccaaggaaactaatcccaataacaatcatcaagcaagtgattcagaatgttactcacaaggattcagctaaatccccagaaaaagctccactgggaggagtgatactagtccaccttattattccaggtcttaatgaaactactgtaaaacttcctgcatccctaatgtttgagatttcagatgcactcaagacacaattagctaagaatgaaaccttggcattacctgccgaatctaaaacaccagaggttgaaaaaatctcagcacgacccacaacagtgactcctgaaacagttccaagaagcactaaacccactacgtctagtgcattagatgtttcagaaacaacactgggtaattctaagaacttttttttttctaaaaaaacaaaagtaacaacgaaataactcccaggactcacagaaaagaaacctggtgccttaacttctctctccctccccactttctccttttccttccttcctggcagtggttaaccttcctctttcttggacagattccactgaagagttaaccacatggctgatcctggtgactgaacttctgggcaaatctggatgctaattgctaactaaatgccctttttaaccagtctctgggttatacagacagaataccagccttttaactcccaaatcttgggggagaatgaaggaaacctggaagtcttgactctgtgctttctgcttagagtggctttgggaagtcttgtgcatactaaatttgggaagaatccccaaaagtgtcatgcttttaaacaagaatttcatggcacccatgtttgttgtttcttagcccaagagaatctaacttgctttgttgttctctttcccctgaagaaaaggagcagcatgtgttttgttctgtaatttgatgttgatcttctcagccacaccactgccctttgaatgtacaccttcatattttaacagctatgtaacttttccagggaaggttatttccattaaaggtattggctgctctgtgtgcaagagtctgttacaaagcttgctgtgcatgatcatggttaagccacaacatcaaaacccaagtccaggagttgctaactgcactcttttttattgtagttctcagcaaaaggaccccggaaacattgcaaactattctaatacctcagtttgaattgccactgagcactctaggtaaaaaataataaatactgcagctttattattaccttggatattgtatgcatgcttcaaagaagtcttttgaattaattacgctaatttatacccaatcccttaaaggtgacacagtcttcaagtttaggatcccaaagaggctctccctatgacaaattgtttggttgggttgtttttcttttaagtggtcatattttaatattatgtttgattcttttaattcagaatcaatatgtcactgaacaaattgatcatttctgtattttttgtaaatgtgtttactctattgtctctcttaacagagaagatatatttatgatatttctgcagactgcttcttataattcttagaattcttctgagtgaagtatgagaaaaatgagggcagggtgcagcggctcatgcctgtaagcccaacactttgggaggctgaggcaggtggattgcctgaggtcagtagttcaagaccaccctggccaacctggtgaaaccccgtctctattaaaaatacaaaaattagactggcatggtggcatgcgcctgtaatcccagctacccaggaggctgagacaggagaatcgcttgaacccaggaggtggaggttgcagtgagccaagatcgtgccacgcactgcaacctgggtgacagagcgagactccatctcaaaaaaaaaaaagaggttgggggaggagcttacatataaagccacgtagttaccaaaactctatttttaaaagctttcagatggacattttctagttcagatgtgtttgcttggtttaaatttaaatgaaatatatttaagaacacacataaacatagctgaagaaatcagcaaactggtttaataagggtggaaagaagagtccaaatacagtagcttaaatttagtcacttaactataaaaaactgaaaaagaaactttcttatattcaacattgaaacatagatgtaagaaatactactaatggtctcttaacatgatttgcctttttgtgtttgcttttgtttttgcaagcttaaaattttaaaaatctttcctgttactttcacctcaggtcgtaactttctttatgtgtttcattacagctccaaaaagccttccagaatttcctgaggcaaaaacacccttcccttttgagaaacctaggggcacattgggtaataagagtaccttaaatttaatattaaggctgtgggtggtgattgcttaattctgcaggacacatttactgcatcttatttctggaaacctcatgaactgatagttaggcaaacaaatggttgatttgatttttttttaataaatctatttggattttctgcaaattcggtaaaacccatcagtcttaattccacataatccacttagctttttgtccttaaaaatgctgacagtctgacaccaaactctggtctctctctgaccactaatcaaatgttctctggatggatacatactgatttcttactgatatataatgactttttattgtattggtatactgcaggcttctggtagccacttaaccataccagcaacctatttctgtctcgttctcctgttaaaaaaaaaaaaaaaa

SEQ ID NO: 2475 - DNA, 1720 bp, Homo sapiens
actctagcccgcggctcggctcagtcggtctgcgaggatccggcccgccgccccccgggggacccgatggcctcggagggcctggcgggggcgctggcttccgtgctggctggccaggggtccagcgtgcacagctgcgactcggcgccggccggggagccgccggcgcccgtgcggctgcggaagaacgtgtgctacgtggtgctggccgtgttcctcagcgagcaggatgaggtgctactgatccatgaggccaagagggagtgccgggggtcgtggtacctgcctgcggggagaatggagccaggggagaccatcgtggaggcgctgcagcgggaggtgaaggaggaggcggggctgcactgtgagcccgagacactgctgtccgtggaggagcggggcccctcctgggtccgcttcgtgttcctcgctcgccccacaggtatggcccacctggaggcagtgtgaacagggccagttgacacctttcccccagctcctcggtgaggtgagcccctctacagccagtcctgttatggctggcacagcctggcatgggcagattccagcctttgggctgggggcctctctcctgggtcagggatgtctgttgactctgccagagctgcacttctctccacacagaccctccctgccccatcccccacatctcccccaggtggaattctcaagacttccaaggaggccgatgcggagtccctgcaggctgcctggtacccacggacctccctgcccactccgctgcgagcccatgacatcctgcacctggttgaactagccgcccagtatcgccagcaagccaggcaccctcccattctgccccaagagctaccctgtgatctggtctgccagcggctcgtggctacctttaccagcgcccagacagtgtgggtgttagtgggcacagtggggatgcctcacttgcctgtcactgcctgtggcctcgaccctgtggagcagaggggtggcatgaagatggccgtcctgcggctgctgcaggagtgtctgaccctgcaccacttggtggtggagatcaaggggttgcttggactgcagcacctgggccgagatcacagtgatggcatctgtttgaatgtgctggtgaccgtggcttttcggagcccagggatccaggatgaacccccaaaagttcggggtgagaacttctcttggtggaaggtgatggaggaagacctgcaaagccagctcctccagcggcttcagggatcctctgttgtcccagtgaacagatagagaggtggaggaggtgacagggagctaggcagccgtgctccctccagtgcggacttgtctccctctgagggaggcaagaggctggcgatcagggatcttgttgcattgggagcaggggcggctctcctggtccccaggagagatgctttgaggagcattcctctagattgcacaagggacagtgcctttaaccaagcgaggagtccaaagctcaggacctgactaccctgagggcacgctgacgcctctccccagggggatggggagctttctgcacccccagtggcatctcctcatcacgttctgtgccgtccttgggaaaggcctgcattctgatccttccaggcccttcgagcatggaggggcactggggaaggtcccccgagggaggagcacgttgctgagtaaagaggtgttactcaccttgaaaaaaaaaaaaaaaaaa

SEQ ID NO: 2476 - DNA, 1707 bp, Homo sapiens
cgctgttgttagtcaccgcggagccgccgaaacctgcaggagtctactatgcaactgcatactggatgcctgctgaaaagacagtacaagtcaaaaatgtaatggacaagaatggggacgcctatggcttttacaataactctgtgaaaaccacaggctggggcatcctggagatcagagctggctatggctctcaaaccctgagcaatgagatcatcatgtttgtggctggctttttggagggttacctcactgccccacacatgaatgaccactacacaaacctctacccacagctgatcacgaaaccttccatcatggataaagtgcaggattttatggagaagcaagataagtggacccggaaaaatatcaaagaatacaagactgattcattttggagacatacaggctatgtgatggcacaaatagatggcctctatgtaggagcaaagaagagggctatattagaagggacaaagccaatgaccctgttccagattcagttcctgaatagtgttggagatctattggatctgattccctcactctctcccacaaaaaacggcagcctaaaggtttttaagagatgggacatgggacattgctccgctcttatcaaggttcttcctggatttgagaacgtcctttttgctcactcaagctggtacacgtatgcagccatgctcaggatatataaacactgggacttcaacatcatagataaagataccagcagtagtcgcctctctttcagcagttacccagggtttttggagtctctggatgatttttacattcttagcagtggattgatattgctgcagaccacaaacagtgtgtttaataaaaccctgctaaagcaggtaatacccgagactctcctgtcctggcaaagagtccgtgtggccaatatgatggcagatagtggcaagaggtgggcagacatcttttcaaaatacaactctggcacctataacaatcaatacatggttctggacctgaagaaagtaaagctgaaccacagtcttgacaaaggcactctgtacattgtggagcaaattcctacatatgtagaatattctgaacaaactgatgttctacggaaaggatattggccctcctacaatgttcctttccatgaaaaaatctacaactggagtggctatccactgttagttcagaagctgggcttggactactcttatgatttagctccacgagccaaaattttccggcgtgaccaagggaaagtgactgatacggcatccatgaaatatatcatgcgatacaacaattataagaaggatccttacagtagaggtgacccctgtaataccatctgctgccgtgaggacctgaactcacctaacccaagtcctggaggttgttatgacacaaaggtggcagatatctacctagcatctcagtacacatcctatgccataagtggtcccacagtacaaggtggcctccctgtttttcgctgggaccgtttcaacaaaactctacatcagggcatgccagaggtctacaactttgattttattaccatgaaaccaattttgaaacttgatataaaatgaaggagggagatgacggactagaagactgtaaataagataccaaaggcactattttagctatgtttttcccatcagaattatgcaataaaatatattaatttgtcaaaaaaaaaaaaaaaaa

SEQ ID NO: 2477 - DNA, 4254 bp, Homo sapiens
ggggactacccagagggctgccgccgcctctccaagttcttgtggcccccgcggtgcggagtatggggcgctgatggccatggagggctaccggcgcttcctggcgctgctggggtcggcactgctcgtcggcttcctgtcggtgatcttcgccctcgtctgggtcctccactaccgagaggggcttggctgggatgggagcgcactagagtttaactggcacccagtgctcatggtcaccggcttcgtcttcatccagggcatcgccatcatcgtctacagactgccgtggacctggaaatgcagcaagctcctgatgaaatccatccatgcagggttaaatgcagttgctgccattcttgcaattatctctgtggtggccgtgtttgagaaccacaatgttaacaatatagccaatatgtacagtctgcacagctgggttggactgatagctgtcatatgctatttgttacagcttctttcaggtttttcagtctttctgcttccatgggctccgctttctctccgagcatttctcatgcccatacatgtttattctggaattgtcatctttggaacagtgattgcaacagcacttatgggattgacagagaaactgattttttccctgagagatcctgcatacagtacattcccgccagaaggtgttttcgtaaatacgcttggccttctgatcctggtgttcggggccctcattttttggatagtcaccagaccgcaatggaaacgtcctaaggagccaaattctaccattcttcatccaaatggaggcactgaacagggagcaagaggttccatgccagcctactctggcaacaacatggacaaatcagattcagagttaaacaatgaagtagcagcaaggaaaagaaacttagctctggatgaggctgggcagagatctaccatgtaaaatgttgtagagatagagccatataacgtcacgtttcaaaactagctctacagttttgcttctcctattagccatatgataattgggctatgtagtatcaatatttactttaatcacaaaggatggtttcttgaaataatttgtattgattgaggcctatgaactgacctgaattggaaaggatgtgattaatataaataatagcagatataaattgtggttatgttacctttatcttgttgaggaccacaacattagcacggtgccttgtgcagaatagatactcaatatgtgaatatgtgtctactagtagttaattggataaactggcagcatccctggcctgttgtcatgcagtcatttcctgttaattctgggagacaatgatttcacaactagagggaagcagtcctaaaagtttaaaatccgataaggaatatctgggacagggtttagatcatgactctacacagataccatgatgagagtatattaaagaaatttaggaaagcacctggttcctttctccccatgcctgccttctgctccctccccagctggtttgggctcaaattgtccctggagactagggtttatgttagggtattgatagattagagcaggtggttgaagagatcttctctggtcagacttggaagaatttccaaaagtgaagttagccccaagacttccctagggttgatgtactttatgatccagatgctaaacttcttagaatgaaaatatgcttcaacacttaagtagcatacactgccctacaaacctcagagagcacttttccccaagttcttgtttttatttttgaaagtactcacacagcacttactatgctccaaacactcctctaagcactttacacatattagctcattcagtccccagacagacgggatgaagtaggtattgttactgttcccattttacaggtgagagatttgaagcctggggaggctagtaactcaccccaaggtcacacggctcatacatggtgggactgagactcagatgcaggcagtctggcacctcagtctggattctaaccatttcactaagctatttttgtcttgtactactttgacccacccctgaataaacctcaattgctggagtggggtgtagttattaaagggatgctttttaccttttgctgtctgctgtggcagattccccagataaccaaggaaaaggggccacccatacctggaaataggccatagggcccctactactgccaacaagccatggcctaccttgacacttgtttgatcttaaaattgtgtcttggtaacaaaagatttggacaggcatatctgtagctttcaagttaattaattgcaatatttttttcttcaggattttagctgctgaacaactttcagtttggagctaaaagagacctgtctcatggtctgcccttccctggggcaatagctagggtctttcctgatttttatggaattttaggggatattttgagctttgggttctcagtagtgaattgagacttggaggtgacttttcatgtttggagtatcatctctgtctgggctctgggctgacaaattaaaacctagagtagtgcttatgctgaaatgatacttttcattttttggttgatttttttgccttcccttcaattttaaactgaagcattttaatgtgggtagaaactctacaccaaatacactaaacattttggtgcttagtggatttctttttaggtaactggtacttacttccaaagactgaatacaagccacactccatcatatcccttaaacttcatgaaaaaccattcaagatccccttgctgcaacactgttctcttcttctctactaaattctatttccaaaattggtaatagagccagaaggatccccagtacccagccctctgcctggcacaaagtggtagcacaattaaattcagtatgggtggagcatggtacagtcttggtgccatagaaggagtagttgcatagtcacacatcatttgataagttggatgttccattacatagaggaacacaaaattccagggtttttggaggaagggattagatagcgactaagccgccagaattgaggtggccattcctttttgtataggctaagaaacaggttatcagtgaaaagttaattatggctttggcactagaatagcactgttgcaaagtatttaagcaccccccatctcagccctttattttatctttcatgtgggctaatgtgaggataatcttacagatattataggaatttcttttctatctttatgaaaacaacgtatataaaatatatctagaaaacctttgtttgagactcttatttaatgggcttttgattctaatgataattgtacctttatctttcaaaagctgatatttcctacctaagcatctcccgagaaaaatatctcattaaaaagcccataaataataggggagaagaaagccttaggtatcaattccaaaacagtgattgaaatttcccaaaataattatggcttctgtcatctccagagataatctggcttggtttaccccataatctaatttcagaaaagaaagctttattttaacactcatctgaatcaacattaaagccttttctctcaaagcgtttattgagaaactcaaatgaatatactttttgaattactgtcatcaaaagtgtacggcttcctgtgctgcttgtgtcaaatggaacctgccctctaaagcactttctttcctttacttgcgtggtttcatgtaagctgtgctgtttagaaacaacatctcagactttacaaagaaatgacaaagaaggcaattgcactttttaagggatatcgacaagcagtttctgttttctaaaggacaaaatacagagtgtgtgtcatttttaattagattctttcccctgctgagttggaaattccagtgcagcactgattgaccacagttgccaatctaaaagcacaaagacagaagtaaagctttatgctaattttatttcaatatgatagaaaatttatcttggtatgtccttttttagataactccagcaggaaactgtaactgctatgtctttaggaaaacgtagaagaaagaacattattattctttaattcctacaaggtacttgaaaaccttaagtgaaaaagatttctatctttttatcttggcgcatttatggaaaaaatattaactgtcctgaatattttataattttgtaggaaaaatatgcatctattttttcttgacttcttttatatagtaataaaagttattttggaaaaaaaaaaaaaaaaaaaa

SEQ ID NO: 2478 - DNA, 2147 bp, Homo sapiens
ggcacgagggctctgagcgggaggcctgagcgggaagcattggcgtccgagcgacttctaggagcctggggttcggcgctatggaggagctcgatggcgagccaacagtcactttgattccaggcgtgaattccaagaagaaccaaatgtattttgactggggtccaggggagatgctggtatgtgaaacctccttcaacaaaaaagaaaaatcagagatggtgccaagttgcccctttatctatatcatccgtaaggatgtagatgtttactctcaaatcttgagaaaactcttcaatgaatcccatggaatctttctgggcctccagagaattgacgaagagttgactggaaaatccagaaaatctcaattggttcgagtgagtaaaaactaccgatcagtcatcagagcatgtatggaggaaatgcaccaggttgcaattgctgctaaagatccagccaatggccgccagttcagcagccaggtctccattttgtcagcaatggagctcatctggaacctgtgtgagattctttttattgaagtggccccagctggccctctcctcctccatctccttgactgggtccggctccatgtgtgcgaggtggacagtttgtcggcagatgttctgggcagtgagaatccaagcaaacatgacagcttctggaacttggtgaccatcttggtgctgcagggccggctggatgaggcccgacagatgctctccaaggaagccgatgccagccccgcctctgcaggcatatgccgaatcatgggggacctgatgaggacaatgcccattcttagtcctgggaacacccagacactgacagagctggagctgaagtggcagcactggcacgaggaatgtgagcggtacctccaggacagcacattcgccaccagccctcacctggagtctctcttgaagattatgctgggagacgaagctgccttgttagagcagaaggaacttctgagtaattggtatcatttcctagtgactcggctcttgtactccaatcccacagtaaaacccattgatctgcactactatgcccagtccagcctggacctgtttctgggaggtgagagcagcccagaacccctggacaacatcttgttggcagcctttgagtttgacatccatcaagtaatcaaagagtgcagcatcgccctgagcaactggtggtttgtggcccacctgacagacctgctggaccactgcaagctcctccagtcacacaacctctatttcggttccaacatgagagagttcctcctgctggagtacgcctcgggactgtttgctcatcccagcctgtggcagctgggggtcgattactttgattactgccccgagctgggccgagtctccctggagctgcacattgagcggatacctctgaacaccgagcagaaagccctgaaggtgctgcggatctgtgagcagcggcagatgactgaacaagttcgcagcatttgtaagatcttagccatgaaagccgtccgcaacaatcgcctgggttctgccctctcttggagcatccgtgctaaggatgccgcctttgccacgctcgtgtcagacaggttcctcagggattactgtgagcgaggctgcttttctgatttggatctcattgacaacctggggccagccatgatgctcagtgaccgactgacattcctgggaaagtatcgcgagttccaccgtatgtacggggagaagcgttttgccgacgcagcttctctccttctgtccttgatgacgtctcggattgcccctcggtctttctggatgactctgctgacagatgccttgccccttttggaacagaaacaggtgattttctcagcagaacagacttatgagttgatgcggtgtctggaggacttgacgtcaagaagacctgtgcatggagaatctgataccgagcagctccaggatgatgacatagagaccaccaaggtggaaatgctgagactttctctggcacgaaatcttgctcgggcaattataagagaaggctcactggaaggttcctgagaactgcttcaatgtggtatctttgtatggcaatgtatatagattttttaaaagaataaatgttgttttgcaaatgtaaaaaaaaaaaaaaaaaaa

SEQ ID NO: 2479 - DNA, 2949 bp, Homo sapiens
gtgccacatcctggctctgtgcgctgggctcccgccgctgctgcgcgcctggcgcgtgccccccgcgccgcccgtctcgggccccggacccagtccgcatccgtcgtccggcccgctgctgccgccgcgcttctacccgcgctacgtgctaccgctcgccttcggcaagtacttcgcgtccgtgtcagcgcacgtcagcatctggaaggtgcccgtgtcctatgcacacaccgtcaaggccaccatgcccatctgggtggtcctcctgtcccggatcattatgaaggagaagcagagcaccaaggtatacttgtcactcatccccatcatcagcggtgtcctgctggccaccgtcaccgagttgtcttttgacatgtggggactcgtcagcgccctcgccgccacgctgtgcttctcgcttcagaacattttctccaaaaaggtcttgcgagattcacggatccaccatctccggctgctcaacatcctgggctgccacgccgtcttctttatgatccccacctgggttctggtggacctctcggctttcctggtcagcagcgacttgacctacgtctaccagtggccctggacgctcctgctcctggctgtcagcggcttctgtaactttgcccagaatgttatcgccttcagcatcctcaacctcgttagccccctgagctactcggtcgccaatgccaccaaaagaatcatggtcatcacggtgtccctgatcatgctgcgcaacccagtcaccagcaccaacgtcctgggcatgatgaccgccatcctgggggtcttcctctataacaagaccaagtacgatgcaaaccagcaagccaggaagcacctcctccccgtcaccacagcagacctgagcagcaaggagcgtcaccggagcccactggagaagccccacaacggcctcctcttcccccagcacggggactatcagtacggccgcaacaacatcttaacagaccacttccaatacagccggcagagctacccaaactcgtacagtttgaaccgctatgatgtgtagagtccaaaggacaggaccagactgttggtgactccttccccggcccccacagcagtatcagaaacttctgacaatcagtgaatgtacaacccagccgaggggacggtgcataactctccatcagaagccctggggttcctggccccccgtgagccgcaggaggatgcgttgcctgcagtgcagacggccgtgagctctgggcaaacctaaacagagaccagtgtctcatgctctttcttcctggagtctgtcatctgagggccgtgtccctgcggagatcttggccacgttgtacctttccatgtggaattattccccaagcagtgtagctcagagcacttgtgtctgcattccagataacattcaggacctgtgtgaaaagctggggtcactgtggctgtagaccatgaactggcagtgggggtgtccagggcggtgcttgagaacgtcagactggctagtttaattccctggcgcagatacgcataggaccaacagggtcaccaagcagacagggagcccgcgagaatcattcaaaacatccccagccacagagatggatccagtttcctggtcatccccttagcagttcacaagttcctggcaaatgttccaaagcaaaaagcgattgcaattagcatccagttcctgcagcctggtgctctgccctgcacgtcagggttggcatccacccagatccagatggaagggaaacttctctcttctcctttgcctcctcttccctcaccagagcagggcgcttctcttggggtggtgagaaggatcttcgagaaatcgtgttcagtatttcaagctctatttctgtggcacatgtcttttgagaggcatcttcacctcttctgtgatgacttggtatgttgtttggtagagagatcttgattttcggaggatcttgcatttttctagggaatattttgtagttgtgtgtgtgtgtttttgccttggtccccattatgggatgcattaggactggcctatgcatcgaaaatctttttgtttgtaaacgtttaaaaacaaagttccccggccaggcacagtggctcacacctgtaatcccagcactttgggaggccaagatgggcggatcacgaggtcaggagttcgagaccagcctggccaacatagtgaaaccccatctctactaaaaatacagaaattagccgggcatggtgtcgcgtgcctgtagtcccagctcctcaggctgctgaggcaggcgaattgcttgaacctgggaggcagaagttgtggtgagccgagattgtgcactccagcctgggtaacagagcgagactccatctcaaaaaaaaacaaaacaaaaccaagttcccactggtgatgcctgtctgacacgttttggtatttagtaggaaatgaagtgtttcgaagcttcgagagaagcttcaaaattgtcacaattgctgaaaacagaatgaatcgtgaacattatctcaatattttgtataatagacaagaccacagtgttttggttccctgacctgtttttgtgtttatgttaggatctgaatcatgttctgggtaaggggacgaggagcgaacactgcactaagatttggtttgccaaatcagattctttggtcaagagtcagtttggggccaggcgtggtggctcatgcctgtaatctcagcactttgggaggctgaggtgggtggatcactggagtttgagaccaccctggccaacatggtgaaaccccatctctactaaaacaaaaattagccaggcatggtggcacctgcctgtaatcccagctacttgggaggctgaggcaggagaatcacttgagcccaggaggtggaggtttcagcgagctgagatcacaccactgcactccagccttggtgacagagtgagactctgtctc

SEQ ID NO: 2480 - DNA, 2303 bp, Homo sapiens
aaaaattactatgaagtacttggagttacgaaagatgctggtgatgaagatttgaaaaaagcttatagaaagcttgctttgaagtttcatccagacaaaaaccatgcacttggagcaacagatgcttttaaaaagattggaaatgcttatgctgttttaagtaatccagaaaagcgaaaacagtatgacctcacgggcaatgaagaacaagcatgtaaccaccaaaacaatggcagatttaatttccattgaggttgtgaagctgatataactccagaagacttgtttaatatattttttgggggtggatttccttcaggtagtgtacattctttttcaaatggaagagctggttatagccaacaacatcagcatcgacatagtggacatgaaagagaagaggaaagaggagatggaggtttttctgtgtttatccagctgatgcccataattgtattgatcctcgtgtcattattaagccagttgatggtctctaatcctccttattccttatatcccagatctggaactgggcaaactattaaaatgcaaacagaaaacttgggtgttgtttattatgtcaacaaggacttcaaaaatgaatataaaggaatgttattacaaaaggtagaaaagagtgtggaggaagattatgtgactaatattcgaaataactgctggaaagaaagacaacaaaaaacagatatgcagtatgcagcaaaagtataccgtgatgatcgactccgaaggaaggcagatgccttgagcatggacaactgtaaagaattagagcggcttaccagtctttataaaggaggatgaactggaatttttatttataccttttagcgtactctttattttttctgtaagtaagtttggtttcatcatgagggatgaaggaaaagatttgatactgaaaactaaactgaatagttggttcctgaaatcttggactgtttatgacctactggctcctttaaatagtaactgaaaactaaaatggaatattttagttaacgcttctacaagtattttcattttaaaagcttacatgattcctaactaaagtgtcatgagaaaggattatcacacctgtagcaatttccagttttagtgattctccattttttcccttgtcatgtaaatatttatggaatgatcattttgtgtacatacaggttactgcttttttatttaaattcttttagtgtttagctccatgagacacttcagtttaaattgatggaataaatgttatatgacacatttacattttccttatcaaggtgtcaaatatgtggactttaaacaatgaaactttttcagaaagaaaaaacaaaaactttaactttgtgtaaaatcttatagtattatcagcttagagggaattgatatttttaatattgccgttatattccaaaatatatattgagataaatgaactggtgtagaatatcagtttgctatttagttttatgaattactatacatatacatgcatagaaatgaaatgctatactgataaattttaaagaaaatatgaggaaatggctataaatattaaactaaaagggtcttcaacagtaaagtgcagttatgtcatttaaaattccaatactttaaaggccaccaaattttgatgtatatgtccttgaagggctgctaaaatttatgaagaggactcacattttcccccatagaaatttgcagtttcttggtgatcatttaagcaggatccaaagaagttcctttacaaataagtaataagaaaaatgagtactaaaatacagctttgtgccttttaaccctatgccaactcctaaacatataagtagattacagtatacttatctgatcagagcatgatctgtttggccacatgcaagtgtgagcagaaatagagcagcacgtagaatagtaacttaaagcaagtcatcctttaaaaattctgagctaaaatctatttaccattgagtaattgaattaatcccataggaataagctccttgtaagtaaatccatgatatgaattagaaaaaaaaaacagctggaaattgaagtttttgatgcctgtatactggatatgaaactatttgatttctagtcttctgtgtttagcagttgtaatattttaatgattttgcttcatactcggttaatggaacataaacatatctttgatacttctttgtgagtgagagaatgctagatagggtggctttgttctttgtttaagttttttttcctgaatgtagttaatttatggcatctgttgaataaaactgctaaaatgacctctt

SEQ ID NO: 2481 - DNA, 3196 bp, Homo sapiens
gtgtgactctgtgccagagcaattgactaaaactctcaggttttagatatcaagccaccggggacttcatgagccaagtcccttccattcctttccaggtgcatagaacttcccacaagagtgtcagcactgtgctttcatcccgagcatcttgtttctgtcattcttattcttctacccatcttcacagcaatcattttcttcacttttctttttttttttttttcgtcttggccattgcacaccctaagacaaagcaatccattttcgttgttgttgttgtttgtgtgtttgtttgttttttgagacagagcctcgatccatcatccaggctgcagtgcagcagcgccatcatgactctctactgcctcaacctctcaggcccgagcaatcctcccagcttcctgagtagctcgggcctcagggctggggtctcctggatacaatggagcagatgagccgggaggacatgctgtccatctcaacacccgtcttgaccagtctggatgtgccccctgagatgatgcccaccgtcatagatgaatacctaggaagcaactcggacgcacaagccaaatgccaggcgttccaggaattcatgggtgacgtattcatcaatgttcccaccgtcagtttttcaagataccttcgagattctggaagccctgtctttttctatgagttccagcatcgacccagttcttttgcgaagatcaaacctgcctgggtgaaggctgatcatggggccgagggtgcttttgtgttcggaggtcccttcctcatggacgagagctcccgcctggcctttccagaggccacagaggaggagaagcagctaagcctcaccatgatggcccagtggacccactttgcccggacaggggaccccaatagcaaggctctgcctccttggccccaattcaaccaggcggaacaatatctggagatcaacccagtgccacgggccggacagaagttcagggaggcctggatgcagttctggtcagagacgctccccagcaagatacaacagtggcaccagaagcagaagaacaggaaggcccaggaggacctctgaggccaggcctgaaccttcttggctggggcaaaccactcttcaagtggtggcagagtcccagcacggcagcccgcctctccccctgctgagactttaatctccaccagcccttaaagtgtcggccgctctgtgactggagttatgctcttttgaaatgtcacaaggccgcctcccacctctggggcattgtacaagttcttccctctccctgaagtgcctttcctgctttcttcgtggtaggttctagcacattcctctagcttcctggaggactcactcccccaggaagccttccctgccttctctgggctgtgcggccccgagtctgcgtccattagagcacagtccacccgaggctagcaccgtgtctgtgtctgtctccccctcagaggagctctctcaaaatggggattagcctaaccccactctgtcacccacaccaggatcgggtgggacctggagctagggggtgtttgctgagtgagtgagtgaaacacagaatatgggaatggcagctgctgaacttgaacccagagccttcaggtgccaaagccatactcaggcccccaccgacattgtccaccctggccagaagggtgcatgccaatggcagagacctgggatgggagaagtcctggggcgccaagggatccagcctagagcagaccttagcccctgactaaggcctcagactagggcgggaggggtctcctcctctctgctgcccagtcctggcccctgcacaagacaacagaatccatcagggccatgagtgtcacccagacctgaccctcaccaattccagccctgaccctcaggacgctggatgccagctcccagccccagtgccgggtcctccctcccttcctggcttggggagaccagtttctggggagcttccaagagcacccaccaagacacagcaggacaggccaggggagggcatctggaccagggcatccgtcgggctattgtcacagagaaaagaagagacccacccactcgggctgcaaaaggtgaaaagcaccaagaggttttcagatggaagtgagaggtgacagtgtgctggcagccctcacagccctcgcttgctctccctgccgcctctgcctgggctcccactttggcagcacttgaggagcccttcaacccgccgctgcactgtaggagcccctttctgggctggccaaggccggagccagctccctcagcttgcggggaggtgcggagggagaggggcgggcaggaaccggggctgcgcgcagcgcttgcgggccagagtgagttccgggtgggcgtgggctcggcggggccccactcagagcagctggccggccccaggcagtgagggccttagcacctgggccagcagctgctgtgctcgatttctcgctgggccttagctgcctccccgcggggcagggctcgggacctgcagccctccatgcctgaccctccccccaccccccgtgggctcctgtgcggccggagcctccccaaggagcgccgccccctgctccacagcgcccagtcccatcgaccacccaagggctgaggagtgcgggtgcacagcgcgggactggcaggcagctccacctgctgccccagtgctggatccactgggtgaagccagctgggctcctgagtctggtggggacttggagaacctttatgtctagctaagggattgtaaatacaccgatgggcactctgtatctagctcaaggtttgtaaacacaccaatcagcaccctgtgtctagctcagtgtttgtgaatgcaccaatccacactctgtatctggctactctggtggggacttggagaacctttgtgtccacactctgtatctagctaatctagtggggatgtggagaacctttgtgtctagctcagggatcgtaaacgcaccaatcagcaccctgtcaaaacagaccacttgactctctgtaaaatggaccaatcagcaggatgtgggtggggcgagacaagagaataaaagcaggctgcctgagccagcagtgacaacccccctcgggtcccctcccacgccgtggaagctttgttctttcgctctttgcaataaatcttgctactgcccaaaaaaaaaaaaaaaaaaa

SEQ ID NO: 2482 - DNA, 2113 bp, Homo sapiens
agaacgtgctgtgtggatgcggcgaaacgctgaggcgcggccttcgttgtgtggtggggactcacaagaccgacgtcaagatgatgctttcaagggccaaacctgctgtaggcagaggcgtacagcacactgacaaaagaaagaagaaaggtaggaagattccaaaactagaggagctactttcaaaaagagatttcactggagctattaccctgttggagttcaaacgtcatgttggggaagaagaagaggatactaatttgtggattggatattgtgcctttcacctgggtgactacaagagagctctggaggaatacgaaaatgctacagaagaggaaaattgtaattctgaagtctgggtgaacctagcttgcacctacttctttcttgggatgtataaacaagctgaagcagctggatttaaagcttcaaaaagccgactccaaaaccgcctcctcttccacttggctcacaagtttaatgatgagaaaaaattgatgagctttcatcaaaatcttcaggatgtcacagaagatcaactcagtttggcctcaatccactatatgcgatctcactaccaagaagctatagatatatataagcgaatactgctagataacagggaataccttgcccttaatgtttatgtggccctctgctactacaagttggattactatgatgtgtctcaagaagttttggctgtttaccttcagcaaattcctgatagtaccatcgcactcaatcttaaagcctgtaaccattttcgcctttataatggcagagcagctgaggcagaactcaaaagcttgatggacaatgcttcttcatcctttgaatttgctaaagaactcatcaggcacaatctggttgttttccgaggaggtgaaggggctttgcaggttttacctcccctagttgatgtcattcctgaagctaggctaaacttggtgatttactaccttcgtcaagatgatgtacaagaagcttataacttaattaaggatctggaacctactactcctcaggagtatattctcaaaggagtggtcaatgcagcccttggccaggaaatgggttcaagggatcatatgaaaattgcccagcagttcttccagttggtgggaggatcagctagtgaatgtgatacaataccagggaggcagtgcatggcttcctgtttcttcctgcttaagcaatttgatgatgttttgatttacctcaactcatttaagagttacttctataatgatgacatctttaactttaattatgcccaagccaaagctgcaacaggcaataccagtgagggcgaagaggcgttcctcttgatccaaagtgagaagatgaaaaatgattacatttacctcagctggttagctcggtgctatattatgaataagaaaccaagactagcctgggaactttatcttaagatggaaacctccggcgagtccttcagtctcttacagctcattgctaatgtctgctacaagatgggccagttttactattctgccaaagcttttgatgtccttgagaggctggatcctaaccctgaatattgggaaggcaaacggggtgcctgtgtgggcattttccagatgatcatagctgggagagaacccaaagagacccttcgagaagtgctccatttactgagaagcacaggtaacacccaagtagaatacatgatccggatcatgaagaaatgggccaaagaaaacagagtgtccatctaaaatagcgccagcgtcctaggaaccagcttctactttgacataaaactggaaatcattttcactccagtttaatctgtgatacagggctctgttttattgacattttccttccttgctctttaagcctcaaggtcagagactgacttgctgagacttagtctcctggctgaacagagtgccatagtctgtgaccctgtatgatcctagtagcaataagattttggacttatctggtgcctttcttccaaaaatgctcagagtacttttatgcaatttactgactttaaggaaaacagtataacttttttttgttagcattttatggcattgtctcctggctgcaataacaaacatctttgatgttcaag

SEQ ID NO: 2483 - DNA, 1460 bp, Homo sapiens
ggcacgaggcagccaactgctcctgcgccgggcggggtcgtcgccgccagcggctccgagcgccggaagggccaggtcgcagggctcctggagctgcaggcggcgggaggggctacaaatgcttgactcagtgatgcagaacctttcagagttagctggaagccacagccctgcctcttgatgcagcctggatccagccggtgtgaagaggagaccccttccctcttgtggggtttggatcctgtgtttctagcctttgcaaaactctacatcagggatatcctggacatgaaggagtcccgccaggtgccaggtgtatttttgtacaatggacatccaataaaacaggtagatgtcttgggaactgtcattggagtgagagaaagagatgctttctacagttatggagtggatgacagcactggagttataaactgcatctgctggaaaaagttgaatactgagtctgtatcagctgctcctagtgcagcaagagagctcagcttaacctcacaacttaagaagctacaagagaccattgagcagaaaacaaagatagagatcggggacacgatccgagtcagaggcagtatccgcacatacagagaagagcgagagattcatgccaccgcttactataaagtggacgacccagtgtggaacattcaaattgcaaggatgcttgagctgcccactatctacaggaaagtttatgaccagccttttcacagctcagccctagagaaagaagaggcactaagcaatccaggcgccctggacctccccagtctcacgagtttgctgagtgaaaaagccaaagaattcctcatggagaacagagtgcagagcttttaccagcaggagctggaaatggtggagtctttgctgtcccttgccaatcagcctgtgattcacagtgcctgctccgaccaagtgaattttaagaaggacaccacttccaaggcaattcatagtatatttaagaatgctatacaactgctgcaggaaaaaggacttgttttccagaaagatgatggttttgataacctatactatgtaaccagagaagacaaagacctgcacagaaagatccaccggatcattcagcaggactgccagaaaccaaatcacatggagaagggctgtcacttcctgcacatcttggcctgtgctcgcctgagcatccgcccgggcctgagcgaggctgtgctgcagcaagttctggagctcctggaggaccagagtgacattgtcagcacaatggagcactactacacagcgttctgagcagagacacgcagaccagctgaggaggacaaagataaggtggcattcacccccaggctctgactttcagcatcatgcaggggcttatctgtctggaggcagttacctcataataaactataaaatatagtcatcttgggaaaaaaaaaaaaaaaaaaaaaaaaaaaaaaaaa

SEQ ID NO: 2484 - DNA, 2020 bp, Homo sapiens
ttctttctttcattccttccttcctctgtttctttctttcttcctttcatttttttttcttttttaagagcgagcggctctgcggtggcggtttggggtgggcgccgccgaggtgaggtcgtctcgcctcccgcgcgccggtagattggttgtttcattatggatggaggggatgatggtaaccttattatcaaaaagaggtttgtgtctgaggcagaactagatgaacggcgcaaaaggaggcaagaagaatgggagaaagttcgaaaacctgaagatccagaagaatgtccagaggaggtttatgaccctcgatctctatatgaaaggctacaggaacagaaggacaggaagcagcaggagtacgaggaacagttcaaattcaaaaacatggtaagaggcttagatgaagatgagaccaacttccttgatgaggtttctcgacagcaggaactaatagaaaagcaacgaagagaagaagaactgaaagaactgaaggaatacagaaataacctcaagaaggttggaatttctcaagagaacaagaaggaagtggaaaagaaactgactgtgaagcctatagaaaccaagaacaagttctcccaggcgaagctgttggcaggagctgtgaagcataagagctcagagagtggcaacagtgtgaaaagactgaaaccggaccctgagccagatgacaagaatcaagagccctcatcctgcaagtctctcggaaacacctccctgagtggcccctccatccactgcccctctgctgcagtatgtatcggcatcctcccaggcctgggtgcctactctgggagcagcgactccgagtccagctcagacagcgaaggcaccatcaatgccaccggaaagattgtctcctccatcttccgaactaacaccttcctcgaggccccctagtttctccgtccctacacagggagctcctccccaagggtagatcggaccgttcatgctgcctataggcattatgtccctcaaaaaaaaactcctttgcctgcatcctgtgtacaacatgacatttttaaccaatccaatctaaaaatgtgccagaatccacctgtggcccgaatcgtgtttggttcctctttctactccactgcagatgaccaaacctgtcccgctgccactttcctcactgatattgggaggagggcaaggcccagccgaagttccactaaaaatgccccaggagaataggcaccggctggcttgccaaagggtttgggttttattgctttctgtttttttcttttcccgacagcacaaagaagtaagggcagttattggacaggtgttatttaaacattctattgtaaatgaatgtgttgtttggttctactgcattgtggagcatgcgggggaagagaactgacccaggtaatgaaatggagcccttccctggaactaaccagtccttgatgttgtgtgactaagtaaagatgataaaccccatctgctgggggtgtcacttcacactcggcatgcattgtgatgccggcaggcagagcagctactgactttgaacatgggcagagaggcccctggatctcatccagcccactccttttccccttccagtacagtgacactctggtgcccattggcagatggcgacttccctgcacccataactgatgctctgtgaattcttcctccttttcagaactactctgtgctaattgttctgccagtatgggcgcatcagctccatcctgacaaacaagacatttaggtaaaactttgtaggcaccttctgcttctctgcttcattgttcctgtgatagtcctgttgttattacagcatgtgcccaaaacagcctcacattgttacaggaggcaggccaggacatcaaagtcatcatctttatgtggcatgactcttaagaggccattactgtatctcatggcctcttgatgtggaaagaagttgacagagggttgcagggtttaaaaacatccattaacatgaaagctaataaacctgtcagagaac

SEQ ID NO: 2485 - DNA, 3463 bp, Homo sapiens
ctcttacaacattggctgccggcgtgactttgaccgcttcccggtgcgttaccggcagctgaacccacccggcgccacgggactttgacgcgtgctctgcgcttgccatgagactcctgggagctgcagccgtcgcggctctggggcgcggaagggcccccgcctccctaggctggcagaggaagcaggttaattggaaggcctgccgatggtcttcatcaggggtgattcctaatgaaaaaatacgaaatattggaatctcagctcacattgattctgggaaaactacattaacagaacgagtcctttactacactggcagaattgcaaagatgcatgaggtgaaaggtaaagatggagttggtgctgtcatggattccatggaactagagagacaaagaggaatcactattcagtcagcagccacttacaccatgtggaaagatgtcaatattaacattatagatactcctgggcatgtggacttcacaatagaagtggaaagggccctgagagtgttggatggtgcagtccttgttctctgtgctgttggaggggtacagtgccagaccatgactgtcaatcgtcagatgaagcgctacaacgttccgtttctaacttttattaacaaattggaccgaatgggctccaacccagccagggccctgcagcaaatgaggtctaaactaaatcataatgcagcgtttatgcagatacccatgggtttggagggtaattttaaaggtattgtagatcttattgaggaacgagccatctattttgatggagactttggtcagattgttcgatatggtgagattccagctgaattaagggcggcggccactgaccaccggcaggagctaattgaatgtgttgccaattcagatgaacagcttggtgagatgtttctggaagaaaaaatcccctcgatttctgatttaaagctagcaattcgaagagctactctgaaaagatcatttactcctgtatttttgggaagcgccttgaagaacaaaggagttcagcctcttttagatgctgttttagaatacctcccaaatccatctgaagtccagaactatgctattctcaataaagaggatgactcaaaagagaaaaccaaaatcctaatgaactccagtagagacaattcccacccatttgtaggcctggcttttaaactggaggtaggtcgatttggacaattaacttatgttcgcagttatcagggagagctaaagaagggtgacaccatctataacacaaggacaagaaagaaagtacggttgcaacggctggctcgcatgcatgccgacatgatggaggatgttgaggaagtatatgccggagacatctgtgcattgtttggcattgactgtgctagtggagacacattcacagacaaagccaacagcggcctttctatggagtcaattcatgttcctgatcctgtcatttcaatagcaatgaagccttctaacaagaacgatctggaaaaattttcaaaaggtattggcaggtttacaagagaagatcccacatttaaagtatactttgacactgagaacaaagagacagttatatctggaatgggagaattacacctggaaatctatgctcagaggctggaaagagagtatggctgtccttgtatcacaggaaagccaaaagttgcctttcgagagaccattactgcccctgtcccgtttgactttacacataaaaaacaatcaggtggtgcaggccagtatggaaaagtaataggtgtcctggagcctctggacccagaggactacactaaattggaattttcagatgaaacattcggatcaaatattccaaagcagtttgtgcctgctgtagaaaaggggtttttagatgcctgcgagaagggccctctttctggtcacaagctctctgggctccggtttgtcctgcaagatggagcacaccacatggttgattctaatgaaatctctttcatccgagcaggagaaggtgctcttaaacaagccttggcaaatgcaacattatgtattcttgaacctattatggctgtggaagttgtagctccaaatgaatttcagggacaagtaattgcaggaattaaccgacgccatggggtaatcactgggcaagatggagttgaggactattttacactgtatgcagatgtccctctaaatgatatgtttggttattccactgaacttaggtcatgcacagagggaaagggagaatacacaatggagtatagcaggtatcagccatgtttaccatccacacaagaagacgtcattaataagtatttggaagctacaggtcaacttcctgttaaaaaaggaaaagccaagaactaactttgcttactgtgagttgactgactctaattgaatctgcgtggttttgatactttgatggattccagtggaataaattcaggctgctgaaacaagaaattctgagcccaggaagcgggctcttctttcttcaaaagaagcccttcttgttcatattcaggagcttctgttatattcaaaggtaattctatgtctatctcaactctattgattggttttatagtttattgaaaatcctcaaataaaatataattattactgaaatatgtttaatatttaaggggaaaagagactaatttcagttatacttttaagcttagaatgtatgttcatttccaaattttgtatcataagagttttcaacatagagaaaagctgaaaaaatgcaaagaataaccacatactttccatctaccttcctttgttaacgggttgtttatcatataataatttgttttgtcatatttgctttcactgtctattatctgtttaagtctcataactctatttttagtttgctgaagacttgaaagtgaatcgcatatatcatgacacttcttggagtgtcattaatgggcaggcttttctgttgaagagtggattccgtatgttcttcatagagagtgtttttcagattcttcattgggatattaaaatattagccaaatttctctctgttttatatatgtctgtttatttcagtttgtggtttctgcaaatttgtaactgcctctgttttaggagtataagtattacttccttgtggtctattgtgaagtaaaaagtagacccttgcatatactattcttgtttgtgttcatcttaatgtttttgtacagctaaatcaaatgtaatttatagagttagtttcatcaacctaatgaatgctagttaaatttgaattccttggaatttatcgtatattgtattcactgagattatgaagggacaaatgttaatcttttgtttccagaaaaagttgggctttcccaagcagttctattacccggttcagaattgcttcatccaaaaatcatctgatggtatagatggatcctagtccttttcattacctgatggtagaaataaaataattgatt

SEQ ID NO: 2486 - DNA, 2092 bp, Homo sapiens
aatcgtccgccgctcccgttaccggggcaaccgcggcgcctcctccgtgtcggccccgatcgtccctccgcgccattttcaaactgctctagcgccggagcccgtgcctggacggaaggagctagtgggggactcgaggcctgagggcaatgcggctggaggcggaggcaacggcggctggagctgccggactttaatttttggaagtgaataaaacttgttttagaagacgagatgactacagctgtagagagaaagtatattaatattaggaaaaggctggatcagctgggataccgccagactctgacagtggagtgtttacctttggtagaaaaacttttcagcgacttagttcatacaactgagagccttcggcaatcaaaattatctgctgtgaaagctgaaaaagaaagtgccaattttgattttgttttggaaccctataaacttgaaaatgcaagattgagtagagaaaataatgaattatacctagagttaatgaaactgagagaacattcagaccaacacgttaaagagttgaaaacttcattgaagaaatgtgcacgtgaaacagctgatctgaaatttctgaataaccaatatgctcataaactcaaactgttggagaaagagagcaaagctaagaatgaaagaattcaacaacttcaagaaaagaatttgcatgctgtagtacaaactccaggtggcaagaaaagaagtattgctttcaggcgccagcgtatgcaaattgatgaaccggttcctccctctgaagtcagttcatatccagttcctcaaccagatgacccttacattgcagacctccttcaagtggctgataacaggattcaagaacttcaacaggaagtccaccagctacaagaaaagttagcaatgatggaaagtggggtgagagactatagcaagcaggtaggatttttatttacttgcatagtagggattgagataggtatgctgtgattgtaaatagaattgggttatatttgaaattgctgatactgagtttttatacagctttcctctttttcatcaggtttgttaatagagttaatagctggaatggcttaggtggctttacttacttagcctgtctcttcaaaaaatttaaaaattagccaagtgtggtggcatgtgcctatggtcccaggtacttgggaggctgaggtgggaggattaatggattgaagagcacttatttactcgattctcttcactattcattgaggtgaatagtagttttttgtttggtttttcttttagctgaatcatctatctccccaaatataattttataaccatattaccgttttcatctcaggagacattttattaagtgtgctatgttttataattgtatttttgtgatttttctactcttattatatattttgtcatattgaacaccagtctcttagaaagttactcttttgtgttgctaatttttttgtttgttttctctataagcacaagtcctcatacaacagttttctgaagaatcaggagaattagtagatgcagagttatattataaccatagcaagctttgtcttttcataatttctattgatgtcttggctaaattttgatttgggtaattataggcttgttttcttaatatgcttcttgaaggttaaattgggtaacatgtttttcattttctgcattgactgcattttttttgagtgatctgcacacacaaatatagatgtaacttaggtgttggtataactaaatctttaaagtgttttgaagattagttggataaaaatggagttaaagaaaattgaccaggcgtggtggctcatgcctgtaatcgcagcactttgggaggccgaggcgggtggatcacttgagatcagaagtttgagaccatcctggccaacatggtgaaacctcatctctactaaaaatacaaaaaattagccgggcgtagtggcgggcgcctgtagtcccagctacttgggaggctgaggcaggagaatggcgtgaacccgggaggcggagcttgcagtgagccgagatcccgccactgcactccagcctgggcgacagagcgagactccgtctc

SEQ ID NO: 2487 - DNA, 3206 bp, Homo sapiens
agttgcagcggccggggaagatggtggaggacggcgcggaggagctggaggatctggtgcacttctccgtgtctgagttgcctagtcgcggctacggcgtcatgggtgagatcctgcggcagggcaagctgtgcgacgtgaccctcaagattggggaccacaaattcagtgcccaccggattgtcttagcagcctcgatcccgtatttccatgctatgtttacaaatgacatgatggagtgcaagcaggatgagattgtaatgcaaggaatggacccaagtgccctggaggctctgatcaactttgcctacaacggcaaccttgccattgaccagcaaaatgtccagtcattgctgatgggggcgagcttcctgcagctgcagagcatcaaagacgcctgctgcacattccttcgagaacggcttcacccaaaaaaactgcctgggtgtgcgccagtttgctgagacaatgatgtgtgctgtgctgtacgacgctgccaacagcttcatccaccagcactttgtggaggtgtccatgtcagaagagttcctggccctgcccttggaagacgtgcttgagctggtgtctcgggatgagctgaatgtcaaatctgaggagcaggtctttgaagctgcattggcctgggtcagatacgaccgggagcagaggggtccctacctgcctgagctgctgtccaatatccgcctgcccctctgtcggccccagttcctttcagacagaatacagcaggatgacctggtgcgttgctgccacaaatgcagggacctggtagacgaagcaaaggactaccacctcatgccagagcgccggccccacctgccagctttcagaacccggccacgctgctgcacatccatcgctggacttatctacgctgtagggggcctcaactcagcaggtgattccctgaatgtggtggaagtgttcgaccccattgccaattgctgggagagatgccgtcccatgacaacagcccgcagccgcgttggcgtggccgtagtgaacgggcttctctatgccatcggaggatatgacggcaagctacggctgagcactgtggaggcctacaacccggagacagacacatggaccagagtggggagcatgaatagcaagagaaggtattctggaagccacgtgcagcccgaacatacacactgagcacctggggagcgccatgctagacgagcaggggcacacagtagagtaaaatacaagctttggcctgggagtttcctgcagccaggccagccactgccagtacctcctgggagcgagcccccatctgcttaaaagtaaaatatccaccttgtcctttggggaacttggggagaccaggcgtggacatgtggaagttgtgttgttattttaagtgccagataaggactggaaatgtgtattatggaagattcgaagagggagagaaactggactggaacttctggaagatttcagggaagaggtgggattaaagttgaaacttgaagaataaggaggatttacctttattagtgataaaaggaaatccaaggtgtttttctgtgtaccttccttccccaggactcccctcacacatgcacttccactacctggggagaatacgaaccaaagcaatgttcttttatttaggtcacacacattctcccagacaggagcacataggtatttgcaaggtgggccaagttgatatgtcactcagtacattctagctacctgctctctccacttctctgcttatattgtctgaataagaagtgggattagaagacatcccagtgcctttgtttagcccttcttactgctgaggtgacaggtggcatgtttcattatgtcagacacgtgatggagtcatcacatgtgtgggcagctgaaaagctggcgcagcccaaggaggggagaggaaagctgcccagggccccctggccgttacccaggacagctctgcactgattgcttttacacattgagcttccttgatatatgcctaatgttgttccacatccagcagcgtttgcatgtggatgtgagctgggagggatctgcctttgtactggtgagaccagttcacaaagcatcggagtaggttcctttgggaagaaaaaaatacgtaagatctgccctcccaagaacgcgttgagagtcctttcctcccaccatccccacttttgctccttggatactttgcagcttcctatgtttgagtgactcattgctccgtgtccccaaccatgagtagcttttttgctttgactgcagtcagctgtccttccttgtgtgtctgctctggaccacttccttgctttgatgttactgggtttagagggctgtcttggaggaaagttctctgggtattcctttccttcactgtggttaatatcctgttattagtgtgggcccggttccattacatcccttttaaattacaggctaccttaaaacgttcctagtcacttctcttctgacatcccacacagctgtctgttctgccagttagtgacatcctgccatctttccttcctatctcccccagtgttctacgccatcccatagacctttcttacactggactattccagtccatgctgatcagcattttctccttctcttcacactcgcctttaccacctagttgatagttaatctcatgcagttttggggcacctcttaattcattttcatattgttctacacctgttttgttatgtaatttttatgtttgttttgtgtccgtatccagaaggatagtgatcatgtctagtaaatttgtgatcttcccacaatacttgcctaaggcaagtccctctcctctttctggctggttcagggggtcagttatcatgtccctgaaagggacattctgtggatcagtttgattactatgtacatttaaaaggtagcagcaagccaggtatggtggctcacgcctataatcccagcactttgcgaggccaaggagggcggatcacctaaggtcaggagtttgagaccagcctggccaacatggtgaaaccctgtctttactaaaaatacaaaaattagccaggcatggtggcgggcgcctgttatcccagctacttgggaggctaaggcagggagaattgcttaaaccggggaggcgggggttgcaatgagctaagatcgtgccactgcattccagcctggttgacagagtgagactccgtctc

SEQ ID NO: 2488 - DNA, 2342 bp, Homo sapiens
ccagccggcgcttgcgcggtggcacgggcgagtgggggggcgaggaggtggaggaggaggaggaggaggaggaggtggcggcgagaagatggcgacttcgaacaatccgcggaaattcagcgagaagatcgcgctgcacaatcagaagcaggcggaggagacggcggccttcgaggaggtcatgaaggacctgagcctgacgcgggccgcgcggctccagctccagaaatcccagtacctgcaactgggccccagccgaggccagtactatggcgggtccctgcccaacgtgaaccagatcgggagtggcaccatggacctgcccttccagaccccctcccaatcctcgggcctggacaccagccggaccacccggcaccatgggctggtggacagggtgtaccgggagcgtggccggctcggctccccacaccgccggcccctgtcagtggacaaacacggacggcaggccgacagctgcccctatggcaccatgtacctctcaccacccgcggacaccagctggagaaggaccaattctgactccgccctgcaccagagcacaatgacgcccacgcagccagaatcctttagcagtgggtcccaggacgtgcaccagaaaagagtcttactgttaacagtcccaggaatggaagagaccacatcagaggcagacaaaaacctttccaagcaagcatgggacaccaagaagacggggtccaggcccaagtcctgtgaggtccccggaatcaacatcttcccgtctgccgaccaggaaaacactacagccctgatccccgccacccacaacacaggggggtccctgcccgacctgaccaacatccacttcccctccccgctcccgaccccgctggaccccgaggagcccaccttccctgcactgagcagctccagcagcaccggcaacctcgcggccaacctgacgcacctgggcatcggtggcgccggccagggaatgagcacacctggctcctctccacagcaccgcccagctggcgtcagccccctgtccctgagcacagaggcaaggcgtcagcaggcatcgcccaccctgtccccgctgtcacccatcactcaggctgtagccatggacgccctgtctctggagcagcagctgccctacgccttcttcacccaggcgggctcccagcagccaccgccgcagccccagcccccgccgcctcctccacccgcgtcccagcagccaccacccccgtcacccccacaggcgcccgtccgcctgccccctggtggccccctgttgcccagcgccagcctgactcgtgggccacagccgcccccgcttgcagtcacggtaccgtcctctctcccccagtcccccccagagaaccctggccagccatcgatggggatcgacatcgcctcggcgccggctctgcagcagtaccgcactagcgccggctccccggccaaccagtctcccacctcgccagtctccaatcaaggcttctccccagggagctccccgcaactggagcagttcaacatgatggagaacgccatcagctccagcagcctgtacagcccgggctccacactcaactactcgcaggcggccatgatgggcctcacgggcagccacgggagcctgccggactcgcagcaactgggatacgccagccacggtggcatccccaacatcatcctcacagtgacaggagagtccccccccagcctctctaaagaactgaccagccaccgaggacaccttccggatggaccgcctgtgagcgggcacgccggcaccctgccgctcagccgtcccgacggcgcctccccagcccggggacggccgtgctccgtccctcgccaacggccgagcttgtgattctgagcttgcaatgccgccaagcgccccccgccagcccgcccccggttgtccacctcccgcgaagcccaatcgcgaggccgcgagccgggccgtccacccacccgcccgcccagggctgggctgggatcggaggccgtgagcctcccgcccctgcagaccctccctgcactggctccctcgcccccagccccggggcctgagccgtcccctgtaagatgcgggaagtgtcagctcccggcgtggcgggcaggctcaggggaggggcgcgcatggtccgccagggctgtgggccgtggcgcattttccgactgtttgtccagctctcactgccttccttggttcccggtcccccagcccatccgccatccccagcccgtggtcaggtagagagtgagccccacgccgccccagggaggaggcgccagagcgcggggcagacgcaaagtgaaataaacactattttgacggc

SEQ ID NO: 2489 - DNA, 1964 bp, Homo sapiens
tgacaatctaccagaagctttccctattactttagaatggggtggaagagtggtcagagaaacagtatattggttccagtatgaaagtgattcatctttgaatagtaatgtttacgatgttgcaatgaaacttgttaccaagcactttccaggtgaatttgggagtgaaatcctagttcagaaagttgtccacactatattgcatcagactgccaaaaagaatcccgatgattatactcctgtaaatatagatggtgctcacgcccaaagagttggagatgttcaaggacaagaatcagagtctcagctcccaactaaaattattcttactggacagaaaacaaaaactttgcacaaggaggagttaaacatgagtaaaactgaaagaactattcaacagaatattacggaacaggcttctgtaatgcagaaacggaaaacagagaagttaaaacaagaacaaaaagggcaacccaggactgtttctcccagtaccattcgtgatggtccatcctctgcacctgctacacctaccaaggctccctattcaccgacaacttctaaggagaagaagatccgaatcacaactaatgatggacgacagtccatggttacccttaagtcttcaacaaccttttttgaacttcaggaaagtatagccagagaattcaacatttttccatatttacagtgtattcgatacgggtttcctcctaaagagttaatgccaccacaggcaggaatggaaaaggaaccagttcctttacagcatggcgacagaattacaatagaaattctaaaaagtaaagctgaaggtggtcagtctgctgcagcacactcagcccacactgtgaaacaagaagatattgctgttactggtaaactgtcatctaaggaacttcaggagcaagctgaaaaagaaatgtactccttgtgtcttttagcaacattaatgggagaagatgtatggtcttatgcaaagggacttcctcacatgtttcagcagggtggtgtattctacagtattatgaagaaaaccatgggtatggctgatggcaagcattgtacttttccacatctgcctggcaaaacctttgtctataatgcttctgaagatagactggaattgtgtgtggatgctgcaggacatttccccattggtcctgatgttgaagatttagttaaagaggctgtaagtcaggttcgatcagaggctactacaagaagtagggaatcaagtccctcacatgggctattaaaactaggtagtggtggagtagtgaaaaagaaatctgagcaacttcataacgtaactgcctttcagggaaaagggcattctttaggaactgcatctggtaacccacaccttgatccaagagctagggaaacttcagttgtaagaaagcataatacagggacagactttagtaatagttccacctaaaacagagccttctgtattcacagcttcttctagtaatagtgagcttattcgaatagctcctggagtaataacaatgagagacggcaggcagcttgatcctgatttggttgaggcccagcgaaaaaaaattgcaggaaatggtttcttctattcaggcttcaatggacaggcaccttcgggatcaaagtacagagcagtcaccatctgatcttcatcaaaggaaaacagaagttgtgagttcttctgcagagtctgggagtcttcagactggtttgcctgaatcttttcctttaactggtggtactgaaaatttgaatacagaaacaactgatggctgtgtagcagatgcactgggagcagcctttgccacaaggtcaaaagcacaaaggggaaattccgtggaggagcttgaagagatggatagtcaagatgctgagatgactaacacaactgaggccaatggatcactcttgatttaattagaggctaataaaggcagaatgtttattgtgaatatgta

SEQ ID NO: 2490 - DNA, 2157 bp, Homo sapiens
gatcacaaatccaaacccttcagaagaaggtagtaaacttggagactgctctgagttacatgaccaaagagtttgagagtgaagttttaaaactgcagcaacacgcaatgatagagaaccaagcaggtcaggtagaaattgacaagctgcagcaccttcttcagatgaaggacagggaaatgaatcgtgtgaagaagctggccaagaacatactggatgagagaacagaagtggaaagattctttttagatgctctgcaccaagtgaagcaacagatcctaattagcaggaagcattataagcagatagcacaagctgctttcaatttaaaaatgagagcagcatgtacaggaagaacagaatatcccaaaatcagaacatttgatggcagagagcacagcaccaatagtgtgaatcaggatcttctggaggccgaaaaatggacacatattgaaggaaatgtggatattggagatttgacctgggagcagaaggaaaaagtattgcgattgctctttgcaaaaatgaatggctgtccttctaggaaatacaaccagagttctaggcctccagttccagactatgttgtttctgacagtggggaaacaaaggaatttggggatgaaagtaagcttcaagataaaatcttcatcacccagcaaattgcaatatcagactcttctggtgaagtggtgctacccactattccaaaagaacctcaggagtctgacacaggaaccttctgagaagcactgattatgacctcacagatgctgctggcagtcccttccttgcagaatccttgctcctgaatatctttaagaaaatttcttaaaggaaaagacaaaaaatttaactcaaaagttacctgtttgccatagaaattggtgtctcccctgaaggaggatcgagagccggtgaatgagaacattggcaaaggcactggaatggggacattcactcccacctaaaacagaacaaatccgtgtcatatcctaaggacaaaggaactctccatttagaaacacaaaggcatcagagaccagttttaaatacccaccttctaccctatcctctaccccatgaactttcattcctgaggaagaaatggggcaatgtgggaggtcatgggggcaatcttaaaccaatgactcaccattatttactgtttcctcttaggaaatagtaaatggatataagaatctcttaaaaattctgttcacgaacctgtccaacatccaccaagtgggcatatttccgagcagtggctccattggtggtgaagatggcagttccatttccatatgggttgttatttacaatctggatggcttcatccaatgtttctgtctccagaaccacaagaactggaccaaaaatctcctctttgtaacaggtcatatttggctgccaggagtgatgcatccagaaaagaagtcagctttttggattctgagtattttatgcttatttggtactttcacttactacacatcatttacgtggacaactttcatattactaatctcttttcatttcaaatcacctatttaaaaaaaaagtcctctctcaagtgtattccgtcttccaagttaccaatcatataaacaacttggaattcctatcaacaataaccacacttcctttaagggactgtatctttagttcatgacccatcatcagctgcctttttaatacctgaacgactagtttcatccaattgttatcaaaaagttacatgaaaatttattttttataaatccaatctatagtaaatataccaggataatttttctctttacagaaaccccatgctgttttctgtaacataaataatccattcttattcactcctttgcctcccaaatatgtctgtatgtttatattttgatatcaggtcgcagacactcaaaacatccttcaccatgcaattaatgtttgttgctgataaacggatttttctgtatggttctgtggcaagagatttcataatttctactgcacttacattcaacacttgatgattcactattatagtaaggatatatgaatttcaaaaaatgcctcataacctcaatttttaagtcatgttagctgagagactttcaaagttttgataaataaaaattgccaagtcaaaaaaaaaaaaaaaaaaaa

SEQ ID NO: 2491 - DNA, 963 bp, Homo sapiens
ctcagcttgcgccgccgccgccgccgccgccgccgcgcacgccatgggagccgtgactgacgacgaagttatacggaagcgtctcctcattgatggagatggtgctggaggtgatcggagaattaatctgctagtgaagagtttcattaaatggtgcaactctgggtcccaggaggagggatatagccagtaccaacgtatgctgagcacgctgtctcaatgtgaattttcaatgggcaaaactttactagtatatgatatgaatctcagagaaatggaaaattatgaaaaaatttacaaggaaatagaatgtagcatagctggagcacatgaaaaaattgctgagtgcaaaaagcaaattcttcaagcaaaacgaatacgaaaaaatcgccaagaatatgatgctttggcaaaagtgattcagcaccatccagacaggcatgagacattaaaggaactagaggctctgggaaaagaattagagcatctttcacacattaaagaaagtgttgaagataagctggaattgagacggaaacagtttcatgttcttcttagtaccatccatgaacttcagcaaacattggaaaatgatgaaaaactctcagaggtagaagaagctcaggaagcaagcatggaatcagatcctaagccatagacaggctaattgcccaccactcccaggaatattgaaatagctacatgaccataatgtgtttaaaatgtggtatgctcttgagatatttaaagttttggcagtaaaatactctgtttttaagtatgaatgtatttcattcatatttcctctcacaaaggaaaatgacttcagtatagatttgtttttattaaaatgcattttttattcttaagtggtaggaagcaacatccaaaaatgcttaataaaatgcttttaagctgcaaaaaaaaaaaaaaaaaaaaaaaaaaaaaaaaaaaaaaaaaaaa

SEQ ID NO: 2492 - DNA, 2508 bp, Homo sapiens
ctttctgctgttaccgggagcgcggtggccacggaacgctgcccggagccgcgcgagggaggacccgacgcgcggcgtttacccagcgcagcgttccaccgctcgggtttggctggaatagctctccagacccccagctggccatgtggtgagttcagggcccaaatcaagtagtaccagcaatcagggaactcctatctgttttgaatggattcacaccagccacaagcctggaaagatggtgtcacaatctacagtcaggcaggattctcctgtggagccctgggaagggatcagcgatcactctggcattattgatggttcgcccagactcctgaacactgaccatcctccttgccaattagacatcaggctcatgaggcacaaagctgtctggattaacccccaggatgtgcagcaacagccgcaggacttgcaatctcaggtgccagcagcagggaacagtgggacccattttgtgacagatgctgcctctccctcaggcccttcaccttcgtgcctcggggactccctggcagagacaacgttgtctgaggataccacagactccgttggcagcgcttctccccatggctcgagtgaaaagagtagcagcttctctctgtcctcaacagaggtacacatggtccgcccaggatactctcatcgggtgtctctgcccacaagccctaggattttggccacctccccatatcctgagactgacagtgctttttttgagccttcccatctgacatctgctgctgatgaaggtgctgttcaagtcagtagaagaaccatttcttcgaattccttctcaccagaggtatttgtgctgcctgttgatgtagaaaaggaaaatgcccacttttatgttgcagatatgattatatcagcaatggagaaaatgaagtgtaacattctgagtcaacagcagacagagagctggagtaaagaagtcagtgggttacttgggagtgatcagcctgactctgaaatgacttttgataccaacataaagcaagagtctgggtcttctacttcttcatacagtggctatgaaggttgtgctgtgttacaggtcagcccagtgactgaaacacgtacttaccatgatgtgaaagagatttgcaaatgcgatgttgatgaatttgttattttagagcttggagattttaatgatatcacagaaacctgtagctgttcctgcagctcctctaagagtgtcacttatgagccagacttcaattctgcagaactattagccaaagagctgtaccgcgtgttccagaagtgctggatactgtcagtagttaattctcagctggcaggttccctgagtgcagctggctcgatagtcgtaaatgaagagtgtgtccgaaaagactttgaatccagtatgaatgtagtacaggaaattaaatttaagtctaggatcagagggactgaagactgggctcctcctagatttcaaatcatatttaatattcatccaccactcaagagggaccttgtggtggcagcccagaattttttctgtgccggctgtggaactccagtagagcctaagtttgtgaagcggctccggtactgcgaatacctagggaagtatttctgtgactgctgccactcatatgcagagtcgtgcatccctgcccgaatcctgatgatgtgggacttcaagaagtactacgtcagcaatttctccaaacagctgctcgacagcatatggcaccagcccattttcaatttgctgagcatcggccaaagcctgtatgcgaaagccaaggagctggacagagtgaaggaaattcaggagcagctcttccatatcaagaagctgttgaagacctgtaggtttgctaacagctgtgtcaaggaaagggctttatttgtgaattttgccagaatacgactgtcatcttcccatttcagacagcaacatgtagaagatgttcagcgtgcagggcttgctttcacaaacagtgcttccagtcctccgagtgcccccggtgtgcgaggatcacagcgaggagaaaacttctggaaagtgtggcctctgcagcaacatgatgcccctgagtactgtgaaaaagactgttcaacatgccttatgataacaccgatttgtgtctattattggtgacattgttttagatattgggtattgtatattaaggaaaaagatggtctatattctctttattgcatatacttaatgtttcaaaagaatgcagattctgtgtttaagcacagggctgatagttgtggttttgtttacaaatgttctgttttggctgctattggttttttaaagaggttttttatacttttgtatttgaatagttatgtttcactgatgctgagccagtttgtatgtgtgtgcatatatgtgaactgtaactgacaagatgaattactcagtttctctttctctaaagcttgtttgatgaaactggttggtcctttcagtgaacaaaaatatgaccccaaaaaaaaaaaaaaaaa

SEQ ID NO: 2493 - DNA, 1652 bp, Homo sapiens
ggcacgagggccctctggcggctccggaccacaggccgagttactctgattaccgccatgctccaagacccgcactgacagtccccacgtgagggaccgcggtgggagtcctaaatgggggaggaggggacgggcggcactgtgcatctgctgtgcctcgcggcctccagcggggtccccctattctgcaggagcagtcgcggcggcgcccccgcccgtcagcagctcccgttctctgtcatcggttccctcaatggagtccacatgtttgggcagaatctggaggtgcagctgagctctgcgaggaccgagaacacgactgtggtgtggaaaagcttccatgacagcatcaccctcattgttctgtcatctgaggtgggcatctctgagctgaggctggagagactactccaaatggtgtttggagccatggtccttcttgtgggacttgaagaactgaccaatatccgcaacgtggagagactgaagaaggacttgagggccagttattgcctcatcgacagcttcctgggggactcggagctcatcggggacctgacccagtgtgtggactgcgtgattcctccagaggggtccctcttgcaggaagccctctccgggttcgctgaggccgcgggcacgaccttcgtcagtctggtggtgtccggccgggtggtggcagcaacagagggttggtggcggctggggacgcccgaggccgtgctgctcccctggctggtggggtccctgccgccgcagaccgctcgcgactacccggtgtacctgccgcacgggagccccacggtcccacaccggctcctgaccctgactctgctgccgagcctggagctgtgtctactctgcgggccgagcccacccctcagccagttgtatccacagcttctggagcgctggtggcagccactgctggacccgttgcgggcctgtctgccgttgggaccccgggcgctgcccagtggcttcccccttcacacagacatcctcgggctgctgctcctccacctggaactgaagcgctgcctcttcaccgtggagcccttgggggataaagagccttcaccagaacagcgccggcgcctcctccgaaacttctataccctggtcacctccacgcacttcccaccagagccagggccaccagagaagacagaagatgaggtctaccaggcccagctgcccagagcttgctacctggtgttggggactgaggaaccaggcacaggagtgcgtctggtggccttgcagctggggcttcggcggctgctgctgctgctgtctccccagagtcccacccatgggctgcgaagcctggccacccacactctgcatgccctcaccccacttctttgactacctagcagtgggtgatggacacagacatggggctgttagcgtctctctgtttattcgctcacaataatacacagcccctggatggggagggggtaggaggggctacaacagggtggggtgggaggggaggagacatccacttccctggcccctctcccctctgtgcttgggggggaaagggagggagggggactccccctaaccccccagaatgtaaacagcagcagatgaacaaaaataaaaatacaaaaggccgaaaaaaaaaaaaaaaaaaaaaa

SEQ ID NO: 2494 - DNA, 1744 bp, Homo sapiens
ggcacgaggaaaacctacctggagaccaaaggggcagccttgagccagaccacagagtttcttcctttctatgcccttccttttgttcccaaccctatggtgcacccctcatttaaagaactcttccaggattcctggactccagagttaaagttgaagttggaaaagtttctagctttaatatctaaagccagcaacacgccaaagcttttaacaatatataaggagaatggacaaagtaacaaagaaatcttgcagcagctccaccagcagctggttgaagctgaacgtaggtcagtgacatacctcaaacggtacaataagatccaggccgactaccacaatctcattggagtcacagcagagctggtggattctctagaggccacagtcagcggcaagatgatcacccctgagtacctccagagcgtctgtgtccgcctgttcagtaaccagatgcggcagagcctggcgcatagtgtggacttcacgaggcctgggacggcatccaccatgttacgagcctccttggcacccgtgaaattgaaggatgtcccattactgccctccttggattatgagaaactgaagaaggatttgattttggggagtgaccgcttgaaagccttcttgttgcaggctctgcgctggcgcttgaccacatcccatcctggagagcagagggagaccgttctgcaagcctacatcagcaatgacctcttggactgttatagccacaaccagaggagtgtgcttcagttgctgcactccacgagcgacgtggtgcggcagtacatggccaggctcatcaatgcttttgcgtcactggcagaaggtcgcctctaccttgcccagaacacaaaggtgctgcagatgctggagggaaggctgaaggaggaggacaaggatatcatcaccagggagaatgttcttggggccctgcagaagttcagtctcaggcgcccgctgcagacagcgatgattcaagacggcctcatcttctggctggttgatgttctgaaggaccctgactgcctgtctgactacacgctggagtactcggtggctttgctcatgaacctctgcctccgcagcacagggaagaacatgtgtgccaaggtggcaggcctcgtgctcaaagtcctttcggatcttcttggccatgaaaaccatgagatacagccgtatgtgaatggagctctgtacagcatcctttctgttccatccattcgtgaggaagcaagagcaatgggaatggaagacatcctacgctgcttcatcaaagaaggcaatgctgaaatgatccgccagatagaattcatcatcaagcagctaaattccgaagagctaccagatggtgttcttgaatctgatgatgatgaagatgaagatgatgaagaggaccatgacatcatggaagccgatctggacaaagacgaactgatccagccccagcttggagaactctcaggagagaagcttctgaccacagagtacctggggatcatgaccaacacggggaagacaaggcggaaggggctggctaatgtgcagtggagcggggatgagcccctgcaaaggcccgtcacccccggcggccacagaaacgggtacccagtgtaagtcagggctaaaggaagcgggaattgactttcttaagctttgttttgattacagtgtaagatgtatgtatttttaaaattcaaaataaagcattcattttgaaaaaaaaaaaaaaaaaaaa

SEQ ID NO: 2495 - DNA, 1332 bp, Homo sapiens
agtgcgcaggcgctggcaagatggcgggaggggtgcgcccgctgaggggcctccgcgccttgtgtcgcgtgctgctcttcctctcgcagttctgcattctgtcgggcggtgaaagtactgaaatcccaccttatgtgatgaagtgtccgagcaatggtttgtgtagcaggcttcctgcagactgtatagactgcacaacaaatttctcctgtacctatgggaagcctgtcacttttgactgtgcagtgaaaccatctgttacctgtgttgatcaagacttcaaatcccaaaagaacttcatcattaacatgacttgcagattttgctggcagcttcctgaaacagattacgagtgtaccaactccaccagctgcatgacggtgtcctgtcctcggcagcgctaccctgccaactgcacggtgcgggaccacgtccactgcttgggtaaccgtacttttcccaaaatgctatattgcaattggactggaggctataagtggtctacggctctggctctaagcatcaccctcggtgggtttggagcagaccgtttctacctgggccagtggcgggaaggcctcggcaagctcttcagcttcggtggcctgggaatatggacgctgatagacgtcctgctcattggagttggctatgttggaccagcagatggctctttgtacatttagctgtggtgtgtgcttcagaaaggagcagggcttagaaaaagcccttttgtccgtaggagttgatgtggtgtgagtgatatacttctatgtttttaatgtacagcatctgtactttgtttgccttgataaaggtaagataaatgaaacgctgaactatgctaatctggaatttgtttttatttgcctgaaatatatttttttctgtgaaaaaattaaaacgtacttaagccaggagaatgaattatacagtgattgaaaatccatttaattcctatgacttttgttttgtattgcccaagtcaaactacatcacttgtatctccagcccaaatgtagtctgccttgaaaagtctttcagctgtgactgcaggaagtgggagtgtttttattgttagctaattgctgtgactgcaggaagtgggagtgtttctgttgttggctaattgaagttattaggctcagcttcagtcatgtgtaagttttgcagtgtaatacatatgtagtctggtctgtatatatgaaaatttgaattaaactgcagaatgtttatgtctagttatggtttaaattttcttagtagtatataaaaggtaagagtactgaaaaattaataaaattgcaagttaagaaaaaaaaaaaaaaaaaa

SEQ ID NO: 2496 - DNA, 3576 bp, Homo sapiens
gaaaggtcacagcgcggcagcgggtctggctggcggcagcggcgggagggagccgagagacccgagtgcacgtgtggagaagcggcggcacaagcgcggcggcgggagacactcccgcccccaccagactcaagccctcactcgactctcgcggccttcgttgctcgcacagctccctgcccaggctaggaggccggcttgcggggttgagtggcccgagctaagggtgcggagacctaagggcggcgactacgacggcgttgatatcggtggtaacgacggcctcagcaggcggggaagatgaaaggtagccggatcgagctgggagatgtgacaccacacaatattaaacagttgaaaagattgaatcaggtcatctttccagtcagctacaatgacaagttctacaaggatgtgctggaggttggcgagctagcaaaacttgcctatttcaatgatattgctgtaggtgcagtatgctgtagggtggatcattcacagaatcagaagagactttacatcatgacactaggatgtctggcaccttaccgaaggctaggaataggaactaaaatgttaaatcatgtcttaaacatctgtgaaaaagatggtacttttgacaacatttatctgcatgtccagatcagcaatgagtcggcaattgacttctacaggaagtttggctttgagattattgagacaaagaagaactactataagaggatagagcccgcagatgctcatgtgctgcagaaaaacctcaaagttccttctggtcagaatgcagatgtgcaaaagacagacaactgaacaaattacaaatgaactttcttgcacttgcttgtcgccaaataaaagagaggcccattgattcctcccccaccccaacacttttcttttaaagcttttctccctccttgttcttgtttttctttcttcctttccttttctctgagagttttaatactttcaaggactttaaaaaaataatcatgtttgaattgttttctcttatttttgtgaggtggtttgaaggaaggacaaggtagatctgtttagttttgcagttgaagttagatggtcctaaacatttaattgtcaaataatttcaaatttaatgtcctgctttcacattgaagggcagagcctacaaaacattgtatatttcaaaagacaaaaagaagcagcagcagtatcttgttctctaattcatagacaagttgagtgtgtttgtggtactttgggtttttaaacactttgggatactaatccctagacattgccttcactccacctttagtccttctgagcactctctcgggagttggaacattgttatccttgtaagaaatactaagcttatgttgatttttaagtaattatatcttctcttcttgctggtgggtggggcagtttggtttagtgttatactttggtctaagtatttgagttaaactgcttttttgctaatgagtgggctggttgttagcaggtttgtttttcctgctgttgattgttactagtggcattaacttttagaatttgggctggtgagattaattttttttaatatcccagctagagatatggcctttaactgacctaaagaggtgtgttgtgatttaattttttcccgttcctttttcttcagtaaacccaacaatagtctaaccttaaaaattgagttgatgtccttataggtcactacccctaaataaacctgaagcaggtgttttctcttggacatactaaaaaatacctaaaaggaagcttagatgggctgtgacacaaaaaattcaattactgtcatctaatgccagctgttaaaagtgtggccactgagcatttgattttataggaaaaaatagtatttttgagaataacatagctgtgctattgcacatctgttggaggacatcccagatttgcttatactcagtgcctgtgatattgagtttaaggatttgaggcaggggtaattattaaacatattgcttctattcttggaaaaatagaagtgtaaaatgttaataatacaaatgtcactgtgacctcctccactgtgaggactggtttatgccagatcattttccggcacacacggagtggctttgacagattgataactttgtaagatgggagacatctgaaatattcatgttttccttttgtagtcccatctccactatttagaaatgttctcagactttaaaataatgcacagggcttgagctttctgtcatttgactttaaaaggaagtttcattcatatttatcctcttatgtaaaattgcggtataaagtctcatttccaaatatgttaaatgacaaaattattttataaaatgtttatgcacactttataaccttaagtttttatttgagaatgtgaaagtacaaagtgcagtagacttcaacaatcttgagtgccaagaataatacagaaaaagaagacagttgatgaatgagtttatagggttctaatcttaagatggtaaaaatgtagaaagaccttgctggttttttgggggtattcgtttcttaaacaatccaaatctaagcttagaagaaaagtttagcgttaagcacctttatcttcatgaataagcttcagcttgctcttggcaagagaagagtgcttgagttacagaaggcataagtagtttgaagaatgcagcagcctttttgtaaacttcccagatatcaaaatagactttgatatataaatggttttctgagatgacactgcctctatttctataaccatttcacctggactatctaaccagtcctatgaatgtatccctaaatgtggttattgaaaacctaatagctgcctcatgacaagtacatgttatttaaggaggaaaaaatattaaattttgaattgagtgtgtaggctccctatcattatatatagagtttctttttccacggtagtcagtgacttaacctgaattgtaaatgtttgtaaagggttaattgtcctacatcaaacttagttaaataattccatccacttatggaggaggaggagaatgtggaagaggtaaaaagctgggcacaagttcatatgcctatgagtcagtaaagactgaagtaatgtcctatgttgagctggttattttgatatatgataataattatctttgaagtagaacaattctgttaactggaaaatcacaggatatatccatcatatttttcaggacagatagtttttactgtggggcaaataggttaaaattacactatgttagttgcatttaggttttaaagcaaagaatctgtagagaaatctatgcaatatatagtttgtccagattagctttcatttggggaatgaagttctgaaatatctaaagcagtttactcatcaattgaaaagtcctccaaaaagagaactattgggaaaccatggtgtggtggtggaaaagaaaagctccctcagttttttggagggaataacttaaaaaaatacttaaatggctaagtttacttggtgcagttaagaattaaacttgtcaattttaacattgctgttacatctgaaataaacttatgtgatgttctggt

SEQ ID NO: 2497 - DNA, 2189 bp, Homo sapiens
gaaggacggtgtgcgggccggccagccctggacgaaagaagagggcccctccaggccagtctgggcaccctgggatagcggctgcagccaggcatggccgactctgcacaggcccagaagctggtgtacctggtcacagggggctgtggcttcctgggagagcacgtggtgcgaatgctgctgcagcgggagccccggctcggggagctgcgggtctttgaccaacacctgggtccctggctggaggagctgaagacagggcctgtgagggtgactgccatccagggggacgtgacccaggcccatgaggtggcagcagctgtggccggagcccatgtggtcatccacacggctgggctggtagacgtgtttggcagggccagtcccaagaccatccatgaggtcaacgtgcagggtacccggaacgtgatcgaggcttgtgtgcagaccggaacacggttcctggtctacaccagcagcatggaagttgtggggcctaacaccaaaggtcaccccttctacaggggcaacgaagacaccccatacgaagcagtgcacaggcacccctatccttgcagcaaggccctggccgagtggctggtcctggaggccaacgggaggaaggtccgtggggggctgcccctggtgacgtgtgcccttcgtcccacgggcatctacggtgaaggccaccagatcatgagggacttctaccgccagggcctgcgcctgggaggttggctcttccgggccatcccggcctctgtggagcatggccgggtctatgtgggcaatgttgcctggatgcacgtgctggcagcccgggagctggagcagcgggcaaccctgatgggcggccaggtatacttctgctacgatggatcaccctacaggagctatgaggatttcaacatggagttcctgggcccctgcggactgcggctggtgggcgcccgcccattgctgccctactggctgctggtgttcctggctgccctcaatgccctgctgcagtggctgctgcggccactggtgctctacgcacccctgctgaacccctacacgctggccgtggccaacaccaccttcaccgtcagcaccgacaaggctcagcgccatttcggctatgagcccctgttctcgtgggaggatagccggacccgtaccattctctgggtacaggccgctacgggttcagcccagtgacggtggggctggggcctggaggcccagatacagcacatccacccaggtcccgagccctcacaccctggacgggaagggacagctgcattccagagcaggaggcagggctctggggccagaatggctgtccttgtcgtagagccctccacattttctttttcttttttgagacagggtcttgctctgtcacccagactggagtgcagtggtgtgatcatagctcactgcaccctcaacctcctgggttcaagcaatcctcctgcctcagcctcctgaacagctgggaccacaggtgcacgccaccacacctggcttttttttgttgtttttagagacagggtctcactatattgctcaggctggtcttgaactcctgggctcaagtgatcttcccacgtgggcctcccaaaacgctggaactacaagtgtgagccaccgcgcctggcccaagccctccacattttcaatccaggagccttgagtctgtgttgtgtcctgacacctccaagttctagggccgtcaggacacgggagggtttggggacagagtgtccttcctctgtcctctcatcccagtcctgatggccgcttggtgagtgtctggtgccctggtggcctgccccagctctcttctggctttctgagcaggaagcgagcagaggctccacaggcttacgctgctctcctgacagccacacgcgaccctcggtgcagagtgcagaggcggctctggttcctccagccacctcagtccctctttgggaggtgatgttcccattgtttttcaaaggcctcaccttcaactgtctgtcttagaattcccctctggagggctatggcctccctatgctttcacttcccacctctctacctaagttccttcccagcacatcgccagccctgggcctggggatgtccccaatgctgtacctggctgaccccggattaaaagcctcatccacgaccgaaaaaaaaaaaaaaaaaaa

SEQ ID NO: 2498 - DNA, 3566 bp, Homo sapiens
ggcacgaggggagagtcgccgcctggccgggcgtagacgcggtggcagagcccgcgcggcgctggaagcgagtggcggagcggcgggacctcggcggactcgccatggaggaggaggatgatcagaagtgtgtggagactgtggagctgggcagctatgagaagtgccaggaccttcgtgccctcctcaagcgaaaacaccgctttatcctgctgcgatccccagggaacaaggtcagcgacatcaaattccaggcacccaccggggaggagaaggaatcctggatcaaagccctcaatgaagggattaaccgaggcaaaaacaaggctttcgatgaggtaaaggtggacaagagctgcgccctggagcatgtgacacgggaccgggtgcgagggggccagcgacgccggccaccaacgagagtccacctgaaggaggtggccagtgcagcttctgacggtcttctgcgcctggatcttgatgttccggacagtgggccaccagtgtttgcccccagcaatcatgtcagtgaagcccaacctcgggagacaccccggcccctcatgcctcctaccaagcctttcctagcacctgagaccaccagccctggtgacagggtggagacccctgtgggggagagagccccaacccctgtctcagcaagctctgaggtctcccctgagagccaagaggactcagagaccccagcagaggaggacagtggctctgagcagcctcccaacagcgtcctgcctgacaaactgaaggtgagctgggagaaccccagcccccaggaggcccctgctgcagagagtgcagaaccgtcccaggcaccctgttctgagacttctgaggctgcccccagggagggtgggaagccccctacacccccacccaagatcttatcagagaaactgaaagcctccatgggtgagatgcaggcttctgggccacctgctccaggcacagtgcaggtctcagtgaatggcatggatgacagtcctgagcctgccaagccctctcaggctgagggcaccccaggaactcctccaaaggatgcaacaacatccacagcactgcccccctgggacctgccacctcagttccatccccgctgctcctcccttggggacttgcttggggaaggcccgcggcatcccttgcagcccagggaacggctatatcgggcccagctggaggtgaaggtggcctcggaacagacggagaaactgttgaacaaggtgctgggcagtgagccggcccctgttagtgccgaaacattgctcagccaggctgtggagcagctgaggcaggccacccaggtcctgcaggaaatgagagatttgggagagctgagccaggaagcacctgggctaagggagaagcggaaggagctggtgaccctctacaggagaagtgcaccctagggccttctgggccagaggcaccatcccttctggccatccatcaagtccatcaaggcccagccctgctgagaaatgtgcttctgcttctacagcaatggctgcaggagggccattgggcatgtcagggtttggccatgacccgaagagactcctggcgtccttcctactctgctctggccagtggtgccaggtgccacccagggctactgcctggctatctggcctggcctctgggctggggctggggctgggagcacacacgctgggacctatgtgtttgtgtggtcgttccaaactgccccagggctttgggggcggcacttggggtttctgggaatgacatcatctctgttccccatccccagtagtttacattcctgacttctgaatacagcacagctgagccccctgcagctcccatctccagctattcctaggcaaagagcctcatggctaaggcagcctcaaagccagcccctcctcccacctattctgagtagctgcagaggccttgggtccaggctctaggttcatccctcagttggggggaacgtaggacccagctggagcctcttgagggagatgagaggcctctttgtgaggaggacattagctgtgtggcctctctctctttggccctgtttccttttttgcaaaacaaggacattttctgcagccccttcctctcagtgagctatgattggagggcttaggtctggaggattcaagagtggaagaggaatttaaggggtcccctagtctagtctctgcccctggatagtgtccagccttgtatatttctgaagaggtggatcccagagtggctctgatgtccacattagaaaaacttacttgtaatgatcatgtcagccttcagaagagaatccccaccaacttctgtgcctcctcagatggggatttatctggatctctgtggttccttctcagccgaaacaggtccagtatcccagtcatttcttcaaatgctgataggggtatgttggaatccgaagccacttccccgccttcaagccccagatgggctgctctcctgtaactttctaggagaagagacattttcttctttccctttcctggtccatccctgcaccctggtcctctcccagcctctcccccacattgtccctgactctaggggcacatccagtctccatcgtgctgcagcagctggactgagggcagagcctgtaggtgcagaggccctggctcccgaggtccagccactctccctggggcctctggggtgagagcagcttccgataggacctgcccagatttctgcatgtgcacttttgtttactgaaagagagaaaggggggggtcacagcaacatgccctggcctttctgccctgttccccaaccccactgaggcctgctgcacaggtcaatgccttcgttatcgttattgtactgtcactttgttcttgaggtagtagtcaaggatcaggaggggcagatgtcttctctgggctgcgtggggccggagcagaggtgagcagcaatgcactggttcgggagcccccatcagcctccttgtgcaaactgggcccccatgccacagtctggctttccctccatctgccccaggacaagagcaagaaggacatcagttgcccagtcatgtgatcccctgccatcttgccttaggaacagccttcccccaccagcagccatggctggctggggctttagccaagccacctactgccaggaattggagcctcagttccctcctgtgtcaagtagctaactgcagcagctggactgagggcagagtctgtgggtgcagagaccctgcatgtaggtcacaggttgaggcccagccactctccctggggcctggtgggtaggcaagtagctctggggccacctcaagtgaccaaatgctattaatttccatcctttagcaggctgggccctaggcaggaagctggcttctgggagaggagtgagaacgtgcagggcctgcctagcttgcgtgcttgaggaaggtggcattccgtgcttgcctccttgaggagggtggcattctgtgtcttctgcttatgaagcgcctttcttaaagtttggcaataaatccatttttatggaaaaaaaaaaaaaaaaaaaaaaaaaaa

SEQ ID NO: 2499 - DNA, 2541 bp, Homo sapiens
gctgcaccgggcacgggtcggccgcaatccagcctgggcggagccggagttgcgagccgctgcctagaggccgaggagctcacagctatgggctggaggccccggagagctcgggggaccccgttgctgctgctgctactactgctgctgctctggccagtgccaggcgccggggtgcttcaaggacatatccctgggcagccagtcaccccgcactgggtcctggatggacaaccctggcgcaccgtcagcctggaggagccggtctcgaagccagacatggggctggtggccctggaggctgaaggccaggagctcctgcttgagctggagaagaaccacaggctgctggccccaggatacatagaaacccactacggcccagatgggcagccagtggtgctggcccccaaccacacggatcattgccactaccaagggcgagtaaggggcttccccgactcctgggtagtcctctgcacctgctctgggatgagtggcctgatcaccctcagcaggaatgccagctattatctgcgtccctggccaccccggggctccaaggacttctcaacccacgagatctttcggatggagcagctgctcacctggaaaggaacctgtggccacagggatcctgggaacaaagcgggcatgaccagccttcctggtggtccccagagcaggggcaggcgggaagcgcgcaggacccggaagtacctggaactgtacattgtggcagaccacaccctgttcttgactcggcaccgaaacttgaaccacaccaaacagcgtctcctggaagtcgccaactacgtggaccagcttctcaggactctggacattcaggtggcgctgaccggcctggaggtgtggaccgagcgggaccgcagccgcgtcacgcaggacgccaacgccacgctctgggccttcctgcagtggcgccgggggctgtgggcgcagcggccccacgactccgcgcagctgctcacgggccgcgccttccagggcgccacagtgggcctggcgcccgtcgagggcatgtgccgcgccgagagctcgggaggcgtgagcacggaccactcggagctccccatcggcgccgcagccaccatggcccatgagatcggccacagcctcggcctcagccacgaccccgacggctgctgcgtggaggctgcggccgagtccggaggctgcgtcatggctgcggccaccgggcacccgtttccgcgcgtgttcagcgcctgcagccgccgccagctgcgcgccttcttccgcaaggggggcggcgcttgcctctccaatgccccggaccccggactcccggtgccgccggcgctctgcgggaacggcttcgtggaagcgggcgaggagtgtgactgcggccctggccaggagtgccgcgacctctgctgctttgctcacaactgctcgctgcgcccgggggcccagtgcgcccacggggactgctgcgtgcgctgcctgctgaagccggctggagcgctgtgccgccaggccatgggtgactgtgacctccctgagttttgcacgggcacctcctcccactgtcccccagacgtttacctactggacggctcaccctgtgccaggggcagtggctactgctgggatggcgcatgtcccacgctggagcagcagtgccagcagctctgggggcctggctcccacccagctcccgaggcctgtttccaggtggtgaactctgcgggagatgctcatggaaactgcggccaggacagcgagggccacttcctgccctgtgcagggagggatgccctgtgtgggaagctgcagtgccagggtggaaagcccagcctgctcgcaccgcacatggtgccagtggactctaccgttcacctagatggccaggaagtgacttgtcggggagccttggcactccccagtgcccagctggacctgcttggcctgggcctggtagagccaggcacccagtgtggacctagaatggtgtgccagagcaggcgctgcaggaagaatgccttccaggagcttcagcgctgcctgactgcctgccacagccacggggtttgcaatagcaaccataactgccactgtgctccaggctgggctccacccttctgtgacaagccaggctttggtggcagcatggacagtggccctgtgcaggctgaaaaccatgacaccttcctgctggccatgctcctcagcgtcctgctgcctctgctcccaggggccggcctggcctggtgttgctaccgactcccaggagcccatctgcagcgatgcagctggggctgcagaagggaccctgcgtgcagtggccccaaagatggcccacacagggaccaccccctgggcggcgttcaccccatggagttgggccccacagccactggacagccctggcccctggaccctgagaactctcatgagcccagcagccaccctgagaagcctctgccagcagtctcgcctgacccccaagcagatcaagtccagatgccaagatcctgcctctggtgagaggtagctcct

SEQ ID NO: 2500 - DNA, 1909 bp, Homo sapiens
gacaccttttaaaatgcagaactaactgaggcatttcagtaactttgctttcaaatcaataaagtcaaatgtatggaaacattttgtgccctactctccataccctgtgtactcaaattctctactgtatgaattatgctttaagtagaattcagtgccaaggagaacttggtgaaataaattattttaattttttttttatcctttacaaagccatggattttatttggttgatgtgtgctctgtacacaagccatttcaataggatggagctgttaattattttccaaagagtaatagacatgcaaaagtttcaataaaaactgggccattaacaaataaattaataaactaataagcattcccttctaggtttttgccaaactgcctatccaataacaaatttgagaatcgttgaaaaagctagttatatttcagagaaatgattttcattattgaaactgttctccctagcaggccattttccctttttcctgggagtttagcaagtttaggagagaatagtcatgaaaagaaagggaagaaaggggagaagggaagaggttaaaaagtaagtgctcagacctatgaacgtaatccctttgctagaaatatttaagagcagctcagcttggttgaaactgagttttgtcatcttccatatttgcaggaaggtattttctgacttgcaatgcagctagatgtaaaattttattttatcatcctagaaagccttgactagaaaaatgaataaatattgagggtttcctgtccatatctggcttgcatgtgccagaaagcagagaatagaaaatgtaatctccaacatccaagcatcgaaacccaaggggtaggcaattctatgtaggttttggacatgaagtttggtgcatcttggtttatgctggctcaactgctattaaacctctctggcttatagtctcttcattctattagacaagcacgtatcgaacacttgcttcgcacaaggctctttagttaacaatttagcagctactgtttgtgttaaacacacttttcaccaaataggttctgaggcaaacgagagcaatgactatttaaagaaaggctttcccagcatcacttacacatcccaaaactaaaaagatcaactcttccaactgagaaaagactcctggctttgaatggaaacttacagcagagagtcacaggccacggcaacaacaacgacaacaacaaacatttggaatattattctcaactcacgttttaataatacatcttaattatttttctagtagagaaactacaaatcagcctcttcaacatttatatacagtttaataagcctcttgcaagttacttgttctctcacctgaggtatttttttcctccccaccttgcccctgttcctcccttcctcttctccctttgcaagaggaaatatttaacatatttgggtccaacttcaataatgtaataattaatacattaaaagcatttaacttcctttctagaaaaatgcacaggctaaggcatagacaaaacaaagagaaatgctgagaaatttgccactggagacaagcaatctgaataaatatttgccaaaagttctttttatgtcatatagtgtcaggatttgaaggagctattttttttaatgttgcaactagcaactcatcttcggaagacacagccaggagaatgaagtagaagtgaaaggtttataaatccatttgtaagcatttatcccatatattttaaattcaagaaaaattgtgtttatctttagaattttgtattcaatactttatgtactatgtgactcatgcttctggataaataaagcaccaaatatgtatctgtaaccacaatcacacatattatattaaatatatatctatataacaaaaaaaaaaaaaaaaaa

SEQ ID NO: 2501 - DNA, 1538 bp, Homo sapiens
ccccctggatgtccccttaccctccacgatcaggccagcttcccccgtggccgggtctccaaagcagccggtgcgtggctactaccgtggcgctgtcggtggcacgtttgaccgcctgcacaacgcccacaaggtgttgctcagtgtcgcgtgcatcctggcccaggagcagcttgtggtgggagtagcagacaaagatctgttgaagagcaagttgctccctgagctgctccaaccttatacagaacgtgtggaacatgtgagtgaattcctggtggacatcaagccctccttgacttttgatgtcatccccctgctggacccctatgggcccgctggctctgacccctccctggagttcctggtggtcagcgaggagacctatcgtggggggatggccatcaaccgcttccgccttgagaatgacctggaggaacttgctttgtaccagatccagctgctgaaggacctcagacatacggagaatgaagaggacaaagtcagctcctccagcttccgccagcgaatgttggggaacctgcttcggcctccatatgaaaggccagagctccccacatgtctctatgtaattgggctgactggcatcagtggctctgggaagagctcaatagctcagcgactgaagggcctgggggcgtttgtcattgacagtgaccacctgggtcatcgggcctatgccccaggtggccctgcctaccagcctgtggtggaggcctttggaacagatattctccataaagatggcatcatcaacaggaaggtcctaggcagccgggtgtttgggaataagaagcagctgaagatactcacggacattatgtggccaattatcgcaaagctggcccgagaggagatggatcgggctgtggctgagggaaagcgtgtgtgtgtgattgatgccgctgtgttgcttgaagccggctggcagaacctggtccatgaggtgtggactgctgtcatcccagagactgaggctgtaagacgcattgtggagagggatggcctcagtgaagccgcggctcaaagccggctgcagagccagatgagcgggcagcagcttgtggaacagagccacgtggtgctcagcaccttgtgggagccgcatatcacccaacgccaggtggagaaagcctgggccctcttgcagaagcgcattcccaagactcatcaggccctcgactgaaaagttctcagtggggccagactggctcctggagctgacaagcgaccccgtggtgaggagaaatgggggccttgatgctcaccctggttcaggcccagaggtccaagctatactgtgcaggacatggccaggcctggtggacacaggaagcctacccaacacgctggtatttggccaacactgaggatgtggttcatgggggagcagtcccctccccactcttgcccatgggtgactcttacccacagctgactagggccagcgcaaatactggaacctgtaacagaattaaaggtgaatgttctgagaaaaaaaaaaaaaaaaaaaaaaaaaa

SEQ ID NO: 2502 - DNA, 1656 bp, Homo sapiens
ttttcttccgggggctggtctccggcggccccgtccccgactgggccccgtgcccccccgcccccgcggccccccgccgccgggccagccgccaccatgaagaaattctttcaggagttcaaggccgacatcaagttcaagagcgcgggacccggtcagaagctcaaagagtccgtgggggaaaaggcccacaaagagaagcccaaccagccagcccccaggccgccccgccagggacccaccaatgaggcacagatggcagccgctgctgccctagcccggctggagcagaagcagtcccgggcctggggccccacatcgcaggacaccatccgaaaccaggtgagaaaggaacttcaagccgaagccaccgtcagcgggagccccgaggccccagggaccaacgtggtatctgagcccagagaggaaggctctgcccacctggctgtgcctggcgtgtacttcacctgtccgctcactggggccaccctgaggaaggaccagcgggacgcctgcatcaaggaggccattctcttgcacttctccaccgacccagtggccgcctccatcatgaagatctacacgttcaacaaagaccaggaccgggtgaagctgggtgtggacaccattgccaagtacctggacaacatccacctgcaccccgaggaggagaagtaccggaagatcaagctgcagaacaaggtgtttcaggagcgcattaactgcctggaagggacccacgagttttttgaggccattgggttccagaaggtgttgcttcccgcccaggatcaggaggaccccgaggagttctacgtgctgagcgagaccaccttggcccagccccagagcctggagaggcacaaggaacagctgctggctgcggagcccgtgcgcgccaagctggacaggcagcgccgcgtcttccagccctcgcccctggcctcgcagttcgaactgcctggggacttcttcaacctcacagcagaggagatcaagcgggagcagaggctcaggtccgaggcggtggagcggctgagcgtgctgcggaccaaggccatgcgggagaaggaggagcagcgggggctgcgcaagtacaactacacgctgctgcgcgtgcgcctccccgatggctgcctcctgcagggcactttctacgctcgggagcggctgggggcggtgtacgggttcgtccgggaggccctgcagagcgactggctgccttttgagctgctggcctcgggagggcagaagctgtccgaggacgagaacctggccttgaacgagtgcgggctggtgccctctgccctcctgaccttctcgtgggacatggctgtgctggaggacatcaaggccgcgggggccgagccggactccatcctgaaacccgagctcctgtcagccatcgagaagctcttgtgaaataaaagcagggttggcctcagccctgtgggtctgtctcatgctctccctgttcctctccccgccaccccagggcctccaagccacctctggaaatacttggctctgccccatgggcacgggaggggcgccagccgtggagctgtggaattgggccccgtggcagagcccccatcccttgggggctgtggggatgcgcccaagcccccgagggagaggcctggggacaccaac

SEQ ID NO: 2503 - DNA, 2261 bp, Homo sapiens
aacccaagcgggacaaggacttttggggggaggtcaaagggcacgaagttgtgcctacagctgttaccatagtaaccgaggaccggatgtggcgatcttggcggtgcgacagtcctcttctcaggccctctggcccgagagcctgttgactctgtgacacactctgaggagctggttgtggtgttttccagcgagggaagaaaagagtaattttttcaaagcatttatagaaacgcagcaaagggaaggtgtgaggttgccgccatgcctggcagaacggagggaggcagttggctccggaatgcggccgccgcagatgttctccgcaaccttccggaagtggaatggcgggagcctcagcattgctgcccaccgaccccccggaagcggaaacagaatccccgcgtgccccttcctcactaccctccaaatcccgctgcagccattgccgcagacacgatgccgaaacgaaagaagcagaatcatcaccagccaccgacacagcagcagcccccgctgcccgagcgggaagagactggagatgaggaggatgggagtcccatcggaccacccagccttctgggccctccccccatggccaatggaaaacctggcgaccctaagtcagctcttcacagaggtcctccaggatcaaggggaccactgattccaccactgctgagtctcccacctcctccttggggtagaggcccaattcggagagggcttggccccaggtctagcccatatggtcgtggttggtggggagtcaatgcagaacctccttttccggggccaggccatgggggtcccaccaggggaagctttcacaaggaacagagaaaccctcgaaggctcaaaagctggtctcttatcaagaatacctgcccgcccaaggatgacccccaggttatggaagacaaatccgaccgccctgtctgccgacattttgccaaaaagggccactgtcgatatgaggacctctgtgccttctaccatccaggcgtcaatggacctcctctgtgagactgtgccttcccatccaggctggaaggagctctctgtgacctagcggccatttatttctctgtagccctatgatggctactgtgaggctcttctaacaccctcagtcagtgacacacccatcccatccaccacttcccccgtgtggggtccagagtggtgttgcatcactggtgcgcggcatacgcgctttcttctgatccagcctgtagagactcgcctttgggacccatctttgcttcctttcagttgcctcctggatcttctttcccgtcatcaaatgactgctgaacaggaaacctctttggtgctgtttcttgtgcatctgtccacctgttccccagtattgccctcaattcctgagagccctggagcggtttcctaccattcccttcttttagctgcttgttttaagtcctttttatgtgacattccctacccccaatgttgtcagctgcttgtgaaactcagccaggttgtctaacctggggtcaagtttgggtgactggtgcagagttacttcctaaaaggccactctccctgcctttggatttcatagtttctctgtcagtagcatgatccccaccgctatggtctatctatgatcaccgtgctttgtgaaactgtgcatccccttgtagcctttctcagtgtccgtggcatttttgtgacttcccagcactagaataagttttcctgccaaaatgagtgaggcgcttggtgccctctggactttcccacttcccaacatgggagaattgtgaactttccatcagactgcctccctggccctccccattcttctcctgttggttattctgagtctgacacagacccatgacatgtcttataaagcctccaatggctttatcctacctagatcccttccagcccattttaattagactatgtcattgtgaggccaccagtccattcatttgaattctgtgaatctccaccttgcctatctttgggtagaagctggacagtactgttgccctcttccaatcctcttcccctacatccctggcactggttgttttctgtgaaaacagcagtgaacaggttcagttttgaactggccctgaggaaatgggtcaggagttgtattggcaagagggaggggtgagagctgttggagaactgagaatgaggttttttttttttttttctttttaactttttttatattagtaataaatgcagtggaaaccagcattttatttaaaaaaaaa

SEQ ID NO: 2504 - DNA, 1837 bp, Homo sapiens
ccaaggcgcgtccccctcggcctcccagcgctcccaagccgcagcggccgcgccccttcagctagctcgctcgctcgctctgcttccctgctgccggctgcgccatggcgttggcgttggcggcgctggcggcggtcgagccggcctgcggcagccggtaccagcagttgcagaatgaagaagagtctggagaacctgaacaggctgcaggtgatgctcctccaccttacagcagcatttctgcagagagcgcagcatattttgactacaaggatgagtctgggtttccaaagcccccatcttacaatgtagctacaacactgcccagttatgatgaagcggagaggaccaaggctgaagctactatccctttggttcctgggagagatgaggattttgtgggtcgggatgattttgatgatgctgaccagctgaggataggaaatgatgggattttcatgttaacttttttcatggcattcctctttaactggattgggtttttcctgtctttttgcctgaccacttcagctgcaggaaggtatggggccatttcaggatttggtctctctctaattaaatggatcctgattgtcaggttttccacctatttccctggatattttgatggtcagtactggctctggtgggtgttccttgttttaggctttctcctgtttctcagaggatttatcaattatgcaaaagttcggaagatgccagaaactttctcaaatctccccaggaccagagttctctttatttattaaagatgttttctggcaaaggccttcctgcatttatgaattctctctcaagaagcaagagaacacctgcaggaagtgaatcaagatgcagaacacagaggaataatcacctgctttaaaaaaataaagtactgttgaaaagatcatttctctctatttgttcctaggtgtaaaattttaatagttaatgcagaattctgtaatcattgaatcattagtggttaatgtttgaaaaagctcttgcaatcaagtctgtgatgtattaataatgccttatatattgtttgtagtcattttaagtagcatgagccatgtccctgtagtcggtagggggcagtcttgctttattcatcctccatctcaaaatgaacttggaattaaatattgtaagatatgtataatgctggccattttaaaggggttttctcaaaagttaaacttttgttatgactgtgtttttgcacataatccatatttgctgttcaagttaatctagaaatttattcaattctgtatgaacacctggaagcaaaatcatagtgcaaaaatacatttaaggtgtggtcaaaaataagtctttaattggtaaataataagcattaattttttatagcctgtattcacaattctgcggtaccttattgtacctaagggattctaaaggtgttgtcactgtataaaacagaaagcactaggatacaaatgaagcttaattactaaaatgtaattcttgacactctttctataattagcgttcttcacccccacccccacccccaccccccttattttccttttgtctcctggtgattaggccaaagtctgggagtaaggagaggattaggtacttaggagcaaagaaagaagtagcttggaacttttgagatgatccctaacatactgtactacttgcttttacaatgtgttagcagaaaccagtgggttataatgtagaatgatgtgctttctgcccaagtggtaattcatcttggtttgctatgttaaaactgtaaatacaacagaacattaataaatatctcttgtgtagcaaaaaaaaaaaaaaaaaaaaa

SEQ ID NO: 2505 - DNA, 1310 bp, Homo sapiens
gctcggagcccggagcgtgcctcggcggcctgtcggttttcaccatggagcagctgagctcagcaaacacccgcttcgccttggacctgttcctggcgttgagtgagaacaatccggctggaaacatcttcatctctcccttcagcatttcatctgctatggccatggtttttctggggaccagaggtaacacggcagcacagctgtccaagactttccatttcaacacggttgaagaggttcattcaagattccagagtctgaatgctgatatcaacaaacgtggagcgtcttatattctgaaacttgctaatagattatatggagagaaaacttacaatttccttcctgagttcttggtttcgactcagaaaacatatggtgctgacctggccagtgtggattttcagcatgcctctgaagatgcaaggaagaccataaaccagtgggtcaaaggacagacagaaggaaaaattccggaactgttggcttcgggcatggttgataacatgaccaaacttgtgctagtaaatgccatctatttcaagggaaactggaaggataaattcatgaaagaagccacgacgaatgcaccattcagattgaataagaaagacagaaaaactgtgaaaatgatgtatcagaagaaaaaatttgcatatggctacatcgaggaccttaagtgccgtgtgctggaactgccttaccaaggcgaggagctcagcatggtcatcctgctgccggatgacattgaggacgagtccacgggcctgaagaagattgaggaacagttgactttggaaaagttgcatgagtggactaaacctgagaatctcgatttcattgaagttaatgtcagcttgcccaggttcaaactggaagagagttacactctcaactccgacctcgcccgcctaggtgtgcaggatctctttaacagtagcaaggctgatctgtctggcatgtcaggagccagagatatttttatatcaaaaattgtccacaagtcatttgtggaagtgaatgaagagggaacagaggcggcagctgccacagcaggcatcgcaactttctgcatgttgatgcccgaagaaaatttcactgccgaccatccattccttttctttattcggcataattcctcaggtagcatcctattcttggggagattttcttccccttagaagaaagagactgtagcaatacaaaaatcaagcttagtgctttattacctgagtttttaatagagccaatatgtcttatatctttaccaataaaaccactgtccagaaaaaaaaaaaaaaaaaaaa

SEQ ID NO: 2506 - DNA, 1310 bp, Homo sapiens; identical to SEQ ID NO: 2505

SEQ ID NO: 2507 - DNA, 1375 bp, Homo sapiens
ggcacgaggcagccaccgccgcaatcatgggcttgtgctggaaaagatgaaatggggaaaatggtgtcagtaattaacactgtggatacctcccatgaggacatgattcacgacgcccagatggactactatggcacccgcctggcaacctgctcatcagacaggtccgtcaaaatctttgatgtgcgcaatggagggcagatccttatcgccgacctcaggggtcatgagggtcctgtgtggcaagtggcctgggctcaccccatgtacggcaacatcctggcatcgtgctcctatgaccggaaagtcattatctggagagaggaaaacggcacctgggagaagagccacgagcatgcgggacacgactcctcagtgaactcggtgtgctgggccccccatgactacggcctgatcctggcctgtgggagctcggatggggccatctccctgctgacttacaccggggaaggccaatgggaagtaaagaagatcaacaacgctcacaccattggctgcaatgccgtcagctgggcccctgctgttgtacctggaagcctcatagaccacccatcggggcagaaacccaattacatcaagaggtttgcatcaggtggctgtgacaacctcatcaagctgtggaaggaggaggaggacggccagtggaaggaggagcagaagctagaagcgcacagtgactgggttcgagatgtggcctgggccccctccatcggcctgcccaccagcaccatcgccagctgctcccaggatggtcgtgtgttcatttggacctgtgatgatgcctcaagcaatacgtggtcccctaaattgttgcacaagttcaacgatgtggtgtggcatgtgagctggtccatcacagccaacatcctggctgtctctggtggagacaataaggtgaccctgtggaaggagtcagttgatgggcagtgggtgtgcatcagtgatgtcaacaagggccagggctccgtatcagcatcagtgacagagggccagcagaacgagcagtgacaagacaggtggggcctggctccccacccgccagctccaggactgccccttcctgggccaactaaccagacaactgggaagagcccccaactccaacaggattattttcccaggaggagttacagatgcagccacagattgatcatctgccttaacgtgatcggagatgccttgtaatctactgtccagctgaaagcactcatgttacgaggaagaaactacaagtgatgttcaaatctattttgggtcatttttatgtacctttgggttcaggcattatttggggggttttgtttccaaaggaactaaataaagtcatattgcttataaaaaaaaaaaaaaaaaa

SEQ ID NO: 2508 - DNA, 3000 bp, Homo sapiens
ctgaggggaggagaccgcgcgcgggacggggaggaatggcctgtccgcgttaaaccatcacaagccatggttgcggaagggccacgcgtcccccagtaggagaatgactccgattcgtgaccctcagcgccggtgcatgtcgatatatttattgagtgtctactgtgtgccaggcactatatctatgtgcatagaaaaaccctggaaggccatacaacaatatatatagagtgatcgtctctgcttgctgagctaacaggggtgtcaagcttccattttggtatctacttctaaatacactcagaacaggagaaatttggactaattttcaaactacagacactttctaatcatgatgcatttcaaaagtggactcgaattaactgagttgcaaaacatgacagtgcccgaggatgataacattagcaatgactccaatgatttcaccgaagtagaaaatggtcagataaatagcaagtttatttctgatcgtgaaagtagaagaagtctcacaaacagccatttggaaaaaaagaagtgtgatgagtatattccaggtacaacctccttaggcatgtctgtttttaacctaagcaacgccattatgggcagtgggattttgggactcgcctttgccctggcaaacactggaatcctactttttctggtacttttgacttcagtgacattgctgtctatatattcaataaacctcctattgatctgttcaaaagaaacaggctgcatggtgtatgaaaagctgggggaacaagtctttggcaccacagggaagttcgtaatctttggagccacctctctacagaacactggagcaatgctgagctacctcttcatcgtaaaaaatgaactaccctctgccataaagtttctaatgggaaaggaagagacattttcagcctggtacgtggatggccgcgttctggtggtgatagttacctttggcataattctccctctgtgtctcttgaagaacttagggtatcttggctatactagtggattttccttgagctgtatggtttttttcctaattgtggttatttacaagaaatttcaaattccctgcattgttccagagctaaattcaacaataagtgctaattcaacaaatgctgacacgtgtacgccaaaatatgttaccttcaattcaaagaccgtgtatgctttacccaccattgcatttgcatttgtttgccacccgtcagtcctgccaatttacagtgagcttaaagaccgatcacagaaaaaaatgcagatggtttcaaacatctcctttttcgccatgtttgttatgtacttcttgactgccatttttggctacttgacattctatgacaacgtgcagtccgacctccttcacaaatatcagagtaaagatgacattctcatcctgacagtgcggctggctgtcattgttgctgtgatcctcacagtgccggtgttatttttcacggttcgttcatctttatttgaactggctaagaaaacaaagtttaatttatgtcgtcataccgtggttacctgcatactcttggttgttatcaacttgttggtgatcttcataccctccatgaaggatatttttggagtcgtaggagttacatctgctaacatgcttattttcattcttccttcatctctttatttaaaaatcacagaccaggatggagataaaggaactcaaagaatttgggctgcccttttcttgggcctgggggtgttgttctccttggtcagcattcccttggtcatctatgactgggcctgctcatcgagtagtgacgaaggccactgaaacccgccgagaaaaagaaacatccctgttgtctgctcagtcaagtccccacacatcagcaatctctcaccacttcttttgcaagtttacagaagcaaacagaaatgtacaggatacttaaaatggaataactttttggttgcaaaacagagacatggttctataatgcttcatgtccctccaagatttgagatcaatttagggattgtgaaatttttttttcaaatttcatacaatcatatttcccagtacttttcacaatcattttttacccatctaactctatgttttgtggcttcccggtctcttagaactttgaaaacatgatatacaataatgtttatttattatacatccagattctgaaataattttcctactgatgttcagctcacactatctgtacctttttagaagagaaaagaatcttgaattgtatatatttattttgctttacagaaaaaaatggtttcgtaaataatttgcctattttggttaacatagcacatggagataatcatctgaaagttatagggcactgccactgctgaatcagagcatgcccaatatttgaggtggctctgatttcctggcagctgaactcgggtagtccagtggcctagctggtaccacatctattcccatccagagacattctctggcaagtgttctcagctgaaaagtggttggggatgattcttaccttggtaattaaatgaagctacacatttgggtaatctagcaaatgaagtattttttccctcttggcaacttgtgtcagagttactctggtctgagtcaactttcgctggggaaaacctatggaacctactgcaaaaagattgtccaaaatgcctaagaaaatactcctctgatgcatttagccttcaaccctacctgtcttgctgaagggagaaaaatgttttagtacattataggcccagcagcttttattcatgtccaccagctagttgcacagagaatcatgtgtacctaactaaggatgatctaggataagtaactcctgttttatattgagtattttagggaagtctttaaaagacttgttttatatctataaatctaggttattacaaatacaagaattttgtaccttaaataagcctcatttctatttcttcttcattaattctccatctagtcttgtgaaaaaaaaaaaaaaa

SEQ ID NO: 2509 - DNA, 2019 bp, Homo sapiens
acgtgtatcgctgccgtcaagatggaggggcctttgtccgtgttcggtgaccgcagcactggggaaacgatccgctcccaaaacgttatggctgcagcttcgattgccaatattgtaaaaagttctcttggtccagttggcttggataaaatgttggtggatgatattggtgatgtaaccattactaacgatggtgcaaccatcctgaagttactggaggtagaacatcctgcagctaaagttctttgtgagctggctgatctgcaagacaaagaagttggagatggaactacttcagtggttattattgcagcagaactcctaaaaaatgcagatgaattagtcaaacagaaaattcatcccacatcagttattagtggctatcgacttgcttgcaaggaagcagtgcgttatatcaatgaaaacctaattgttaacacagatgaactgggaagagattgcctgattaatgctgctaagacatccatgtcttccaaaatcattgggataaatggtgatttctttgctaacatggtagtagatgctgtacttgctattaaatacacagacataagaggccagccacgctatccagtcaactctgttaatattttgaaagcccatgggagaagtcaaatggagagtatgctcatcagtggctatgcactcaactgtgtggtgggatcccagggcatgcccaagagaatcgtaaatgcaaaaattgcttgccttgacttcagcctgcaaaaaacaaaaatgaagcttggtgtacaggtggtcattacagaccctgaaaaactggaccaaattagacagagagaatcagatatcaccaaggagagaattcagaagatcctggcaactggtgccaatgttattctaaccactggtggaattgatgatatgtgtctgaagtattttgtggaggctggtgctatggcagttagaagagttttaaaaagggaccttaaacgcattgccaaagcttctggagcaactattctgtcaaccctggccaatttggaaggtgaagaaacttttgaagctgcaatgttgggacaggcagaagaagtggtacaggagagaatttgtgatgatgagctgatcttaatcaaaaatactaaggctcgtacgtctgcatcgattatcttacgtggggcaaatgatttcatgtgtgatgagatggagcgctctttacatgatgcactttgtgtagtgaagagagttttggagtcaaaatctgtggttcccggtgggggtgctgtagaagcagccctttccatataccttgaaaactatgcaaccagcatggggtctcgggaacagcttgcgattgcagagtttgcaagatcacttcttgttattcccaatacactagcagttaatgctgcccaggactccacagatctggttgcaaaattaagagcttttcataatgaggcccaggttaacccagaacgtaaaaatctaaaatggattggtcttgatttgagcaatggtaaacctcgagacaacaaacaagcaggggtgtttgaaccaaccatagttaaagttaagagtttgaaatttgcaacagaagctgcaatcaccattcttcgaattgatgatcttattaaattacatccagaaatccttcggattaaacatggaagttatgaagatgctgttcactctggagcccttaatgattgatctgatgttccttttatttataacaatgttaaatgcaatgtcttgtaccttgagttgagtattacacattaaagtaaagtacaagctgtaaacttgggtttttgtgatgtaggaaatggtttccatctgtactttggtcctctgatttcagatattgcaacctagtactttattagtttaaaaagaaattgaggttgttcaaagtttaagcaattcattctctctgaacacacattgctattcccatcccacccccaatgcacagggctgcaacaccacgacttctgcccattctctccagtgtgtgtaacagggtcacaagaattc

SEQ ID NO: 2510 - DNA, 1112 bp, Homo sapiens
tgagagtcctctagacaggcgctcctcgcagcaccgtagtgcgcttgcgctgagcagcccgcgagggcggaagtgggagctgcgaccgcgctccctgtgaggtgggcaagcggcgaaatggcgccctccgggagtcttgcagttcccctggcagtcctggtgctgttgctttggggtgctccctggacgcacgggcggcggagcaacgttcgcgtcatcacggacgagaactggagagaactgctggaaggagactggatgatagaattttatgccccgtggtgccctgcttgtcaaaatcttcaaccggaatgggaaagttttgctgaatggggagaagatcttgaggttaatattgcgaaagtagatgtcacagagcagccaggactgagtggacggtttatcataactgctcttcctactatttatcattgtaaagatggtgaatttaggcgctatcagggtccaaggactaagaaggacttcataaactttataagtgataaagagtggaagagtattgagcccgtttcatcatggtttggtccaggttctgttctgatgagtagtatgtcagcactctttcagctatctatgtggatcaggacttgccataactactttattgaagaccttggattgccagtgtggggatcatatactgtttttgctttagcaactctgttttccggactgttattaggactctgtatgatatttgtggcagattgcctttgtccttcaaaaaggcgcagaccacagccgtacccatacccttcaaaaaaattattatcagaatctgcacaacctttgaaaaaagtggaggaggaacaagaggcggatgaagaagatgtttcagaagaagaagctgaaagtaaagaaggaacaaacaaagactttccacagaatgccataagacaacgctctctgggtccatcattggccacagataaatcctagttaaattttatagttatcttaatattatgattttgataaaaacagaagattgatcattttgtttggtttgaagtgaactgtgacttttttgaatattgcagggttcagtctagattgtcattaaattgaagagtctacattcagaacataaa

SEQ ID NO: 2511 - DNA, 3641 bp, Homo sapiens
ctgcactgaagagggagagcgagagagagactggagacgcacagatccccccaaggtctcccaagcctaccgtcccacagattattgtacagagccccaaaaatcgaaacagaggaaacgaacagcagttgaacatggacgaaggaattcctcatttgcaagagagacagttactggaacatagagattttataggactggactattcctctttgtatatgtgtaaacccaaaaggagcatgaaacgagacgacaccaaggatacctacaaattaccgcacagattaatagaaaagaaaagaagagaccgaattaatgaatgcattgctcagctgaaagatttactgcctgaacatctgaaattgacaactctgggacatctggagaaagctgtagtcttggaattaactttgaaacacttaaaagctttaaccgccttaaccgagcaacagcatcagaagataattgctttacagaatggggagcgatctctgaaatcgcccattcagtccgacttggatgcgttccactcgggatttcaaacatgcgccaaagaagtcttgcaatacctctcccggtttgagagctggacacccagggagccgcggtgtgtccagctgatcaaccacttgcacgccgtggccacccagttcttgcccaccccgcagctgttgactcaacaggtccctctgagcaaaggcaccggcgctccctcggccgccgggtccgcggccgccccctgcctggagcgcgcggggcagaagctggagcccctcgcctactgcgtgcccgtcatccagcggactcagcccagcgccgagctcgccgccgagaacgacacggacaccgacagcggctacggcggcgaagccgaggcccggccggaccgcgagaaaggcaaaggcgcgggggcgagccgcgtcaccatcaagcaggagcctcccggggaggactcgccggcgcccaagaggatgaagctggattcccgcggcggcggcagcggcggcggcccggggggcggcgcggcggcggcggcagccgcgcttctggggcccgaccctgccgccgcggccgcgctgctgagacccgacgccgccctgctcagctcgctggtggcgttcggcggaggcggaggcgcgcccttcccgcagcccgcggccgccgcggcccccttctgcctgcccttctgcttcctctcgccttctgcagctgccgcctacgtgcagcccttcctggacaagagcggcctggagaagtatctgtacccggcggcggctgccgccccgttcccgctgctataccccggcatccccgccccggcggcagccgcggcagccgccgccgccgctgccgccgccgccgccgcgttcccctgcctgtcctcggtgttgtcgccccctcccgagaaggcgggcgccgccgccgcgaccctcctgccgcacgaggtggcgccccttggggcgccgcacccccagcacccgcacggccgcacccacctgcccttcgccgggccccgcgagccggggaacccggagagctctgctcaggaagatccctcgcagccaggaaaggaagctccctgaatccttgcgtcccgaaggacggaggttcaagcagagtgagaagttaaaatacccttaaggaggttcaagcagagtgagaagttaaaatacccttaaggtctttaagggaggaagtgtaatagatgcacgacaggcataaacaagaacaacaaaacaggtgttatgtgtacattcggagttcctgttttgctcatcccgcaccaccccaccctccacacactaacatccctttcttccccccaccagctgtaaaagatcctatgcgaaagacactggctcttttttttaatcccccaaataaattttgcccccttttaggccatgttccattatctcttaaaattggaacctaattcgagaggaagtaagaagggtctgttctgtggctgagctaggtgaaccccggggtaggggaaagatgttaacacctttgacgtctttggagttgacatggaacagcaggtagttgttatgtagagctagttctcaaagctgccctgcctgttttaggaggcgttccacaaacagattgaggctctttttagaattgaatttactcttcagtattttctaatgttcagctttctaaaaggcatatatttttcaaagaagtgaggatgcagtttctcacgttgcaacctattctgaagtggtttaaatggtatctcttagtaacttgcactcgttaaagaaacacggagctgggccatcgtcagaactaagtcagggaaggagatggatgagaaggccagaatcattcctagtacatttgctaacactttattgagaaattgaccatgaattaatggactcatcttaatttcttctaagtccatatatagatagatatctatctgtacagatttctatttatccatagataggtatctatacatacacatctcaagtgcatctattcccactctcattaatccatcatgttcctaaatttttgtaatcttactgtaaaaaaaagtgcactgaacttcaaaacaaaacaaaaaacaacaacaacaaaaaacaagtccaaactgatatatcctatattctgttaaaattcaaaagtgaacgaaagcatttaactggccagttttgattgcaaatgctgtaaagatatagaatgaagtcctgtgaggccttcctatctccaagtctatgtattttctggagaccaaaccagataccagataatcacaaagaaagcttttttaataaggcttaaaccaagaccttgtctagatatttttagtttgttgccaaggtagcactgtgagaaatctcacttggatgttatgtaaggggtgagacacaacagtctgactatgagtgaggaaaatatctgggtcttttcgtcagtttggtgcatttgctgctgctgttgctactgtttgcctcaaacgctgtgtttaaacaacgttaaactcttagcctacaaggtggctcttatgtacatagttgttaatacatccaattaatgatgtctgacatgctatttttgtagggagaaaatatgtgctaatgatattttgagttaaaatatcttttggggaggatttgctgaaaagttgcacttttgttacaatgcttatgcttggtacaagcttatgctgtcttaaattattttaaaaaaattaaatactgtctgtgagaaaccagctggtttagaaaagtttagtatgtgacgataaactagaaattacctttatattctagtattttcagcactccataaattctattacctaaatattgccacactattttgtgatttaaaaattcttactaaggaataaaaactttaatatacgatatgatattgtctaataattaaaaaagacataatggatgctcaattagttttaagatatctataactatagggatacaaatcactacagttctcagatttacaccttttttttgtcattggcttgatgtcacacatttccaatctcttgcaagcctccaggctctggctttgtctacctgctcgttcccaatgtatcttaatgaaaagtgcaaaagaaaaacctaccaattaaaaaaaaaaaaaaaaaa

SEQ ID NO: 2512 - DNA, 2265 bp, Homo sapiens
acgcgggatacagggaggggccatgtgcgaaccagggagacctcatcttccaaccaagcttgctgggcttgcatttaatcaatgcatggccagagaacaggagcggaacattgcctagtagaccctgaggctttacaacagtgctactgacccctatgagcctgatgctggatgaccaaccccctatggaggcccagtatgcagaggagggcccaggacctgggatcttcagagcagagcctggagaccagcagcatcccatttctcaggcggtgtgctggcgttccatgcgacgtggctgtgcagtgctgggagccctggggctgctggccggtgcaggtgttggctcatggctcctagtgctgtatctgtgtcctgctgcctctcagcccatttccgggaccttgcaggatgaggagataactttgagctgctcagaggccagcgctgaggaagctctgctccctgcactccccaaaacagtatctttcagaataaacagcgaagacttcttgctggaagcgcaagtgagggatcagccacgctggctcctggtctgccatgagggctggagccccgccctggggctgcagatctgctggagccttgggcatctcagactcactcaccacaagggagtaaacctcactgacatcaaactcaacagttcccaggagtttgctcagctctctcctagactgggaggcttcctggaggaggcgtggcagcccaggaacaactgcacttctggtcaagttgtttccctcagatgctctgagtgtggagcgaggcccctggcttcccggatagttggtgggcagtctgtggctcctgggcgctggccgtggcaggccagcgtggccctgggcttccggcacacgtgtgggggctctgtgctagcgccacgctgggtggtgactgctgcacattgtatgcacagtttcaggctggcccgcctgtccagctggcgggttcatgcggggctggtcagccacagtgccgtcaggccccaccaaggggctctggtggagaggattatcccacaccccctctacagtgcccagaatcatgactacgacgtcgccctcctgaggctccagaccgctctcaacttctcagacactgtgggcgctgtgtgcctgccggccaaggaacagcattttccgaagggctcgcggtgctgggtgtctggctggggccacacccaccctagccatacttacagctcggatatgctccaggacacggtggtgcccttgttcagcactcagctctgcaacagctcttgcgtgtacagcggagccctcaccccccgcatgctttgcgctggctacctggacggaagggctgatgcatgccagggagatagcgggggccccctagtgtgcccagatggggacacatggcgcctagtgggggtggtcagctgggggcgtgcgtgcgcagagcccaatcacccaggtgtctacgccaaggtagctgagtttctggactggatccatgacactgctcaggactccctcctctgagtcctgctgtttcctccagtctcactgcacaccactgcctcatgcttcctggggcctccagcagctccactaatggaggagaggcagtagcctccgacacagaacgcatggacctcctactactgtgtgtgaggaacagtcactacccactggccagccacccagccaacaggtctctcctcttgggccctgatttcagagtcctctttctcactagagactcaatgacagaagagaggctgggacttggttgggcatgctgtggttgctgagggatgagggggaggagagaggtaggagctggagatgaagagactgctagaagcagcaggaagcctgcccttctgccctctcccctccctgcccctgtgtgagtcttttagggagggtgactgggaggtgccccccgtcccacctttttcctgtgctctaggtgggctaagtgcctccctagaggactccatggctgagaggctcctgggcagatggggtcaaggctgggccagtcccagatgaagcctatgggagtcaggaccctctccactctccctctccactccccttcctgttctcacctggctgtggctggccctgtgtggggtgggtacactggaaaacaagaaggttggagttggtctaggacattggttttaaatgacagttctgtgaactggtccaaggaggttctgttattaaagtgatatatggtcttgaaaaaaaaaaaaaaaaaaaaaaa

SEQ ID NO: 2513 - DNA, 4167 bp, Homo sapiens
atgcgcgcccggcccctcagcgcccccagcacgccgccgagtcccgctcgccatgggccactccccacctgtcctgcctttgtgtgcctctgtgtctttgctgggtggcctgacctttggttatgaactggcagtcatatcaggtgccctgctgccactgcagcttgactttgggctaagctgcttggagcaggagttcctggtgggcagcctgctcctgggggctctcctcgcctccctggttggtggcttcctcattgactgctatggcaggaagcaagccatcctcgggagcaacttggtgctgctggcaggcagcctgaccctgggcctggctggttccctggcctggctggtcctgggccgcgctgtggttggcttcgccatttccctctcctccatggcttgctgtatctacgtgtcagagctggtggggccacggcagcggggagtgctggtgtccctctatgaggcaggcatcaccgtgggcatcctgctctcctatgccctcaactatgcactggctggtaccccctggggatggaggcacatgttcggctgggccactgcacctgctgtcctgcaatccctcagcctcctcttcctccctgctggtacagatgagactgcaacacacaaggacctcatcccactccagggaggtgaggcccccaagctgggcccggggaggccacggtactcctttctggacctcttcagggcacgcgataacatgcgaggccggaccacagtgggcctggggctggtgctcttccagcaactaacagggcagcccaacgtgctgtgctatgcctccaccatcttcagctccgttggtttccatgggggatcctcagccgtgctggcctctgtggggcttggcgcagtgaaggtggcagctaccctgaccgccatggggctggtggaccgtgcaggccgcagggctctgttgctagctggctgtgccctcatggccctgtccgtcagtggcataggcctcgtcagctttgccgtgcccatggactcaggcccaagctgtctggctgtgcccaatgccaccgggcagacaggcctccctggagactctggcctgctgcaggactcctctctacctcccattccaaggaccaatgaggaccaaagggagccaatcttgtccactgctaagaaaaccaagccccatcccagatctggagacccctcagcccctcctcggctggccctgagctctgccctccctgggccccctctgcccgctcgggggcatgcactgctgcgctggaccgcactgctgtgcctgatggtctttgtcagtgccttctcctttgggtttgggccagtgacctggcttgtcctcagcgagatctaccctgtggagatacgaggaagagccttcgccttctgcaacagcttcaactgggcggccaacctcttcatcagcctctccttcctcgatctcattggcaccatcggcttgtcctggaccttcctgctctacggactgaccgctgtcctcggcctgggcttcatctatttatttgttcctgaaacaaaaggccagtcgttggcagagatagaccagcagttccagaagagacggttcaccctgagctttggccacaggcagaactccactggcatcccgtacagccgcatcgagatctctgcggcctcctgaggaatccgtctgcctggaaattctggaactgtggctttggcagaccatctccagcatcctgcttcctaggccccagagcacaagttccagctggtcttttgggagtggcccctgcccccaaaggtggtctgcttttgctggggtaaaaaggatgaaagtctgagaatgcccaactcttcattttgagtctcaggccctgaaggttcctgaggatctagcttcatgcctcagtttccccattgacttgcacatctctgcagtatttataagaagaatattctatgaagtctttgttgcaccatggacttttctcaaagaatctcaagggtaccaatcctggcaggaagtctctcccgatatcacccctaaatccaaatgaggatatcatcttttctaatctcttttttcaactggctgggacattttcggaagggggaagtctctttttttactcttatcattttttttttttgaggtggagtctcattctgttgcccaggctggcctgatcttggctcactgcaacctccacctcctgagttcaagcgattcttgtgcctcagcctcctaagcagctgggactacaggcgcatgcaaccatacccagctaatttatttttagcagagatggggtttcactgtgttggccaggctggtcgtgaactcctgagctcaagtgatccacccacctcagcctcccagagtgctaggattacaggccttttgactcttttatctgagttttattgacccctctaattctcttacccagaatatttatccttcaccagcaactctgactctttgacgggaggcctcagttctagtccttggtctgctggtgtcattgctgtaggaatgaccacgggcctcagtttccccatttgtataatgggaagcctgtaccaggtcattcttaagatttctcctgactccagtgagctggaattctaaatgctggtctaggagctgtctccaggatggtgcaggatggctttgcggaaaggagatgggtttggaggccaacaaacctgcttgtcaatattgcctttgcctcttggcagcccttgaacttgagtaaataacaactccctgaacctcagtttcctcatctgcagaatggggataattatgtcccaggggtatatttagaccctgtttcctttcaggagggtccccagctggtccagggcctgggaaatttctacttatcctcattacccaggtccctcctttggaccctgtaaagggtcagggtgaatcagatgggggactgagcaagtagctatgactgcagatcatgtaaggaagggactgacaagaagctcccagatgctggggagaatgaagagctaaaatagatcctaggtgctggatgctttgtcatccatgcgtgcacatatgggtgctggcagagcccccaaggactctggcctctcgagttctcctatcttctccattctagatgcttcccttgtatccagtgatgtgctggagctggctttgccaagcttgtgagagctggttgctacattttcaggatttttacaagttggtaaacacagccattataaaaaattaaatgatttaaatttataattaagtaaattacattaaaacaaaaaaattatactcaaaattcattacttaattttactacctgttactattatctgtgcttttgaggctatttctacatagtaactcttatggagacctaggggagacaccgcgcatctcttcctgattccccactcaatgacatcatgttagtctttggttgcttaactggctgtggggagtgtttttgtatcacaaagattagagaggactacacatcagggcttgatttattgtttgttgattttctagacttcagaacatgctggataaaatgtcagtaatgcaaattaaactttaaagtatgtcttgtttgtagccaatacatggtgtatagcaccaaaaaatggagggattattcttccagtagttgaacactgtcatccgtttcagctgacagctgctcaaatcatttaagaaggagttctgacattcattttcattgttttacttttgtcttcctcactagtgtaaacaaaaatttcaaccagcattcatgccgaacctatacccattcttcagtgcctagctgtacagttatcagggatttttatttgtagtctaattttgtcaaatcatggccaaatcgcagtgatagttgactttggatacaaggtttggcaaaaaaaaaaatattaacaaaatattctgtaagaatcaattgtctatatggaatttaggataaagaatatttacaataaagaatatttacaataaagagtttattattatttgtaagttgtgtgcaacaaacataccctttatctctgtaaaatttatacacacaaaaattaacaaaagattctgtaagaattaattggctatatggaatttaggatagaatatttacaataaagagtatttacaat

SEQ ID NO: 2514 - DNA, 4685 bp, Homo sapiens
gggagcgcggggagcgcgggccggcggcggcgagggaggacgggggcgcagacggccggcgcgcggcgcggctaccatgggcgtgcggtgagcagccgctcgggacgacttcctcggctgcgcggcgctcgcgcggagctccccggccggcggtgcgtccccacggtcaccatgaaagacgacttcgcagaggaggaggaggtgcaatccttcggttacaagcggtttggtattcaggaaggaacacaatgtaccaaatgtaaaaataactgggcactgaagttttctatcatattattatacattttgtgtgccttgctaacaatcacagtagccattttgggatataaagttgtagagaaaatggacaatgtcacaggtggcatggaaacatctcgccaaacctatgatgacaagctcacagcagtggaaagtgacctgaaaaaattaggtgaccaaactgggaagaaagctatcagcaccaactcagaactctccaccttcagatcagacattctagatctccgtcagcaacttcgtgagattacagaaaaaaccagcaagaacaaggatacgctggagaagttacaggcgagcggggatgctctggtggacaggcagagtcaattgaaagaaactttggagaataactctttcctcatcaccactgtaaacaaaaccctccaggcgtataatggctatgtcacgaatctgcagcaagataccagcgtgctccagggcaatctgcagaaccaaatgtattctcataatgtggtcatcatgaacctcaacaacctgaacctgacccaggtgcagcagaggaacctcatcacgaatctgcagcggtctgtggatgacacaagccaggctatccagcgaatcaagaacgactttcaaaatctgcagcaggtttttcttcaagccaagaaggacacggattggctgaaggagaaagtgcagagcttgcagacactggctgccaacaactctgcgttggccaaagccaacaacgacaccctggaggatatgaacagccagctcaactcattcacaggtcagatggagaacatcaccactatctctcaagccaacgagcagaacctgaaagacctgcaggacttacacaaagatgcagagaatagaacagccatcaagttcaaccaactggaggaacgcttccagctctttgagacggatattgtgaacatcattagcaatatcagttacacagcccaccacctgcggacgctgaccagcaatctaaatgaagtcaggaccacttgcacagatacccttaccaaacacacagatgatctgacctccttgaataataccctggccaacatccgtttggattctgtttctctcaggatgcaacaagatttgatgaggtcgaggttagacactgaagtagccaacttatcagtgattatggaagaaatgaagctagtagactccaagcatggtcagctcatcaagaattttacaatactacaaggtccaccgggccccaggggtccaagaggtgacagaggatcccagggaccccctggcccaactggcaacaagggacagaaaggagagaagggggagcctggaccacctggccctgcgggtgagagaggcccaattggaccagctggtccccccggagagcgtggcggcaaaggatctaaaggctcccagggccccaaaggctcccgtggttcccctgggaagcccggccctcagggccccagtggggacccaggccccccgggcccaccaggcaaagagggactccccggccctcagggccctcctggcttccagggacttcagggcaccgttggggagcctggggtgcctggacctcggggactgccaggcttgcctggggtaccaggcatgccaggccccaagggcccccccggccctcctggcccatcaggagcggtggtgcccctggccctgcagaatgagccaaccccggcaccggaggacaatagtaagtccaagccctccctccagccagggggacagggcagtgcatgtgcttgagactgagccaacccccagtgtgtggccccacccatgttatttttgtttttgtttttgttttgagacagggtctcactctgttgcccaggctggagtgcagtggcgtgatctcggctcactgcaacccccacatcccgggttcaagtgattctcctgccttagcctcccaggtagctgggaatacaagcgtgtgcccccacagccagctaatttttgtatttttagtagagaggggtttcacagtgttgggcagggtggtttcaaacttctggcctcaagtgatccacctacctagtttcccaaagtgctgggaatacaggtgtgaaccaccacgttttgtcccccggctgcatattatttaacagcaaaggcatcataggggttggcacaggagccctgctgccagaacaggcctccataccaggcatgtgtctctctctaaacgccattgggttttttagtgctcatttgttttatgtattatgtgtgtatgtatgggacagggtctcactctgtcacccaggctggaatgacgaagtgaagtagtgcaaacatagctcattgcagctttgacctcctgggcttaggtgatcttcccactcagactcctgcgtagctgggaccacaggggtatgccaccacacctggctaattttttattttcctttttgtagaaacagggtcttgctatgttgcccaggctggtcttgaactcctggcctcaagcaaccctcctgcctcagtcttgcaaagtgctgggattccaggtgggagccactgcacctggctcttgcacttgtttatttataggagccagccctcagaagacaaacacaatgcaaaacatttccttcagggaagcctgctggccgccctgagcgctcttccctcgttttacatcctcactctggagatagatgggctccctcggttagctccatcaacatgtggatggaaccctctgctattgatgactacatttaatttctttttgagaaaggtgttagatgttacggtgccttctagtcttttgataattaaacctttggcaaaactcgaatgtttggttagcaaccaagcctatttttctctcctttgacccaaccgctattctacttgattttggtcggtgaggcccgggttatttttgttgatccgtgagcccatttttggtgctgggttctcacatccaagtgttcctgggttccgtatgattccagactgacgctgaacatctgtgcctgccctgcttcttgttgttgcttctgtcatttctgtcattgtgaagacggatccaaacacagaagaacaaagacccagtccaagatccatccagattatgtggtttcggcttgtgctctgcagtccactttgggtcatgcttgctgcgagcacgtccgtgaacgtcagctgtgggcctcgtgcagggacgctcaggctgctcccagcgggaccacagttttggcctctgaaacacagctgaagaaaggcagagtgctttctgtgatcttttaatcaatgttttccacttttgcattcctaggctgcccgcctcactggaagaacttcacagacaaatgctactatttttcagttgagaaagaaatttttgaggatgcaaagcttttctgtgaagacaagtcttcacatcttgttttcataaacactagagaggaacagcaatggataaaaaaacagatggtagggagagagagccactggatcggcctcacagactcagagcgtgaaaatgaatggaagtggctggatgggacatctccagactacaaaaattggaaagctggacagccggataactggggtcatggccatgggccaggagaagactgtgctgggttgatttatgctgggcagtggaacgatttccaatgtgaagacgtcaataacttcatttgcgaaaaagacagggagacagtactgtcatctgcattataacggactgtgatgggatcacatgagcaaattttcagctctcaaaggcaaaggacactcctttctaattgcatcaccttctcatcagattgaaaaaaaaaaagcactgaaaaccaattactgaaaaaaaattgacagctagtgttttttaccatccgtcattacccaaagacttgggaactaaaatgttccccagggtgatatgctgattttcattgtgcacatggactgaatcacatagattctcctccgtcagtaaccgtgcgattatacaaattatgtcttccaaagtatggaacactccaatcagaaaaaggttatcattggtcgttgagttatgggaagaacttaagcatatactgtgtaaacagtgccatacatttctaaaatcccaagtgtaggaaaaatatgcagacatacagatatataggccaactattagtaataatatgaaatatacttaaagagcttttaaaactttgtatttttgtacaaaatatttgtcttttacaatttttttcctttttttttttttgtcattttaccgacataatacatggagccaaagaaaacaataatggtactaataaaaactcctagggtttcctgtcagatttaattctacccagtggcaaagaattttttcaattgtggctttaaaaaaataattaaatatacatgtatatatatat

SEQ ID NO: 2515 - DNA, 2823 bp, Homo sapiens
ggcaggtgcttgttactgttaatgaaagcagatttaaagcaacaccaccatcactggagtatttttagttatatacgattgagactaccaagcatgttgctcttattcagtgtaatcctaatctcatgggtatccactgttgggggagaaggaacactttgtgattttccaaaaatacaccatggatttctgtatgatgaagaagattataaccctttttcccaagttcctacaggggaagttttctattactcctgtgaatataattttgtgtctccttcaaaatccttttggactcgcataacatgcacagaagaaggatggtcaccaacaccgaagtgtctcagaatgtgttcctttccttttgtgaaaaatggtcattctgaatcttcaggactaatacatctggaaggtgatactgtacaaattatttgcaacacaggatacagccttcaaaacaatgagaaaaacatttcgtgtgtagaacggggctggtccactcctcccatatgcagcttcactaaaggagaatgtcatgttccaattttagaagccaatgtagatgctcagccaaaaaaagaaagctacaaagttggagacgtgttgaaattctcctgcagaaaaaatcttataagagttggatcagactcagttcaatgttaccaatttgggtggtcacctaactttccaacatgcaaaggacaagtacgatcatgtggtccacctcctcaactctccaatggtgaagttaaggagataagaaaagaggaatatggacacaatgaagtagtggaatatgattgcaatcctaattttataataaacgggcctaagaaaatacaatgtgtggatggagaatggacaactttacccacttgtgttgaacaagtgaaaacatgtggatacatacctgaactcgagtacggttatgttcagccgtctgtccctccctatcaacatggagtttcagtcgaggtgaattgcagaaatgaatatgcaatgattggaaataacatgattacctgtattaatggaatatggacagagcttcctatgtgtgttgcaacacaccaacttaagaggtgcaaaatagcaggagttaatataaaaacattactcaagctatctgggaaagaatttaatcataattctagaatacgttacagatgttcagacatcttcagatacaggcactcagtctgtataaacgggaaatggaatcctgaagtagactgcacagaaaaaagggaacaattctgcccaccgccacctcagatacctaatgctcagaatatgacaaccacagtgaattatcaggatggagaaaaagtagctgttctctgtaaagaaaactatctacttccagaagcaaaagaaattgtatgtaaagatggacgatggcaatcattaccacgctgtgttgagtctactgcatattgtgggccccctccatctattaacaatggagataccacctcattcccattatcagtatatcctccagggtcaacagtgacgtaccgttgccagtccttctataaactccagggctctgtaactgtaacatgcagaaataaacagtggtcagaaccaccaagatgcctagatccatgtgtggtatctgaagaaaacatgaacaaaaataacatacagttaaaatggagaaacgatggaaaactctatgcaaaaacaggggatgctgttgaattccagtgtaaattcccacataaagcgatgatatcatcaccaccatttcgagcaatctgtcaggaagggaaatttgaatatcctatatgtgaatgaagcaagcataattttcctgaatatattcttcaaacatccatctacgctaaaagtagccattatgtagccaattctgtagttacttcttttattctttcaggtgttgtttaactcagttttatttagaactctggatttttagagctttagaaatttgtaagctgagagaacaatgtttcacttaataggagggtgtcttagtccatattacattgttataacagagtatcacagactggataacttctaaccaatagtttatttgtttcataaatctaaaagctgagaagtccaagatggtggggctgcctctggtgagggtcttctcgaagcatcataatatgctggaaggcatcacaacatggtggaagggatcacgtggcaaaagagcatgtacatgggagtgagagaaaaagagagagagagacagagtggcgggggccggggaggagcgcaaactcatcctttataaagacaccactcctgagataacaatccaatcccatgataatgacattaatccattcaagaagatagagctctcgtgacttaatcaccttctaaagatctcacctgacaacactgttgcattggcagttaagtttccacgtaaactttcggggacacattcaaaccacaggagaaactcaaattgttcctgggcaaatcacaacatggggaattttattcataaatgtccacagaaacagtaaatgttctcgcttcagaacttaattcatctaatccctcctgtttgtctcaaattataggataactttgaaactttctgaattaacgttatttaaaaggaaatgtagatgttattttagtctctatcttcaggttattatcacttaaaaacctgcgaaagctgtcaacttttgtggttgtagcaagtattaataaatatttataaatcctctaatgtaagtctagctacctatccaatactaaataccccttaaagtattaaatgcactatctgctgtaaacggaaaaaaaaaaaaaaaaaaaaaaaaa

SEQ ID NO: 2516 - DNA, 10215 bp, Homo sapiens
  misc_feature (4908)..(4908): n is a, c, g, or t
  misc_feature (5098)..(5098): n is a, c, g, or t
  misc_feature (9196)..(9196): n is a, c, g, or t
gcggccgctgcttctttcacactttagttgggagctgcgcgccgcgctcagttactggagagctggccgcgcgccgccgcctcccgcacgcttgcacgcgggcccggcttcggggttttgggttcttactccaagcggcggggaggagggggagccccggacacactgtggggaggaggaggaagaagaggaggagggaggaagaaaaaagacgaggaggacaggggcggggggcgggaggcttgccaccttcagcccccccgcgaacgcccaaggtgcacacatcttgaccaactcagcagcaaggtggattttctttgtgtttaaagaaaaaaaatgtccctgtgtctgtagagatgatttgcagttcagcccggctgaagctgaccgaatgagactatgggctgtgcctccgccaagcatgttgccactgttcaaaatgaagaggaagcccagaaagggaaaaactaccagaacggagatgtgtttggcgatgagtataggatcaaaccagtggaagaggtcaaatacatgaaaaatggggcagaagaagagcagaaaatagcagccaggaaccaagaaaacttggaaaaaagtgccagctcaaatgtaagacttaaaactaataaagaggttccgggattagttcatcaacccagagcaaacatgcacatctctgaaagccaacaagaattcttcagaatgctggatgaaaaaattgaaaagggtcgggattactgttcggaagaagaggatatcacatagcaccaattttaccactcaaaccaggagctactactgtgtaaataggttacaccccagttgaaatctttgcaaaggtcggttctattcagcgaacagcactatagcaaaagaagatcgttccatattgtacgccccattaaattacagtgtttcttaatgaacttgcaaaggaatattgctaaaaacaaacaaaaaaaactgttatcgaactttctttgttgctgctagttaaaacttgttgcaacttttcacttctcttgtgtccaggtatgcagcaaaattctgcaatttcaccttaaagatactgttggttttacagatgctctccaacctattttctataagatgaggtagtggtgaactcagataacaaacttcccttctaaactggttctgcttctaagacaagcatctcctgccctctctccttcctccccatctctcgcacgcagtctagagatggactgagccttgcttctcactggcagtgttgagctttggagatgggatggttgctatgccaagccttgtttctctgctcagaagaagtagagaagctattatcaattaaaagcatgctgtgatgtgactcctggaagtgacgtaggagtgagtggcaggttgtttgatttaataggtatcttaatcaagaattaagcttgcaacattggctttgctcagatgcagatggaagtgtgatcacaatcattttgaatccctcttcctcacttttttttctaagaaaataaacattttactgtttttatggatccttgtcttctcccattcatccagctcagtgttttaagatgatcctgggtgcagaagttgagccctcctttgcattgacactgataattagcctatagggctccctacccttccattaagaatctaccaagcattagcaaggctgaaagtggtctaagaggtgaggggacatcctatgactttttaggaaggcctgaaaccaccttgttacctttcattttgttagcaaataaaccatcctattttgtaactctcccccttcaaaatgctacatgagccttgccacttcctttttctcttacttccagcacactagacatagcaaaagtgtttgcctactcaaaaacataatacttttatgctgatgatggtatttggagatgtgaaagccaaaagcccctggcagtggtggggaatgttgactgagtgttcagcagagtttatttttccatactatatgaagagaatgatctcttctcaaagacagaagtgatatttttaacaaatattgtcacaagtaaatagcaatcaaaaggagaaaataacttttgtatttttttaatgtgtttgatagctttgacgagggttctctttgttactttcaggggagggcatcctattaaatgccacgccagcagtccgggtctgggtttgtcccacaaaatcacaggagcactgtatgttcctctcttttggagttgtgactttgaagggcctcaatattagccacactgccgcctgcagaaggtggagagttaagatgttctatgtcaatttgctcttgccgaaaagatgagcctcgattttaaaatctatccacatccaactgatggcaccattgatgtgcaaataatgagattccctatctccttttagacctgggacggcaaaagggaagggaaggaaacttagcagagtgctattgactatagattcacatattagcaacaaaatcccgtaattcttttggccaacagcagctattttggggagcagctgtggctgttacataaatagagatgcagccaaaattttaggccttttatcctgcttctagcagaaaaatgcagggagagtcaagtagtctagggtttcaggttgcctcccctcatatggtttttggccaagtgactaaaacagttttccacaactgtaaacaaactggtaagccccacctcaaacttgttcactggggactttgcttaccgttctgtgggtgaccttttccgggatttcttgttcttatcaagcaagaattaagcacatgctaaacgtcttccatttgacttctctactcggtgtctcagacagtgtcttcccagaaaaccaccaccctctacccaaagatgaaacatgctcatgtcatttttctcatggtcacatttaacagttttgacatgttatacttgcgcatagatccaagcgtttcttgggaacctgacttttgagtgtttaataaagccggaagtggtgttgccctgaaccagcagattttcacctgggttctggctccggtgtttaacactggatacatctttgatgtgcgaaagtgagttcatcttcagacacatttggtacatccagaaatagatccaagaaatggggtggttgagtgggtccgcacgaaatgcttgattatgtcagcaacacccaacactgtctgttttccatttgttggttttaatcataaaattgtcaagtgattcgtgttgtactttatttttgtgccttctgaacggatctaaaacaaawgtattttgccttttttaccccacgtgtatctgaacattaagcagattggctcagacaccatgaaaaggatactccaatgtacgtgctggtgcactctgctagttgttatctctgtagggctcaagaagctggaaggaggaagggagggtaagtggcctggtgagtggaggtagaaaaatgatgagaaatgaactgagagcattaagcagagagggttgataggctggccgtgtccggggtgaaattggaaatccagctgcctagtggccagtgggtggggcaagactgtcaacgagatttacagctggcttacacatgccttatgtcctctgagttgtagagttgtaaaagttcagcagtgtgtgcacagctttcttttggttggcagagattcaggatcatggagtactgctctcataattgaagacgtgtttgttattggcagagaaccttaaaaaaggcctttacctcagcgatgcttcctagccccaggcttgcagagaacacagagtggtgttgtggtctatttagggacaaagaaggtataaagtccagagatgagaaaactgggtcagccctcagaaactgcagcagccacgcacacagaagcctgctggaagacaggtctctctccgtccacagtgcccatcatctgagcctgggctgggatgactcaacttagcaaagacggacccaggaggagtgctggttcttcagtctttgtactggccccatcctctcctcactgtaatgtgaggaagcacctctgtgtcagggctcacctgggcatccaaagcggccacgcccacaatccgacagcccccaggagcaggtccagggatgatgcagcccccttcttggtcccatgtgatgtcatcctgctttgttatcttcttataactttatcctgctataactttatcctcttcccagcctcatccctgtttttctgttagggcaagactcttccataagcctgctaaaaaacagagatgatacctcttacaaactttacctcatagcctgtgaagcaggttggcatgtggattacaagtcctgctttgacactgggcaagaatttaagattgttctatctctactagtcatagaaaagaaacattgttaaacatgttgagttttaaaggaagaaatattttcaaattcttaatccaagaaaatactgagttggaatcttagacttcgggactctgacacgttctttatgaaaggcaaaataattggtatctaaagttctctccttcctgcctcccctaaagaaaaaggatattagattgcacactataattttacataagatctgccttccacacttccctgctggaaggcattctcagagctttatgtcttcgtacctctcagagattggactttttcttgtttaaaaccccaaccaaaaaaaataataaggcatgattggtggggagggaatgtgtatttaggggcataataaaaaggtggctcgaagcaggaactttggcctcatggtgtcatgggtggatgcctggactccagtgtgcctgtgaggggctgggttaggcagtcggctgtcacactcacatgtgcctgcaataaaccttttggaatttcatgaacgaggtnctatgaattgccttttgccaatgaatggatgtatttttccaaggggggaatagtatccttgactttggcagtcacctttttgtatgtctctagaraggggtcaaaaaaactatggtaaagatgaggcttatgagtgaatacctctgggacaaaccttaggactcacaagctatgccatgtttttcagganactctgtacctatctggaatccaatcctgggagaagaggaaaaaggagctaatatttgtcctttatactcactctgtgccagatactgtgscaggcatttataattgtttgtgtcaccccatgatatccgttaaattaatctattacccccgtgttctaaataatagatcttaagtgtggaatgcatctatccaacataaatgcccatgttgaaagaaggaaagatgtcattcaagtatttttcaaattctttttattatgactatgcccttcgcaacactgtgaaaacaacccctgggggcatctgccttccagaatctctctctggcttctcaccagcttggtttcctcatggggagtgttttatttggcctcccctatctgakctgcacacacaccagggggaggccactggctaacagtaggacttcagtgccctgaggaaaaggctttgggaatttaggcacacgtttctctccttggaatccttctagcatctggaaaaggaacctggtatttctgcagttagataccagatgcaccagaacaggcttcgagtgctgtgattcttcctggttcccaagtcttgttgttcatcacaaactgtatctttttaaggttaaaagtcttgaccttcatggggtctgggacaatccgatctccaagcatggaggaaaggcaatgcctggaccactgacttgcattgaaatcctttcttgtgggctagggtttgatgtctctttttcatctttggactggggatctgcatcttccaggtccatttaagcactgaaactagatgcaaatctctttcgagaccttacatgttttagatagtcatgtaatgacttggatagacatttaaataacttgttccaaggtcggaagacccaagaactcctcagagttcctcttcttgcttcttgaatcacatcctctaaagatgactcatgtctccatagcaattgttaaaggtgctgcctagacgggacccgctcccacctttacttactttgctcgaaggaaccaaaacaatgtccttgtgtaaaggggctgtcatatccagttttcctttgaaatctggcccccaagatcctgcttctttctaacctggcagctgtcatgtcccttcaagatgatgtgggaaatggcccttacaacttgggaaccacagaaattgctgtatttcgggaagattcacctctaaactgaaggcttcattctgatagtgtctgccctctctaccctgatttcgcccttctttgcttccatttttagcccaaggctttgaatttgattgagtaagacttagaggcagtataaagaacaccataaacttaggcagaggtcccttagggtctctagagttgaaaataattctacagccttagggggacctcttggcattgactctaaagggagagaatagcccctgtgtcctggcatttcagtctagaccttcaaggactgttctctcttgacaggcaagcaagcaaagaaagttttgcaatagatttcaagccagtttttccattcaaaccaagatgcaaattcataaaattactcttttcctggaatagatccaggcagctgccttattagaactttagattcggatctattttcttaacacacatacacatacacgcgcatacatacatatacagagagatacgtggagaaaggaaatttactctatcattgcaatacttcaagaaagagctgtattttgcctttctgtaatctccaagatagtgtctaggaaagtaatagtataactatagggataccgaaacaggaaaaaccagccatcactcttgagaaagtttgagttcgactcacatgggagaatcgaggtctgctactcgtcttgctttgtgccccatctgtgcctggatgccctactacayctgcttgactcgtctgggctgctagccggggtgttgtggctgacatcctttcctggccttacacacataatagacacatccctaacggcgtgtgcctggtccagccacatacagccaccacatgtgtcacacactgtccccctcatccatgtggacttgactggcatttcagcagctccactgggatgctctaaccccagtgtgtggagttggggtcccttcatctaggttgacccaggtatagcatttttagcattgcctttccagtcttgatgattcattcattgaactcatttatttctggagcccctggtacactccaggcactgcgctaattgccagcaaagcacaactgaactaaatccaccttcaaggaacctagccataacgagggaggcagcatggaagtaccctacaggggaaagtcctgagtgctgtgggagcatctcaccgtggcagccagcccagttttggcaatcaggggcttcctgaaagaggtgacatcaaagcccggatgtgtcagaggactgagggagagtgttactaaaggactttcaggctgagaggatagcacaggactcagcccaaaggagggccagtgtggactgtccagggccagcctgcagtacagaggctggagcttggacttgtagagggagagagaagagcaagggacgtggacggggcagtgagccaggctagccacagagggttcccggggctttgctggggattcagggagcataaataagagctttaggtggtgctgtgtcctctgcagcccactgctgaggtcctccagacagrtaaggtgtggtcacaatcagggccggggtttccctgctcactgcggcagtgcaggggtgcttgctgagatgaytcatcccagggtgtcctctgtcccttacccagccccaactcctcttcctctgccaaaagctatttgaattcaaggactttaacctgggccggatctggtttggagacaaaggggacagctctgggtcagcatgaccttctttagagccactaaggcgaaaaataccgtttgggaccaggctggcctagacccagggatgagaatgcaccctaaaataaatatacgggaagcagcagagggcttccctgtctagtgtgtgatcctaactaaaggcagctctcttgggcagccttcccctggattaggtcacatacacctggtggccaagcctctgctgggtcccaaatacacacccgagtcctgccaaagaaaggagatttttaaaaagcacagacaaattgtatgcaagtggaaaatacccataggcctagacagctgtggagggaagacctcgtgggtacctggaggctgccagagctgggagctctgcaggtatgagtcagggaaggctcagagacaagcagaatctctctatggagacaacttgcagtgccttttaggttttccaaataacctcggagttcagagcattgggtttttttctcccctccccacccccagaaaaataattagaaaaatgtttaggagaaaggaaaagaattagatgcatcagaataccagctataagccaacactgtttccagaaactcaagaaaaagctcaaacagaagacagttcccctgagaggctggaggcgttggtgctgaaggcaattttcctagctaaggggcactgggccttgctgcaccttggggctgaccttttttgcaaaacacccacccctgccctcctggcatactcaacagcaacgccagctttctggacccttggaaagatgttagctcaaacacccactttttccagatcttcctcttgctcttcactgaggaatttgtaattctgaggctagcgatgccgactcggatattccgcagcccaggtgtttagattagaatttgtccagcggtaatcctgatgctggaaaccaacaaacatttggcctcatattcacccatttaaaaactagagcccctggcaggtccccttagggccatgtgttcatggaatataagccaagtttgccytagcgctkgttcatggaatataagccaagtttacctctccccattttctgccctggcccacttcccactcacctccacctcattgccaggaagggatcaaaatgcctccatgccagttgttaaatggctacatatttgcccttcccaagggtatttgcatttntatttaggaacatggccttatattcaaggaaaatctagcatcaagattacgaggcatcacctctcaatcaggtctgggaggtatcttggggcattgctcttctgaacacctgcagaggcttcctcaggtgagtgtgggagcccggaagtggcctccctaaccactctgcctgcacatgaattctccaaagcagtgggcccccatctgtttcaattacacatgcctgtcagcaaaaacttcgtgagatgcactctctctgtgtgtttattaatttatttaaagcatatatccctttacttttgtactactatattaggcacattataaaaagtatacagcatagaaactttaaatgaataagacacaaaatattataaacagaggttctggcattttctctctgaactcctgagggggaccttgggcacctcctggtatgtgcacaccccactttgaacacccttgctttagtgcaaatcagcacgcctaaatrgcatcccaaacccactgtgcgacatttggcctgcagaataggaaagtcctaggscagaatccccaggaacttcaaatctgggagatgaggaaagaaaactcactcacaaacaacataaatgtaaataattcaaaaccctaaaggagagctgtccctagacagtagtggctacaggtgctaagcaaaagtcaggtacactggacagagccatgcgattgattgttcatcttccctctctgggtctccagaaaaggacactggcaatatccccagctctctcctgattggaattctttgaaccctcgaagtgctccagcagtactaccccccacgtagcagtgggcccatgtcgcttgaatattatttttgatttgaccaccaagatgtaatgatgattctattccattttgaaaagggtctgagaaagtgtacaggtctaattatatatacatatttatacatgtgtatttttgtttattgttacattttgacattggactttctattaaataatttttaagagttg

SEQ ID NO: 2517 - DNA, 2712 bp, Homo sapiens
gtcatgttcttcgcgccctggtgtggacactgccagcggctgcagccgacttggaatgacctgggagacaaatacaacagcatggaagatgccaaagtctatgtggctaaagtggactgcacggcccactccgacgtgtgctccgcccagggggtgcgaggataccccaccttaaagcttttcaagccaggccaagaagctgtgaagtaccagggtcctcgggacttccagacactggaaaactggatgctgcagacactgaacgaggagccagtgacaccagagccggaagtggaaccgcccagtgcccccgagctcaagcaagggctgtatgagctctcagcaagcaactttgagctgcacgttgcacaaggcgaccactttatcaagttcttcgctccgtggtgtggtcactgcaaagccctggctccaacctgggagcagctggctctgggccttgaacattccgaaactgtcaagattggcaaggttgattgtacacagcactatgaactctgctccggaaaccaggttcgtggctatcccactcttctctggttccgagatgggaaaaaggtggatcagtacaagggaaagcgggatttggagtcactgagggagtacgtggagtcgcagctgcagcgcacagagactggagcgacggagaccgtcacgccctcagaggccccggtgctggcagctgagcccgaggctgacaagggcactgtgttggcactcactgaaaataacttcgatgacaccattgcagaaggaataaccttcatcaagttttatgctccatggtgtggtcattgtaagactctggctcctacttgggaggaactctctaaaaaggaattccctggtctggcgggggtcaagatcgccgaagtagactgcactgctgaacggaatatctgcagcaagtattcggtacgaggctaccccacgttattgcttttccgaggagggaagaaagtcagtgagcacagtggaggcagagaccttgactcgttacaccgctttgtcctgagccaagcgaaagacgaactttaggaacacagttggaggtcacctctcctgcccagctcccgcaccctgcgtttaggagttcagtcccacagaggccactgggttcccagtggtggctgttcagaaagcagaacatactaagcgtgaggtatcttctttgtgtgtgtgttttccaagccaacacactctacagattctttattaaatgtgtaactcatggtcactgtgtaaacattttcagtggcgatatatcccctttgaccttctcttgatgaaatttacatggtttcctttgagactaaaatagcgttgagggaaatgaaattgctggactatttgtggctcctgagttgagtgattttggtgaaagaaagcacatccaaagcatagtttacctgcccacgagttctggaaaggtggccttgtggcagtattgacgttcctctgatcttaaggtcacagttgactcaatactgtgttggtccgtagcatggagcagattgaaatgcaaaaacccacacctctggaagataccttcacggccgctgctggagcttctgttgctgtgaatacttctctcagtgtgagaggttagccgtgatgaaagcagcgttacttctgaccgtgcctgagtaagagaatgctgatgccataactttatgtgtcgatacttgtcaaatcagttactgttcaggggatccttctgtttctcacggggtgaaacatgtctttagttcctcatgttaacacgaagccagagcccacatgaactgttggatgtcttccttagaaagggtaggcatggaaaattccacgaggctcattctcagtatctcattaactcattgaaagattccagttgtatttgtcacctggggtgacaagaccagacaggctttcccaggcctgggtatccagggaggctctgcagccctgctgaagggccctaactagagttctagagtttctgattctgtttctcagtagtccttttagaggcttgctatacttggtctgcttcaaggaggtcgaccttctaatgtatgaagaatgggatgcatttgatctcaagaccaaagacagatgtcagtgggctgctctggccctggtgtgcacggctgtggcagctgttgatgccagtgtcctctaactcatgctgtccttgtgattaaacacctctatctcccttgggaataagcacatacaggcttaagctctaagatagataggtgtttgtccttttaccatcgagctacttcccataataaccactttgcatccaacactcttcacccacctcccatacgcaaggggatgtggatacttggcccaaagtaactggtggtaggaatcttagaaacaagaccacttatactgtctgtctgaggcagaagataacagcagcatctcgaccagcctctgccttaaaggaaatctttattaatcacgtatggttcacagataattctttttttaaaaaaacccaacctcctagagaagcacaactgtcaagagtcttgtacacacaacttcagctttgcatcacgagtcttgtattccaagaaaatcaaagtggtacaatttgtttgtttacactatgatactttctaaataaactctttttttttaaaaaaaaaaaaaaaaaaaaaaaaaaaaaaaaaaaaaaaaaaaaaaaaaaac

SEQ ID NO: 2518 - DNA, 2955 bp, Homo sapiens
ggggggggctgagtgctcagtggagagcggggagttgtgtccaccttgccgacgtcgctagccgtggggctgtcctgggaaggcggacggcgagcgcccggtgtccgcactcggccgcctgccgtgcccgtctgcgcccgtgtcatcctcactcgggacgcagggaccgtttttaaatcacaggggcgtgtgtcagcctgccctaggacttcatgtctatatatttccccattcactgccccgactatctgagatcggccaagatgactgaggtgatgatgaacacccagcccatggaggagatcggcctcagcccccgcaaggatggcctttcctaccagatcttcccagacccgtcagattttgaccgccgctgcaaactgaaggaccgtctgccctccatagtggtggaacccacagaaggggaggtggagagcggggagctccggtggccccctgaggagttcctggtccaggaggatgagcaagataactgcgaagagacagcgaaagaaaataaagagcagtagagtccctgtggactcccatgggtcataccagccagcatctgttcctgaactgtgtttttcccatcatgacggaagaagagagtgagccgcaattgttctgaaaatgtcaaacgaggcttctgttttgcacctgcagatcaccgagttggttttcttttcttttcttgccttttttttttttttgaaatttgccgagcagtggagccctctgacaatttgcaaggccctctgagaaaggaagctgcttagagccagggggttagtgggtgaggggagcgagtgctgtttttgagatcattatctgaactcaggcagcctagtagaggcagtggtgggattccaatgggtcttggtgggtgggaggtggggcatgtgcaaagcaagcaaggaacatttggggtaagaaaacaaacatgaggcaaaagaaaaaatacatgtttttaagaaaacattgagcagagaactgcagccaggatgcgctcagcagacattcactctggccgctgggacatcagaaaacaaagtcttcatctctctctccagtttcacccaccccaccctttgctttcatttcaggtgtgttggtctatatgacagggaggagagtaaaggagagcaggagcaattggctgcctgcaaagccagctggaggtgaagtgcaggaaaggaaaggtcaccccattctactccatggcctctctgctcccagctgtggtaggctcacatagccagtgtgatcggtttttaagaggcagtgcttttcagcttttctccctgatatatccattttgcttcccagcactttttaggagtagtgagagcacttcctgcccttgttggaagccccagggtggacactcagcacgaaggtctctcccttaactgctgcccttccaagacttgctcccgagatggagtgggcgtggtcttccaggctggcccttccttctcctcaccgccaccttccctgccccagccccagcagccatgggtacatgggtccccagctcacctatggattcccgccagtctgcccagctgcagtactcacgccccatgggggatcttggtctgtttttcttgtgggagcctagtggagagcagacgtggctttttatgtgtcttgttggggaggtgacttgcatggtggggacaaggctgtcgtggcaaccttgggatcgagtttgagactaaaggatgtcatgagatccctggcttctccccatgttgttcccggacaagggcagaagggaggcatggcaagggacctctgctgtccttactcaacagtggtcctcatccctccccacctcccactgcttcctgcaagggcaccagttgtatgagaaagttggcctttggacttaggatttcttattgtagctaagagccatctgaagcagcaggttgcaggacaaatgcttcagtccgccgagagcagtaccgtgtggccaagaggtggactcagagccttccttgagctaaactcggccaaccaaggcacgcagcatgtcccctcaggtctccagtcagtccaggttgaccctcagttctggacgtgtgtatatagctgtatttaatacctcaaggtcattgtggctctggggatgccagggcaggaggacgagggtgcgctgtggacacagcagtccgcggaattccgttctgggaagccaatggtcgccggcaccccttgcttcctccctctgttgtctgcctgtgtgacacacatcaatggcaataacttcttccaactcctcgcagaagtgggagaggccggcagcctgcaccgagaggggctttcctctctcttgctccccgcttcgttctgttttggctgcagagagtggttcatccatactctcattccctcgcctccccttgtggacgggggtcttgccttttcaattcctgtgttttggtgtcttcccttatctgctaccctgaatcacctgtcctggtcttgctgtgtgatgggaacatgcttgtaaactgcgtaacaaatctactttgtgtatgtgtctgtttatgggggtggtttattatttttgctggtccctagaccactttgtatgaccgtttgcagtctgagcaggccaggggctgacagctaatgtcaggaccctcagcggtggagcctgctggggggacccagctgctcttggacaagtggctgagctcctatctggcctcctcttttttttttttttcaagtaatttgtgtgtatttctaactgattgtattgaaaaaattcctagtatttcagtaaaaatgcctgttgtgagatgaacctcctgtaacttctatctgttcttttttgaggctcagggagaaactagcatttttttttttccaaactactttttgtcactgtgacagttgtaaataaagtttgaaaatgctcaaaaaaaaaaaaaaaaaaac

SEQ ID NO: 2519 - DNA, 309 bp, Homo sapiens
atgcagcgctacaattttcattatcttaagtacattgtacatttctacagaacctgtgattattctcgcatgataaggatggtacttgcatatggtgaattactactgttgacagtttccgcagaaatcctatttcagtggaccaacattgtggcatggcagcaaatgccaacattttgtggaatagcagcaaatctacaagagaccctggttggtttttcgttttgttttctttgttttttcccccttctcctgaatcagcagggatggaaggagggtagggaagttatgaattactccttccagtag

SEQ ID NO: 2520 - DNA, 2065 bp, Homo sapiens
gggacgcgagcgggatccaaacttccggtgcctgcagagctcggagcggcggaggcagagaccgaggctgcaccggcagaggctgcggggcggacgcgcgggccggcgcagccatggtgaagattagcttccagcccgccgtggctggcatcaagggcgacaaggctgacaaggcgtcggcgtcggcccctgcgccggcctcggccaccgagatcctgctgacgccggctagggaggagcagcccccacaacatcgatccaagagggggggctcagtgggcggcgtgtgctacctgtcgatgggcatggtcgtgctgctcatgggcctcgtgttcgcctctgtctacatctacagatacttcttccttgcgcagctggcccgagataacttcttccgctgtggtgtgctgtatgaggactccctgtcctcccaggtccggactcagatggagctggaagaggatgtgaaaatctacctcgacgagaactacgagcgcatcaacgtgcctgtgccccagtttggcggcggtgaccctgcagacatcatccatgacttccagcggggtctgactgcgtaccatgatatctccctggacaagtgctatgtcatcgaactcaacaccaccattgtgctgccccctcgcaacttctgggagctcctcatgaacgtgaagagggggacctacctgccgcagacgtacatcatccaggaggagatggtggtcacggagcatgtcagtgacaaggaggccctggggtccttcatctaccacctgtgcaacgggaaagacacctaccggctccggcgccgggcaacgcggaggcggatcaacaagcgtggggccaagaactgcaatgccatccgccacttcgagaacaccttcgtggtggagacgctcatctgcggggtggtgtgaggccctcctcccccagaaccccctgccgtgttcctcttttcttctttccggctgctctctggccctcctccttccccctgcttagcttgtactttggacgcgtttctatagaggtgacatgtctctccattcctctccaaccctgcccacctccctgtaccagagctgtgatctctcggtggggggcccatctctgctgacctgggtgtggcggagggagaggcgatgctgcaaagtgttttctgtgtcccactgtcttgaagctgggcctgccaaagcctgggcccacagctgcaccggcagcccaaggggaaggaccggttgggggagccgggcatgtgaggccctgggcaaggggatggggctgtgggggcggggcggcatgggcttcagaagtatctgcacaattagaaaagtcctcagaagctttttcttggagggtacactttcttcactgtccctattcctagacctggggcttgagctgaggatgggacgatgtgcccagggagggacccaccagagcacaagagaaggtggctacctgggggtgtcccagggactctgtcagtgccttcagcccaccagcaggagcttggagtttggggagtggggatgagtccgtcaagcacaactgttctctgagtggaaccaaagaagcaaggagctaggacccccagtcctgccccccaggagcacaagcagggtcccctcagtcaaggcagtgggatgggcggctgaggaacggggcaggcaaggtcactgctcagtcacgtccacgggggacgagccgtgggttctgctgagtaggtggagctcattgctttctccaagcttggaactgttttgaaagataacacagagggaaagggagagccacctggtacttgtccaccctgcctcctctgttctgaaattccatccccctcagcttaggggaatgcacctttttccctttccttctcacttttgcatgtttttactgatcattcgatatgctaaccgttctcagccctgagccttggagaggagggctgtaacgccttcagtcagtctctggggatgaaactcttaaatgctttgtatattttctcaattagatctcttttcagaagtgtctatagaacaataaaaatcttttacttctg

SEQ ID NO: 2521 - DNA, 1942 bp, Homo sapiens
ggcacgaggggctgggggaaatgacccgggagggtcccatgcggctacataaaattggcagccttagaactagtgggaaggcgggtgcgcgaagtcgaggggcggagagagggggccggaggagctgctttctgaatccaagttcgtgggctctctcagaagtcctcaggacggagcagaggtggccggcgggcccggctgactgcgcctctgctttctttccataaccttttctttcggactcgaatcacggctgctgcgaagggtctagttccggacactagggtgcccgaacgcgctgatgccccgagtgctcgcagggcttcccgctaaccatgctgccgccgccgcggcccgcagctgccttggcgctgcctgtgctcctgctactgctggtggtgctgacgccgcccccgaccggcgcaaggccatccccaggcccagattacctgcggcgcggctggatgcggctgctagcggagggcgagggctgcgctccctgccggccagaagagtgcgccgcgccgcggggctgcctggcgggcagggtgcgcgacgcgtgcggctgctgctgggaatgcgccaacctcgagggccagctctgcgacctggaccccagtgctcacttctacgggcactgcggcgagcagcttgagtgccggctggacacaggcggcgacctgagccgcggagaggtgccggaacctctgtgtgcctgtcgttcgcagagtccgctctgcgggtccgacggtcacacctactcccagatctgccgcctgcaggaggcggcccgcgctcggcccgatgccaacctcactgtggcacacccggggccctgcgaatcggggccccagatcgtgtcacatccatatgacacttggaatgtgacagggcaggatgtgatctttggctgtgaagtgtttgcctaccccatggcctccatcgagtggaggaaggatggcttggacatccagctgccaggggatgacccccacatctctgtgcagtttaggggtggaccccagaggtttgaggtgactggctggctgcagatccaggctgtgcgtcccagtgatgagggcacttaccgctgccttggccgcaatgccctgggtcaagtggaggcccctgctagcttgacagtgctcacacctgaccagctgaactctacaggcatcccccagctgcgatcactaaacctggttcctgaggaggaggctgagagtgaagagaatgacgattactactaggtccagagctctggcccatgggggtgggtgagcggctatagtgttcatccctgctcttgaaaagacctggaaaggggagcagggtcccttcatcgactgctttcatgctgtcagtagggatgatcatgggaggcctatttgactccaaggtagcagtgtggtaggatagagacaaaagctggaggagggtagggagagaagctgagaccaggaccggtggggtacaaaggggcccatgcaggagatgccctggccagtaggacctccaacaggttgtttcccaggctggggtgggggcctgagcagacacagaggtgcaggcaccaggattctccacttcttccagccctgctgggccacagttctaactgcccttcctcccaggccctggttcttgctatttcctggtccccaacgtttatctagcttgtttgccctttccccaaactcatcttccagaacttttccctctctcctaagccccagttgcacctactaactgcagtcccttttgctgtctgccgtcttttgtacaagagagagaacagcggagcatgacttagttcagtgcagagagataggtgaggccagctcgagatcttataccactctgtattggacaaaggctagcacagggctaggcaccaataaagatttctaatgatgcacagaaaaaaaaaaaaaaaaaaaaa

SEQ ID NO: 2522 - DNA, 393 bp, Homo sapiens
atgatgtcggcttccttagtccgggcaactgtccgggctgtgagcaagaggaagctgcagcccacccgggcagccctcaccctgacaccttcagcagtaaacaagataaaacaacttcttaaagataagcctgagcatgtaggtgtaaaagttggtgtccgaaccaggggctgtaatggcctttcttatactctagaatatacaaagacaaaaggagattctgatgaagaagttattcaagatggagtcagagtattcatcgaaaagaaagcacagctaacacttttaggaacagaaatggactatgttgaagacaaattatccagtgagtttgtgttcaataacccaaacatcaaagggacttgtggctgtggagaaagctttaatatttga

SEQ ID NO: 2523 - DNA, 5115 bp, Homo sapiens
gaattccgggagcgggcgggctgcgaggccgcggggcatgcgggaggcggaggggtgggaccgggtggctgcgcccattccacacccgccgaaagcggacactgtcagctgaatcactccccttttaggaggagggagggggaaaaggtgtctagctaatttctgcttaaaaaagcacaggagatcgcgggtcagctttgcagtcgctgccttctcgcgcctgaccatgcacccctgcatcttcctgctgggcacaggcgagcgctttatttctggagctgagggctaaaacttttttcacttttcttctcctcaacatctgaatcatgccatgtgcccagaggagctggcttgcaaacctttccgtggtggctcagctccttaactttggggcgctttgctatgggagacagcctcagccaggcccggttcgcttcccggacaggaggcaagagcattttatcaagggcctgccagaataccacgtggtgggtccagtccgagtagatgccagtgggcattttttgtcatatggcttgcactatcccatcacgagcagcaggaggaagagagatttggatggctcagaggactgggtgtactacagaatttctcacgaggagaaggacctgttttttaacttgacggtcaatcaaggatttctttccaatagctacatcatggagaagagatatgggaacctctcccatgttaagatgatggcttcctctgcccccctctgccatctcagtggcacggttctacagcagggcaccagagttgggacggcagccctcagtgcctgccatggactgactggatttttccaactaccacatggagactttttcattgaacccgtgaagaagcatccactggttgagggagggtaccacccgcacatcgtttacaggaggcagaaagttccagaaaccaaggagccaacctgtggattaaaggacagtgttaacatctcccagaagcaagagctatggcgggagaagtgggagaggcacaacttgccaagcagaagcctctctcggcgttccatcagcaaggagagatgggtggagacactggtggtggccgacacaaagatgattgaataccatgggagtgagaatgtggagtcctacatcctcaccatcatgaacatggtcactgggttgttccataacccaagcattggcaatgcaattcacattgttgtggttcggctcattctactcgaagaagaagagcaaggactgaaaatagttcaccatgcagaaaagacactgtctagcttctgcaagtggcagaagagtatcaatcccaagagtgacctcaatcctgttcatcacgacgtggctgtccttctcaccagaaaggacatctgtgctggtttcaatcgcccctgcgagaccctgggcctgtctcacctttcaggaatgtgtcagcctcaccgcagttgtaacatcaatgaagattcgggactccctctggctttcacaattgcccatgagctaggacacagcttcggcatccagcatgatgggaaagaaaatgactgtgagcctgtgggcagacatccgtacatcatgtcccgccagctccagtacgatcccactccgctgacatggtccaagtgcagcgaggagtacatcacccgcttcttggaccgaggctgggggttctgtcttgatgacatacctaaaaagaaaggcttgaagtccaaggtcattgcccccggagtgatctatgatgttcaccaccagtgccagctacaatatggacccaatgctaccttctgccaggaagtagaaaacgtctgccagacactgtggtgctccgtgaagggcttttgtcgctctaagctggacgctgctgcagatggaactcaatgtggtgagaagaagtggtgtatggcaggcaagtgcatcacagtggggaagaaaccagagagcattcctggaggctggggccgctggtcaccctggtcccactgttccaggacctgtggggctggagtccagagcgcagagaggctctgcaacaaccccgagccaaagtttggagggaaatattgcactggagaaagaaaacgctatcgcttgtgcaacgtccacccctgtcgctcagaggcaccaacatttcggcagatgcagtgcagtgaatttgacactgttccctacaagaatgaactctaccactggtttcccatttttaacccagcacatccttgtgagctctactgccgacccatagatggccagttttctgagaaaatgctggatgctgtcattgatggtaccccttgctttgaaggcggcaacagcagaaatgtctgtattaatggcatatgtaagatggttggctgtgactatgagatcgattccaatgccaccgaggatcgctgcggtgtgtgcctgggagatggctcttcctgccagactgtgagaaagatgtttaagcagaaggaaggatctggttatgttgacattgggctcattccaaaaggagcaagggacataagagtgatggaaattgagggagctggaaacttcctggccatcaggagtgaagatcctgaaaaatattacctgaatggagggtttattatccagtggaacgggaactataagctggcagggactgtctttcagtatgacaggaaaggagacctggaaaagctgatggccacaggtcccaccaatgagtctgtgtggatccagcttctattccaggtgactaaccctggcatcaagtatgagtacacaatccagaaagatggccttgacaatgatgttgagcagatgtacttctggcagtacggccactggacagagtgcagtgtgacctgcgggacaggtatccgccgccaaactgcccattgcataaagaagggccgcgggatggtgaaagctacattctgtgacccagaaacacagcccaatgggagacagaagaagtgccatgaaaaggcttgtccacccaggtggtgggcaggggagtgggaagcatgctcggcgacatgcgggccccacggggagaagaagcgaaccgtgctgtgcatccagaccatggtctctgacgagcaggctctcccgcccacagactgccagcacctgctgaagcccaagaccctcctttcctgcaacagagacatcctgtgcccctcggactggacagtgggcaactggagtgagtgttctgtttcctgtggtggtggagtgcggattcgcagtgtcacatgtgccaagaaccatgatgaaccttgcgatgtgacaaggaaacccaacagccgagctctgtgtggcctccagcaatgcccttctagccggagagttctgaaaccaaacaaaggcactatttccaatggaaaaaacccaccaacactaaagcccgtccctccacctacatccaggcccagaatgctgaccacacccacagggcctgagtctatgagcacaagcactccagcaatcagcagccctagtcctaccacagcctccaaagaaggagacctgggtgggaaacagtggcaagatagctcaacccaacctgagctgagctctcgctatctcatttccactggaagcacttcccagcccatcctcacttcccaatccttgagcattcagccaagtgaggaaaatgtttccagttcagatactggtcctacctcggagggaggccttgtagctacaacaacaagtggttctggcttgtcatcttcccgcaaccctatcacttggcctgtgactccattttacaataccttgaccaaaggtccagaaatggagattcacagtggctcaggggaagaaagagaacagcctgaggacaaagatgaaagcaatcctgtaatatggaccaagatcagagtacctggaaatgacgctccagtggaaagtacagaaatgccacttgcacctccactaacaccagatctcagcagggagtcctggtggccacccttcagcacagtaatggaaggactgctccccagccaaaggcccactacttccgaaactgggacacccagagttgaggggatggttactgaaaagccagccaacactctgctccctctgggaggagaccaccagccagaaccctcaggaaagacggcaaaccgtaaccacctgaaacttccaaacaacatgaaccaaacaaaaagttctgaaccagtcctgactgaggaggatgcaacaagtctgattactgagggctttttgctaaatgcctccaattacaagcagctcacaaacggccacggctctgcacactggatcgtcggaaactggagcgagtgctccaccacatgtggcctgggggcctactggaaaagggtggagtgcaccacccagatggattctgactgtgcggccatccagagacctgaccctgcaaaaagatgccacctccgtccctgtgctggctggaaagtgggaaactggagcaagtgctccagaaactgcagtgggggcttcaagatacgcgagattcagtgcgtggacagccgggaccaccggaacctgaggccatttcactgccagttcctggccggcattcctcccccattgagcatgagctgtaacccggagccctgtgaggcgtggcaggtggagccttggagccagtgctccaggtcctgtggaggtggagttcaggagagaggagtgttctgtccaggaggcctctgtgattggacaaaaagacccacatccaccatgtcttgcaatgagcacctgtgctgtcactgggccactgggaactgggacctgtgttccacttcctgtggaggtggctttcagaagaggattgtccaatgtgtgccctcagagggcaataaaactgaagaccaagaccaatgtctatgtgatcacaaacccagacctccagaattcaaaaaatgcaaccagcaggcctgcaagaaaagtgccgatttactttgcactaaggacaaactgtcagccagtttctgccagacactgaaagccatgaagaaatgttctgtgcccaccgtgagggctgagtgctgcttctcgtgtccccagacacacatcacacacacccaaaggcaaagaaggcaacggttgctccaaaagtcaaaagaactctaagcccaaa

SEQ ID NO: 2524 - DNA, 3692 bp, Homo sapiens
ctgatttctcttcggctggacggaggctgcctcctcacgcggctcccaactattcccgtagctcagtgcccccctcccgccgctctactcagccaggcagacagactgacagactcgctagtcggcagcttcactcccgagggtgccgcgagcccaggcggcgaacacccggtacccctggcgcagcgaggtgggatgctgtacggacagcagcgctaagtgcccccccacccccggcgcagggtgcactcgctcctggccgcgggcccagcggcggcggcggcggcggcggcggaggggatgagcccgggacgcgcgaggcgcctgcctcaagctaccgcccggagagggacgccgagtagggctcatcgcagtaccgcgcggacccctgccccctgtggcacgcggctgcggagccttgaagccgtgtctgtgatcaggatgcactgggcgcctcgcagctggtgaggatgccctgctgcgcggccctgcgcccccagccccagtcccaggtgggcaagactgactgggcccggcttcggcccctcgtgccggtggatgaaacgtgccggagtgcttgggtgccatcagctatcaaatctgaattctaagcgccatggacgaaggcactggactgcagcccggggcgggagagcagctggaggcgccggccactgcagaagctgtccaagagaggtgcgagccggagaccctcaggtctaagagtttaccggtcctcagcagcgcctcctgccggccaagcctcagtcccactagtggagacgccaacccggcctttggctgtgtggattcttcgggccaccaggagttgaagcaaggcccgaacccgttggcccccagtccctctgccccgtccacttcggcggggctcggggactgtaaccacagggtggacctcagcaaaaccttctcggtgtcctccgccttggccatgctccaggagagaaggtgcctctacgtggtcctcacggattcccgttgcttcctggtgtgcatgtgctttctgaccttcatccaggcgttaatggtctctgggtacctgagcagcgtaattaccaccattgaaaggcgctacagtctgaagagttccgagtcggggctgctggtcagctgctttgacatcgggaacctggtggtggtggtgttcgtcagctacttcggcggccggggtcggcggcccctgtggctggccgtgggtggactcctcatcgccttcggggcagccctcttcgccttacctcacttcatctcgcccccctaccagatccaagagttgaacgcctcggcccccaacgacggcctgtgtcagggtggcaactccaccgccactttggagcctccggcctgtccgaaggactcgggaggaaataatcactgggtctacctggctttattcatttgcgcgcagattctcattggaatgggctccacacctatttataccctgggaccaacctacttagatgacaatgtcaagaaagaaaactcctccttgtacctagccatcatgtatgtcatgggagcacttggccctgcagtgggatatttattaggtggacttcttattggtttttatgttgatcccagaaatcctgttcaccttgaccagaatgaccctcgtttcattggaaactggtggagtggattcctcctttgtgccattgcaatgtttcttgtgatattcccaatgtttactttcccaaaaaagcttccacctcgacacaagaaaaagaaaaagaaaaaattttctgttgatgctgttagtgatgacgatgttctgaaggagaaatcaaacaacagtgaacaagcggacaaaaaagtttcttcgatgggatttggaaaggatgtcagagacctaccaagagcagctgtcaggatcttaagcaacatgacattcctttttgtgagtttgtcatacacagctgagagtgccattgtaactgctttcattaccttcattcccaagttcatcgagtcacagtttggtatcccagcctccaatgccagcatctacactggggttattatcgtccccagtgctggtgttggtattgtcctcggaggctacattataaaaaaattgaaacttggtgccagagaatctgcaaaactagcaatgatctgcagtggtgtgtctttactatgtttttcaaccctatttattgttggatgtgaaagcattaatctagggggcataaacatcccttatacaacaggaccttctctcaccatgccccataggaatctgacaggaagctgcaacgttaattgtggttgtaaaatacacgagtatgagccagtctgtggatcagatggaattacatactttaacccttgtctggctggctgtgttaatagtggtaatcttagcactgggatacggaattatacagaatgcacctgtgtccaaagtcgccaagtgatcactccacccaccgtgggacagcgaagtcagctccgtgtggttattgtcaagacttatctcaatgagaacggctatgctgtgtctgggaaatgtaaacggacctgcaatactcttatcccattcttagtttttcttttcatagtcaccttcatcacagcatgtgcccaaccatcagctatcatagtaacactcaggtccgtagaagatgaggagagaccttttgcactgggaatgcagtttgttttgttgcgaacacttgcatacattcctactccaatctactttggagcagtcattgacaccacctgcatgctctggcaacaggaatgtggtgtgcagggttcttgctgggagtacaacgtgacgtcgtttcgttttgtgtattttggtttggctgccggcctcaaattcgttgggtttatttttatttttctggcctggtactccataaaatacaaggaggatggactgcagaggcggaggcagagagaatttcccctgagcaccgtgagtgagagagtgggacaccccgacaatgcccggactagatcttgcccagctttcagcacccagggagaattccacgaagagactggcctgcaaaaagggatccagtgcgcagcacagacctacccggggcccttcccagaagcaataagttcctctgcggacccggggctggaagagagccccgctgccttggagccgccctcctgaagcttgaaaatggaagaatttagttttgttggttgaattgaaaatggcgacttgagaaacaactgtgccttcttttctttctttcttttttttaacctctacagacacaatcctcaaaccaacaaaactcagtatacacagccgctattcattgagggctggatacctcaacaagactgagagcctttccccgcttctctccaagaaggagacgttcagctagatttgttcccatttccgttgtgttaattcaaagctcatgctcccctacggtacaggctgaggtacacggttagcaaaaccatgggaaggggaatggcggtgcatatcattaactaacactccaaacaaaggtgagcttgcccaggacttggcatttccaaatcaaagtttttagatatgaacacctactgtgagttctgctacaaagcacaaatgaatttgtctcaactatgcaatttgattggaaaaatgtatgtgcagcatgttacatttactttcacggaataaagcagatatgtttctgaaa

SEQ ID NO: 2525 - DNA, 935 bp, Homo sapiens
ggagagacctggctgctgtgtcccgcggcttgcgctccgtagtggactccgcgggccttcggcagatgcaggcctggggtagtctcctttctggactgagaagagaagaatggagaagcccctcttcccattagtgcctttgcattggtttggctttggctacacagcactggttgtttctggtgggatcgttggctatgtaaaaacaggcagcgtgccgtccctggctgcatggctgctcttcggcagtctagccggcctgggtgcttaccagctgtatcaggatccaaggaacgtttggggtttcctagccgctacatctgttacttttgttggtgttatgggaatgagatcctactactatggaaaattcatgcctgtaggtttaattgcaggtgccagtttgctgatggccgccaaagttggagttcgtatgttgatgacatctgattagcagaagtcatgttccagcttggactcatgaaggattaaaaatctgcatcttccactattttcaatgtattaagagaaataagtgcagcatttttgcatctgacattttacctaaaaaaaaaaaagacaccaaatttggcggaggggtggaaaatcagttgttaccattataaccctacagaggtggtgagcatgtaacatgagcttattgagaccatcatagagatcgattcttgtatattgattttatctctttctgtatctataggtaaatctcaagggtaaaatgttaggtgttgacattgagaaccctgaaaccccattccctgctcagaggaacagtgtgaaaaaaaatctcttgagagatttagaatatcttttcttttgctcatcttagaccacagactgactttgaaattatgttaagtgaaatatcaatgaaaataaagtttactataaataataaaaaaaaaaaaaaaaaa

SEQ ID NO: 2526 - DNA, 2051 bp, Homo sapiens
tcatttcatgttatgttttcatttcccctctgtctgagagattgctctgatgtctttccttccataagtcctacggagatcgagcttacctcatttttctcccaggcctaggagctcaattaccaggatcactttcttccccagggtgtactacagacctccacatgttggacagtaggattcagcagagaatgagtcccacatcctcttttcatccataagccactcttcccaactactcttccgccttccattgtccctatgtctactttactgctcaatctggattttggggaacctcctcccaaaaaggcattagaaggaaatgccaagcaccgaaattttgtcaagaagcggaggctcttagaacggagaggctttctgagtaaaaagaaccaaccccctagcaaggcgcctaagttgcactctgaaccttcaaagaaaggggagactcctacggtcgatggcacttggaagaccccttccttcccaaaaaagaagacagctgcttccagcaatgggtcaggacagcccctggacaagaaagctgcagtgtcttggttgacccctgccccttcaaaaaaggctgattctgttgctgctaaagtagatttgctgggggagttccagagtgcccttccaaagatcaatagccacccaacccgctctcagaagaagagctcccagaagaaatcctctaaaaagaaccatcctcagaagaatgccccacagaactccacccaagctcattcagagaataaatgctccggagcatcccagaagttgccacggaagatggtggcaattgactgtgagatggtgggcacaggaccaaaggggcatgttagttccttggctcgatgtagcattgtcaactacaacggagatgtgctttatgacgagtacattcttcccccctgccacattgtggactaccgaaccaggtggagtggtatccggaagcagcacatggtgaatgccacacccttcaagattgctcgaggccagatcttgaagatactcacagggaagatagtggtggggcatgccatccacaacgacttcaaagcccttcagtactttcaccccaaatccctcacccgtgacacctcccatatcccccccctcaaccggaaggctgactgcccggagaatgccaccatgtctctgaagcatctcaccaagaagctgctaaaccgggatatccaggttgggaagagcggacattcctctgtggaagatgcccaggccaccatggagctatataagttggttgaagtcgagtgggaagagcacctagcccggaatccccctacagactagtggcaatggggacgctggtgatatgaggaggcagaggcagcacccaggagaaacagggcagtggaccaatggacagctccaccagctccacatctttggaagctagatttggggagagagaagctctaccccagacttaatacccattgaaatttcacctcaggtgttgtgtcctgtgtctggttaagtgtcccatggaaggggaaagccttcacgtcagaacccaaccctataccttttacttcttaaatggtgctaaccacaggtgtcccagggtgctctgtgccagttaagatttttaactttcaaggggcagggcatactgggaaatgtagtttcccaaactgccttatcacttgggtggacatatgtctccttttatgccttttggtcttgagtaattaacagcatcctcttccacgctcagaagtgttctggttggggccaggcatggtggctcacgcctgtagtcccaacacttagggaggccgaggcgggcggatcacctgagatcaggagttcaagaccagcctggccaacatggcgaattcccgttctctactaaaaatacaaaaaatgtgtggggtgtggtggcaggagcctgtaatcctagctactcaggaggctgaggcaggagaatcgcttgagcccaggaggcggagattgcagtgagccgagatcgtgtcactgcactccagcctgggtgacaagagtgagactccgtctcc

SEQ ID NO: 2527 - DNA, 2438 bp, Homo sapiens
gtgcggagcggcgcggcacagagcctgttgttgagctcagtatgtcgtgggaatccggggccgggccaggtctaggttcccaggggatggatctcgtgtggagtgcgtggtacggaaagtgcgttaaagggaaagggtcgttgccactctcggcccacggcatcgtggtcgcctggctcagcagggccgagtgggaccaggtgacggtttatctgttctgtgacgaccataagttgcagcggtacgcgcttaaccgcatcacggtgtggaggagcaggtcaggcaacgaactccctctggcagtggcttctactgctgacctgatacgctgtaagctcttggatgtaactggtggcttgggcactgatgaacttagactgctctatggcatggcattggtcaggtttgtgaatcttatctcagagaggaagacaaagtttgccaaggtccccctcaagtgtctggctcaagaggtaaatattccggattggattgttgaccttcgccatgagttgacccacaagaaaatgccccatataaatgactgccgcagaggctgctactttgtcctggattggctccagaagacctattggtgccgccaactggagaacagcctgagagagacctgggagttggaggagttcagggaagggatagaggaagaggatcaagaggaagataagaacattgttgttgatgacatcacagaacagaaaccagagcctcaggatgatgggaaaagtacggagtcagatgtaaaggccgatggagacagcaaaggcagcgaagaggtggattctcattgcaaaaaggccctgagtcataaagagctatatgaaagagcccgagaactgctggtatcatacgaagaggagcagtttacggtgctggagaaatttaggtatttacctaaggccattaaggcgtggaataacccgtccccacgtgtagaatgtgtcctggcagagctcaagggcgttacatgcgagaacagggaggctgtgctggatgcttttctggatgatggcttccttgtccccacatttgaacagttggcagctttgcagatagaatatgaagatggtcagactgaggtccagagaggggaaggtactgacccaaagtcacacaaaaacgtggacttgaatgacgtcctggtgccaaagccgttctctcagttctggcagcccctgctcaggggcctgcactcccagaacttcacgcaggccctattggagaggatgctctctgaactgccagccttggggatcagcgggatccggcctacctacatcctcagatggaccgttgaactgatcgtggccaacaccaagactggacggaatgctcgccgattttctgcaggccagtgggaagcaagaaggggctggaggctgttcaactgctccgcctcccttgactggccccggatggttgagtcctgcttgggctcaccttgctgggccagcccccaactccttcggatcatcttcaaagccatggggcagggcctgccagacgaggagcaggagaagctgctgcgcatctgttccatttatacccagagtggagaaaacagcctggtgcaggagggctctgaggcctcccccattgggaagtctccatatacactagacagcctgtattggagcgtcaagccagccagctccagcttcgggtctgaagcaaaggcccagcaacaggaggagcagggcagtgttaatgatgtcaaggaagaggagaaggaggagaaagaggtcttgccagaccaggtagaggaggaggaagaaaatgatgaccaagaggaggaagaggaggatgaagatgatgaagatgatgaagaggaagacagaatggaggtggggcctttctctacagggcaagagtcccccactgccgagaatgctaggcttctggcccagaaaagaggagctttgcagggctctgcatggcaggttagctcagaagacgtgcgatgggacacatttcccctaggccgaatgccaggtcagaccgaggacccagcagagctcatgctggagaattatgacaccatgtatcttttggaccagcctgtgctagagcagcggctggaaccctcaacatgcaagactgacaccttgggcctgagctgtggtgtcggcagtggcaactgcagcaacagcagcagcagcaacttcgagggccttctctggagccaggggcagctgcatgggctcaaaactggcctgcagctcttctgatggccatccctggtgcaagtgttcatccagccgtgccagggcaacagcccaccccctagtacaactgatgctccctgagacaacctgggagacagcctggatcagccacatcaactcagttgtccaccacaggggaattttgaatgtcttttgtttttgttttgttttgaaaaataataaacaggcaactgt

SEQ ID NO: 2528 - DNA, 849 bp, Homo sapiens
gaacaaaggtctctggttttcctaggcagagtgtgtgtgtccctgggtacttgagattagggaatggtgatgactcttaacgagcatgctgccttcaagcatctgtttaacaaagcacatcttgcaccgcccttaatccatttaaccctgagtggacacagcacatgtttcagagagcacagggttggggataaggtcatagatcaacaggatcccaaggcagaagaatttttcttagtacagaacaaaatgaaaagtctcccatgtctacttctttctacacagacacggcaaccatccgatttctcaatcttttccccacctttcccccttttctattccacaaaaccgccattgtcatcatggcccgttctcaatgagctgttgggtacacctcccagacggggtggtggccgggcagaggggctcctcacttcccagtaggggcggccgggcagaggcgcccctcacctcctggacggggcggctggccgggcggggggctgacccccctacctccctcccagacagggcggctggccaggcagaggggctcctcacctcccagacggggcggcggggcagaggcgctcccatctcagacgatgggcggccgggcagagacgctcctcacttcctagatgggatggcggccgggcagagacactcctcactttccagactgggcagccaggcagaggggctcctcacatcccagacgatgggcggccaggcagagacgctcctcacttcccagacggggtagcggccgggcagaggctgcaatctcggcactttggggggccaagacaggcggctgggaagtggaggttgtagccgagatcacgc

SEQ ID NO: 2529 - DNA, 2770 bp, Homo sapiens
agggcgctccaggcgacagcattgcagacgccattatcctctgtttctctgctgcaccgacctcgacgtcttgcctgtgtcccacttgttcgcggcctataggctactgcagcactggggtgtcagttgttggtccgacccagaacgcttcagttctgctctgcaaggatatataataactgattggtgtgcccgtttaataaaagaatatggaaactgaacagccagaagaaaccttccctaacactgaaaccaatggtgaatttggtaaacgccctgcagaagatatggaagaggaacaagcatttaaaagatctagaaacactgatgagatggttgaattacgcattctgcttcagagcaagaatgctggggcagtgattggaaaaggaggcaagaatattaaggctctccgtacagactacaatgccagtgtttcagtcccagacagcagtggccccgagcgcatattgagtatcagtgctgatattgaaacaattggagaaattctgaagaaaatcatccctaccttggaagagggcctgcagttgccatcacccactgcaaccagccagctcccgctcgaatctgatgctgtggaatgcttaaattaccaacactataaaggaagtgactttgactgcgagttgaggctgttgattcatcagagtctagcaggaggaattattggggtcaaaggtgctaaaattaaagaacttcgagagaacactcaaaccaccatcaagcttttccaggaatgctgtcctcattccactgacagagttgttcttattggaggaaaacccgatagggttgtagagtgcataaagatcatccttgatcttatatctgagtctcccatcaaaggacgtgcacagccttatgatcccaatttttacgatgaaacctatgattatggtggttttacaatgatgtttgatgaccgtcgcggacgcccagtgggatttcccatgcggggaagaggtggttttgacagaatgcctcctggtcggggtgggcgtcccatgcctccatctagaagagattatgatgatatgagccctcgtcgaggaccacctccccctcctcccggacgaggcggccggggtggtagcagagctcggaatcttcctcttcctccaccaccaccacctagagggggagacctcatggcctatgacagaagagggagacctggagaccgttacgacggcatggttggtttcagtgctgatgaaacttgggactctgcaatagatacatggagcccatcagaatggcagatggcttatgaaccacagggtggctccggatatgattattcctatgcagggggtcgtggctcatatggtgatcttggtggacctattattactacacaagtaactattcccaaagatttggctggatctattattggcaaaggtggtcagcggattaaacaaatccgtcatgagtcgggagcttcgatcaaaattgatgagcctttagaaggatccgaagatcggatcattaccattacaggaacacaggaccagatacagaatgcacagtatttgctgcagaacagtgtgaagcagtattctggaaagtttttctaagactagtgaagaactgaaggagtcctgcatctttttttttttatctgcttctgtttaaaaagccaacattcctctgcttcataggtgttctgcatttgaggtgtagtgaaatctttgctgttcaccagatgtaatgttttagttcttacaaacagggttgggggggggaagggcgtgcaaaaactaacattgaaattttgaaacagcagcagagtgagtggattttatttttcgttattgtggtggtttaaaaaattccccccatgtaattattgtgaacaccttgctttgtggtcactgtaacatttggggggtgggccagggaggaaaagtaacaatagtccacatgtccctggcatctgttcagagcagtgtgcagaatgtaatgctcttttgtaagaaacgttttatgatttttaaaataaatttagtgaacctatttttggtggtcattttttttttaagacagtcattttaaaatggtggctgaatttcccaacccacccccaaactaaacactaagtttaattttcagctcctctgttggacatataagtgcatctcttgttggacataggcaaaataacttggcaaacttagttctggtgatttcttgatggtttggaagtctattgctgggaagaaattccatcatacatattcatgcttataataagctggggattttttgtttgtttttgcaaatgcttgcccctacttttcaacaattttctatgttagttgtgaagaactaaggtggggagcagtactacaagttgagtaatggtatgagtatataccagaattctgattggcagcaagtttattaatcagaataacacttggttatggaagtgactaatgctgaaaaaattgattatttttattagataatttctcacctatagacttaaactgtcaatttgctctagtgtcttattagttaaactttgtaaaatatatatatacttgtttttccattgtatgcaaattgaaagaaaaagatgtaccatttctctgttgtatgttggattatgtaggaatgtttgtgtacaattcaaaaaaaaaaaagatgaaaaaagttcctgtggatgttttgtgtagtatcttggcatttgtattgatagttaaaattcacttccaaataaataaaacacccatgatgctag

SEQ ID NO: 2530 - DNA, 764 bp, Homo sapiens
ggcacgagcccggcagtgcagctgccgctaccgccgccctctgcccgccggcccgtctgtctacccccagcatgagcggcctgcgcgtctacagcacgtcggtcaccggctcccgcgaaatcaagtcccagcagagcgaggtgacccgaatcctggatgggaagcgcatccaataccagctagtggacatctcccaggacaacgccctgagggatgagatgcgagccttggcaggcaaccccaaggccaccccaccccagattgtcaacggggaccagtactgtggggactatgagctcttcgtggaggctgtggaacaaaacacgctgcaggagttcctgaagctggcttgagtcaagcctgtccagagttcccctgctggactccatcaccacactccccccagccttcacctggccatgaaggaccttttgaccaactccctgtcattcctaacctaaccttagagtccctccccccaatgcaggccacttctcctccctccttctctaaatgtagtcccctctcctccatgtaaaggcaacattccttacccattagtctcagaaattgtcttaagcaacagccccaaatgctggctgcccccagccaagcattggggccgccatcctgcctggcactggctgatgggcacctctgttggttccatcagccagagctctgccaaaggccccgcagtccctctcccaggaggaccctagaggcaattaaatgatgtcctgttcaaaaaaaaaaaaaaaaaa

SEQ ID NO: 2531 - DNA, 705 bp, Homo sapiens
ctagagcggcgagttgttacctgcgtcctctgacctgagagcgaaggggaaagcggcgagatgactgaccgctacaccatccatagccagctggagcacctgcagtccaagtacatcggcacgggccacgccgacaccaccaagtgggagtggctggtgaaccaacaccgcgactcgtactgctcctacatgggccacttcgaccttctcaactacttcgccattgcggagaatgagagcaaagcgcgagtccgcttcaacttgatggaaaagatgcttcagccttgtggaccgccagccgacaagcccgaggagaactgagactctgccttaccaccgcagtgcggggcacctctcccagcgtttctccggtttgccaatcctcttaagtattcctgtctccaaaggaccggctctccatggctcctgcgcctcgtgctttccgcgtacagaagtgcttgcccggggagtcccgcctgacctgccttcatgtggacccttagaacagcactgggagaccagcaggactcctgagaactgtgctggtggagaggtcctagagccggcgagcgtttgagaagagggcatggcgctggagtgagatgggatttggcgtctcgtttttggctaattgattgtcattggctttttccataaagtttagaaatcgttcaaaaaaaaaaaaaaaaaaaaaaaaaaaaaaaa

SEQ ID NO: 2532 - DNA, 1164 bp, Homo sapiens
gggtaagctgtggcggcgtgggagcacctctggggctatggaggcccctgagccgggagaagccctggagttgagcctggcgggtgcccatggccatggagtgcacaagaaaaaacacaagaagcacaagaagaaacacaagaagaaacaccatcaggaagaagacgccgggcccacgcagccgtcccctgccaagcctcagctcaaactcaaaatcaagcttgggggacaagtcctggggaccaagagtgttcctaccttcactgtgatcccagaggggcctcgctcaccctctccccttatggttgtggataatgaagaggaacctatggaaggagtcccccttgagcagtaccgtgcctggctggatgaagacagtaatctctctccctctccacttcgggacctatcaggagggttagggggtcaggaggaagaggaggaacagaggtggctggatgccctggagaagggggagctggatgacaatggagacctcaagaaggagatcaatgagcggctgcttactgctcgacagcgagctctgctccagaaggcgcggagtcaaccttcccctatgctgccgctgcctgtagctgagggctgcccacctcccgccctcacagaggagatgctgctgaagcgcgaggagcgggcgcggaagcggcggctccaggcggcgcggcgggcagaagagcacaagaaccagactatcgagcgcctcaccaagactgcggcgaccagtgggcggggaggccgggggggcgcacggggcgagcggcggggagggcgggctgcggctccggcccccatggtgcgctactgcagcggagcacagggttccaccctttccttcccacctggcgtccccgcccccacggcagtgtctcagcggccatccccctcaggcccgccgccgcgctgctctgtccccggctgtccccatccgcgccgctacgcttgctcccgcacaggccaggcactctgtagtcttcagtgctaccgcatcaacctgcagatgcggctgggggggcccgagggtcctggatccccccttttggctacgtaaggcccttaacccggactctgcgccccgtcccatgcccgctcttgagtatcttccccaccctattaaattacatccggtgcaaaaaaaaaaaaaaa

SEQ ID NO: 2533 - DNA, 905 bp, Homo sapiens
ggggggtttccgcggtggccatgactgcggccgtgttcttcggctgcgccttcattgccttcgggcctgcgctcgccctttatgtcttcaccatcgccaccgagccgttgcgtatcatcttcctcatcgccggagctttcttctggttggtgtctctactgatttcgtcccttgtttggttcatggcaagagtcattattgacaacaaagatggaccaacacagaaatatctgctgatctttggagcgtttgtctctgtctatatccgagaaatgttccgatttgcatattataaactcttaaaaaaagccagtgaaggtttgaagagtataaacccaggtgagacagcaccctctatgcgactgctggcctatgtttctggcttgggctttggaatcatgagtggagtattttcctttgtgaataccctatctgactccttggggccaggcacagtgggcattcatggagattctcctcaattcttcctttattcagctttcatgacgctggtcattatcttgctgcatgtattctggggcattgtattttttgatggctgtgagaagaaaaagtggggcatcctccttatcgttctcctgacccacctgctggtgtcagcccagaccttcataagttcttattatggaataaacctggcgtcagcatttataatcctggtgctcatgggcacctgggcattcttagctgcgggaggcagctgccgaagcctgaaactctgcctgctctgccaagacaagaactttcttctttacaaccagcgctccagataacctcagggaaccagcacttcccaaaccgcagactacatctttagaggaagcacaactgtgcctttttctgaaaatccctttttctggtggaaaaaaaaaaaaaaaaaaaac

SEQ ID NO: 2534 - DNA, 1050 bp, Homo sapiens
atggctctgttacgaaaaattaatcaggtgctgctgttccttctgatcgtgaccctctgtgtgattctgtataagaaagttcataaggggactgtgcccaagaatgacgcagatgatgaatccgagactcctgaagaactggaagaagagattcctgtggtgatttgtgctgcagcagggaggatgggtgccactatggctgccatcaatagcatctacagcaacactgacgccaacatcttgttctatgtagtgggactccggaatactctgactcgaatacgaaaatggattgaacattccaaactgagagaaataaactttaaaatcgtggaattcaacccgatggtcctcaaagggaagatcagaccagactcatcgaggcctgaattgctccagcctctgaactttgttcgattttatctccctctacttatccaccaacacgagaaagtcatctatttggacgatgatgtaattgtacaaggtgatatccaagaactgtatgacaccaccttggccctgggccacgcggcggctttctcagatgactgcgatttgccctctgctcaggacataaacagactcgtgggacttcagaacacatatatgggctatctggactaccggaagaaggccatcaaggaccttggcatcagccccagcacctgctctttcaatcctggtgtgattgttgccaacatgacagaatggaagcaccagcgcatcaccaagcaattggagaaatggatgcaaaagaatgtggaggaaaacctctatagcagctccctgggaggaggggtggccacctccccaatgctgattgtgtttcatgggaaatattccacaattaaccccctgtggcacataaggcacctgggctggaatccagatgccagatattcggagcattttctgcaggaagctaaattactccactggaatggaagacataaaccttgggacttccctagtgttcacaacgacttatgggaaagctggtttgttcctgaccctgcagggatatttaaactcaatcaccatagctga

SEQ ID NO: 2535 - DNA, 15534 bp, Homo sapiens
ccagccgtgtgtgatgagtggccacaccttgcctcctcttcccgtcccaggcaccaacagcacagagcaggccagtgtacccagagccatggcagccacgctgggagccggcacgccccccaggccccaggccaggagcatagctggggtgtatgtggaggcctcgggccaggcccagagtgtctacgccgccatggagcagggcctcctgcctgctgggctcgggcaggctctgctagaggcccaggcagccactgggggcctggtggacctcgcccggggccagctgctccctgtgtccaaggccctgcagcagggtctggtggggctggagctgaaggagaagctgctggccgctgagcgtgccactacgggctatcctgacccctacggcggtgagaagctggccctctttcaggccatcgggaaggaggttgtggacagggccctggggcagagctggctggaggtccaactggccactgggggcctggtggaccccgcccagggagtgctcgtggcccctgagccagcctgccaccagggcctcctggaccgggagacatggcacaagctgtcagagcttgagcctggcacaggtgacctgcgcttcctcaaccccaacacgctggagcggctgacataccaccagctgctggaaaggtgtgtgcgtgcccccgggtcggggctagccttgctgcccctcaagatcaccttccgctccatgggcggggcggtgagtgcagctgagctgctggaggtgggcatcctggacgagcaggctgtgcagggtctgcgggagggcaggctggccgcagtggacgtgagtgcacgtgccgaggtgcggcgctacctggagggtaccggcagcgtggccggggttgtcctgctgcccgaaggccacaagaagagctttttccaggctgccaccgagcacctgctcccaatgggcaccgcgctgccactcctagaggcccaggctgccacccacaccctggtggaccccatcacaggccagcggctgtgggtagacgaggcagtcagggcgggcctggtcagcccagagctccatgagcagctcctggtggctgagcaggccgtgacagggcaccacgaccccttcagtggctcccaaatcccccttttccaggccatgaagaaggggctagtggacaggccactagcactgcggctcttggatgcccagctggccacaggcgggctggtctgtccagcacgcaggctccggctgcccctggaggccgccctgcgctgcggctgcctggatgaagacactcagcggcagctctcgcaggctggcagcttctcagacggcacgcacggcggcctgcgctatgaacagctgctggccctctgtgtcaccgacccagagaccgggcttgccttcctgccactctcagggggaccccggggaggggagccccagggacccccattcatcaagtacagcactcggcaggccctgagcacggccacagccaccgtctctgtggggaagttccggggccggcccgtgtccctctgggagctgctcttctctgaggccatctcctcagagcagagggcgatgctggcccagcagtaccaggaagggaccctctccgtggagaagctggccgctgagctgagcgccacccttgagcaggctgcagccactgccagggtcaccttttctgggctgagggacaccgtgacaccaggagagctgctgaaagccgagatcatcgaccaggacctgtacgagcggttggagcatggacaggccacagccaaggatgtgggcagcctggcctcggcgcagaggtacctgcagggtacgggctgcattgctggcctgctgctccctggctcccaggaacgcctgagcatctatgaggcccgatgcaaggggctcctccggcccggcactgccctcatccttctggaggcacaagctgccacaggcttcatcatcgacccaaaagcaaacaaggggcactccgttgaggaggcactgagggctgctgtcattgggcctgatgtgttcgcgaagctgctgtcggctgagcgcgctgtcactggctacactgacccctacaccgggcagcagatctccctcttccaggccatgcagaagggcctcatcgtccgggagcacggcatccgcctgctggaggcccagatcgccacgggcggcgtcatcgaccccgtgcacagccaccgcgtgcccgtggacgtggcctaccggcgcggctacttcgatcagatgctgaacttgatcctgttggacccttctgacgacaccaagggcttcttcgaccccaacacgcacgagaacctcacgtacctgcagcttctggagcgctgtgtgcgtgaccccgagacgggcctgtacctcctgccactcagcagcacgcagtccccgctggtggacagtgccacccagcaggccttccagaacctgctgctctccgtgaagtatggacggtttcaggggcagagggtctccgcgtgggagctgatcaactctgagtacttcagcgagggccgcaggaggcagctgctgcgtcgctaccggcagcgcgaggtcacgctggggcaggtggcaaagctgctggaggcggagacgcagagacaggcggacatcatgctgcccgcactgcggagccgggtcaccgtccaccagctcctggaggccggtatcattgaccagcagctgttggaccaagtgctggccgggacaatcagcccggaggccctcctactcatggacggcgtccgcaggtacctgtgcggcctgggagctgtgggcggtgtgcggctgctgccctctggccagcggctcagcctctaccaggccatgaggcagaagctgctggggcccagggtggccctggccctgctggaggcccaggcggccaccggaaccatcatggaccctcacagcccagagagcctctcggtggatgaggccgtgcgcaggggtgtggtggggccggagctgtatggcaggctgaagcgggctgagggtgccattgctggcttcagagaccccttctctgggaagcaggtgtctgtgttccaggccatgaagaaaggtctcatcccttgggagcaagctgcccgcctcctggaggctcaagtggccacaggagggatcattgaccccaccagccaccaccacctccccatgccagtggccattcagcgtggctatgttgaccaggagatggagacagccttgtccagctcctccgagaccttccccacaccggacggccaggggcgcacgagctatgcccagctcctggaggagtgccccagggatgagacttctggccttcacctcctgcccctgccagaaagtgctcctgccctccccaccgaggagcaggtccagaggagcctgcaggccgtgccgggggccaaggatggcacatccctctgggacctgctcagctcctgccacttcaccgaggagcaacggaggggcctgctggaggacgtgcaggaggggaggaccactgtgccacagctgctagcctctgtgcagaggtgggtacaggagaccaagcttctggcccaggcccgcgtcatggtgcccggcccacggggtgaggtacccgctgtctggctgctggatgctggcatcatcacccaggagacccttgaggccctggctcagggcacgcagtcgcccgcccaggtcgccgagcagccggcggtgaaggcctgcctgtggggcacaggctgcgtggccggtgtgctgctacagccctctggggccaaggccagcatcgcccaggccgtgagggatggcctcctgcccacaggcctgggccagaggctgctggaagcccaggtggcatctggcttccttgttgaccccctgaacaaccagagactgtcagtggaggacgcggttaaggtcggcctggtgggcagggagctgagtgagcagctcgggcaggccgagagggcggcggccgggtacccagatccctactctagggcctccctctctctgtggcaggccatggagaaggggctcgtgccacagaacgagggcttgcccctcctgcaggtgcagctggccacagggggtgtggtggaccctgtccacggggtgcacctgccccaggcggcagcctgcagactcggccttctggacacacagacgagccaggtgctgactgcagttgacaaggacaacaagttcttctttgaccccagtgcgcgggaccaggtgacctaccagcagctcagggagcgctgcgtgtgcgactccgagaccggattgttgctgttgccactgccttcagacacagtgcttgaggtggacgaccacaccgcggtggctctgagggccatgaaggtgcccgtcagcacagggaggtttaaggggtgtagcgtgtcactctgggacctgctgctctccgaatacgttggcgctgacaagcggcgggagctggtggcactctgtcggtctgggagggctgcggccctgcggcaggtggtcagcgcagtcaccgccctggtcgaggctgcagagaggcagcccctgcaggccaccttcagagggctccggaagcaggtgtcagccagggacctgttcagggcgcagctgatcagcaggaagacgctggacgagctgagccaggggacaacgactgtgaaggaggtggcggagatggacagcgtgaagcggtccctggagggaggcaacttcattgccggggtccttatccagggcacccaggagaggatgagcatcccagaggccctgaggaggcacatcctgcggcctggcacagccctggtgctgctggaggcacaggcagctaccggcttcatcatcgaccccgcggagaaccggaagctgaccgtggaggaggcgttcaaagcaggaatgttcgggaaagaaacctacgtgaagctgctgtcggccgagcgcgccgtcaccggctacaccgacccctataccgggcagcagatctccctcttccaggccatgcagaaggacctcatcgtccgggagcacggcatccgcctgctggaggcccagatcgccacgggcggcatcatcgaccccgtgcacagccaccgcgtgcccgtggacgtggcctaccgctgcggctacttcgacgaggagatgaaccgcatcctggcggaccccagcgacgacaccaagggcttcttcgaccccaacacgcacgagaacctcacgtacctgcagcttctggagcgctgtgtggaggaccccgagacgggcctgtacctgctacaaatcataaagaaaggagaaaactacgtgtacatcaatgaggccacgagacacgtgttgcaatccagaactgcaaaaatgcgcgtggggaggtttgctgaccaggtggtctctttctgggacctgctgtcctctccatacttcacagaggacaggaagcgggagctcatccaggagtatggagcccagagtgggggcctggagaaattgctggaaatcatcaccacgacaattgaagaaacagagacgcaaaaccaaggcatcaaagtggcggccatcagaggggaggtgacagctgcagacctgttcaactccagggtcatcgatcagaagaccctgcacacacttcgtgtggggaggactgggggacaggcactcagcacgctggagtgtgtgaagccctatctggaaggcagcgactgcattgcgggggtcacggtgccctccaccagggaggtcatgagcctccatgaggccagcaggaaggagctcatccctgcagcatttgcgacttggctgctggaggcgcaggccgccaccgggttcctcctggacccctgcacccgccagaagctctctgtggatgaggctgtggatgtgggcctggtgaacgaggagctgcgggagaggctcctgaaggctgaaagagctgccacgggctacagggatccggccacaggagacacgatcccgctgttccaggccatgcagaagcagctcatcgagaaggcggaggcactgaggctgctggaggtgcaggtggccacggggggtgtcatcgacccacagcaccaccaccggctcccactggaaacagcctacagacggggctgtctgcacaaggacatctatgcgctcatttccgaccagaagcacatgaggaaacggtttgtggacccgaacacgcaagagaaggtctcgtaccgagagctgcaggagaggtgccgcccacaagaggacacgggctgggtgctgttcccagtgaacaaggctgcacgggactccgagcacatcgatgacgagacgagaagggccctggaggcagagcaagtggaaatcacagtgggaaggttcagaggccagaaaccaacactgtgggcactactgaattccgaatacgtgacagaggagaagaagctccagctggtgaggatgtatagaacacacaccagacgggcactgcagacggtagcgcagctcatcttagagttgatcgagaagcaggaaaccagcaacaaacacctgtggttccaaggaattagacgacagatcacagcttctgaactcctcagctcagccataatcacggaggaaatgctccaggacctggaaacgggacggagcacgacgcaagagctcatggaggacgaccgcgtcaagcgctacctggagggcaccagctgcatcgcgggcgtcctggtgcccgccaaggaccagcccggccgccaggagaagatgagcatctaccaggccatgtggaagggcgtgctgcggcccggcacggccctggtgctgctggaggcgcaggcggccaccggcttcgtcatcgaccccgtgcgcaacctgaggctgtcggtggaggagcccgtgcccgcgggcgtggtgggcagcgagatccaggagaagctgctgtcggccgagcgcgccgtcaccggctacaccgacccctacaccgggcagcagatctccctcttccaggccatgcagaaggacctcatcgtccgggagcacggcatccgcctgctggaggcccagatcgccacgggcggcgtcatcgaccccgtgcacagccaccgcgtgcccgtggacgtggcctaccggcgcggctacttcgacgaggagatgaaccgtgtcctggccgaccccagcgacgacaccaagggtttcttcgaccccaacacgcacgagaacctcacgtacgtgcagctgctgcgccgctgcgtgcccgacccggacaccgggctctacatgctgcagctggcaggccggggctccgccgtgcaccagctgagcgaggagctgcgctgtgccctgcgcgacgcccgcgtgacgccaggctcgggcgccctccagggccagagcgtctccgtctgggagctcctcttctaccgcgaggtgtccgaggaccggcgccaggacctgctgagcagataccgggcgggcacgctgaccgtggaggagctgggcgccaccctcacctcgctgctggcccaggcccaggcccaggcccgggccgaggccgaggccgggagcccgcgcccagacccccgggaggccctgcgtgcggccaccatggaggtcaaggtgggccgcctccgggggcgcgcggtgcccgtgtgggacgtgctggcgtccggctacgtgagcagggccgcccgggaggagctgctggccgagtttggctcggggaccctggacttgcccgcgctgacccgccggctgaccgccatcatcgaggaggccgaggaagcccccggggcccggccgcagctccaggacgccaggcgcggcccgcgggagccagggccagccgggcgaggggacggcgactcggggcgctcccagcgagagggccagggggagggcgagacccaggaggccgccgccgccgccgccgccgcccgccgccaggagcagaccctgcgtgatgccaccatggaggtgcagcgcgggcagttccaggggcggccggtctccgtgtgggacgtcctcttctcctcgtacctgagcgaggcccgccgagacgagctcctggcccagcacgcggccggcgccctgggcctgcccgacctcgtcgccgtcctcacccgggtcatcgaggagacggaggagcggctcagcaaggtgtccttccgcggcctgaggcgccaggtgtccgcctccgagctgcacacgtccgggatcctgggccccgagaccctgcgggacctggcccagggcactaagacgctgcaggaggtgacggagatggactcggtcaagcgctacctggagggcaccagctgcatcgcgggcgtcctggtgcccgccaaggaccagcccggccgccaggagaagatgagcatctaccaggccatgtggaagggcgtgctgcggcccggcacggccctggtgctgctggaggcgcaggcggccaccggcttcgtcatcgaccccgtgcgcaacctgaggctgtcggtggaggaggccgtggccgcgggcgtggtgggcggcgagatccaggagaagctgctgtcggccgagcgcgccgtcaccggctacaccgacccctacaccgggcagcagatctccctcttccaggccatgcagaaggacctcatcgtccgggagcacggcatccgcctgctggaggcccagatcgccacgggcggcgtcatcgaccccgtgcacagccaccgcgtgcccgtggacgtggcctaccggcgcggctacttcgacgaggagatgaaccgtgtcctggccgaccccagcgacgacaccaagggtttcttcgaccccaacacgcacgagaacctcacgtacgtgcagctgctgcgccgctgcgtgcccgacccggacaccgggctctacatgctgcagctggcaggccggggctccgccgtgcaccagctgagcgaggagctgcgctgtgccctgcgcgacgcccgcgtgacgccaggctcgggcgccctccagggccagagcgtctccgtctgggagctcctcttctaccgcgaggtgtccgaggaccggcgccaggacctgctgagcagataccgggcgggcacgctgaccgtggaggagctgggcgccaccctcacctcgctgctggcccaggcccaggcccaggcccgggccgaggccgaggccgggagcccgcgcccagacccccgggaggccctgcgtgcggccaccatggaggtcaaggtgggccgcctccgggggcgcgcggtgcccgtgtgggacgtgctggcgtccggctacgtgagcggggccgcccgggaggagctgctggccgagtttggctcggggaccctggacttgcccgcgctgacccgccggctgaccgccatcatcgaggaggccgaggaggcccccggggcccggccgcagctccaggacgcctggcgcggcccgcgggagccagggccagccgggcgaggggacggcgactcggggcgctcccagcgagagggccagggggagggcgagacccaggaggccgccgccgccgccgccgccgcccgccgccaggagcagaccctgcgtgatgccaccatggaggtgcagcgcgggcagttccaggggcggccggtctccgtgtgggacgtcctcttctcctcgtacctgagcgaggcccgccgagacgagctcctggcccagcacgcggccggcgccctgggcctgcccgacctcgtcgccgtcctcacccgggtcatcgaggagacggaggagcggctcagcaaggtgtccttccgcggcctgaggcgccaggtgtccgcctccgagctgcacacgtccgggatcctgggccccgagaccctgcgggacctggcccagggcactaagacgctgcaggaggtgacggagatggactcggtcaagcgctacctggagggcaccagctgcatcgcgggcgtcctggtgcccgccaaggaccagcccggccgccaggagaagatgagcatctaccaggccatgtggaagggcgtgctgcggcccggcacggccctggtgctgctggaggcgcaggcggccaccggcttcgtcatcgaccccgtgcgcaacctgaggctgtcggtggaggaggccgtggccgcgggcgtggtgggcggcgagatccaggagaagctgctgtcggccgagcgcgccgtcaccggctacaccgacccctacaccgggcagcagatctccctcttccaggccatgcagaaggacctcatcgtccgggagcacggcatccgcctgctggaggcccagatcgccacgggcggcgtcatcgaccccgtgcacagccaccgcgtgcccgtggacgtggcctaccggcgcggctacttcgacgaggagatgaaccgtgtcctggccgaccccagcgacgacaccaagggtttcttcgaccccaacacgcacgagaacctcacgtacgtgcagctgctgcgccgctgcgtgcccgacccggacaccgggctctacatgctgcagctggcaggccggggctccgccgtgcaccagctgagcgaggagctgcgctgtgccctgcgcgacgcccgcgtgacgccaggctcgggcgccctccagggccagagcgtctccgtctgggagctcctcttctaccgcgaggtgtccgaggaccggcgccaggacctgctgagcagataccgggcgggcacgctgaccgtggaggagctgggcgccaccctcacctcgctgctggcccaggcccaggcccaggcccgggccgaggccgaggccgggagcccgcgcccagacccccgggaggccctgcgtgcggccaccatggaggtcaaggtgggccgcctccgggggcgcgcggtgcccgtgtgggacgtgctggcgtccggctacgtgagcggggccgcccgggaggagctgctggccgagtttggctcggggaccctggacttgcccgcgctgacccgccggctgaccgccatcatcgaggaggccgaggaggcccccggggcccggccgcagctccaggacgcctggcgcggcccgcgggagccagggccagccgggcgaggggacggcgactcggggcgctcccagcgagagggccagggggagggcgagacccaggaggccgccgccgccgccgccgccgcccgccgccaggagcagaccctgcgtgatgccaccatggaggtgcagcgcgggcagttccaggggcggccggtctccgtgtgggacgtcctcttctcctcgtacctgagcgaggcccgccgagacgagctcctggcccagcacgcggccggcgccctgggcctgcccgacctcgtcgccgtcctcacccgggtcatcgaggagacggaggagcggctcagcaaggtgtccttccgcggcctgaggcgccaggtgtccgcctccgagctgcacacgtccgggatcctgggccccgagaccctgcgggacctggcccagggcactaagacgctgcaggaggtgacggagatggactcggtcaagcgctacctggagggcaccagctgcatcgcgggcgtcctggtgcccgccaaggaccagcccggccgccaggagaagatgagcatctaccaggccatgtggaagggcgtgctgcggcccggcacggccctggtgctgctggaggcgcaggcggccaccggcttcgtcatcgaccccgtgcgcaacctgaggctgtcggtggaggaggccgtggccgcgggcgtggtgggcggcgagatccaggagaagctgctgtcggccgagcgcgccgtcaccggctacaccgacccctacaccgggcagcagatctccctcttccaggccatgcagaaggacctcatcgtccgggagcacggcatccgcctgctggaggcccagatcgccacgggcggcgtcatcgaccccgtgcacagccaccgcgtgcccgtggacgtggcctaccggcgcggctacttcgacgaggagatgaaccgtgtcctggccgaccccagcgacgacaccaagggcttcttcgaccccaacacgcacgagaacctcacgtacgtgcagctgctgcgccgctgcgtgcccgacccggacaccgggctctacatgctgcagctggcaggccggggctccgccgtgcaccagctgagcgaggagctgcgctgtgccctgcgcgacgcccgcgtgacgccaggctcgggcgccctccagggccagagcgtctccgtctgggagctcctcttctaccgcgaggtgtccgaggaccggcgccaggacctgctgagcagataccgggcgagcacgctgaccgtggaggagctgggcgccaccctcacctcgctgctggcccaggcccaggcccaggcccgggccgaggccgaggccgggagcccgcgcccagacccccgggaggccctgcgtgcggccaccatggaggtcaaggtgggccgcctccgggggcgcgcggtgcccgtgtgggacgtgctggcgtccggctacgtgagcagggccgcccgggaggagctgctggccgagtttggctcggggaccctggacttgcccgcgctgacccgccggctgaccgccatcatcgaggaggccgaggaggcccccggggcccggccgcagctccaggacgcctggcgcggcccgcgggagccagggccagccgggcgaggggacggcgactcggggcgctcccagcgagagggccagggggagggcgagacccaggaggccgccgccgccaccgccgccgcccgccgccaggagcagaccctgcgtgatgccaccatggaggtgcagcgcgggcagttccaggggcggccggtctccgtgtgggacgtcctcttctcctcgtacctgagcgaggcccgccgagacgagctcctggcccagcacgcggccggcgccctgggcctgcccgacctcgtcgccgtcctcacccgggtcatcgaggagacggaggagcggctcagcaaggtgtccttccgcggcctgaggcgccaggtgtccgcctccgagctgcacacgtccgggatcctgggccccgagaccctgcgggacctggcccagggcactaagacgctgcaggaggtgacggagatggactcggtcaagcgctacctggagggcaccagctgcatcgcgggcgtcctggtgcccgccaaggaccagcccggccgccaggagaagatgagcatctaccaggccatgtggaagggcgtgctgcggcccggcacggccctggtgctgctggaggcgcaggcggccaccggcttcgtcatcgaccccgtgcgcaacctgaggctgtcggtggaggaggccgtggccgcgggcgtggtgggcggcgagatccaggagaagctgctgtcggccgagcgcgccgtcaccggctacaccgacccctacaccgggcagcagatctccctcttccaggccatgcagaaggacctcatcgtccgggagcacggcatccgcctgctggaggcccagatcgccacgggcggcgtcatcgaccccgtgcacagccaccgcgtgcccgtggacgtggcctaccggcgcggctacttcgacgaggagatgaaccgtgtcctggccgaccccagcgacgacaccaagggcttcttcgaccccaacacgcacgagaacctcacgtacgtgcagctgctgcgccgctgcgtgcccgacccggacaccgggctctacatgctgcagctggcaggccggggctccgccgtgcaccagctgagcgaggagctgcgctgtgccctgcgcgacgcccgcgtgacgccaggctcgggcgccctccagggccagagcgtctccgtctgggagctcctcttctaccgcgaggtgtccgaggaccggcgccaggacctgctgagcagataccgggcgggcacgctgaccgtggaggagctgggcgccaccctcacctcgctgctggcccaggcccaggcccaggcccgggccgaggccgaggccgggagcccgcgcccagacccccgggaggccctgcgtgcggccaccatggaggtcaaggtgggccgcctccgggggcgcgcggtgcccgtgtgggacgtgctggcgtccggctacgtgagcggggccgcccgggaggagctgctggccgagtttggctcggggaccctggacttgcccgcgctgacccgccggctgaccgccatcatcgaggaggccgaggaggcccccggggcccggccgcagctccaggacgcctggcgcggcccgcgggagccagggccagccgggcgaggggacggcgactcggggcgctcccagcgagagggccagggggagggcgagacccaggaggccgccgccgccgccgccgccgcccgccgccaggagcagaccctgcgtgatgccaccatggaggtgcagcgcgggcagttccaggggcggccggtctccgtgtgggacgtcctcttctcctcgtacctgagcgaggcccgccgagacgagctcctggcccagcacgcggccggcgccctgggcctgcccgacctcgtcgccgtcctcacccgggtcatcgaggagacggaggagcggctcagcaaggtgtccttccgcggcctgaggcgccaggtgtccgcctccgagctgcacacgtccgggatcctgggccccgagaccctgcgggacctggcccagggcactaagacgctgcaggaggtgacggagatggactcggtcaagcgctacctggagggcaccagctgcatcgcgggcgtcctggtgcccgccaaggaccagcccggccgccaggagaagatgagcatctaccaggccatgtggaagggcgtgctgcggcccggcacggccctggtgctgctggaggcgcaggcggccaccggcttcgtcatcgaccccgtgcgcaacctgaggctgtcggtggaggaggccgtggccgcgggcgtggtgggcggcgagatccaggagaagctgctgtcggccgagcgcgccgtcaccggctacaccgacccctacaccgggcagcagatctccctcttccaggccatgcagaaggacctcatcgtccgggagcacggcatccgcctgctggaggcccagatcgccacgggcggcgtcatcgaccccgtgcacagccaccgcgtgcccgtggacgtggcctaccggcgcggctacttcgacgaggagatgaaccgcgtcctggccgaccccagcgacgacaccaagggcttcttcgaccccaacacgcacgagaacctcacgtacctgcagcttctgcagagggccaccctggaccctgagacggggctcctatttctttctctctctctacagtgactgggcttcctccgtgcagttttctgcaactctggagaagttgaggcatacttgtgtgtctgggttgtttttttttttttttgtcattctttaattttgttgttttacccattcgttatctgtggaaaacgttttaagttgtcatgtgacagaaacttttcctttgtccatcgaggtgtttcataagttttttggtgtgttttctgggtcgtctatgtgtcatatggttttacttttctcccggaatt

SEQ ID NO: 2536 - DNA, 1638 bp, Homo sapiens
ggacaaccggctggggtccttgcgcgccgcggctcagggaggagcaccgactgcgccgcaccctgagagatggttggtgccatgtggaaggtgattgtttcgctggtcctgttgatgcctggcccctgtgatgggctgtttcactccctatacagaagtgtttccatgccacctaagggagactcaggacagccattatttctcaccccttacattgaagctgggaagatccaaaaaggaagagaattgagtttggtcggccctttcccaggactgaacatgaagagttatgccggcttcctcaccgtgaataagacttacaacagcaacctcttcttctggttcttcccagctcagatacagccagaagatgccccagtagttctctggctacagggtgggccgggaggttcatccatgtttggactctttgtggaacatgggccttatgttgtcacaagtaacatgaccttgcgtgacagagacttcccctggaccacaacgctctccatgctttacattgacaatccagtgggcacaggcttcagttttactgatgatacccacggatatgcagtcaatgaggacgatgtagcacgggatttatacagtgcactaattcagtttttccagatatttcctgaatataaaaataatgacttttatgtcactggggagtcttatgcagggaaatatgtgccagccattgcacacctcatccattccctcaaccctgtgagagaggtgaagatcaacctgaacggaattgctattggagatggatattctgatcccgaatcaattatagggggctatgcagaattcctgtaccaaattggcttgttggatgagaagcaaaaaaagtacttccagaagcagtgccatgaatgcatagaacacatcaggaagcagaactggcttgaggcctttgaaatactggataaactactagatggcgacttaacaagtgatccttcttacttccagaatgttacaggatgtagtaattactataactttttgcggtgcacggaacctgaggatcagctttactatgtgaaatttttgtcactcccagaggtgagacaagccatccacgtggggaatcagacttttaatgatggaactatagttgaaaagtacttgcgagaagatacagtacagtcagttaagccatggttaactgaaatcatgaataattataaggttctgatctacaatggccaactggacatcatcgtggcagctgccctgacagagcactccttgatgggcatggactggaaaggatcccaggaatacaagaaggcagaaaaaaaagtttggaagatccttaaatctgacagtgaagtggctggttacatccggcaagcgggtgactcccatcaggtaattattcgaggtggaggacatattttaccctatgaccagcctctgagagcttttgacatgattaatcgattcatttatggaaaaggatgggatccttatgttggataaactaccttcccgaaagagaacatcagaggttttcattgctgaaaagaaaatcgtaaaaacagaaaatgtcataggaataaaaaaattatcttttcatatctgcaagatttttttcatcaataaaaattatccttgaaa

SEQ ID NO: 2537 - DNA, 1857 bp, Homo sapiens
ccattcttctcccgggagccctcatctatgcacatctcctcaagcctgccccctgacacacagaagttccttcgctttgcagagactcaccgcactgtgttaaaccagatcctacggcagtccacgacccaccttgctgatgggccttttgctgtcctggtagactacattcgtgtcctcgactttgatgtcaagcgcaaatatttccgccaagagctggagcgtttagatgaggggctccggaaagaagacatggctgtgcatgtccttcgtgaccatgtgtttgaagactcctatcgtgagctgcatcgcaaatcccccgaagaaatgaagaatcgattgtatatagtatttgaaggagaagaagggcaggatgctggcgggctcctgcgggagtggtatatgatcatctctcgagagatgtttaaccctatgtatgccttgttccgtacctcacctggtgatcgagtcacctacaccatcaatccatcttcccactgcaaccccaaccacctcagctacttcaagtttgtcggacgcattgtggccaaagctgtatatgacaaccgtcttctggagtgctactttactcgatccttttacaaacacatcttgggcaagtcagtcagatatacagatatggagagtgaagattaccacttctaccaaggtctggtttatctgctggaaaatgatgtctccacactaggctatgacctcaccttcagcactgaggtccaagagtttggagtttgtgaagttcgtgacctcaaacccaatggggccaacatcttggtaacagaggagaataagaaggagtatgtacacctggtatgccagatgagaatgacaggagccatccgcaagcagttggcggctttcttagaaggcttctatgagatcattccaaagcgcctcatttccatcttcactgagcaggagttagagctgcttatatcaggactgcccaccattgacatcgatgatctgaaatccaacactgaataccacaagtaccagtccaactctattcagatccagtggttctggagagcattgcgttctttcgatcaagctgaccgtgccaagttcctccagtttgtcacgggtacttccaaggtacccctgcaaggctttgctgccctcgaaggcatgaatggcattcagaagtttcagatccatcgagatgacaggtccacagatcgcctgccttcagctcacacatgttttaatcagctggatctgcctgcctatgagagctttgagaagctccgccacatgctactgttggctatccaggagtgctctgaaggctttgggctggcctaataaggccctgcccaactccgtggggttttttttaccattgttggacctggggaggggggagttaaaaaaagaaccagaaagaaattgtcaaaaaccaataaatgaaatccaccaactcaccgtgtgtgtcccagctgccccatcttccccagcgcatacctgttcctcttctcattctctccccgccgcctgtttcctcaccttctctcccctttccatgccgtccatgatccccaccccatgtgttttaaaaaggcagtagcctttgcagggacctgtctgtcccaactgtttgaacagtgtgctcctcagattctgtgttcagaaggatttgctgcattgagacttgaaacctttggataggggaaaaaattatatatatatatatttttttgttctgtttgcatttcttaatttgtgcttggaatgtgttgatgtgcacagctaatgattcaatgcgagacaagattggcgtctgtgttgtggaggtttcaaataaagagcactcttcataactcaaaaaaaaaa

SEQ ID NO: 2538 - DNA, 3869 bp, Homo sapiens
gagccggtggcgcaggtgtcggggtcctcgagcgcccagcctgggagcatgattgtggacaagctgctggacgacagccgcggcggagaggggctgcgggacgcggcgggcggctgcggcctcatgaccagcccgctcaacctgagctacttctacggcgcgtcgccgcccgccgccgccccgggcgcctgcgacgccagctgctcggtcttgggcccctcggcgcccggctcgcccggctccgactcctccgacttctcctctgcctcgtcggtgtcctcctgcggcgccgtggagtcccggtcgagaggcggcgcccgcgccgagcgccagccagttgagccccatatgggggttggcaggcagcagagaggcccctttcaaggtgttcgggtaaagaactcagtgaaggaactcctgttgcacatccgaagtcataaacagaaggcttctggccaagctgtggatgattttaagacacaaggtgtgaacatagaacagttcagagaattgaagaacacagtatcatacagtgggaaaaggaaagggcccgattcgttgtctgatggacctgcttgcaaaaggccagctctgttgcattcccaatttttgacaccacctcaaacaccaacgcccggggagagcatggaagatgttcatctcaatgaacccaaacaggagagcagtgctgatctgcttcagaacattatcaacattaagaatgaatgcagccccgtttccctgaacacagttcaagttagctggctgaaccccgtggtggtccctcagagctcccccgcagagcagtgtcaggacttccatggagggcaggtcttttctccacctcagaaatgccaaccattccaagtcaggggctcccaacaaatgatagaccaggcttccctgtaccagtattctccacagaaccagcatgtagagcagcagccacactacacccacaaaccaactctggaatacagtccttttcccatacctccccagtcccccgcttatgaaccaaacctctttgatggtccagaatcacagttttgcccaaaccaaagcttagtttcccttcttggtgatcaaagggaatctgagaatattgctaatcccatgcagacttcctccagtgttcagcagcaaaatgatgctcacttgcacagcttcagcatgatgcccagcagcgcctgtgaggccatggtggggcacgagatggcctctgactcttcaaacacttcactgccattctcaaacatgggaaatccaatgaacaccacacagttagggaaatcactttttcagtggcaggtggagcaggaagaaagcaaattggcaaatatttcccaagaccagtttctttcaaaggatgcagatggtgacacgttccttcatattgctgttgcccaagggagaagggcactttcctatgttcttgcaagaaagatgaatgcacttcacatgctggatattaaagagcacaatggacagagtgcctttcaggtggcagtggctgccaatcagcatctcattgtgcaggatctggtgaacatcggggcacaggtgaacaccacagactgctggggaagaacacctctgcatgtgtgtgctgagaagggccactcccaggtgcttcaggcgattcagaagggagcagtgggaagtaatcagtttgtggatcttgaggcaactaactatgatggcctgactccccttcactgtgcagtcatagcccacaatgctgtggtccatgaactccagagaaatcaacagcctcattcacctgaagttcaggagcttttactgaagaataagagtctggttgataccattaagtgcctaattcaaatgggagcagcggtggaagcgaaggatcgcaaaagtggccgcacagccctgcatttggcagctgaagaagcaaatctggaactcattcgcctctttttggagctgcccagttgcctgtcttttgtgaatgcaaaggcttacaatggcaacactgccctccatgttgctgccagcttgcagtatcggttgacacaattagatgctgtccgcctgttgatgaggaagggagcagacccaagtactcggaacttggagaacgaacagccagtgcatttggttcccgatggccctgtgggagaacagatccgacgtatcctgaagggaaagtccattcagcagagagctccaccgtattagctccattagcttggagcctggctagcaacactcactgtcagttaggcagtcctgatgtatctgtacatagaccatttgccttatattggcaaatgtaagttgtttctatgaaacaaacatatttagttcactattatatagtgggttatattaaaagaaaagaagaaaaatatctaatttctcttggcagatttgcatatttcatacccaggtatctgggatctagacatctgaatttgatctcaatggtaacattgccttcaattaacagtagcttttgagtaggaaaggactttgatttgtggcacaaaacattattaatatagctattgacagtttcaaagcaggtaaattgtaaatgtttctttaagaaaaagcatgtgaaaggaaaaaggtaaatacagcattgaggcttcatttggccttagtccctgggagttactggcgttggacaggcttcagtcattggactagatgaaaggtgtccatggttagaatttgatctttgcaaactgtatataattgttatttttgtccttaaaaatattgtacatacttggttgttaacatggtcatatttgaaatgtataagtccataaaatagaaaagaacaagtgaattgttgctatttaaaaaaattttacaattcttactaaggagtttttattgtgtaatcactaagtctttgtagataaagcagatggggagttacggagttgttcctttactggctgaaagatatattcgaattgtaaagatgctttttctcatgcattgaaattatacattatttgtagggaattgcatgcttttttttttttttctcccgagacagggtcttgctctggcgcccaggctggagtacagtggcatgatcttggctcacttcagccttgacttgggctcaagtgatcctcctacctgagccttctgagtaactgggactacaggtgtgcactcctcgcctggctaattttttattttttgtacaggcaggatcttgccaccttgcccaggctggtcttgaactcctgagctcatgccatctgcctgccttagtctcccaaaatgctgggattacaggagtgagccaccatgcccggctggcagttgcatggaagagaacacctctttatggcttaccctctagaatttctaatttatgtgttctgttgaaatttttgtttttttacctttattgaaacaacaaaaagtcagtattgaaacatatcttcctgttttctgttgtcaaatgatgataatgtgccatgatgttttatatatatcattcagaaaaagttttattttttaataacattctattaacattattttgcttgccgctggcatgcctgaggaatgtatttggctttgattacacactaagtttttgtaataaatttgactcattaaaaaccttttttttttaaaaaaaaaaaaaagaaaatctcattagtgaacttatctttgcagctgagtacttaaattctttttaaaaagataccctttggattgatcacattgtttgacccagtatgtcttgtagacacgttagttataatcaccttgtatctctaaatatggtgtgatatgaaccagtccattcacattggaaaaactgatggttttaaataaactaattcactaataaaaaaaaaaaaaaa

SEQ ID NO: 2539 - DNA, 3301 bp, Homo sapiens
gagagccctcctcaggggctgtctctgccttcccttcttcccatgtgtatctggggcagctgaggcagggctaggagaagagcccaggttcctcctgccacctccaagcgatgaagcagccctgggccaactccagcattctcgtgtgaactgcagaggagccctgcgcttccagctacttgcagccagacagcccacctgaggatattgaccataaggactcatatctcattacaagaagcatcatggccgagccagactacatagaagatgacaatcctgaactcattaggcctcagaaactgatcaatcctgtaaaaacctcccggaaccatcaagatcttcacagagaacttcttatgaatcaaaaaaggggtcttgctcctcagaacaaaccagaattgcagaaggtgatggaaaaaagaaaacgagaccaagtaataaagcagaaggaagaagaagcacagaagaagaaatctgacttggaaatagagctattaaaacggcagcagaagttggagcagcttgaacttgagaagcagaaattgcaagaagagcaagaaaatgcccccgagtttgtgaaggtgaaaggcaatctcaggagaacaggccaagaagtcgcccaagcccaggagtcctaggctgaggctgcaccaagacctcgtgtgtcaccccacagagctgtctgtgggtgccttctcaatctcagggcaaaagcccctggagaatatttcagccagcagagaattttgacttgcagtaggatttggtttgattttcctacgatctgggtggatgccttgcctgtgacagttgcagttcctattcgccaaatgaagggcagtgccccgcacgtaagttggaatgatggacctgtgttcagagacttaacagaaccaacaagcaaaacaagtgagaacaggaaaaaggaagaggacactggaatcaattcttgagagttgcactacttggtttttcttccattccaagtttcgtgggacccagagccttttttcttttaaaagctaaaaaacaagtgtttaattcctctttttgttatctgttagataattgagatcacctagaaatgcgtttaatctgttcactcactgtaaattttgaggacccagaattgtcttgtttaatttatactttcacccctgttgcagttaacaccagagaaggaacgtgaatgtcgagcacagccactacccttgttggcacttaatttagaaatagggtgagaagtttaaaagcccatcttgattttattttcattccttttggttctctgtgtaataatagcaggctacatagtgacattccagttccaagaaggtacatcctgtccattcattaattgctttgattactaggagggtttctgttcagttttgtttttaaatgtcttgctgatctagttctttcagatggaataaccttccagtcccttagagagtggaactagtccatataacccagcttcagtagcaaaagtagaagccgccacatcttttcatttctccaagaggagagtggggaaggttcccatgaccagctgggcagtcaggatttctctaggcattctaatgtgaaataagtgtagactgctgtcaaggaggcttcatcagaagatgtatagcatttgaatgtctaatgataatgcatatcattagaatccaagctttgaaaatttctgattaatgctcatgtatttctttatctttgtttttccttgtgaagaaagactttcaccactgtctgagtgatgatgctgttgataaggatgatgtcgatgactactatattgcatctctcaggaacagctgatgggaagggaggggctgctgagttcccttgttctagctagcagcacgctcctcagagagggggccgagttacagacagcagccgcattctcatgcaaaattagttttaaactgctagtgtgggcatcggtaccttttgcctgggtgataccgaagaattgttgaggatttagtatgctccgtagagacagttcagccagtcatttctgcattggagagacttctcatactttctttgaagactcatagaaagctggatctagagcttttgaatccttaattagcacagtagaaattagctttctatgggaatgctttagtgttagcagttgacaattaggcccatattcaatctgaatgggaacaaaagtaaatgcaatgataatatactgctagttagagaaacatgttagttgattatacctgaaatggattatttatctcatcagcaagtattatttgaataaaatgagaaatgcttaagaaaaattgttgctctacagtaatttggtttcgaagaatggaatggtaactattttttcccatcgttcttttgagagaaggaagtgtgatgactgatgatcttgaaaagcccatttctgattgcacgttgactggaattctttctttgtgtctgtggactagcgatgctgtttgtaaaatgaagattcgggactggctcatatctttttatctaactagatgtcagatcttgaaatctgtattctcgaagcaattctgccacttgatcgtattcacaggggccctggtaggctcctttagaaggaccatttctgttcctagagcttaactagaattcattcttcactgaaaaaaaaaaaagttacttaagaaagcatttctttcctaatctcactcaaatctgcagaattatttgtaattagtaatacaaaatctggccaaaaggagacttgtaaatagcgtaaagtggtgtcttatgctaaacggtggaatgtataggcagagaagctctttgaagttgtcagatgagctgggctcacaagcctgattcaaacaggctgtcggtctcctctcaccccttaatactgtgcagcccaaactcctaggactcttgaacatctgagcagttttgtgctttgagccactttttgacaaaaatggctccatttttccacagcgtggttttcttaaaatagtttaatgttttatagtctcatagtagtagtgttgctttctaagctataacagtcgactttattcttctactctgaaaaatcttgacttgtttgagtgtatataatatatataaagggagccttaatggattggttttcataatttaatattttttgtatttgctcttgtataattgtttttaacggaaagtattaaagaattgagggtggaattcttagaaccaaagttattcttaataaaaatcaccacatgcttggaccatgcaaaaaaaaaaaaaaaaaaaaaaaaaaaaa

SEQ ID NO: 2540 - DNA, 3327 bp, Homo sapiens
tccagcaccaaagcggccgttctcggattccggagcgttctggagccccgagagacgccccggggttctagaagctccccggcggcgcccagtcccggcttcattcgggcgtccctccgaaacccactcgggtgcacgggtcgtcggcgagccgcgaccgggtcctggcgcgcaccatgatcgtggcggactccgagtgccgcgcagagctcaaggactacctgcggttcgccccgggcggcgtcggcgactcgggccccggagaggagcagagggagagccgggctcggcgaggccctcgagggcccagcgccttcatccccgtggaggaggtccttcgggagggggctgagagcctcgagcagcacctggggctggaggcactgatgtcctctgggcgagtagacaacctggcagtggtgatgggcctgcaccctgactactttaccagcttctggcgcctgcactacctgctgctgcacacggatggtcccttggccagctcctggcgccactacattgccatcatggctgccgcccgccatcagtgttcttacctggtaggctcccacatggccgagtttctgcagactggtggtgaccctgagtggctgctgggcctccaccgggcccccgagaagctgcgcaaactcagcgagatcaacaagttgctggcgcatcggccatggctcatcaccaaggaacacatccaggccttgctgaagaccggcgagcacacttggtccctggccgagctcattcaggctctggtcctgctcacccactgccactcgctctcctccttcgtgtttggctgtggcatcctccctgagggggatgcagatggcagccctgccccccaggcacctacaccccctagtgaacagagcagccccccaagcagggacccgttgaacaactctgggggctttgagtctgcccgcgacgtggaggcgctgatggagcgcatgcagcagctgcaggagagcctgctgcgggatgaggggacgtcccaggaggagatggagagccgctttgagctggagaagtcagagagcctgctggtgaccccctcagctgacatcctggagccctctccacacccagacatgctgtgctttgtggaagaccctactttcggatatgaggacttcactcggagaggggctcaggcaccccctaccttccgggcccaggattatacctgggaagaccatggctactcgctgatccagcggctttaccctgagggtgggcagctgctggatgagaagttccaggcagcctatagcctcacctacaataccatcgccatgcacagtggtgtggacacctccgtgctccgcagggccatctggaactatatccactgcgtctttggcatcagatatgatgactatgattatggggaggtgaaccagctcctggagcggaacctcaaggtctatatcaagacagtggcctgctacccagagaagaccacccgaagaatgtacaacctcttctggaggcacttccgccactcagagaaggtccacgtgaacttgctgctcctggaggcgcgcatgcaagccgctctgctgtacgccctccgtgccatcacccgctacatgacctgactcctgagcaggacctgggcccggttcagctccccacaaggacttctctgtctggagacagccccagacccttttgtgtcccatgcccaccctccccacgctgcagtgggcttgtgtgtgatgtgcagtcccgaagccacaccctcccttttcctcactggaatggacagttcattgcactgactctgggatctcagccctgctcctgggagctggaagagcacttggagatcctaagggaccacacccttcctccttcccctgcccacagaggcagagggcacaggaaagaagccgggccaagctcggaattaatgtgccacaagtgttgtggccttcctgaactgggaagtccctggctggcccccgggggagaggggcaaatgcctccgggactgacactccaggcagctttgccttctctcccctgtcatttccagatttcattacctcctacttgccattcacccatcaatgtgaaagtcagggtcacagctggtctgtgtgtccagttccctaaaagcctgttctgttgggcagcctgaggctgttgcccgaatcctagttcagttttttgacttcctttgccctttttcccttttctccatgcttaatggtgtgaggcgtcaggagagaggccaagtacataaaaaaaaaaaaaagcagattatctctagagagtttgagcctttgctggtcacattgccttctgaagaggagggagtattagattataaatcctctttattttggtcctttatgcttgaggttccaacctggagccacagtgtgtgagaggaggaggagagggagaattctgttctcccagagctgcacctgcctcgcagaggccagcaccccactctcctgcctccagtggccctgccgcagatgtctcccaaaaagttgagcctttctagatggcttaggtggcaccatggctcagcaggaggggcgggaggcaccagggttcttgtttggaccctgcccctgggccatggccaggtgaccatggctacattgccaaacctctgactgccacagctgcagactgagagggtgggtctgagtccccacaatgtctgaagctgcccctgggattctcaggccaacctgccaacagcaagcggattttcttgcaagatcagggaccccatttctgcagccagtgtctcctgggtgccttctgaggactcccacccccatcccagtatctcatctgtcccctctcctggggcttaagtgggttgcttccaggcagaagcagccaaggaccgattccaggcactttctgtagcaaatgactgtgaattacgacttctcttgcccttcttctagcagtctgtgcctcctctctgaccagtttggagggcactgaagaaaggcaagggccgtgctgctgctgggcggggcaggagaggagcctggccagtgtgccacattaaatacccgtgcaggcgcggagaagcaaccggcacccccttccggcctgaaagccctccctgcaagaaggtgtgcaggagagaagaggccccggcatggggatctgggttctagagggcatgtgatgactgtaaatgttcactgggtgggtagggagtggtatccagtgttcaagtgcagaaatctttggctttgctaccagttccatatgatgagaaataaacgttcgctgaggttttgtttcataaaaaaaaaaaaaaaaaaa

SEQ ID NO: 2541 - DNA, 2667 bp, Homo sapiens
gcggccgcaggtctagaattcaatcgggaggagtggaagagcctgtcttggagattttcctggggaaatcctgaggtcattcattatgaagtgtaccgcgcgggagtggctcagagtaaccacagtgctgttcatggctagagcaattccagccatggtggttcccaatgccactttattggagaaacttttggaaaaatacatggatgaggatggtgagtggtggatagccaaacaacgagggaaaagggccatcacagacaatgacatgcagagtattttggaccttcataataaattacgaagtcaggtgtatccaacagcctctaatatggagtatatgacatgggatgtagagctggaaagatctgcagaatcctgggctgaaagttgcttgtgggaacatggacctgcaagcttgcttccatcaattggacagaatttgggagcacactggggaagatataggcccccgacgtttcatgtacaatcgtggtatgatgaagtgaaagactttagctacccatatgaacatgaatgcaacccatattgtccattcaggtgttctggccctgtatgtacacattatacacaggtcgtgtgggcaactagtaacagaatcggttgtgccattaatttgtgtcataacatgaacatctgggggcagatatggcccaaagctgtctacctggtgtgcaattactccccaaagggaaactggtggggccatgccccttacaaacatgggcggccctgttctgcttgcccacctagttttggagggggctgtagagaaaatctgtgctacaaagaagggtcagacaggtattatccccctcgagaagaggaaacaaatgaaatagaacgacagcagtcacaagtccatgacacccatgtccggacaagatcagatgatagtagcagaaatgaagtcataagcgcacagcaaatgtcccaaattgtttcttgtgaagtaagattaagagatcagtgcaaaggaacaacctgcaataggtacgaatgtcctgctggctgtttggatagtaaagctaaagttattggcagtgtacattatgaaatgcaatccagcatctgtagagctgcaattcattatggtataatagacaatgatggtggctgggtagatatcactagacaaggaagaaagcattatttcatcaagtccaatagaaatggtattcaaacaattggcaaatatcagtctgctaattccttcacagtctctaaagtaacagttcaggctgtgacttgtgaaacaactgtggaacagctctgtccatttcataagcctgcttcacattgcccaagagtatactgtcctcgtaactgtatgcaagcaaatccacattatgctcgtgtaattggaactcgagtttattctgatctgtccagtatctgcagagcagcagtacatgctggagtggttcgaaatcacggtggttatgttgatgtaatgcctgtggacaaaagaaagacctacattgcttcttttcagaatggaatcttctcagaaagtttacagaatcctccaggaggaaaggcattcagagtgtttgctgttgtgtgaaactgaatacttggaagaggaccataaagactattccaaatgcaatatttctgaattttgtataaaactgtaacattactgtacagagtacatcaactattttcagcccaaaaaggtgccaaatgcatataaatcttgataaacaaagtctataaaataaaacatgggacattagctttgggaaaagtaatgaaaatataatggttttagaaatcctgtgttaaatattgctatattttcttagcagttatttctacagttaattacatagtcatgattgttctacgtttcatatattatatggtgctttgtatatgccactaataaaatgaatctaaacattgaatgtgaatggccctcagaaaatcatctagtgcatttaaaaataatcgactctaaaactgaaagaaaccttatcacattttccccagttcaatgctatgccattaccaactccaaataatctcaaataattttccacttaataactgtaaagtttttttctgttaatttaggcatatagaatattaaattctgatattgcacttcttattttatataaaataatcctttaatatccaaatgaatctgttaaaatgtttgatcccttgggaatggccttaaaaataaatgtaataaagtcagagtggtggtatgaaaacattcctagtgatcatgtagtaaatgtagggttaagcatggacagccagagctttctatgtactgttaaaattgaggtcacatattttcttttgtatcctggcaaatactcctgcaggccaggaagtataatagcaaaaagttgaacaaagatgaactaatgtattacattaccattgccactgatttttttttaaatggtaaatgaccttgtatataaatattgccatatcatggtacctataatggtgatatatttgtttctatgaaaaatgtattgtgctttgatactaaaaatctgtaaaatgttagttttggtaattttttttctgctggtggatttacatattaaattttttctgctggtggataaacattaaaattaatcatgtttcaaataggccatgaaggccgaattc

SEQ ID NO: 2542 - DNA, 3651 bp, Homo sapiens
gctttgggcgggaccctgcagaggcggcggggctcctcctcccgctcctcctcggcctccccttcgggcgctctcgcgctaactgtgctcctccggggccctccgcctgctcccagccatggtggcctggcgctcggcgttccttgtctgcctcgctttctccttggccaccctggtccagcgaggatctggggactttgatgattttaacctggaggatgcagtgaaagaaacttcctcagtaaagcagccatgggaccacaccaccaccaccacaaccaataggccaggaaccaccagagctccggcaaaacctccaggtagtggattggacttggctgatgctttggatgatcaagatgatggccgcaggaaaccgggtataggaggaagagagagatggaaccatgtaaccaccacgaccaagaggccagtaaccaccagagctccagcaaatactttaggaaatgattttgacttggctgatgccctggatgatcgaaatgatcgagatgatggccgcaggaaaccaattgctggaggaggaggtttttcagacaaggatcttgaagacatagtaggggtggagaatacaaacctgacaagggtaaaggtgatggccggtacggcagcaatgacgaccctggatctggcatggtggcagagcctggcaccattgccggggtggccagcgccctggccatggccctcatcggtgccgtctccagctacatctcctaccagcagaagaagttctgcttcagcattcagcagggtctcaacgcagactacgtgaagggagagaacctggaagccgtggtatgtgaggaaccccaagtgaaatactccacgttgcacacgcagtctgcagagccgccgccgccgcccgaaccagcccggatctgagggccctgtccagctgcaggcatgcacaatggtgccaccgcttgtcacccggctccccccaccccttcatttggacccgcagctgctgtgctgctctgtgccatcggctccttgttggtctgagtttcccggatgagctctgggtgtttgtgagtttggtttctctgccctgccccaagcgtgctgagacttggtgccgaaattcaagagccagctctgatagaaagccagcaccagcctcgggagctgctgagccaccaactcccaaagccagcctgcctccagctttactgagcacaggatgcgggggccaagatgatgctgaggcctgatgacatttatgcttaggggacaagagtttgaactcaagggactgtgacccctgcacactggagtggctcattgtggcaggtttctgccaatagacagcccctgacagtggcctcaaggagctgcaggtggggggctcagcctgcacccacttggagcccctgcaaggagcgaaccggtcagcaccaagtaacaccacacacacgcagcacccaggatgatggtttcacttcagtcttccccatcccaggttttatgttgctgggcttccggagagccggtccaagcggaggctttcagtgatttaagtacaaacatgcatctcgtgatagtcctgccttgagagcttaggaatcttccggataagtatgaagcaattcgtaggcctgtttcccatctgattccatagggggctgggtgtggccttcgggttgacatgagaaaggtctttagcaatcatttctgcaccggagatgagttttatcctgtgttggggagaggtgctcaccctccaccctgtgtccctgttttggtagcaagagtgaccgatgtcaagaacgagcatcaaagccagaatcctgcttgtttgcttaaaaatgtaattgggggcggcgggggaggagaggggaaagagacattcgcttggtttagtgaaacgcaggtgactttgtagctctgtggtcagcctacttgtctgctctgagggagagtgcgtggggagccatgctcaccgtggcaaacacaggaaccccatgactcgcccctcacctggcgtggagctgcctggtttgggctggagcagagctggtttcctggaatgttcctttggcccacatatggttctgtcccggtgagctctgttgtcagaggctcacgggacagaaccacatgctagggtctagggcccctgtctactgatagtcagtttgctgtgtcagaaagcacttctgaaagcagatatgagtcaccagacaggcaggatcttacaaaactcacgggcctctttggtctgcatgatggccccatgcgtttcataggctgtccactgagcgggattgtctgctgagtgggatgagccaactccagtttcttaaggaaaccactggaatctgcagcccccacatgcatctgtctaacgcatgcctcgtgttcgttttgcaaacatgcctgtggtggagggtggtcagtcgtagccctgtgcgtctcaaggctgccttgtgaggccattcccagtgcgtgcccttgagctccttaccaccccttttcctgctcggccctttaatccctgacagacctggactgtgtggctgaagggggacctgcagcactgcagaaatgcctctgcgtggtgccatgaaggaaagaaaccttggcctggtctcgagaagcttcccatgcttcaggaagttagtaagggtggggtggcttgcaggattggcctgtttccagggcctcccacactcattggccagattgtgaactttgtcaggcttgtccctccctgataccaagtatgtcgagaaccgatggccccaccctctggctggtgctgggccggaggtggctatggaggattttggcatgcgtggcctgtcgccacctggacagcgtgacctcaggggttgtccactttacctttatggtgaggcctgtcggatggctaagtccttgaaaccctagagctgtgacgtagaatatgtgctgtctgtgagaccgtgttcccaggagcactgactgcagttgagagagacccattttgctctcccttaccgccccccgccccgggtgctttctgcacaaagcctagagcctggcactcaagcccaccggtggcagctcctagtgactggacatgcctggaagacccctcagccttctgtttgcagaacgttcatttcaggagcttctccttcccacagacatcttacacttgctcgacactgccacctgcagaagcctggcgggctctggtcaccatgtgtctatctgaaggttgcactggccagcatgggcctgtcccaagcgagaggggagacacagtggactgaaaggactggttgaaagtggccaatctctatcagcttaatttggcagagaaaatttgtaacaactctgagcacatgctgggtgaagtcacagctcaaggaaagataaagctgggcggaaggaggtgtgcgtggcttctggggtgggacccagaggggaggctctgggacaggggctggggttcagtgccagggccctgaggaagaaatggggactgatctcaaaattccagaattccctgtacatctgttcacgtgcttgtgtccaggtgtgacttgtaaactgtctagtgtttgcattaaataaaatggcaccgagcagaaaaaaaaaaaaaaaaaaaaaaaaaaaaaaagaaaaaaaaaaaaaaaa

SEQ ID NO: 2543 - DNA, 933 bp, Homo sapiens
atggcgctgaggcggccaccgcgactccggctctgcgctcggctgcctgacttcttcctgctgctgcttttcaggggctgcctgataggggctgtaaatctcaaatccagcaatcgaaccccagtggtacaggaatttgaaagtgtggaactgtcttgcatcattacggattcgcagacaagtgaccccaggatcgagtggaagaaaattcaagatgaacaaaccacatatgtgttttttgacaacaaaattcagggagacttggcgggtcgtgcagaaatactggggaagacatccctgaagatctggaatgtgacacggagagactcagccctttatcgctgtgaggtcgttgctcgaaatgaccgcaaggaaattgatgagattgtgatcgagttaactgtgcaagtgaagccagtgacccctgtctgtagagtgccgaaggctgtaccagtaggcaagatggcaacactgcactgccaggagagtgagggccacccccggcctcactacagctggtatcgcaatgatgtaccactgcccacggattccagagccaatcccagatttcgcaattcttctttccacttaaactctgaaacaggcactttggtgttcactgctgttcacaaggacgactctgggcagtactactgcattgcttccaatgacgcaggctcagccaggtgtgaggagcaggagatggaagtctatgacctgaacattggcggaattattgggggggttctggttgtccttgctgtactggccctgatcacgttgggcatctgctgtgcatacagacgtggctacttcatcaacaataaacaggatggagaaagttacaagaacccagggaaaccagatggagttaactacatccgcactgacgaggagggcgacttcagacacaagtcatcgtttgtgatctga

SEQ ID NO: 2544 - DNA, 937 bp, Homo sapiens
acggcgcccgccaggagcgccccccactcccaggccagcccaccccggcggaccgggccccgcgcgcccaggcgaggcactgggctccctctgctccccgtgggccgctccccgcgtggggccactgcccccggcccccgccatggtgcggatttcaaagcccaagacgtttcaggcctacttggatgattgtcaccggaggtatagctgtgcccactgccgcgctcacctggccaaccacgacgacctcatctccaagtccttccagggcagtcaggggcgtgcctacctcttcaactcagtggtgaacgtgggctgcgggccagccgaggagcgggtgctgctgaccggcctccatgctgtcgccgacatccactgcgagaactgcaagaccactttgggctggaaatatgaacaggcctttgagagcagccagaagtacaaagaggggaagtacatcattgaactcaaccacatgatcaaagacaacggctgggactgacccccgctcccccgacgcatgtggctccagcccggcctggccgccagggagcgccactggcttcccgccacccgaagggagctctggaccctcagagcccctgcagaggacggatctagctcctgtatatatattttattgcatgcactgtgaccttggggggagaacagaagggggacgacgcccccgcacctcctgcgatctggctggcttggatctcgtttttaacccgttcctgccccacctgccctatagttatggcctgtgttctgctctcctggtcccagtgcaccgtctgctctgtgaactcctcccaccaggcccttcttaccccacgcgtgtctgtccccctcgttctgtagcgtttgtacataataaaacaatggagtggagacaaaaaaaaaaaaaaaaaaaaaaaaaaaaaaaaaaaaaaaa

SEQ ID NO: 2545 - DNA, 1821 bp, Homo sapiens
ctctctgacgtgggagccgccgtcgctgccgccacccggaggctcttgtcaggatggtgaagctgttcatcggaaaccttccccgggaggctacagagcaggagattcgctcactcttcgagcagtatgggaaggtgctggaatgtgacatcattaagaattacggctttgtgcacatagaagacaagacggcagctgaggatgccatacgcaacctgcaccattacaagcttcatggggtgaacatcaacgtggaagccagcaagaataagagcaaagcttcaaccaagttacacgtgggtaacatcagccccacttgtaccaaccaagagcttcgagccaagtttgaggagtatggtccggtcatcgaatgtgacatcgtgaaagattatgccttcgtacacatggagcgggcagaggatgcagtggaggccatcaggggccttgacaacacagagtttcaaggcaaaagaatgcatgtgcagttgtccacaagccggcttcggactgcccctggtatgggagaccagagtggctgctatcggtgtgggaaagaagggcactggtccaaagagtgcccagtagatcgtacgggtcgtgtggcagactttactgagcagtataatgaacaatatggagcagttcgaacaccttacaccatgggctacggggaatccatgtattacaacgatgcatatggagcactcgactactataagcgataccgggtccgctcttatgaggcagtagcagcggcggcagcggcttctgcatacaactacgcagagcagaccatgtcccatctgcctcaagtccaaagcacaactgtgaccagccacctcaactctacttctgttgatccctatgacagacacctattgccaaactctggcgctgctgccacttcagctgctatggctgctgctgcagccaccacttcctcctactatggaagggacaggagcccactgcgtcgtgctgcagccatgctccccacagttggagagggctacggttatgggccagagagtgaattatctcaggcttccgcagctacacggaattctctgtatgacatggcccggtatgaacgggagcagtatgtggaccgagcccggtactcagccttttaaaaactggaggtaggataattgcggactgaaccctcgggctgcggtcatatatgagaacttgctccgcgcggtcccctttgccgggatgtttccattgcttcatgtttcagtaaacaaaaggagtttgtgaccaactatgttttctttcttaattcttctaagttgacttttctttcctcctgaaactagtctctgtagcctttcactctgttccttatattctcagcctctgagcagccctaggtaaggattatgctggcatcccctttttcctgtgcagtggaacccctcttatcttgctttccctaggagttgaatccttctccctgcctacctgcagcatctcctttccctttaaaatgaccatgtagtggcaagcagccttttactcttctgttagctctggactcttaacacttaagttactcttctgaaattgctaggaccattgggggttttgttgttttgtttgttttttatgtccgacctgtgatcgtggtacagcattagctgaaatttacccttgttttactccactcctcccttttttaaaaaaattttttgacaaataaatgtttctaacacttaaaaaaaaaaaaaaaaaaaaaaaaaaaaaaaaaaaaaaaaaaaaaaaaaaaaaaaaaaaaaaaaaaaaaaaaaaaaaaaaaaaaaaaaaaaaaaccccggg

SEQ ID NO: 2546 - DNA, 4372 bp, Homo sapiens
aaacttggagagacgcaggacaggatcccggcggcagaaggacggagagaaaggggaccccgggacgggaaaggcgcagagcaggcgcgggcggcggcggcggcggggcagggcagggcgggcgtcccggcagagggcgcgcggtcgccctgtcgccctccgccccgccggggtcacagtgccccctccctcgcgccctagccgccctgccgggctatttttacgcgcggacaccggacaccggacaccgggctggggcggcggcggcggcggccgaggcggccgaggcggggccgcaccggggccgggcgtcggggccacacgtcggttcgcgggtcgccggggctgcgcgcgccatggagccgcggtgcccgccgccgtgcggctgctgcgagcggctggtgctcaacgtggccgggctgcgcttcgagacgcgggcgcgcacgctgggccgcttcccggacactctgctaggggacccagcgcgccgcggccgcttctacgacgacgcgcgccgcgagtatttcttcgaccggcaccggcccagcttcgacgccgtgctctactactaccagtccggtgggcggctgcggcggccggcgcacgtgccgctcgacgtcttcctggaagaggtggccttctacgggctgggcgcggcggccctggcacgcctgcgcgaggacgagggctgcccggtgccgcccgagcgccccctgccccgccgcgccttcgcccgccagctgtggctgcttttcgagtttcccgagagctctcaggccgcgcgcgtgctcgccgtagtctccgtgctggtcatcctcgtctccatcgtcgtcttctgcctcgagacgctgcctgacttccgcgacgaccgcgacggcacggggcttgctgctgcagccgcagccggcccgttccccgctccgctgaatggctccagccaaatgcctggaaatccaccccgcctgcccttcaatgacccgttcttcgtggtggagacgctgtgtatttgttggttctcctttgagctgctggtacgcctcctggtctgtccaagcaaggctatcttcttcaagaacgtgatgaacctcatcgattttgtggctatccttccctactttgtggcactgggcaccgagctggcccggcagcgaggggtgggccagcaggccatgtcactggccatcctgagagtcatccgattggtgcgtgtcttccgcatcttcaagctgtcccggcactcaaagggcctgcaaatcttgggccagacgcttcgggcctccatgcgtgagctgggcctcctcatctttttcctcttcatcggtgtggtcctcttttctagcgccgtctactttgccgaagttgaccgggtggactcccatttcactagcatccctgagtccttctggtgggcggtagtcaccatgactacagttggctatggagacatggcacccgtcactgtgggtggcaagatagtgggctctctgtgtgccattgcgggcgtgctgactatttccctgccagtgcccgtcattgtctccaatttcagctacttttatcaccgggagacagagggcgaagaggctgggatgttcagccatgtggacacgcagccttgtggcccactggagggcaaggccaatggggggctggtggacggggaggtacctgagctaccacctccactctgggcacccccagggaaacacctggtcaccgaagtgtgaggaacagttgaggtctgcaggacctcacacctccctagagggagggagggagggcagggtggagggcaaggctggggggaggggattgggtttaggaagagctaggttaagtcataacgagtggggaaacactgagtcttgttgggtcttgggttgtgtggtttggtagctcctgtgggtacctcctgaagcagcagcgaatggcaatgggttgtgttgtgttaatgaagactcaattggttcatattactctgagttgtgcaaagctcatggagccttttggggtagtgttgagataggtttggtcgtatcattttgtgagtttcctaggtcagtgttgggtttggttgggttgtgagtctgggatagtgtggtccagctgcattgtgtaggattctgtggtttggtgggtcccctagggccatgttgggtcaagttagatggtcccccatggcattgttgagatcgaatgtgtgtggtgttaagtttcgttgagacatggtggaaattgtgtagctctgtgattcttccaggggcatgttattttaggttctgtgaacttgcgagtcatgtagaaatgtgaagagtccagtggtagaatttgagctttctaggtcacattgggttaagtttgtatgaccaaatgaatcttgtagggttctgttgggcttaactgtgtagaggtgtgtggctggacatttttcgtggccacagcgagttgagttgtgttgaattgtacaaccatatgagccttgtaaggccagttcagttgggtcatgccactgtttgagtctcatagggccatgctgaattgagttccattgagttgtgtcactatgtgagtcctacaggaagttgggttgagttggactgtgcgaacgagttccatagggccacatcgggctgttttgcatttagtggtagcaccaggacccaaaggaaatagcagtggggaagcatcatgtatctgggagcatgcagtggcgagggctctgggaggtgtgccgagctggctccccagctcgctgtagggggcgggactggattctgtatccatgggattgggtgttcatccagaggcgactgggtaaattaggaagaggtggatgctcctcctgtttaccccacatccacttcattgtgctgttcactcccattctcccctacagttttatgctcagacatggaggtcagagccacaagggaaaggggagagggggagaaaactgtactctgtccagacatgatagagggacagagccaaaaggatagagaaagagacccagaaaaaggaagaggtggaaacccagagagacagagacccaaagggagagaaacagagactcagggagagggagacaatgacctggagggtggggtatggcagagacgcagaagagaggaacagaaatccagagtggggagacagagaccaagagcaggggatagaagccgggcgaagtggcccatgcctgtaatctcagcactctgggagaccgaggaagggggattgattgaggccaggagttcaagaccagcctgggcaacatggtgagaccccatctctacaaaaaatacaaaaattagctgagtgtggtggcacatgcctgtgatcccagctactcaggaagctgaggcagaaagatcccttgaccctgagaggtagaggctgcattgagccatgattgcaccactgcactccagcctgggcaacagagggagcccccgtctcaacaaacaaacaaaaagagccagtgggggagggagggacagagacccagagggcagcgtcagacacccagagttggagacagaacaacagagtctcagggaaagagaaccacaatagaaaaaggcagaaaaggccgggcgcggtggctcatgcctgtaaccccagcactttgggaggccgaggtgggcaaattacgaggtcaggagatccagaccatcctggctaacacggtgaaaccccgtctctactaaaaatacaaaaaaattagccgggtgcggtggcgggcacctgtagtcccagctactcgggaggctgaggcaggagaatggcatgaacctgggaggcggagcttgcagtgagccgagattgcgccactgcactccagcctgggcagcagagcaacactctgtctcaaaaaaaaaaagaaaagaaaagaaaaagccagaaaaagttggtgcccctgaacccaagagtgatgtacagtctattccatagaatcacagaacaatcctgaaccaggcctgtcacctaccctccctgcagctcaggaaggctgtcagacaggctgggggcctcactctgttttccaggggagaaacctgagtctcagagcaggggagtggcttcccaaggtctcacagcttgtccccaggggccaggcaggctgtctgtctgcttcacatgtccccatcagcctgctgggacacacgggtcctcctgagtcccgtagcctcatttcttacagacggggaaactgaggctcagagcagcaggtgttacccaaggtcacaaggccgaacattttcagaaatctttcagaactcaaagggcatttagaggaagaaggctgaaatcactaacacatatagggcttcctttggtatcaaagtactttacttgggttaatttatta

SEQ ID NO: 2547 - DNA, 2998 bp, Homo sapiens
gaatcgagcgccgagagagcgagtcggtgctactggcgccgggtcggtccgggtaggcgcagcgggactggacctgggtgccgagcggagccgctgccatgggcctgggcgtcagcgctgagcagcccgcaggcggcgccgagggcttccacctccacggggtgcaggagaactccccagcccagcaggcgggcctggagccctactttgacttcatcatcaccattgggcactcgaggctgaacaaggagaatgacaccctgaaggcactactgaaagccaatgtggagaagcccgtgaagctggaggtgttcaatatgaagaccatgagggtgcgcgaggtggaggtggtgcccagcaacatgtggggcggccagggcctactgggtgccagtgtgcgcttctgcagcttccgcagggccagtgagcaggtgtggcatgtgctggatgtggaaccatcttcacctgctgcccttgccggcctgcgcccctacacagactatgtggttggttcggaccagattctccaggagtccgaggacttctttacgctcatcgagtctcatgaggggaagcccttgaagctgatggtgtataactccaagtcagactcctgccgggaggtgactgtaactcccaacgcagcctggggtggagagggcagtctgggatgtggcattggctatgggtatctacaccggatcccaactcagccccccagctaccacaagaagccacctggcaccccaccaccttctgctctaccacttggtgccccaccacctgatgctctaccacctggacccacccccgaggactctccttccctggagacaggttccaggcagagtgactacatggaggccctgctgcaggcacctggctcctccatggaggatccccttcctgggcctgggagtcccagccacagtgctccagaccctgatggacttccccatttcatggagactcctcttcagcccccacctccagtgcagcgagttatggacccaggcttcctggacgtgtcgggaatttctctcttggacaacagcaatgccagtgtgtggcccagcctgccctcttccacagaactgaccaccacagctgtctcaacctcagggccagaggacatctgctccagcagcagttctcatgagcggggtggtgaggctacatggtctgggtcagagtttgaggtctccttcctggacagcccaggtgcccaagcccaggcggaccacctgcctcagctgactcttcctgacagtctcacctctgcagcctcaccagaagatgggctgtccgccgagctgcttgaagctcaggctgaggaggaaccagcaagcacagagggcctagatactgggacggaggctgaggggctggacagccaggcccagatctctaccacagaataacaccctgggctgtgacaaggcccatgatgacatttcatgaggcccagatgtgggcaggcagcccgggctgcactatgcggtcaggattccttgctgctttggtgggacatgaggcctcagtgggtggtgagagggggccatgggccttgtgggaggatatcttttggccgtgtaccctcaggtccagtgcttggtcctgctctggtcactggggcttcccaggaggcagcagggtctggtcataatccagtgtgaagatgaggtgaggaaggaaggggttgctgtccagtgttggcctggtcgctttgattcttcctgcacagctcagcccaccccatctgtactggaagggaccctggagccctgggaccaccccctttcaagtcccaaacactgagtcctctgtcatgtgtccttgtccctaggctacaatgctacacttggctcaggctgatcaccatgctagtcacaggagggagagagaggcagtgtacttgcccccatctcctggagggaggtgcgttggaaattctaggcccttcagcagagacccatttgtgcccagaccacaatatttcttcttcctcagggactacatgccacagacctgtatccccagtggcaactcctgttagctcccaaacttaaacagtgatctcttctaaatatacaaggcatctacccagccccaatagtgaataaaagtcacaaatttaagttcaacaccctaagcaatttctcaaagccagtctacctgactaggtctatccacgcacggttcccaaccccaagggggaattaggggattagattaagagtaggtaaagacccttttgttctttcctgttgtaggggaggaagctgttctccccaccccaggtgcctttggaggttaaggctaggttaggccctgcactccacctggggacggcccctcatcacctgaagtcctctgctgtgttgactggaccctcagttcccacactgctaattactatgaaagctgctctggcctcgtcttctagcttgtgcctagttgaaagtctcacctttacaggatcatttgtaatgctggtgtacatgcagggaactcacaagctgtgtcaggtatgcaggacaaggaatgtctgctctggggggcacaggccaactatatggagggagggtcccaaattagcaaacccttcatttaaagcaaacccttgtcaagcctaccagagcagctgatacgtgtgcataacagtgaggcattgtgtcctggatcgtctgggagcccagtgtcaagtctgctggaatgcaggaagtagaacagaatcgccacaggactgttctggggccagcttcccttaactctgtagcctggcagtctgacccaaagttgccctcacccaaaggttctggctcttccctccctcacttttactttcccttcccccataagttggaggataaaatgggtatcaatgctaatatttccagggagaacatgaaaccagaggtttctttctttctctgtaatctgctatgaaagaaaataacaaatgaaaataaatgtgtactacactttgaaatatttt

SEQ ID NO: 2548 - DNA, 903 bp, Homo sapiens
catgctgaaagcagggcgggaccggggcggtcttccagcagggaaaatggcgctggccatgctggtcttggtggtttcgccgtggtctgcggcccggggagtgcttcgaaactactgggagcgactgctacggaagcttccgcagagccggccgggctttcccagtcctccgtggggaccagcattagcagtacagggcccagccatgtttacagagccagcaaatgataccagtggaagtaaagagaattccagccttttggacagtatcttttggatggcagctcccaaaaatagacgcaccattgaagttaaccggtgtaggagaagaaatccgcagaagcttattaaagttaagaacaacatagacgtttgtcctgaatgtggtcacctgaaacagaaacatgtcctttgtgcctactgctatgaaaaggtgtgcaaggagactgcagaaatcagacgacagatagggaagcaagaagggggcccttttaaggctcccaccatagagactgtggtgctgtacacaggagagacaccgtctgaacaagatcagggcaagaggatcattgaacgagacagaaagcgaccatcctggttcacccagaattgacaccaaagatgttaaaaggataacttcacagtaaatcatttctcctgaaatagaggaagattctttacgttgttgtgcttgtttttaaatcatcagtatagtttaacacattctttctaagcagttttgtgtgggataatttgaagaatatattatgagtaaactccgaaaattttgtttatccaaaggctcaatggattatgtttctattatatacaaggttttaagtaaacataaaatttccagaacaaaaataaaaaatttaaaattcatagcaaaaaaaaaaaaaa

SEQ ID NO: 2549 - DNA, 2794 bp, Homo sapiens
cttcaagattatcaataatcggagatacgtatattttatttgtaaagaaaacatggctgccctattcctacgtggttttgtccaaatagggaactgcaagactgggatatctaagtcaaaagaagcattcattgaagcagtggaaagaaagaagaaagatagactggtgctgtatttcaaaagtggaaaatatagcacttttcggctaagtgataatattcaaaatgtagtccttaaatcctatagaggaaaccaaaatcacctgcatttaactttacaaaataataatggcttgtttattgaaggattatcctccacagatgctgaacaattgaagatattcttggacagagttcatcaaaacgaggttcagccacctgtgagacctggtaagggtgggagtgtcttttctagcacaacacagaaggaaatcaacaaaacttcattccacaaagttgatgagaaatcaagtagcaaatcttttgagatagcaaaaggaagtgggacaggtgtccttcagaggatgcctttgcttacatcaaaattgacacttacttgcggagagttatcagaaaatcagcacaagaagaggaaaagaatgctctcatctagctcagagatgaatgaggaattcttgaaagaaaataattctgtagaatacaagaaatccaaggcagattgttcgaggtgtgtaagctataatcgagagaaacaattgaagttaaaagagttagaagagaataagaaattggaatgtgaatcttcatgcatcatgaacgccactggaaatccttacctagatgacattggtcttctccaagctctcactgagaaaatggttttggtatttctgttacaacaagggtatagtgacggttacacaaagtgggataaattaaaactattttttgaattatttccagagaaaatatgccacggcctccccaatttgggaaacacctgttatatgaatgcagtgttacagtctctactttcaatcccatcgtttgctgatgatttacttaatcagagtttcccatggggtaaaattccccttaatgctcttaccatgtgcttggcacggctacttttttttaaagatacctataatatagaaatcaaggagatgttactcttgaatcttaaaaaggccatttcagcagctgcagagatattccatggcaatgcacagaacgatgctcatgagtttttagctcactgtttagatcaactgaaagataacatggaaaaactcaacacaatttggaagcctaaaagtgaatttggggaagataattttcctaaacaggtttttgctgatgatcctgacaccagtgggttttcttgccctgtcattactaattttgagttagagttgttgcactccattgcttgtaaagcttgtggtcaggttattctcaagacagaactgaataattacctctccatcaaccttccccaaagaataaaagcacatccttcatctattcagtctacttttgatcttttttttggagcagaagagcttgagtataaatgtgcaaaatgtgagcacaagacttccgttggagtgcactcattcagtaggctacctagaatccttattgttcacctcaaacgctatagcttgaatgagttttgtgcattaaagaagaatgaccaggaagtcatcatttccaaatatttaaaggtgtcttctcattgcaatgaaggcaccagaccacctcttcccttgagtgaggatggagaaattacagatttccaattattaaaagttattcgaaagatgacttctggaaacatcagtgtatcatggcctgcaacaaaggaatccaaagatatcctggctccacacattggatcagataaggagtctgaacaaaaaaaaggccagacagtctttaaaggggcaagcagaagacagcagcaaaagtaccttggaaaaaattctaaaccaaatgagctagaatctgtatactcaggagatcgagcattcattgaaaaagaaccgttagctcacttaatgacgtatctggaagatacctcactttgtcagttccacaaagctggaggtaaacctgccagcagcccaggcacacctctctcaaaagttgactttcaaacagtgcccgaaaatccaaaacgaaagaaatatgtgaaaaccagtaagtttgtagcttttgataggattatcaatcctactaaagatttgtatgaagataaaaatatcagaattccagaaagattccaaaaagtgtctgaacagactcagcagtgtgacggtatgagaatctgtgaacaagcccctcagcaggcactgcctcaaagctttccaaagccaggcacccaggggcacacaaagaacctcctaagacctacaaaattaaatctacagaagtctaacaggaattccctacttgcactgggttccaataagaatccaagaaacaaagacattttagataagataaaatctaaagccaaggaaacaaaaagaaatgatgataagggagatcatacctaccggctcattagtgttgtcagccatcttgggaagactctaaagtcaggccattatatctgtgatgcctatgactttgagaaacagatctggttcacttacgatgatatgcgggtgttaggtatccaggaggcccagatgcaggaggataggcgttgcactgggtacatcttcttttacatgcataatgagatctttgaagagatgttgaaaagagaagagaatgcccagcttaatagcaaggaggtagaggagacccttcagaaggaataa

SEQ ID NO: 2550 - DNA, 1133 bp, Homo sapiens
atgtcggcggccgtggcgtgcgtggattacttcgccgccgacgtgctcatggccatctcttcgggcgccgtggtgcaccgcgggcggcccggccccgagggcgcgggccccgccgccggcctggatgtgcgcgcggcgcgccgcgaggccgcctcacccgggaccccggggccacccccgccgccccccgccgcttctggcccgggccccggcgccgccgcggcgccccacctgctggccgccagcatcctggccgacctgcgcggcggacccggagccgccccggggggcgcctcgcccgcctcctcctcctcagccgcctcgtccccgtcctcgggccgcgcccccggcgccgcgccctccgccgccgccaagagccaccgctgtcccttcccggactgcgccaaagcctactacaagtcctcgcacctaaagtcgcacctgcggacgcacacaggggaacgcccttttgcttgtgactggcagggctgcgacaagaagttcgcccgctccgacgagctggcccgccaccaccggacgcacacgggcgagaagcgcttctcctgccctctgtgctccaagcgcttcacccgcagtgaccacctggccaagcacgcccgccgccaccccggcttccacccggacctgctccggcgccctggtgcccgcagtacctcccccagcgactcgctgccctgcagcctggccgggagccctgcgcccagccccgcgcccagcccagcccccgcaggcctgtagggccctcgtgcagcccaccctgaccgccaggatgcttctgccatccaggggtgtagtgaggacccacggggagcctgggccccttccagccgtgggcaaaccctgaagacacccctgcccccctccagagagtgaggagggggcctgagactggacctgggtctgcctgacctcagagtgtccaggggcttggagagacctgcgcccacccctccactctcccaggagtcgctgatcactgggacctggttccagccgtttgcaggggaggcggctccgagaggcgtgtgctttccgtgggtggcgcccctcccccgccctgcctggcctcatccttgtatttaattaattaaacaagcccctttttaaaccct

SEQ ID NO: 2551 - DNA, 1318 bp, Homo sapiens
gaggagcctcgggtgggccggggttgctgcgccgtcctccactactggctactggcgctgcagccatgcagcccccgcccccgggcccgctgggcgactgcctgcgggactgggaggatctacagcaggacttccagaacatccaggagacccatcggctctaccgcctgaagctggaggagctgaccaaacttcagaacaattgcaccagctccatcacgcggcagaagaagcggctccaggagctggccctcgccctgaagaaatgcaaaccctccctcccagcagaggccgagggggccgcacaggagctggagaaccagatgaaagagcgccaaggcctcttctttgacatggaggcctatttgcctaagaagaatggattgtacctgagcctggttctggggaacgtcaacgtcacgctcctgagcaagcaggctaagtttgcctacaaggacgagtatgagaagttcaagctctacctcaccatcatcctcatcctcatctccttcacttgccgcttcctgctcaactccagggtgacagatgctgccttcaacttcctgctggtctggtactactgcaccctgaccatccgggagagcatcctcatcaacaacggctcccggatcaaaggctggtgggtgttccatcactacgtgtccaccttcctgtcgggagtcatgctgacgtggcccgacggtctcatgtaccagaaattccggaaccaattcctctccttttccatgtaccagagcttcgtgcagtttctccagtactactaccagagcggctgcctctaccgcctgcgggcgctgggcgagcggcacaccatggacctcactgtggagggcttccagtcctggatgtggcggggcctcaccttcctgctgccttttcttttctttggacacttctggcagctttttaacgcgctgacgttgttcaacctggcccaggaccctcagtgcaaggagtggcaggtgcttatgtgcggctttcccttcctcctccttttcctcggcaatttcttcaccaccctgagggttgtgcaccacaagtttcacagtcagcggcacgggagcaagaaggattgaggctgggccttcccctgccggcccagaggggcttctgtcctgtgtgttgtgggaggggatgggaggcgcccctcgagtgtgcgtgtatcagggggtctcttctattctcccttgggttttatgggcgctgtgggccctgaaggaagacctgggcccagtgccctcaataaagagaggcccagaaaaaaaaaaaaaaaaaaaaaaaaaaaaaaaaaaaaaaa

SEQ ID NO: 2552 - DNA, 780 bp, Homo sapiens
atgaacattctggcacccgtgcggagggatcgcgtcctggcggagctgccccagtgcctgaggaaggaggccgctttgcacgggcacaaagacttccacccccgcgtcacctgcgcctgccaggagcaccggacaggcaccgtgggatttaagatctccaaggtcattgtggtgggggacctgtcggtggggaagacttgcctcattaataggttctgcaaagacacctttgataagaattacaaggccaccattggagtggacttcgagatggaacgatttgaggtgctgggcattcccttcagtttgcagctttgggataccgctgggcaggagaggttcaaatgcattgcatcaacctactatagaggagctcaagccatcatcattgtcttcaacctgaatgatgtggcatctctggaacataccaagcagtggctggccgatgccctgaaggagaatgacccttccagtgtgcttctcttccttgtaggttccaagaaggatctgagtacccctgctcagtatgcgctgatggagaaagacgccctccaggtggcccaggagatgaaggctgagtactgggcagtctcatctctcactggtgagaatgtccgagaattcttcttccgtgtggcagcactgacctttgaggccaatgtgctggctgagctggagaaatcgggggctcgacgcattggggatgttgtccgcatcaacagtgatgacagcaacctctacctaactgccagcaagaagaagcccacatgttgcccatga

SEQ ID NO: 2553 - DNA, 1973 bp, Homo sapiens
gctcaggcggcgggcgcggctaggatggcgaagagcaacggagagaatgggccgcgcgcgcccgcggccggggaaagcctgtcgggaacccgggagagcctggcccagggccccgacgccgcaaccaccgacgaactcagctctctcgggtctgactcggaggccaacggcttcgccgagcgccgcatcgacaagttcggcttcatcgtgggctcgcagggcgccgagggcgcgctggaggaagtacccctggaggtgctgaggcagagggagtccaagtggctggacatgctcaacaactgggacaaatggatggccaagaagcacaaaaagattcgtctgcggtgccaaaagggcatcccgccttctctgcggggccgtgcttggcagtacctgtcaggaggcaaggtgaagttacagcagaaccctggaaagtttgacgagctggacatgtcccctggggaccccaagtggctggacgtgattgagcgtgacctgcaccggcagttcccattccatgagatgtttgtgtcccgggggggccacggccagcaggacctattccgtgtgctgaaggcctacacgctgtaccggcccgaggagggctactgccaggcccaggcgcccattgccgctgtcttgctcatgcatatgcctgctgagcaagccttctggtgcctggtacagatctgtgagaagtacctgcccggctactacagcgagaaactggaggcgatccagctggacggggagatccttttctcgctgttgcagaaggtgtcgccggtggcccacaagcacctcagccgtcagaagatcgacccgctcctctatatgacagaatggttcatgtgcgccttctcccgaaccttgccctggagctctgtgctgcgtgtctgggacatgttcttctgtgaaggggtcaagatcatcttccgggtggggctggtgctgctgaagcacgcgctgggctcccctgagaaggtcaaagcctgccagggccagtacgagaccatcgagcgactgcggagcctcagccccaagatcatgcaggaggcctttctggtccaggaggtagtggagttgcccgtgacagagcgccagattgagcgcgaacacctcattcagctgcggcgctggcaggagacccggggtgagctgcagtgccgctccccgcccaggctgcatggtgccaaggctatcttggatgcagaacctggtccccggcctgccctacaaccttcaccatccatccgcctgcccctagatgcccccctccctggctccaaagccaagcccaagccacccaagcaggcccagaaggagcagcggaaacagatgaaggggagagggcagctggagaagcccccagccccaaatcaagccatggtggtggccgctgcaggagatgcatgtcccccacagcatgtgcccccgaaggactcagcccccaaggactcagcccctcaggatttggctccccaggtctcagcccaccaccgctcccaggagagcttgacgtcccaagagagtgaggacacctacttgtaaccctggcagctaaggcctccagggcggggtctccatataactacacggttcatgaactgacattccacatcctgcccaccctctgagggccaagctgcctggccactgggctgggctggagtctggctggtccaacacagattctgcctggtccaacacagattctgcctgagcctccttatttattttctttacagtggcactcaggctggcccagccagggcaggcagaagctagggcctggggggtggggcctccttcagccccctcctcctgggggatgctccccagggttagggtgctggtgtgaggggaaagggtggggtgttctttgtgtaaaatagaaacatggttttgtacagaaataaacagccttgtatagagaaaaaaaaaaaaaaaaaaaaaaaaaaaaaaaaaaaaaa

SEQ ID NO: 2554 - DNA, 1239 bp, Homo sapiens
ccatgactatctttattcacactcttctctgagcctgaaatgctccactcctcctttccaacctcccaccctcacccctaccccattccctcctcacgccccctgccccctgccccgtgttcatgccctgtgctggctctgcctccacacctgcctgctgcctcccacagagcccgcaaggcaggaacccagaccctggcctcagcacaagctccagtgcagaccccagcacccactctgcctggtcctgctcttccagggcccttccctggtggccgtgtggtcaggctgcacccagtccttttggcctccactgtggacagctatgagagacgcaacaagggtgctgcccgagttatcgggaccctgttgggaactgtcaacaaacactctgtggaggtcaccaattgcttttcagtgtcatacaatgagtcagatgaagtggttgttgacatggaatttgctaagaacatgtatgaactgcataaaaaagtttctccaaatgagctcatcttggggtggtacgctgccggccatgacatcacagagcactctgtgctgatccatgagtactacagccgagaggcccccaaccccatccacctcactgtggacacaagtctccagaacggccatatgagcatcaaagcctatgtcagcactttaatgggtgtccctgggaggaccgtgggagtgttcacacctttgacagtgaaatatgcatactatgacactgaatgcatcagagttgacctgatcatgaagacctgctttagccccaacagagtggttggactctcaagtgacctgcagcaagtaggaggggcatcagctcacatccaggatgccctgagcatagtgttgcaatatgcagaggatatactatctgcaaaggtgtcagctgacaatacaatcaggaaggtgggccacttcctgatgagcctggttaaccaagtaccgaaaatagttcccgatgactttgagaccatgctccacagcaacatcaatgacctgttgatggtggcctacctggccaacctcacacagtcacagattgccctcaatgaaaaacgtgtaaacctgtgaagccaccccaagcagtacgcttgctggtctaagtcttaaccccaggactcagaagtgaaggaaaaatgggttttttgtggtcttgagtcacactgagacagtcaactgtgtgtgactctaataaacgtagcctaccttttgtaaattaaagaa

SEQ ID NO: 2555 - DNA, 1013 bp, Homo sapiens
cccagccaggcctgaggacatgaggcggccggcggcggtgccgctcctgctgctgctgtgttttgggtctcagagggccaaggcagcaacagcctgtggtcgccccaggatgctgaaccgaatggtgggcgggcaggacacgcaggagggcgagtggccctggcaagtcagcatccagcgcaacggaagccacttctgcgggggcagcctcatcgcggagcagtgggtcctgacggctgcgcactgcttccgcaacacctctgagacgtccctgtaccaggtcctgctgggggcaaggcagctagtgcagccgggaccacacgctatgtatgcccgggtgaggcaggtggagagcaaccccctgtaccagggcacggcctccagcgctgacgtggccctggtggagctggaggcaccagtgcccttcaccaattacatcctccccgtgtgcctgcctgacccctcggtgatctttgagacgggcatgaactgctgggtcactggctggggcagccccagtgaggaagacctcctgcccgaaccgcggatcctgcagaaactcgctgtgcccatcatcgacacacccaagtgcaacctgctctacagcaaagacaccgagtttggctaccaacccaaaaccatcaagaatgacatgctgtgcgccggcttcgaggagggcaagaaggatgcctgcaagggcgactcgggcggccccctggtgtgcctcgtgggtcagtcgtggctgcaggcgggggtgatcagctggggtgagggctgtgcccgccagaaccgcccaggtgtctacatccgtgtcaccgcccaccacaactggatccatcggatcatccccaaactgcagttccagccagcgaggttgggcggccagaagtgagacccccggggccaggagccccttgagcagagctctgcacccagcctgcccgcccacaccatcctgctggtcctcccagcgctgctgttgcacctgtgagccccaccagactcatttgtaa

SEQ ID NO: 2556 - DNA, 1138 bp, Homo sapiens
ccctttaaagggtgactcgtcccacttgtgttctctctcctggtgcagagttgcaagcaagtttatcagagtatcgccatgaagttcgtcccctgcctcctgctggtgaccttgtcctgcctggggactttgggtcaggccccgaggcaaaagcaaggaagcactggggaggaattccatttccagactggagggagagattcctgcactatgcgtcccagcagcttggggcaaggtgctggagaagtctggcttcgcgtcgactgccgcaacacagaccagacctactggtgtgagtacagggggcagcccagcatgtgccaggcttttgctgctgaccccaaaccttactggaatcaagccctgcaggagctgaggcgccttcaccatgcgtgccagggggccccggtgcttaggccatccgtgtgcagggaggctggaccccaggcccatatgcagcaggtgacttccagcctcaagggcagcccagagcccaaccagcagcctgaggctgggacgccatctctgaggcccaaggccacagtgaaactcacagaagcaacacagctgggaaaggactcgatggaagagctgggaaaagccaaacccaccacccgacccacagccaaacctacccagcctggacccaggcccggagggaatgaggaagcaaagaagaaggcctgggaacattgttggaaacccttccaggccctgtgcgcctttctcatcagcttcttccgagggtgacaggtgaaagacccctacagatctgacctctccctgacagacaaccatctctttttatattatgccgctttcaatccaacgttctcacactggaagaagagagtttctaatcagatgcaacggcccaaattcttgatctgcagcttctctgaagtttggaaaagaaaccttcctttctggagtttgcagagttcagcaatatgatagggaacaggtgctgatgggcccaagagtgacaagcatacacaactacttattatctgtagaagttttgctttgttgatctgagccttctatgaaagtttaaatatgtaacgcattcatgaatttccagtgttcagtaaatagcagctatgtgtgtgcaaaataaaagaatgatttcagaaat

SEQ ID NO: 2557 - DNA, 2179 bp, Homo sapiens
gcatgaggagagtgtgtaggggccgggttccgtggatgaactctcacccgagcggtttctctttccgggacaacatggcgccgtccacgccgctcttgacagtccgaggatcagaaggactgtacatggtgaatggaccaccacattttacagaaagcacagtgtttccaagggaatctgggaagaattgcaaagtctgtatctttagtaaggatgggaccttgtttgcctggggcaatggagaaaaagtaaatattatcagtgtcactaacaagggactactgcactccttcgatcttctgaaggcagtttgccttgaattctcacccaaaaatactgtcctggcaacgtggcagccttacagtacttctaaagatggcacagctgggatacccaacctacaactttatgatgtgaaaactgggacatgtttgaaatctttcatccagaaaaaaatgcaaaattggtgtccatcctggtcagaagatgaaactctttgtgcccgcaatgttaacaatgaagttcacttctttgaaaacaacaattttaacacaattgcaaataaattgcatttgcaaaaaattaatgattttgtattatcacctggaccccaaccatacaaggtggctgtctatgttccaggaagtaaaggtgcaccttcatttgttagattatatcagtaccccaactttgctggacctcatgcagctttagctaataaaagtttctttaaggcagataaagttacaatgctgtggaataaaaaagctactgctgtgttggtaatagctagcacagatgttgacaagacaggagcttcctactatggagaacaaactctacactacattgcaacaaatggagaaagtgctgtagtgcaattaccaaaaaatggccccatttatgatgtagtttggaattctagttctactgagttttgtgctgtatatgggtttatgcctgccaaagcgacaattttcaacttgaaatgtgatcctgtatttgactttggaactggtcctcgtaatgcagcctactatagccctcatggacatatattagtattagctggatttggaaatctgaggggacaaatggaagtgtgggatgtgaaaaactacaaacttatttctaaaccggtggcttctgattctacatattttgcttggtgcccggatggtgagcatattttaacagctacatgtgctcccaggttacgggttaataatggatacaaaatttggcattatactggctctatcttgcacaagtatgatgtgccatcaaatgcagaattatggcaggtttcttggcagccatttttggatggaatatttccagcaaaaacaataacttaccaagcagttccaagtgaagtacccaatgaggaacctaaagttgcaacagcttatagacccccagctttaagaaataaaccaatcaccaattccaaattgcatgaagaggaaccacctcagaatatgaaaccacaatcaggaaacgataagccattatcaaaaacagctcttaaaaatcaaaggaagcatgaagctaagaaagctgcaaagcaggaagcaagaagtgacaagagtccagatttggcacctactcctgccccacagagcacaccacgaaacactgtctctcagtcaatttctggggaccctgagatagacaaaaaaatcaagaacctaaagaagaaactgaaagcaatcgaacaactgaaagaacaagcagcaactggaaaacagctagaaaaaaatcagttggagaaaattcagaaagaaacagcccttctccaggagctggaagatttggaattgggtatttaaagattcacggaaagcaagttgatgaccagaaatcagtgcaaacacatcttctgttaaacccattggtatacacagaatattcctgtgcccacacttaatgtcaatctataattttaaccatttatccaagattctactaagtgtaaaattatttaataatgtctattaaattgatatttatatcttgcatcctatatcatgtcaatatgtgatatagaaaagagatacgtgaattttttagctaagcttgacagattgaaagacaagtgtcatttttttttgtagagggtgatatataccatgtaaatgaataaagacattttaaatttaaaaaaaaaaaaaaaaaa

SEQ ID NO: 2558 - DNA, 1234 bp, Homo sapiens
agactttccccccttctttacagcattctatcaaaatacagtgttttgggcgtccggcttccacgttccctccacaaaatgcctggcgaagccacagaaaccgtccctgctatagagcagcagttgctgcagccccaggctgagacagggtctggaacagaatctgacagtgatgagtcagtaccagagcttgaagaacaggattccacccaggtaaccgcacaagtccagttggtggtagcagctgaaattgatgaagaaccagtcagtaaagcaaaacagaggcggagtgaaaagaaggcacggaaggctaggttcaaactgggtcttcaacaggttacaggagttactagagtcaccatccggaaatctaagaatatcctctttgtcatcacaaaaccagatgtctacaagagcccggcttcggatacctacatggtttttggggaagccaagattgaagatttatctcaggaagcacaactagcagctgctgagaaattcaaagttcaaggtgaagctgtctcaaacattcaagaaaacacacagactccaactgtacaagagggcagtgaagacgaagaggtcgatgaaacaggtgtagaaattaaggatatagaattggtcctgtcacaagcaaatgtgtggggagcaaaggcagtccgagccctgaagaacagtaatgatattgtaaatgctattatggaattaacaatgtaaccatctgaaagcaacttttttggtgtctcagatgagtaactgcagcttggtttgaaatttgtactgtttctatcataaataaagttatggcttcttgttggatgaaaaaaaaaagacagtattttgccaaattaaacagaaaagagagttcagtggaagatggctctgatttcagggtaataataatggtaggtaacaattaaatggcatttaaaaatttgctgaatgcttgctacgagcggtggctcatgcctgaatctcagcactttgggaggccaaggcaggcagatcatctgaggtcatgagttcgagaccagcctggccaacatgatgaaaccctgtctctactaaaaatacaaaaattagctgggcatggtggtgcacacctgtaatcccagttactcaggaggctgaggcaggagaatcacttgaatccagaaggcggaggttgcagtgagctgagattgcaccacggcactccagcctgggtgacagagtgagactctgtctcaaa

SEQ ID NO: 2559 - DNA, 3324 bp, Homo sapiens
cgcccgggcaggttgagaagccaggggccaagatggatcttctcctcgacatcagctaagcctggaggactcttcccctcagagaccatggagagggacagccacgggaatgcatctccagcaagaacaccttcagctggagcatctccagcccaggcatctccagctgggacacctccaggccgggcatctccagcccaggcatctccagcccaggcatctccagctgggacacctccgggccgggcatctccagcccaggcatctccagctggtacacctccaggccgggcatctccaggccgggcatctccagcccaggcatctccagcccaggcatctccagcccaggcatctccagcccgggcatctccggctctggcatcactttccaggtcctcatccggcaggtcatcatccgccaggtcagcctcggtgacaacctccccaaccagagtgtaccttgttagagcaacaccagtgggggctgtacccatccgatcatctcctgccaggtcagcaccagcaaccagggccaccagggagagcccagtccagttctggcagggccacacagggatcaggtacaaggagcagagggagagctgtcccaagcacgctgttcgctgtgacggggtggtggactgcaagctgaagagtgacgagctgggctgcgtgaggtttgactgggacaagtctctgcttaaaatctactctgggtcctcccatcagtggcttcccatctgtagcagcaactggaatgactcctactcagagaagacctgccagcagctgggtttcgagagtgctcaccggacaaccgaggttgcccacagggattttgccaacagcttctcaatcttgagatacaactccaccatccaggaaagcctccacaggtctgaatgcccttcccagcggtatatctccctccagtgttcccactgcggactgagggccatgaccgggcggatcgtgggaggggcgctggcctcggatagcaagtggccttggcaagtgagtctgcacttcggcaccacccacatctgtggaggcacgctcattgacgcccagtgggtgctcactgccgcccactgcttcttcgtgacccgggagaaggtcctggagggctggaaggtgtacgcgggcaccagcaacctgcaccagttgcctgaggcagcctccattgccgagatcatcatcaacagcaattacaccgatgaggaggacgactatgacatcgccctcatgcggctgtccaagcccctgaccctgtccgctcacatccaccctgcttgcctccccatgcatggacagacctttagcctcaatgagacctgctggatcacaggctttggcaagaccagggagacagatgacaagacatcccccttcctccgggaggtgcaggtcaatctcatcgacttcaagaaatgcaatgactacttggtctatgacagttaccttaccccaaggatgatgtgtgctggggaccttcgtgggggcagagactcctgccagggagacagcggggggcctcttgtctgtgagcagaacaaccgctggtacctggcaggtgtcaccagctggggcacaggctgtggccagagaaacaaacctggtgtgtacaccaaagtgacagaagttcttccctggatttacagcaagatggagagcgaggtgcgattcagaaaatcctaaccagctggcctgctgctctgcacagcaccggctgctgtgaagactctggccatggtgactggccatgtgtggcatcatctgggctaatggccaccgggcaccatcagactcccacctccactgtctgctgcctctgtgtgtgtgtgtgtgtgtgtgtgtgtgcatatgtgtgcattgccactctcccaagtttttcagaaaccagcagagctgtcaactcttctcaaaatcccaggctggaaattacctggagacaagagttgagtaccgtggatgttcctacaggagtgtccatagatggatggaggaggtggagcccagagcccaaggaagagctgggaattcttgcttctctgaccctcacttacagactagcccagtgtgggcagatgccagcggcccaggtggcgccattgctgtcctgggatggatcgtgggttttggtggatgcagcttcccagggcctggaccgtcttcggtgaaaagctgctcccgttggctttatgagcatcaagtcctcacccagaccccctgctggtgccgtggatgtcaccagtcggactgtgctgtggctaaccaggctgacaactgagatgaggattcactgtactcatttggtcacaagctgctggggcgggttttattttattttatttttatatttaagaaatgaaaatacgggtatttttaaagattctccaaaaagtccagaagccttgagagctggcatcaatcagcccaagacccccaggggattcatgggaaatgtcgtattttagagtcctacagaatatttctggcctcaaggaactggatgaagagactggacaaagtccccaggatgggcatcccccaagtcactacagcatctggagcccctaggagatactcagggaagcaaatccttgtttgggctggcaagcaaatccgacacgacgaggtccacaaactgtttctgcatcccagggctctgacgaaggcgttaagaaacagatgctgttcccgcgtaggctcccaggggccccagggaggtccaggtggactgcctctctcattcccaggagctgtcctgggactttgggatttcttctcagctttctccacctttcagtttctcagttgtttcagaaacatagcaatgacataaaaactgctatggagagaaagctaacatggtcccatgccttccaggcagccctgctgaaggatctaagttggccctgttcctgcaaatcatcaacgtgcctggactcgccagctaaaagcctgggccttccccagccttttttctggggcacctattcctctgccagtcctgctcccctcaccttccttgggcccgtcagagtcttttgtggtgctgtgcttctcagaggcaggatccaagcagatcagcccagcctagcccagctcaggcaggccatggccgctcaagggaaagactgccccagaagagcaagctggagaggctgggcaggggctgatggggctgggtacactggggaatgttagcaagactgggaaggaggccacattcctgtctgcagcagcccccagcgatggtcttcagcaataaaagttgtgtgacctaaaaaaaaaaaaaaaaaaaaaaaaaaaaaaaaa

SEQ ID NO: 2560 - DNA, 2487 bp, Homo sapiens
atggcagctccaaccaaatgccagctccgcggaagattagtcctgctatgctcgctcctggggatgctatgggaggccagggccagtcagattcgctactcagtgcctgaagagacagaaaagggctatattgtgggcaacatctccaaggacctggctctggagccccgggagctggcggagcgccgagtccgcatcgtctctagaggtaggacgcagcttttctctctgaacccgcgcagcggcaccttggtcaccgcgggtaggatagaccgggaggagctctgtgctcagagcccgcggtgtctggtgaactttaaagtcctggttgaagacagagtgaaactgtacggaatagaaatagaagtaactgatattaacgacagcgccccaaagttccaggccgaaagtctggaagtaaaaattaacgaaatcgcggttcctggagcacgttatccacttccagaagctattgatccggatgttggcgtgaactccctccagagctaccagctcagccccaatcaccacttctccctgaacgtgcagactggagacaatggagccataaacccagagctggtgctggagcgcgccctggacagggaggaggcaactgcccaccacctggtcctcacggcctcggatggcggcgagccgcgtcgctccagcacagtgcgcatccatgtgacagtgttggatacaaatgataatgccccggtttttgctcaacggatttaccgagttaaagtccttgagaacgtgcccccaggcacctggctgcttactgcaacagccagcgacctggatgagggaatcaacggaaaagtggcatacaaattctggaaaattaatgaaaaacaatctctgctattccagcttaatgaaaatactggggaaatatcaacagcaaaaagtctagattatgaagaatgttcattttatgaaatggaaatacaagctgaagatggtgggggattgaaagggtggacaaaagtgctcatttcggtggaagatgtaaatgacaatagacctgaagtgaccattacatctctgtttagcccagtgagagaagacgcacctcagggaacagtaattcttcttttcaatgctcatgaccgagactccgggaagaatggtcaagttgtctgttctatccaggagaatctatcttttacattagaaaattcagaagaagattattacagattgttgacggcccaaattcttgaccgagaaaaagcctcagaatataatatcacggtgactgcaacagacagaggaactccgcccctgtccacagaaattcacatcaccctgcaagtgactgacatcaatgataatccacctgctttctctcaagcctcctactcagtctacctcccggaaaacaacgccagaggtacttccatcttctccgtgattgcctatgaccctgatagcaatgagaattctagagttatttactccttggcagaggataccatccaagggtctcctctctccacctatgtctctattaactcagacactggtgtgctgtatgctctgtgctcctttgactatgagcagtttagagatttgcaaatgcaggtgacggcaagtgacagtggaagcccaccacttagcagcaatgtgtcattgagactgtttgttttggaccagaatgacaatgccccagaaatcctgtaccctgccctccccactgatggttctactggtgtggagctggcaccccgctctgcagagcctggctacctggtgaccaaggtggtggcagtggacagagactcaggccagaatgcttggctctcctaccgcctattcaaggccagtgagccagggctcttctcggtggggctgcacacaggtgaagtgcgcacagctcgggccctgctagatagagatgcgctcaaacagagccttgtggtggctgtacaggaccatggccagccccctctctcggccactgtcacgctcacagtagccatagctgacagcatcccagacatcctggctgacctgggcagtcttcagatccctgcagacctggaggcctcagaccttaccctctacctcgttgtggctgtggcagtcgtctcctgtgtcttcctcaccttcgttatcacgctgctggccctcaggctgaggcactggcactcctcgcatctgctgcgggctaccagtgatgggttggctggtgtgcccacctcacactttgtgggtgtagatggggttcgagctttcctacagacctattctcaggagttctccctcaccgctgactcaaggaagagtcacctgatcttcccccagcccaactatgcagacacactcatcagccagcagagctgtgagaaaaatgagcctttgtgcgtctctgttgattccaagtttcctatagaagacacccctttggttccggtgagttcattttttttctttctttcttttctttttttgttttttgttttgttttgtttttga

SEQ ID NO: 2561 - DNA, 2186 bp, Homo sapiens
ggatgttgcccaggtacaaggccaggatcttcgggacctggcttcatttggagttcagctaccaaaaggaaaccttcctctgggtcctggagtatttggcctgaaattgggaactcggaagttgctgctccagggcgctccctgcggagctccgccgcccgcctctccgcccggcctttcccggcgtccccacgcggggcgcaaccgcgagaaagaaacgcaggtcgcaccgtcagcgcccagagcagcgccagtttccgggcccgggctgctctcggagccatgagctgcggccgcccccctcccgacgtggacggcatgatcaccctcaaggtggacaacctgacctaccgcacctctcccgacagcttgaggcgcgtgttcgagaagtacgggcgcgtgggcgacgtgtacatcccgcgggagccccacaccaaggcgccccggggcttcgctttcgtccgctttcacgaccggcgcgacgcccaagacgccgaggccgccatggacggggcggagctggacggacgcgagctgcgggtgcaggtggcgcgctatggccgccgggacctgccccgcagccgccagggagagccacgcggcaggtccagaggcggcggctacggacggcggagccgcagctacgggcggcggagccgcagccccaggcggcgacaccgcagccgatcccggggtcccagctgctccaggtcccgcagccgatctcgctataggggttctcgctatagccggtctccctacagccgatctccttacagccggtcgcgctacagccgctctccctacagcagatctcgctacagggaatctcgctacggcggatctcactacagctcatctggttacagtaactctcgctacagccgatatcacagcagccggtctcactcgaagtctgggtcctccactagctctcgctctgcatcaacctccaaatcgagctctgcgcgacgatccaagtcctcctcggtctccaggtctcgctcgcggtccaggtcttcatctatgaccaggagtcctccccgggtatccaagaggaaatccaagtcaaggtcgcgatccaagaggccccccaagtctcctgaagaggaaggacagatgtcctcttaagaaaatgatgcatcaggaagcaacgtgatggaggacttgggggaaaaggatcacatactcagtctatggaagcaacgtccctggaagaagaggctgcctattgaaaaggttgtatcacacttttctacctttttgccagtttgaagctttgcatcaggtggcaaaattcattctatgtgccgttttgttgttattcacattttattgtaacttaggaggtgaacgacctaagattacgttattgggtttggatatttgaggcaaaaatttatttttatttctatagtgatgactgttttggtttgaaatgaacagattggtaacctaatttgtggcctcctgacttttaaggaaacgtgtgcagccattacacacagcctaacgctgtcaagacattgcttcaacattgccttcattccttaaaaacctacaaaaggtggtgtaaattaatatggataattttatttacctccaggtctaaaaggtagtgtgacccaaatttgtataaagatttttcatgtgaaaggactggggttttagcaaacacaggtctaatctcttttgtgtttttgtgcaccaggcccggctgcgtagcagttgagtgatgctggttagctattaaggtggcctgttgcagtgcagagtgctgagctgcttcctgttttcttctgattgctcctggggaaaacacgccttgtcctgaagaacaaatggctgtccagtttattaaaatgcctgtcaactgcacttccagtcacccaggccttgcagataaataatggagcatgcagtgagcacatctagctgacgataatcacaccttttcccccgtcttttctgaaaaattgtaaatctgatcatatcaacatgtatgaacttaaaatatggagaatgttatggaagaaatagtttataagtttgttaagtacttataacatggtttatctttttgattattaattttttacgctaaccattgtttctgtagttaaaattgttttcttggtgttatcttttctcagaataaaattagaaacttttgatggaaaaaaaaa

SEQ ID NO: 2562 - DNA, 2241 bp, Homo sapiens
tgggacttatagaagggagaggagcgaacatggcagcgcgttggcggttttggtgtgtctctgtgaccatggtggtggcgctgctcatcgtttgcgacgttccctcagcctctgcccaaagaaagaaggagatggtgttatcagaaaaggttagtcagctgatggaatggactaacaaaagacctgtaataagaatgaatggagacaagttccgtcgccttgtgaaagccccaccgagaaattactccgttatcgtcatgttcactgctctccaactgcatagacagtgtgtcgtttgcaagcaagctgatgaagaattccagatcctggcaaactcctggcgatactccagtgcattcaccaacaggatattttttgccatggtggattttgatgaaggctctgatgtatttcagatgctaaacatgaattcagctccaactttcatcaactttcctgcaaaagggaaacccaaacggggtgatacatatgagttacaggtgcggggtttttcagctgagcagattgcccggtggatcgccgacagaactgatgtcaatattagagtgattagacccccaaattatgctggtccccttatgttgggattgcttttggctgttattggtggacttgtgtatcttcgaagaagtaatatggaatttctctttaataaaactggatgggcttttgcagctttgtgttttgtgcttgctatgacatctggtcaaatgtggaaccatataagaggaccaccatatgcccataagaatccccacacgggacatgtgaattatatccatggaagcagtcaagcccagtttgtagctgaaacacacattgttcttctgtttaatggtggagttaccttaggaatggtgcttttgtgtgaagctgctacctctgacatggatattggaaagcgaaagataatgtgtgtggctggtattggacttgttgtattattcttcagttggatgctctctatttttagatctaaatatcatggctacccatacagctttctgatgagttaaaaaggtcccagagatatatagacactggagtactggaaattgaaaaacgaaaatcgtgtgtgtttgaaaagaagaatgcaacttgtatattctgtattacctctttttttcaagtgatttaaatagttaatcatttaaccaaagaagatgtgtagtgccttaacaagcaatcctctgtcaaaatctgaggtatttgaaaataattatcctcttaaccttctcttcccagtgaactttatggaacatttaatttagtacaattaagtatattataaaaattgtaaaactactactttgttttagttagaacaaagctcaaaactactttagttaacttggtcatctgatcttatattgccttatccaaagatggggaaagtaagtcctgaccaggtgttcccacatatgcctgttacagataactacattaggaattcattcttagcttcttcatctttgtgtggatgtgtatactttacgcatctttccttttgagtagagaaattatgtgtgtcatgtggtcttctgaaaatggaacaccattcttcagagcacacgtctagccctcagcaagacagttgtttctcctcctccttgcatatttcctactgcgctccagcctgagtgatagagtgagactctgtctcaaaaaaaaagtatctctaaatacaggattataatttctgcttgagtatggtgttaactaccttgtatttagaaagatttcagattcattccatctccttagttttcttttaaggtgacccatctgtgataaaaatatagcttagtgctaaaatcagtgtaacttatacatggcctaaaatgtttctacaaattagagtttgtcacttattccatttgtacctaagagaaaaataggctcagttagaaaaggactccctggccaggcgcagtgacttacgcctgtaatctcagcactttgggaggccaaggcaggcagatcacgaggtcaggagttcgagaccatcctggccaacatggtgaaaccccgtctctactaaaaatataaaaattagctgggtgtggtggcaggagcctgtaatcccagctgcacaggaggctgaggcacgagaatcacttgaactcaggagatggaggtttcagtgagccgagatcacgccactgcactccagcctggcaacagagcgagactccatctcaaaaaaaaaaaaaaaaaaaa

SEQ ID NO: 2563 - DNA, 2927 bp, Homo sapiens
gcggaggcggagaaagggcgcgggagtgagagagggtgagtcagccactgtctatgcaataaagggaggcctcaccgcgggatagggctgaattcagaagtgcggcccgtgccgcagtctgttccaggacgcggcttgtcttagcgtcagcgagggaaggttgaggaggagccagagcctggtcctgcagcctttctcgccgtcagcgcccgtcgccatctccaccatgcagtcccgggaagacgtcccgcgctctcgccgcctcgccagtccccgtggtgggaggcggcccaagaggatttccaagccctcggtttcggcctttttcacgggtccagaggagttaaaggacacggcccattctgcagccctgctggcacagctcaagtccttctacgacgcgcggctgctgtgtgatgtgaccatcgaggtggtgacgcctggcagcgggcctggcacgggtcgcctcttttcctgcaatcgcaacgtgctagcagctgcgtgtccctacttcaagagcatgttcacaggtggcatgtacgagagccagcaggccagcgtgaccatgcacgatgtggacgccgagtccttcgaggtgttggtcgactactgctacacgggtcgtgtgtctctcagtgaggccaatgtgcagcgcctgtacgcggcctccgacatgctacagctggaatatgtgcgggaagcctgtgcctccttcttagcccgacgtcttgacctgaccaactgcaccgccatcctcaagtttgcagacgccttcgaccatcacaagcttcgatctcaggcccagtcctacatagctcacaacttcaagcagctcagccgaatgggttcaattcgggaggagactctagcagatctaaccctggcccagctgctggctgtcctacgcctggatagtctggacatagagagtgagcggactgtatgccatgtagctgtgcagtggctggaggctgctgccaaagagcggggtcccagtgctgcagaagtcttcaagtgcgtgcgctggatgcacttcactgaagaagatcaggactacttagaagggctgctgaccaagcccatcgtgaagaagtactgcctggacgttattgaaggggccctgcagatgcgctatggtgacctgttgtacaagtctctggtgccagtgccaaacagcagcagcagcagtagcagcagcaactctcttgtatctgcagcagaaaatccaccccagagactgggtatgtgtgccaaggagatggtgatcttctttggacaccccagagatccctttctctgctatgactcttactcgggggacatttacacaatgccatcccctttgaccagctttgctcacactaagactgtcacctcctcagctgtctgtgtgtccccagaccatgacatctatctagctgctcagcccaggaaagacctctgggtgtataaaccagctcagaatagttggcagcaacttgcagatcgcttgctgtgtcgtgagggcatggatgtggcatatctcaatggctacatctacattttggggggacgagaccctattactggagttaagttgaaggaagtggaatgctacagtgttcagagaaaccagtgggcattggtggctcctgtccctcattccttctattcctttgaactcatagtggttcagaactatctttatgctgtcaacagtaagcgcatgctttgctatgatcctagccacaatatgtggctgaactgtgcttctcttaaacgtagtgactttcaggaagcatgtgtcttcaatgatgaaatctattgtatctgtgacatcccagtcatgaaggtctacaacccagctaggggagaatggaggcggattagtaatattcctttggattcagagacccacaactaccagattgtcaatcatgaccaaaagttgcttctcatcacttctacaaccccacaatggaaaaagaaccgagtgacagtgtatgagtatgatactagggaagatcagtggattaatataggtaccatgttaggccttttgcagtttgactctggctttatttgcctttgtgctcgtgtttatccttcctgccttgaacctggtcagagttttattactgaggaagatgatgcacggagtgagtctagtactgaatgggacttagatggattcagtgagctggactctgagtcaggaagttcaagttctttttcagatgatgaagtctgggtgcaagtagcacctcagcgaaatgcacaggatcagcagggttctttgtaaatagtattttgagacactaagatgtttctactgctacggaatgtattttaaacacatatcgtttctttttcttggaaaaaaagttgattaggaccacagatttggtttagaaagggtaatattttgaaatactacaaggtttagacagtccatgaaatcgacctgtttaataatttaccatcctgaaagtccagaattaaaatatggaagcaagaactatataattgattaggatgcttggtaggtttttttcattgttcaaatattcattgcacagtggattgttttgattagttagtatgctttttttttaattaattcagtcttctgttaatttttaagttttggttagtgccacaaggaatttaactttttgatttgtataatagaaaactgaactaggaattgttagcggggttttgaaggatgtgtactttccttcaaaataaagtggtagattttcaaaattttacactagtcagttctttatattctaagttaaatgtagtttgtaaaattattttggttttcttctacaaaggaaaaaattggatttatatatataaggttactgcataatgatttcattttgataatgtgcagaatggcctcataagctcacagaaagtaaaaaaaaaaaaaaaaa

SEQ ID NO: 2564 - DNA, 3084 bp, Homo sapiens
ggggcactcagcaggttgggctgcggcggcggcggctggggaagccgaagcgccgcgcgtgagagatcccggatacatctgcggtttgggctccgccaccctccgtctctctcccgcaggtctctgagccgggtgcggaaggagggaacggccctagccttgggaagccaaagcacacccctggctcccgccgacaccgccctccttcccttcccagccgcgggcctcgctccgtgctcggctactctgccgggaggcggcggcggctgccagtctgtggcgagccctgctgccctccagccgggcttctccagccgggctcctccaccggcccttgcaggggcacagagagctcggcgcccgcccttccgctcgcctttttcgtcagccggctggaggagcatcggtccgggaggtctctgggctgaggcggcgacagctcctctagttccaccatgtccgcgggcggagacttcgggaatccgctgaggaaattcaagctggtgttcctgggggagcaaagcgttgcaaagacatctttgatcaccagattcaggtatgacagttttgacaacacctatcaggcaataattggcattgactttttatcaaaaactatgtacttggaggatggaacaatcgggcttcggctgtgggatacggcgggtcaggaacgtctccgtagcctcattcccaggtacatccgtgattctgctgcagctgtagtagtttacgatatcacaaatgttaactcattccagcaaactacaaagtggattgatgatgtcagaacagaaagaggaagtgatgttatcatcacgctagtaggaaatagaacagatcttgctgacaagaggcaagtgtcagttgaggagggagagaggaaagccaaagggctgaatgttacgtttattgaaactagggcaaaaactggatacaatgtaaagcagctctttcgacgtgtagcagcagctttgccgggaatggaaagcacacaggacggaagcagagaagacatgagtgacataaaactggaaaagcctcaggagcaaacagtcagcgaagggggttgttcctgctactctcccatgtcatcttcaacccttcctcagaagcccccttactctttcattgactgcagtgtgaatattggcttgaaccttttcccttcattaataacgttttgcaattcatcattgctgcctgtctcgtggaggtgatctattagcttcacaagcacaaaaaaagtcagcgtcttcattatttatattttacaaaaagccaaattatttcagcatattccggtgataactttaaaaattagatacattttcttaacatttttttcttttttaatgttatgataatgtacttcaaaatgatggaaatctcaacagtatgagtatggcttggttaacgagcagtatgttcacagcctgctttatctctccttgctcttctcacctctcccttaccccgttccctatttccgtgttcttacctagcctccccccacttcctcaaaacaaacaagagatggcaaagcagcagtccgaccaagcccactggaattatcctttaattttacagataccacttgctgtaggctgtggaccaagatgtccagaattattcttgagcactgatgtaaattacttagatcttctttgaggtcagaattcagcgatcacggtaggcagtgcttgaatgagaaaagcctcctggtgcatcttcaaaatgagtcctaaagaacatactgagtacttataagtagcagaacataaaatgtatttctgactaacacaaatggtcctttcacatgtgctttattagactctgggagagaaaagtaaccaagtgcttcagaacaggtttttagtatttacttcttcatggtaagataatgaagttctaatgaactatttctcccaaggttttaaaattgtcaagagttattctgtttgtttaaaaagtaagaaacctctgtaagcaatagattttgcttgggttttctttcttaaaaaaataatactatgcaggcaagacaccataaaagtttaattccttacagaagaaccagtggaagaatttaaatttggcactacgatcaaaactactgaattagcagaaataacgatatctaaagcttaccagcaaaagaaccctcagcagaatagcaaaaactttgctcaggacatttgaggtcaaattgaagacggaagacggaaaccggaaaccgttttcttgtaagcccctagaggcagatcaggtaagcatacatagtagagggaaaggagagaatggaaataaaactgaatattatgcagatttatgccttattttttagcattttttaaggttgggtctttcaggctggttttggtttgtattagatctgtatagtttagtgatttagttttatatttaagctacgattaatattttttctttggcgatatttctttgctttttttttttaacaactttccatttttagatgtttcgttgaatctatttagagcttcaccatggcaatatgtatttcccttaaaacactgcaaacaaatatactaggagtgtgcccttttaatctttactagttattgtgagactgctgtgtaagctaataaacacatttgtaaaaacattgtttgcaggaagaaaacttcgagttacaggtcaggaaaagcctgctgaatttatgttgtaaacgttacttaacacagtataaagatgaaaagacaacaaaagtatcttcatacttcctcatcccctcattgcaacaaaaccttaaactgggagaaccttagtcccctctctttcctcttcctcctccacttcccacttattgccactttgtaatattcagagagcacttggattatggatctgaatagagaaatgcttacagataatcattagcccacataccagtaacttatacttaaagatgggatggagttataaagtgcttttataatccaatataattgctaaaggcaagggttgactctttgttttattttgacatggcatgtcctgaaataaatattggttcactatgaaaaaaaaaaaaaaaaaaaa

SEQ ID NO: 2565 - DNA, 1718 bp, Homo sapiens
aacatggggctgtacgctgcggtggcaggcgtgctggccggcgtggagagccgccagggctctatcaaggggctggtgtactccagcaacttccagaacgtgaagcagctgtacgcgctggtgtgcgaaacgcagcgctactccgccgtgctggatgccgtgatctccagcgccggcctcctcagtgcgaagaagctgcagccgcacctggccaagggtgctagtgtatgagttgttgggaaagggctttcgagggggtgggggccaatggaaggctctgttgggacggcaccaggcgaggtgttgagttggctcggctcaaggttcttcggggtgtgagctggcatgaggacctgttggaagtgggatccaggcctggtccagcctcccagctgcctcgatttgtgcgtgtgaacactctcaagacctgctccgtttatgtagttatttcaagagacaaggtttctcctatcagggtcgggcttccaggctggatggagtgccctggcgcgatctcggctcaccgcaacctctgcctcctgggttcaagcgattctcctgcttcagccttctgagcagctgggattatgaaggggtggcctgcccctccacatctgtgggatatctcatcagcctcgatgacttacgagccctcaaggggaagcattttctcctggaccccttgatgccggagctgctggtgtttcccgcccagacagatctgcatgaacacccactgtaccgggccggacacctcattctgcaggacagggccagctgtctcccagccatgctgctggacccccgccgggctcccatgtcatggatgcctgtgccaccccaggcaataaagaccagtcacttggctgctcttctgaagaaccaagggaagatctttgcctttgacctggatgccaggcggctggcatccatggccacgctgctggcctgggctggcgtctcctgctgtgagctggctgaggaggacttcctggcggtctcccccttagatccgcgctatcgtgaggtccactatgtcctgctggatccttcctgcagtggctcgggtatgccgagcagacagctggaggagcccggggcagggacacctagcccggtgcgtctgcatgccctggcagggttccagcagcgagccctgtgccacgcgctcactttcccttccctgcagcggctcgtctactccatgtgctccctctgccaggaggagaatgaagacatggtacaagatgcgctgcagcagaacccggacgccttcaggctagctcccgccctgcctgcccggccccaccgaggcctgagcacgttcccgggtgccgagcactgcctccgggcttcccccaagaccacgcttagcggtggcttcttcgttgctgtaattgaacgggtcgagatgccgacctcagcctcacaggccaaagcatcagcaccagaacgcacacccagcccagccccaaagagaaagaagagagcaaaaagctgcagccggtgcctgcacaccgccttgcgcatagcagaggctccgggctcactccttcctggtgggaaaggaagatgcctgtcctctccgtggaggaccctgggccctcaccgcaggcagcagtttgcgttttgaaaggttattgggtcccttcctcgggctgtgttcttgctggtgagcaaaagtgttgcctgcagaaataaaatgcagaacgtactct

SEQ ID NO: 2566 - DNA, 1567 bp, Homo sapiens
aaaatggatacatcccagtagcaacataggcaagtacttagccatgtgacccctcctctgggggctctgccagttgtgagctctgcccagaaggtttccttccatctcggttggaggaatcccttttctgctcacccaccctgacttcatgctcacctggggctcggcaggtcacaagatgcagggtccatctacagaaccaaggaatgggctcatcccccagatacatacatcacctccatcccacgctgcctgcaggtacctactgggtggatccaaaccttggctgctcctctgacaccatcgaggtctcctgcaacttcactcatggtggacagacgtgtctcaagcccatcacggcctccaaggtcgagtttgccatcagccgggtccagatgaatttcctgcacctgctaagctccgaggtgacccagcacatcaccatccactgccttaacatgaccgtgtggcaggagggcactgggcagaccccagccaagcaggccgtacgcttccgggcctggaatggacagatttttgaagctgggggtcagttccggcccgaggtgtccatggatggctgcaaggtccaagatggccgctggcatcagacactcttcaccttccggacccaagacccccaacagctgcccatcatcagtgtggacaacctccctcctgcctcatcagggaagcagtaccgcctggaagttggacctgcgtgcttcctctgacctctgacctcgtggccactctaggcctcacggaggagggaagaggaagaggcaaggggagggtactgaggggcagatggctccaggagaggcagctcccctgcccaagggtccttgggcagaccccagctgttgtctgcccagtagaagtgggtgggggtaggaggggatagggtgtccttgggaacaatggatcccagcttagccccaaagaccaaccaaagagccagccagagtaagctggacctgcaacctgcctgagccccgtggcctctcagctctgcggccaccccgttccctccccagcttcctgcccaaagagccccacattctagccaacttgagggaagggggcgtctcgtcagctggtccctgctagggagctattgatgtgcaatattagaaaggagacatgaaaaaaggagaaaaggaaagacagaagtgtatatatatattatttaaacaaacaaaaagaaggtgcgttactatttttttttcacccgggaaagaggtgagaggatgggaaggagcagccaggcgtgggaagcggcgagatcctcgggctgggggtgcccacgtttgctacctcccactgtgaaatcgctggtgctcacaattgtctctcacagtgtatgtgatttttttaaggaaaaaaaaaaatccctatttaagattctgaaggtgctaccattattttgccacagactttgaagaaacttttggatgtggggcatcatccgcatctttctctctcctccaaatgacaaagtttggggaatttttgaattttcctagcatcgcccttgtgctcatcaggtaatctgctaaggagg

SEQ ID NO: 2567 - DNA, 1839 bp, Homo sapiens
aaaccccagagctaatagaagacaagacaaaaacaagctcagagcagaactaaaggagacagagacacaaagagcccttcaaaaaaaatcaatgaatccaggagctgtttttttgaaaaaaatcaacaaaatagatagaccaccagcaagactaacaaagaagaaaaaagaagattcaaataaacacaataagaaatgataagggggataccatcactgatcccacacaaatacaaacaaccattagagaatactataaacacctctatgcaaataaactggaaaatctagaaggaatggataaattcctagataaatacacacttccaagactgaatcaggaagaagttgaatccctgaatagagcaataacaagttctaaaattgaagcagtaataaatatcctaccaatcaaaaaaagtccaagtccagatggatttacagctgaattttaccagaggtacaaagagaagctggttccatttattccgacactatttcaaacaactgaaaaggaggaacttctccctaactcatgctatggggccatcatcatcctgataccaaaacctggcatagatactacaagaaaagaaaacttcaggacaatatccctgatgaacatcgatgcaaaaattctcaacaaaatattggcaacccacatccaatagcacaacaaaagatttatccgccggccgggcgcggtggctcacgcctgtaatcccagcactttgagaggccgaggcgggcggatcacgaggtcaggagatcgagaccacggtgaaaccccgtctctactaaaaatacaaaaaattagccgggcgcagtggcgggcgcctgtagtcccagctactggggaggctgaggcaggagaatggcgtgaacccggaaggcggagcttgcagtgagcggagatcgcgccacagcactcccgcctgggcgacagagcgagactccttctcaaaaaaaaaaaaaaaaaaaaaagatttatccgccacaatcaagtaagctttatcactgagatgcaagattggtttaacatacacaaatcaataaatgtgattcatcacataaacagaactaaagacaaaaactacatgattatctcaatggatgcaaaaaattaaggctttcagtaaaattcaacaccccttcatgttaaaaactcttaatacactaggtattgaaggaacccatctcaaaatcataagagccatctatgacaaacccacagccaatatcatactgaatgagaaaaagctagaagcattccccttggaaactggcacaagacaaggttgccctctctcaccacttttattcaacatagtgttggaagttctggccagggcaatcaggcaagagaaagaaataaagtgtattcaaataaaaagagaggaagtcaaactatccctgtttgcagatgacatgatcctgtatctagaaaacccatcgactcagcccaaaagcttcttaagctgataagcaacttcagcaaagtctcaggatacaaaatcaatgtgcagaaatcacaagcattcctatacaccaacaacagacaagcaaagagccaaatcatgaatgaactcccattcacaactgccaaacagagaataaaatacccaggaatacagctaacaagggacacaaaggacctcctcaaggagaattacaaaccactgctcaaggaaataagagaggacacaaacaaacggaaaaacattccatgctcatggacaggaagaatcaatatcatgaaaatggccacattgcccaaagcaatttatagattcaatgctattgccattaccataccattggcattcctcacagaattag

SEQ ID NO: 2568 - DNA, 2180 bp, Homo sapiens
gcttccggcacgggatgttttcggttgtttgaccgagagagttgtaggcgcaaagctgaggaaaggagagtgtggagaggggcctggtgtggtggggcccggtgtttgggaccggagggtgttgacggctgatgagttccttgggtttgctctttcttcacctgaaaagaagactccaggaagggcagcacatgccggagaaagatgaattgcagcttgaccgcccagaggcgcggcagtgacgccgagttgggaccctgggtgatggctgcgaggtccaaggacgcggcgccgtcccaacgcgacggacttttgcccgtgaaagtggaggaagactcacccggaagttgggagcccaactatcccgcggcttcgccggaccccgaaacttctcgactgcactttaggcagctgcgttaccaggaggtggctggaccggaagaggcgctgagccggctccgagaactctgtcgtcggtggctgagacccgagctgctctccaaggagcagatcctggagctgctggtgctggagcagttcctcaccatcctgcccgaggagcttcaagcctgggtgcgagagcactgcccagagagcggggaggaggcggtggccgtggtgcgggctctgcagcgagcgctcgatggaacctcatcccaggggatggtgactttcgaggacacggctgtgtctctaacctgggaggagtgggagcgcctggacccagcacggagggacttctgcagagagagtgcgcagaaggattccgggagcacagttccgccgagtttggaaagcagagtggagaacaaagagttgattccaatgcaacaaattttagaagaagcggagccacaggggcaactacaagaagcgttccaggggaagcgccccctgttttctaagtgtggcagtacccatgaggacagggtggaaaagcagtccggagaccccttgcccctgaaacttgaaaattctcctgaagcagaaggactcaacagcatctcagatgtcaataagaatggttccatagaaggggaagactctaaaaataatgaattgcagaacagtgccaggtgttccaaccttgttctatgtcagcacatcccgaaagcagagaggcccactgacagtgaggaacacgggaacaagtgcaagcaaagtttccacatggtgacgtggcacgtgctgaaacctcacaagtctgacagtggagacagtttccatcattccagcctttttgagacccagaggcagctccatgaagaaagaccttataaatgtggtaactgtgggaagagtttcaaacaacgctctgacctctttagacaccagagaatccacacaggtgagaaaccctatggctgccaagaatgtgggaaaagcttcagccagagtgctgccctgaccaagcaccagaggacacacacaggcgagaagccgtacacctgtctgaaatgtggggagcgcttcaggcagaattcacacctaaatcgtcatcaaagtacccacagtagagacaaacattttaaatgtgaggaatgcggggaaacctgtcatatttccaacctttttagacatcagagactacataaaggggaaagaccctataagtgtgaagaatgcgagaagagcttcaaacagcgctctgacctctttaaacaccacagaatccacactggggagaagccctatggatgttccgtctgtgggaaacgcttcaatcagagtgcaaccctcattaaacaccagagaattcacactggggaaaagccttacaaatgtcttgaatgtggggaaagatttagacaaagtacacaccttatccgacaccaaagaattcatcaaaataaagtgctgtcggctgggcgtggtggctcacgcctataatcccagcactttgggaggccaaggcaggcagatcatttgagatcaggagtttgaaaccagcctggccaacatggtgaaattctgtctctactaaaaatacaaaaatgagccgggcatggtggtgcatgcctgtaagcccagctattcgggaggctgaggtaggagaatcacttgaacccaggaggcggaagttgcagtgagctgagatcatgccactgcactccagcctgggcaacagagcgagactccatctcaaaaaaagaaataaagtgctgtcattttgatatgtt

SEQ ID NO: 2569 - DNA, 2841 bp, Homo sapiens
ggaacagcggcctctgacaccagcacagcaaacccgccgggatcaaagtgtaccagtcggcagcatggctacgaaatgtgggaattgtggacccggctactccacccctctggaggccatgaaaggtaattgcccatggtctgagagccagcgccctactactgattccacagctgggggtggagggacttcagacctagcccccaccctctggcacacccagcacttcccctacctttccttcccaccctgccgtccctgctgcctgctttctaccgtgcaggacccagggaagagatcgtctacctgccctgcatttaccgaaacacaggcactgaggccccagattatctggccactgtggatgttgaccccaagtctccccagtattgccaggttaggcggggcttgggcgccagctactttgagaccatagctgccctcatccctggccctgggcccccccttcccagctccatccttcttggccctccctggggatgcttgtgcacgctcaacctgggacaaggggagtgctgaaatccagcctgtgccgtgcttccaaaccaaaatgagtccacaggggcgcctcttccaaaagtggacagaggcgtggcctgggggagcaccacctctccccgcatcctaggtcatccaccggctgcccatgcccaacctgaaggacgagctgcatcactcaggatggaacacctgcagcagctgcttcggtgatagcaccaagtcgcgcaccaagctggtgctgcccagtctcatctcctctcgcatctatgtggtggacgtgggctctgagccccgggccccaaagctgcacaaggtcattgagcccaaggacatccatgccaagtgcgaactggcctttctccacaccagccactgcctggccagcggggaagtgatgatcagctccctgggagacgtcaagggcaatggcaaagggggttttgtgctgctggatggggagacgttcgaggtgaaggggacatgggagagacctgggggtgctgcaccgttgggctatgacttctggtaccagcctcgacacaatgtcatgatcagcactgagtgggcagctcccaatgtcttacgagatggcttcaaccccgctgatgtggaggctggactgtacgggagccacttatatgtatgggactggcagcgccatgagattgtgcagaccctgtctctaaaagatgggcttattcccttggagatccgcttcctgcacaacccagacgctgcccaaggctttgtgggctgcgcactcagctccaccatccagcgcttctacaagaacgaggtgacatacgccctctggccctcccctcccagtagtcttgtcagcagctctacctaagcaggcttctgtaacggtgctcccaggcgtctccaggaacgaaaaaaatgaggctgcatgccctgtctctcttctctcagtgctagggcaacttctgcctgaaccctaactggccgtatttattcattcattcaaaaactacttagtgaatgtctgtgctaggcactgtgctatgttctgggaatgcagtggtgaagcagacacaacccctgcctcaaggggcttgcatggagttagatcctgctggcaagaaggccgggcatctattctctccctcccaggtctgggcaacccagatctaacccctagtccccaattctgataggctgacctctctgccagctaacctcaccctccacccctcaatgtagggaggtacatggtcagtggagaaggtgatccaggtgccccccaagaaagtgaagggctggctgctgcccgaaatgccaggcctgatcaccgacatcctgctctccctggacgaccgcttcctctacttcagcaactggctgcatggggacctgaggcagtatgacatctctgacccacagagaccccgcctcacaggacaggtggagaccctggcaggaggagcagaagggaaggaaggaaagagaagagaagctggggatggggtggatgatctgaagcagctgcaggatgttgagggaggtgcaggaaaagcagacatgtgtgctgtgggacagcacaggcccaggactgtccaggccagggatgggcatgcagagcatgtctgaaaggagagaggggttccagccaggcaagctgctcttcctgcaatgtttgcgcctcccactatggtcctccttatactctgcacctccccatctagctcttcctcggaggcagcattgttaagggaggccctgtgcaagtgctggaggacgaggaactaaagtcccagccagagcccctagtggtcaagggaaaacgggtggctggaggccctcagatgatccagctcagcctggatgggaagcgcctctacatcaccacgtcgctgtacagtgcctgggacaagcagttttaccctgatctcatcagggaaggctctgtgatgctgcaggttgatgtagacacagtaaaaggagggctgaagttgaaccccaacttcctggtggacttcgggaaggagccccttggcccagcccttgcccatgagctccgctaccctgggggcgattgtagctctgacatctggatttgaactccaccctcatcacccacactccctattttgggccctcacttccttggggacctggcttcattctgctctctcttggcacccgacccttggcagcatgtaccacacagccaagctgagactgtggcaatgtgttgagtcatatacatttactgaccactgttgcttgttgctcactgtgctgcttttccatgagctcttggaggcaccaagaaataaactcgtaaccctgtccttc

SEQ ID NO: 2570 - DNA, 3026 bp, Homo sapiens
tataaacccatatattcaccagttaccccagtaactcctggtacaccaggaaataccatgcactttgagaatatttcttccccagaaagttctccagaaataaagagacgcacttatagtcaagagggatatgacagatcttcaaccatgttaacattggggccttttagaaattctaatttaactgaactgggtctgcaagaaataaagactattggttatacgagccctaggagtaggactgaagtcaacaggcagtgtcctggagaaaaggaacctgtgtcagaccttcagctaggactcgatgcagttgagccaactgccctacataaaaccctggaaacgcctgcacatgacagggctgagcccaacagccaactggactcgactcactctggacggggcacaatgtattcttcctgggtaaagagccctgacagaacaggagttaacttctcagtgaactccaacttgagggacctgacaccctcgcatcagttggaggttggaggaggcttccgaataagtgagtcaaagtgcctgatgcaggatgatactagaggcatgtttatggaaacaactgtgttttgtacttccgaagatgggcttgtatctggtttcggacggactgttaatgacaatttgatcgacgggaattgcacaccccagaatccaccacaaaagaaaaaggtttctctattagaataccgtaagagacaacgtgaagctaggaaaagtggctctaagacagagaactttccactcattagtgtatcaccccatgcaagtggaagcttgagcaacaatggtgatggctgtgccagcagtaatgacaatggggagcaggtggaccacactgctagcctacctttaccaacaccagctacagtttataatgccacttctgaagaaactagcaataactgccctgttaaggatgctactgctagtgagaagaatgaaccagaagttcaatggactgcctcaacttcagtggaacaagtcagagaaaggagttatcagagagctttacttctcagtgatcaccgaaaagataaagatagtgggggagaatcaccatgtgtctcatgttcaccgagtcatgttcagtcttcaccttcatctcattcaaatcacataccccagttgcaagctaagggcccagtcccttctttcagtgaacttatggaagaccctgatcctgaaaatccagaacccacaactacgaatgaatgtccatccccagatacttctcaaaatacttgtaaaagtcctccaaaaatgagcaagcctggttcacctggatctgtaattcctgctcaagcacacgggaaaatattcacaaaaccagatccccaatgggactccacagttagtgcatccgaagctgaaaatggtgttcacctaaaaacagagctccaacaaaaacagctatcaaataacaaccaagcactttcaaagaatcatcctcctcagacacacgttcgtaattcatctgagcaactttcacaaaagctgccttctgtgccaacaaagttgcactgtcctccatcacctcacctagaaaatcctccaaagtcatccacgcctcacacacctgtacagcatggttatctttcaccaaagcctccttcacagcagttaggatctccctacaggcctcatcattcacagtcacctcaagttggaacacctcagcgagagcctcaaagaaacttttatccagcagcacagaaccttccagccaatactcagcaggcaacttctggaacattatttacacagacaccctcaggacaatcttcagcaacatacaaaatgaagtaggcatatttaccactcctaattttgatgaaacttccagtgctactacaatcagcacatctgaggatggaagttatggtactgatgtaaccaggtgcatatgtggttttacacatgatgatggatacatgatctgttgtgacaaatgcagcgtttggcaacatattgactgcatggggattgataggcagcatattcctgatacatatctatgtgaacgttgtcagcctaggaatttggataaagagagggcagtgctactacaacgccggaaaagggaaaatatgtcagatggtgataccagtgcaactgagagtggtgatgaggttcctgtggaattatatactgcatttcagcatactccaacatcaattactttaactgcttcaagagtttccaaagttaatgataaaagaaggaaaaaaagcggggagaaagaacaacacatttcaaaatgtaaaaaggcatttcgtgaaggatctaggaagtcatcaagagttaagggttcagctccagagattgatccttcatctgatggttcaaattttggatgggagacaaagatcaaagcatggatggatcgatatgaagaagcaaataacaaccagtatagtgagggtgttcagagggaggcacaaagaatagctctgagattaggcaatggaaatgacaaaaaagagatgaataaatccgatttgaataccaacaatttgctcttcaaacctcctgtagagagccatatacaaaagaataagaaaattcttaaatctgcaaaagatttgcctcctgatgcacttatcattgaatacagagggaagtttatgctgagagaacagtttgaagcaaatgggtatttctttaaaagaccatacccttttgtgttattctactctaaatttcatgggctagaaatgtgtgttgatgcaaggacttttgggaatgaggctcgattcatcaggcggtcttgtacacccaatgcagaggtgaggcatgaaattcaagatggaaccatacatctttatatttattctatacacagtattccaaagggaactgaaattactattgcctttgattttgactatggaaattgtaagtacaaggtggactgtgcatgcctcaaagaaaacccagagtgccctgttctaaaacgtagttctgaatccatggaaaatatcaatagtggttatgagaccagacgg

SEQ ID NO: 2571 - DNA, 5219 bp, Homo sapiens
gaatgggctcctgcctgcctggtgccacatcctgccccagctttgagggctgaatcctctcagctcagagaagagcttccctagttttgcaggcgcacggaggcctcccacccgtacacctgcctctgctctccccctggccattgcaatgcatgcccgggatctgggtttaccctgcagcccgactcctccagggcaggctccttccgtccttgggtccagcagcctcccccctccgctgggtactgagcatctgaaaagtctcagatagggccctacacctcttctcccttctcaagtgctcagcccaggggtggggcttgctgcttgcaaagagcagcccaccctcctgtactgccatcctattgcctttgaagaaggaggtcagcctggacaggtgaactgagttgccttcagaaaggcctgtctcaggcagccgcagcaggcttcacgatgtccatgtatcctgtttgcctgctgccgtctctcctctcccaagaggggaggtctgcgtgttgagccagggaggaaggagcctgcagcctgctcagggtggtggctggtgactgcggggccagggcttgctgctgtctctcggaatgtcctgcatgtgggtctggctgttcctgctggcactgccctcttctctctcccctcctttcccactctgccctgcttgcccgtcagggtctccggatgcccctgctggaggcagagaagcgttctgtttttatcatcgtccctgtcttggtcctgtccgtgctccccatgtgctcccaatcagttgtcttcgttcctcaacatcagggaaagaaaaaacagcaacacttctccctgtcatcagctctgctgtctccttgtcaggccttgggacgttctctgggctcagtctagggtcgtgcctcatgcctcatgcctctctgggaaggttcccaggggcgccgcctccatggttggctggtgggttttaaaggggaaggttgggaggaggcctgtggaaggaggagggccgtccacacccgtggggcaaagcgtgttccatgaaaccagtgctgtgcgtgctgggatgaaagcctcccagcctctcgtgctgaagggaaaggtggaccgaactggcttagctgctgtggcaatggggtggggggtgagtcctaatcagaaggtgggagaagagaataacaaaatggaactccgccccctgccgccacatttccttaagttttaggagttggggcctatgagtagaatttgaaagaactaccaaaaaagcttatttttggaaattaagtcagctttgcctgtggtttggctaggaataaatatttacctgtgtgcccctacagagatgacacagacccaaagtgggacattgagcaaggcacaggctggttcccctcctgtcctctgtcatcattctgtgagtgccaccatcaccaggtactgtggcctgcagaaataaacgaggcaccaaccctgccctcagggaccccgtgtcttcttagggacagaggactcagaaacatctgtgtccccgcatgttaagtgcatgcacacagtgctgagtctttgcagagaagggccatggctccctgaggagaccaagaaaggcacatagaagtgacttctcagctggcccttgcaggatccctgggtgcctgtacctctccagtccagctgagcaaggaggctcaggaattaatgaagatggggcttgtgtagcacgatggttctaggccatcccttttccatggctcaagtccattgaaggcagcctccaaaatcagggggttgcctgatcctcctagtgccacaatcccagtcctagctagaacttgccatggttcttctccctaaaagttcccaggggacaggagacaggtgttgcttttctaatggagcgggacctcgcatggacggggccctccaagcctgctaacaccctgttcgcactgactcagccctggaagagaggccagcagtgatgacctcgcccctgtacctggagatcatcatctattgcacaggggccttcctcatctcctgcatggtggggtcggtcatcgtctacaagatgaagagtggtaccaagaagagtgacttccacagccagatggctgtgcacaagctggccaagagcatccctctgcgcagacaggtaacagaaagtagatgggggatttgcacactcagcaccacctctctctctgggcctctaatgccctgccctctccattgtccctaatttatagctttgggccttattttctggcttctgggcaaggcacagaggaatatcatgaactaagtgctctagagtctgtttcaagctagtgtagcccgtgaatttcctgcaccctccatatcacactgcaagtcctccggactcctgggacatggattgggaggaagtcctatttggacagaatgtgcagccaatagcatgaatttgaactgtccccaagggctgcttagaagtgcagagatgcagggtagagaagagaactgtttgtattagtccattttcacactgctgagaaagacatacccaagaccgggcaatttacaaaagaaagaggtttaatggactcacagttccacgtggctggggaggcctcacaattgcagaaggcaaaaggcacgtctcacatggcggcagacgagaagagagcttgtacagggaaactcccctttataaaatcatcagatctcgtgagatttattcactatcacaagaacagcacagggaagacctgcccccatgagtcaatgacctcctaccaggtccctcccataacacgtgggaattcaagatgagatttgggtggggacacagccaaaccatctcagccataccatacccttgtcccctgtgtgcccacccttccccacgggaggaaatggtacagatggcacaggtgtgtgcaagaatgaccgttccctcagaagcctgtgctcattctggaaggtgctttgggagttaggaatccataagctaaggcaaagtatttgcaaagagtcaggagaacagagttgttactgcaatgatcagttataaaatgtcaagctggaagaggtgcatttggtctgcttattttaaaggtgagtgaagtccagaaaggccagcttgtggcagaaataggtcagtcctagaagttgggcctcctggcctaccatggtctttggaccactctgtgttgaggaaagaacatcagatacacagacatgtgcctctgccattgttgggaagccctgactaagaatgggaaggagtcaccccgtcccccttccttgctctagggtgaccccacacttccttgcaggtgtctgctgactccagtgcatccatgaactctggggttcttctggttcggccatcacggctctcctccagtgggactcccatgctagcaggggtctctgagtatgagcttcccgaagaccctcgctgggagctgcctcgggacaggtaataatactttgactcccaactttttgaaggcattccttgcttgctattctagtggtggaaggtgtgtatactaacaccttctgggcggtgaaggttcatgaaatgcctgcagaaacattcattccactttctgctcgcagttgggtgaaatacagagaggtggagatggggtgcctctcaaggtttgaacttcaccagccccaacttatgccactctctgtttcccccgaaagactggtcttaggcaaacccctgggagagggctgctttgggcaggtggtgttggcagaggctatcgggctggacaaggacaaacccaaccgtgtgaccaaagtggctgtgaagatgttgaagtgtaagtgatgcttctgtccttgcaaagaaaatcttgtcccattcaaagcaaacagcaggcctcgggcccagcagaacagcttctctggtgcctttgctgcccacacctgctccgctgcctgcttggggttacctgggagtggagggggtgttctgcaccttgagattgttctatgacgtcactctgttccttggcgtcaacctgggttgtggtcaggtgtttatcctggatccatcgcttgcaggctttcctcaccacatccctgcccactcactaccacctattgcaacaacggctcccatgagagggaagagaaaacaagtttggatgaagtggggaggagagaatcaagtcccagggaaaagcagcccctcgacacataccccactcccttagcctttatcctgccctcctcccttcccaagtaaatgagtctcaacgtgttctttaaagcggacgcaacagagaaagacttgtcagacctgatctcagaaatggagatgatgaagatgatcgggaagcataagaatatcatcaacctgctgggggcctgcacgcaggatggtgggtgccggccagactggctttccctgcccagcggggagaagatctgagctggggtatcagtcccaaggcctctctcagccacagctagggaagggggttaagagaggctgctttggcagaggtttaaaatgtgttatctcgggatctgggctccgctcattggtgttcattcaggaatacagatacctagattcacacacgtggtgtgttaacagaggcagctgagtaattatggtctaagagcgctcaggctgggtgcagtggctcatgcctgtaatcccagcaatttgggaggccgaggcaggaagatcacttgagatcaggagttcgagaccagtctggtcaaaatggtgaaaccccatctctactaaaaaatacaaaagttagccaggcatggtcacgcatgcctataatcccagctactcaggaggctgacgcataagacttgcttgaacccgggaggtggaggttgcagtgagccaagatcacgccattgtactccagcttgggagatactcccgctgtctcaaaaataaaataaataaataggccaggcacagtggctcacgcctgtaatcccagcaccttgggagggtgaggcgggtggatcacttgaggtcaggagttggagaccagcctggccaacaggtgaaaccccatctctactaaaaatacaaaaagtagccgggcgtggtggcgcatgcctgtaattccagctactcgggaggctgtggcaggagaatcgtttgaacacgggaggcggaggttgcggttagccgagatcgcgccattgcactccagcttgggcaacgagcaaaactccatctc

SEQ ID NO: 2572 - DNA, 2618 bp, Homo sapiens
gtaatccgagctactcaggagctgaggcagaagaaccccttgaacccgggaggcggaggtttcagtgagccgagatcgcgccactgcactcctgcctgggacacaatgcgtgactccgtctcaaaataaaaataatcgttagatcaatgagtgcgggaattctaaaaggggtctggaactctcgcaaggttgtggatcactacacctgaagcttaaggggaatgaaatcggtgagaaatgagggtcctacagcccgggccgaagtgacaggtccacccctagtgactccaacaggtgaggagcacccccgacccgcctccctcggcactaaagcgggacgatagggcgcagggctccacccggaagcctcgccataatgtccgcgggcgggccggggcgaggagaaggtgggaagccgtggccgcaggttccgggaggggtcagccgtcctgggcaaggtcaggcccgacttccccggctgaggccgctgcgacccggccctgcaggctccaggcggcagagcaaggggagcgccctagcggggccccagggtccgggccgcctcacctgcaggtgaacttgagggcgaggagcagcgcgcagccgagcgccacggccccgcagagcagctcgggccgctggcgcgccatgaggaaggcgccacgcagcccgcgacggagccggcctgccgaggacgctgtggccagggtcgggctcgagctgaggcagtctgagcccgcggagccgccgccgccccctccctcgtcctcggcgtcctcgctgctgctgctgccgccgccgcggcctccgcattccgacattacatgctcccagtcgccggctttataccgccgccgccgcctcgggcccgaaggcccggcccggcccgttgctccccaatcccgcagctcgccgcacccgctaacccggacgctccacgtcagccgcgccgccgccgcggggtccgccccacctcactccccagagcacgcagctccgcccaccgctcacggagtccgggcgggcaccgacaccgcccaaatccccgcccccaacgggccacgccctgcaccctacgtaaatgcacggaagccttccccgcccgcagcccagtcttggccccaccggtcacgaccccgctcacggagtctgcgcaggcgccgtcgcggggcgtggagaagctgctcccttgggataaggcccgcggggaatacttggaaccttgacaccgctgtagtctgctctcgccgcgctgggttttaggagccgtaacgacaataatcgtgtccaccattctcactacaggccccgaagcacgtaggtgccgttttttatcccaacttaactgaagaaaaaaaacacggccgggcgcggtggctcaagcctgtaatcccagcacgttgggaggccaaggcgggcagattacatgagaccaggcgttcaagaccagcctggccaacatggtgaaacctcgtctctactaaaaatacaaatatattagccgggcgtggtggcgggcgcctgtaatcctagctgcttgggaggctgaggcagagaattgcttgaaccctggaggcggaggttgcagtgagtggagatggcgccactgcactcccgtctgggggagagagagagagagactcttgtctcaaaaaaaaaaaaaaggacttgtcctccaatgtcaataacaacaaactagacaaataaaacttcgagggcattaaggcaatatggtgttatgccacaaacagaaggcacagctaacggccagtagctgagacgccacctctgccacaggtcagctatgtgacccacgtgcaaatctcatcacttcctgtctggttctgcttctgtggatgtagaatggggcaatcaatggctgtcttgctcaattggccagacatttaatgtgtcagccacccaggcccaacatgttgtgagttcgtgtacaccgaccattttgctatttcttttctatatgtcacttttttttttttggttgttttttgatacagggtcttgtgtcacccaggctggagtgcaatggcgcaatcatagcacactgaagccttgacaaccccagctcaagcgatccacccccctcagcctcccaagtagtaggcaacacagatgtgtgcgactacgcccagctaatttttttttttttgtggagacaaggtctctccatgttgcctaggctggtcttgaactcctgggctcaagcgatcttcccccttcgacctcccaaagcgttaggattatgtaaaagcatgagtcactgcgcccacctgtcacatctttttgtttcttctatactgccttattttgtagaaagtagctattttctcgtataacattaattcctttatttttaacttgtccctcatctctgttttgtgttattattacccttattatctatgttacaaacccaaccatacagtgctaatcttgttttaaaaagctgagaaaaaatatatagttacagagtttttttaaccttctaatttgccacttatacttctgattgattcctttgtgtagattagagttacacaatttattgctaaagaaaataaatatgatcaaaagtcataaaaaaaaaaaaaaaaaaaaaa

SEQ ID NO: 2573 - DNA, 3665 bp, Homo sapiens
ggctggggggccgcgggcgggaggcggataaaaaggccccagggcgcccggggagggagcccgttagcgctgctccgccgcggcgcccgcccagccccggactgtccgcgctccatctggtatcttggcctcagctgtccttgaagtcaccatggcgaggtccccaccagccaccctctttctgttcctgctgctgctaggccagccccctcccagcaggccacagtcactgggcaccactaagctccggctggtgggcccagagagcaagccagaggagggccgcctggaggtgctgcaccagggccagtggggcaccgtgtgtgatgacaactttgctatccaggaggccacagtggcttgccgccagctgggcttcgaagctgccttgacctgggcccacagtgccaagtacggccaaggggagggacccatctggctggacaatgtgcagtgtgtgggcacagagagctccttggaccagtgcgggtctaatggctggggagtcagtgactgcagtcactcagaagacgtaggggtgatatgccacccccggcgccatcgtggctacctttctgaaactgtctccaatgcccttgggccccagggccggcggctggaggaggtgcggctcaagcccatccttgccagtgccaagcagcatagcccagtgaccgagggagccgtggaggtgaagtatgagggccactggcggcaggtgtgtgaccagggctggaccatgaacaacagcagggtggtgtgcgggatgctgggcttccccagcgaggtgcctgtcgacagccactactacaggaaagtctgggatctgaagatgagggaccctaagtctaggctgaagagcctgacgaataagaactccttctggatccaccaggtcacctgcctggggacagagccccacatggccaactgccaggtgcaggtggctccagcccggggcaagctgcggccagcctgcccaggtggcatgcatgctgtggtcagctgtgtggcagggcctcacttccgcccaccgaagacaaagccacaacgcaaagggtcctgggcagaggagccgagggtgcgcctgcgctccggggcccaggtgggcgagggccgggtggaagtgctcatgaaccgccagtggggcacggtctgtgaccacaggtggaacctcatctctgccagtgtcgtgtgtcgtcagctgggctttggctctgctcgggaggccctctttggggcccggctgggccaagggctagggcccatccacctgagtgaggtgcgctgcaggggatatgagcggaccctcagcgactgccctgccctggaagggtcccagaatggttgccaacatgagaatgctgctgctgtcaggtgcaatgtccctaacatgggctttcagaatcaggtgcgcttggctggtgggcgtatccctgaggaggggctattggaggtgcaggtggaggtgaacggggtcccacgctgggggagcgtgtgcagtgaaaactgggggctcaccgaagccatggtggcctgccgacagctcggcctgggttttgccatccatgcctacaaggaaacctggttctggtcggggacgccaagggcccaggaggtggtgatgagtggggtgcgctgctcaggcacagagctggccctgcagcagtgccagaggcacgggccggtgcactgctcccacggtggcgggcgcttcctggctggagtctcctgcatggacagtgcaccagacctggtgatgaacgcccagctagtgcaggagacggcctacttggaggaccgcccgctcagccagctgtattgtgcccacgaggagaactgcctctccaagtctgcggatcacatggactggccctacggataccgccgcctattgcgcttctccacacagatctacaatctgggccggactgactttcgtccaaagactggacgcgatagctgggtttggcaccagtgccacaggcattaccacagcattgaggtcttcacccactacgacctcctcactctcaatggctccaaggtggctgaggggcacaaggccagcttctgtctggaggacacaaactgccccacaggactgcagcggcgctacgcatgtgccaactttggagaacagggagtgactgtaggctgctgggacacctaccggcatgacattgattgccagtgggtggatatcacagatgtgggccccgggaattatatcttccaggtgattgtgaacccccactatgaagtggcagagtcagatttctccaacaatatgctgcagtgccgctgcaagtatgatgggcaccgggtctggctgcacaactgccacacagggaattcatacccagccaatgcagaactctccctggagcaggaacagcgtctcaggaacaacctcatctgaagctgtcactgcacactcctagctgctgccgatacaccagatacctcagcttattggagccatgcccttcacagagtcccaactcagaggaaaagggccagtgccaaggggcaccaagaacctgctcaggaagccttttgatggcaagatcaccaatccagatggtattgctccctcaggatggctctgggcctgcccctaagggcctgtggcctatggaatatgtcctccaggctttgctcagctgagctcctcttctgtaaggaaacccagtcatccctgaatcttgccacagagatccgggattcaggagctctcagtttcttagggatggactatggcccagtcccccatctaagtggtgctttgcaaatgtcttggaggagtataggacagaggaccaaaatacacagcaggtagtgttagctctctgctaggagctcaaagcaacacaacttgtatcaaaatcacaactggcagagaagctggtggatccaatcctttcttcatctgttgttatttagaactcacctctcacactctgttctttagtgtccttacctttatcttaccacacacatgggtgtttctattatccttggaagcacagacctcgggcatccccttattgcctgatgggccaacaccaacagttacggagtgcttgagaaggggcaagtttcacagaaatggccagatagggccttcctacagagcagcaagagtaggccaagcagaaagactgctgaggtaacacggaccccagcccctgtcagggcctctgccaaggaaataatatggaccatttacctggcaggcagtctgctctctctcaggatcaccacgcatctcaggattggtctaaacttcaagtctcaaccaagtgtctgaagtgaactttgcattgaataaatttttgccatggaaagaacatcaaacaagccactcatctctacagagataagaaaacaagtttggcagagcaagagacagaagaccgtggagaaatcagaagggggaacagtcagtttagttaaggatggaacctgggaaaggccaccattcctgcttgatggggctctgatttgctcttgctcaagtggaataaaaccccatggtcttcttgacatgattcttgatcttttctccactgagacacacttaagtgatgatccttacaggactgacaccctaatgccaataaaagttgctcattatggactgctacaaaaaaaaaaaaaaa

SEQ ID NO: 2574 - DNA, 2621 bp, Homo sapiens
ttcaaacgagaactttgaaggccgaagtggagaagggttccatgtgaacagcagttgatgagcagatgaggcctagccgaggcggcgggacccccaagtttggaaagctcttttaacggctatgcgaaagttctgtccaaaggctgctcacagcccctgtctgactggttgtcatgatgaattgagctctctgttacctgcgcatcacaaccgatagtaactgtccctactgaaggccccaggagtgctccagccaggtgtggaaagctggtcacgattctatgctacttggttcattttctacacagcaacagaagagccctcctgagattgctattaccatacccgcctgtcaccttgccaaggctggccaatgccgagcgtgttggctcatgcctgtaatcccagcactttggaaggccgaggcaggcggatcacgagagctgaggcttcgaagacctcagaggacttctctcagcactcacagaaacctcctacaccctcggatgccacaaagggactgttttcttactcttagtctgagtgactgccaaggaaggcaaaggtagagcaactggatctctggctctccacatagcttctgatctcagaccttactaaaatgctttctgggcccaaggacaaagctcacatgaacaaatgattttgagtcatgaatgaaaaatcttgctctttccatagtaaagaagaattaagagatggacagggtgaaagattgtctgctggatattctccatcatatgacaaggacaagagtgttctggctttcaaaggaatccctatctcagagttgaagaaccatggcattctccaggctctgaccacagaagcttatgaatgggagccacgtgttgtgagtacagaggtggtcagagcccaagaagaatgggaagctgtggacaccatccagccagagacagggagccaagctagctcagagcagcctgggcagctaatctccttcagtgaggccctgcagcacttccagactgtggacctttcccccttcaagaaaagaatccagccaactattcgaaggactgggctcgccgccctccgacactacctcttcgggcctccaaagctccaccagcgccttcgggaagaaagggacttagtcctgaccattgctcagtgtggcctggatagccaagacccagtgcatggccgcgtcctccagaccatctataagaagctgaccggctccaagtttgactgtgcccttcatggaaaccactgggaggacctgggctttcagggagcgaatccagccacagacctgagaggcgcaggcttccttgccctcctgcatctgctctacctggtgatggactcaaagaccttgccgatggcgcaggagattttccgcctgtctcgtcaccacatccagcaattccctttctgtttgatgtccgtgaacatcacccacattgccatccaggccttgagagaggagtgtctctccagagagtgtaatcggcagcagaaggtcatccccgtggtgaacagcttctatgccgccacattcctccacctcgcacatgtctggaggacacagcggaagaccatctcagactcgggctttgtcctcaaagagttggaagtattggccaagaagagcccacggcggctgctcaagaccctggagctgtacttggccagggtgtcaaagggacaggcctccttgttgggagcacagaagtgctatgggccagaagcccctcccttcaaggatctcaccttcacaggtgagagtgacctgcagtctcactcatccgaaggcgtatggctgatctgacctccgagatgaatggaggcttaaaggctgagctgcaggggctttcagggggtcagtggagccatgtcaggagcctggccaggccgcaccccttgctgtctcagcagatgggatataggaagctcctgggcttagctgtgggaagccaagtaccctcaccggcatgggacatgaggggcagctagacttcacccccttcccgcagacctacctccagagcaaggagaattctgccttaatctgttgggctccagtctccgggttgaattccagtgtatcccactgggagtgaatggatcatgaggtgggatggccccatctggatgttctgcagatccccacatgggaggagattcccaagtagaggcagccagaattctgactccctggcagcagcagggctttcaggcaccagtgtctgtgttgttagaactcagaggaagaggcaggggcagcagccgacagggggcagcatgacccaagcaaggggcctgaggcctcagtgggggtagggcaaggaggtacctcacaggtgggtgtgaggccccctctggagtttctggccattcacttacccactctcttctccccctgacccccgctccattgtttatgatggaaaaacggacatttggctaggtgtctctcacggctgctccatcctagcccccacaagctggggcttcctcctgtagatgctgtgcatgccccatgatgagtttctggcctaattgagggaaggaggaaattcataccagcagttttcaaataaaagaattgttctaaaaaaaaaaaaaaaaaa

SEQ ID NO: 2575 - DNA, 2415 bp, Homo sapiens
acatgctctgtgaggagatttccctcgatgatgtgcttctgagtgctctgctgaggaacgatgggaagtctgcccagcagaagaaaatctctgccaagcccaagcttgagttcctctgtccaaggccagggacctgtgaccatggaagcagagagaagcaaggccacagccgtggccctgggcagtttcccggcaggtggcccggccgagctgtcgctgagactcggggagccattgaccatcgtctctgaggatggagactggtggacggtgctgtctgaagtctcaggcagagagtataacatccccagcgtccacgtggccaaagtctcccatgggtggctgtatgagggcctgagcagggagaaagcagaggaactgctgttgttacctgggaaccctggaggggccttcctcatccgggagagccagaccaggagaggctcttactctctgtcagtccgcctcagccgccctgcatcctgggaccggatcagacactacaggatccactgccttgacaatggctggctgtacatctcaccgcgcctcaccttcccctcactccaggccctggtggaccattactctgagctggcggatgacatctgctgcctactcaaggagccctgtgtcctgcagagggctggcccgctccctggcaaggatatacccctacctgtgactgtgcagaggacaccactcaactggaaagagctggacagctccctcctgttttctgaagctgccacaggggaggagtctcttctcagtgagggtctccgggagtccctcagcttctacatcagcctgaatgacgaggctgtctctttggatgatgcctaggcccaaaggagaggccaaaagggaaaccaaggctgcacacctagaaccccaattcagcctcctgggcaccccagaggcaaggctgtgcactcagggagggagggtgggacacagaggtgcatctagggtcccacctgtacccttgctctttcctctcttagcccttagaagtcacctacttccttccagtgccatgatcccacctgcgacctctagtgcgagtgcagagaaggtgggaccagggccagggttccaaaaagagaataagcctcctggggggtctgacctagttagttcttgagtttggggtttccagtaccatctggatgccctgcctgttgagccccattctacatccccaccattaaccaggccccacccacaaggtagaaacaacccctagagtcaacgagaaagtcattttcagaaaatctacaagtctcgttgagaccaccaccatacctcagaaggtaggactgtggcctagaagggaaaggaaagctgagatggtgtcttaccgtagcagcagatcttggatggtccaggctctatgtgacctccagagcaaagagaaagactcgggacagtctaggtcctcaaatgtcccccattgaggacaacagccccagctctttttcttttttttgagacggagtcttgccctgttgcccatgctggagtgcaatggcacgatctcagctcactgcaacctccatctcctggattcaaacaattctcctgcctcagcctccagaatagctgggattacaggcgtacaccaccatgcctggctaatttttttgtatttttagtagacatggggtttcaccacattggccaggctggtgtcgaactcctgacctcaggtgatccacccaccttggcctcccaaagtgctgggattacaggtgtgagccacggcacccagcctagctctcagatctctatttcattttgtggcttaccattccctagcacactggccttgccatcttgtggccgaataaaaaataacacctcttaagtctagcacactgcagtgaggccaggcacctcagtgctgggcaggggcatcagaaggtgctaagccctctctccacaatgccaagacggagaccacagcctacaccaaatccagcccttgatttccctgctgcctccataaacagaaagaggtctgctggatccgctaagggatcagggagaggaagaaagagggatggggtgggaggcaccccctccagtgctcctactggttcccaagctacaggtggggtgggaaaggctttatcaggtatcatcaacaggttctcaattaaagatttgatttattcaagtatgtgaaaacattctacaatggaaactcttattagatgctgcatgtactgtgctatggaccacgcacatacagccatgctgtttcagaagacttgaaatgccattgatagtttaaaaactctacacccgatggagaatcgaggaagacgatttaatgtttcatctgaatccagaggtgcatcaaattaaatgacagctccacttggcaaaaaaaaaaaaaaaaaaaaaaaa

SEQ ID NO: 2576 - DNA, 1019 bp, Homo sapiens
ggcacgagggtctggccccgccttttctctgctctcctgaacctttaggcttgtctcggcccatttgaagaccaggaagttgatcaatcccgaggctgctgagagacggtggcgcgattgggacagtcgccagggatggctgagcgtgaagatgcagcgggtgtccgggctgctctcctggacgctgagcagagtcctgtggctctccggcctctctgagccgggagctgcccggcagccccggatcatggaagagaaagcgctagaggtttatgatttgattagaactatccgggacccagaaaagcccaatactttagaagaactggaagtggtctcggaaagttgtgtggaagttcaggagataaatgaagaagaatatctggttattatcaggttcacgccaacagtacctcattgctctttggcgactcttattgggctgtgcttaagagtaaaacttcagcgatgtttaccatttaaacataagttggaaatctacatttctgaaggaacccactcaacagaagaagacatcaataagcagataaatgacaaagagcgagtggcagctgcaatggaaaaccccaacttacgggaaattgtggaacagtgtgtccttgaacctgactgatagctgttttaagagccactggcctgtaattgtttgatatatttgtttaaactctttgtataatgtcagagactcatgtttaatacataggtgatttgtacctcagagcattttttaaaggattctttccaagcgagatttaattataaggtagtacctaatttgttcaatgtataacattctcaggatttgtaacacttaaatgatcagacagaataatattttctagttattatgtgtaagatgagttgctatttttctgatgctcattctgatacaactatttttcgtgtcaaatatctactgtgcccaaatgtactcaatttaaatcattactctgtaaaataaataagcagatgattcttataaaaaaaaaaaaaaaaaa

SEQ ID NO: 2577 - DNA, 2073 bp, Homo sapiens
atgatattccacttttagatgaacagagcatagcctgtgagatgaatgaactttcttgtaccaatgaactggttgtaaacaaagtagaaagtgaatgtgttttaaatcaacaagtgtcccttaattctcaagaacatgcaaatttgccaactgactctctactgcatttaaacaaagagatgcctttagcaacaggcagagatgcccatcagagccatcaccctccattagagggtagagcagatgtcattgctgatatacaaaccattcccattcagacaaaaataaaagacatctctccaccaggtaaccaaacctgtggtgcctcttcaaactgtcccaccttaaacatcaaaccagtaagcctagagagaaaaaaggaaatggctgattcaggaacaaaagctctacattccaggctgcgctcaaataagagagaagcagctggctttcctcaagtggtctctgtcatagaatgtcacagcgttcaatctcaggatatctctagctgtcatcgtgtaagaaaaaatgtatcccaggaaaacatgtgttctgcttctgctgctttcaagtccagcaaaatcagcctgcaagttgataactctttgataacaaaatatgaaaatgcatttcagcaccgtgatcactgctgccaaggaacaggacactctgtggaaaaaagcagctgtaaagtgagttacacatcacaggaaagggaacttgatgggaaagaaacgaatggcagccttccaggagataagatcagaaacaaaatggtagcaggcttgttaaatagtggaaattcaaacaaaaccattcacacctccagtagcatcaaactcagtgaggaagggctggaaggaaaggagcaggatgtatccaaagaaactgtattttgtaagtataacatctctgatcatgctatacaagaactaaaccagactgtaaacattccaggtcctgaaaaagtgttggaccagtctcctactgttatgttctccagttttaaaaatgtaaaatcagttgaaacactcgatcagaaggcagatgaagtccttgactgtcagagtaaccaaaacagaccagatgaatgcaaaagtgaaggtcagtcagccaaggagatgctaagtagtgaccagagagagactgtcaccgagcctcacggggaggtaaaccacaaccaaaaggatctgctggtcagctcaggcagtaataactcactaccttgtggtagtccaaagaaatgcaatttgaaaggagcctttgtcaagatgtctggttgtgatgagtccacagaaggtatggtagacatcgtctacacggactgtagtaataagcttgcagaaggtgtgctggacgtgaaggcatctaatctactggattgtggtgcaaggcaagagaaactggcatttcaagaggactccaggagtaccttgtctcggagagaactggatgctgcacatacaggaacaactggtcaggattcagatttcccagttactgctgcttctacagtggactttctcaaaataaaaaaatcatgtgaagaaaacgtatgcagatctttaaaagactgtgaaatggaaaagtgtccagactcttgtgcccatgagatggagtctgttgcagatcatgaaccaaataaaagaatattgggcagagtaaattttgtctttaaatgatagccattatggccagcaagataaaggaacatctctcagagaaacacaagaaatgactgaaggatcaagactagaaccaaactctgagtttggcaaagaaagtacctttggaatttcctcaaaagagtcgatgttttgccatgatgaaagctctgtttccctaagaagcccctgcctgaccacgtgagcattgtggaacccaaagatgagatactgcccaccacccccatctcagaacagaagggtgggaagccagagccgcctgccatgccccagccagtccccacagcataacagggtctccttggcagctgtattctggagtctggatgttgctctctaaagacctttaataaaattttgtacaaagaaaaaaaaaaaaaaaaaaaaa

SEQ ID NO: 2578 - DNA, 2117 bp, Homo sapiens
gcgtgctggcccggggtggcaggagccgcagaggcttgggctgcagaaaaaggatcctgtttgctgtgtaatcctgagaatggactgcaagagaggaaaaactgggcgtctgcttgggaatctattgtggaaacccagggtgtttcccgaccagtccctgggcgccaactagagtatggactgaccaggtacctggatggagacctgagctggagaaggagatgcgcttgggaggaaattgcagaggccgtcaacatggaaaagcagccccagaacagcaggagaggcctcgccccccgagaggtgccgccagctgttgggctgctgctgatcatggccctgatgaatactctactctacctctgcctcgaccacttcttcatcgctcctcgacaatccactgtggaccccacacactgtccctatggtcacttcaggataggacagatgaaaaactgctcaccttggctgtcctgcgaggagctgagaacagaagtgagacagctgaagcgtgttggggaaggagctgtaaagagagtctttctgtctgagtggaaggagcacaaagttgcactctcacagctcaccagcctggagatgaaagatgatttcctccatggactgcagatgctgaaatctctccaaggcacacatgttgtcacgctgcttggctattgtgaggatgacaacactatgcttactgaatatcaccctctaggttccttgagtaacctggaagaaacactaaacctttcaaagtaccaaaatgtgaacacgtggcagcacaggctggagctggccatggactatgtcagcatcattaattacctgcaccacagccctgtgggcacacgggtcatgtgcgactccaacgacctgccgaagacactgtcccagtatctgctaacaagcaacttcagcattttggcaaatgacttggacgccttacccctggtgaaccacagctccgggatgctggtgaagtgcggccacagggagctgcatggggatttcgtggctccagagcaactgtggccctatggagaggacgtgcctttccacgatgatctcatgccctcatatgatgagaagattgacatttggaagatcccagacatctccagtttccttctggggcacattgaagggagtgatatggtccgattccatttgtttgatattcacaaagcatgcaagagccagactccctcagaaagacccactgcccaggacgttctggagacctaccagaaggtcttggatacacttagagatgccatgatgtctcaggcaagagagatgctgtgaaaaccagtccagccaatgaaggtgggattgaagggctgaatggaagttacagcattctactctgatggtggagttttttgcctgagtttcgtgttttattgttttttttatggcttagccatgtggttcgttgtccacatccacatgtacgtttgtatgtagtccacattggttgttagattttttttttttttctttgagatgcggtcttgctctgttgctgaggctggagtgcagtgatgtgatcttggctcactgcagcctctgcctcccaggttcaagcaattctcccacctcagcctccaaagtgctgggattacaggcgtgagccactgcgcccggccacattcagttcttatcaaagaaataacccagacttaatcttgaatgatacgattatgcccaatattaagtaaaaaatataagaaaaggttatcttaaatagatcttaggcaaaataccagctgatgaaggcatctgatgccttcatctgttcagtcatctccaaaaacagtaaaaataaccactttttgttgggcaatatgaaatttttaaaggagtagaataccaaatgatagaaacagactgcctgaattgagaattttgattttttaaagtgtgtttctttctaaattgctgttccttaatttgattaatttaattcatgtattatgattaaatctgaggcagatgagcttacaagtattgaaataattactaattaatcacaaatgtgaagttatgcatgatgtaaaaaatacaaacattctaattaaaggctttgcaacaccaaaaaaaaaaaaaaaaaa

SEQ ID NO: 2579 - DNA, 3166 bp, Homo sapiens
ggcggcttccggcgcggcggttccggacaaccgtgcgcttttagtaaaagattggggttcgcgcgggggagaagggctgccccgggccctctggttctcgtcccgcagcgtccgctcccccgcgccactgcgccgctcccaggaaccctgtactccggggtcgccggcttctctcctgcctccggtcccgccagacacctcgagctccttaagtagctcggtccttgacgtccctctgggcccttcccgcgtctatcgcctgagtccccgggcccctctagccctctgttccctcccctcttttgttcctccctagagccccgccgccctcagggctgacagtgtggacggcgggagtctcctcgctcccctgctgggattgactgaccgagcgtttagtgactgcccagatctggctgatgggggtaccgagaggtggcctgggccgggaatgtccagctagagtcttccgtggaagtcagacatgaaactgacaggcctaagggaagctaggaagtcccctcaccgctcagccagggtgatgggctggactgacagactccagtgaatttgagcttgcctgtcaggctgattggctgatagacagccctggattggctcactaagactgaccagcccgggaccaagcagttctggggtcccaacctgggtggaaggtctgaactgatgacccacccaggctgaccaggccagcccacctcactgacctcctgacccctgacctcatcacctgtgcagccatggagaagatgtcccgtgtgaccacagccctgggtggcagcgtgctgacaggccgcaccatgcactgccacctggatgctcccgccaatgccatcagtgtgtgccgcgacgcagcccaggtggtcgtggcaggccgtagcatcttcaagatctatgccatcgaggaggaacagttcgtggaaaagctgaacctgcgtgtggggcgcaagccttcgcttaacctgagctgtgctgacgtggtctggcaccagatggatgagaacctgctggccacagcagccaccaatggcgtggtggtcacgtggaacctgggccggccatcccgcaacaagcaggaccagctgttcacagaacacaagcgcacggtaaacaaagtctgcttccaccccaccgaagcccacgtgctgctcagtggctcccaggatggcttcatgaagtgctttgacctccgcagaaaggactctgtcagcaccttctcgggccagtcggagagcgtgcgggacgtgcagttcagtatccgggactacttcaccttcgcctccacctttgagaacggcaatgtgcagctctgggacatccggcgtcccgaccggtgcgagaggatgttcacagcccacaacggacccgtcttctgctgcgactggcaccccgaggacaggggctggttggccactggagggcgcgacaagatggtgaaggtctgggacatgaccacgcaccgtgccaaggagatgcactgtgtgcagaccatcgcctcggtggcccgtgtgaagtggcggccagagtgccgccaccacctggccacgtgctccatgatggtggaccacaacatctatgtttgggacgtgcgccggcccttcgtgccagctgccatgtttgaggaacaccgagacgtcaccacgggaattgcctggcgccacccccacgacccctccttcctgctgtctggctccaaggacagctcgctgtgccagcacctgttccgcgacgccagccagcccgtcgagcgcgccaaccctgagggcctctgctacggcctcttcggggacctggccttcgccgccaaggagagcctcgtggctgccgagtcggggcgcaagccctacactggcgaccggcgccaccccatcttctttaagcgcaagctggaccctgccgagcccttcgcaggcctcgcctccagtgccctcagtgtctttgagacggagccaggtggcggcggcatgcgctggtttgtggacacagctgagcgttatgcgctggctggccggccactggccgagctctgtgaccacaacgcaaaggtggctcgagagcttggccgcaaccaggtggcgcaaacgtggaccatgctgcggatcatctactgcagccctggcctagtgcccactgcaaacctcaaccacagtgtgggcaagggtggctcctgtggcctcccgctcatgaacagtttcaacctgaaggatatggccccagggttgggcagtgagacgcggctggaccgcagcaaaggagatgcacggagcgacacagttctgctcgactcctcggccacactcatcaccaatgaggataacgaggaaaccgagggcagcgacgtacctgccgactacctgctgggtgacgtggaaggtgaggaggacgagctgtacctgctggatccggaacacgcgcaccccgaggaccctgagtgcgtgctgccgcaggaggcctttccgctgcgccacgagatcgtggacacgcctcccggacccgagcacctgcaggacaaggccgactccccgcacgtgagcggcagcgaggcggatgtggcctccctggcccccgtggactcctccttctcgctcctgtctgtctcacacgcgctctacgacagccgcctgccgcccgacttcttcggcgtgctggtgcgcgacatgctgcacttctacgctgagcagggcgacgtgcagatggctgtgtctgtgctcatcgtcctgggtgaacgggtgcgcaaggacatcgacgagcagacccaggagcactggtacacttcctacatcgacctgctgcagcgcttccgcctctggaacgtgtccaacgaggtggtcaagctgagcaccagccgcgccgtcagctgcctcaaccaggcctccaccaccctgcacgtcaactgcagccactgcaagcggcccatgagcagccggggctgggtctgcgacaggtgccaccgctgcgccagcatgtgtgccgtctgccaccacgtagtcaagggtctcttcgtgtggtgccagggctgcagccacggcggccacctgcagcacatcatgaagtggctggaaggcagctcccactgtcccgcaggctgcggccacctctgcgagtactcctgacggggcatctgctgggcttgcccgggcggccg

SEQ ID NO: 2580 - DNA, 2011 bp, Homo sapiens
catggcaacatgagcagtgctgagataattggttctacaaatcttataattctgctagaggatgaagtctttgccgattttttcaacacatttctttccctcccggtttttggtcagacaccattttatactgttgaaaattcacagtggagcttgtggccagaaataccttgtaacttgattgccaaatacaaagggttattgacctggttggaaaaatgccgattacctttcttctgtaaaacaaacttgtgtttccattacattctctgtcaggagttcatcagtttcattaagtccccagaaggagccaagatgatgagatggaaaaaggcagaccagtggctactccagaaatgcattggcggggtcagagggatgtggcgcttctattcctacctcacaggcagtgcaggtgaagaattggtggatttctggatccttgctgagaacatcctgagcatagatgagatggacctggaagtgagagactactacctgtccctcctcctcatgctgagggccactcatctgcaggagggctccagggtggtaaccctctgtaacatgaacatcaagtccctcctgaacctctccatctggcatcccaaccaatcaaccactaggagggagatcctgagccacatgcagaaagtggctctgttcaaactccagagctattggcttcccaacttttacacccacaccaagatgaccatggccaaggaggaagcatgccatggtctgatgcaagagtacgagactcgcttatacagcgtttgctacacccacataggagggctccctctgaacatgagcatcaagaagtgccaccactttcagaaacggtactcaagcaggaaagccaagaggaagatgtggcaattggtagatcctgactcttggtctctggaaatggatctcaagccagatgctattggtatgcccctacaggagacatgtcctcaagagaaggtggttatacaaatgccttccctgaaaatggcttcttcaaaggaaacaagaatcagttccctggaaaaggatatgcattatgcaaaaatatccagcatggagaataaagccaagagccacctccacatggaagccccctttgagacaaaggtctctacccacctgaggactgtcatccccattgtcaatcactcctccaagatgacaattcagaaggccatcaagcaaagcttctccttaggatacatccacttggccttgtgtgctgatgcctgtgcagggaaccctttccgggaccacctgaagaagctgaatttgaaagtggagatccaacttcttgacctctggcaggacttgcagcatttcctcagtgtccttctgaataacaaaaagaatgggaatgcaatctttcgtcacttgctgggtgacagaatctgcgagctctacctgaatgagcagattggtccgtgcttaccactcaaatcccaaaccattcagggcctgaaggaactattgccctctggggatgtgatcccctggattcccaaagcccagaaggagatttgcaagatgctcagtccctggtatgatgagtttctagatgaagaggactactggtttctcctttttacggtaggaaggactttgggttaggaaggaatcatgaggatgagggaagaagaaagagtaattactgttttaaaagggttatgtgttaaagtaaatgaaattgttatttttcctagagtcaaccaaagatcagcatggtccctgttgttctaaagctaaacctctcaaggaaaaggactcagtgcataagatgactttggtgaaaccccgtctctactaaaaatacaaaaaattagccgggcgtagtggcgggcgcctgtagtcccagctacttgggaggctgaggcaggagaatggtgtgaacccgggaggcggagcttgcagtgagccgagatcccgccactgcacgccagcctgggcgacagagcgagactccgtctcaaaaaaaaaaaaaaaaaaaaaaaag

SEQ ID NO: 2581 - DNA, 1107 bp, Homo sapiens
ggcacgaggtggtcgcctaagctgtttagtgaaacttcttccacctttctccattcctctaggtgctttttctgaacctggatgtgaggcattaaaggatccgacggaaatagaattgaaggcattctaaaatggctaaccgtacagtgaaggatgcgcacagcatccatggcaccaaccctcaatatctggtggagaagatcattcgaacgcgaatctatgagtccaagtactggaaagaggagtgctttggacttacagctgaacttgtagtcgataaagccatggagttaagaaacgctatgtattagaggaagctgagcaactggagcctcgagttagtgctctggaagaggacatggatgatgtggagtccagtgaagaggaagaagaggaggatgagaagttggaaagagtgccatcacctgatcaccgccggagaagctaccgagacttggacaagccccgtcgctctcccacactgcgctacaggaggagtaggagccggtctcccagaaggcggagtcgatctcccaaaaggagaagcccctcccctcgccgagaaaggcatcggagcaagagtccaagacgtcaccgcagcaggtcccgagatcggcggcacagatcccgttccaagtccccaggtcatcaccgtagtcacagacacaggagccactcaaagtctcccgaaaggtctaagaagagccacaagaagagccggagagggaatgagtaatggactcagtttggttttagtccacatggcctcctgtggatatgaggatatctgtatgtggaaggattaagatctcccccaggcagctataagaatattttagtttttttcttatcaagtttctcaacctttatttttaatgaaggaggtgctgagttttgtatctttttaatcataatcaacatcagtttttgacccaactaaccttgactgtattcaaacttatgagagtataaaggatctggaggttggggatatgactgacaaggaaaggctgtggccacctgatgaccctttccctttttattaaaccggacacacctgtttcccataaaaaaaaaaaaaaaaaaaaaaaaaaaaaaaaaaaaaaa

SEQ ID NO: 2582 - DNA, 2690 bp, Homo sapiens
tgctgggaaaagtgactgcgattctgaagaaccgctgccttgcaaggtcaaggacattcagtggttgctggggtccgcagactactgccacccactcaccatcaactctgttagcccaattgccctgctgaacaactgcctgaatacaggctttaggttcccctggactccagccaaggctgttcaggtgggaccatggtgctctttaagcgtgatcggagggaagacacacagcagggccaccattccatgaatgggaggtgtacagatcactttctctttgtgctcagttctcttctgtctccagcagctatattggtaagactagtacctgccagggagaggtgcccccaagtgaaggggtacagtggcacctgggaaaaggcacctggaaggtttccatgtggcccagcccagcatggaagcagggtgggaactctgctgtgtcgccagccctcactctactcaagtggctttttgagagccctgccatgtctgtgtcaggcctgtgctgcttcacaccctacagctgcctgggaaaggccggccacgctccctgtccacacactccctgtccacacactccctgtccacaactgcagccgggccctctgcctatgggcacccaatccaagcagctgctccacctttgtttggcatggtgatttgtgttttttctcttggtgcttatgtgtgtgggcttgggacgagtgctggtatgcacttaggaccttcttgatagctccctgcactttggaacacggagcagatgagagagggtcaggggcttgccctccaccttggacttggaagaagcccacattggagaggtgaggaccccatggtggctctagtggaagatacgttagtctccagctaaggaggatgaggcgcagccccagagggagacctcagtgataggggatcaggctacgaaagtgggggaagggagatgctttgtacatattttggggttataatttctctaaattttaggagaacgggtattgattgataaaagggacaggcagtagtgttcaacagtgcatgtgaaggaaagttctgttttccatggttttgacattctttggactgtattgtgactgctgtctggtccacatggtacccttttggtaagtaggcttcagtgcataccagggtatcactggagatgggagttagtgaaggggtgactccctggcctagtatagtgtgaccctgggacaacttaatgtcctaaagcattttggtgacttctagggaatagcaaagacctatttcattgtccccaggtaagtatgtgatgagcaatgaggaggagtggaaaacaaaacccagaaagtgcggcaggaccagcctgacgcacacgctcctgttgtcatggcagacagccgccttgggtgggcaccaccctggcagttccagcctgtaggggagtgaagggacatggctgagctgggcatgtgctgaggttgacttagggaacaagccctgggattggacaaaagggcccatgctgcagccactgactgggggcagagctctgggtggaagagggaagagatcctaatggaggcgcctccatctgcaaccacagttgtaaggctcatggcacctctgcttggaaagcactggtttagggacttagagaggtaggcacaaggtgggtctcctgggtaagggaagcaagagcagactgttgggccaacaggagaagctccccagagtaggggagaaggttggggtgtagggccttccacgtggaacagacagcccctgtgtctctgtctcttggggacctgagtttgggtggggtggcagttggcacagcgcagatgcggtagagatgggaggaaacccagctcctcacttccgtgtgcctcatgcctttgcatacacaagcaccaaacctactaggtcttctcattacccatgtaaaccacatgttagataaatttttgcaagtagaggaaagaaggaaataaaacatcacattttggtgtctctcaggctttcccccccaactatggtttctttgctttttgttttaacatagttttgttgctgtcttctgtaatgatacagttttgtgcagctgttttcacttagcatatcgtgggcatctccccttatgattactaaatattttattttggagtggctgtgtactctcccattgactagatggaccattgtgccagttgccaatcactaatgctgttactaacttttcagttataaattgatgaatatctttgtgcacaggctgtttcccaatgtcaagttattagggtagactccaggaggtgggattcttcaactaaagaatatgaaaacctttgaggcttttactacatattgacaaaatggtttccggaaatatttgtatccccttacactgccaccagcaaggataaacatgtccatcttgcccgtattgggaattatcatctggctaaatatttgctaatttgataatgaaaaaatagcatcgtgtttcagttggcatttcactgacttctagcacggttgaacatctttcatgtggagcgattgtatttcctcctttgtggattgtcagtgtcctttgctctatcttctggggtcagataaatttgtatgagctcggtatatattaaagatattaacctggtgtgtgtcaaaaaaaaaaaaaaaaaaaaaaaaaaaaa

SEQ ID NO: 2583 - DNA, 3453 bp, Homo sapiens
gcgcgagtgggaggtggcaggcctgcgactccggccttgtccgcgcccgctctcggcgcgacgtctccagccatgaaccggtttggtacccggttggtgggagccacggcgacttcttcgccgccgccgaaggcccgcagcaatgaaaacctcgacaaaatagatatgtctttggatgatatcatcaagttgaatcgaaaggaagggaagaagcagaattttccaagactaaatagaagactcctccagcaaagtggtgcccagcaattcaggatgagagtgcgatggggaatccaacagaattctggttttggtaagactagtctgaatcatagaggaagagtaatgcctggaaagagacgtcctaatggagttatcactggccttgcagctaggaaaacgactggaattcgaaaaggaattagtcctatgaatcgtccacctctaagtgacaagaatatagaacaatattttccagtgttaaaaaggaaggcaaaccttctgagacaaaatgaagggcagaggaaaccagtagcagttctcaagagacctagccagctaagcagaaaaaataacattccagctaattttaccaggagtggaaataaattaaatcatcagaaagatactcgtcaggcaacttttcttttcagaagaggcctgaaggtgcaggcccagttgaatacagaacaactgctagacgatgtagtagcaaagagaactcgtcaatggcggacttccaccacaaatggagggattttgactgtatctattgacaatcctggagcagtgcaatgcccagtaactcagaaaccacgattaactcgtactgctgtaccttcatttttaacaaagcgggagcaaagtgacgtcaagaaagttcctaaaggtgttcccctgcagtttgacataaacagtgtcggaaaacagacagggatgacgttgaatgagcggtttgggatcctgaaggaacaaagagccactctcacatacaacaaagggggaagccgctttgtcaccgtgggataggtcccatgtcaaaggaacttttgagtgatgactctgagaagttgaattgcttgaagagttcatcacggaaattcaagaaactttacttcaaaatattcacaaggctaaataactcttatttttatttttgaaggtttttttttttaaaaaaaaaaaacgtataaaataatgccctgaaagaataatagggattatacctgtctgttcttaaagatttcatggttggctcagacagaacaatcatctgtttgacttctttggttcctcatgcagcagaaggaagacagaaggatagaaattgattatttttatgatagcggtattcaggatctcatcacctttgcccgtgttttagactttgtcatggtaaatcctggtcttcataaacatgagtaggtcccttggttgctgtcacttgccctttaatagtgttgatgtagtcagtgccgttgccttttcttcattagagacacagaacaatgtattagaatttccagctgtgggtttgaagacttagggggacatccagaacgtgcttcctctttcagacggtgtaaagtcccctggaattacacagctttagtgctgagcttttaacaggaaatgtggccctaggtattagtcttagtttaaaatgttggtgtttagagactgtaaatgcatattcacaaagttatctgatagggccttggaggagaaggtccagttttaaaaaatgacagtttgtgtttaataaatgaaggcatgagaggaagtaagtagcaagttgaaggacaggtagttgagatgaaacacttcaaaaccctggttatagatgtactgtttggatgtagcatagtcttgagtctagcgtccacaaagaattattcaaatgatatttagaagaattataactattacattgaatggagtcccttggatattttgatagtaaaattaatagccataaagtcctagacttcttatttgaagttaaaatttcttatttgaaaagttgaaatttatgagctttgaagattgctaaattaaataatttatagctccaaaaacaaaaatatacttgtatatgtcacagagaaaaaaaatgcaaaatttataatagagttacattaaccttgttgtttacctttcactgatttcttatatggtataaattaaagttcaggcatttatggggagaaaaggccctccccaccgacccgccacctgccacctctgacggagtgggagaagttagtctgtgctaagatagtactgagtccccagatgttgtatactgtaaattacagtataatgccaaatgcagcaaaatcttccagctgtacgttacaagtttggtcattttgaagcttgacattttagtttgccattatgttaaaaacatctaaataggtgttagtttctcaggagtagattgttagtgttgacttttcctgtaaagcagacatcgttcttggcctgccctgcattgtatactagatttcattgttgtctctcatgcttcttgagttgcttcatggtttatgctcgccatggaaagctatcagtaacagtttcatgcttataccaaagaattaaatctgatctttaatatctgatattttcctggtactcgtactgataagggattattggaagtcagtcacagaatttggaaataaattctagtctctccttagctatttgatgcttttcatataggccaagaactcattgcaaaacatttttgcaaggatgaatgcctgtatttggtctaggaacagtacattttagtctgatttagaattactggtagcttattttaaagcaaggaaaagcagctgagctcaagtttgctgtctttagaatggtttgtgaaaatatggtataaaggtgttttcattttcctgttcttacctattattgtatagagctattcatgccattttttgggaaaactttaaaaattgccccaaatactgacattgagtgcattaaataacaaattatctttgatacattaaacttttattcttcatgcatctgtaatttaattttaagtataatgttttgcctttggtacaactaaattaaaactcttggtggtcacatattgtatataaacaaaacaatatgctttgttgaaggaaaattttctttattggaatgtggttgtaatccttgttcagttcttaagtttcggttttttttaaaaacaggatgcaacttaaacttttctttgcatcaaggtatatgcaaaacattggtgccgtgcatcaccaaatgaaagtttgtatttaacgaggaggtgctttacactgtactttttggtgttttttggaaaagttacatttagatctattctgaagctgttcatttttaacaaataaaatgttacaggtttcacatgatttattctcagctctaaaaaaaaaaaaaaaaaaa

SEQ ID NO: 2584 - DNA, 2973 bp, Homo sapiens
gcggagccggggctggagagcggcgaccactgcggatctcggaaggaagaaatgatgtaaatcactcatccaaactttaaggtcaaaggtgagaaggaaggtcaggaagaacatggcctggccaaatgtttttcaaagagggtctctgctgtcccagttcagccatcatcatgttgtagtgttcctgctcactttcttcagttattcgttgctccatgcttcacgaaaaacatttagcaatgtcaaagtcagtatctctgagcagtggaccccaagtgcttttaacacgtcagttgagctgcctgtggagatctggagcagcaaccatttgttccccagtgcagagaaagcgactcttttcctcggcacactggataccattttcctcttctcctatgctgtgggcctattcatcagtggcatcgttggggatcggttgaatttgcgatgggttctgtcttttggcatgtgctcttctgcattagtggtgtttgtctttggtgcgctcacagaatggctgcgtttctacaacaaatggctgtactgctgcctgtggattgtgaacggcctgctgcagtccactggttggccctgtgtggttgctgttatgggcaactggtttgggaaagccggacgaggagttgtttttggtctctggagtgcctgtgcttcggtgggcaacattttgggagcgtgcctagcttcttctgttcttcagtatggttatgagtatgcctttctggtgacggcgtctgtgcagtttgctggtgggatcgttatcttctttggactcctggtgtcaccagaagaaattggtctctcgggtattgaggcagaagaaaactttgaagaagactcacacaggccattaattaatggtggtgaaaatgaagacgaatatgagccgaattattcaatccaagatgatagttctgttgcccaagtcaaggcgataagcttctaccaggcatgttgccttcctggagtcataccgtactcactggcctacgcctgcttgaagttagtgaattactccttcttcttctggctccccttttatctgagtaacaacttcggctggaaggaggcggaagccgacaagctgtccatttggtacgacgttggagggatcatagtatttagtgtctctgatccgggacaagctaggatggatgtgggttttctactttttcattctcatgacaagttgtacaattgtgtttatctcgccattaatagtgagggaaatattctctctcgtgctaaggagacaggctcacatattgagggagtgaccggtgcccgcgagacagaaagaacaatgtcagccacatcaggaccgctggggcttcgagtctgccctaatttgggtttgtctaggagctccagcctgatcttggattgtcaggcgtctctcaacactgccagccacctgagatgctgaccagcagtgaaggctgcactagttttctacactacaggaattactgttgatgatttttgctgttgtttcatgaatgtgccgagtgacttctgactctgccagcatctttgacctctgactctgcccgcgtctttgtttggcctattgaggtttagcgttttaaccttaactgttgttttggacttgaactttctctagccttgaaaatggagtgaacaggaggcaaagccacgcgtggtttgtgttggtggtatgttccacaaatggaagagatcattgcattttgctttggtaatgagtttacagagagtgggtcatctttgaagcatcaaatcctgatcaaatgctcaagctggaccgagctgcaagcctgccttggacaaagaatccctctgttcactgtggtgggaaagatcacactacatgcctgttgattggctcagtcactctgtgtctgatctaaacgtcattcagccctagaagcatgaattgcttcaaattattgtcaacttgttctcttccattttcattcaaattaactttgactcctggaagtattgagtcttcctttcaaggaccataaggtacatcagttatcttgaacattctgacgtgtaaaggaccataaggtacatcatttatcttgaacattccgacgtgtaactcacagccgaagcactccatcccagatttgttgtctgggaactttaggatcctctaggaagctaatctgcttagtctatttttagaggattgatctctggcacaaccagcttcctggagttacctcagcagaagactagaattagagaaaagggaaagaccttttcttctagtaagtgtcaagtacagatgctctttgacttatgatggggttatgtcccagtaaacccattggaagtcaaatgcatttaatacccctgactggacaccacagcttagcctcgtccaccctaaatgtactcagaacacttagaattgcccacagttgggcagaatcatctaacacaaactctattttataatcgagtgttgaatatatcatgtaatttattgaatattgtacattatgttgaaattgcaaccatttcacaccattgtaaagtccaaaaatcagaagctgaggactgtctgtacatgacattgaatcacatgaatggattactagggcctgaggggtgtccgttctttagaaaaatgtagagtatatatatcttcagggctgtgaattccatactagttatcaatattttaagatcattctgtatatacatattttaaattatgcaagcaaactaggaggagaatgtgcaattttgagggatacctaatttgcattcggttaggggatatttttcaacctcttgctttatactctgatatggggtgtgtttatgaacttgttaatgttatttaatcatgcagatttccaatcagtgtattgctcatttactgacaaaaagggaaaatacgaaacacagaaagggaaaataaactgacttttataatgaaaaaaaaaaaaaaaaaaa

SEQ ID NO: 2585 - DNA, 1395 bp, Homo sapiens
gccggggctggttggggaccggccgggttccgctcctgctggagcccggtgcgtggaattccacgcgagtgccggggagttcctggggagccgggcttctcttttggcccccagcgtgttgaccgagcccgcttcgcacagcccttcctagggtgtggagagcgggccccgccctgaaggggcaccgtgggctggggggcctgttttggagcaggcaccggtggccgagctccgtgaccatgaaggtcaaggtcatccccgtgctcgaggacaactacatgtacctggtcatcgaggagctcacgcgcgaggcggtggccgtggacgtggctgtgcccaagaggctgctggagatcgtgggccgggagggggtgtctctgaccgctgtgctgaccacccaccatcactgggaccacgcgcggggaaacccggagctggcgcggcttcgtcccgggctggcggtgctgggcgcggacgagcgcatcttctcgctgacgcgcaggctggcgcacggcgaggagctgcggttcggggccatccacgtgcgttgcctcctgacgcccggccacaccgccggccacatgagctacttcctgtgggaggacgattgcccggacccacccgccctgttctcgggcgacgcgctgtcggtggccggctgcggctcgtgcctggagggcagcgcccagcagatgtaccagagcctggccgagctgggtaccctgccccccgagacgaaggtgttctgcggccacgagcacacgcttagcaacctggagtttgcccagaaagtggagccctgcaacgaccacgtgagagccaagctgtcctgggctaagaagagggatgaggatgacgtgcccactgtgccgtcgactctgggcgaggagcgcctctacaaccccttcctgcgggtggcagaggagccggtgcgcaagttcacgggcaaggcggtccccgccgacgtcctggaggcgctatgcaaggagcgggcgcgcttcgaacaggcgggcgagccgcggcagccacaggcgcgggccctccttgcgctgcagtgggggctcctgagtgcagccccacacgactgagccacccagaccctcacagggctggggcctgcgtccctcctcgtgacctcggccagctggacccacatgagggccacctctggaaccttcttcgaggccctggccagccatctgcccagcctcggagggtgggcaacctggtgcttcccgggtggacacacaggaccactcagtggggcctgtgtgggcgccgagacctgggtgtctgggaagtggggcacacggggcctcccaactatgaataaagctttgaaaggccaaaaaaaaaaaaaaaaaaaaaaaaaaaaaaaaaaaaaaaaacctcggg

SEQ ID NO: 2586 - DNA, 1512 bp, Homo sapiens
ggcacgaggcggcccccgggagctgtgctctatggagctattgcggccgtgggtggtcgcgggcgatgcggggctgccagctcctcgggcttcgtagctcttggcccggggacctactaagtgctcggctcttgtcccaagagaagcgggcagcggaaacgcactttgggtttgagactgtgtcggaagaggagaaggggggcaaagtctatcaggtgtttgaaagtgtggctaagaagtatgatgtgatgaatgatatgatgagtcttggtatccatcgtgtttggaaggatttgctgctctggaagatgcacccgcttcctgggacccagctgcttgatgttgctggaggcacaggtgacattgcattccggttccttaattatgttcagtcccagcatcagagaaaacagaagaggcagttaagggcccaacaaaatttatcctgggaagaaattaccaaagagtaccagaatgaagaagattccttgggcgggtctcgtgtcgtggtgtgtgacatcaacaaggagatgctaaaggttggaaagcagaaagccttggctcaaggatacagagctggacttgcatgggtattaggagatgctgaagaactgccctttgatgatgacaagtttgatatttacaccattgcctttgggatccggaatgtcacacacattgatcaggcactccaggaagctcatcgggtgctgaaaccaggaggacggtttctctgtctggaatttagccaagtgaacaatcccctcatatccaggctttatgatctatatagcttccaggtcatccctgtcctgggagaggtcatcgctggagactggaagtcctatcagtaccttgtagagagtatccgaaggtctccgtctcaggaagagttcaaggacatgatagaagatgcaggctttcacaaggtgacttacgaaagtctaacatcaggcattgtggccattcattctggcttcaaactttaattcctttcctatcatggagcatgaaccagtcatatcctgttgaaagcctggaactgaaggataatctggcaaatgagacagcagcagagcatctcctcttaaggatacgtgccttggactcatgtttgaatcgaacagtctcaaagtggaagaacaaattcttgtcacttttttacagctttctttggagctgcttcagtccatctcccagaggcatttggtctgtatctttgctcaactgctaatttctcttggctgtagggtgtgtggttaaggtacaaccacccctaaagctcagttttgaagtgagtgtatttatagcttctctgctggtgctgccttctagagggatgatagatcatttgaacccaatgacaatttttaaccagaaaatttaattgtacctgaatcaacctttcagcctaggacgaagtctaggcccaagtcagagtattaatgatcatgagaattgtgtgctgaaccagtaaacgagtttaccttttgaaaaaaaaaaaaaaaaaaa

SEQ ID NO: 2587 - DNA, 1105 bp, Homo sapiens
gtcctgcgagcgacgcgcggcggggcggcgagaggaaacgcggcgccgggccgggcccggccctggagatggtccccggcgccgcgggctggtgttgtctcgtgctctggctccccgcgtgcgtcgcggcccacggcttccgtatccatgattatttgtactttcaagtgctgagtcctggggacattcgatacatcttcacagccacacctgccaaggactttggtggtatctttcacacaaggtatgagcagattcaccttgtccccgctgaacctccagaggcctgcggggaactcagcaacggtttcttcatccaggaccagattgctctggtggagagggggggctgctccttcctctccaagactcgggtggtccaggagcacggcgggcgggcggtgatcatctctgacaacgcagttgacaatgacagcttctacgtggagatgatccaggacagtacccagcgcacagctgacatccccgccctcttcctgctcggccgagacggctacatgatccgccgctctctggaacagcatgggctgccatgggccatcatttccatcccagtcaatgtcaccagcatccccacctttgagctgctgcaaccgccctggaccttctggtagaagagtttgtcccacattccagccataagtgactctgagctgggaaggggaaacccaggaattttgctacttggaatttggagatagcatctggggacaagtggagccaggtagaggaaaagggtttgggcgttgctaggctgaaagggaagccacaccactggccttcccttccccagggcccccaagggtgtctcatgctacaagaagaggcaagagacaggccccagggcttctggctagaacccgaaacaaaaggagctgaaggcaggtggcctgagagccatctgtgacctgtcacactcacctggctccagcctcccctacccagggtctctgcacagtgaccttcacagcagttgttggagtggtttaaagagctggtgtttggggactcaataaaccctcactgactttttagcaataaagcttctcatcagggttgcaaaaaaaaaaaaaaaaaaaaaaaa

SEQ ID NO: 2588 - DNA, 1278 bp, Homo sapiens
ggcacgaggaggtgtggacgctgtgtatgaaatgtctttcctccaggacccaagtttcttcaccatggggatgtggtccattggtgcaggagccctgggggctgctgccttggcattgctgcttgccaacacagacgtgtttctgtccaagccccagaaagcggccctggagtacctggaggatatagacctgaaaacactggagaaggaaccaaggactttcaaagcaaaggagctatgggaaaaaaatggagctgtgattatggccgtgcggaggccaggctgtttcctctgtcgagaggaagctgcggatctgtcctccctgaaaagcatgttggaccagctgggcgtccccctctatgcagtggtaaaggagcacatcaggactgaagtgaaggatttccagccttatttcaaaggagaaatcttcctggatgaaaagaaaaagttctatggtccacaaaggcggaagatgatgtttatgggatttatccgtctgggagtgtggtacaacttcttccgagcctggaacggaggcttctctggaaacctggaaggagaaggcttcatccttgggggagttttcgtggtgggatcaggaaagcagggcattcttcttgagcaccgagaaaaagaatttggagacaaagtaaacctactttctgttctggaagctgctaagatgatcaaaccacagactttggcctcagagaaaaaatgattgtgtgaaactgcccagctcagggataaccagggacattcacctgtgttcatgggatgtattgtttccactcgtgtccctaaggagtgagaaacccatttatactctactctcagtatggattattaatgtattttaatattctgtttaggcccactaaggcaaaatagccccaaaacaagactgacaaaaatctgaaaaactaatgaggattattaagctaaaacctgggaaataggaggcttaaaattgactgccaggctgggtgcagtggctcacacctgtaatcccagcactttgggaggccaaggtgagcaagtcacttgaggtcgggagttcgagaccagcctgagcaacatggcgaaaccccgtctctactaaaaatacaaaaatcacccgggtgtggtggcaggcacctgtagtcccagctacccgggaggctgaggcaggagaatcacttgaacctgggaggtggaggttgcggtgagctgagatcacaccactgtattccagcctgggtgactgagactctaactaaaaaaaaaaaaaaaaaaaaa

SEQ ID NO: 2589 - DNA, 2299 bp, Homo sapiens
ggcacgagggtgggacaaagcctggggctgggcgggggccatggcgctgccatcccgaatcctgctttggaaacttgtgcttctgcagagctctgctgttctcctgcactcagggtcctcggtacccgccgctgctggcagctccgtggtgtccgagtccgcggtgagctgggaggcgggcgcccgggcggtgctgcgctgccagagcccgcgcatggtgtggacccaggaccggctgcacgaccgccagcgcgtgctccactgggacctgcgcggccccgggggtggccccgcgcggcgcctgctggacttgtactcggcgggcgagcagcgcgtgtacgaggcgcgggaccgcggccgcctggagctctcggcctcggccttcgacgacggcaacttctcgctgctcatccgcgcggtggaggagacggacgcggggctgtacacctgcaacctgcaccatcactactgccacctctacgagagcctggccgtccgcctggaggtcaccgacggccccccggccacccccgcctactgggacggcgagaaggaggtgctggcggtggcgcgcggcgcacccgcgcttctgacctgcgtgaaccgcgggcacgtgtggaccgaccggcacgtggaggaggctcaacaggtggtgcactgggaccggcagccgcccggggtcccgcacgaccgcgcggaccgcctgctggacctctacgcgtcgggcgagcgccgcgcctacgggcccctttttctgcgcgaccgcgtggctgtgggcgcggatgcctttgagcgcggtgacttctcactgcgtatcgagccgctggaggtcgccgacgagggcacctactcctgccacctgcaccaccattactgtggcctgcacgaacgccgcgtcttccacctgacggtcgccgaaccccacgcggagccgcccccccggggctctccgggcaacggctccagccacagcggcgccccaggcccagaccccacactggcgcgcggccacaacgtcatcaatgtcatcgtccccgagagccgagcccacttcttccagcagctgggctacgtgctggccacgctgctgctcttcatcctgctactggtcactgtcctcctggccgcccgcaggcgccgcggaggctacgaatactcggaccagaagtcgggaaagtcaaaggggaaggatgttaacttggcggagttcgctgtggctgcaggggaccagatgctttacaggagtgaggacatccagctagattacaaaaacaacatcctgaaggagagggcggagctggcccacagccccctgcctgccaagtacatcgacctagacaaagggttccggaaggagaactgcaaatagggaggccctgggctcctggctgggccagcagctgcacctctcctgtctgtgctcctcggggcatctcctgatgctccggggctcaccccccttccagcggctggtcccgctttcctggaatttggcctgggcgtatgcagaggccgcctccacacccctcccccaggggcttggtggcagcatagcccccacccctgcggcctttgctcacgggtggccctgcccacccctggcacaaccaaaatcccactgatgcccatcatgccctcagacccttctgggctctgcccgctgggggcctgaagacattcctggaggacactcccatcagaacctggcagccccaaaactggggtcagcctcagggcaggagtcccactcctccagggctctgctcgtccggggctgggagatgttcctggaggaggacactcccatcagaacttggcagccttgaagttggggtcagcctcggcaggagtcccactcctcctggggtgctgcctgccaccaagagctcccccacctgtaccaccatgtgggactccaggcaccatctgttctccccagggacctgctgacttgaatgccagcccttgctcctctgtgttgctttgggccacctggggctgcaccccctgccctttctctgccccatccctaccctagccttgctctcagccaccttgatagtcactgggctccctgtgacttctgaccctgacacccctcccttggactctgcctgggctggagtctagggctggggctacatttggcttctgtactggctgaggacaggggagggagtgaagttggtttggggtggcctgtgttgccactctcagcaccccacatttgcatctgctggtggacctgccaccatcacaataaagtccccatctgatttttaaaaaaaaaaaaaaaaaa

SEQ ID NO: 2590 - DNA, 1350 bp, Homo sapiens
ggcacgagggtcagtgccaagatgtcgacggcggcggttccggagctgaagcagatcagccgggtggaggcgatgcgcctagggccgggctggagccactcgtgccacgccatgctgtacgccgccaaccctgggcagctcttcggccgcatccccatgcgcttctcggtgctgatgcagatgcgtttcgacgggctgctgggcttccccgggggcttcgtggaccggcgcttctggtcgctggaggacggcctgaaccgggtgctgggcctgggcctgggctgcctgcgcctcaccgaggccgactacctgagctcgcacctgaccgagggcccacaccgcgtcgtggcgcacctgtacgcgcggcagctgacgctggagcagctgcacgccgtggagatcagcgcggtgcactcgcgcgaccacggcctggaggtgctgggcctcgtgcgggtcccgctgtacacccagaaggaccgagtcggaggcttccccaacttcctgagcaacgccttcgtgagcacggctaagtgccagctcctctttgccctcaaggtgctcaacatgatgcccgaggagaagctggttgaggccctggctgcagccaccgagaagcagaagaaggccctggagaagttgctcccggcctcctcttgagggctgcctgagctggtggcaccctcccctgggccggaagactgggaattcctgctaagtgtggcttctagagtgtttgtgtgtaccccgcttctgactgcctagggcgagtgggcatcctgtcatcatctccactgtcccaagcagtcactaggtggcggccgggccagctggaacccagcccatcctctcaggcagagcagggtggtccgggcacactgggcctgcctctccagcctcaggatgctcttgtttattctgggctcagaccctcctcttgtacgtctcatcacagctggtagagacccaggagtgcctgattgtcccacaggggtggcgcacagctctgggaccactcagaagatgggatgtgtgggtggaggatgccttgtctcggtcagctcattcctgcctccttcctgagccagttcagggcctgggggagagccagcttggggtaggaagttaataatactgttaatttgggttgttgttggatttactttgctagattttctctttcaccacgtgtgaactgtgggtgaggtttcaaagtagcttcaccccacgtggcttggttcccagggacagtcagggcctcgggggcccagctatgtacaacgaagctgtcgaaggagaagacaataaagtcgctccgcagctgcaaaaaaaaaaaaaaaaaaaaaaaaaaaa

SEQ ID NO: 2591 - DNA, 1235 bp, Homo sapiens
ggcacgagggtcatcgccgcggggcggaggcgacagtgtctagcgggagctccgcgtgtagctacgccggccgcctggctttgagacaacgtgattctccgcagctggtcgcctacccgtgatgttctgcccacgtcgagacctgagctgaaatggcagacgatctcggagacgagtggtgggagaaccagccgactggagcaggcagcagcccagaagcatcagatggtgaaggagaaggagacacagaagtgatgcagcaggagacagttccagttcctgtaccttcagagaaaaccaaacagcctaaagaatgttttttgatacaaccaaaggaaagaaaagagaataccaccaagaccaggaaaagaagaaagaagaaaattactgatgttcttgcaaaatcagaaccaaaaccagggttacctgaagacctacagaagctgatgaaggactattatagcagcagacgcttggtgattgaattagaagaactgaacctgccagactcctgtttcctcaaggccaatgatttgactcacagtctttcctcatacctaaaaggaatttgtcctaagtgggtaaaacttaggaagaaccacagtgagaagaaatcggtcctgatgctgatcatctgcagctcggccgtccgagccctggagctcattaggtcgatgacagcattcagaggagacggcaaagttataaaattatttgcaaagcacataaaggtccaggcgcaggtaaagttgctggagaagcgtgtggtgcacctgggtgtaggaactccggggagaattaaagaacttgttaaacaaggtggccttaatttgagccccttaaaatttctggtttttgactggaactggagagatcagaagttgaggagaatgatggacattcccgagataagaaaggaggtattcgaacttctggaaatgggagtgctcagtctgtgcaagtcagaatccttgaaactgggccttttctaagtctgtgtcctaatgaagattccagttttcacagtagaagttgcatcttatttaatgactctgatacattgcaagcactcagtaaatatcagcaaatagtttatgttaattgtgtcaacagatggatcactggaatgtggggattctgaaacagaaatgaaactgtccttttgacaactctcttatataataaagtatcaccggcttgtgtatgaaaaaaaaaaaaaaaaaaaaaaaaaaaaa

SEQ ID NO: 2592 - DNA, 1818 bp, Homo sapiens
tccagccttgcagcgttgcttgactctgctgagagatagcaggccatggcagcggctggtaagaatagttcagtggggctggctggagttgccttgggtcaagcagaatattaataggcaggggaatgcacctgtagctagtgggcgctactgccagcctgaagaggaagtggctcgactcttgaccatggctggggttcctgaggatgagctaaaccctttccatgtactgggggttgaggccacagcatcagatgttgaactgaagaaggcctatagacagctggcagtgatggttcatcctgacaaaaatcatcatccccgggctgaggaggccttcaaggttttgcgagcagcttgggacattgtcagcaatgctgaaaagcgaaaggagtatgagatgaaacgaatggcagagaatgagctgagccggtcagtaaatgagtttctgtccaagctgcaagatgacctcaaggaggcaatgaatactatgatgtgtagccgatgccaaggaaagcataggaggtttgaaatggaccgggaacctaagagtgccagatactgtgctgagtgtaataggctgcatcctgctgaggaaggagacttttgggcagagtcaagcatgttgggcctcaagatcacctactttgcactgatggatggaaaggtgtatgacatcacagagtgggctggatgccagcgtgtaggtatctccccagatacccacagagtcccctatcacatctcatttggttctcggattccaggcaccagagggcggcagagagccaccccagatgcccctcctgctgatcttcaggatttcttgagtcggatctttcaagtacccccagggcagatgcccaatgggaacttctttgcagctcctcagcctgcccctggagccgctgcagcctctaagcccaacagcacagtacccaagggagaagccaaacctaagcggcggaagaaacttgccgaactaaagcaagaatgtcttgctcgtggtttggagaccaagggaataaagcaagatcttatccacagactccaggcatatcttgaagaacatgctgaagaggaggcaaatgaagaagatgtactgggagatgaaacagaggaagaagaaacaaagcccattgagctccctgtcaaagaggaagaaccccctgaaaaaactgttgatgtggcagcagagaagaaagtggtgaaaattacatctgaaataccacagactgagagaatgcagaagagggctgaacgattcaatgtacctgtgagcttggagagtaagaaagttgctcgggcagctaggtttgggatttcttcagttccaacaaaaggtctgtcatctgataacaaacctatggttaacttggataagctgaaggaaagagctcaaagatttggtttgaatgtctcttcaatctccagaaagtctgaagatgatgagaaactgaaaaagaggaaggagcgatttgggattgtcacaagttcagctggaactggaaccacagaggatacagaggcaaagaagaggaaaagagcagagcgctttgggattgcctgatgaaaagttcctgatactttctgttctccagtgttttccatttctctccttcttcttggtcacatatatgcctaaatgcacagtcatgtgcctacgtcctgcctcgcaatgagggagcatgtaccccaggtacatccatgaactgcggcagcagtttgacttattgctgtttcagctttaaggttgttgtgtttttgtttttgattatgttgcttgttaataaaaaaaaatagaaaaaaaaaaaaaaa

SEQ ID NO: 2593 - DNA, 2103 bp, Homo sapiens
ctcagactacaggtgtgagccaccatgcccggccttctcctttaagtattgttggcctcactttcccaactaaaatgggagctcactaagaacaaaggctgttccttcatcttatacttagtaccttgaaagggcctaccacacagtaggtggtcacgtgttagtctgttaggtcttttggattttctaggtagacaatcacatcgattgcaaataatagtctttctcttttcagtctttgtatttcttttttcttgttttattgcattgactgagctcatcagtgaaatgttgaatagtagcaatgatggagggcaccccaatcttattatgctcaatactcattaatttatgcaataggaatgtaaagtacctactgcaggtcaaatcctgtgcctggggataacagtgtaacacatttgagatcttttcctgtccactgaaatgcctgagcagtagcagtatttcagtaaacacgacaatgctgagaatatcaccaaattctccagacttgctgaagtgttcctttgggatcctggttcccaaaaagtatggacataggtccctgctggtggccccaggttccaggccatcagtaaggttgggggctgcagactggaccactgcaccgtggagcagaggtgaagaaaccaagacgcagagaggccaagccccttgccttgggtcacacagccaaaggaggcagagccagaactcacaaccagatccagaggcaacagggacatggccacctgggacgaaaaggcagtcacccgcagggccaaggtggctcccgctgagaggatgagcaagttcttaaggcacttcacggtcgtgggagacgactaccatgcctggaacatcaactacaagaaatgggagaatgaagaggaggaggaggaggaggagcagccaccacccacaccagtctcaggcgaggtcatcatcatctgcttggtggttctggatgccctcctggtgcttgctgagctcatcctggacctgaagatcatccagcccgacaagaataactatgctgccatggtattccactacatgagcatcaccatcttggtcttttttatgatggagatcatctttaaattatttgtcttccgcctggagttctttcaccacaagtttgagatcctggatgccgtcgtggtggtggtctcattcatcctcgacattgtcctcctgttccaggagcaccagtttgaggctctgggcctgctgattctgctccggctgtggcgggtggcccggatcatcaatgggattatcatctcagttaagacacgttcagaacggcaactcttaaggttaaaacagatgaatgtacaattggccgccaagattcaacaccttgagttcagctgctctgagaaggaacaagaaattgaaagacttaacaaactattgcgacagcatggacttcttggtgaagtgaactagacccggaccagctcccctcaaaaagaagacactgtctcatgggcctgtgctgtcacgagaggaacagctgcccctcctgggccgcttggtgagaggtttggtttgatacctctgcctccctcctgccagcatggattctgggtggacacagccttgtggaaggtccagtaccaccaagagctgcccatccactcccaccccacactgtatcaaatgtatcacattttctcatgttgaacactttagccttaattgaaaatgagcaacaaagctggacaattgctagttgtatataaaatttaatctcaccgaatgtacagttttcaaatttcacgtgtatattaaggaactgatgcatctgagcattctgaaagaaagaaaaagaagctactttagctgccaccccattctagaaaagtctcttattttcaagctgttctaaatagcttcgtctcagtttccccaaaaggggtacccaggcccctcctctgtgtgccccagctgcatcagccagcttctaggtggctccattgttttctgccacctgacaacatttttcctcaattactgtacaactactgtataaaataaaacaactactgtataaaataaactctctcttttccctggaaaaaaaaaaaaaaaaaa

SEQ ID NO: 2594 - DNA, 2255 bp, Homo sapiens
ccctttcatcagtcttcccgcgtccgccgattcctcctccttggtcgccgcgtccttggctggcgttagagacggggtttcaacgtgttggccaggatggtctcagtctccagaccctgtgatccgcccgcctcggcctcccaaagtgttgggattacaggtgtgagccaccgtcctggccgaggctccttcttttatgaggagcgggaaggcctcctgcaccctggagaccgtgtgggaagacaagcacaagtatgaggaggccgagcggcgcttctacgaacacgaggccacacaggcggccgcctccgcccagcagctgccagccgaggggccagccatgaatgggcccggccaggacgaccctgaggacgctgatgaggcggaagcccctgacggcggcagcaggcgtgatcccaggaagagccaggacagcaggaagcccctgcagaaaaagaggaagcgctcccccaagagcgggctcggccccgcggacctggccctcctgggcctctcggccgaacgtgtgtggctggacaagtcacttttcgaccaggcagagagctcctaccgccagaagctggcagatgtggctgcccaggcagcctggcctcctgccttggccccttggggtctctgcacccatggaaaccaggtggcctgccaccacgtgacctgggggatctgggtcaacaagtcctccttcgaccaggctgagcgggccttcgtggagtggtctcaggccctgttgctggcccccgagggcagccgcaggcaggggactcccaacacaggccagcaggtggccgtccccgacctggcccaccagcccagcccaccggtcaatggccagcccccgctgggcagcctgcaggcactggttcgggaggtgtggctggagaagccccggtatgatgcagccgagaggggcttctacgaggccctgtttgacggccatcccccagggaaggtgcgcctgcaagagcgagccggcctggccgagggtgcccggcggggccgcagagaccggcggggccgcaacatcttagggaacaagcgggccgggctgcgacgggccgatggggaggccccctctgccttgccctactgttacttcctgcagaaggatgcagaggccccctggctcagcaagcctgcctacgacagcgccgagtgccgccaccacgctgccgaggccctgcgtgtggcctggtgcctcgaagctgcctccctgtctcaccgacccggtcctcggtctggcctgtccgtgtccagcctgagacccaacagaaaaatggctacaaacttcctagcacatgagaagatctggttcgacaagttcaaatatgacgacgcagaaaggagattctacgagcagatgaacgggcctgtggcaggtgcctcccgccaggagaacggcgccagcgtgatcctccgtgacattgcgagagccagagagaacatccagaaatccctggctggaagctcaggccccggggcctccagcggcaccagcggagaccacggtgagctcgtcgtccggattgccagtctggaagtggagaaccagagtctgcgtggcgtggtacaggagctgcagcaggccatctccaagctggaggcccggctgaacgtgctggagaagagctcgcctggccaccgggccacggccccacagacccagcacgtatctcccatgcgccaagtggagcccccagccaagaagccagccacaccagcagaggatgacgaggatgatgacattgacctgtttggcagtgacaatgaggaggaggacaaggaggcggcacagctgcgggaggagcggctacggcagtacgcggagaagaaggccaagaagcctgcactggtggccaagtcctccatcctgctggatgtcaagccttgggatgatgagacggacatggcccagctggaggcctgtgtgcgctctatccagctggacgggctggtctggggggcttccaagctggtgcccgtgggctacggtatccggaagctacagattcagtgtctggtggaggacgccaaggtggggacaaacttggtggaggaggagatccccaagtttgaggagcgcgtgcaaagtgtcgatatcccagctttcaacaaaatttgaagcctgagtgtgtgtacgagggggcgtgcgtgaggccctcccccgattaaataattggcccggcaaaaaaaaaaaaaaaaaaaaaaaaaaaaaaaaaaaaaaaaaaaaaaaaaaa

SEQ ID NO: 2595 - DNA, 2731 bp, Homo sapiens
tttaaccattctaactttgccttgggatattgaaaattctgaatcagtgaggtatctaaataatttatattttcaaaaaataatgtttattttataattctgagtgtaaaacactatcagaaaagtaatcctcatgctcactaaacaaacctactctaagacactcaacaaccagaacagttttattattgagttgtgtacaaaaatcttgactgtccagatgaaatagtttttcagcctgcagtgtgttagtgatatatctcaaggagatgaaccaataaagtacagactttgtggtctgaagctctgttgtgaaaaaataagctaaaccaattcacactgacagtataatttgattcaagtgcagctccagttcaataaaaactaatgtttttaaaattaactttgttttgtatttggttcaactccttgctagttctctctctatataatttataaaaactgcatgttgctaatctcatgatcctgtgcatgtggactactctgcctttaacttttttacaaaaacatgtttgttcatagattaaataaaagtatgttttcaacttaatgtctaatgttttctgacaattgtaagaataattttgaaatggaaatgctgctgtttagtttccacagtgcctacacaacctgataatccattttctcaccctgacaaactcaaaaggatgagcaagtctgttccagcatttctccaagatgagagtgatgacagagaaacagatacagcatcagaaagcagttaccagctcagcagacacaagaagagcccgagctctttaaccaatcttagcagctcctctggcatgacgtccttgtcttctgtgagtggcagtgtgatgagtgtttatagtggagactttggcaatctggaagttaaaggaaatattcagtttgcaattgaatatgtggagtcactgaaggagttgcatgtttttgtggcccagtgtaaggacttagcagcagcggatgtaaaaaaacagcgttcagacccatatgtaaaggcctatttgctaccagacaaaggcaaaatgggcaagaagaaaacactcgtagtgaagaaaaccttgaatcctgtgtataacgaaatactgcggtataaaattgaaaaacaaatcttaaagacacagaaattgaacctgtccatttggcatcgggatacatttaagcgcaatagtttcctaggggaggtggaacttgatttggaaacatgggactgggataacaaacagaataaacaattgagatggtaccctctgaagcggaagacagcaccagttgcccttgaagcagaaaacagaggtgaaatgaaactagctctccagtatgtcccagagccagtccctggtaaaaagcttcctacaactggagaagtgcacatctgggtgaaggaatgccttgatctaccactgctaaggggaagtcatctaaattcttttgttaaatgtaccatccttccagatacaagtaggaaaagtcgccagaagacaagagctgtagggaaaaccaccaaccctatcttcaaccacactatggtgtatgatgggttcaggcctgaagatctgatggaagcctgtgtagagcttactgtctgggaccattacaaattaaccaaccaatttttgggaggtcttcgtattggctttggaacaggtaaaagttatgggactgaagtggactggatggactctacttcagaggaagttgctctctgggagaagatggtaaactcccccaatacttggattgaagcaacactgcctctcagaatgcttttgattgccaagatttccaaatgagcccaaattccactggctcctccactgaaaactactaaaccggtggaatctgatcttgaaaatctgagtaggtggacaaatatcctcactttctatctattgcacctaaggaatactacacagcatgtaaaagtcaatctgcatgtgcttctttgattacaaggcccaagggatttaaatataacaaaatgtgtaatttgtgactctaatattaaataagatatttgaacaagctaggaaaattgaatttctgctgctgcttcaaagaaaaagctgccccagagcattaaacatggggtattgttaagaagcaaaatgttcttgtttgccatcatgtgtttcacaccacaattctgtgccacagttaagagggtctggtacccttgcaggacctttgtaggttgtgggaaaaagtcgcagaaagatactcaaagtggagcagggaatggagacagacatcagtgatgataaaaaaaaaaaaggaccttaagaaactatttactctgtaatctctaataaaatatggaattccatattagggcaatgagactgaaactactggtgtttttctgccttgagaaaacaaacagttaaaacaagcctcaaatgtattttagtgccacccactggccataggtacaattcagttgttggcttgttttgacttaattctaaaataggtctcaagcctgtatttttatgagtttatttttttaaaaccctgcatatatatgattgtttttcttataactttactatatgaaagcagcataagagtagtcacaaacatgttttgcaacaaagttttaattagaatgtaagttgctcagttatactgttcttcttatgtatgtaaaattttcgtattttgtaaaaacccttagaataaattatcatttgatttaaattgt

SEQ ID NO: 2596 - DNA, 3706 bp, Homo sapiens
caaaatattatccattgtaaactgagatttaattctcaaatgtattctacttgttctaaaacaatctgtccacaaatataagactataagtaataaattgttatttccgcacaatgggaatctctaatgtgaaaatgtattctatgaaaataatttttttaaataaaatgttgtataaaaaaaaaaaaaaaaagatgaactgtccctgcatcggcctaaaggtatcagtgctcaaaatcccactcctgctttccaactcaaaggcttgactcttgcagttcatctctcttctgtatcatcagatttttcctctctatcggattattgccctcctgcttctcctccatttctctgttcccctttatagcaaagtccttggcagagctgcccctgcatgctgtctccactttctcatctcctgctcttgaatcagtcaagccaggctgttgccttcttcctcctctacaaccatgcatgccaaggtctcctggccaaatccaatggctacttcccagccctcatccgacttgacctctcagcagcattcagcccacctggggccctctctttccttgccttccaggacctcatgctctcctgggcttcctcctgcctctccaagcacaattctgtctcctttgctggctcttacacatgtcccccctctaaaatgcagggtgttctaggactcagtcctcagacttcttcccatctctctttatcctcactcctgagtgatctccttgggtctcatggctttaaacaccatctgtattgtaacaactcccaaatttatatccctagccctaacctttccactaagcttcagacttgtacatctccattcagtgtctccactgggatgtttcatacacatctctaccccccctcccccaaccttaaccctaacgctaccacattcgacactgaactctgggttttccctcccagatctatcccaccccaacattccccatctcagtaaatggcaccagcagccgctgagttgtgccagatgagaaccttgaagtcatcttgaccctctcccaccccacgtgcagtctatcagcaaatcctgtcaattctgctattaaaatacagtcaggatccaaccacttcccatcactctcacagctattgtcctagtctgagtctggatgatggcaatcactgccgctctggtctccacctgcttcctctcttgccccttcagtcttttctgaacccagaagccagagtatcttaaaacataagtcagatcatggctctcctctgcccaacactccctagttctccctgtatttctcagagtaaaatccaaagtcctttgggacactgaggcacagtaaaggggcttcatgcttttttttgtaaacatgcatcatctcatgtgattaattcaattactccctcaaaaccctatgtggtagtactgctaccctcatattacagatgaagaaactaaagctctaagaggttaaattgcccagagtcacacagggatttatggcagagctgggatgcaaaccccagcctttgactccaagtccagtgcactttcttctaagccaggctggaactgtgggttctcgcttgggttctgccactatcttgctatgtgatcttgggcagtcccttcccctctccaggcatcagctttctcacctatgagatgggaaggttggctatgtcctcactcagggtcagggttacatcagaggatctgggagagccatttggattggccttaccttcacagctgccttcaaatttagactttcgacaggctctcccaatgagaggacatatgcagttactaacacgcactgactgaaagaagatgctggctgtacaaacttgctggacccactgctggtgaggctctgagaattaattacttttatataaccataattatatcatgaatagcacaatcctacaggattatactgtagtagttaaaggcattggtttgttgtgtttaaacatttgcacagaccacatttttgtaaactcatttggatatctatctatctatcaatcttttcttttcttttttctttattttaaatttgagatgaagtcttgctcttgtcccccaggctgcagtgcaatggcgcgatctcggttcactgcaacctccacctctcgggttcaagcgattctcttgcctcagcctcctgagtagctgggattacaggcgcctgccaccatgcccagctaaattttgtatttttagtagagatgaggttcccccatgttgaccaggctggtcttgaactcctgacctcaggtgatctgccctccttggcctcccaaagtgctgggattacaggtgtgagccactgtacccagcctgtctgtctgtctatctgtctgtctatctatctatctgtctatccacctacctatttatttagagatgaggtcttgctatgttgcccagctcggtccctaactcctgggctcaaacaatccttccaactcacacctcagcctcctgagtaactgagactacaggtgcatgccaccacaactggataatttagaaaaaattactttttagagatgaggatcttgctatgatgcccaggctggtctcaaactcctggcctcaagtgatcttccttcctcagcctcccaagtagctgggattacaggttgtctttatttttcaaaaccctggaaaccccaccaaatggagcttttggcccttttctcccaggtccctcctcccagcaccatgactcacgttgaagatattactgatgaccatcctcaggttgcctaaagctgtcacctccaccagcaccatcaccaccaactgcgccaagttgaccttccccaagacagcttccactgagatcagcaccgacaaagcactcatggtggccagccgaatactgggggagagagggagagccaggacgactgagaaggaaggatgcctctcactcattcattcattcattcattcattcattcattctttcaacaaacactgttgggcacctactttctgtgggaatagaagacaagatttctacccacctgggcgctgatgctgcagagtggagtgaccatctcttctcccgttaaggtggcctctgcaccctgagccatgtggtctggcagatgacttaaccactctgtgcctcagtgccttcatctatgaggcattgatctacacacactcatctgactgagggtgatcggggtgactgttccctcaggggatctgataactgggattctgcccagtcttcttttctgctgccatcattcggatgctcaacagagggcactcttcccccgcaggcctgcccacatccagtcaccccatccccatctggggccactgtcccttctctccgtctccgtggcagtggaaagaaactggatttggaatcaggacaagcccggcttccagtcccagccttgccactggagtggctatttcatctcactgagcctatttctccttctgcaaattaagaatgatgatcaaacgtatcccatgttggtgtcctggggatgtgaaggagttttcttcctatcggtgtgtctagcaccaagactggcacaaagaaccaacttctgaaaagacgctagccttattaacgctattatgattccttccttcctttgaccaatgagcatgctcaggagtagaaaattattttggtcttgaagatacttatgatcc

SEQ ID NO: 2597 - DNA, 772 bp, Homo sapiens
ggataacccgcggccgcgcctgcccgctcgcacccctctcccgcgcccggttctccctcgcagcacctcgaagtgcgcccctcgccctcctgctcgcgccccgccgccatggctgcctcccccgcgcggcctgctgtcctggccctgaccgggctggcgctgctcctgctcctgtgctggggcccaggtggcataagtggaaataaactcaagctgatgcttcaaaaacgagaagcacctgttccaactaagactaaagtggccgttgatgagaataaagccaaagaattccttggcagcctgaagcgccagaagcggcagctgtgggaccggactcggcccgaggtgcagcagtggtaccagcagtttctctacatgggctttgacgaagcgaaatttgaagatgacatcacctattggcttaacagagatcgaaatggacatgaatactatggcgattactaccaacgtcactatgatgaagactctgcaattggtccccggagcccctacggctttaggcatggagccagcgtcaactacgatgactactaaccatgacttgccacacgctgtacaagaagcaaatagcgattctcttcatgtatctcctaatgccttacactacttggtttctgatttgctctatttcagcagatctttctacctactttggtgatcaaaaaagaagagttaaaacaacacatgtaaatgccttttgatatttcatgggaatgtttaaaaatagaaataaagcattttgttaaaacga

SEQ ID NO: 2598 - DNA, 798 bp, Homo sapiens
attcggaacagagcaatctgagacaggtgcggcaagtctactgcgggctggtccgggctcctcaggttcagacccgaccgttatccagtcggttcgtggagaggagaggtgcactttacaggtccccgatgaaccaagagaaccctccaccatatccaggccctggtccaacggccccatacccaccttatccaccacaaccaatgggtccaggacctatggggggaccctacccacctcctcaagggtacccctaccaaggatacccacagtacggctggcagggtggacctcaggagcctcctaaaaccacagtgtatgtggtagaagaccaaagaagagatgagctaggaccatccacctgcctyacagcctgctggacggctctctgttgctgctgtctctgggacatgctcacctgaccagaccagcccagccgtcctgtcctgccagctctgctgccacctctgacaggtgtgcctgcccccatctcttctgattgctgttaacaaatgactagctttgcacagacacctctaccttcagcactatgggattctagattaatgggggttgctactgtttaattcagtgacttgatctttttaatgtccaaaatccatttcttattgatctttaaagatgtgctaaatgacttttttggccaaaggcttagttgtgaaaaatataatttttaaattatacattcaaggtagtggccaaatgtaacacatcaatcatggaatgatttctctgctaacagccgcctgtatgtttcaataaatttgtccaaagctc

SEQ ID NO: 2599 - DNA, 7522 bp, Homo sapiens
aaagattgctttcttctgggacgctgcttgaacgctaaccgcgttgattggaacagattttgtgtcttggctggctttgggtgaagaccggggagaaaaggttgcgctgcgattctcaagatctctggacctggattatcattgcaaatccattaaagaaggagaagcaagcggatttcagagaggttgttcttcagaaaaaaatggttatttctttgaactcatgcctgagctttatttgtttattgttatgccactggattgggacagcatcacctctgaatcttgaagaccctaatgtgtgtagccactgggaaagctactcagtgactgtgcaagagtcatacccacatccctttgatcaaatttactacacgagctgcactgacattctaaactggtttaaatgcacgcggcacagagtcagctatcggacagcctatcgacatggggagaagactatgtataggcgcaagtctcagtgttgtcctggattttatgaaagcggggaaatgtgtgtcccccactgtgctgataaatgtgtccatggtcgctgtattgctccaaacacctgtcagtgtgagcctggctggggagggaccaactgctccagtgcctgcgatggtgatcactggggtccccactgcaccagccggtgccagtgcaaaaatggggctctgtgcaaccccatcaccggggcttgccactgtgctgcgggcttccggggctggcgctgcgaggaccgctgtgagcagggcacctatggtaacgactgtcatcagagatgccagtgccagaatggagccacctgcgaccacgtcacgggggaatgccgctgcccaccaggatacaccggagccttctgtgaggatctttgtcctcctggtaaacatggtccacagtgtgagcagagatgcccttgtcaaaatggaggagtgtgtcatcacgtcactggagaatgctcttgcccttctggctggatgggcacagtgtgtggtcagccttgccccgagggtcgctttggaaagaactgttcccaagaatgccagtgccataatggagggacgtgtgatgctgccacaggccaatgtcattgcagtccaggatacacaggggaacggtgccaggatgagtgtcctgttgggacctatggcgttctctgtgctgagacctgccagtgtgtcaacggagggaagtgttaccacgtgagcggcgcatgcctctgtgaagcaggctttgctggcgagcgctgcgaagcacgcctgtgtcctgaggggctctacggcatcaaatgtgacaaacggtgtccctgccacttggaaaacactcatagctgtcaccccatgtctggagagtgtgcctgcaagccgggctggtcaggactctactgtaatgagacatgttctcctggattctacggggaagcttgccagcagatctgcagctgccaaaatggggcagactgtgacagtgtgactggaaagtgcacctgtgccccaggattcaaaggaattgactgctctaccccatgccctctgggaacctatgggataaactgttcctctcgctgtggctgtaaaaatgatgcagtctgctctcctgtggacgggtcttgtacttgcaaggcaggctggcacggggtggactgctccatcagatgtcccagtggcacatggggctttggctgtaacttaacatgccagtgcctcaacgggggagcctgcaacaccctggacgggacctgcacgtgtgcacctggatggcgcggggagaaatgcgaacttccctgccaggatggcacgtacgggctgaactgtgctgagcgctgcgactgcagccacgcagatggctgccaccctaccacgggccattgccgctgcctccccggatggtcaggtgtccactgtgacagcgtgtgtgctgagggacgctggggccccaactgctccctgccctgctactgtaaaaatggggcttcatgctcccctgatgatggcatctgcgagtgtgcaccaggcttccgaggcaccacttgtcagaggatctgctcccctggtttttatgggcatcgctgcagccagacatgcccacagtgcgttcacagcagcgggccctgccaccacatcaccggcctgtgtgactgcttgcctggcttcacaggcgccctctgcaatgaagtgtgtcccagtggcagatttgggaaaaactgtgcaggaatttgtacctgcaccaacaacggaacctgtaaccccattgacagatcttgtcagtgttaccccggttggattggcagtgactgctctcaaccatgtccacctgcccactggggcccaaactgcatccacacgtgcaactgccataatggagctttctgcagcgcctacgatggggaatgtaaatgcactcctggctggacagggctctactgcactcagagatgtcctctagggttttatggaaaagattgtgcactgatatgccaatgtcaaaacggagctgactgcgaccacatttctgggcagtgtacttgccgcactggattcatgggacggcactgtgagcagaagtgcccttcaggaacatatggctatggctgtcgccagatatgtgattgtctgaacaactccacctgcgaccacatcactgggacctgttactgcagccccggatggaagggagcgagatgtgatcaagctggtgttatcatagttggaaatctgaacagcttaagccgaaccagtactgctctccctgctgattcctaccagatcggggccattgcaggcatcatcattcttgtcctagttgttctcttcctactggcattgttcattatttatagacacaagcagaagggaaaggaatcaagcatgccagcagttacctacacccctgctatgagggtcgtcaatgcagattataccatttcaggaacccttcctcacagcaatggtggaaacgctaatagccactacttcaccaatcccagttaccacacgctcacccagtgtgccacatcccctcacgtcaacaacagggacaggatgactgtcacgaagtcaaaaaacaatcaactgtttgtgaatcttaaaaatgtgaaccctgggaagagaggccctgtgggggactgcactgggacattgccggctgactggaaacatggcggctacctcaacgagctcggtgcttttggacttgacagaagctatatgggaaaatccttaaaagacctgggaaagaattctgaatataattcaagtaactgctccctaagcagttctgagaacccatatgccactattaaagacccacctgtacttatcccgaaaagctcagagtgtggttatgtggagatgaaatcgccggcacgaagagattccccatatgcagagatcaataactcaacttcagccaacaggaatgtctatgaagttgaacctacagtgagtgttgtccaaggagtattcagcaataatgggcgtctctcccaggatccatatgacctcccaaagaacagtcacatcccttgtcattatgacctgctgccagtccgagacagttcatcctcccctaagcaagaggacagtggaggtagcagcagcaacagcagcagcagcagtgaatgacaccaaaggaccgcttggtagccactggaaccctttccagaactgctgtttggttcttctccatcctcaattttgccactttcatgtgaatgttagtcaattcggtgggcaatttttggacatgaaccagaaagctgaaagctgaggctgacacggactgtaggtgctttttgttcaggtggattcgaaggagttagagatgtgatttgccattgctgttagttttagaactatacccgtgaagcatgacttattgtaagatgttggctgaaagcatgaacttgcagaactccctcggagacgcaggttgcagtggacattgggattgttgcttgaaaaattaaaatttgaatattttctctctcatttgcatcatacagctctacctaggattgtacagtttaccataaaatttacttcatgaaagtgggaatcactgaacatgtagaagacaaggaacatattgttaactcctgattcttaactttattcaactggactcagaattgtagggataatatgaatgcaggaggaaacattctgtcaggcggtatgactggacagactttgaatatactctaaaagtggacagaaaatttacgaaaatcttagattttgtttagaatgagaaaatatacaattagaattattttagaaatagtaggaagtattgcagaagtcaatacacaaatgtgccaggcagaggtggttttctctgtttgactctcaaccaacttcagatctatgacattattctgatcactggctccatcatacatattcaccacttgagattcataacatatcaatagttatttcataaatatagaaatgaaataattttatttttgacagactggatggaatgagtgtgtaatgattgataaaggttgtaaattttaaatgcaagatgacgcttacgttctgtaaaccattagtaatacatgctgtaatatagaattagtggaacattttgattaatctttccctagaagtgactgaaatatttttgtgcatatttgagaaagggaactttccttttattaattgtcaatttagagaaactatgcttaagctggtcttttgcattgctaatgtgacatgtacccaacttttcattaatttgtatttccatttttaaattgcatattctatgttttgtagtgtttggattgttaatgaaaaaatattatatgttcgttattccttgtattattgccacttatcttttgcttgataaaaatgcgttgttcttttttcttttggagggacaagatgaaaatatataatttgaattgattaaaattggtcgttactaaaatagtatagtaaccacaagtgattggcttataaatgaagtagaaatgctttttaatattccaaaatagagttccttttgatctgttggtgctgagccttggttaaaccagggagaaggggagcagaaaggaaacgttgttactgatgagtaccacagactcatcttaaaaaaaactctcattatggtgatcatagaattgaccatccaaactgggacactcttgagagtaaatggagggcattattaataattatcttgtaatgaacttaaatctggactgttccaggcaaaccagacttatcttgcaatatgagaatgctgacacaatgcaggaaagccagtttcccttttgttgatctacttgaccaagcaaaggggctgaaaaactgaataaggaaacaactttataagagaaacagtggtcttcaatcttttaaagacatgaaatcctatatggcattctgtctcagtgagtcagttaacaaatacgtatgtgcaacccttctgctagtagtgcacataagtgattatccctgccaggtatcgagttggaatatccagttatttcatgtcacacatcggcacgtatgatggtggtttggtcagatggataatacagcagacacacttagaacactcactgcactggtggctgttcattttgaggaactccaaagtcaattcaaggaaataaggaatgacctggaacaggccttagaaacaattgatttattccaatagttaaccactggctggctcccaactctaggtgataggcatctaattgagacatgtgtgagtcaatagccatcggggtcctttttggtgagaagaaataagacattttctcccttttaaagatcatctcttcagagctgcatggtaaatttgaatttccccattgttctctagagataggtcaaaaaaacaactgtttcttttcttattccactattaataaattgaaagcttgctgtacaaaggcaacagcaacttaaaaaagaaaatctggacaatagatgtggactccaaggggccactgccatcccttcctgtgtgctctttttgacaagtaaatcactccagttagctgatgtcctgaaatgacatttgtacctgaggcaattcttattagagcttactcaggacttttcaaacatcaggacacacatagcaatttggatgttgtaaaactacgtgttacatttggagaggtcttgttgagaaggcaaaattttctaaatattttgatatcaatttgggtaaagaaaggaatacttttgttagaatgagaattaaagagaaaacaaaagaatcttggcaaaattttccctctgaaattacaaactttaggaacttttccagatgtatcgaatttaatttgacattgatgtcactcttcataccaagtgaatctattctcatgaactttgaacccatgttaattttggaccctataactaatttcctttctgtatcccatggtggtcaaagcagtaaaggagtttagagatacttagcaaatgccattcatatagtattgttagccaaactattattccttccttagaagttgatgtatcagaaaatttataagttatttgtatttatatataagtacatcagaacttgcccacatgataactcatgtttgctttaataaggaaaatatgttatttgaggttaattatatgatagtgaggaacattttacaattatttacagtgtttgacattaattgctgtcctatgatacagtagtaatgttaacagagagtttaatatgtttagcattatctttatggaatttatattcaccaatttcaggaaaaccaaccatagaactttataataggacagttataacctgactgaaccaaatccatcagcataatgactgtgtgttctgagaaatgcaaacaactttatgaaagtgtggtcatcttgacccccaaagagccacagtagctgtcaattattgagatttttaaatggtaaatattgcaaaagttaaacaagggtaccacaatatcatttataattgatgtcaatattagtagtccactttatgcttaaaataaaatcataaaaaatcaagttttaaggttatattttttaaaataatgaattttctatctctaggcaacatgtctttattattcaagctgaatgtttaagagagattttggtcttaaaggcttcatcatgaaagtgtacatgcatatgcaagtgtgaattacgtggtatggatggttgcttgtttattaactaaagatgtacagcaaactgcccgtttagagtcctgttaatattgatgtcctaacactgggtctgcttatgctagttcagtatttggtctaggcttcattttgatatgactgaattgcaatctatatttttaaaaagaaaaatcaaaatacattagggtttacttggttgtggcaaacaaacaaaaaatgctttcagtgttgaaatatctctattttccaaagatgataaactttcatcgttcttagcctacattgtcatttatatcaccaaatgagtttatagattaatgcaataaactttctaat

SEQ ID NO: 2600 - DNA, 1843 bp, Homo sapiens
gggcacgagggcagagccagttcctagcgcagagccgcgcccgccatgagggagatcgtgcacatccaggcgggccagtgcgggaaccagatcggcaccaagttttgggaagtgatcagcgatgagcacggcatcgacccggccggaggctacgtgggagactcggcgctgcagctggagagaatcaacgtctactacaatgagtcatcgtctcagaaatatgtgcccagggccgccctggtggacttagagccaggcaccatggacagcgtgcggtctgggccttttgggcagcttttccggcctgacaacttcatctttggccagacgggtgcagggaacaactgggcgaaagggcactacacggagggcgcggagctggtggacgcagtgctggacgtggtgcggaaggagtgcgagcactgcgactgcctgcagggcttccagctcacgcactcgctgggcggcggcacgggctcaggcatgggcacgctgctcatcagcaagatccgtgaggagttcccggaccgcatcatgaacaccttcagcgtcatgccctcgcccaaggtgtcggacacggtggtggagccctacaatgccacactgtcggtgcaccagctggtggagaatacagacgagacctactgcatcgacaacgaggcgctctatgacatctgcttccgcactctgaagctgacaacgcccacctacggggacctcaaccacctggtgtccgccaccatgagtggggtcaccacctcgctgcgcttcccgggccagctcaatgctgacctgcgcaagctggcggtgaacatggtgcccttcccgcgcctgcacttcttcatgcctggcttcgcgccgctcaccagccgcggcagccagcagtaccgggccctgaccgtgcccgagctcacccagcagatgttcgacgccaggaacatgatggccgcctgcgatccgcgccatggccgctacctgaccgtggccaccgtgttccgcgggcccatgtccatgaaggaggtggacgagcagatgctggccatccagagtaagaacagcagctacttcgtggagtggattcccaacaacgtgaaggtggccgtgtgcgacatcccgccccgcggcctgaagatggcctccaccttcatcggcaacagcacggccatccaggagctgttcaagcgcatctccgagcagttctcagccatgttccggcgcaaggccttcctgcactggttcacgggtgagggcatggatgaaatggagttcaccgaggcggagagcaacatgaacgacctggtatccgagtaccagcagtaccaggatgccaccgccaatgacggggaggaagcttttgaggatgaggaagaggagatcgatggatagtcggaatagagccgccccaactcagatcctacaacacgcaagttccttcttgaaccctggtgcctcctaccctatggccctgaatggtgcactggtttaattgtgttggtgtcggcccctcacaaatgcagccaagtcatgtaattagtcatctggaacaaagactaaaaacagcagagaattgcgggttctacccagtcagaagatcacaccatggagactttctactagaggacttgaaagagaactgaggggccacaaaataaacttcaccttccattaagtgttcaagcatgtctgcaaattaggagggagttagaaacagtctttttcatcctttgtgatgaagcctgaaattgtgccgtgttgccttatatgaatatgcagtatgggactttgaaataatgattcataataaaatactaaacgtgtgtcttcaaaaaaaaaaaaaaaaaaa

SEQ ID NO: 2601 - DNA, 569 bp, Homo sapiens
tcgatgcagctgtagtgacaatctcagagcagcttcaacaccacagccatttccagcatgaagatcactgggggtctccttctgctctgtacagtggtctatttctgtagcagctcagaagctgctagtctgtctccaaaaaaagtggactgcagcatttacaagaagtatccagtggtggccatcccctgccccatcacatacctaccagtttgtggttctgactacatcacctatgggaatgaatgtcacttgtgtaccgagagcttgaaaagtaatggaagagttcagtttcttcacgatggaagttgctaaattctccatggacatagagagaaaggaacgatattctcatcatcatcatcttcatcatcccaggctctgactgagtttctttcagttttactgatgttctgggtgggggacagagccagattcagagtaatcttgactgaatggagaaagtttctgtgctacccctacaaacccatgcctcactgacagaccagcattttttttttaacacgtcaataaaaaaataatctcccagaaaaaaaaaaaaaaaaaaa

SEQ ID NO: 2602 - DNA, 795 bp, Homo sapiens
  misc_feature (505)..(505): n is a, c, g, or t
  misc_feature (551)..(551): n is a, c, g, or t
  misc_feature (553)..(553): n is a, c, g, or t
  misc_feature (751)..(751): n is a, c, g, or t
cacacaacatggccttcagcaatgctgattcaggctttgtggatgcccagctggtgctgacccacaaggacctcctgtctggcagtatcatggccacggatgagcccatgcagcccatcttctgcttcatccaggaggggcctcaggaagaggcgagtcctgttcacgcactcaggctgaccatggctggatcctgctgcatgtgtccgacaggcagcaccaggccatcttggtgctggaggtgcaggccttggagccttacctctatgtggccaatggctccggcctcaaggtccctcaaggagaccagggtaccatcaatatggccgagctccacctgggcaccaacctcgacatccgcagtggggatgaggtccactaccacatcacagacagcccttgctggggacagttgctccaggccactcagccagcacagccttcgcccagaaggacctgctggttggggccgttctctttggccacaatggcagcctcagctccngcaacaccctggccttctcaatggatgtggggccttctcaatggangnggggccttctcaatggatgtggggccagtgcacacagacagtgcacacggtgcactctacaagtgaccattgccctagagggcccactagccccactgaagctggcctggcacaagaagatctacatcttcctgggagaggcagctgagatcagaagggaccagctggagaccacggagttcatcatctcggagccgntggccaatctgtactcatgtggggaccagaacacactgatggag

SEQ ID NO: 2603 - DNA, 1250 bp, Homo sapiens
ccacgttgtcttctttccttcaccaccacccaggagctcagagatctaagctgctttccatcttttctcccagccccaggacactgactctgtacaggatggggccgtcctcttgcctccttctcatcctaatcccccttctccagctgatcaacccggggagtactcagtgttccttagactccgttatggataagaagatcaaggatgttctcaacagtctagagtacagtccctctcctataagcaagaagctctcgtgtgctagtgtcaaaagccaaggcagaccgtcctcctgccctgctgggatggctgtcactggctgtgcttgtggctatggctgtggttcgtgggatgttcagctggaaaccacctgccactgccagtgcagtgtggtggactggaccactgcccgctgctgccacctgacctgacagggaggaggctgagaactcagttttgtgaccatgacagtaatgaaaccagggtcccaaccaagaaatctaactcaaacgtcccacttcatttgttccattcctgattcttgggtaataaagacaaactttgtacctctctgtgcttatgtcatctctgttattgtccccagcttggggctcccctatccagaaaatgttgtcagtgtcccagtggtgacatctcagtttgggaagtgggatgggaagttaggaaagatatgggaagaatgggaaaaacaaactgacactccaaacccccacttccctcatttttatttatttatttatttatttttttcttttttttcatttttttttttttttattatactctaaagtttagggtacatgggcaacattgtgcaggttagtaacatatgtatacatgtgccatgctggtgcgctgcacccactaacgtggcatctagcattaggtatatctcccaatgctatccctcccccatcccccgaccccaccacaagtccccaagagtgtgatattccccttccctgtgtccacgtgatctcattgttcaattcccacctatgagtgagaatatgcggtgtttggttttttgttcttgcgatagtttactgagaatgatggtttccaatttcatccatgtccctacaaaggacatgaactgatcatttttatggctgcatagtattccatggtgtatatgtgccacattttcttaatccagtctatcattgttggacatttgggttggttccaagtctttgctattgtgaatagtgccgcaataaaca

SEQ ID NO: 2604 - DNA, 3825 bp, Homo sapiens
atgggtcatcttactctggaagactatcagatctggagtgtgaaaaatgttcttgccaatgagtttttgaacctccttttccaggtgtgtcacatagttctggggttaagaccagctactccggaagaagaaggacaaattattagaggatggttagaacgagagagcaggtatggtctgcaagcaggacacaactggtttatcatctccatgcagtggtggcaacagtggaaagaatatgtcaaatacgatgccaaccctgtggtaattgagccatcatctgttttgaatggaggaaaatactcatttggaactgcagcccatcctatggagcaggtcgaagatagaattggaagcagcctcagttacgtgaatactacagaagagaaattttcagacaacatttctactgcatctgaagcctcagaaactgctggcagcggctttctgtattctgccacaccaggggcagatgtttgctttgctcgacaacataacacttctgacaataacaaccagtgtttgctgggagccaatgggaatattttgttgcaccttaaccctcagaaaccaggggctattgataatcagccattagtaactcaagaaccagtaaaggctacatcattaacactagaaggaggacgattaaaacgaactccacagctgattcatggaagagactatgaaatggtcccagaacctgtatggagagcactttatcactggtatggagcaaacctggccttacctagaccagttatcaagaacagcaagacagacatcccagagctggaattatttccccgctatcttctcttcctgagacagcagcctgccactcggacacagcagtctaacatctgggtgaatatgggaaatgtaccttctccgaatgcacctttaaagcgggtattagcctatacaggctgttttagtcgaatgcagaccatcaaggaaattcacgaatatctatctcaaaggctgcgcattaaagaggaagatatgcgcctgtggctatacaacagtgagaactaccttactcttctggatgatgaggatcataaattggaatatttgaaaatccaggatgaacaacacctggtaattgaagttcgcaacaaagatatgagttggcctgaggagatgtcttttatagcaaatagtagtaaaatagatagacacaaggttcccacagaaaagggagccacaggtctaagcaatctgggaaacacatgcttcatgaactcaagcatccagtgtgttagtaacacacagccactgacacagtattttatctcagggagacatctttatgaactcaacaggacaaatcccattggtatgaaggggcatatggctaaatgctatggtgatttagtgcaggaactttggagtggaactcagaagaatgttgccccattaaagcttcggtggaccatagcaaaatatgctcccaggtttaatgggtttcagcaacaggactcccaagaacttctggcttttctcttggatggtcttcatgaagatcttaatcgagtccatgaaaagccatatgtggaactgaaggacagtgatgggcgaccagactgggaagtagctgcagaggcctgggacaaccatctaagaagaaatagatcaattgttgtggatttgttccgtgggcagctaagatctcaagtaaaatgcaagacatgtgggcatataagtgtccgatttgaccctttcaattttttgtctttgccactaccaatggacagttatatgcacttagaaataacagtgattaagttagatggtactacccctgtacggtatggactaagactgaatatggatgaaaagtacacaggtttaaaaaaacagctgagtgatctctgtggacttaattcagaacaaatccttctagcagaagtacatggttccaacataaagaactttcctcaggacaaccaaaaagtacgactctcagtgagtggatttttgtgtgcatttgaaattcctgtccctgtgtctccaatttcagcttctagtccaacacagacagatttctcctcttcgccatctacaaatgaaatgttcaccctaactaccaatggggacctaccccgaccaatattcatccccaatggaatgccaaacactgttgtgccatgtggaactgagaagaacttcacaaatggaatggttaatggtcacatgccatctcttcctgacagcccctttacaggttacatcattgcagtccaccgaaaaatgatgaggacagaactgtatttcctgtcatctcagaagaatcgccccagcctctttggaatgccattgattgttccatgtactgtgcatacccggaagaaagacctatatgatgcggtttggattcaagtatcccggttagcgagcccactcccacctcaggaagctagtaatcatgcccaggattgtgacgacagtatgggctatcaatatccattcactctacgagttgtgcagaaagatgggaactccagtgcttggtgcccatggtatagattttgcagaggctgtaaaattgattgtggggaagacagagctttcattggaaatgcctatatcgctgtggattgggatcccacagcccttcaccttcgctatcaaacatcccaggaaagggttgtagatgagcatgagagtgtggagcagagtcggcgagcgcaagccgagcccatcaacctggacagctgtctccgtgctttcaccagtgaggaagagctaggggaaaatgagatgtactactgttccaagtgtaagacccactgcttagcaacaaagaagctggatctctggaggcttccacccatcctgattattcaccttaagcgatttcaatttgtaaatggtcggtggataaaatcacagaaaattgtcaaatttcctcgggaaagttttgatccaagtgcttttttggtaccaagagacccggctctctgccagcataaaccactcacaccccagggggatgagctctctgagcccaggattctggcaagggaggtgaagaaagtggatgcgcagagttcggctggggaagaggacgtgctcctgagcaaaagcccatcctcactcagcgctaacatcatcagcagcccgaaaggttctccttcttcatcaagaaaaagtggaaccagctgtccctccagcaaaaacagcagccctaatagcagcccacggactttggggaggagcaaagggaggctccggctgccccagattggcagcaaaaataaactgtcaagtagtaaagagaacttggatgccagcaaagaaaatggggctgggcagatatgtgagctggctgacgccttgagtcgagggcatgtgctggggggcagccaaccagagttggtcactcctcaggaccatgaggtagctttggccaatggattcctttatgagcatgaagcatgtggcaatggctacagcaatggtcagcttggaaaccacagtgaagaagacagcactgatgaccaaagagaagatactcgtattaagcctatttataatctatatgcaatttcgtgccattcaggaattctgggtgggggccattacgtcacttatgccaaaaacccaaactgcaagtggtactgttacaatgacagcagctgtaaggaacttcacccggatgaaattgacaccgactctgcctacattcttttctatgagcagcaggggatagactatgcacaatttctgccaaagactgatggcaaaaagatggcagacacaagcagtatggatgaagactttgagtctgattacaaaaagtactgtgtgttacagtaa

SEQ ID NO: 2605 - DNA, 1257 bp, Homo sapiens
ggcacgaggccttagcgctgacccccacgcaacccagcgaaactccgcggagcgcgcgcggcacgatggacggtcgggtgcagctgatgaaggccctcctggccgggcccctccggcccgcggcgcgtcgctggaggaacccgattccctttcccgagacgtttgacggagataccgaccgactcccggagttcatcgtgcagacgtgctcctacatgttcgtggacgagaacacgttctccaacgacgccctgaaggtgacgttcctcatcacccgcctcacggggccagccctgcagtgggtgatcccctacatcaggaaggagagccccctgctcaatgattaccggggcttcctggccgagatgaagcgggtctttggatgggaggaggacgaggacttctaggccgggagacccttgggcctgggggcgggtgctctgggaagagttcgctgtgccagtggccaccgctagggtctccacaggcgccctccctccgcgcctccctccccctcgagccgccgcgatgtcccctgcgctcctgtcccctcccgcgtagtgcttgcctttgttccaggaatagcgctccaggctcctgctgcagctcctgggccgcactctagagcgcgctgcctccgccctcttttgccagcccagcccctccatgcacatttggacgctgtcctgcacttcaggtgcaagctgggctcctgttacatactggacagaccacccacagccgctgctgccaacccacctccactcctccagactgccagccaactacatcattctgcccacagacctacgctaccactgccatcgccatccaccgcatctcaccaacagactgtggctcctagtgatgtggactcacctcggaggtatccgagctggacacagcccctggacagtgatccagacagctggccgtcccccaaggagcctgtcaccttcagcgagacccatttcctccccatccccagagacctcttgtgttcctgccacatagctgccagggcttaagtgtgcctggcaaccaaatcgaatctctcattttctcctgtggaccagttagttttgcctagaatcctgttttcttctgaatttgcagctgtctctctgatgggtgccttttgttcaacacagtaagccctgctcccttccctgctctaatacactacctgtacaaaggttttttccttatttttaataaatgtcagacactattaaatagaaaaaaaaaaaaaaaaaa

SEQ ID NO: 2606 - DNA, 967 bp, Homo sapiens
ggcacgaggcttctacggatatctgtggaccttatggaagcaaagactcttggaactgtaacgcccagaaaacctgtcttatctgtcagtgcaagaaaaattaaggacaatgcggctgattggcacaatttaatcctgaagtgggaaaccctcaatgatgcaggttttaccactgcaaataatattgccaacttgaaaatcagtttattgaataaagacaagatagaactagacagcagcagcccagcctcgaaggaaaatgaagaaaaggtgtgtctggaatataacgaggaactggagaagctgtgtgaggaactgcaggccaccttggatgggttgaccaaaatacaggtgaaaatggaaaagctgtcttcaactaccaagggaatttgtgaactagaaaactaccattatggggaggagagtaaacgaccccctctgttccacacgtggcctacaacccatttctatgaggtttcgcataagctcttggagatgtacaggaaggagctgctcctgaagcgcacggtggccaaggagcttgcccacaccggggatcccgacctcaccctgagctacctgtccatgtggctgcaccagccctatgtggagagcgacagtaggctgcatctggagagcatgctgctggagacaggccaccgagctctctgacgtcctgagacggctgcggacactggctccttccacgtctcaccaggcagacagtctgcctaggacccagtgccgcaggcctggatcagaccccaggatcagaccttcttggggtcttctggccagagcttgtcaccagccccatggcctctccaggcgtgctcatgcccacaacccgcggccagccccacgtggtgccgctcagccttctctgcccctcctgggaatctgtcattcgtgggtgcttcagagtaaaatcaatgagtttctgagcagaaaaaaaaaaaaaaaaaaa

SEQ ID NO: 2607 - DNA, 1004 bp, Homo sapiens
ccggccccttccctctcggatgggggccctgggggtgacgtacacaccccatccttcccgcaccgcctctgcccgccgcccgtcgcccgccatagttgttgacgtagctttagtcgatcgcgaagatggctttatggaccctaggttctcctgccggtggtggcgatggcttctcgggggtgttgggcggtggccgctgtggtcagggaggcagttgcgagtcgctggggccgccgcctgcgtcgtcgctgctgtgtagcaaacctgcctctgggcccatggtgtgtcttgagggctgtgagagaggcagtgcctgagctgggtcagctgctgtggatcgctcccgcctcctggctggaggcaccaaagaggaggagaagggggaggaggacgtctctgccatcgcccttaagtaaaggaggggtgggggcgatagaaggatggcagggcaacttgcctgtcctaagtctagccgctcgtggcaagtgttgactgcgtgtaggagactcccgtcctatctcccagtaccaagtctcggggaaaaggagtgcgacgagggtggagaagaccaagtttcgcttctcggccccaggctgttgcgcagtttccctggaatctttttgatcgactgctacgttgaccatgtccttcccagtgtccttagcaggagtgatggccagagagagaacttttgcacatgccatgttttcgtggcaaaaattttagtttcaagtaccttatgagggcggttacctagttttgaattttgtcacttgttgagggtgtacaaaatcctatctagagtcatactcgttggatgtattttcttttccgaaatgtacccataggacacataaccttattcctggtctttaatatttctcggttttataccaagcagcagtgttcggaagaccatgttagtgctacattgtgcacagtgagaaatgaacaagttttttaattaaagacagcactgtaattttaaaaaaaaaaaaaaaaaa

SEQ ID NO: 2608 - DNA, 1473 bp, Homo sapiens
ggcacgagggctggacacgcagcggctcgcatcgcagagcgcagcgccggcgcggggccgcgagaacgcagcgcaggggagcagcccgaggcggacaccgcgagccgcccggcactcccgcagtccagccggctcctctagcccggccacggctccgctgcgggccacccaggattactcgcgtctggctccaggcgccgagaaggcgcgctgggcgcccgtggccgccgcgccagctcctcctcctcccgctgctcctgctcccggggcgagcgcgcagccccgagcccgccccgcgcctcccggagccctcccccccgctgctcccatgcgcgcgggtgggtcatgagcacagcgccctcgctttctgccctaagaagcagtaagcacagcggcggcggcggcggcggaggcggaggcggcggtgcagaccctgcctggaccagcgcgctctctggaaatagctccggccccggcccaggctcgtccccggccggcagcaccaagccttttgtgcacgccgtgcccccctctgaccccctgcgccaggccaaccgcctgccaatcaaggtgctgaagatgctgacggcacgaactggccacattttgcaccccgagtacctgcagcccctgccttccacgccggtcagccccatcgagctcgatgccaagaagagcccgctggcgctgttggcgcaaacatgttcgcagatcgggaagcccgacccctcgccctccctggccggccaccccctctacccctacggctttatgctccctaacgacccactcccccacatctgcaactgggtgtcggccaacgggccgtgcgacaagcgcttcgccacgtccgaagagctgctgagccacttgcggacccatacggcatttcccgggacagacaaactgctgtcgggctaccccagctcgtcgtctctggccagcgctgccgcggccgccatggcttgccacatgcacatccccacctcgggcgcaccgggcagccctgggacgctggcgctgcgcagcccccaccacgcgctgggactcagcagccgctaccacccctactccaagagcccgcttcccacgcctggcgcccccgtgccggtgcccgccgccaccggaccgtactactccccctacgccctctacggacagagactgaccaccgcctcggcgctggggtatcagtgagggcggccgggagggcgagcgagggagaggagggagagggggaggggaggagtccagggagaggcgggatcacggcccaggctgctgacacccgcgcgtggggaggactcgggccacgaaaggaaagaaatgtataccgtatctatctacccgacagcagcgaccgagacccggtgggacactccccttctccccactttcacctccccacccaaactttataaaagttgaaaaaatatcatttgactttttatagaaaaaaaaaaaaaaaaaaaa

SEQ ID NO: 2609 - DNA, 1553 bp, Homo sapiens
gtccatggggaagctgccattttcttgaaaaagccagaattgcacagaaaggaggtgctgaagcaatgttagttgtcaataacagtgtcctatttcctccctcaggtgacagatctgaatttcctgatgtgaaaatactgattgcatttataagctacaaagactttagagatatgaaccagactctaggagataacattactgtgaaaatgtattctccatcgtggcctaactttgattatactatggtggttatttttgtaattgcggtgttcactgtggcattaggtggatactggagtggactagttgaattggaaaacttgaaagcagtgacaactgaagatagagaaatgaggaaaaagaaggaagaatatttaacttttagtcctcttacagttgtaatatttgtggtcatctgctgtgttatgatggtcttactttatttcttctacaaatggttggtttatgttatgatagcaattttctgcatagcatcagcaatgagtctgtacaactgtcttgctgcactaattcataagataccatatggacaatgcacgattgcatgtcgtggcaaaaacatggaagtgagacttatttttctctccggactgtgcatagcagtagctgttgtttgggctgtgtttcgaaatgaagacaggtgggcttggattttacaggatatcttggggattgctttctgtctgaatttaattaaaacactgaagttgcccaacttcaagtcatgtgtgatacttctaggccttctcctcctctatgatgtattttttgttttcataacaccattcatcacaaagaatggtgagagtatcatggttgaactcgcagctggaccttttggaaataatgaaaagttgccagtagtcatcagagtaccaaaactgatctatttctcagtaatgagtgtgtgcctcatgcctgtttcaatattgggttttggagacattattgtaccaggcctgctgattgcatactgtagaagatttgatgttcagactggttcttcttacatatactatgtttcgtctacagttgcctatgctattggcatgatacttacatttgttgttctggtgctgatgaaaaaggggcaacctgctctcctctatttagtaccttgcacacttattactgcctcagttgttgcctggagacgtaaggaaatgaaaaagttctggaaaggtaacagctatcagatgatggaccatttggattgtgcaacaaatgaagaaaaccctgagatatctggtgaacagattgtccagcaataatattatgtggaactgctataatgtgtcattgattttctacaaatagacttcgactttttaaattgacttttgaattgacaatctgaaagagtcttcaatgatatgcttgcaaaaatatatttttatgagctggtactgacagttacatcataaataactaaaacgctttgcttttaatgttaaagttgtgccttcacattaaataaaacatatggtctgtgtagtttccgagatgtactatatacagtatatttttct

SEQ ID NO: 2610 - DNA, 2517 bp, Homo sapiens
ttctacagggatctggacaactctcctctgtccccaccttcaccaaggaccaaaagcagaacgcatactcgggcactcaagaagttaagtgaggtgaacaagcgcctccaggatctccgttcctgtctgagccccaagccacctcagggtcaagagcaacagggccaagaggatgaagtggtcttggtggaagggcccaccctcccagagaccccccgactcttcccactcaaaatccgttgccgggctgacctggtcagattgcccctcaggatgtcggagcccctgcagagtgtggtggaccacatggccacccaccttggggtgtccccaagcaggatccttttgctttttggagagacagagctatcacctactgccactcccaggaccctaaagctcggagtggctgacatcattgactgtgtggtactaacaagttctccagaggccacagagacgtcccaacagctccagctccgggtgcagggaaaggagaaacaccagacactggaagtctcactgtctcgagattcccctctaaagacccttatgtcccactatgaggaggccatgggactgtcgggacggaagctctccttcttctttgatgggacaaagctttcaggcagggagctgccagctgacctgggcatggaatctggggacctcattgaggtctggggctgacaccccactccctgtttgacggcccagcctggacttggggagaatgactttcccttttttgccccataagggctagcataagctgaggtagaacttatctttaagctgcagcaaaatcaaggagtgacttttgtcccctctcctgttgaccctggtttagagccgttaaccacttggtgagttatgtgggtgttgttgccctgggtggcctgtggctccgtccacaagtcatgctgagttttgcagcctctgtgacttggagatgtcccttcacccctcccctttcaccaccatcctcttttcctcatggaaatgtctgctttatgaaactatgcacatattgaaagtgagttgaaacaaatgagggttgggtaggagcttccaggcctgggatttacaccacgcctagcccagcagaggccttagtcccatttggggcttgggagtgacatttgcttgaggcttatacactggtgtggttgcctggcttgcaggaaatgaccaagctcacacatgctggctgaagcgtaagcagacaactgaggtactcttttgaaggatgaaggtggtggattctcagccctgggggtcttcctcacctgaggacccttcagagccaccctttctagtttgcatttcctggtgcacacatttaaggcataacagcacattcatccctttggtttgggatctcaggaatacagtcccatgcaaagattctctggttttatggcttttttccctttctttacaccatcctctcccataagcacccatgtctttgaatatgaatgtatttgtaaaataccacgtttcatgtgtgaatatgtgcttttactgtacatagtgctattgtgcaataggtcttatgctgttttcactcaatgtgtgctaagatctagccccattgactcttctagaaatgcagtattgctttgacctgccatgtggcactccacaatgtcaattgcagtttacacacattgcctaaagtgggggacacctgggtgcccctgaccccttggcaccggatacaggccacgataaacatcctttcgtgtgttcccttctgtgcttgtgtggcatgtgtacccaggatgggcctataggtcacagaggtcagtttctctttggttttccagattttctttagaacggtgactgaccctcctacttgaggccgcccttttctccttatccttgccagcacttgtattgccagactacctaatttttgccagtctcatgggtagatagtggtgcagtgctttaacatacattcatctgatcagcattaatttggggaattttttcacttagcctttctggtttcccttcctgtgcattgcccattttctcatggagtttcttatcttttttggtttattctcaggagttgcttgtacattcttgggcaattgcagataattccaagaatgcatatttgggctgggtatggaggttcactggtaatcccagcactttgggaggcccaggcagaaggatcgctgcagcccaggagttcgagactagcctgggcaacatagcgagacctcgtctctacaaaaaaaaattaaaaagggggctttgggaggccaaggcgggcagatcatgagggcaggagattgagaccctcctggccaacatggtgaaaccccgtctctactaaaatacaaaaaattagctgggcatggtggcgcacacctgtagtcccagctactctggaggctgaggcaggggaatcgcttaaacccaggaggcggagattgcagtgagccaaggttccaccactgcactccagcctggcgacagagcaaggctccactc

SEQ ID NO: 2611 - DNA, 1786 bp, Homo sapiens
gtacgccgattccatatgggcgccggcgcggagcgccgcggggcagcgcggggtcgccatggctgagctgcagcagctccgggtgcaggaggcgatggagtccatggtgaagagtctggaaagagagaacatccggaagatgcagggtctcatgttccggtgcagcgccagctgttgtgaggacagccaggcctccatgaagcaggtgcaccagtgcatcgagcgctgccatgtgcctctggctcaagcccaggctttggtcaccagtgagctggagaagttccaggaccgcctggcccggtgcaccatgcattgcaatgacaaagccaaagattcaatagatgctgggagtaaggagcttcaggtgaagcagcagctggacagttgtgtgaccaagtgtgtggatgaccacatgcacctcatcccaactatgaccaagaagatgaaggaggctctcttatcaattggaaaataaaagtatttgccagtggccatcaggctgagggcaagaatatattttttataaggaattgggaattttagtcttttaagcaaagtttacgaatgaagaaatgaaggatggccacaagcgtaaggcatatgtcacttgcctctggacactggttattttatgtttcagtccctaaaaaatgaaatggaaaaaagtggtgctaaatcgagtcagagatattacaggagagttttagagcttattatttcctgtggccagtgcttgtcctggcagtaaggctctcccctgtaacaagccagagccctccaaggtaccagactcttcttactacacaggtactaacaggctggcaggttagagttggtggagtctgaggagagatattttctctttgttgccaacatcctgtttaccaaaagtgtcaccccaccatcttccataagctgtgaaacaaaatcaatgaggtcactaacttagaagggaaagaaagttttctgggtctttgttttcttgatttggggtaatttatacaagggcatacaagttgattttaagatgtggaactgggaggtagactagtttggataagaactttgaaatgttccttgtggatccccatttctggtcatcaagatgtggatgtacatttcttaaaattattacatgctgcatctttcagcctggagactgtgcagaaacatgagaggtgatgacacactaattatgggaagcagaattactggctgatggcccctgaggctgtgtgtaacaaaatgacaggacaatcttgcagtaacactttccccttgaagagaagggggttttgattgtgatatatactagtatctaggaatgaacagtaaaagaggagcagttggctacttgattacaacagagtaaatgaagtactggatttgggaaaacctggttttattagaacatatggaatgaaagcctacacctagcattgcctacttagccccctgaattaacagagcccaattgagacaaacccctggcaacaggaaattcaagggagaaaaagtaagcaacttgggctaggatgagctgactcccttagagcaaaggagagacagcccccattaccaaataccatttttgcctggggcttgtgcagctggcagtgttcctgccccagcatggcaccttattgttttgatagcaacttcgttgaattttcaccaacttattacttgaaattataatatagcctgtccgtttgctgtttccaggctgtgatatattttcctagtggtttgactttaaaaataaataaggtttaattttctcccc

SEQ ID NO: 2612 - DNA, 2697 bp, Homo sapiens
agtagtggtggtacgggtccgactgaggggtactcgccaccggctgcgtccacccgagcggctgcgagagccaaggcccgagggggtgggcgtggcggccgccgaaacacaaccccctctgttccctctcttcgcggagcggcgccgcgtagcttccatccgccagctgccatgagcgagcgcctccgtcccaggaaaaggagaaggaatggcaacgaagaagacaaccatcttcccccccagaccaaaagaagtagcagaaaccctgtctttcaggattcctgggacacagagtcttcaggcagtgacagtggtgggagcagcagcagcagcagcagcagcatcaatagcccggacagggccagcgggccggaaggcagcttgagccagaccatggccggatccagccctaacacgcctcagcccgtgcccgagcagtccgcgctgtgccaaggcctctacttccacatcaaccagaccctgagggaggcccacttccacagcctacagcaccgagggcggcctctgacatgatgtgccggcagtttcttgccttctgtgaagggacagcgctgtgcagatttgatatttcaacttacaacttgttttaaaagaaaaattgcacacgaaaaatgcctgttggcttttcagtctatatttgaaataacaggttaacaggcagttgtttacttgtggttttgctgcactattgcaatttcaaaggggctttgaagcaattttttataggattcttttgagggagggtatcaaatctatgtcaaggtagtggtttgaggaaaactcattctgtgtgttgaatccatagtatgtcccattcagactgatttccaaatctgtcaactagaaactctactttatgtaaagggccttttaaaaatgcgggatcttcaattttttttattcaataaactagtaaagagtatctagtttccatgaaaaaacataagtttttttccaaaatataggaagcttgattcagtcttgcactgaaattaactgccatactacctctcagtatgtagatgttctattgaaagtactctctcctgtgtaacaggagaacaatcagatccaattcagactgtcagtgaagcacactccctaataatagtctctactctttgttatatatttgtatttccagagagaatgtcttttagattcttgtatacccagataacttctgtgtcactattccaccagagtctgcacctcagactttagtaggaaacatggcacagttctgcaagtaaagtaatatgtaatgactttttgtcctacaaacttggtcagtcagcagcttacatgatctcattgacaattccaccttgtagtgtcaacaattaaggtgttgttgaacgctgataaaatgtaagctacctgaactgatgtctaaagcaacaagtattgtgaaattttgggacaaggattaacttgatgcttaaagtaacccccaacagtaactagggggccacattccatcagtgaaactggaaagattggtgtggctgagaatcagatgagcagaggcacctttagaagaaataatgtggtagtatttatttagggagagacagatgtgttgccatgttacttagtcatactagagagccagccaagtttgaataatgaaggtgcagacgtgttgtcttcttcactgacaagctgtctgaacaaggagccaggaactgtcgggtcaccagctgtggagcgtgccggggggacaacctgccattggatgtagagaaaagtgccttagagttggcctgagccctcctgcccactcgccctccgcgcgacgccactcggagtccacacggcacacacaagcggagctgagaagcacgatggctctagtcagaggactttgctgtcggtccagatttgaagaggacacggaacagcatgagcctttgtgacaaaactagaatttggaaatgaggactgtcttgggaaaagggtagacacaggcacttctctccacagcctgctaacctaatgtgggcagaactgaaagatcactgcagtggaaactgttctggaagaggctgcaacatagcccatgcttagggactggatggtttttgcaagagctttttttttttttaaactaccatctcccaacttttaaagccagattcttgacaaggattttagatcttaatgggttcgatggtagggaatacggaaaggatacactgctaatattgtgtctaacaataaagcaaacaactcgatgctgtaagaagacaagctgtttgagctttcaaacacacatgcacacagcacaattcagaaatacccaggaggattcctgcaggcttaacagttggcatcgtactgaaatgaaacgtgtattaacaagaaaatgtcaaacttttggggaaacaaattttctgttacttcccacccaactaaaagggaagataaaaccatcatcaccagaacaaaacagattttctccaaacaagtacaatgatagtgccgggttggcagttaactctttcaccctactaaattcaagagctcatctccaccctgtcctgtatattttctacatttctattaagaggctacttggtagtgtcagcgggcaccttttacaccttctagtagctcaagctagtaaaaccttgtacttctctattgcgccgccattaaaagcagcattagtgc

SEQ ID NO: 2613 - DNA, 2576 bp, Homo sapiens
gtacctgtagctgcggcgctgaggtcggaacgtctgcgtgtgtgcgggctggttttgtggcggctgctgctagagctggagcatttgccgggttggtggctcctgcacatttttacagttctccagtccttctctttcgtcagtataaaagattaaactctacagaagaatgcaatcaagtgatggcttttcctttagaatttgaatatggaggctacaggaacagatgaagttgacaagctaaaaaccaaatttatatctgcttggaacaacatgaaatatagttgggtgttgaaaacaaagacgtattttagtagaaattctcctgtattattgcttggaaaatgttaccattttaaatatgaagacgaagataaaacgttacctgcagagtcgggatgtacaatagaggatcacgtaattgcaggaaatgtagaagaatttcgtaaagatttcatttctagaatatggctgacctacagggaagaattccctcaaatagaaggctcagctttgacaacagactgtgggtggggctgcacattgagaactggccagatgctcttggctcaaggactcatactacactttcttggtagagcttggacctggcctgatgctttgaatattgaaaattcagactctgaatcatggacttcccacactgtcaaaaaatttactgcatcatttgaagcatcactttcaggggaaagagaattcaaaaccccaacaatttctctgaaggaaacaattgggaaatattctgatgatcatgaaatgcgaaatgaagtttatcataggaaaatcatctcttggtttggtgattcccccttggctctttttggcttacatcaactaatagaatatggaaagaagtctgggaaaaaagcaggagattggtatggaccagctgtggttgctcacattttaagaaaagcagttgaagaagcaaggcatcctgatttacaaggaataactatttatgttgcacaagattgtacagtttacaattctgatgtaattgataaacagagtgcttccatgacttctgataatgcagatgacaaagctgttattattctagttcctgttagacttggtggagaaagaaccaacaccgactacttagaatttgtgaagggtattttaagcctggaatattgtgtgggtattattggtggcaaacctaaacagtcatattactttgctggatttcaagatgacagtttgatttacatggatcctcattactgccaatcttttgtagatgtcagcataaaggatttccctcttgagacattccactgcccttctcccaaaaagatgtcttttcgaaaaatggatcccagctgtacaataggattttactgtcgaaatgttcaggacttcaaacgagcttctgaagaaatcaccaagatgctgaaattttcttctaaggagaaatatcccttatttacttttgtaatggtcattccagagactatgattttacatctactacaaccaatgaagaagaccttttttcagaggatgaaaagaaacaattaaaaagatttagcacggaagagtttgtcttgctttaaagattagcacatttgtgcttgataagaagaattccattgaaaggggaaaaatgaagagaaacaagtatatctgaaatgtttattttcacaaatatcttaattttatatgttctttaaaaaagaacatttgaaaatataacagttaaagatatttttctaaaagagaaatgatttaatgaatcttgctttctaataaataaattgagtgattctggttgcattcctatttccctaagatctactagtgataattctaccttaactgtaagccttttagtcttcaaagtcttccacctgagcccattgttctcatgggggttttgtgatattaaccctcccccaaagactgggatcaccaaatagtttcaaaattctcagtttgtactgaagaccagaagatcagagaaggaaactttaatgctgtctagcctcctgctattaatgcaatcaaagaatacttttgcatatgtcttgataattaaatagtatttgttaactgtgatatgcatacacttatataagcagaattatgagttaaagtaatacttagcaatatgattttataatggctcctcattatgcttgctgttgaaccttttatgaggagtgaatataaagtattggttttccctcacaaatttaaagattatgttattaatactattataactgcatcaatcaagtcagataaaggcaactataaaatagtagtagtgtttgtttcctatctcaagggcgaaattttatgggaactcaatttattatgcagtttttaagtttaaaataccaagaaagatgtcactagattctcttctatgtgatttttgttttttatataaagcagtgtagtggtgtttagaagctgaggccacctgtaaggcaaatctgccttaagtgtattatgtgttacttaaaggcaaatttgtgatctaaaagtacaagagtgatttttgagctaggattataaaatacataataaagatgtgagaagat

SEQ ID NO: 2614 - DNA, 1830 bp, Homo sapiens
gttgccatggatcctggggacgactggctggtggaatccttgcgcttgtaccaggatttctatgcattcgacctgtcaggagccactcgagtccttgaatggattgatgacaaaggagtctttgttgctggctatgaaagcctgaaaaagaatgaaattcttcatctgaaattacctctcagactttctgtaaaggaaaacaagggcttattcccagaaagagatttcaaagtgcgccatggaggattttcagacaggtctatctttgatctaaagcatgtgccacataccagattgctggttaccagtggccttccaggttgttatctgcaggtgtggcaggttgcagaggacagtgatgtcattaaagctgtcagcaccattgctgtgcatgagaaagaggagagtctctggcctagggtggccgtcttctccacattggcacccggagtcctccatggggcgaggctccgaagtctgcaggtcgttgatctggagtcccggaagaccacgtacacctcagatgtcagtgacagtgaggagctgagtagcctgcaggtcctagatgcagacacctttgccttctgctgtgcttcgggccggctggggcttgttgacacccggcagaagtgggcaccgttggagaatcgcagccctggccctgggtctggtggaaagagatggtgtgctgaagttgggagctggggccagggccctgggcccagcattgccagccttggctcagatgggcgtctttgtcttcttgacccccgggatctctgccatcctgtgagctcagtccagtgcccagtatccgtacctagccctgacccagagctgctgcgagtgacttgggccccaggcctgaagaattgcttggccatctcaggttttgatggtacagtccaggtctatgatgccacatcttgggatggaacacggagccaagatggaacacggagccaagtagaacctctcttcactcacagaggtcacatcttcctagatggaaatgggatggaccctgctcctttggtcaccacccacacctggcatccctgcagaccaaggactttgttatcagcaacaaatgatgcctctctgcatgtgtgggactgggtggacctttgtgccccccgctgacaccagcatctttccatctaggcctctagaaaggggaggagctgctgtagtagcaagggtgctcatgtaggactcaagtgactaccagtccctgttaccagctgtgtggccttgggcaagtctgccagcgtcacttagcctcagtttccttatctgtaaaatgaggatagtaagaactacctcgtagtgatattgcgaaggttagaagaaacgcatggcataattacttggtagctattgttagatctgggagtgtgaaatggtagcgttttgtccctgtcttcacactatcatagggagaatcaaaagagctaacaaatataaacatgctttgtgaatttttttaaagaaaaaaatgtagaggggccaataaacatgaaaaaatcccagccctagtagcaattaaggaaatagcaaaacaggatttctgctcctcttgagtgggtctcatgggaacacaggtgcactttcccacacttgtccccccaggtgactaggttcaagagacatttgcttttggtggccccacaaacatttccttttgagggcccatagtgaatattaaagtgtgctggacatggtggctcatgcctgtaatcccagcactttcagaggctggggtgggcagattgcttgagctgaggagtttgagaccagcctgggcaacatagcaagatcccttccctt

SEQ ID NO: 2615 - DNA, 2606 bp, Homo sapiens
gggtctgcgcaccttcccggcccagccggcgattcattcaaaaggcgcgcaggctgcgcggctgtccgggcgctcgccgagccgggccgcggcgccgagtcgaacggggagccgagctggagctgccgcggcgcagccaggccggcgaccaccaggggcctgaggatgaagccaagtctgctgtgccggcccctgtcctgcttccttatgctgctgccctggcctctcgccaccctgacatcaacaaccctttggcagtgcccacctggggaggagcccgacctggacccagggcagggcacattatgcaggccctgccccccaggcaccttctcagctgcatggggctccagcccatgccagccccatgcccgttgcagcctttggaggaggctggaggcccaggtgggcatggcaactcgagatacactctgtggagactgctggcctgggtggtttgggccttggggggttccccgcgttccatgtcaaccatgttcctgggcacctctgggtactcatggctgtgatgagtgggggcggcgggcccgacgtggcgtggaggtggcagcaggggccagcagcggtggtgagacacggcagcctgggaacggcacccgggcaggtggcccagaggagacagccgcccagtacgcggtcatcgccatcgtccctgtcttctgcctcatggggctgttgggcatcctggtgtgcaacctcctcgagcggaagggctaccactgcacggcgcacaaggaggtcgggcccggccctggaggtggaggcagtggaatcaaccctgcctaccggactgaggatgccaatgaggacaccattggggtcctggtgcgcttgatcacagagaagaaagagaatgctgcggccctggaggagctgctgaaagagtaccacagcaaacagctggtgcagacgagccacaggcctgtgtccaagctgccgccagcgcccccgaacgtgccacgcatctgcccgcaccgccaccatctccacaccgtgcagggcctggcctcgctctctggcccctgctgctcccgctgtagccagaagaagtggcccgaggtgctgctgtcccctgaggctgtagccgccactactcctgttcccagccttctgcctaacccgaccagggttcccaaggccggggccaaggcagggcgtcagggcgagatcaccatcttgtctgtgggcaggttccgcgtggctcgaattcctgagcagcggacaagttcaatggtgtctgaggtgaagaccatcacggaggctgggccctcgtggggtgatctccctgactccccacagcctggcctcccccctgagcagcaggccctgctaggaagtggcggaagccgtacaaagtggctgaagcccccagcagagaacaaggccgaggagaaccgctatgtggtccggctaagtgagagcaacctggtcatctgaggggcggtctagtctaaggacactgcggccctgccctgggaggttccgaaggcttcctggaggaggtggagctgcagctgggactgtgaggaccgagaagcaatggcccagcagacgagacagcaaagaccaaggcctggaggtgggagcgtctgccccagtgaggaggcaggtggccggcgggcactgtgtacaggagcaggctgagccccgcccctggccctgctgccatgttgctcccctgaaggatgccccgacccccgtgcctgccctggctggatcctaggagcccacgggattctctgtatcatcagaggctgggcttggcagaggggaggggcctgtgcccgtcacccctggccccattccttggtaattagccacacccttgcctctgtacagggccctagagcagatgtgcgtccccctcctcttccagcaggtctataaagggaaggggtagcagaaagtcctgggctaggagagtgagtccctgggttctaatcttgggcacatctgtggccatcgctgggtccatttttctgactgtgaagtaaggagagacgtctcagtacccagggcctcttcagctctttgtaggttctgggctgggttgtgggggactggggagctgggctctaccatccctcccattagtagctttatccagccccgtttttgctgcttccagggcctctgccttcaaggcccccatggggctgtccatccatggctctgcctacggaaggggcttaatgcatgtgcctgcccctcccccagctgtttttaatgaaactgaaaaaatagacttgatcccagcaggactgtgatacagagccctagcctgcccagccagccccaagatctcaggagctttagggagaagacttggtggggctggagcacaccttgggcctcagtggtttctgtgtccctgtggtgccagtgcttctgggcagtgcaggcggctgccaggcccagccctgacttccactctggctcagcaacctggttatttatgtggggccgtgcaggcatgggcccactgcctgtccatcctgtttctcttatttattgaaactcaccattgccctatccttgtgtctccacccccttccatgtgttgaataataaaaggtgggaaagtg

SEQ ID NO: 2616 - DNA, 869 bp, Homo sapiens
ggacagagcggcccggtcgccggcatggtttctccgtcctgctgcagccggcgggaggcagccagtccaggcgcccgctagcttcggcggcgacccagacggggaaagcggaaggaatgtcgcgtgcaagcaggcagctggtgtggaagaatggcggtgagccattcagtgaaggagcggaccatctctgagaacagcctgatcatcctactgcagggcctccagggccgggtaaccactgtggacctgcgggatgagagcgtggcccacggacgcatagacaatgtcgatgctttcatgaacatccgcctggccaaagtcacctacacggaccgttgggggcatcaggtcaagctggatgacctctttgtgacaggccgcaatgtccgctacgtccacatcccagatgacgtgaacatcacctcgaccattgagcagcagctgcagattatccatcgggtgcgaaactttggtggcaagggccaaggccggtgggaatttcccccaaaaaactgtaagtgaggccctcagcaagccctggccccaactcggagtcctccagtgatctccagagctagttccctgccctcacaccctgtctggtacccgagaagaaagcagggccaggccagaagctggtgtccaacagacaccacctgtcaaagctgcctttcacagggttccacctcccagactcactctgggacccagaatcctatatgtggccttggggtaggtgacaatccccctttttgatgatctgaatctctgacttattgattatggaacctgtcaagtagttttcaactctcccagtgaggataattaaacatgctcagcctgagccaccaaaaaaaaaaaaaaaaaaa

SEQ ID NO: 2617 - DNA, 1325 bp, Homo sapiens
ggcacgagggacgaacgggaagccgggagctcggccacgggtggcgaggctgcggtgaggcctggtctccggctgccagaccatgctgagtggagcacgctgcaggctcgcctcagcgctgcggggaacgcgcgcgccgccgtccgcggtcgcccgtaggtgcctgcacgcgtcggggtcgcggcctttggccgaccggggcaagaagactgaggagccgccccgcgacttcgatccggcgctgctggagttcctggtgtgcccgctctccaagaagccgctcagatatgaagcatcaacaaacgaattgattaatgaagagttgggaatagcttatccaatcattgatgggatccctaatatgataccacaggcagctaggatgacacgtcaaagtaagaagcaagaagaagtggagcagcgctagttcataatttaaaaaaattaaaaaaacgcaacagccaacttttcttaataccatataccttttaaaacacagtggcaggtaataagtggaagagaagaatgtttctgtctcttcctacgttgactgttcttattccactggtttctttagcaggactgttctactcagcctctgtggaagaaaacttcccacagggctgcactagcacagccagcctttgcttttacagcctgctcttgcctattaccataccagtgtatgtattcttccacctttggacttggatgggtattaaactcttcaggcataattgatgcaactagagtcaatatgctgtatatattaatgatagctcttgggcatcgatctctgaaagctcaaatggatggaatttagtttgcgggaaagaggctttgctttgcgcatatcaggcttaggactgtgggaggcttaagttgcagatgcttcttttattgtactcttgttctgcccttgttttttgaaggctctgacttataactgctgtatcagaagaaacattttgacagtgtcttggttggagatgaacatccctaattgacatgtgatgactatttcttattccattcatctaagagtcattgaaattttgttttgcttgtttgtttagcttcaaggtctttggtaaagtcacatgttaaggatgactgaaataattccaaaggagtgatgttggaatagtccctctaagggagagaaatgcatttgaacgaatgtgatataaaaccacataatcaaatagaaacttcatgtacttacaaaaactgagtttgtaaaattaccttcatttctttgacattaaatgcttatattagcaataaacatgttgacactttcctataaaaaaaaaaaaaaaaaa

SEQ ID NO: 2618 - DNA, 2367 bp, Homo sapiens
ggcacgaggagtaatcgttctggtcactgggacacagctgcgctcgcccattctaaaaagtcagcgccctcaggcccgcgggtaaccacctcctcctgagcgcggtgaccagagcttagaggcaaagttaagagactcatcagattctgagctgctgcgggatattttgcagaagactgtgaggcatcctgtgtgtgtgaagcacccgccgtcagtcaagtatgcctggtgctttctctcagaactcatcaaaaagtcctcaggaggctcggtcacactctccaagagcacagccatcatctcccacggtaccacaggcctggtcacatgggatgccgccctctaccttgcagaatgggccatcgagaacccggcagccttcattaacaggactgtcctagagcttggcagtggtgccggcctcacaggccttgccatctgcaagatgtgccgcccccgggcatacatcttcagcgaccctcacagccggatcctcgagcagctccgagggaatgtccttctcaatggcctctcattagaggcagacatcactggcaacttagacagccccagggtgacagtggcccagctgggactgggacgtagcaatggtccatcagctctctgccttccagccagatgttgtcattgcagcagacgtgctgtattgcccagaagccatcgtgtcgctggtcggggtcctgcagaggctggctgcctgccgggagcacaagcgggctcctgaggtctacgtggcctttaccgtccgcaacccagagacgtgccagctgttcaccaccgagctaggccgggatgggatcagatgggaagcagaagctcatcatgaccagaaactgtttccctatggagagcacttggagatggcaatgctgaacctcacactgtaggactcacacatgactccaaagggattgtgagaatcaagtcactctcgtgggaagaatttttatatgggaaagtggataaaactttcattggactggaatgtttggagattattaaattccaaatcaggaatcaaaactgccctctaataagacattagctgtctaggcgtgtgggtgccccctttctgccagcagttctggttctcaagaaaatcatcataaatcagacatgaaaattctggctccaaaaatagcattttctttctgcaaataaaaacgtgtgtatcaaggacgacgttcccccaacgtggacacactcggttcctcagaaagccaagcccgctgcagctgccacatccctggacacactcggttcctcacaaagccaagcccgctgcagctgccacatccctggacacactcggttcctcacaaagccaagcccgctgcagctgccacatcccagggcttatggtgcagcaggtgcttttttcaagacaggaatgaaagtgttaggaacacggcagaaaggtgacacctggagaccaaatgcaggatgaggagtactgcagaggtcacagggaagtcacagaacagtaatacgctagcaggggcatggggcatgaagaacagaagacaggaagcatttcagagactccaaagaagaaatcagggccaaccacagcttcccgggtcattcaccaggtgacaccactgccgtcatttcagcttctggccactgggaggcgctgctcgaaaggctttgccctgagactccaagaagctgcgggaaggacagcaggggccctggggttttagcctctggcccaggagttatgtgtccataaccaaagggagcacagtctgcacccagctctcatcccatcagagctgctgagactcttgcaggttcttccagaactggtttagcttgcctgcaggatcagaaaagtttgagaaaagcatctgcaaaatgctaaagagcagagcttaactcattgcctgtccccaccccatcccaggtcaccacttggatgaccccaggtccccgacccaacaacaacccctcccaagtccctaactccctcacttggacttgagacccttcacaacccccctcacttggacttgagacccttcacaacccagcagcgctccacctccaacttgacatcatgctttctggaaacttccccgtatgtctcactttcccacacttggtgccctggagcaccttccggcctctacatgctgtacgttcccctgtgagcaccctcctctcggtctctggccaacacagtcccacccatctgtgggtaacaagggggtgtgggtgttcttttcagccttgctaaactgtctgaatcaaggatcacaaactacagcctgcaggccaaatccagcccacagcctgtgtttgtaaataaagctttgttggaacaaaaaaaaaaaaaaaaaa

SEQ ID NO: 2619 - DNA, 2240 bp, Homo sapiens
cgccgggccactggcacttgcttctgcggcgagtcccacccacgaccgcagcccagcaactcgcaaacgcaacctgaagcctgggctgcgcagtgtgggagggcttcgcgatcttgggggacccattccgaacttgcagaggaccgtagctctcctggcctggagagtgtgaacaggattgtggactcttccaagattcacaatgatatggtgaatccaaagactggaaccaaaaagatttactcagtgctttagttttaacaacagtaaattgtctaccaacacccatcatggctaaaagtgcggaggtcaaactggcaatatttgggagagcaggcgtgggcaagtcagctcttgtagtgagatttctgaccaaacggttcatctgggaatatgatcccaccctcgaatcaacctaccgacaccaagcaaccatcgatgatgaagttgtttccatggagatactagacactgctggtcaggaagataccattcagagggaggggcacatgcgatggggggaaggctttgtgctggtctacgacattactgaccgaggaagttttgaggaagtgctgccacttaagaacatcctagatgagatcaaaaagcccaagaatgtgactctcatcttggttggaaacaaagctgacttggaccactccaggcaggttagcacagaagaaggagagaagctggccacagaattggcttgtgctttttacgagtgctctgcctgcactggagaagggaacatcacagagatattctatgaattgtgtcgagaggtgcgtcgccggaggatggtgcagggcaagacgaggcgacgcagctccaccacgcatgtcaagcaagccattaacaagatgctcaccaaaatcagtagttaggcagcccagctgaggtggaccaactaattggaaacactcttccccttctgttcccctttcaaaaataaaacaaaatattgcattctttgtttggattctgagaaatgtctgggcttcccattgtttctggcctctaataggttgggaagttttagcgtgttttatgcaatttcagtgctaacaatttcttcctttcctgcttgaataagatacactctaatggcatttgaacatgtaatcaccagagattctgaaatgactggtttatgttaagctatttttaggcatcttcaccttgctttaagtaggttgaagtttttgcaaaggcatttaaaaattcaatttcttgtcagatactacaaataattttcttaaaagtctaagatagcagaaaatacagtaaaaacacaggagaagaagctgagctattggaacaggaaatagaaggaactctagtttctgtttgaagtgaggattttctgaattatctaatatcatctaggttttctttaaaattttattttgttcttcagttcaagcatcttctcactaatgtttttcactataacagagaattcatttcaatttgagttggttctctcaatgatctattgatcattacaccctaactctccttccttggctcaaacaatattttccctataacaaaggcaataggacacaaaattcacatcctgctgggccttttttcatcaagtcagggtgatataaaaacattggaagtcttttcaccaaaccctgactttattgaatgctagtagaagatgtagaattagagacatctgatttgtttatcaccttagcagaaaaaccacagtccaaaagacaagcaaattaagaatggagcttaaccatgcctccattgggaagtctagactttgagccaggtacagtaagaaaaattagcctctgattcattaagtttgccacatgacttattttgatattttggatacattaactcacttaggagaattcagaaaagaatgggtgattaaagttcattacagctgaataaatgtgtctaaaacagactcttgtattctgaaagtacagtctacaactgataaaaccttatgattcttttctcccccattatgcccctatatatatcaagatttgggtactttattttagtagaaaatatatatcttttacatatgtatgtatttataaatgcatagatatatgtataaaaatttgtaagcgttagcggcattaattcaccaatgcatttggacaacttgatgtaactgactttattttatgtgactataataaaaagcataattttctcattctgtcaaaaaaaaaaaaaaaaaaaaaaaa

SEQ ID NO: 2620 - DNA, 922 bp, Homo sapiens
aaatctcaacagcttaggatgtgtccctttcaactcagacttttcattttagagaatggggcagatggggcaaatcgttgaattttcccagaaatcacaccagccttagaaagcgtcaaggcaagtggatggcgtgctgggaatagaaagcagctctgggaccagttaccccatttaggaaaggagtttgcactaaactgtttttctcacagcagaggaacctttccaaggtggggatggaagcacagtcgggacagaattcgatggattcctttagttggagtccgcgtagtcagcacagacagcagtggaaaggacgctctgggtcctgttatttgctagggagggtaaagggagactatttcaaagctactgttcctagtccagctttaagtttcggtaagaaacatgctgttttgtttcatgatttcgttaattatggaaatttggcattgagggattattttattgagggtagaagagattccagaatcatcatctgtgatgatggtgtcctttagggctcttggagcagccagaccatgtttccaagagaaacctggtgatattgccagcagaccccctgccatcccccccagttgtcctggggctgaatgggcaaatctgtccaaacagctagtaaccggctgtgagggagagggtcagaagcacttagcgttggcctctgattgctgtcctctcttgtcctcttcccactccaatgatgaaaatgattttctctaaatgcctgggtaaggatgctttcaaggagctcacttggcctgcttgccctgccctctcacctctgacacccagccccaggagccagaccactcctgcctccacctctgactcttcagcagctgaagattaatgcagagaaagagcaaagcccaaaagggagaaaaaaaaaaaaaaaaaa

SEQ ID NO: 2621 - DNA, 1689 bp, Homo sapiens
ccttccccttccgctcctcctccctcctccacctctttctcctcctccttccctcctcctccctcctcttcccttctctgccatctttctccccgtgcctattgatcccacataggctcattctgggtacaccggctaaaggctttggtgcattgcagcgttttctcccagcagctgtgtgaaagatgcattttctaagctaaggagaattttctcaagagtggcatactcatgccaaatattattgctctgggccatataggctggtcttcctccacactaaaatgggtgtcttgttttggtacttaaaacagtctactccaggcatccagtccttacagaccaaggaagagcatagcgatgcctgttggaattgcagatgcattctggccttctcccccgtcctgaaacattttctttgaggaaggctcttagaacattagatagtctgctgaggttgttggcccagctccatacacccagtagaacagtggaacaactcatgcttcatgctgccaagctgctgtacttcaaaggaaacagatctagcacactgctgcacccctgcttccacactccacacttcaccccgctgcttttctctgacccgcccctggccttgtaagactcacgtaagctaagtccaggatgcctgtggcctgcggcttgattcttccctttaggattcagcaagttaatggcttcctcgctatagaagtgagactttgacttgatgcctcttggtatatcaaaaagatattcatccagaaagtaccaaatgttctgaaagacccgctcttcactccagttttccctagggtgtttctggcagggcgtttttaaaaggcatctacctgagttgacgctaatacttgtcaccacctggaacgtagttatcggtcggcaggctgaacatactccagattccccagaggccacttctgtagcccagcgatgcatctgagcctctctgcgtggtttatgcttgaaaaatagataatgcttttagatggttcactgccaggccatgggccccacacatctcaggccctgtgtgagggagcacactgagatggtgcaggagtgaatgggcatggcttggcctcgctacctcggggacctgttggagttctggcagcagggtgtctgcaggtgggacggcgttctgggcagagtcagaatggtcagaatgaaacagaacagccaactcacccacaggacagcttattttgaggcaaggttttggattttggaggaagcagccagatgaggcggtgagcctccagaaggtcagcctttggagcacgtaagatactgttacagggtccagaaatcgtgttcacatgggggctttgactcttcaaacagcttttgcagatcgtaaattgcatttgcctagtcgtgtgacctcaaaagaagtcagacatatttaatccagaaatagtttcgtttgagggagggcttgcaggtctgtaaatagcatttgctttcctggttagagattgggatgcagaaggagttttcagtattttttttaaaacactaatgatcattgaagagtatttatgtaaacatacaacgtataatgggtgggggatccgatcatggtgatgtacggggtgaattctcttgccgtgttgcaaatgtgtaaaataaagattatctggcagaaaaaaaaaaaaaaaaaaa

SEQ ID NO: 2622 - DNA, 1080 bp, Homo sapiens
agcccccgcgcccgcccgcccgccctgcggtccggtcctggcgcccgcgcagaaccagctgtctgagctgcccgggcagcgggggagcagcgagcgggcttccgcgagccggagaaggcacaggcctgtcccgggtcccggcaggtctgcgcgtctgttcccagcgctctgcgaggcctaaaaaggaggagcaacctgtccagaatccctgcaggacaggaaaaggaggggaaatctcgacatggaaaaaccctacaataaaaatgaaggaaacctggaaaacgagggaaagccagaagatgaagtagagcctgatgatgaaggaaagtcagacgaggaagaaaagccagacgtggaggggaagacagaatgcgagggaaagagagaggatgagggagagccaggtgatgagggacaactggaagatgagggaagccaggaaaagcagggcaggtccgaaggtgagggcaagccacaaggcgagggcaagccagcctcccaggcaaagccagagagccagccgcgggccgccgaaaagcgcccggctgaagattatgtgccccggaaagcaaaaagaaaaacggacagggggacggacgattcccccaaggactctcaggaggacttacaggaaaggcatctgagcagtgaggagatgatgagagaatgtggagatgtgtcaagggctcaagaggagctaaggaaaaaacagaaaatgggtggttttcattggatgcaaagagatgtacaggatccattcgccccaaggggacaacggggtgtcaggggagtgaggggtggaggtaggggccagaggggcttacacgatatcccatacctttaatgcctttggccttccattctgatttctctgatgagaatattgctggccctgctttccctggtaggtatttgccaggcccaatgctttaaccttaagctgatactttgctttagatgtcagtctcgttaccagcagccttttgacccaactacggcgctctatattttagtagaggattttcacccatgtgcatggaaaagatgttcatggtacattgtaaaaaaaaaaaaaaaaaa

SEQ ID NO: 2623 - DNA, 1393 bp, Homo sapiens
ggccgagccctcccggtcggctaagattgctgaggaggcggcgggtagctggcaggcgccgacttccgaaggccgccgtccgggcgaggtgtcctcatgacttctcttgtggaccatgtccgtgatcttttttgcctgcgtggtacgggtaagggatggactgcccctctcagcctctactgatttttaccacacccaagattttttggaatggaggagacggctcaagagtttagccttgcgactggcccagtatccaggtcgaggttctgcagaaggttgtgactttagtatacatttttcttctttcggggacgtggcctgcatggctatctgctcctgccagtgtccagcagccatggccttctgcttcctggagaccctgtggtgggaattcacagcttcctatgacactacctgcattggcctagcctccaggccatacgcttttcttgagtttgacagcatcattcagaaagtgaagtggcattttaactatgtaagttcctctcagatggagtgcagcttggaaaaaattcaggaggagctcaagttgcagcctccagcggttctcactctggaggacacagatgtggcaaatggggtgatgaatggtcacacaccgatgcacttggagcctgctcctaatttccgaatggaaccagtgacagccctgggtatcctctccctcattctcaacatcatgtgtgctgccctgaatctcattcgaggagttcaccttgcagaacattctttacaggttgcccatgaggaaattggaaacattctggcttttcttgttcctttcgtagcctgcattttccagtgttatttgtacctgttctacagtccagccaggactatgaaggtggtgcttatgctgctctttatttgcctgggcaacatgtacctgcacgggctgaggaacctctggcaaatccttttccacataggagtggcttttctgtcttcatatcagatactaacaaggcagcttcaggagaagcagtctgactgtggagtatgaggatgacactgtgatgaatggattctttgattttcttttgaggatcaatctatgtttctctttctgcttctctactttacactccagtttccatccttttcagccaactggactgaaaaaccaggaattggggatgttaaacagttgcagtggaagtcatgaggttgcttgatacccagccttggttctgtgccaagcattactgcaggatctccagccagttcagcacgtttacctaggacagctggatctgggggctcatccagaaagagctttattggaagagagaaaggaaatattttggtcttttaagttgaatgatacagtaaaccacttgattcaataacaaaaaaaaaaaaaaaaaaa

SEQ ID NO: 2624 - DNA, 4964 bp, Homo sapiens
ggtggtccagtacctccaaagatatggaatacactcctgaaatatcctgaaaccttttttttttcagaatcctttaataagcagttatgtcaatctgaaagttgcttacttgtactttatattaatagctattcttgtttttcttatccaaagaaaaatcctctaatccccttttcacatgatagttgttaccatgtttaggcgttagtcacatcaacccctctcctctcccaaacttctcttcttcaaatcaaactttattagtccctcctttataatgattccttgcctccttttatccagatcaattttttttcactttgatgcccagagctgaagaaatggactattgtataaattattcattgccaagagaataattgcattttaaacccatgttataacaaagaataatgattatattttgtgatttgtaacaaataccctttattttcccttaactattgaattaaatattttaattatttgtattctctttaactatcttggtatattaaagtattatcttttatatatttatcaatggtggacacttttataggtactctgtgtcatttttgatactgtaggtatcttatttcatttatctttattcttaatgtacgaattcataatatttgattcagaacagatttatcactaattaacagagtgtcaattatgctaacatctcatttactgattttaatttaaaacagtttttgttaacatgcatgtttagggttggcttcttaataatttcttcttcctcttctctctctcctcttcttttggtcagtgttgtgcgggttaatacaacaaactgtcacaagtgtttgttgtccgggacgtacattttcgcggtcctgctagtatgcgtggtgttccactctggcgcccaggagaaaaactacaccatccgagaagaaattccagaaaacgtcctgataggcaacttgttgaaagaccttaacttgtcgctgattccaaacaagtccttgacaactactatgcagttcaagctagtgtacaagaccggagatgtgccactgattcgaattgaagaggatactggtgagatcttcactaccggcgctcgcattgatcgtgagaaattatgtgctggtatcccaagggatgagcattgcttttatgaagtggaggttgccattttgccggatgaaatatttagactggttaagatacgttttctgatagaagatataaatgataatgcaccattgttcccagcaacagttatcaacatatcaattccagagaactcggctataaactctaaatatactctcccagcggctgttgatcctgacgtaggcataaacggagttcaaaactacgaactaattaagagtcaaaacatttttggcctcgatgtcattgaaacaccagaaggagacaagatgccacaactgattgttcaaaaggagttagatagggaagagaaggatacctatgtgatgaaagtaaaggttgaagatggtggctttcctcaaagatccagtactgctattttgcaagtaagtgttactgatacaaatgacaaccacccagtctttaaggagacagagattgaagtcagtataccagaaaatgctcctgtaggcacttcagtgacacagctccatgccacagatgctgacataggtgaaaatgccaagatccacttctctttcagcaatctagtctccaacattgccaggagattatttcacctcaatgccaccactggacttatcacaatcaaagaaccactggatagggaagaaacaccaaaccacaagttactggttttggcaagtgatggtggattgatgccagcaagagcaatggtgctggtaaatgttacagatgtcaatgataatgtcccatccattgacataagatacatcgtcaatcctgtcaatgacacagttgttctttcagaaaatattccactcaacaccaaaattgctctcataactgtgacggataaggatgcggaccataatggcagggtgacatgcttcacagatcatgaaattcctttcagattaaggccagtattcagtaatcagttcctcctggagaatgcagcatatcttgactatgagtccacaaaagaatatgccattaaattactggctgcagatgctggcaaacctcctttgaatcagtcagcaatgctcttcatcaaagtgaaagatgaaaatgacaatgctccagttttcacccagtctttcgtaactgtttctattcctgagaataactctcctggcatccagttgatgaaagtaagtgcaacggatgcagacagtgggcctaatgctgagatcaattacctgctaggccctgatgctccacctgaattcagcctggatcgtcgtacaggcatgctgactgtagtgaagaaactagatagagaaaaagaggataaatatttattcacaattctggcaaaagataatggggtaccacccttaaccagcaatgtcacagtctttgtaagcattattgatcagaatgacaatagcccagttttcactcacaatgaatacaaattctatgtcccagaaaaccttccaaggcatggtacagtaggactaatcactgtaactgatcctgattatggagacaattctgcagttacgctctccattttagatgagaatgatgacttcaccattgattcacaaactggtgtcatccgaccaaatatttcatttgatagagaaaaacaagaatcttacactttctatgtaaaggctgaggatggtggtagagtatcacgttcttcaagtgccaaagtaaccataaatgtggttgatgtcaatgacaacaaaccagttttcattgtccctccttacaactattcttatgaattggttctaccgtccactaatccaggcacagtggtctttcaggtaattgctgttgacaatgacactggcatgaatgcagaggttcgttacagcattgtaggaggaaacacaagagatctgtttgcaatcgaccaagaaacaggcaacataacattgatggagaaatgtgatgttacagaccttggtttacacagagtgttggtcaaagctaatgacttaggacagcctgattctctcttcagtgttgtaattgtcaatctgttcgtgaatgagtcagtgaccaatgctacactgattaatgaactggtgcgcaaaagcattgaagcaccagtgaccccaaatactgagatagctgatgtatcctcaccaactagtgactatgtcaagatcctggttgcagctgttgctggcaccataactgtcgttgtagttattttcatcactgctgtagtaagatgtcgccaggcaccacaccttaaggctgctcagaaaaacatgcagaattctgaatgggctaccccaaacccagaaaacaggcagatgataatgatgaagaaaaagaaaaagaagaagaagcattcccctaagaacctgctgcttaatgttgtcactattgaagaaactaaggcagatgatgttgacagtgatggaaacagagtcacactagaccttcctattgatctagaagagcaaacaatgggaaagtacaattgggtaactacacctactactttcaagcctgacagccctgatttggcccgacactacaaatctgcctctccacagcctgccttccaaattcagcctgaaactcccctgaatttgaagcaccacatcatccaagaactgcctctcgataacacctttgtggcctgtgactctatctccaattgttcctcaagcagttcagatccctacagcgtttctgactgtggctatccagtgacaaccttcgaggtacctgtgtccgtacacaccagaccgactgattccaggacatgaactattgaaatctgcagtgagatgtaactttctaggaacaacaaaattccattccccttccaaaaaatttcaatgattgtgatttcaaaattaggctaagatcattaattttgtaatctagatttcccattataaaagcaagcaaaaatcatcttaaaaatgatgtcctagtgaaccttgtgctttctttagctgtaatctggcaatggaaatttaaaatttatggaagagacagtgcagcgcaataacagagtactctcatgctgtttctctgtttgctctgaatcaacagccatgatgtaatataaggctgtcttggtgtatacacttatggttaatatatcagtcatgaaacatgcaattacttgccctgtctgattgttgaataattaaaacattatctccaggagtttggaagtgagctgaactagccaaactactctctgaaaggtatccagggcaagagacatttttaagaccccaaacaaacaaaaaacaaaaccaaaacactctggttcagtgttttgaaaatattgactaacataatattgctgagaaaatcatttttattacccaccactctgcttaaaagttgagtgggccgggcgcggtggctcacgcctgtaattccagcactttgggaggccgaggcgggtggatcacgaggtcaggatattgagaccatcctggctaacatggtgaaaccccatctccactaaaaatacaaaaaattagctgggcgtggtggcgggcgcctgtagtcccagctactcgggaggctgaggcaggagaatggcgtgaacccgggaggcggagcttgcagtgagccgagatggcgccactgcactccagcctgggtgacagagcaagactctgtctcaaaaagaaaaaaatgttcagtgatagaaaataattttactaggtttttatgttgattgtactcatgctgttccactccttttaattattaaaaagttatttttggctgggtgtggtggctcatacctgtaatcccagcactttgggaggccgaggcgggtggatcacctgaggtcaggagttcaagaccagtctggccaacat

SEQ ID NO: 2625 - DNA, 537 bp, Homo sapiens
cttttcctccttggctgtctgaagatagatcgccatcatgaacgacaccgtaactatccgcactagaaagttcatgaccaaccgactacttcagaggaaacaaatggtcattgatgtccttcaccccgggaaggcgacagtgcctaagacagaaattcgggaaaaactagccaaaatgtacaagaccacaccggatgtcatctttgtatttggattcagaactcattttggtggtggcaagacaactggctttggcatgatttatgattccctggattatgcaaagaaaaatgaacccaaacatagacttgcaagacatggcctgtatgagaagaaaaagacctcaagaaagcaacgaaaggaacgcaagaacagaatgaagaaagtcagggggactgcaaaggccaatgttggtgctggcaaaaagtgagctggagattggatcacagccgaaggagtaaaggtgctgcaatgatgttagctgtggccactgtggatttttcgcaagaacattaataaactaaaaacttcatgtgt

SEQ ID NO: 2626 - DNA, 1768 bp, Homo sapiens
ggcggtgcagcttgggcggcccatcggatcgtgccgcggcggccgagcgcagctacaggagggtgtccagaagccacaagccatggctgtggggaacatcaacgagctgcccgagaacatcctgctggagctgttcacgcacgtgcccgcccgccagctgctgctgaactgccgcctggtctgcagcctctggcgggacctcatcgacctcgtgaccctctggaaacgcaagtgcctgcgagagggcttcatcactgaggactgggaccagcccgtggccgactggaagatcttctacttcttacggagcctgcacaggaacctcctgcacaacccgtgcgctgaagaggggttcgagttctggagcctggatgtgaatggaggcgatgagtggaaggtggaggatctctctcgagaccagaggaaggaattccccaatgaccaggttcgcagccaggccagattgcgggtccaagtaccagctgtgcgttcagctcctgtcgtccgcgcacgcgcctctggggaccttccagccagacccggcgaccatccagcagaagagcgatgccaagtggagggaggtctcccacacattctccaactacccgcccggcgtccgctacatctggtttcagcacggcggcgtggacactcattactgggccggctggtacggcccgagggtcaccaacagcagcatcaccatcgggcccccgctgccctgacaccccctgagcccccatctgctgaaccctgactggtaaacaactgctgtcagaaaagggctgggcttgggaaggggaggtggaggccaggtgtccccagacctctaacccttgcccctagcagcctcttctttgtggagcctctcagtgtgggcagccctcgcatgctggggtcgggccagctctccccgaaaggtcttgacctgaatgatggccggggaagcctgcgtgtgcccctttcagagacggagcacctgagatgtgggaggtgcagcatgttcccctgggcccctcagaaagtcgagcttggaggccagcctggatctgtctctcccttcccctcctgggaccattctacctgtgttctttgaccctcggagcagggacaggcaagacaactggcaagcttgcagctgccctgatggtgcaggtgcagggaggtgaccatgtaactctgaccaatctgggaagtggagggtgggctcatgggccgtgctctgcccctgtctgctgctcccagtctctcgctctgcctgcctgctcagaagaggtggctttggcccagaggctcaggccgggactgagatggacagacccagggtggggtggggtccaggtcgggtgtggactgtcctcactgtcagtggagccccagaagctagatgggtaccaggtggggttaggttcccagaggactgagggaatcctgtacaggatgtcccagggtagatggggagcaggattgggacctgctctgacagctggacacatgagccctggatgagtatggtagggggtttgaagaatcccctgtccacctcccaaatccaggcccggccccctctggcttggagagcattccaagcccccaccccacccctagaactgccattcccaagacctctgtctcccagccaaccacccttggaacttgcctcttgtcctgctggaaagatagcagtgttctcctgacttcgccctactgcatgcagccaaataaaaggtgtgcccagtctaaaaaaaaaaaaaaaaaaaaaaaaaaa

SEQ ID NO: 2627 - DNA, 1668 bp, Homo sapiens
atggcggccgccggggctgcggctacacacctagaggtggcccggggcaagcgcgccgccctcttcttcgctgcggtggccatcgtgctggggctaccgctctggtggaagaccacggagacctaccgggcctcgttgccttactcccagatcagtggcctgaatgcccttcagctccgcctcatggtgcctgtcactgtcgtgtttacgcgggagtcagtgcccctggacgaccaggagaagctgcccttcaccgttgtgcatgaaagagagattcctctgaaatacaaaatgaaaatcaaatgccgtttccagaaggcctatcggagggctttggaccatgaggaggaggccctgtcatcgggcagtgtgcaagaggcagaagccatgttagatgagcctcaggaacaagcggagggctccctgactgtgtacgtgatatctgaacactcctcacttcttccccaggacatgatgagctacattgggcccaagaggacagcagtggtgcgggggataatgcaccgggaggcctttaacatcattggccgccgcatagtccaggtggcccaggccatgtctttgactgaggatgtgcttgctgctgctctggctgaccaccttccagaggacaagtggagcgctgagaagaggcggcctctcaagtccagcttgggctatgagatcaccttcagtttactcaacccagaccccaagtcccatgatgtctactgggacattgagggggctgtccggcgctatgtgcaacctttcctgaatgccctcggtgccgctggcaacttctctgtggactctcagattctttactatgcaatgttgggggtgaatccccgctttgactcagcttcctccagctactatttggacatgcacagcctcccccatgtcatcaacccagtggagtcccggctgggatccagtgctgcctccttgtaccctgtgctcaactttctactctacgtgcctgagcttgcacactcaccgctgtacattcaggacaaggatggcgctccagtggccaccaatgccttccatagtccccgctggggtggcattatggtatataatgttgactccaaaacctataatgcctcagtgctgccagtgagagtcgaggtggacatggtgcgagtgatggaggtgttcctggcacagttgcggttgctctttgggattgctcagccccagctgcctccaaaatgcctgctttcagggcctacgagtgaagggctaatgacctgggagctagaccggctgctctgggctcggtcagtggagaacctggccacagccaccaccacccttacctccctggcgcagcttctgggcaagatcagcaacattgtcattaaggacgacgtggcatctgaggtgtacaaggctgtagctgccgtccagaagtcggcagaagagttggcgtctgggcacctggcatctgcctttgtcgccagccaggaagctgtgacatcctctgagcttgccttctttgacccgtcactcctccacctcctttatttccctgatgaccagaagtttgccatctacatcccactcttcctgcctatggctgtgcccatcctcctgtccctggtcaagatcttcctggagacccgcaagtcctggagaaagcctgagaagacagactga

SEQ ID NO: 2628 - DNA, 1296 bp, Homo sapiens
ctgggtcctggcctttgggcatcatccagcgccatcggcctggcgcttcagccaacgcgggagtggatgggccccttcttcttcgcagacagcgttcggccgctgcccgggctctaggcgcggccggacggcccagtctggagggttcggggcggaggcccgggggggtgcgcgcgcccggggtccggcctctcactcgctcccctctcgtccgcagccgcagggccgtaggcagccatggcgcccagccggaatggcatggtcttgaagccccacttccacaaggactggcagcggcgcgtggccacgtggttcaaccagccggcccgtaagatccgcagacgtaaggcccggcaagccaaggcgcgccgcatcgccccgcgccccgcgtcgggtcccatccggcccatcgtgcgctgccccacggttcggtaccacacgaaggtgcgcgccggccgcggcttcagcctggaggagctcagggtggccggcattcacaagaaggtggcccggaccatcggcatttctgtggatccgaggaggcggaacaagtccacggagtccctgcaggccaacgtgcagcggctgaaggagtaccgctccaaactcatcctcttccccaggaagccctcggcccccaagaagggagacagttctgctgaagaactgaaactggccacccagctgaccggaccggtcatgcccgtccggaacgtctataagaaggagaaagctcgagtcatcactgaggaagagaagaatttcaaagccttcgctagtctccgtatggcccgtgccaacgcccggctcttcggcatacgggcaaaaagagccaaggaagccgcagaacaggatgttgaaaagaaaaaataaagccctcctggggacttggaatcagtcggcagtcatgctgggtctccacgtggtgtgtttcgtgggaacaactgggcctgggatggggcttcactgctgtgacttcctcctgccaggggatttggggctttcttgaaagacagtccaagccctggataatgctttactttctgtgttgaagcactgttggttgtttggttagtgactgatgtaaaacggttttcttgtggggaggttacagaggctgacttcagagtggacttgtgttttttctttttaaagaggcaaggttgggctggtgctcacagctgtaatcccagcactttgaggttggctgggagttcaagaccagcctggccaacatgtcagaactactaaaaataaagaaatcagccatgaaaaaaaaaaaaaaaaaaaaaaaaa

SEQ ID NO: 2629 - DNA, 3534 bp, Homo sapiens
tcgaggtcgacatttataccgtctgagggtagcagctcgaaagtagaagaaagtgttgccagggacggcagtatctctttgtgtgaccctggcggcttatgggacgttggcttcagacctttgtgatacaccatgctgcgtgggacgatgacggcgtggagaggaatgaggcctgaggtcacactggcttgcctcctcctagccacagcaggctgctttgctgacttgaacgaggtccctcaggtcaccgtccagcctgcgtccaccgtccagaagcccggaggcactgtgatcttgggctgcgtggtggaacctccaaggatgaatgtaacctggcgcctgaatggaaaggagctgaatggctcggatgatgctctgggtgtcctcatcacccacgggaccctcgtcatcactgcccttaacaaccacactgtgggacggtaccagtgtgtggcccggatgcctgcgggggctgtggccagcgtgccagccactgtgacactagccaatctccaggacttcaagttagatgtgcagcacgtgattgaagtggatgagggaaacacagcagtcattgcctgccacctgcctgagagccaccccaaagcccaggtccggtacagcgtcaaacaagagtggctggaggcctccagaggtaactacctgatcatgccctcagggaacctccagattgtgaatgccagccaggaggacgagggcatgtacaagtgtgcagcctacaacccagtgacccaggaagtgaaaacctccggctccagcgacaggctacgtgtgcgccgctccaccgctgaggctgcccgcatcatctaccccccagaggcccaaaccatcatcgtcaccaaaggccagagtctcattctggagtgtgtggccagtggaatcccacccccacgggtcacctgggccaaggatgggtccagtgtcaccggctacaacaagacgcgcttcctgctgagcaacctcctcatcgacaccaccagcgaggaggactcaggcacctaccgctgcatggccgacaatggggttgggcagcccggggcagcggtcatcctctacaatgtccaggtgtttgaaccccctgaggtcaccatggagctatcccagctggtcatcccctggggccagagtgccaagcttacctgtgaggtgcgtgggaaccccccgccctccgtgctgtggctgaggaatgctgtgcccctcatctccagccagcgcctccggctctcccgcagggccctgcgcgtgctcagcatggggcctgaggacgaaggcgtctaccagtgcatggccgagaacgaggttgggagcgcccatgccgtagtccagctgcggacctccaggccaagcataaccccaaggctatggcaggatgctgagctggctactggcacacctcctgtatcaccctccaaactcggcaaccctgagcagatgctgagggggcaaccggcgctccccagacccccaacgtcagtggggcctgcttccccgcagtgtccaggagagaaggggcagggggctcccgccgaggctcccatcatcctcagctcgccccgcacctccaagacagactcatatgaactggtgtggcggcctcggcatgagggcagtggccgggcgccaatcctctactatgtggtgaaacaccgcaaggtcacaaattcctctgacgattggaccatctctggcattccagccaaccagcaccgcctgaccctcaccagacttgaccccgggagcttgtatgaagtggagatggcagcttacaactgtgcgggagagggccagacagccatggtcaccttccgaactggacggcggcccaaacccgagatcatggccagcaaagagcagcagatccagagagacgaccctggagccagtccccagagcagcagccagccagaccacggccgcctctcccccccagaagctcccgacaggcccaccatctccacggcctccgagacctcagtgtacgtgacctggattccccgtgggaatggtgggttcccaatccagtccttccgtgtggagtacaagaagctaaagaaagtgggagactggattctggccaccagcgccatccccccatcgcggctgtccgtggagatcacgggcctagagaaaggcacctcctacaagtttcgagtccgggctctgaacatgctgggggagagcgagcccagcgccccctctcggccctacgtggtgtcgggctacagcggtcgcgtgtacgagaggcccgtggcaggtccttatatcaccttcacggatgcggtcaatgagaccaccatcatgctcaagtggatgtacatcccagcaagtaacaacaacaccccaatccatggcttttatatctattatcgacccacagacagtgacaatgatagtgactacaagaaggatatggtggaaggggacaagtactggcactccatcagccacctgcagccagagacctcctacgacattaagatgcagtgcttcaatgaaggaggggagagcgagttcagcaacgtgatgatctgtgagaccaaagctcggaagtcttctggccagcctggtcgactgccacccccaactctggccccaccacagccgccccttcctgaaaccatagagcggccggtgggcactggggccatggtggctcgctccagcgacctgccctatctgattgtcggggtcgtcctgggctccatcgttctcatcatcgtcaccttcatccccttctgcttgtggagggcctggtctaagcaaaaacatacaacagacctgggttttcctcgaagtgcccttccaccctcctgcccgtatactatggtgccattgggaggactcccaggccaccaggccagtggacagccctacctcagtggcatcagtggacgggcctgtgctaatgggatccacatgaataggggctgcccctcggctgcagtgggctacccgggcatgaagccccagcagcactgcccaggcgagcttcagcagcagagtgacaccagcagcctgctgaggcagacccatcttggcaatggatatgacccccaaagtcaccagatcacgaggggtcccaagtctagcccggacgagggctctttcttatacacactgcccgacgactccactcaccagctgctgcagccccatcacgactgctgccaacgccaggagcagcctgctgctgtgggccagtcaggggtgaggagagcccccgacagtcctgtcctggaagcagtgtgggaccctccatttcactcagggcccccatgctgcttgggccttgtgccagttgaagaggtggacagtcctgactcctgccaagtgagtggaggagactggtgcccccagcaccccgtaggggcctacgtaggacaggaacctggaatgcagctctccccggggccactggtgcgtgtgtcttttgaaacaccacctctcacaatttaggcagaagctgatatcccagaaagactatatattgttttttttttaaaaaaaaagtcg

SEQ ID NO: 2630 - DNA, 794 bp, Homo sapiens
ggcagccgtctgtgccacccagagccggcgggccgctaggtccccggagaccctgctatggtgcgtgcgggcgccgtgggggctcatctccccgcgtccggcttggatatcttcggggacctgaagaagatgaacaagcgccagctctattaccaggttttaaacttcgccatgatcgtgtcttctgcactcatgatatggaaaggcttgatcgtgctcacaggcagtgagagccccatcgtggtggtgctgagtggcagtatggagccggcctttcacagaggagacctcctgttcctcacaaatttccgggaagacccaatcagagctggtgaaatagttgtttttaaagttgaaggacgagacattccaatagttcacagagtaatcaaagttcatgaaaaagataatggagacatcaaatttctgactaaaggagataataatgaagttgatgatagaggcttgtacaaagaaggccagaactggctggaaaagaaggacgtggtgggaagagcaagagggtttttaccatatgttggtatggtcaccataataatgaatgactatccaaaattcaagtatgctcttttggctgtaatgggtgcatatgtgttactaaaacgtgaatcctaaaatgagaagcagttcctgggaccagattgaaatgaattctgttgaaaaagagaaaaactaatatatttgagatgttccattttctgtataaaagggaacagtgtggagatgtttttgtcttgtccaaataaaagattcaccagtaaaaaaaaaaaaaa

SEQ ID NO: 2631 - DNA, 1534 bp, Homo sapiens
ttgtccgtggcttctctgagaagaaaagttgaaaaagggtaaaagttttcaggaatattcgggctctctattgctaagcatagcgagtgtcggttttctctctccaacagacatcgctattgcggttccgaggcagtgggaagagatgcggcccctggacatcgtcgagctggcggaaccggaggaagtggaggtgctggagcccgaggaggatttcgagcagtttctgctcccggtcatcaacgagatgcgcgaggacatcgcgtcgctgacgcgcgagcacgggcgggcgtacctgcggaaccggagcaagctgtgggagatggacaatatgctcatccagatcaaaacgcaggtggaggcctcggaggagagcgccctcaaccacctccagaacccgggcgacgcggccgagggccgggcggccaagaggtgcgagaaggccgaggagaaggccaaggagattgcgaagatggcagagatgctggtggagctggtccggcggatagagaagagcgagtcgtcgtgagcgcggtcggcggtttccagccaatggattctggtcaactggtggagattggctgacaccctggagaagccgaaaccagagagccttttgttttctcttttttcctgtctatgctctgtctcacttaacactacgttttctgctatggtctgtggttgatgacctcaatatgagtttcgattgttaacgtgtttttgtttgggaagtaattttgtttgaaaatgctctcacatacaggaattagggcctagattgtaagctcttgcagcagtcacatttgttcccgggctttggtggttatttctaaatttttgaggtgctttgctatttcttgtgtgacctgatagctccctggaactttgggtctgtgtgtgacacatgagactcacagttggagttctccagctctggaggtgctgaaggagctgcattaattctggaagacgactccatgcagcaactactgaagaaaggaccagacttcaacggggagtgtggatgggccgacctggctgggactcgtgaatctggagaagagctggagaatggatagtattgtctgtatttggagactttaatttctgtgtgagaccaaaggaggagagatgtgttttgttcaaaatttaaatttgttgtggtacactatcttatgtaacctgtctggtgagtttgtttggacaacctaactcagctttatttgacatggaacctaaaatagaagataagatcttgatattctgtacaagttgatgtaataccctgatgcgttttagaggacttggcataaaatgaaagattggcaaaggcccttgaggggcttggggatgacagtatggaactgtctgcattggaccctaaactggactagaagaggcatcttcaaggttcatacgttgtccagctgtaagttcatttgagtagcagacctaacaaatatttgaggtcagaaccctaccatgttaaaacaaacaaaaacttaccatgttaataaaagtattcatttgc

SEQ ID NO: 2632 - DNA, 967 bp, Homo sapiens
gcggcatgggcagtatccgccgccatcctcttccgtgaggcgcgctgagacccggaccggccctcctgagaggatgccggtgcgggcgcccgcggagagggacccgtcgccatgggccgtgtgatccgtggacagaggaagggcgccgggtctgtgttccgcgcgcacgtgaagcaccgtaaaggcgctgcgcgcctgcgcgccgtggatttcgctgagcggcacggctacatcaagggcatcgtcaaggacatcatccacgacccgggccgcggcgcgcccctcgccaaggtggtcttccgggatccgtatcggtttaagaagcggacggagctgttcattgccgccgagggcattcacacgggccagtttgtgtattgcggcaagaaggcccagctcaacattggcaatgtgctccctgtgggcaccatgcctgagggtacaatcgtgtgctgcctggaggagaagcctggagaccgtggcaagctggcccgggcatcagggaactatgccaccgttatctcccacaaccctgagaccaagaagacccgtgtgaagctgccctccggctccaagaaggttatctcctcagccaacagagctgtggttggtgtggtggctggaggtggccgaattgacaaacccatcttgaaggctggccgggcgtaccacaaatataaggcaaagaggaactgctggccacgagtacggggtgtggccatgaatcctgtggagcatccttttggaggtggcaaccaccagcacatcggcaagccctccaccatccgcagagatgcccctgctggccgcaaagtgggtctcattgctgcccgccggactggacgtctccggggaaccaagactgtgcaggagaaagagaactagtgctgagggcctcaataaagtttgtgtttatgccaaaaaaaaaaaaaaaaaaaaaaaaaaaaaaaaaaaaaaaaaaaaaaaa

SEQ ID NO: 2633 - DNA, 3810 bp, Homo sapiens
ggcatcccaggatttggaattcagctgtgagctcatgagctgatggatgtttccaggagtaccctgaagaccacccaggtgggagtgtaagataaccttccagataaagagttgctgctaccaaaagagtgctgacaccatcacagtatgttcccttctcaaccctggacatggttcagaaacagctaaagcagacaagaatctggggcagccaatattgtaccacctgccaaagcttggcacaaacaatctggaagccaaaaattgcacatactgtggaacagagcaagtggttctggcctccctgggatttggatcctggtttccagagctaagaacacaaagtcatgaaggtgaaggaggagaaggctggggtaggaaagctggaccacactaaccacaggaggagatttccggatcagaaagaatgccctcctatccacattgggcttccagtacccacttaccctcaaagaaaaactgaccagaagggacatctttcaggcctgcaaaaagtccactggggcctgcggccagaccagccacagcaggaactgactggcccagggagtggggcaagcagccaggacagcagcatggatcttatcagcaggactcggtccccagctgctgagcagctccaggacatcctgggggaggaagatgaggctcccaaccccaccctctttacagagatggatactctgcagcatgacggagaccagatggagtggaaggagtcagccaggtggataaagtttgaagaaaaggtagaggaaggcggcgaacgctggagcaagccccacgtgtccacactatccctgcacagcctcttcgagctccgtacctgcctgcagacggggacggtgctgctggatttggacagtggctccttaccacagatcatagatgatgtcattgagaagcagattgaggatggtctcctgcggccagagctccgggagagggtcagttacgtcctcctgaggaggcaccgccaccaaaccaagaagcccatccaccgctccttagctgacattgggaagtcagtctccaccacaaatcgcagtcctgcccggagccctggtgctggcccgagtctacaccactccacggaagacctgcggatgcggcagagtgcaaattacggacgtctgtgtcatgcccagagcagaagcatgaatgacatttctctcaccccaaacacagaccagcggaaaaacaaattcatgaagaagatccccaaggactcagaagcgtccaacgtgctcgtgggcgaggtggacttcctagaccagccattcatcgcgttcgtgcgcctcatccagtcggccatgctgggaggagtgaccgaggtgcctgtccccaccagatttctgtttatactactgggaccttctgggagagcaaaatcctacaatgaaattggccgtgccattgcaaccctcatggtagatgatctcttcagtgacgtggcctacaaagcccgcaatcgggaagatctgatcgcaggaattgatgaatttctggatgaggtcatcgtccttcctcctggagaatgggacccaaatatccggattgagccccccaagaaggtgccctctgctgacaagaggaaatctgtgttctccctagcagagctgggccagatgaatggctctgtgggaggaggcggcggagctcctggaggaggcaatggaggtggtggtggtggtggcagtggcggcggggctggcagtggcggggccggcggaacaagcagcggggatgatggagagatgccagccatgcatgaaatcggggaggaacttatctggacaggaaggttcttcggtggcctgtgtctggatatcaagaggaagttgccctggttcccaagtgacttctatgatggcttccacattcagtccatctctgccatcctattcatctacctcggctgtatcaccaacgcgatcacctttggtgggcttctgggggatgccaccgacaattatcagggagtgatggagagcttcctgggcactgccatggctggctccttgttctgcctcttctcgggacagcctctcatcattctcagcagcacggggcccatcctcatctttgagaagctcctcttcgacttcagcaaaggcaatggcctggactacatggagttccgcctctggattggcctacactcagctgtccagtgccttatcctagtggccacagatgccagctttatcatcaaatatatcacccgcttcaccgaggagggcttctccacccttatcagcttcatcttcatctacgatgccatcaagaagatgatcggtgccttcaagtactaccctatcaatatggacttcaagccaaacttcatcactacctacaagtgcgagtgtgtcgcccctgacacagtgaatacaaccgtgttcaatgcttcagccccattggcaccagacaccaacgcttctctgtacaacctccttaacctcacagcgttggactggtccctgctgagcaagaaggagtgtctgagctacggcgggcgcctgcttgggaattcctgcaagtttatcccagacctggcgctcatgtccttcatccttttctttgggacatactccatgaccctgaccctgaagaagttcaaattcagccgctattttcctaccaaggtccgggccctggtggctgacttttccattgttttctccatcctgatgttctgtggaatcgatgcctgttttggcctagaaactcccaagctgcatgtgcccagtgtcatcaagccaacgcggcctgaccgaggctggttcgtggccccctttgggaagaacccgtggtgggtatacccagcaagcatcctgcccgccctgctggtgaccatcctgatcttcatggaccagcagatcactgccgtcattgtcaaccggaaggagaacaaactgaagaaggctgccggctaccatctggacctgttctgggtgggcatcctcatggctttgtgctcctttatggggctcccctggtacgtggctgccacggtcatctccatcgcccacatcgacagcctcaagatggagacagagaccagtgcccctggggagcagccccagtttctgggagtcagggaacagagagtaaccggcatcatcgtcttcatcctgacgggaatctctgtcttcctggctcccatcctaaagtgtatccccctgccggtgctgtacggagtcttcctctacatgggcgtggcctccctgaatggcatccagatggggaccggagggtcagaattcaaaatccagaagaagctgactccattctgggaacgctgcaagctcttcctgatgccagccaagcaccagccggaccatgccttcctgcggcacgtgccgctgcgccggatccacctcttcaccctggtgcagatcctctgcctggcggtgctctggatcctcaaatccacggtggctgccatcatcttcccggtcatgtctctctccaccacagatcctgggcctcatcatcgttcgaaggcttctggatttcatcttttcccagcacgacctggcctggattgacaacatcctcccagagaaggaaaaaaaggagacagacaagaagaggaagagaaaaaaaggggcccacgaggactgtgatgaggagccccagttccctcctccctcggttataaagattcccatggaaagtgtccaatcagatccccaaaacggtatccactgcattgccagaaaaagatcttccagttggagttactcactctgattcttccttcagtgacacagaacttgaccgaag

SEQ ID NO: 2634 - DNA, 2319 bp, Homo sapiens
gcaaaacatttccctgctgggggcggcgaccaccgtgagcgtcccggaaggggcggcaaagacgcctccgtcgcgcacgaggtggcctcgttggctttaccttggttcgcggtcgtccttggttatcgtgagcgtccgcgagtctctgggaggccaagcctaggggcgccacagcgcctgcgcgcgtacggcggccggaaggggctagaggcggctccctgggtgacaaccgcgcgccccacctttccccacgtggccgcgaagaccggctcaggagcatctatcggctgcacgccaacatcaacacaggcgaagatggtctccaagcgcattgcccaggagacctttgatgcagctgtgcgcgagaacatcgaggagtttgcgatggggccagaggaggcagtgaaagaggccgtggagcagtttgaatcgcaaggggttgatctgagcaacattgtaaagacggcacctaaagtctctgcagacggatcccaggagcccacacatgacatcctgcagatgctcagtgacctccaggagtctgtggccagctctcgcccccaggaggtgtcagcatacctcacccgcttctgcgaccagtgcaaacaggacaaggcctgccgcttcctcgcggcccagaagggggcctaccccatcatcttcactgcctggaagctggccactgcaggtgaccagggccttctgctccagtccctcaatgccctgtcggtgctgactgatggacagccagacctcctggatgcccagggcctgcagctcctagtggccacgctgacccagaatgctgatgaggctgacctgacctgctctgggatccgctgtgtgcgtcacgcttgcctgaaacatgaacagaatcggcaagacctggtgaaagctggcgtgctgcctctgctgactggtgccatcacccatcatggccaccacactgacgtggtcagggaagcctgctgggccctgcgtgtcatgaccttcgatgacgacatccgtgtgccctttggccatgcccacaaccatgccaagatgattgtgcaggagaacaaaggcttgaaggtgctcatcgaagccaccaaagcgttcctggataaccctggcatcctgagcgagctctgtggaaccctgtcccgcctggccattcgcaacgagttctgccaggaggtcgtcgacctcgggggcctgagcattctggtgtccctgctagccgactgcaatgaccaccagatgagggaccagagcggcgttcaggagctcgtgaagcaagtgctgagcaccctgcgagccatcgcaggcaacgacgacgtgaaagatgctattgtccgtgctggtgggacggagtccatcgtggctgctatgacccagcatctgaccagcccccaggtgtgtgagcagagctgcgcggccctgtgcttcctggccctgcgtaagcccgacaacagccgcatcatcgtggagggtggcggggctgtggcagcactgcaggccatgaaggcacacccgcagaaggccggcgtgcagaaacaggcttgcatgctgatccgaaacctggtggcccacggccaggccttctcgaagcccatcctggacctgggggctgaggcactcatcatgcaggcccgatctgcccaccgtgactgtgaggacgtggccaaggccgccctgcgggacctgggttgtcatgtcgagctccgagagctgtggacaggccagaggggcaacctggcgccatgaccccaggcccagtctgggccgtgactctgggtgagtcgtgtgactcaggaatgggggtagatccatgtcctccactgtcccccattagttctgtccccttcacaatgagaagtgttttctggcaggccctaggtaaagggtcgggggaggggggagccttgtagggaggcctctacacagaagaaagcagcccccatgtcccagccacttctgggtcccagccagcagcacggatgttactgtcctgctccttcccccagccccacgccctaccagagggggcaaagggcacgtcccatcactcactgccctgtctgaaatgtggcagccactgtgggccaggctcagggcagggcaggcgattccagtggggttgggccccctggcgcctgctgcttactgcagtttcatgcaggcctctgctccttgtctttcttacctgtaaaatgggtctcagatgctccgccctgcttggccccagcttgtctgtctctgggtcctgggccagccaggatacctgataataaaagatcattgggtgaaaaaaaaaaaaaaaaaaaaaaaaaaaaaaaa

SEQ ID NO: 2635 - DNA, 988 bp, Homo sapiens
aggggacaagtctaggaggtctctgaggttactgtacccatccctccttcatctccctccagcatttgtttctggaaggagtcaacaccaacagctctgacctgggcagccttcctgagaaaatgcagccattcctcctcctgttggcctttcttctgacccctggggctgggacagaggagatcatcgggggccatgaggccaagccccactcccgcccctacatggcctttgttcagtttctgcaagagaagagtcggaagaggtgtggcggcatcctagtgagaaaggactttgtgctgacagctgctcactgccagggaagctccataaatgtcaccttgggggcccacaatatcaaggaacaggagcggacccagcagtttatccctgtgaaaagacccatcccccatccagcctataatcctaagaacttctccaacgacatcatgctactgcagctggagagaaaggccaagtggaccacagctgtgcggcctctcaggctacctagcagcaaggcccaggtgaagccagggcagctgtgcagtgtggctggctggggttatgtctcaatgagcactttagcaaccacactgcaggaagtgttgctgacagtgcagaaggactgccagtgtgaacgtctcttccatggcaattacagcagagccactgagatttgtgtgggggatccaaagaagacacagaccggtttcaagggggactccggggggcccctcgtgtgtaaggacgtagcccaaggtattctctcctatggaaacaaaaaagggacacctccaggagtctacatcaaggtctcacacttcctgccctggataaagagaacaatgaagcgcctctaacagcaggcatgagactaaccttcctctgggcctgaccatctctgggacagaggcaagaatcccaaggggtgggcagtcggggttgcaggactgtaataaatggatctctggtgtaaatatgactg

SEQ ID NO: 2636 - DNA, 979 bp, Homo sapiens
cttacagaactcccacggacacaccatgataaggacgctgctgctgtccactttggtggctggagccctcagttgtggggaccccacttacccaccttatgtgactagggtggttggcggtgaagaagcgaggcccaacagctggccctggcaggtctccctgcagtacagctccaatggcaagtggtaccacacctgcggagggtccctgatagccaacagctgggtcctgacggctgcccactgcatcagctcctccaggacctaccgcgtggggctgggccggcacaacctctacgttgcggagtccggctcgctggcagtcagtgtctctaagattgtggtgcacaaggactggaactccaaccaaatctccaaagggaacgacattgccctgctcaaactggctaaccccgtctccctcaccgacaagatccagctggcctgcctccctcctgccggcaccattctacccaacaactacccctgctacgtcacgggctggggaaggctgcagaccaacggggctgttcctgatgtcctgcagcagggccggttgctggttgtggactatgccacctgctccagctctgcctggtggggcagcagcgtgaaaaccagtatgatctgtgctgggggtgatggcgtgatctccagctgcaacggagactctggcgggccactgaactgtcaggcgtctgacggccggtggcaggtgcacggcatcgtcagcttcgggtctcgcctcggctgcaactactaccacaagccctccgtcttcacgcgggtctccaattacatcgactggatcaattcggtgattgcaaataactaaccaaaagaagtccctgggactgtttcagacttggaaaggtcacagaaggaaaataatataataaagtgacaactatgcaaaaaaaaaaaaaaaaaaaaaaaaaaaaaaaaaaataaaaaaaaaaaaaaaaaaaaaaaaaaaaaa

SEQ ID NO: 2637 - DNA, 2001 bp, Homo sapiens
atggcggcggagaacgaggccagccaggagagcgccctgggcgcctactcgccagtggactacatgagcatcaccagcttcccgcggctgcccgaggacgagccggcgcccgcggccccgctgaggggccgcaaggacgaggacgcctttctgggagaccccgacaccgacccggactccttcctgaagtctgcacggctgcagcggctgccatcgtcgtcgtcggagatgggcagccaagacgggtcgccgctacgcgagacgcgcaaagacccgttctccgccgcagcggccgagtgctcctgccgccaggatgggctcacggtcatcgtcacggcctgtctcaccttcgctaccggtgtcaccgtggcgctggtcatgcagatctacttcggggacccccagatcttccagcagggtgccgtggtgaccgatgctgcccgctgcacttcactgggcatcgaggtgctcagtaaacagggatcttctgtggacgcagcggtggcagcagccttgtgtttgggtatcgtggctccacacagttctggcctgggcggtgggggcgtgatgctggtacatgacatccgacgaaatgagagccacctaattgatttccgggagtccgcaccaggggccctcagggaagagaccctgcaaagatcctgggagaccaaggtggggaccctgcctgggctcttggtgggggttcccggaatggtgaaggggctacatgaagctcaccagctctatggcaggctgccatggtcccaagtcctggcctttgcagcagctgtggcccaagatggcttcaacgtgactcatgatctagcccgtgccctggctgaacagctgccacccaacatgtccgagcgcttccgggagacgttcctgccatcgggccgcccgccactacctggctcgttgctgcatcggcccgacctggctgaggtgctggatgtacttggcacctccggcccggctgccttctacgcaggtggcaacctcacactggagatggtggccgaggctcagcacgcagggggtgtcataaccgaagaggacttcagcaattacagcgcccttgtggagaagcctgtgtgtggcgtgtacagaggccacctggttcttagtcccccacctccgcacacgggccctgccctcatcagtgctctcaacatcctggagggcttcaatctcaccagcctggtatcccgagaacaggctcttcactgggtggcagagaccctgaagattgcattagccctggccagcagactgggagatcccgtctatgattctaccatcactgagagcatggatgacatgctcagcaaggtggaggccgcctacctccggggccatatcaatgactcccaggcagcccctgccccactcctgcctgtctatgaactagacggagctcccacggctgcccaggtgctgatcatgggacctgatgacttcattgtggccatggttagctccctgaaccagccctttggcagcggccttatcaccccctcggggatcctgctcaacagccagatgctggacttctcctggcccaaccggacagctaaccactctgcacccagcctggagaattcagtgcagccagggaagcggccactctctttcctgctgcccacagtggtccgacccgcggaggggctctgtggaacctacctcgctctgggggccaatggagctgcgcggggcctcagcggcctgacacaggttctgctgaatgtcctgaccttgaaccggaacctgagtgacagcctggcccgcggccgcctacacccggacctgcagtccaacctcctgcaggtggacagtgagttcacagaggaagagattgagttcctggaagccaggggtcaccacgtggagaaagtagatgtcttatcctgggtccatggcagccgaaggaccaacaacttcatcatcgctgttaaggaccctcggagcccagatgcagctggagccaccatcctgtag

SEQ ID NO: 2638 - DNA, 2312 bp, Homo sapiens
gggagatggatcaggtggcaaccttgcggcttgagtctgtcgacctgcagagctccaggaacaacaaggagcaccacacgcaggagatgggcgtcaagcggctcactgtgcgccgcggccagcccttctacctccggctgagcttcagccgacccttccagtcccagaacgaccacatcacctttgtggctgagaccggacccaagccgtcagagctgctggggacccgagccacattcttcctcacccgggtccagcccgggaatgtctggagcgcttctgatttcaccattgactccaactctctccaagtttcccttttcacaccagccaatgcagttattggccattacactctgaaaatagagatctctcagggccaaggtcacagtgtgacttacccgctgggaactttcatcctactttttaacccttggagtccagaggacgacgtctacctgccaagtgaaatactgctgcaggagtatatcatgcgagattatggctttgtttacaagggtcatgaaagattcatcacctcctggccctggaactacgggcagtttgaagaggacatcatagacatctgctttgagatcctgaacaagagcctgtatcacttaaagaacccggccaaagactgttcccagcggaacgacgtggtgtatgtgtgcagggtggtgagtgccatgatcaacagcaacgatgacaatggcgtgctgcaggggaactggggcgaggactactccaaaggggtcagtcctctggagtggaagggcagtgtggccatcctacagcagtggtcagccaggggcgggcagcctgtgaagtacggacagtgctgggtcttcgcctctgttatgtgcaccgtaatgagatgcttaggtgttccaacccgtgttgtttccaatttccgttccgcgcacaacgtggataggaacttgaccatcgatacgtactatgaccgaaatgccgagatgctgtcaactcagaaacgagacaaaatatggaacttccacgtctggaatgagtgctggatgatccggaaagatctcccaccaggatacaacgggtggcaggttctggaccccactccccagcagaccagcagtgggctgttctgctgtggccctgcctctgtgaaggccatcagggaaggggatgtccacctggcctatgacaccccttttgtgtatgccgaggtgaacgccgatgaagtcatttggctccttggggatggccaggcccaggaaatcctggcccacaacaccagttccatcgggaaggagatcagcactaagatggtggggtcagaccagcgccagagcatcaccagctcctacaagtacccagaaggatcccctgaggagagagctgtcttcatgaaggcttctcggaaaatgctgggcccccaaagagcttctttgcccttcctggatctcctggagtctgggggtcttagggatcagccagcgcagctgcagcttcacctggccaggatacccgagtggggccaggacctgcagctgctgctgcgtatccagagggtgccagacagcacccaccctcgggggcccatcggactggtggtgcgcttctgtgcacaggccctgctgcatgggggtggtacccagaagcccttctggaggcacacagtgcggatgaacctggactttgggaaggagacacagtggccgctcctcctgccctacagcaattacagaaacaagctaacggacgaaaagctcatccgcgtgtctggcatcgcggaggttgaagagacagggaggtccatgctggtcctaaaagatatctgtctggagcctccccacttgtctattgaggtgtctgagagggctgaggtgggcaaggcgctgagagtccatgtcaccctcaccaacaccttaatggtggctctgagcagctgcacgatggtgctggaaggaagcggcctcatcaatgggcagatagcaaaggaccttgggactctggtggccggacacaccctccaaattcaactggacctctacccgaccaaagctggaccccgccagctccaggttctcatcagcagcaacgaggtcaaggagatcaaaggctacaaggacatattcgtcactgtggctggggctccctgagacccgccctccagctgccctccctggcacccctgccccacctggctcctttctactcctggctatgtcgtcttggctccacctctgtcctctctctagcctgcctgggaatgaatgaagctctgttagaaacaccgtgtgctttgggaagagacaataaagatgtctttattt

SEQ ID NO: 2639 - DNA, 1695 bp, Homo sapiens
atgcccgccctacgtccactcctgccgctcctgctcctcctccggctgacctcgggggctggcttgctgccagggctggggagccacccgggcgtgtgccccaaccagctcagccccaacctgtgggtggacgcccagagcacctgtgagcgcgagtgtagcagggaccaggactgtgcggctgctgagaagtgctgcatcaacgtgtgtggactgcacagctgcgtggcagcacgcttccccggcagcccagctgcgccgacgacagcggcctcctgcgagggctttgtgtgcccacagcagggctcggactgcgacatctgggacgggcagcccgtgtgccgctgccgcgaccgctgtgagaaggagcccagcttcacctgcgcctcggacggcctcacctactacaaccgctgctatatggacgccgaggcctgcctgcggggcctgcacctccacatcgtgccctgcaagcacgtgctcagctggccgcccagcagcccggggccgccggagaccactgcccgccccacacctggggccgcgcccgtgcctcctgccctgtacagcagcccctccccacaggcggtgcaggttgggggtacggccagcctccactgcgacgtcagcggccgcccgccgcctgctgtgacctgggagaagcagagtcaccagcgagagaacctgatcatgcgccctgatcagatgtatggcaacgtggtggtcaccagcatcgggcagctggtgctctacaacgcgcggcccgaagacgccggcctgtacacctgcaccgcgcgcaacgctgctgggctgctgcgggctgacttcccactctctgtggtccagcgagagccggccagggacgcagcccccagcatcccagccccggccgagtgcctgccggatgtgcaggcctgcacgggccccacttccccacaccttgtcctctggcactacgacccgcagcggggcggctgcatgaccttcccggcccgtggctgtgatggggcggcccgcggctttgagacctacgaggcatgccagcaggcctgtgcccgcggccccggcgacgcctgcgtgctgcctgccgtgcagggcccctgccggggctgggagccgcgctgggcctacagcccgctgctgcagcagtgccatcccttcgtgtacggtggctgcgagggcaacggcaacaacttccacagccgcgagagctgcgaggatgcctgccccgtgccgcgcacaccgccctgccgcgcctgccgcctccggagcaagctggcgctgagcctgtgccgcagcgacttcgccatcgtggggcggctcacggaggtgctggaggagcccgaggccgccggcggcatcgcccgcgtggcgctcgaggacgtgctcaaggatgacaagatgggcctcaagttcttgggcaccaagtacctggaggtgacgctgagtggcatggactgggcctgcccctgccccaacatgacggcgggcgacgggccgctggtcatcatgggtgaggtgcgcgatggcgtggccgtgctggacgccggcagctacgtccgcgccgccagcgagaagcgcgtcaagaagatcttggagctgctggagaagcaggcctgcgagctgctcaaccgcttccaggactagcccccgcaggggcctgcgccaccccgtcctggtgaataaacgcactcc

SEQ ID NO: 2640 - DNA, 1444 bp, Homo sapiens
atgcagggcacccctggaggcgggacgcgccctgggccatcccccgtggacaggcggacactcctggtcttcagctttatcctggcagcagctttgggccaaatgaatttcacaggggaccaggttcttcgagtcctggccaaagatgagaagcagctttcacttctcggggatctggagggcctgaaaccccagaaggtggacttctggcgtggcccagccaggcccagcctccctgtggatatgagagttcctttctctgaactgaaagacatcaaagcttatctggagtctcatggacttgcttacagcatcatgataaaggacatccaggtgctgctggatgaggaaagacaggccatggcgaaatcccgccggctggagcgcagcaccaacagcttcagttactcatcataccacaccctggaggagatatatagctggattgacaactttgtaatggagcattccgatattgtctcaaaaattcagattggcaacagctttgaaaaccagtccattcttgtcctgaagttcagcactggaggttctcggcacccagccatctggattgacactggaattcactcccgggagtggatcacccatgccaccggcatctggactgccaataagattgtcagtgattatggcaaagaccgtgtcctgacagacatactgaatgccatggacatcttcatagagctcgtcacaaaccctgatgggtttgcttttacccacagcatgaaccgcttatggcggaagaacaagtccatcagacctggaatcttctgcatcggcgtggatctcaacaggaactggaagtcgggttttggaggaaatggttctaacagcaacccctgctcagaaacttatcacgggccctcccctcagtcggagccggaggtggctgccatagtgaacttcatcacagcccatggcaacttcaaggctctgatctccatccacagctactctcagatgcttatgtacccttacggccgattgctggagcccgtttcaaatcagagggagttgtacgatcttgccaaggatgcggtggaggccttgtataaggtccatgggatcgagtacatttttggcagcatcagcaccaccctctatgtggccagtgggatcaccgtcgactgggcctatgacagtggcatcaagtacgccttcagctttgagctccgggacactgggcagtatggcttcctgctgccggccacacagatcatccccacggcccaggagacgtggatggcgcttcggaccatcatggagcacaccctgaatcacccctactagcagcacgactgagggcaggaggctccatccttctccccaaggtctgtggctcctcccgaaacccaagttatgcatccccatccccatgccctcatcccgacctcttagaaaataaatacaagtttgaacaggc

SEQ ID NO: 2641 - DNA, 1218 bp, Homo sapiens
atggactctcttgttacagcaaacaccaaattttgctttgatctttttcaagagataggcaaagatgatcgtcataaaaacatatttttctctcccctgagcctctcagctgcccttggtatggtacgcttgggtgctagaagtgacagtgcacatcagattgatgaggtactacacttcaacgaattttcccagaatgaaagcaaagaacctgacccttgtctgaaaagcaacaaacaaaaagctgggtccttaaacaatgagagcggactggtcagctgctactttgggcagcttctctccaaattagacaggatcaagactgattacacactgagtattgccaacaggctttatggagagcaggaattcccaatctgtcaggaatacttagatggtgtgattcaattttaccacacgacgattgaaagtgttgatttccaaaaaaaccctgaaaaatccagacaagagattaacttctgggttgaatgtcaatcccaaggtaaaatcaaggaactcttcagcaaggacgctattaatgctgagactgtgctggtactggtgaatgctgtttacttcaaggccaaatgggaaacatactttgaccatgaaaacacggtggatgcacctttctgtctaaatgcgaatgaaaacaagagtgtgaagatgatgacgcaaaaaggcctctacagaattggcttcatagaggaggtgaaggcacagatcctggaaatgaggtacaccaaggggaagctcagcatgttcgtgctgctgccatctcactctaaagataacctgaagggtctggaagagcttgaaaggaaaatcacctatgaaaaaatggtggcctggagcagctcagaaaacatgtcagaagaatcggtggtcctgtccttcccccggttcaccctggaagacagctatgatctcaattccattttacaagacatgggcattacggatatctttgatgaaacgagggctgatcttactggaatctctccaagtcccaatttgtacttgtcaaaaattatccacaaaacctttgtggaggtggatgaaaacggtacccaggcagctgcagccactggggctgttgtctcggaaaggtcactacgatcttgggtggagtttaatgccaaccacccttttctctttttcattagacacaacaaaacccaaaccattctcttttatggcagggtctgctctccttaa

SEQ ID NO: 2642 - DNA, 1179 bp, Homo sapiens
atgggttctctcagcacagctaacgttgaattttgccttgatgtgttcaaagagctgaacagtaacaacataggagataacatcttcttttcttcgctgagtctgctttatgctctaagcatggtcctccttggtgccaggggagagactgcagagcaattggagaaggtgcttcattttagtcatactgtagactcattaaaaccagggttcaaggactcacctaagtgcagccaagctggaagaattcattccgagtttggtgtcgaattctctcaaatcaaccagccagactctaactgtaccctcagcattgccaacaggctctacgggacaaagacgatggcatttcatcagcaatatttaagctgttctgagaaatggtatcaagccaggttgcaaactgtggattttgaacagtctacagaagaaacgaggaaaatgattaatgcttgggttgaaaataaaactaatggaaaagtcgcaaatctctttggaaagagcacaattgacccttcatctgtaatggtcctggtgaataccatatatttcaaaggacaaaggcaaaataaatttcaagtaagagagacagttaaaagtccttttcagctaagtgaaggtaaaaatgtaactgtggaaatgatgtatcaaattggaacatttaaactggcctttgtaaaggagccgcagatgcaagttcttgagctgccctacgttaacaacaaattaagcatgattattctgcttccagtaggcatagctaatctgaaacagatagaaaagcagctgaattcggggacgtttcatgagtggacaagctcttctaacatgatggaaagagaagttgaagtacacctccccagattcaaacttgaaattaagtatgagctaaattccctgttaaaacctctaggggtgacagatctcttcaaccaggtcaaagctgatctttctggaatgtcaccaaccaagggcctatatttatcaaaagccatccacaagtcatacctggatgtcagcgaagagggcacggaggcagcagcagccactggggacagcatcgctgtaaaaagcctaccaatgagagctcagttcaaggcgaaccaccccttcctgttctttataaggcacactcataccaacacgatcctattctgtggcaagcttgcctctccctaa

SEQ ID NO: 2643 - DNA, 3672 bp, Homo sapiens
atggctccactccgcgcgctgctgtcctacctgctgcctttgcactgtgcgctctgcgccgccgcgggcagccggaccccagagctgcacctctctggaaagctcagtgactatggtgtgacagtgccctgcagcacagactttcggggacgcttcctctcccacgtggtgtctggcccagcagcagcctctgcagggagcatggtagtggacacgccacccacactaccacgacactccagtcacctccgggtggctcgcagccctctgcacccaggagggaccctgtggcctggcagggtggggcgccactccctctacttcaatgtcactgttttcgggaaggaactgcacttgcgcctgcggcccaatcggaggttggtagtgccaggatcctcagtggagtggcaggaggattttcgggagctgttccggcagcccttacggcaggagtgtgtgtacactggaggtgtcactggaatgcctggggcagctgttgccatcagcaactgtgacggattggcgggcctcatccgcacagacagcaccgacttcttcattgagcctctggagcggggccagcaggagaaggaggccagcgggaggacacatgtggtgtaccgccgggaggccgtccagcaggagtgggcagaacctgacggggacctgcacaatgaagcctttggcctgggagaccttcccaacctgctgggcctggtgggggaccagctgggcgacacagagcggaagcggcggcatgccaagccaggcagctacagcatcgaggtgctgctggtggtggacgactcggtggttcgcttccatggcaaggagcatgtgcagaactatgtcctcaccctcatgaatatcgtagatgagatttaccacgatgagtccctgggggttcatataaatattgccctcgtccgcttgatcatggttggctaccgacagtccctgagcctgatcgagcgcgggaacccctcacgcagcctggagcaggtgtgtcgctgggcacactcccagcagcgccaggaccccagccacgctgagcaccatgaccacgttgtgttcctcacccggcaggactttgggccctcagggtatgcacccgtcactggcatgtgtcaccccctgaggagctgtgccctcaaccatgaggatggcttctcctcagccttcgtgatagctcatgagaccggccacgtgctcggcatggagcatgacggtcaggggaatggctgtgcagatgagaccagcctgggcagcgtcatggcgcccctggtgcaggctgccttccaccgcttccattggtcccgctgcagcaagctggagctcagccgctacctcccctcctacgactgcctcctcgatgacccctttgatcctgcctggccccagcccccagagctgcctgggatcaactactcaatggatgagcagtgccgctttgactttggcagtggctaccagacctgcttggcattcaggacctttgagccctgcaagcagctgtggtgcagccatcctgacaacccgtacttctgcaagaccaagaaggggcccccgctggatgggactgagtgtgcacccggcaagtggtgcttcaaaggtcactgcatctggaagtcgccggagcagacatatggccaggatggaggctggagctcctggaccaagtttgggtcatgttcgcggtcatgtgggggcggggtgcgatcccgcagccggagctgcaacaacccctccccagcctatggaggccgcccgtgcttagggcccatgttcgagtaccaggtctgcaacagcgaggagtgccctgggacctacgaggacttccgggcccagcagtgtgccaagcgcaactcgtactatgtgcaccagaatgccaagcacagctgggtgccctacgagcctgacgatgacgcccagaagtgtgagctgatctgccagtcggcggacacgggggacgtggtgttcatgaaccaggtggttcacgatgggacacgctgcagctaccgggacccatacagcgtctgtgcgcgtggcgagtgtgtgcctgtcggctgtgacaaggaggtggggtccatgaaggcggatgacaagtgtggagtctgcgggggtgacaactcccactgcaggactgtgaaggggacgctgggcaaggcctccaagcaggcaggagctctcaagctggtgcagatcccagcaggtgccaggcacatccagattgaggcactggagaagtccccccaccgcattgtggtgaagaaccaggtcaccggcagcttcatcctcaaccccaagggcaaggaagccacaagccggaccttcaccgccatgggcctggagtgggaggatgcggtggaggatgccaaggaaagcctcaagaccagcgggcccctgcctgaagccattgccatcctggctctccccccaactgagggtggcccccgcagcagcctggcctacaagtacgtcatccatgaggacctgctgccccttatcgggagcaacaatgtgctcctggaggagatggacacctatgagtgggcgctcaagagctgggccccctgcagcaaggcctgtggaggagggatccagttcaccaaatacggctgccggcgcagacgagaccaccacatggtgcagcgacacctgtgtgaccacaagaagaggcccaagcccatccgccggcgctgcaaccagcacccgtgctctcagcctgtgtgggtgacggaggagtggggtgcctgcagccggagctgtgggaagctgggggtgcagacacgggggatacagtgcctgctgcccctctccaatggaacccacaaggtcatgccggccaaagcctgtgccggggaccggcctgaggcccgacggccctgtctccgagtgccctgcccagcccagtggaggctgggagcctggtcccagtgctctgccacctgtggagagggcatccagcagcggcaggtggtgtgcaggaccaacgccaacagcctcgggcattgcgagggggataggccagacactgtccaggtctgcagcctgcctgcctgtggaggaaatcaccagaactccacggtgagggccgatgtctgggaacttgggacgccagaggggcagtgggtgccacaatctgaacccctacatcccattaacaagatatcatcaacggagccctgcacgggagacaggtctgtcttctgccagatggaagtgctcgatcgctactgctccattcccggctaccaccggctctgctgtgtgtcctgcatcaagaaggcctcgggccccaaccctggcccagaccctggcccaacctcactgccccccttctccactcctggaagccccttaccaggaccccaggaccctgcagatgctgcagagcctcctggaaagccaacgggatcagaggaccatcagcatggccgagccacacagctcccaggagctctggatacaagctccccagggacccagcatccctttgcccctgagacaccaatccctggagcatcctggagcatctcccctaccacccccggggggctgccttggggctggactcagacacctacgccagtccctgaggacaaagggcaacctggagaagacctgagacatcccggcaccagcctccctgctgcctccccggtgacatga

SEQ ID NO: 2644 - DNA, 744 bp, Homo sapiens
agcggaggaggtgaggagggtttgctgggtgggtatgggggagggggagactctgcaggagcctaattccccactctgagctcacccttctgtctgcccgggccctaccccttcccctactctcacccttataatccttttcagcactaggtcttcccgtcacctccacctctctccatgacccggctctgcttacccagacccgaagcacgtgaggatccgatcccagttcctccaaggggcctgggtgctggggaggggtcaggtagtccagtgcgtccacctgtatccacctggggccctagctgggcccagctcctggacagtgtcctatggctgggggcactaggactgacaatccaggcagtcttttccaccactggcccagccctgctgctgcttctggtcagcttcctcacctttgacctgctccataggcccgcaggtcacactctgccacagcgcaaacttctcaccaggggccagagtcagggggccggtgaaggtcctggacagcaggaggctctactcctgcaaatgggtacagtctcaggacaacttagcctccaggacgcactgctgctgctgctcatggggctgggcccgctcctgagagcctgtggcatgcccttgaccctgcttggcctggctttctgcctccatccttgggcctgagagcccctccccacaactcagtgtccttcaaatatacaatgaccacccttcttcaaaaaaaaaaaaaaa

SEQ ID NO: 2645 - DNA, 828 bp, Homo sapiens
ctcacctcacagacacctcctctctggatcctccagagctataaagacgggccttccaccaccagacaggcgcactctaccaccatgaatccactcctgatccttgcctttgtgggagctgctgttgctgtcccctttgatgatgatgacaagattgttgggggctacacctgtgaggagaattctgtcccctaccaggtgtccttgaattctggctcccacttctgtggtggctccctcatcagcgaacagtgggtggtgtcagcaggtcactgctacaagccccacatccaggtgagactgggagagcacaatatcgaagtcctggaggggaatgagcagttcatcaatgcagccaagatcatccgccaccccaaatacaacaggattactctgaacaatgacatcatgctgatcaagctctccacacctgccgtcatcaatgcccatgtgtccacgatctctctgcccactgcccctccagctgctggcaccgagtgccttatctccggctggggcaataccctgagctcaggggccgactacccagatgagctgcagtgcctggacgctcctgtgctgacccaggctaagtgtaaagcctcctaccctttaaagattaccagcaagatgttctgtgtgggcttccttgagggaggcaaggattcctgccagggtgactctggtggccctgtggtctgcaatggacagcttcaaggaattgtctcctggggctatggctgtgcccagaagagaaggcctggagtctacaccaaggtctacaactatgtggactggattaaggacaccatagctgccaacagctaa

SEQ ID NO: 2646 - DNA, 741 bp, Homo sapiens
gccagacgcccctatgacgtcaaggccggtaatggcccgcctggcataatgcccagtacaggaccttagggactttctacttggcagtacatctacgtattagtcatcgctattaccatggtgaatcggttttggcagatacatcaatgggcgtggatagcggtttgactcacggggatttccaagtctccaccccattgacgtcaatgggagtttgttttggcaccaaaatcaacgggactttccaaaatgtcgtaacaactccgccccattgacgcaaatgggcggtaggcgtgtacggtgggaggtctatataagcagagctcgtttagtgaaccgtcagatcgcctggagacgccatccacgctgttttgacctccatagaagacaccgggaccgatccagcctccggactctagcctaggccgcgggacggataacaatttcacacaggaaacagctatgaccattaggcctatttaggtgacactatagaacaagtttgtacaaaaaagcaggctggtaccggtccggaattcccgggatccgtctccactaaaataaataaatacaaaaaatatatatagcaagaccccacctctaaaaaaaaaaaaaaaaaaaaaggctgggcacgagaatcacttgagcctgggaggcggaggttgcagtgagccaagattgcgccactgcactccagcttgggcaacagcgagactccatctcaaaaaaaaaaaaaaaaaa

SEQ ID NO: 2647 - DNA, 590 bp, Homo sapiens
agtaagatgtctattagatattcaagtggaggtagcaagtaagcacttgaatatataagtctgtagttgaggaaagaggcaaagttggagatagaaatttgagtatcatcagcatatagatggtatttaaagccatgagattagatgagatcccttagaacacctctgagaggaaggcatctatgaactgaaccttggagttcagggagatgagagagaaactagccaatgaagctgagaaggagtggccaaaaagagtactggctgggcatggtggctacacatctgtaatacccagcactttgggaggccgaggcaggcggatcacgaggtcaggagtttgagaccagcctggccaatatggtgacaccttgtctctattaaaaatacaaaaattagccgggagtggtggcgtgtgcctgtagtgccagctactctggaggcgaaggcagaagaatcgcttgaacccaggaggcagaggtcgcaagtgagccgagatggcaccatgcactccagcctgggcgacaatgcgagactctatctcaaaaataaatacactaataaaaagagtacccatgtccctagaagaa

SEQ ID NO: 2648 - DNA, 729 bp, Homo sapiens
tttttttttttttttagtttagcttgtaaatttaattaataggctttttttttagtttaaagtttacagaaaaatgagcagaaaatacaaggttcccataaaacattatcttccctcagttttctccattattaacatcttaaattaaagtggtagtttttttaataattcataagccagtattgacacatcattaactaaagtttatggtttacattagagttcactctctgtgttatacattctatggattttgagaaacttgcaaagaaatatatgcaccattacagtgtaatacagcatatagtcattcacttctcaaaaactgcctatgttccaccttttcttccctttctccttctccacaaactcctggcaaccgctgttgtttttcactgtctccaaagtttcgccattttcattgctgaatattttattctataaatttaccatagtttattcattcattcacttactcaacaacttttggtcgcctccaagttttggcaataaaggtaatgtaaacattcgtgtgcaggtttttacatagacaaacgttttcaactcatctgggcaaatatcaaggaccataatttctagaccatatgacaagagtatgaatagttttgtaagaacattgaaatacttacttccaaaatgcctggaccattttgcattcccacaagcaacgaacgaaagtcttgtttggtacccgtccagctagtgttt

SEQ ID NO: 2649 - DNA, 730 bp, Homo sapiens
tttttttttttttttaaagcatcatcaaaatatgtacaagaaagggtaattattcaactcaaactataattgtgtctaattgacactccagaaatatccttcctagtaacatctgaaacaatttattaagatttttttgaacattgattcacagctagtatctcaattgtagcactgaaaaggctcttgataattttgctattacaaaatgcatgttccatggagaggttgcgtatcatttctcaaaccactaatgaaggcaaactcttaagcaagccctaatatctggcaggaaatggggcttactgaccattagccaaatggaatgtctgcctttaagatttggcagtgaactcaatattggcaggttagtggggaatgggtgttagaattacatattatgggtactctgtgttctttctcttagtccatggtaatttccatcttcccagactacccatgttgagctctcagttatccttgactccccctttcctgctgtgtgcacattcaatcatggaccaatatctgaaaattctttacacaactcttatcaactatcactgtaccagtcaaaagctcacttatgtctcacatggcatgacgtgatacctactgacatactgtcttccatgacttccaggttacattcctccagtgtagtgtgcacacatgctgttagggggaacttccgaagtcacagcacgagtcaaaccagtctcttcctcaa

SEQ ID NO: 2650 - DNA, 512 bp, Homo sapiens
ttttttttttttttttttgagacggagtttgctcttgttgcccaggctggagtgcagtggtgcaatctctgctcagtgcaacctctgccttccaggttcgagcaattctcccacctcagcttcccaagtagctgggattacaagcgcgcaccactatgcacagctaatttttgtatttttagtagagacggggtttcgccatgttggccaggctggtctcgaactcctgacctcaagtgagccaccacacctggttgacagtctttttaaaagggtaattgcggaaaggacatatgggtacctttcttaaacagagcggtggacacgtatttcactctgaccaaaaaaaacaaaaccagaaaccacaaacgaacaacaaaaagggcggccaacagaaacaatcagcagagttaacagacaacccgcagagtgggaaaaaactctctgcaatctgtaccatcctgacacagggactagtatctacaatcgtacaaggaacctcaaagaaactt

SEQ ID NO: 2651 - DNA, 790 bp, Homo sapiens
ttttttttttttttgagacagagtctcactctgtcagccaggctagagtgcagtggtgcaatctcagactcactgcaacctccacctcctgggttcaagcgattctcctgcctcacccctcccgactagctgggactacatgcaaatgccaccatgcctggctaatttttgtatttttagtagagatggagtttcaccatattggccaggctggtctcgaactcctgactgcaggtaatctacccacctcggactcccaaagtgctgggattacaggcgtgagccaccgcgcccagactcgtgcattagtattttaatacaacaagggctggttttataatctattttacctctaagcacattagtatgttttatttcaaaattcttcacattttccccctgccttttcaccccaaatccattttcagccaacccattatttctcttcctgtgttgttcacaataacacaaaaggacaaaacacacaacaaaaacccgttgcacctcataataggtctctggacgaatacagtagatacacaaactgacatatgccaatgcacaaaattacaaaatattgtatcaccaatgtcatcttgtggcaacaaaaccatgaattacaaaaaacttacagacttctaacaaccatgctgagaaaagatgaccccaaatagcacaaattaaatggagcagaacgtatcaactgtgaaccattgcggcaatatggttacaccacatgggtacaaggttccccaatacttggaccttacaaacttctataacagtaggt

SEQ ID NO: 2652 - DNA, 634 bp, Homo sapiens
ttttttttttttttttttttttttttttttttttatggctgcatagtattccagagatctagaactagaaataccatttgacccagccatcccattactgggtatatacccaaaggactataaatcatgctgctataaagacacatgcacacatatgtttattgtggcactattcacaatagcaaagatttggaaccaacccaaatgtccaacaatgatagactggattaagacactctaaaatatttttaaggattagtgcttactagaaagactgtcaatgatgtctctgacttcaagcttgaggaatcggtgcttttttcttcttcagaaatttatgcatgcaaatatcatatagtagccttacacaagcaatagtgtaggcttttaatgtcaaacatgtacgaacgaatatcttcagttaactcctgataaatcctgagaactaacatatatatgtattatatacatatatatatcatatatccctgaggtctgtaagatacttattctaaaggtcctttgcctatataaaagactctactaacattaactactctctcctatcctatctcctctaaaatgcaccatataatatttactgagccatatatctcaaataaagccatccaac

SEQ ID NO: 2653 - DNA, 650 bp, Homo sapiens
gctggttgcccaaatatgaggtccataaagatttactgctatgttttcttagagttttgtagttttagctcttgcatcaagatctttaatccattgtcagtatttgtgcatattgtgatgaggttaaaaatataactttactcttttgcatgtggctatctaattgttctaacactatttgttgaaaggactattctttatctattcaatggtcttggcattgcattgaaaatacaaatcaatttgggagtctaaatatttggaattatatagtggtgatggttgcagaacttcgtgaatgtattaaaaaccactaaataggccgggtgcagtggctcacgcctgtaatcccaacactttggtaggccaagatgggcagatcacaaggtcagaagatcgagaccatcctggctatcatggtgaaaccctgtctctactaaaaaataacaaacaaacaaaaaaaattaaacagccatggtggtgggcacctgtagtcccagctacttgggaggctgaggcaggagaatggcgtgaactcgggaggcagagcttgcagtgagctgagattgtgccactgcacttcagcctgggtgacagagcaagactccgtctcaaaaaaaaaaaaaaaaaaaaaaaaaaaaaaaaaaaaa

SEQ ID NO: 2654 - DNA, 681 bp, Homo sapiens
ttttttttttttttttgagacggagtttcgctcttgttgcccaggctggagtgcaatggtgccatcttggctcaccacaacctccaccttccaggttcaagcgattctccttcctcagcctcccaagtagctgagactacaggcgcccgccaccacgcctggctaatttcttatatttttattagcgacagggtttcaccatgttgaccaggctggtctcaaactcctgacctcaggggatccacccgctgcagcctccaaaagtgctgggattacaggcctgagccacctcgcctggcggggattactaattttgaaaatgtggtaataatgatatggttatttaaaaataattatagttaatatcataatggtattatggttattttcaaagaggtaataatggtattatggcaattttatcttttagagatacacactgaagtatttatggatgaaataatgatatctagaatttgctttaaaatgatccattggagaagaaaaaaagtcttgttcatttatttataattgtttaagtgaggtgatgaggtcatgaggttttattgtactagtctgtcctttgtcgtccgtcaaaatggttagtgtcaccatttgctgggtagaagttttctatatgtagtccagaagtccagtgtggcaatgagtggttaactaatc

SEQ ID NO: 2655 - DNA, 660 bp, Homo sapiens
catcctacgggactttcccaaaagtcgtaacaactccgccccatttgacgccaatgggcggtaggcgtgtacgtctgggaggtctatgatagagccgagctcgtttagtgaaccgtcagatcgcctggagacgccatccacgctgttttgacctccatagagagacacccgggaccgatccagcctccggactttagcctaggccgcgggacggataaccatttcacacagggaacagctatgacccttaggcctatttaggtgaccctatagaaccagtttgtgaccaaaaagccggctggtaccggtccggaattcccgggataaaatgattttaaagaatgtttagtattgtacttaaatggtatgcagaggcacagatgtaaggtttataactggaaataggtggtaagaaaaatatatagaaagcaccatgatttgaatatttttccacttaggatttcctaatctccttgtcatcccattcaagctcaagatgaagcaccattctttgatctccctttgccagttgaattttatagatcatctaatgttgagcccccgtatgagaataaatattggggttgtcaaccattaaaaaaaaaaaaaaaaaaaaaaaaaaaaaaaaaaaaaaaaaaaaaaaaaaaaaaaaaaaaaaaa

SEQ ID NO: 2656 - DNA, 686 bp, Homo sapiens
  misc_feature (278)..(278): n is a, c, g, or t
  misc_feature (341)..(341): n is a, c, g, or t
tttttttttttttttaaatgagatctaggtattaacctgctgtctagcgaaaactagtcactaagtcctggcctgagagatacccacatttcctttagaacaaacagaactaatacctgtgtacatttctgagagcctgatgtgtgagtccttaaaatgtagaccttgcaggaggcttagacctcagtttcacctaatgcatgtggaggaaatggaggtgagaatagtcacctgaagagtgcaagcgctccagctccagcacacacactacttccctngggcacgcagcgaacaacggaaggttaacacaagggaactttgggggctggacaattcttggnaaaggcacttaaaggccttaaattggttggcccttgggttaagaaggggaagccctccaggaaagccacaagaatgtctttccacctgttgcctgtccacaaaccggaggttaccacatcgtttaaaagggcacaggggcaaatgtgacaaggcagaaaacaataaccatttcaaggatcacttaaggaatccgtggtgtaatctgcctaatcagaagtagtaccaaccgtgcttttccctatatatgggagaacataaaggtattaattaatctccagtcccacaccttcaggcccttataataatccttagtaaacactcagctagcatcactcgcttcaagg

SEQ ID NO: 2657 - DNA, 754 bp, Homo sapiens
  misc_feature (387)..(387): n is a, c, g, or t
tttttttttttttagtagaggtggggttcaccatgttggccaggctggtctcaaactccctacctcaaagttcatccacccaccttggcctccaaaagtgcatgtattcttgattgatggtgacagaatatggagaagtgtgtcagttcaggttctccaagaagcatgtgcccagatgggattagaccgcagaatatttatttattgggggaaatggctgtgaagcataaaagtggagggagcagtacagggagtggcttccgaatccttttcacgggtgagtcaccctgtgtataaagaagagttgggagaggagagagaaggagaagagcggtggtatagagaaaagacgtcttttgcgccgacacgtactcatcagaaagacgntctgttggcacgaggcaccagagagagggcgcccatagcagcaaatagtttgctacaagtagagttcgctgtgttggagcatgctcttagtgtcaccaggccgttcctacgggtggttaggcagaggaaaagtgggggtggcctagccacagcaagaccactgtagagggtctcaaggtgtggcagctggaagctgttagccatggtcgagccccaaaagctctccatagcccagttctcttgaagttctcttgaaggagcatctgagtggacctcttgaccactacaaggagagggaaaatgatgacgaatccttgctcagccacttcactggatgcctgcctttagtctatagggttatcttata

SEQ ID NO: 2658 - DNA, 443 bp, Homo sapiens
tttttttttttttagcccccaaagggtggagcattgaagcataatagcttcaataagcttgttattttaacattattattttttaaactgaattcaccaccacaggaggtcacagagtcaatggtcacagctggcttttaaaaaagggttgagtcattttgtgattgataaaacagactcagcctgagatgagggcaatcaggtttcctgcttgaaggcatcagttgatcactacaggggtcggacagaagtgttttcttacgcaagttctggcataatagtctaggtgaatgcaaaaaaacacaaaaagttagtcttatcgattacgtaagtcataaggttcctacagagagagcagaactaagaaagcccatccttacctcagtagaacaatgagtggtctgatttccatctgggctctgctgctcagatggacagcttga

SEQ ID NO: 2659 - DNA, 718 bp, Homo sapiens
tttttttttttttttggaaagaaggaaataaatatattatttgtagatatataggatctgcctagaaaagcaaaagagagttaagtgactagatgcaagacaaataagcaaaaattacacagtttttggaagttacgatcaaatatattagaaagctgtggtcagtttaaagataaccccagggcaagaataagtaaccaaaacaagcccttgtaaaatttactattatagtgtcacaaaatcaggtgggaacaaaggggaaagggatttatttaaaattggacagtaaagaatttggaaaaatgagaagtttagatactttctgttgactatattaaaattccaaaaagattaaaaaattttttcagtctataggaaatgttaatgaaactagaactattgtaagtactagaagaaattacaaaagaaatgatcagtcaatgtaaataaagatgactgtttttgaaacataagtgttaacaaaacggggaaaaattattaataaacataatgaattaggagaggcagcatacagacgcaggctgaggagtcaggctgtctggactagagccgacttggccggaagtttgagcaagttgcagtggtagtggctacatacacgtctcctctgtgcctcattttcctcatctatgaaatggagacagaaaatagcactttcctcataggatcattggagaaagattaactggtgacacag

SEQ ID NO: 2660 - DNA, 726 bp, Homo sapiens
tttttttttttttttggtcttttaatcaatgtttattaattattccacaataaaaaggaatgcactattgatacacacaataaaatggatgcatctaaatacactgtatcaagcgaaagaagctcaactcagttccatttacataacatactggaaaaggcaaaactataggataaagtgcagtcactggttggttgccaggggctgatggtaagagagtagggttgaccctaaagggggccacaaaaaatttttttggggagggacagacctgttctgtactttgtgatgctgtttacacaaatctactttctgtcaaaactcagaagtgtccacaaaaaaagtaaattttactgtaggtaattttaaaaataagtaaatatggagctgaaagacaactaggaggaggttaagaagacatacacagtaagccctctgcatctgcagattcaaacaatcgcagatcgaaaatattctgcaaatctttaaaaaataaaaatgcaacaataaacataatacaaataaaacaatacagtataacaactatttacatggcattacaaggcatcagatatgtaagtaattcaaagaggattaaaagtagacaagagggtcctttctcttggtttctttcaccctcccccaaccataaggaaaacaaacataggaggagtgcataggtcatatgtaaatctacgccatttacatccagcactggacatctgc

SEQ ID NO: 2661 - DNA, 698 bp, Homo sapiens
ttttttttttttttttttgagacagagtcttgctctgtcaccaggctggagtacagtggcgcgacctcagctcagtgcaacctccacctccagggttcaagcaattcccctgcttcagcctcctgagtagctgggactacaggtgtgcaccaccacgcctggctaatgttttgtattttagtagagatggggttttaccatgtttgtcaggatggtctcgttctctgaccttgtgatccacccacctcggcctccaagagtgctgggattacaggtgtgagtcactgcactttttttttttttttttttttggagacacttgctctgtcaccaggctggagtgaaacagtgtgatcattcaaagtctcctgggctcaagggatcctcccacctcagcttcctgagtagctaggattgcaggcctgtgccatatgcctggctaattatttttaatttttttgtagagatgggatctggctgtggagcccaggctggtctcaaactcctgacctcaagcaatcctcctgcctcagcctccaaaagtaggaattataggcaggagccatcatgcccagccctcacataggtacttttaaacttggtcccagaggcacagactaccaaccttatttatatcatttagttacaagatgctggctactgaccagaagtatatccaagtaggtgtagaaatagta

SEQ ID NO: 2662 - DNA, 623 bp, Homo sapiens
ttttttttttttttatggtgggtttttttaatttaaactttttttttttttaagagacagcctcgctctgccacccaggctggtgtgcagtggcgcaatctcggctcattgcaacctccgcctcctgggttcaagcgattatcctgcctcagcctcccaactagctagaattacaggcgtgtaattttaccaccatgcgcagctaatttttttttgtatttttagtaaagacagggtttcactatattggccaggctgggcttaaactcctgacctcaggtgacccgccggccttagcctcccgaagtgctgggattataggcgtgagccactgcgcctggcctaatttaaacttttaattttgagaccattgtagatttgcatgcagtggtaacgaaataacaccaagagatcatgggtacagttcacccagctcctcctaatggtacaatgtcacaacctgcacagtgacattgacagaagccactgatcatactcaggttccctcagttttacttttgtgtgtgtgtgtgtgtgtgtgtgtgtgtgtgtgtgtatagttagttctatgtaactttatcacgtgctactctcgtgtatagcctgtatggtggctttacaac

SEQ ID NO: 2663 - DNA, 714 bp, Homo sapiens
tttttttttttttttgagatagggtctagctttgtagcccaggctggaatgcagtggcaggatcgcagctcactgcaaccacgacctctcaggcccaagcgactctcccaccctagcctcctgagtagctgggaccacaggcacccgccacacccggctaatctttgtgatttatgtagagatggggttttgccgtgctgcccaggctggtctccaactcctgaggtcaagtgatccaaccgacttgggggttgggattcccaaaaggggttgtgggccaggccccaaatctcccataatggacttcatttgatcatcgggcaaagccgtgaagataggggatataccccacaatctccgaggcaagagacaatcaggtggtttcccttttatatttcctccttttcaggctagagtggcacaatgatggaatggttttcaagaggccaagtaggaccagctgtgggtttatcccattattacctaaggattttacacaatacattgagtgcaggaatggcacgcaatgattgcactcagtaatataccaaaccactcctggctttgtttagaccctagacttgggccctcaaacttctcgtagacctcttgcgaggattttcccctttacagattcacaactcagtcccgaacgagaaacacttgaggcacctacaatctcgcagacaactcctggcaagtccagtgactcca

SEQ ID NO: 2664 - DNA, 693 bp, Homo sapiens
tttttttttttcttccttcctttctctctttcttttgtgcatatggcaacgttcatgttcatctcaggtggcatttgcaggtgaccagaatgaggcacatgacagtggttatatttcaaccacacctaaattaacaaattcagtggacatttgttctgggttaacagtaaatatacactttacattcttgctctgctcatctacacattttaaacaacaagtaaggaatagggtccggctttcctggttacttctgtcagtgagtcaaaggcagaacctagtctgtgtggttcatataggggcaaaaatttgacattgtcagaatgttgtgtaggtatttactgcaatgtctgtccctaaacatagtggtattttaacatagcagctggttaaccgggactacagaagtggaaggataatgagatgtaatacaccaaatagcttttcacttcttaaggacagtgttcaaattctgattattacaacaagcaaactgaaattagtgttttcattctggtccttagtaaattcctaattctatgattaaactgggaaatgagatcccagagttatttcccaacccaggattcaacatcaattgggtttagatctcagcatcctggaaattgtgtgcttcacacaaagtgaaattagtattttgagccttattaaaatatattcttaattatggga

SEQ ID NO: 2665 - DNA, 684 bp, Homo sapiens
tttttttttttttttttttcattctgactgtgtttagatgagttcaattcagtggaaaaaatataaagcacaatagaattgtctatgctcatgttgatactcgttttcattttgtgagccgttttgaaaacctctttacataggccctttggtccagagagtttatacagcctggattttttttaatggcttatccttccttggattattgctaaataaatttcccaagcttaacaccaatctcccaggaaagctgatcccctgaagtttagccttaaatccacaccttccagccaaacaagacattgtgaatgtcaccgtgcagtttttctgaggctgttgtaaagcagacataaattgttcaacaaatattgcgaaagctatgaatttaatggctcattcggtttttggacatttatttttcacgagcatgtgatcatctgctaaggaatattctagttccatagtgagtcagtcacttgtgtggtattatgagagacgattgaacagtatcatcttggttgaacttctataagtaaacacttgtgtgaataacaaatccaaatttggtaaatgtcaaatataaaaattagatcatgagcattaaaagtgagctagaagtgatgtaaggactaaacctgaattctgactaacataaggatcccacgagttcacgcagagtgt

SEQ ID NO: 2666 - DNA, 637 bp, Homo sapiens
gagtttaaaaaattttatgtttgcataaaaggagaatttcagaatattttagagactacttgccagaagtagtgaaactgtctcttgctgaaaaatcattcaaagaaatttgtcttagtctgttttatagtattgtaacagaataacagagagtgagtaatttatgaagaacagtcatttattttctgacagttctggagtctgggaaatccaagatgaaaatatcaacatttggtgtctcaggaccttcttgtttcatcctcacatggtagcaggcagaagggcaggagagcaagctagtccaatgtgtgaagcctcattcataagggccttaatcccatgaaggagaaaggagccctcttggcctaatcatctcttaaaagtcctacctcttaatatcatcacattggcaacacttgaattttggagggaatacattcaaacagtagcaaatttagtagagcaaattccaaagacattgagcctaggccagctgtcagtcatgggtataattttagatgttttcaggctctgaagctttgcacttaaatttgaacttcagaacaaagatctgtgtctctgcattgaccaaatagaatgtctgtgaatccatggtgttgatcgttttaaaagattt

SEQ ID NO: 2667 - DNA, 736 bp, Homo sapiens
ccgtcaggatctcctggaacgccattcacgcctgttttgacctccatagaagacaccgggccgatccagcctccgtacttttagctagtccgtcgggacgggattacgatgttcaccacaggaaatcagctatgaccattaggcctatttaggtgacactatagaacaagtttgtacttaagcaggctggtaccggtccggaattcccgggatgttgggataaagatttagaactgaggttccagagaagaggagaagactatttacttctcaaaagaaggtaatatgagggcttggggcaaaaagcctgaggaacatatctgtcttggtggcccaatggaagtggcctgggggaagcaggatttgtgcctgtaatgcactgatgtccttttggtgctcatcctcttctcttatgtcctaggaagcggccacctgtctcccagctgtctgggactgtctgctggagcaagtgacatcacagtgaccagaaaccacctcccctttgtctggagcagttatgatgtcattccctctggcagcgaagcaggatgttggcagctgggattcctccgggtcctcctgaagtgataattgccttagattttgttataaagtgcagctgctaattatcttgttaaatcacagccatatactttttggatctttttttcctttgcaatccatttaaacaatctgggagattaaataaaaccacataccccaaaaaaaaaaaaaa

SEQ ID NO: 2668 - DNA, 709 bp, Homo sapiens
ttttttttttttttttggttgagcaatcgtgagtgtttttctgttgttgctaaccaaacattctgatggacacaggaggtggcagatggtgttatttacatctgtaaagtgaaaggaaatttcttcgagaaaaaaatgtagaaaaggaggaaacaaggccacaatctggagcatatcaaaaagtagaggagtttacaagaagaggagccaggaaacaactcaaagaataggatctatcctggaaggaagatcaccagaagaagatggtttcatggaatccacaagatctcaagagaccgatagtcggccagcacgttcaatgctactaagagggcaagccaggtcagagggatgataattggatttgacatcatgtaagttactaaagagcatgaaaaagaaaaaaagcatatcggaggacagaaggccatgcaagacatcggaggtggagatgaggaagtggtgacaacctgttcagacaacttaccagaaaagtttgctgtgaaaggcagcaggtatgtgggagaacagtggtagggaagtgtcgccaagggaaggtatctgtttaaaatggaggacagtggagcgtaattgtatgctgaggggaataggcattggagcagaagaatttgaagatgcagagaaacagtggacatctgcaggaaattcaactgtgacgaaacagtgaggggtaaagatggggtccaac

SEQ ID NO: 2669 - DNA, 680 bp, Homo sapiens
tttttttttttttttgttgctgttgccctaggtttttcaggactagatatctcaatttatcctctcactagggagcttcaaaaaagaaaaccacatacttgtattatggggactattttttcatatccaggtttctgaaagctgaataaataatcagaaggatgacttctaaacttagaataatagaaaataaaattacatattattataaaatttttcccttgagtcatggaaaaagcctcatgaattatccctgtccaattatagagagaacatttctaataattggaatgtacggagtctttctcttcttctctgtaaaaatgctgaataaattcaatccaatttctcaaataaccagtatttatcagccaccaaaaccattacctcatgccagacaaaattttaccaaggtgacaaagaatgtgctagtgaggaggggtattaacacattggaaactcagtagtggttgtcttttgcaggctgggactaatagaaggagatactgttataaaactgggctatctactagtactaggaatgataggacctaaattatcagagactaggcagcagtgcttagcttcagcaagtaaagcacatggaacttacttttaatcagcctgcaagttcaaaagcgtagaactgggggtggggaacacaggtggtggtgtatcgg

SEQ ID NO: 2670 - DNA, 691 bp, Homo sapiens
  misc_feature (42)..(42): n is a, c, g, or t
  misc_feature (48)..(48): n is a, c, g, or t
gacggtaaatggcccgcctggcataaggcccaggacaggacntcatgngactttcctactttggcagtacatctacgtattagtcatcgctattaccatggtgatgcggttttgcaagtacatcaatgggcgtggatagcggtttgactcacggggatttccaagtctccaccccattgacgtcaatgggagtttgttttggcaccaaaatcaacgggactttcccaaatgtcgtaacaactccgccccattgacgcaaatgggcggtaggcgtgtacggtgggaggtctatataagcagagctcgtttagtgaaccgtcagatcgcctggagacgccatccacgctgttttgacctccatagaagacaccgggaccgatccagcctccggactctagcctaggccgcgggacggataacaatttcacacaggaaacagctatgaccattaggcctatttaggtgacactatagaacaagtttgtacaaaaaagcaggctggtaccggtccggaattcccgggattgcggagcggcccttgtctcccagctatctataaccttagctagagtgtcgccttgtgggttcctgttgctgagacttcctggatggagccgccctcaccgccgggcccgtggccctgcgcggagctgtgtccaataaagttcttggatgtgaaaaaaaaaaaaaa

SEQ ID NO: 2671 - DNA, 627 bp, Homo sapiens
ttttttttttttaagataataaagccttgaacatattgaaatgttgatgggaagagaccagcagagaggtaaagcttacagatataagcaagggagggaagagtggtccctgaaaaatgagagaagggctcagatttatctgtggtgtcaggagagagaaggaaaatataggtgcaagttcagagaggtttaggtttgatggcaggaagttggggcattcgcaaggttattgctgatggtgacaggggctgcagggcagcaggcaggggaatggtggggttggagtctgagagaagaattgtaatggcctgtgtggagcaggaaacagaggccattagagacatagaaagattactagtcatggagggaactgttggagacacatgaagttacaatggctccaatgcacatggccatgggaggctttggggtagtgctcagctggtgtcaaatataggcacaaagacagcaaatggctggagtataacagaactgaaggacaaggagtagaggctctaggaaagctgagtaacagatggcaagggaagagagaaagcagacctgagaggcttgaagtagaaggtctaggactcagataaaagcggggactacctacctggtaagtcc

SEQ ID NO: 2672 - DNA, 711 bp, Homo sapiens
tttttttttttttaattttactttaagtctgggatacatgtgtggaatgtgcaggtttgttacataggtatacatgtgccatggtggttcgctgcacctatcaacccatcatctatgttttaagcccctcatgcattaggtatttgtcttaatgctctccctcccctttcctcccaccctctacctctaaacttttatagctgcacatttatcttcatttataccactcctatactaatttaggactggtcttctagtcactctgaattcttatacatctgatctaatctacttatttatcacttttattcttcaaggcctggctgtaattgtaacttgctcccttcaaaaactttcaatgactttaaattacctagaaaataaagttgaatagtcttaatccagcttttttaggccttttgagttttaggtgaactccctttttaaaggccaaagggtctgtttggtctcaatctgcccttaacctgcagtgtcatcttggatcagtctgtacgcttggcagtgacaatgactactctcatggtttattataaggattatttattttaattcctagaagtcctggctttgaaagcttcattatctagcagaatagacttggaaacatgatctacttctctgggatttcttctattgttgtaactcgatgtggtcacacatttgagtggtataggaatcagctagagaact

SEQ ID NO: 2673 - DNA, 675 bp, Homo sapiens
tttttttttttttttttttttttttttttttttttttttttttttttttaaggagacaggggtctcactatattgcccaggctggcctcaaactcctgggctcaagcaatcctcctgccttagcctcctgagttgctgggactataggcatgtgtcccagctgtgtctggcttccagtctttttaatattaagggataatgattttggtgaattatcttctctttttacattctcttatcagctacaaatctaacaaatattagcggtttcccaacctctaagaatgaaattatttaatctaaaaatatagagtaacctcaggacgaagttctcctaatacagactctggaactagattacctacttttgaatcccagctcagctagttacagtgttatcaccttaacttctgtgtgcctcagtttcctcatctgtaaaatggggataattatagattggaaatactgaataaatggggctaactgatttaatgtgtgtggaatacttagactactgagaacactacctgacatttcaatgttcaatactatagaaatgatagcagatattatctgatgggatgattctgatttaatccacatgcatctttcccgatttccctcaaatatctaaagacactgcatatcccttctagatgattatcaaagtcgcaa

SEQ ID NO: 2674 - DNA, 687 bp, Homo sapiens
ttttttttttttcctatgagttacttgtatatatattctggttattaatctttgtcgtaagaatagtttgcaaatatttttatcacattccgtggactgtcacattttctttatccattcatctgttgatgtgtttctctctaatttcagttccttatgttctatccaagaagaaaacacaatctgaatttacttcagaatgcccaggatttccaagggatatttttatattgtcacacaatatgtatgtggtgtatctgaaaaatatatagcttcattcacagtgttaaaagatgtataaatagatataaatatatcaattttcagcttgcttttcatcttcaacattcatgttattgatgtctatactgattcatgtacgctatagcctatttattgtaatacctgtataacaaaactaccattttagaggtgtaacaacttctactgtaactatgcttttaaactttctattatattcatttattctattgtggcaacgatgcacataacataacaattaccatattcaccatttttaagtgtacagttcactggtattaagtaccttaatactgttgtgcaaaatacacccaccaatccatcttcaggacaatttttcatcatggaaaactgaaactctatattcattaaccatgacttccgatccttccatcctctcaagtc

SEQ ID NO: 2675 - DNA, 661 bp, Homo sapiens
tttttttttttttttttttttttttttttcaaaattaaccaaagtatatttctgttagaggttagtttatccacgtaacttaagaataaaccacagcgtagctcccttaaccaaagagccaggttttaatgacaagtcagttgccagcaatggacgtgcaggtactatcgaagaagtcgcaactacaaatcccaaactggcttctattcaatgggaaaagccctttggttgagtcacaagcctgtaaacgcagagcgcttgtgcgccactatagctcgtgaggatggtctttgacttaggagggaagtgcctctgagtacatgaggatcacagtcttctcatctcgttggtttatctatttcattggtagcatcttctttatcataatccatccaactgtttacaaagaatggtaaaatttggaactcaggtggcactgcagctttctgccagaaataaaccagtttctataattcagtaatagctgtagaaggccacatatattccagagaaaactgaaatcaagaattcatattgaaaacagagaccattaagtgctctacatatgttccattaattattttactcatttttctgaaaatcttgaccttatcataaaaaacagtcacttctctccttattattgctctttatcatagat

SEQ ID NO: 2676 - DNA, 642 bp, Homo sapiens
agccaagaagcaatttttaaaattcaaatgcatgtaaaaacaattttaaggacatattcttaatggtgtagcaaagtgaaaaataaaatgccttatggagaacaatcgtccactaagatgcctacctgtcatttataaagatccagggcaacaaaatgaaacagagtttcctcttcctgttgccacagatagtgtagaaatagcttggagctggcagtctcatggtaataagccaataatactaactgctgtctatttagtacctaccacatgccatccaggcctcatagcaacctgtgaggcaggtgttactaaactggaaacagacaggacacggttcagaaggtctcagggctgggccaggggggccgggatcaggggcctggggttttgggtcctgggaagccaaaaagcttggaggcttccacaattaacacagccttcccaattcaagggcacaggacaggtctccggggaacagaagcacaaacaaagaacgtgtgaaggtcgtgaagtgtttccgtgggcgctgcgtgtaaagaggttacacacaaaaactagagtgggcttaaaaaaaacccccaagtgaatctcgtgctaagtcctgcagggacagaagtccaagagccaaagggtgtggca

SEQ ID NO: 2677 - DNA, 700 bp, Homo sapiens
tttttttttttttttgttataagctttttcttttttagaatttaagcttatgagtttatctacgcccactatattcataattacagttttatatctgcatacaaaagctatgtaaaaatccatttttcccaaatatacaaattttttttggatagtttaaaacattttgatcacagatttcaacagagttttaggctgaaaaaaatatcaccatctagcaatatcacttaacactgtttgcaaaacacaaatcttccaatgactgtaaatctttttctattctgtagtatttttctgattctcagggcatgaaaacattatgggaaaaaaaaggattttctacgaagaaagcatggagaactaatttggctctatggtcaaattaaaaatgccaagttaataagggagaaccaaaagaaagaagtggcataatgtcacatcagctcattcatgccctgataatttctgtatcaacaatacatatgtaaagtgtctccttttgtcttacattgtgctccataatttacatgagtattatctgcatcctgaggaggacagatttatatttgattgtcttgtgcatagggtgggtcagctttaactgtgcaacagaaagccacaaacagcgttttacctgcacaatattgctctgaaggcggcattaattcatgtggaaacacctataatgccactttcgctt

SEQ ID NO: 2678 - DNA, 172 bp, Homo sapiens
ttttttttttttttttgagacaggttcttgctctatcacccaggctggagtgtagtggcacgaccatagctcaatgcagcctccaactcctgggctcaagtgatcctcctgcctcagtctcctgagtagctgggactgcaggtgagtgccaccgcactgggctaatcttcca

SEQ ID NO: 2679 - DNA, 682 bp, Homo sapiens
ttttttttttttggtggggggacagagtcttacttgttgcccagcctggagtacagtggcgtggtcttagctcactgcaacctccacttcctgggttcaagcaattctcatgcctcagcctcctgagtagctgggattataggtgtatgccaccacacccggctaatttatttttgtgtttttagtagagacagggtttcaccatgttggctaggctggtttcgaactcctggcctcaagtgatccacccacctcagcctcccaaagtgctgggattacaggcatgagccaccatgctgggctgactatatttttattatattatttcttatctaattagaaatatttgcagtttgtgtaagtgacattactgtcaaatttaaaattataaaatggcataataacttattgtaaactatgaaacatagtttattaaaaatgtagaagtgttcttaatatttcagctttttttttctataggcttgggggaatatcagattaagatgaaaatattacaccatcatccataatattgatttggtaaaaggataagataaaatgaaaaataagatacctttctttcctcagacaaatagaggacttaacatttgacaaccatttctcaatgtcagctgttcatgctgggaaatgacccatgcagtatctttatgccttttttcag

SEQ ID NO: 2680 - DNA, 630 bp, Homo sapiens
tttttttttttttttttttttttttttttttcctttgaagtaaaatttaaatacaatgaaaggtacaatcctaacggtgtatttgtatttggattttgaaaaatgcatacatctgtgtatatgccaagtccctatgaagatatagaacattcaaaggtgtaaatttatactcactgacacagtccacaagactatttcttataattctatgccttctcatagcatccaacattataggatcacatagtaggtgttcaatcaatacttttaagactatagtggatgtcacctggactcttaaagagagcaaatgatcctgaccacggttggctctgacaagctggaaaataaagacatttctggagcctagagaagcaaaggaaaggaccgagaagctgccctctatacttggtctgtgcaaaaccccattaaggaatagttggtccaccgaaattagcaaggcgtagagatagtaaaaatgcttatgaaaggcaattcgttctccatggcattcaccagatggcccacactgtaaagtattacttaaatctccacttgggaaaacctgttatctccctcccttataataacccctggcctgaatctcatgaccaggcacatagccaccat

SEQ ID NO: 2681 - DNA, 127 bp, Homo sapiens
tacacagaacaagagtaataaagttctcaagtaaggattgcactccaataggaattgagtgattctctcagagagcactcattacatcttagacaacgtcactcttctttcctctggccatatgtcc

SEQ ID NO: 2682 - DNA, 699 bp, Homo sapiens
tttttttttttttttaccttctccagaagtgggagatgcacgcctgtcccctcttcactgatgatgctgtcctgtagccatttgccatccatgctctttttgaacgtggctgccagctttttggagaaggaaatatggtgtagctattattgcatttggagaaactagcacaatttatgactaaggaagagcatcaatagatatatcctgaatgacttgaaattaaaatttcagccttcttataatttacatatctgatactttagagtgcatgctttttagttgacaaaggaagacatttggaatgggaagtggggagtgtcattccaaaagcagctgcagtagaagcattagaactacctcgtccagccagccctgtgtgacaaggtgggcagcatatggcgggacaagctttcggaacgctgacagcagtggggtatagcacggaatagaagatgggggcaccataacaagacactatgtttgatgatcttcagtaaagttactaagctcgtgtgtgctcaaagtgatgagattccttagaagaatcgaaggaggacagaatcttgggtctgaattttgacacgtgggttcctgggaatgtctatgaaaacaggcatggaaataggggcaatgagaaagtaagatgggaaattggtagaaactctgaatgtgtgtcagtgcggtgtgtgtcatggg

SEQ ID NO: 2683 - DNA, 684 bp, Homo sapiens
  misc_feature (496)..(496): n is a, c, g, or t
tttttttttttttttagtagagatgaagtttcaccatgttgctcaggctgcctcccaaagcattgggattataggcatgagccaccgttcctggccagggctactttttaatttttttaatttattttttttatttttcaagactgagtcttgctctgttgcccatgttggagtgcagcggcaccatcttggctcactgcaacctctgcttcccgagttcaagcaattctcctgcctcagcctcctgagcagctgggattacaggcgcctgccatcatgcccggctaatttttgtatttttagtagagtcggggtttgacgatgttggccaggctggtcttgaactccttgcatctacttgcctgggcctcccacagtgctgggattacaggtatgagacattgagccaggcaagggcttctcaaatgtaaatatgagtgtgtatcatctagggatcttgtttaaaatgcaggttttgattctgttgacccagggntggggcctgggaatctgcatttctaacaagttcctaggtgatactgatgctacctgaccatggtccacacactgacaaggctgcagaaggagtaatgaagcggtctctacatccaaaaagtacttttattaagaggctgcttccagctctctcacattgcttcgtttcaccactggagaggatctagc

SEQ ID NO: 2684 - DNA, 665 bp, Homo sapiens
gcccgcctggcttatgcccctacatgaccttatggactttcctacttgcagtacatctacgtattagtcatcgctattaccatggtgatgcggttttgcagtacatccatgggcgtggatagcggtttgactcacggggatttccaagtctccaccccattgacgtcaatgggagtttgttttggcaccaaatcaacgggactttccataatgtcgtaacaactccgccccattgacgcaaatgggcggtaggcgtgtacggtgggaggtctatataagcagagctcgtttagtgaaccgtcagatcgcctggagacgccatccacgctgttttgacctccatagaagacaccgggaccgatccagcctccggactctagcctaggccgcgggacggataacaatttcacacaggaaacagctatgaccattaggcctatttaggtgacactatagaacaagtttgtacaaaaaagcaggctggtaccggtccggaattcccgggatctcccagacaccggcgtgggaatgtgggaacagtgacagcactggctgccacccaggctctacgagaagcggggtcaggcctggctttgccgttcctacagtggctcccgctaggtggtgtcaagcaggcgctcttgtgaattaaaaaaaaaaaaaaa

SEQ ID NO: 2685 - DNA, 720 bp, Homo sapiens
ttttttttttttttttttttttttttttttttccctacaaaataatttattgggaacacacagctacagcactctatgtacaagcacatgacgctcctgactatcctcaactaggggacccttttcttcccccttgccttgcggacctcttctatcaaatctttcaggtactggatctccttggccagggaatccggcctctcttttagaagcctcggttcttcttttccagctctttggactcaacacataagaagctctctgtgtctcgcgcctctctctctctcgtggggcggacatcaatatgtggcggtgcgtgtcgttgttgcgctccattttttcagcagcttcattactccagtttcatcactcctttacttgtggctgctaccattcttctctccaggaggatcgtagagggttggggacgggcagacccaacagagaacagcctgaagatgggaggctcctatttggagagccccttggatagaggggctgtgctgaggagaccccagataggactctgggctcatacagatgccactatcattatctgaaggggtgtcttcctcctttatgcactgagggatcatggcaacgtaagcagtgtagtctggcttcctatctccttcagtgatatccacttcactgaccagctctaaacctaaaggaatgatctgcagtggaggacatcgaccccggggaaagggaagagtg

SEQ ID NO: 2686 - DNA, 720 bp, Homo sapiens; identical to SEQ ID NO: 2685

SEQ ID NO: 2687 - DNA, 166 bp, Homo sapiens
gaaggcttctccaaggaggtgacacttgagttacctagaggacggtaagagagggaagaagtggtccagcaagaaggattggcaggtgcaaaggccctggggtaggatgcagtgggcagatttgaagtactccatggaggctgatggggccattgtagaaggagag

SEQ ID NO: 2688 - DNA, 759 bp, Homo sapiens
tttttttttttttttcttccttatgggaggcaccttactgggccacatccccaaatcttgggactccctttctctccctgttagaggaggatgtggttccacagcttcaccttagcagtctgcagagaaacaatggcagagaaacaatggaggaatggcccaggctgccactgccagtcactgactgcagtttgcaaggcccacatgggagtcaatttaatgagtccatgcaccctcccggggcactttgttgtcccaaactcaattccaaccttcaggttgaagccccagaaaagaaaactaggtcttagatcagacaacagcagaagtctaggggcacagcacaggcaagtacgactaattcctgccaattaggcacctccccccagcttcatggaaggaggttatgtgtgtatccaaggcataaatgaggtctaggggactcgaaggttaccaacagcaagaggacaggccagtgcagatattcctaccctctaggcttccctgctacatgggtgaaggccatattgggacccatgggcagcacctgtcaagttggcgaaacgtggggctacaacgatggaagaacaacggggatgcacttttatcatctcccacatgtaccctgggtacttgctggaaaagagaaattagggatgctttatcccctctttccagatgggtaaacaccatttcaggctgtacttctctccagtgatctgaatatggaactctttgaaaaaaaaaaagcttttcgta

SEQ ID NO: 2689 - DNA, 645 bp, Homo sapiens
tttttttttttttgttccttttcattctctcttgcttctttttatgaaagtccagtaaaatggaagtaataccatttaatactgcctcacatgtcactgataattcactgttcaatctttttaaatacttttttctctccaaattttattttggataatttctatatatttatcttccagttcctgttctgttctttaacaatgttattcttttgttaagtcagcctaatatatttttgtgttaaatatttataaaatctctgctctctatttagtttatttaaaatttctgtctggcttctttctttcattttttttttttaaattttttggagatggagtctggatctgttgcccagactagaggtgtgcagtgggtgtgattggcaggtccaatggaaaccttcggccttctggggttccaggggaatccttcttggccttcaagccttccctagttagctggggactacgggttgcctggccaccacgcctgggctaatttggtaatctaagtagagatgggggtttcgccatgttgaccaggcgggtctcgaactcctgacttcgggtgatcgcccacctgtggcctcccaaagtgcggggatcacagggcgtgagccacggtgcccggccgtgtcgggt

SEQ ID NO: 2690 - DNA, 330 bp, Homo sapiens
tttttttttttttttcagacagagtctcgctcttgtcgcccaggctggagtgcaatggtgtgatctccgctcactgcaacatctgcctcctgagttcaagcaattctcctgcctcagtctcctgagataactgggattacaggcatgtgccactgcgcctggccaatttttttattttcagtagagacagggtttatgccacattagccaggctggtcttgaactcctgacctcaggtgatccaggccgggatgggattgggggcgccgagaaaggaggctgcccggtgcactccaacctgggcaacagagcgagactccgactcaaaaa

SEQ ID NO: 2691 - DNA, 501 bp, Homo sapiens
tttttttttttttttaaataatagatacggggtttcgccacgttcttcaactcctgggctcaagcagtccgcccactgtggcctcccaaaatgatggaattacaggcgtgagccaccgcgcctggctggaacattttctttacatacactggcttttctccccttcaaatcatcagaaaatgggataatttttagaaatcaggtttaagcactactttcagataagcatttcatagttacaacagttacctcaaaatagaagtatgaagagcaagtgagaaatctggtttcattgttacactaggcagttccctgtagaaactttgcaggggttaatagtcctgaggaagattttagttacaatgtattccaatcccatcgatctgatctggagcaaagctgacaaatgaagctggtcaaaaataaaggggagattactcagggaagggagtcaggtcttaaaccaaacttggtttccttaacgggcccaaggtgtaagag

SEQ ID NO: 2692 - DNA, 619 bp, Homo sapiens
ctgcccacagcccgggccgggcagacaccgcgccctgccgagcgggggcccccagtgcggcttttcaccgaggaggagctggcccgctatggcggggaggagagttttatggacgaggagccccctacaatgccttgacggggaaggactccactagaggggtagccaagatgtccttggatcctgcagacctcacccatgacactacgggtctcacggccaaggaactggaggccctggatgaggtcttcaccaaagtgtacaaagccaaataccccatcgtcggctacactgcccggagaattctcaatgaggatggcagccctaacctggacttcaagcctgaagaccagccccattttgacatcaaggatgagttctgatgttccccctgcaggagcaggttcttgggagcgtgaggcaggaagacactaggtgctgaatctcctgcaaaactggctgcctggaggccctgagccacccagatctgaataaaacagatgcttaccctggaacaaacaaaaaaaaaaaaaaaaaaaaagaaacaaaacaaaaaaaaagggcggcgctcgcgatcccgggaattccggaccggtaccagccggctaccggtaccaac

SEQ ID NO: 2693 - DNA, 669 bp, Homo sapiens
tttttttttttcctcatcagctatcattagtgttagtgtagtttatgtgtggcccagtgaattcttcttcttccagtgtggcccagggaagccaggatattagacgcccctgcccttaaaagcttgaaatgcaattagaatcagggaaatcccatcttccagtttggtttactggggttccgcgggatattgtgtaagaactgattccctcgattcatctcctcatgatgccccacggagctggcaatatgcatttcaaggaatgccagtaggtggtttggttggttgatccttgagcatgtacagttgttggtggattagaaagcgcagacgagctttgaatttctgtagatggggttgaaatttgtgttattagctgtgagactgtgggacacacacagggatggcagcacctctctaatccaatgtttttaacaactaaataatacatgccatgcgttagcatgtaccagctatgcaacaaacattggattgctttctacttctacctacttatcttattattttatattttattcatttatttatttatttttgaggcagagactcgctctactgcctgggctggagtgcaaggtgtgatctcggctcactgaactttgcctcctggactcaagcaattctccttcctcagcctcctgagtagtg

SEQ ID NO: 2694 - DNA, 175 bp, Homo sapiens
tttttttttttttttaaaatatttttggtagagacggagttttaccatattggccaggctggtcttgaactcctgacctcaagtgatccacctgcctcagcctcccaaagtgctgggattacaggcgtcagctaccacgcccggcctcttatttatttatttttgagaacaagaa

SEQ ID NO: 2695 - DNA, 631 bp, Homo sapiens
tttttttttttttttttttttttttttttttttttacatcacaactttggagtacacatagagttaaattagaaaatttgcttttgagacagtctttcactctgtggcccacgctggagtgtggtggcacaatcttagctcactgcagcctctacgtcctaggctcaagcgatactcccacttcagcctcttgagtagctgaaagtacaggcatgtatcaccatacctggctaacagttttgatgtttagtagagatgaattctcactacgttgcccaggttggtcttgaattcctgagctcaagtgatcctcccaccttggcctctcaaagtgcctatattataggtgtgagccactgtgcatggcctatttgcaattttattaatttaagtagtatggaacctggcattggcacacatacaaggccttacaaagaggggccaactgacttgactaggaagtttcaaaatcagtctgtgctggattccagggaagaactctaaaacaacataacttgagattatgtgataatgacaacagtaacaaaaccagaataaattcatagacagttcttcaaatcagtgactcttccaagattatcctacatgttacatctacaagtaaacactg

SEQ ID NO: 2696 - DNA, 121 bp, Homo sapiens
ttttttttttttttttttttaggaaattgtctattttatctaacttgtaaacatattagtcattaacttattcataagtagtctctcagagttttatctctgctgtacctgaagttatgtt

SEQ ID NO: 2697 - DNA, 693 bp, Homo sapiens
ttttttttttttttttaaaataagccagaactgtttattgaaaaagcactaaaacaaaatattttggtaagatcgagcaagaagacacaaatagagaatggaaaaatgaaaattttataaacgcagttgaaatttgaaaatgtgaggatattatgaacaattcatttgaaaactgacaaaatacacaaattactacgagtattttactcaaactaattgaagatagacatgtaatcccacagctcctaaatagtttcagtaattaaaaatttcccccaaagaaaagccttttatagtaagttccactaacctgttccatatggtaccaattcttaatctaacagttaacagttcattcaaaataatggcaacaatgtatttgatttggtacacatatatttgtgtgtgtgtgtgtgtgtgtgtgtatagtcgtcatacttaggggtgcttatatataagtggaatgacagcaatgatacatgggataggaaagagaaataggattatttgttactataaggtacactgccaaagaagcagtatattatcatttgaaagaggggtgcattattgtaaatctatacggcaaacacaagggcaaccacaagaaaaccacgctagaagagagaataataaaatgcaaatgaacaccatcaaaggcacaagacgaatggaagacaacaatacggaata

SEQ ID NO: 2698 - DNA, 582 bp, Homo sapiens
ttttttttttttttttattaattacctggtaacctttattcgggaagtgaaagtaactgtgaaacaggcttcataaggcgtggcatacaaggccttggtttccaacgccggcgaggatgaggcccagtcccacactccctcgcaggcacccttgctaagatgtcctccatgggtgaccaaaacggtggtaacatagccaagggttacttttacttgggtaggatgactgcagaaggaatggctacacagagcttccagacctttccatgcgttgtgctctccagaggatgcgccaggtgtatcagattggcatgcacaaagacaggtgtgcgccaccacccaccctgggctgggcagcaaagaggtctgctcacctagcgcaccagacttcctagcctccttccacacatccgaatcttcaagcaggatgaacaagagaccacagaacactgaagcaacgactaggaatgctgcaaagacagatgctctgaatacacaaaaagccaaaacataagacaaggagggaagagtacaacgagggagacagacaggcacagtacaactatgcagcttacactgccg

SEQ ID NO: 2699 - DNA, 410 bp, Homo sapiens
gattcaccaccacccgcacccattcccctatctaggccttcttacgagcccaaacctgcccctactcctcctagacctaacctgactagaaaagctattaccttaaaccatttcacagcacccaatctccacctccatcatcacctcaaccccaaaaggcataattaaactttacttcctctctttcttcttcccactcatcctaaccctactcctaatcacataacctattcccccgagccatctcaattaccatatatacacccaaccaaccatgttcaacccgtaactactactaatcaacgcccataatcataccaagcccccgcacccataggatcctcccgaaaaaaaaaaaaaaaaaaaaaaaaaaaaaaaaaaaaaaaaaaaaaaaaaaaaaaaaaaaaaaa

SEQ ID NO: 2700 - DNA, 391 bp, Homo sapiens
  misc_feature (247)..(247): n is a, c, g, or t
  misc_feature (323)..(323): n is a, c, g, or t
tttttttttttttttagttatgtatttaattatatttataaattatcatagatatttataaagatatgtgaaggaatatttaacatttgtgacattcaacacacatgcttattgctttcatagctctattctagcactaatccacagaatggaaatatcaatagaaaaaagcaattaacaacgttagctgtggaagcatttcatttagtaaaatcaagaaataaaatatattttcctaactttgatngtgataaaatcgggcaatcctttcatttctttaaattctttatttccctgtgctcctattttccccttcgaccatnccacaaaccactttttgtgaaaccaagtgtctcgtgtgcctgggggcccgggggcccgtgagaaaaca

SEQ ID NO: 2701 - DNA, 655 bp, Homo sapiens
ttttttttttttttttttttttttttttttttttttttttttttttttttttcaatgggaggaaatttatttattacagggaaaatgggttatacaggcattaagagggctgaaaagcaaaatacaaaggctgaaaaaccaaaagtcatctagaaataataacttcagaaagcagctaccacctctagggcgggaggaacaaaaggaaaaatatgaagtaaccagaacttagaagcccagaatggcaaccacaatcttgggggaaggtagaaccatcgggctgcgggggataatctcggagcgggtacagggggaatcacggaggctgattccagtagggctgaaagaagctgaagtggcactgccactgcttgggagaagggtctctaggtgaagaagcatggcgggtcctgtaagcaacatgaacaagaacagaaaaaacaggaagcatatctctccttcggcctcccagtctctctctagtgacccctatgggcagaactgaacaggaagcaagcttaaaaagaagtctgagaaacagttggaggacaactagccccataatcacggggaagaagagtacagaaggtagattagaggtgaggggcactcagtaaatgacctcgccagatggtgtccatgccaaggtcgctct

SEQ ID NO: 2702 - DNA, 97 bp, Homo sapiens
ccagagtgtattctgaggaaggagaaatgcagtgaacccttgacttagcaggtagacaatgaatacgtagttatgataggtattgtttggaaagcac

SEQ ID NO: 2703 - DNA, 637 bp, Homo sapiens
  misc_feature (306)..(306): n is a, c, g, or t
tttttttttttttttgagatggagtctcactctattgctcaggttggagtgcagtggtgtgatcttgcctcactgcaacctccgcctcctgggttcaagcaattctcctgtgtcagcctcccaagtagctggaattacaggtatccaccaccatgcctggctaatttttgtatttttaatagagatggagtttcaccaacatggcggccaggctggtcttgaactcttgacctctagtgatacctgcctcatcccaaagtggtggaattacaggtgtaagccactgtgcccagcctgtggctggantatttaaaaatttttttgtagaggtggggcctcactttgttacccaggctggtcttgaactcctgggctcaagtgatcctcccaccttggcctcccaaagtgttgggattacaagcatgagctgcagcgcctggccaaatcctttcctatgatttgaattcagttttacaaacattatctttttttcttcaaaaagaaaataatcataatgattataacagcagctacttataaagcatttacaaggcattataacaaatatcttatacttggtaatctcgctcagatcatctgcatgaccttctatgtacggtcattatctcattttaca

SEQ ID NO: 2704 - DNA, 670 bp, Homo sapiens
ttttttttttaatgatatgtgggtcctctaaagtattaagacaaaggaagaagcctctttgcttgtgcctaaatcagactgatggacaacactcagatttacttgaaaaatatagcatattttgaagaggagagatttataatgtcattgaatgctataacagaggaaagaaatgtgatttatcatgtgacttaatatatgtatttctaagtcctagaatattatccattagcattatcatatttatagcaaagtatatttttcttcctttatctaaagtaccgagtgcatttaattatttattttcaagttgatattttccttagtgacagttttcattgttaatatttatcaaaataaaaaatattttttatatatttttctattttttactattcacatcataactatatttttcctaaaataaatttattagaaaaatacttccttacatcaatactactcctgcttcccaatatagaatattactcaattacactcacaaagcaacagctccttttcaaggtagttcaattttttcagctttttagaacagttagtaaatatgacattatgagtaatactcctctaattttaaaatgacaaattaggtgttataaattactaactctttagttattttattaagttcagtagcaaattaatgaca

SEQ ID NO: 2705 - DNA, 739 bp, Homo sapiens
  misc_feature (525)..(525): n is a, c, g, or t
tttttttttttttttgtagagacagggcttgccatgctgcccaggctggtcgtcaactcctgggctcaaatgatccacccacgttggcctcccaaagcactagcattgcaggcatgagccaccgtgcctggccataaacatcattttcttttagagagcctctctctgacatttaagttgacagctatatggtacagcctattgatcctagactacaaacctgcaagcacagcatgattgtattagtcaattctcacactgctgtaaagaaatgcctgagactgggtaatttataaagaaaagaggtttaataggctcatggttttgcaggctgtacgggcagcatctcttctgggaaggcctcatggagcttttactcattgtggaagacaaagtgggagcaggcatcttacatggcagaagcaggactgagaggggtagggggaggtgccacacacttttaaaccaccagatctcatgagaactcactcaccatcgtgagaacagcaacgagtggaaggggcntaaacccattcatggaaaggatcacaaacacaccagtggaatccccaagtccattcttccacaatcaaggaccaccagcttcccacacacttgaggcattatacattgaagcatgagaatttggatgggggacacagagccaaaccatatcattttgccctagcacatcctagatctgatgtcttctcacttgcaaatccacatgctctgattg

SEQ ID NO: 2706 - DNA, 722 bp, Homo sapiens
ttttttttttttttgttaatgtgatacattatgttgatgattttcattatatagaaccatcattggattccaagaatgtctcccttggtcatggcatataatccttttcatgtgctgttgaattctgtttgttattattttgttgaggattttcacatcagtattaatcaaagataatggttgtagtttttttatagtgtctttgtcaagctttagatatcaggataatgctggcctcagagtgagttgggaagtgttatacttcctcttcaggttttgggaagagttgagggaatatggtgtagattcttctttaaatgttggtagaatttatcagtaaagccatctggtcctgggttttctttgtgggagtaaatagatactttaaaaaaattcaccttttaaaattatttatacaaccccatccaaactttactacctatcctgcaatgtttattttttcctttatggtcatcagcccatccaagatcattgatgcttctaattgtcatgtctttttagtcttaatctatctggaagagttcctgcacctttctctatctttcatgaccttaccaatttagagagtacacacctttattctgtaagatgtctcattaacctggggtctgtcttgtgtttaccttaatgttcagattcatgtcatatattttgggagaaataccttcacatgactggtgcatgcttctcactgtatgaga

SEQ ID NO: 2707 - DNA, 597 bp, Homo sapiens
tttttttttttttttttttttttttttttccggagaccgatgcaccccacagtcagggtgattttatttctagaaaaggtgacaggtgctgcacgtgggcaggagcaggtcacagtgaggcagggccaggggcatccccctctcaacacaacctaggcgccagcagcctaccggccaggtagagcaagggctggcccatgtagtgagcccagcatggggagacgctgagggcccatggggcgccaaagccagggggcagcagcctccaaacaccgacagcgccacgtcccctgggcaggaaggtggatgccccagggcactctgtcctcctgctggagggcctggcaggctggtctcaagacaccagccggagggaggcctggcaggtggccagggatagaggcaggggatgggctgagcagggacgcagcccccacctgcctgcaggctccagacacaacagcccaggccccatctgagccctggcgctgcgctggcatgggtgggggctggggaggggcgtgggcatggctggcctcagaagcccttgtccatgctcagggtgcggcgggtcacgtgctccagctcccctgacga

SEQ ID NO: 2708 - DNA, 686 bp, Homo sapiens
  misc_feature (18)..(18): n is a, c, g, or t
tctcactgagtttcctgnaaatcattattttgaattactctcccggcatttaataaattcctttacttggggtctgttactggagaattattgtgtttttttttaaggcatcatatttccttgctttttaatgtttcttgtgttcctacattgatacctgcacatctggtgaaatgtttgcctcttccaattttatgcaatagttttgtaggaagtgactttgtgggaaatgtagatgagtcctagggtgtcagttgggtagctgagtggattcattagtatagcctctttgccgtttattcagctataatctactttaactctgtctgcaaattcctaagtagcctaggctacaggagttttcagtggtggcagtgcagccttgccaggggtgggctcaccaggctggttctcacagcatgcaagtaaggggtcagccagcttggaaattggtccaccaagggcagggcctccagactgtctctcaggccaagggtatgggtgcatggtgagtgagtagactggggattgacttaactaggggcaagcatccaggttgtttctatgactggggacacctggctaaatcaccagaggtagatttactggtagtttctaggctgagcatggattctggcagttcagcaggctgaaataccttctatgctgtgcaagactggagtcta

SEQ ID NO: 2709 - DNA, 701 bp, Homo sapiens
tttttttttttttttttttttttttttttttcttttagagatggggtcttcctatttggcccaggctagtctcaaactctggggcttaaatgatcctcccgcctcagcctcccaaagtgctgggattacaggcatgagccacctcgtccagccaataattaatctactatgtaaataaaatgaagtcaccaataaatttttaaatacaccttcatttttggaaagacatcattaaattccagcaaaacatccttactaatatgttgttaactggtcatagtcacactcaaaatagcttacaatatgttataaaattttttagaatggaaatatataataactaggttttataacatggaggaaaacaaactatagggtagtgctggcccctggattttcatggacctcccccgtttcacctgtcaaaccaacattcacattctcttcttactaatcccttcttaaagctaaattcaactcccccttatccagcgcaaaggttcagagggagagggaaaataaggacattactaacgcctgactatgaacactgcaacattattccaacggtctactatctgtatgccatcactctcagacatctcttcctcttcctagtattctctcccgaactcctccaacgtatacatggaccctgaacacttacactaacacaatatgtctcgagactgggtaacatc

SEQ ID NO: 2710 - DNA, 639 bp, Homo sapiens
tttttttttttttttttttttttttttttttagcagatacgtttattcaacacagtgcatgattcaaagcatcggatattccacagccaacaaggtttcctattccctattacaaaataccggataccctgaatatagctcattcaagggtcctcgttcctttttccctatatctagaattaaacaggtttccccgtttagcgcacatttcacgttcgctgaaggcttgggggagagggggaaacagagcttatgacggcccctctgaaccaaaggcacttaatgttaaaagataaagcacagtagagtcaccccacagacattcctatgtgttcaacggctgaactgcagcataccatcaccggccccatgtgggattcatcataacaacgtacaagacactgatttccttggaaaaacaaagtgcagtacgaatataaaggagtcaccacacccctcttccgaaaataatacataagagaactcttactttacatgattagtatcactcaaggttcacacatggaaaaaatagctaaaaaataatctatcataaattctatgaagtcacaatagaatctgatacccttttagaactggtgagtggagagaaaaccagaggtcagcgtgcatcactac

SEQ ID NO: 2711 - DNA, 689 bp, Homo sapiens
cgccattatgcccagtacatgaccttatgggactttcctacttgcagtacatctacgtattagtcatcgctattaccatggtgatgcggttttggcagtacatcaatgggcgtggatagcggtttgactcacggggatttccaagtctccaccccattgacgtcaatgggagtttgttttggcacccaaatcaacgggactttccgaaatgtcgtaacaactccgccccattgacgcaaatgggcggtaggcgtgtacggtgggaggtctatataagcagagctcgtttagtgaaccgtcagatcgcctggagacgccatccacgctgttttgacctccatagaagacaccgggaccgatccagcctccggactctagcctaggccgcgggacggataacaatttcacacaggaaacagctatgaccattaggcctatttaggtgacactatagaacaagtttgtacaaaaaagcaggctggtaccggtccggaattcccgggatcgcgagcggccgctcgcggtgcagcccatgttcctgcgtgcagctcacggccttgtgtgtatgtgtgtgtgtgtgtgtgtgaggcatcgtcatgtcctggggcaggggcggggggttgggtgtggtgagggaggggacatatcctagggttttcaaataaaacatccagaaaaaaaaaaaaaaa

SEQ ID NO: 2712 - DNA, 110 bp, Homo sapiens
gagtctgggaagtccaggatcaaggggctgcatttgatgaggcccttcttgctgtcatgccacagaccgaagggcaaagagaaggcgagagggagcaagaagggaaaggg

SEQ ID NO: 2713 - DNA, 619 bp, Homo sapiens
tttttttttttttctgactaaatgtagcccatattgttgcaagccttgggtgatttccagacttctgaaaaattgaatttgacaatttggtcagagttctcatgcattttatgaaggagaggttttcagagggcctactctgctatccatgctgatgtcttccattaatgcagttttaatgaagatattaaatattcatggacattctatttaaaagatctgtagggtaagaaatctacaggttctcaattttattttctggtactacccactatctcataaaccatagtaatttcatctctatatctttatctcagactaaatattcattcatcgtacatacaccatcaaagtgtatattcagtgacttctgtgcttaagacactgtgatacccatattgaggtagattcaaaattaataaatcacagattatacccaatgcaataaataagatgatgtagctaatacacaaattaaacttgatacacatcagaaatgggatatcgatcatgagaatttcaaaaacggatgaggaaagactgctcgacagaatacgctaggggacacatccacaagggctgtggtgtacaatcctagcatatacccatgagtggtcat

SEQ ID NO: 2714 - DNA, 615 bp, Homo sapiens
ttatttctgaattatacagtgaggctatatagatatattgtgtcattaaagacttttatattatgaatctacattatggagaatttatttaccaaaacgaagtctaacagacactttattctgagcaatccaatggcatgatagaaaaagctttgagatatataaaagattaatttgtgcacatctaaatgtttctaagggaacaaactactgaggcattgtgataagacgagagttgcaaacatagtaccataactgaatatttaaaattacatcttaacaaaggctaggagtagtgacttcctcacacacctcagagaatgtcttagagagtaaccccatagaacattgtatggcttcaacagaaacttcaggattttcttccacactgagctactgccctcaaacaaactttctcactccttgacactatcttctgtgcaaatttctgttctttctcttaatcaaggagctttgagaaacaatgcttttgccccaatgaccccttggttcccttaactacagatctataggagaaatgcaaagcagttcccagaagtcagaaccaaagcaagaatgttcagagtgcagagctagagagctaactcatgtgaa

SEQ ID NO: 2715 - DNA, 762 bp, Homo sapiens
  misc_feature (611)..(611): n is a, c, g, or t
ttttttttttttttgaaggcttcatgaataatttattccatttgaagtttgttttttgtttttgttttttttttttttaaaaagtataaaccttttcatttcctcaatcacaatttgtacaactcagtgttatggcattcggcagcaatagtgtttgttccttattctctttttgtcacgttaaaaagaaaagcaatgggaccatattaaatgtcactgctaaacaacaactttaaaacgccccttcataaagtgaccaagctattttgagagggttgatgctgacatgtccagtaatgacgttacaatttggtagcttaaactcaataactttaagggtccacatatccagtttacttggaaaactaaagatgttttaaaacttcatgaatacatcaacctgaggagtattttaggtcccaaatccagtttttaaatttatactccacaaaaaagaaaatacatacataaaaatttaaaccacagttctgggcccattaaaacaccaaaaaagaccccccaaaaagttaagatttccagcttatttctggaggggtgggacaaaataagaatgtatattaaaaacatttttccttattcagacaaactanaatcttaagaggaaaacccagaccaaaatatcactcatgcaacatttaagtgtatttactgattgatatgcaatggcataggggatgactagcaaattatatgatgccatagctttaaactttaatctattcattgactttattatgcact

SEQ ID NO: 2716 - DNA, 75 bp, Homo sapiens
tctaagtagcaaggattggtgtgaacaaaggcacaagctctgaaaggttacaagacatttctggagtggccagag

SEQ ID NO: 2717 - DNA, 707 bp, Homo sapiens
tttttttttttttttcccacgtgatggggtgggtgtgaaaggcagtccaggttgcactggttgcacaggagaagtgatcagaagaggaccccagcaggtgtgagccgtgagctgggaggtgcttcagtagtgcaggccatagctgaaggtgtcctacatcagcagggtgatggtgaggtttgaaccactgtttcactgcatagtccctgctgatggacacttgagtgttcagattttttgctggtatattcagtgctgcagtggacattttcatacaaaatatttcggtacacttttgtttatatctgaaaggtaaattcctagcagtagaattattagagcaaacggaatttaacattttggtgtgtattgccaaattgccctcccaagtggtttagtcagcttacccttgccaacaatagatctatccttgccagccttgggcatcacatttaccagtttaatagattgtaaaaccatatcttaattggctaccctgaagccaccatactggagaggctgtgtacagtgtttcacgtagagagagggatacccaggaggcccacctgctccaaccccagctgcatgagtcttcccagcccaggcacagacatgtggataagatttagacatttccaggcccaggcttcaagcgatccttagttgacactgaggggagccagataaggctgagctgagaaacagtc

SEQ ID NO: 2718 - DNA, 639 bp, Homo sapiens
gctgcctggccgcccggacgccttccaccgctgcatcttcctcttctgctgccgcgagcagccgtgctgtgccggcctgcgagtttttaggaatcaactacccaggaaaaacgatttttactcatatgagccaccttctgagaatcctcccccagaaacaggagaatcagtgtgtctccagcttaagtctggtgctcatctctgacagggtttgtggctgtttaggccccaaaacgtgctccagatgccacaaagcatattactgcagcaaggagcatcagaccctagactggagattcgggacataagcaggcttgtgcacaaccagatcatctggaccatataattccagaccacaacttcctttttcccagaatttgaaattgtaatagaaacagaagatgagattatgcctgaggttgttggaaacggaagattactcagcagattataggggagcattggggatattactgggaaagcaacaacttccaagtggtcagatgctcacagtcttatgggagagagcccaaatagtatctggggacagttaacagtccatataaatgacatgataagagtacaatcacaggtgccatgggaacacgtgacatcactgagactgcctggcaggggccg

SEQ ID NO: 2719 - DNA, 731 bp, Homo sapiens
ttttttttttttttttactcatgtcaatattctttattaataaaatgtttttcagtgtcaaaatttattattcatttcttcattagttgactcctccttgctcatcagtctaaggacagttgtaccagacttggataaggtctgcccagaacgagtagtaattgctcttgctgttctactaggcacatcaatgttatagtattgatctttagaaaaggcatagtaatcatagccgtcaggttttctgatgttgggcagtgatatagctgaggtaaccacatttggaagtcctctccacagtatactcactttaacttcattatgaaggacacctttgtcttgataagccagtctggcaggtgaatattgaattctgatggtgtgtgtttgagaaggtcctatagcacgttcaaagcgacgtctcctaacctgtgtcgtttctccatacactggataatttagagcaggccttcttccagggcacttctgtacaggttcctgttgtataaatatactgctgaatgctgccacctctcttgaaaaaatacacagattcaggccagttcttatatttagctgttgaaagcgctgccactatttgtccagttagtcctccaaatcctttgaaaattggttggggtaccctgcatcttttatatcatggtaaaacgccagtactgagaatccttaagaagaaagttttccttcacagttgcactagtagaaacgta

SEQ ID NO: 2720 - DNA, 656 bp, Homo sapiens
ttttttttttttttttttttttttttttttttgagatggagttttgctcttgtgcccaggctggagtgcaatggtgcaatctggctcactgcaacctccgccttctaggttcaagtgattctcctgcctcagcctcctgaaagtagctgggattacaggcatgtaccaccatgcctggctaattttgtatttttagtagagacggggtttctccatgttgttcaggctagttttgaactcccgacctcaggtgatccacccaccttggcctcccaaattgctgggattacaggcttgagccactgtgcctggccaaaactgtaccttttaacatcagaagggaaatggaagttaggcagcccaaacaacagatgtatagtctaccattagttcctgcagtcatctaaatggccggtagcagatgggatcttaaaggcatttaggacattcattcaatacaagtgcatcttttaactagcgatatatcttatttaagaaaaatcatcttcatacctacattgggaaaagaattatgattttgaaaaacagcttcatattcattagctgctactatacttagaaacttgttgaggtagatagaaccagaattaacatgcctcttctgagttgaaacctggaggtgctggatattcagg

SEQ ID NO: 2721 - DNA, 218 bp, Homo sapiens
ttttttttttttttgtctgactgggttaaattaaaagactgtcttcttctgctaaatttctttcttctgcttggtctagtctatttctaagtctttcaactgtgtttgtaattcctataatacatttttcatttgcagaagttctgtttttttaaaatatctatctttttagtaaattttcttctttttgtaaatttttcattcatatcctgtattgg

SEQ ID NO: 2722 - DNA, 571 bp, Homo sapiens
tttttttttttttttagtagacacagagttcaccatgtggccaagatggtctcaatctgctgacctggtgatctgcccatctggactcccaaggtgctgggattacatgcgtgagccacctcgcctggccatatttgccattttcaatcaatccatcaaacatcttaggaagattaaaaaaaaaaaagcatccaatttctggagcactgtgcactccctgggcagatgggaaatctggaatacttgtttctagagagatgttctgcgttagagaagaagcagaggctgcagggaaggcatggtttatgtatttacaatgcgagaggacatgtggaagttcccttgttatgtcgcctcacaaggaataaaagcaacaggatgaggacagcatgactcagaagcacaagcaacaggagacatgatcaacaggactggatcaaaactggaaacatacgggtccttcaaaggacaccatcaggaaagtgaaaagacaggccaggtgcagaaggcacatacctgtaatctcagcacttgggaggcagaccggccaggtgcagaggatcataccagt

SEQ ID NO: 2723 - DNA, 650 bp, Homo sapiens
gtcgtatcgcctggagacgccatccactctgttttgacctccatagaagacaccgggaccgatccagcctccggactctagcctagccgcgggacggataacatttcacacaggaaacagctatgaccattaggcctatttaggtgacactatagaacaagtttgtactaataaagcaggctggtaccggtccggaattcccgggatgtcaggaggctgcctcttagacgatctccagatgtactgtgatgtgagtttgaaaaagagttcctgaagtaccacatctgggagacatgccactagctgagcttcccataagtctaccaagagctgaggaattgtatcttcatccttagcacaaagcaccttaaaaacagtaaaaggagcctctatattccagataaatatagcactgataaagcgacagctgggctgaatatcacagcatcacatgggccacgcaatcaataatttaccattagcattagcgccatggcaaaagcaaatttagacatttttaaaaggaaacagattctaggatgtacaaataaagtttctacagatatagtcttttaattagtacttttatcttataaactgattatgtatgtgttttttcaataaacaaacaaatgaaaaaaaaaaaaaaa

SEQ ID NO: 2724 - DNA, 662 bp, Homo sapiens
tttttttttttaataaggtatttcaaatggaagaaaaatggtggaaaagacaagatagccatagcaacttcaggataatggacacgttgtggaggaacagagtgaaattagacagaaatgaataggtggctttcattttatgtttgtagctttttaatttttttaaattttttatttttttgagacggagtctcactctgttgcccaggctggagggcagtggtatgatctcggctcactgcaatctcctcctcctgggtacaagcgattctcctgcctctgcctcccaagtagctgagactacaggtgcccgccaccatgcctagctattatttttttttttttgtatttttattagagacaggatttcaccatgttggccaggctggtctcaaactcctggcctcaagtgatcctctccgcttggcctcccaaagtgctaggattacaggcatgagacaccgggcctggccttgtagcatttttttttttaaataagaaaggactcaatgatagtaagtttatttttgttacatattaatggtgcatacatagggtttcatcacattttcccctgaactttctaaatgtttaaaggtttgtaatactaacagcactttactaagaaagaaagaggtgcatctcagtaatcggagttctaa

SEQ ID NO: 2725 - DNA, 145 bp, Homo sapiens
tttttttttttaaaagacaccacccccaagcaggcatactaggagctgaggaatgtcaagctggccctggacacagaggttgccacctacatgaagctgctggagggcaacaagaacaggctggagtctggggccgccctttttt

SEQ ID NO: 2726 - DNA, 686 bp, Homo sapiens
tttttttttttttttttaactgcttgctctttttattattgtttttgttgtatgtgttttttatgtttggggttggggtggtagatcagagttccttttcctacatgttaaattttggtatattagtggaaatctccccagttgttcaggactccctgaagttaccagagtaaataggatgtttttcaaaagaaaatatttattagaattaaaagggcatttttgctaaaaatccatactgtagctgctccccacattccattacccaaagatgcactgaaatgtgattatctttactttccaacatgatcttacttggtccattatgtgcttttcttttttaaaatttttcttttgttctttttttaatgccagttttttcttatttgatatagcttagatattatttagtatcacaaaatatagataatacatgctgttggaacaaaaattacactagccaatattaaatagggaaggaagacttaattcaaggctattttaaagagctaggatcagggaaattgtagccatctgtgttgctaattggccttattcaaaggaaaagtaaactttctcatatcttcataactggaggtaattttgcaatcggagcaagaaatccactgaatttaggctcctaaccttctcacaaaagacctgggaacatagggaattacccttct

SEQ ID NO: 2727 - DNA, 641 bp, Homo sapiens
tttttttttttttttttgtttttagttcgaaaagatctttattcattcaaatcatggcaagaaactccttcaggaacacaggagatagtggtaccaaaaacagataaccacgcaaactatgcaaactggaaaagtgcattgctttgtcaaagttcattaagtaggtcttaatattttagcaaaagaaaatcttccatctgaacacagggcatgacaaagctcatttcacacaatggaaggaaggctttttttcttgtttcatgtttgtatgtttctgacactgcagtattaacattttaaattgaatctttaaatgatttttctgatgtcaacaacattattgggaaggccaagctcggtagatgaccttaactgaggtggttacagcattgttcccggtaattcggctttgtgatatatccttcttctcataggtattaaggtctggtttgaattaaagtccgcagcatactcacagctgtggggagtaactgaaaggacttgtttacatctgatggccaaaagactttctagtaacatacagttcgtacatttatattacttacttgtcgggcatttatggaacctactaaacacctgatgccaagcactggtgctaggtatagatataaatcctgacc

SEQ ID NO: 2728 - DNA, 687 bp, Homo sapiens
ttttttttttttctctgcttttgaagttaattctccccttgctactcattgtgctaaacaaaaggttctcaatactggctacaagattgaatcctctggagagctttttagaaaataagatgccagggcctcaccaccactgaggagtctacttcaaccagctagtggtgggatgctggcaaaggtttttgcaaatggcttcccaggtgatttaatcatgtatctggagttgaggactatggcactagaccaaaagaaaccctagtgtttatgagaagtactagaaggtagactcagggtgttagaatagagtgccaggtgacagcagcagaagcctggcccataatcaggatgggcctcattatggcttgcccatcaacctgaagaatcagtggcggctgaggcatcagcctcctgtatggtctgcaggatagaaaatggcaaagtcaagcaccacttctatgaggttgacaacagagactgactgcccagtgccagttgggaagatggttcctttggaatgaaccactctcacacccacatatatcactagatggtattaaatgttactacaacctagggctacacagggacaggcaacatggccctgatggaatctttgcttctcccttcacggagtaagatgcctgaaataactatttttaaacaaaatttattttgagggac

SEQ ID NO: 2729 - DNA, 183 bp, Homo sapiens
catgtgaagtcatatttattgacaatattattttttatagttgtacacaatttagagctagcatttagagctagagtttatcatatcaatattatgtttaagttgcttaagttctaaaataattaccttgttgggctatgaatttatcaggttacaatacaaaaatactatggtaagttcatt

SEQ ID NO: 2730 - DNA, 817 bp, Homo sapiens
  misc_feature (612)..(612): n is a, c, g, or t
cctggccctgctgaccctaggcctggctgcacaacaccaagacaaagtgccctgtaagatggtggacaagaaggtctcgtgccaggttctgggcctgctccaggtcccctcggtgctcccgccagacactgagacccttgatctatctgggaaccagctgcggagtatcctggcctcacaccctgtggcgttctacacgggacttcgtgcacctgtgacatgagagccacagagatatcagtctctctaccagaccaagaagccttaccgagggtcgctggaacccaacggcttagggaagcataccttcaagtgcttggcgattcaacaaaccgggcttgggcgggatgggccgacttggtcggctgggagtggcttgggtgggccttggggcccgccttggccactgcatgtgaccttcccttggaaccttggtctaggggaactaggccttggtacagcgggccttgctgggagcgggcttggctggggggatggcaccacagccttgctatacctctcgtcactggggcggagaacgagtctggactctgccgtcacccggccacagccttccagggacatgccgtgcgcctggagcagcttgacctngcatagcaagcgtgctgatggacatcgaggatggcgccttcgagggtctgccccgcctgacccatctcaacctctccaggaattccctcacctgcatctccgacttcagcctccagcagctgcgggtgctagacctgagctgcaacagcatcgaggctttcagacggctcccagcccaggctgagtccagtcacctgggttgacc

SEQ ID NO: 2731 - DNA, 596 bp, Homo sapiens
tttttttttttttttagtggagacggggtttcttcatgttgcccaagctggtcttgaactcctggcctcaagtgatgtacccactccagcctcccaaagtgctgggattataggcttgagccgctgagcccagccccaagtagaatactttatacgtaaccatatagaacacagtgaaacatgtaaacagagcaaaatagcaagaagataacatcttcaaagcaagggagataagagcatgatcatgggaatccatgattctacatcactagttcacaatgagatgagtacacagcgttatcaaaatgtggggcacaaccaaaatataatagtatgggtaagagagagtgatattcgatatcaatggcggatatagagaagaataatacctctaataatccaacatagatgaatcacagaagttgcggtgggttgacgtaaacagacatttcattcgtggattttattcaatgcaggccagtgctggtgtgcctgcttagcatgggcaaatcagggacccaggctcctacctttcatgactcctctacccgtctgaaatgtcggtcctatgcatacaactgatgggaaagattaac

SEQ ID NO: 2732 - DNA, 701 bp, Homo sapiens
ttttttttttttttttttttttttttttttttaaatgggtatattttattttatgtatattttacaacaatagaaaaactgtaaaaccatactaattagaacctataataaatactcattacttactgatattctgactgactacctggagcagattaccagaaattccagatcaagcccaatgtctaagttagtaatgaggtatggatctgtgtttaatgcttactaaataagcattctatttacaaattcatttttacctgttctagaatctaggtttcagaattattcaacagttttctacttacacctttctcacatgtaagtcaccaaacaaaggtttactggggcagaacaaatataagaaaaaatatagactttttactatcacggagcttctgaataagacaaaaaattagtggatcctgcatctgagatatttattcacgagaccctaacatatcctatgaaatgccattacttaaaagttaacacctttagaattacaatcaggatagttattacagtagaacttctacccaaattaggctgtgaatgacctggaaccctgtagtcactaggatctaagccagaatctaaatttagacagtcattctgaagactgtaatattactagttcttgggcagctgactaagcctgtatattaatgaagtggagaagtcgatctgcctattacaca

SEQ ID NO: 2733 - DNA, 667 bp, Homo sapiens
ttttttttttttttattgtcagtctatccctacatctaaactcttttaagggtttgtcagtttgttgattgaaaagaaaaaaaacttttagttttgttgattctgttttttttctgttctctgttttattcatctctattcatatatttcttatttccttccttctgttagcttgggttcagtttcttcttgtagttctccggttgtagagttagattaatgatttgagatcttctttcttaatgtaagcatttacagctgtaaatttccttctgagcactgtcttgctgcatcccgtaagtctttggtattatgtcttaactatgtaaaaatttttcttgtttaagagtattatcttagtcagtttagtgctgctataaaggaatacctgaggccaagtaattgtaaaggaaagaggtttatgtggctcacaattctgctagctagaaagtgaaagtctcaggctgcctccacttgtggtggaaggtgaaggggagccaacatatgcagtggttacgtggccagatagcagagaggtgtcaggctctttttaccaaccagttgtagtgggagggaactcatagaatgagaacacattcattaccaagaggaaggcacaattccattcatgagggatccaactctgtggtccaaatacttccattta

SEQ ID NO: 2734 - DNA, 715 bp, Homo sapiens
  misc_feature (119)..(119): n is a, c, g, or t
  misc_feature (152)..(152): n is a, c, g, or t
  misc_feature (239)..(239): n is a, c, g, or t
  misc_feature (245)..(245): n is a, c, g, or t
  misc_feature (363)..(363): n is a, c, g, or t
tttttttttttttttttttttttttttttttttttttttttttttttttttttttggaggtttcaccatggtgcccaggcggtgccttggagggtcctgagctcaaagcaatccacctnacttgggcctcccaaacgtggtgggtatttaanaggcatgaggccaccggggtccgggccaataaagaggtatcatatacaaaacgtaaacccaacatatgggtacttaagtgataaaancaaacnatacctagtcttaaacactattcacagggggcacattacgtgccatagggcatttttggggtggcattctaaatctagaagtttctcagaacattagccgataatgacaattcaacanggaacagttgccccacctcaaaatcccagtctgcagagtagagacctgggcgtgtgatccttaaacaagggttccaggtgaatcctttcatcctttcattgggggaacacggatccaagggcttagctcatttcagcttgtgaaaagggttataagcttactcctcaacctcttctctgaattaaaccataccattacattttcttcaaagatttaatattctaagtcttagtcctcctaattaactcaacagctattagctgagcatgcttagaggatttgaaatctctctttaagtgtgggtccttgaacttttatatgaatatgatagttgcctcaaggatgcgggagc

SEQ ID NO: 2735 - DNA, 709 bp, Homo sapiens
ttttttttttttttttttttttttttttttttatttcaaatagctttttattcacataggactagaggaaaatctaattcagtagaaaacacaaaacaaaaggggttattttattctattcaaaggagagtcatgacattaacaacaccaacaataattgggaacacaccatggcattttcaaatacaaaaaaggaatcagaagaaggtggacattccatgagcatgttcaacaatggtatggtattagatattaatcctttataagattattattttcacatctggggaaaataccactgggcagcacaattttaagaaaagtttgggcaacatgtatttttctcagcagctctggatgacagatctgtggtgatgctagccaaaaaaaaattaagggcaaaaccacttggtgcacagaggacaacaaacgtgatcttattaccagaaacgggatatcagaccacaatagaaaagacatgtcattttacactaagccaaaaattctaggctatgggcatacatatcaacaagcctggtctagaagtgtctaatcacaaaagtactaaatatgggtttccgtgccgtgcctgctcaccttatttaaaaatatcaggatattggtttcaaatgacacagatggctgaggctgtaacctacaaaatggtcactcatttttaacggctggtggttataactagaaaacactg

SEQ ID NO: 2736 - DNA, 699 bp, Homo sapiens
gaccttatgggactgtcctacttggcagtacatctacgtattagtcatcgctattaccatggtgatgcggttttggcagtacatcaatgggcgtggatagcggtttgactcacggggatttccaagtctccaccccattgacgtcaatgggagtttgttttggcaccaaaatcaacgggactttccaaaatgtcgtaacaactccgccccattgacgcaaatgggcggtaggcgtgtacggtgggaggtctatataagcagagctcgtttagtgaaccgtcagatcgcctggagacgccatccacgctgttttgacctccatagaagacaccgggaccgatccagcctccggactctagcctaggccgcgggacggataacaatttcacacaggaaacagctatgaccattaggcctatttaggtgacactatagaacaagtttgtacaaaaaagcaggctggtaccggtccggaattcccgggattgcaaaaccccactctgcatcaactgaacgcaaatcagccactttaattaagctaagcccttactagaccaatgggacttaaacccacaaacacttagttaacagctaagcaccctaatcaactggcttcaatctacttctcccgccgccgggaaaaaaggcgggagaagccccggcaggtttgaagctgcttcttcgaaaaaaaaaaaaaaa

SEQ ID NO: 2737 - DNA, 613 bp, Homo sapiens
tttttttttttttttttttttttttttttttttttttttttttttttttaaaaaaataattccatcttaaaaatcgctaaactctatcttgttctattgtgttttggtaacaagggtcacaaatataagatgtcatcataaatattgggaagcagtcacagtccactttatcttgttgctctgaaaatgggatttgtgaatttactaaacattcttctggttataaaaataatacatatccactgtcaaaaatttgaaaaaatatttttaaatgaaaaaactacaaataatcccactacccagaaataataattgatattttggtgtctagctaatctttctttttttgcttccaagcacatataccatacatacttttctacctgtgtgtttatcaacgcaattttccacagtattgtattttcctacatcattttaaatgcctgcttacctgataccacatacctatataagcactttatttaacctctttgacctgtaagtcatttctaacttttcactatttcgaaacaatggcaaataatcatgtgaatagtgtctatgcacacattcatagtgacttctgtaagctaacattcctaaggagcggggc

SEQ ID NO: 2738 - DNA, 623 bp, Homo sapiens
tttttttttttttgtgtgagacagagtctagttctgtagctaggctggagtgcagggcgcgatctcggcttactgcaacctctgcctcccgggttcaagtgattctcctgcctcagcctccggagtagctgggactacaagcatgtgccaccacgcccagctaatttttttttttaatagagacggggtttcaccatggtggccaggatggtctcgctctcttgaccttgtgatccgcctgccttggcctcccaaagtgctgggattacaggcataagccactgcgcccagcctatcaaatatttttataaaaattaataatttaggtgttgagcttcatacctatgtctagtccgtagtatgattcaaaaaagtgtagttttataatttggtaacaaatctttcaatgttttcattggcatgcaacctttaagtacatggactagataaattgacctaaattctctttcatccttcatcctgaactcaaaatctcaagcaagctaagcacataataccccggacttcaaggatgaatgtggggcaagcaggaatgatggtggacgacatgagaggtagctgtagaaatcccgagtaactgaacttagtctcctaaatggccg

SEQ ID NO: 2739 - DNA, 649 bp, Homo sapiens
tttttttttttttttttttttttttttttttttttttttgacaatgcaggaagaggctttttattgcttgtgtgtgttttcaaatcaagtaggcacaacccagtcctcataacagccctcgggagtggacgcaccggggcgggagagcgcaggagggagtgtgcttggctatcctgcccagtggaaaggaaagtgacgtgcattgatcttagagtccttggcaacagactgtggaggcaataacaggataaagaaagcagggagaacgaggcatggccagggctccccagtgcgccttcaaggagaccttaaaacagatagatagcaccacaagagagccacaagagagaagtgtaaaaaataagcaccaatttacattgagttatcacctacaaaaaatgtggtttccctgccctggacattctcccatcaggctctgcgggaagaaaagcggaaacgaggaagcaaataaagattaatccacaacctgtgcttttagtcttaagtgcatgtagaacacagaaaattatcaagattttttccctattagggcgaccaacaaaagtctagagcgaatcacaagctgtctgaacaggggcctggtacctgcttttcactggcagcatagatgcttgctgcccccggggct

SEQ ID NO: 2740 - DNA, 661 bp, Homo sapiens
  misc_feature (341)..(341): n is a, c, g, or t
  misc_feature (447)..(447): n is a, c, g, or t
  misc_feature (649)..(649): n is a, c, g, or t
  misc_feature (651)..(651): n is a, c, g, or t
tttttttttttttttttagacgttcctttaataacttaaaagacaaagcatacacaaccagcatattataggcatgtaaatacatgtgttcttaaatggatcttcacttggaagaaagtttttcgtccttctcagaaggagattagacacaacatatggtaaagccaaaagcaggagcttatagatttgcatgaaatgaaggcgttcttcagacttcttcataacccacgtgacatcagcacttccttttcccactggtattttctacacttccgagactccgtttctgtctgagcacggcaacacaatcattcctgtcagggtgttcacttgcttttatngtctgcatacatttaattgtgtaagaaacttgcgcacagtctggaaatccacatgaccaagcgagatcttcagctgtttgcccgttcttattacataaatcaattngggcatcactggctacaagcaggcttaggcactccaggcttccaacttttgctgccttgtgtagtggagcttctcctaaaacatcctgctggttgaggtcagcgcccgtttgcagctgccagagaagaaagcaagcaaggcgcttcctgcggctaagtggacaggcgactgcttgcagggatccgggggtgcgttgaccgangnccctgtctcc

SEQ ID NO: 2741 - DNA, 698 bp, Homo sapiens
gtcggttgatctccatgtttagtgtaaaataatagatggaattactgaatgaaggtaactacgttttgcacagaggcatactgctcctacttcattccccctgccccatgccacaaagttgaaaatagtgagccctgttaaacaagatttctaaaatatattgacttcttttgggaaatggtcatatttatgaatacgttgtacttttaaagtgtttaatttttctctatatatttgtacatctgttacctgatttgaaacccctccctaacatgggtattacatgaattttcattttaaagattaggaattgggaggttagagataacacacaagctgactcagaaccatgctctttccacttctcaaaacgttttatatgtgtgggtatgtttccttataagaatgtatgtgtccaggcgcagtggctcatgcctgtaatcccagcactttgggaggctgaggcgagcagatcatgaggtcaggagattgagaccatcctggccaacatggtgaaaccccatctctactaagctgggcatggtggcgcacgcctatagtcccagctactcaggaggctgaggcaggagaattgcttgaacccgggaggcggaggttacggtgagccgagatggcaccactgcactccagcctggcgacagagcgagactccgtctcaaaaaaaaaaaaaaaaaaaa

SEQ ID NO: 2742 - DNA, 686 bp, Homo sapiens
  misc_feature (674)..(674): n is a, c, g, or t
tataatattattttgcatttgctttttaaacttattttagaattcagttcataaggctgggcctggtggctcacacctgtaatcccagcatcttgggaggctgaggtgggcagatcatctgaggtcaggagttcgagaccagcctggccaacttatctttcttttaaatatgcataaggaaacatggaaaacattaaacattacaggaaaataaaactacaggtcaatatcccttgtaaacattgatgcaaaaatccttaacaaaatattagcaacttgaatccatcaatatataagaaggataacatcacaaccaagtagggtttttattccaggaatgcaaagttggtttaacgtgagtaaattaatcagtgtattacaccacatcaacagaataaagaagaaaaactatgattatctcaatagatggagacaacatatttggcaaatttcaatacttattcttcgtaaaaataatacactagaaatggaaggaagctccctcaaactgacaaagggcactatgaaacatttatagctaacatcacacttaatagtcaaaaactgaatgttttcaccctaagatcaggaatggggcaatatgtctactctcactgcttctccaacatttcctggagattctagcctatgcagtatggcaagaaaagcagcanaaggtacacaga

SEQ ID NO: 2743 - DNA, 704 bp, Homo sapiens
ttttttttttttttttttttttttttaggacagggaaaacaagacgggcaccctgaggtagggattttgatccttgggtcctaaagggggtcttcagaggcagtggaggagtcacatggagcagcgcagctctcggtggtggaatcccaaccagggactgacgatgcatccaggaagatgagaatctaggagtaggaatgccggccctgcagcctcactccatgtggacagcggttgtgaaaagatggttaaagtgctttgcgagctgggtccaagcagatgtacacatctggacaatgtggctcttttcagccttgattgagtcattcattcttggaggcttttggaatccccacacttttagaccaaagggcacattttcagagcccacacattatcagtgccagataagagtagacagattgagaaaccaggggaggtagagccagggaaggggagtaaacacaacctgaggtttattgtgatctgatgttgtcagagcctgggctgaagctaagggctgggcttatgtttgtcaagcaatcaggaaaacctctgtcttcttctttcactacacatccccacatcaccttccctctgtctctcaccaggaacccaagcttcagccagctactgtggtgcttgcaaaccccacaacagtgtcctagatctgtaggcatgggctaagctggctgtcccagctc

SEQ ID NO: 2744 - DNA, 717 bp, Homo sapiens
gacgtcaatgggagtttgtttgggcaccaaatcaacggactttccaaatgtcgtaacaactccgccccattgacgcaaatggccggtaggcgtgtacggtgggaggtctatataagcagagctcgtttagtgaaccgtcagatcgcctggagacgccatccacgctgttttgacctccatagaagacaccgggaccgatccagcctccggactctagcctaggccgcgggacggataacaatttcacacaggaaacagctatgaccattaggcctatttaggtgacactatagaacaagtttgtacaaaaaagcaggctggtaccggtccggaattcccgggatatttttcaatccactttagcacacatgtaaaactatatcaagaaataaaattgaagtgaactcaaaaatgtgttgaagaaaaccctttaaaaaaaaaaaaagcttacttttaaaaatataatcgtgtgtgtatacatacacatgttgatatacatctacatatataacatatgaatgacattgctgtcgttttttatttacattcttttcccccaaaataaaagatgtttttagattttaaaaaaataaaaaataaataaaagcatactttttctagtatttgtattgcaattttggatgattattctttgtaaaaaatgtatttaccacaggtaaaatattatgtcatactaacttgtgaaaaaaaaaaaaa

SEQ ID NO: 2745 - DNA, 691 bp, Homo sapiens
catgtggttgatttgttctgaaaaggttaacccctcccgactcctcacacatgggctcttcctcttggaggccccaaagttttgattcttggcgaagtatgggccttattttatgttaatcttgtcaatgagagggacccgattggtgttgccccatcagcactgccaaggctgtgtgtgcaccagccacgagagcgcacggtggtagcagagtcgaggctgtcttgtatcctggtttcatgtgttgttttgaactgataggaggatgttctcttctgaccagttacccttgtgtatcctgcagacatgtaagaataaaatacacagttcatttttttcaccttttttagattttgtttaaaaaataaaatgtgtaatcctttttttaaaagaaacacatgtaaatacatttaagtattgtaggcatagcgttcagatgtgactggcccacggcgttcctcggagcaagcctgcattccccgtgatcacgcccacctcaagcccacggggctgcagcccagccaccagatgaactctacctttgctttcagaaccacttagtccttttgtaaccaaagaaaaaaaaatgttttttacaatgtccaataaaaaattctttgtatgggaaaaaaaaaaaaaaaaaaaaaaaaaaaaaaaaaaaaaaaaaaaaaaaaaaaaaaaaaaaaaaaaa

SEQ ID NO: 2746 - DNA, 662 bp, Homo sapiens
ttttttttttttttttccctctgtctcatacacacacacacacacacacacacacaatatcagattcttaacatgttattgacattttgaacttaataatcatttgttgtggatggggctgttcagtacttagcagcaagtttagcagcatcctcggcctttacctactagatgccaataggattttccttctagtgtaacaactaaaaatcatcccagacattgtcaaatgtcctcgtgggaggaaacccatccctagttgagaactaatggtctatatctatatccatccatatccacacccatatccagatctattcacagatctgtatctgtggtttatgaggactaagatttgttagtcttgctcacatcttataccagtgctcagatatatacttagcacaaaatgcaatagataggctgggcgcagtggctcaccttgtaatcccagaactttgggaggctgaggcaggaggatcacttgagcccaggagtttgataccagactgggcaacataacaagacctcatttctacaaaaaaatcaaaaaatttcccaggcatggtggtgtgcacttgcggtccgagctacttgggaagcttagatgggagtatcgcttgaacccagaaggtccaggttgcagtgagccatgaccatga

SEQ ID NO: 2747 - DNA, 701 bp, Homo sapiens
tttttttttttttttatcatcaatactgtatctgttttattagttttctctgaacaccttcatctgtgcagatgcctgctgataatgaaattgactggaactctggctagatgtcctgtcaaatcggaacaacctgtctcttgacctctttcatccattttctttggcaaatctcttttgcaactgagaatatcctggagaagttatggtcaacatcgtcttttaagaaccatgtacgtttgtcagcccaaatttctgtatgtgagacgctaccataaaacaaaatcaaaacatctctttatccgagaacttccaatttgaatctgctgctatccacatttattggagcccctcttattgagatatttctcttcaattataacatttgatcaacttacatgaaaaaaatgcctgaccttgtcttccatgatgaatgcatctgcagatgttctttggaatgcacatgttattccacctgacttttctcaatctttgtgctaagaagctaaacaactttttattaacctcaaagatttgagaccagccctacatctgtctggtcagaatgaaattactaccgtgactatataatggagtcttgactactgaaatctgcaaacacttcatatcttgtcttagagggctacttaccatttctgaaatatcctgggaagtatccagctaatctacagtggagtaag

SEQ ID NO: 2748 - DNA, 734 bp, Homo sapiens
tcaatgtatcatatgccattacgccccctattgacgtcaatgacggtaatgcccgcctggcattatgcccagtacatgacttatgggactttcctacttggcagtacatctacgtattagtcatcgctattaccatggtgatcgttttgcagtacatcaatgggcgtggatagcggtttgactcacggggatttccaagtctccaccccattgacgtcaatgggagtttgttttggcaccaaatcaacgggactttccaaaatgtcgtaacaactccgccccattgacgcaaatgggcggtaggcgtgtacggtgggaggtctatataagcagagctcgtttagtgaaccgtcagatcgcctggagacgccatccacgctgttttgacctccatagaagacaccgggaccgatccagcctccggactctagcctaggccgcgggacggataacaatttcacacaggaaacagctatgaccattaggcctatttaggtgacactatagaacaagtttgtacaaaaaagcaggctggtaccggtccggaattcccgggatagagaagtctttaaatgacctgatggagctgaaaaccatggcacgagaacaactacgtgatgaatgcacaagcttcagtagccaatttgatcatttggaagaaagggtatcagtgattgaagatcaaattaatgaaatgaagtgagaagagaactttagagaaaaaaaaaaaaaaa

SEQ ID NO: 2749 - DNA, 626 bp, Homo sapiens
tttttttttttttttttttttttttcaaataataaactttaatttgaatataatacagtagaatataataattattttgaggtacaaaaataattataaaatacttttcccatttgcaagtaatgtatgctatagactataaatagtacactgatgccagaaactgtacatatttcactacatgcctaagtctgggtcttcctctctcctccatcatcacatgtaagaaaaccagctatgcaatactactttgcaatcttgaaactctgttaagacatttcagaagtagctatctttaataaaagaattagatggtacctttctttaaaatagtatgtatgtttaagggctcaatcctatagatgaaaaagtttacaaaaattagatttctgccatttgggaatatctgctttttttcccaaaagacaggaaaatgtcagagagaatctagagtgctgaatctcaacacaagctcatttgaaagtaagtctccatcaagtggaaaagcttataggactataggcacatttgaaaataatagcaattcactggaagacaaatttcactgccaaaacctgccgacgagttctccctgtctattctatactggtgttttccataactat

SEQ ID NO: 2750 - DNA, 751 bp, Homo sapiens
tttcggtaactgcccacttgccagtacatcaagtgtttcatatgccaagtacgccccctattgacgtcaatgacggtaaatggcccgcctggcattatgcccagtacatgaccttatgggactttcctacttggcagtacatctacgtattagtcatcgctattaccatggtgatgcggttttggcagtacatcaatgggcgtggatagcggtttgactcacggggatttccaagtctccaccccattgacgtcaatgggagtttgttttggcaccaaaatcaacgggactttcccaaatgtcgtaacaactccgccccattgacgcaaatgggcggtaggcgtgtacggtgggaggtctatataagcagagctcgtttagtgaaccgtcagatcgcctggagacgccatccacgctgttttgacctccatagaagacaccgggaccgatccagcctccggactctagcctaggccgcgggacggataacaatttcacacaggaaacagctatgaccattaggcctatttaggtgacactatagaacaagtttgtacaaaaaagcaggctggtaccggtccggaattcccgggatggcgctgggaggggggccctcaccccatcacgcctcgctccctcctggccctctggtccagcccctcacgcctcctctcagtctactcaattgtgactgtccctcctgatgtattttttttcttggcttaaaaaaaaaaaaaaaaaaaaaaaaaaa

SEQ ID NO: 2751 - DNA, 666 bp, Homo sapiens
  misc_feature (462)..(462): n is a, c, g, or t
ttttttttttttttttttttttttttttttttttgggtgttatttcttttttaattgtctatatacaaaatccactgttgtcactgttttccagcatacagttcagtggcgttaagggcattcaggacagctctcatgacagactcacacccacatgcacacctggtgccccagcctgctttgtccactgtctccatttccccagggctgctttatacttttaattgtattatttttgaggcagggtctcacctggtcgcccaggctggagtgcagtggcatgatcatagctcactgcagcctcaacctcccagggctcaaggcgaatccatcaccaacctcaagccctcccggaagtagcttaaacccttgggcggccaattaacaatgtgcccacgagggctgtgtttataaattaagtggccaagagcacagacaggagtactacatctcggctgtgcncgtggagctcagtgatctctaacggtgtgtttagacacagagaatatcttccacaagtgccgatatgaacttctcaccagagacacaagaaagcagaggggttccctgtctcagaccacgacacttgcagtcatggggaaggaggagcccctccacagcagacccagttctcctctgtagcagtcccggcctcatttcaccacc

SEQ ID NO: 2752 - DNA, 683 bp, Homo sapiens
tttttttttttttttttttttttttttgcacaggggtggctggtgatgggatggagtctcactctgtcacccaggctggagtgcagtgacacggttttggctcactgcaaccttcgccgccagggttcaagcaattctcctgtctcagcctccagagtaactgggattacaaacgtgccaccatgcctggctaatttttgtatttttagtagagacggggtttcgccattttggccaggctggtctggaactgctgacttcaggtgatccacccacctcggcctcccaaagttctgggattgcagacatgagccaccatggcctggcctgtcatctgcactttctaagcttcttagtcgactatatttacataaccagttaaaaatcttggctctaaaatatctatgtaacaggattgtagaaagaaatgaagaccactgaaatgacaagccaaggttatttttattcagagcttgctatagcaagggagtgagccactgtcacttacatttggaagagaggcaggagagtagaaaggctctatagtgaaaaagtggagcgacaaagtatgctatgatcataggttgaaggcatggggaagctagaggcaggctagctagaagcagaacattctgtgtgattggtttgagaacatatttggctctctagcgttcgtctgagtt

SEQ ID NO: 2753 - DNA, 662 bp, Homo sapiens
tttttttttttttttttttaaaacaaaatgctcatttactgtttttaatatgtagtcaaatatgacagcagtcttacacaaatagctccctcctcccccttctaaaatcccaaatttgttgactcctactgtaagtgaaaaacatggtttgcttctgaaaatagcaatcaacagcaaaaacacaggtaacatttggtccccaccagcttccacacctttaaagataaattgtgtcactgaggcagtcaatacactaaatttcttatcaaactattactaggggaaaaaaatcagatttcccacacactgtaagcagaaccgaaagagctgcagagaaacttggtttaagaagctgtgtgaagaaaacattaatgacttattgcaattgtaataatccccaggtaaaagatggatgtcaaattaatggactgtaaggaaatacattcaaacttaggtcattcaatattacagtgaacataatcaggaagcttgcagaagtatgtagcatctctgaattattgaatttgaacaaaggtttccaatagaggtcacactctttttgctctcagacaccattagtgcaaattcagatacatcatctctacatttgcaggctcaggtacgttcaacagaaggtcagcgagaagtatggggctggatta

SEQ ID NO: 2754 - DNA, 680 bp, Homo sapiens
ggagcttaggatcagacctagaatggcacagatgacttctatgcacatttatgacagattcgtcacatggccccacctagttgcaaaggacactgggaaaaattgcattcctgtgtgtccagaggaaaatgaaaaaaatggttggtgattagattgcctctaccatgtgagtcccagagactataactaggccagatatcaaagatgctttgcctttctcatccttgtgttgtgaaagacaaagaggccaacttatgtttgctcctgactcccaaagcccaacacttgacagtcatatttcttgtatttcagggttcctggtggcctggcctatggtcctcctgactgtcctcctggcttggctgttctgagagctccgctgagcatctggccttgaagtttgtgttcttccctctggcaatggctcccttcagcacttctgctttccactccaattcacacaggcttggtattaacagaatcaaggccaggctaggttaggaaaagggaagagctttcaccttctttaaaactctcggctgggcgcagtggctcacgcctgttatcccagcactttgggaggctgaggggggcggatcatgaggtcaggagatcaagaccatcctggctaacacggtgaaaccccgtctctactaaaaatacaaaaaaaaaaaaaaaaa

SEQ ID NO: 2755 - DNA, 715 bp, Homo sapiens
  misc_feature (633)..(633): n is a, c, g, or t
tttttttttttttagcacccatacatcagaatatatcacatatatctagagagagagataatttttttctttttttttctttttttttttttttgagacagagttttgctcttgttgcccaggctggagtgaaatggcgcaatcttggctcaccacaacctctgcctcctgggtttaagagattctattgcctcagcctcccgagtcgctgggattacaggcatgcgccaccatgcccagctagttttatatttttagtggagacggggtttctccatattgtcaggctggtcttgaactcccgacctgaagtgatccgcccacctcagcctctcaaagtgctgggattacaggcatgaaccactgcgcccggctgagagagagaatttagtaggggaattggctcatacaattatggaggctgaggagctccatgacaggccatctataaactagagaatttgggaggctggtgactgcctcagtccaagtctaaaaggccaaaagccaattgtataactcttagttcaagctgaaagcctgagaacccagttgggggttggggacactggggtaagttccagaaccccaaggcaagagaagctgaagttctgatttccaagggctggaaanaacaggatgtctctggctccagcaggagaacgaaagagagagagacgagagagagagagagagaccagacgagaccgcgaac

SEQ ID NO: 2756 - DNA, 574 bp, Homo sapiens
ttttttttttttttttctttttcacgcatttgctttattcgaaaagaggcttttaaaatgtgcatgtttagaaacaaaatttcttcatggaaatcatatacattacgaaaatcacagtcagatgtttaatcaatccaaaatgtccactatttcttatgtcattcgttagtctacatgtttctaaacatataaatgtgaatttaatcaattcctttcatagttttataattctctggcagttccttatgatagagtttataaaacagtcctgtgtaaactgctggaagttcttccacagtcaggtcaattttgtcaaacccttctctgtacccatacagcagcagcctagcaactctgctggtgatgggagttgtattttcagtcttcgccaggtcattgagatccatccaatcacatccttaagcattcttcctggcaaagatttatggtgaatgaatatgggctttaggcggccagatgatatacaatatctgacttcccaaaagctccaggattagtgtgctgtttgccgaatactcaggaccggacctgaattgcctgattttaataacca

SEQ ID NO: 2757 - DNA, 164 bp, Homo sapiens
ttttttttttttatagggtatttcactttatttagcaaacggtcacactcggccccaccacaccgcgcctgcagcctcacttgagcatctgtctcaggaagcagctcagggtgaacaggaaggcctgggtttcccagttcaggccttatccgtcgccacacgat

SEQ ID NO: 2758 - DNA, 116 bp, Homo sapiens
gttcaagagattttcatgccttagcctcctgagtagctgagattacaggtacacaccatgaccagctaatttttgtatttttggtagagatggggtttcaccatgttggccaggct

SEQ ID NO: 2759 - DNA, 608 bp, Homo sapiens
gcaagctctaaggaaatccccaccctatacacatcataatctctgtcaaaagcccatgggcccagagagaattttgaaagcagcataagagaagccaatcattaaggtgacagagtgaccctcacgtaagattaacatctagtttctcgtcagaaatcatggaggcccgaaagccgtaggataacatattcaaagtgctaacagaaaggagacatcagcccagaattctatatccctaaagaaaatccttcagaaatgaagaagagtggtgactcactcctgtaatccccgcacttagggaggctgaggcgggtggatcatctgaggtcagaagttcaagaccagcctggcccacaccagtgaaaccctctctactaaatataattaccaaattagctgagtgtggtgttgcatgcctgtaatcccagctgcttgggaggctgaggccggagaattgcttgaacctaggacgcagaggttgcagtgagcccagattgcacccttgcactcccagtgtgggcaacaagagccaaaactccatctccaaaaaaaaaaaaaaaaaaaaaaaaaaaaaaaaaaaaaaaaaaaaaaaaaaaaaaaaaaaaaaa

SEQ ID NO: 2760 - DNA, 727 bp, Homo sapiens
tatgcccagtacgcccccgtattgacgtcatgacggtaaatgcccgcctggcattatgcccagtacatgacttatgggactttcctacttggcagtacatctacgtattagtcatcgctattaccatggtgatgcggttttggcagtacatcaatgggcgtggataggcggtttgactcacggggatttccaagtctccaccccatgacgtcaatgggagtttgttttggcaccaaaatcaacgggactttccaaaatgtcgtaacaactccgccccattgacgcaaatgggcggtaggcgtgtacggtgggaggtctatataagcagagctcgtttagtgaaccgtcagatcgcctggagacgccatccacgctgttttgacctccatagaagacaccgggaccgatccagcctccggactctagcctaggccgcgggacggataacaatttcacacaggaaacagctatgaccattaggcctatttaggtgacactatagaacaagtttgtacaaaaaagcaggctggtaccggtccggaattcccgggatggctgagtgcacaggtgccgccagctgccgcaccagcccgaacaccattgagggagctgggagaccctccccacagtgccacccatgcagctgctccccaggccaccccgctgatggagccccaccttgtctgctaaataaacatgtgccctcaggccaaaaaaaaaaaaaaaa

SEQ ID NO: 2761 - DNA, 160 bp, Homo sapiens
tttttttttttttttgtagagagagggtattactatgttgtccaggctggtcttgaactcctgaactcaagccaccttcccacctcagcttcctaaagtgctaggattacaggagtgagccactgcatccaacctcaaaaaaacttaaatctcaacctga

SEQ ID NO: 2762 - DNA, 677 bp, Homo sapiens
tttttttttttttttattagacagtctacatactttattgaaagtcacatgaatgagccccaggatctcgtttgttttattatttggatatagcatatgtctttcacacaggcaatctttctagccctctactaatgtccttggcatcaagtgcttcatttcccccaggaaaatgaaggcttttctttatcgaaaacttatctttaaggtatctgtccttcgcgaaggacatgaacagacacttctcaaaagaagacatttatgcagccaaaaaacacatgaagaaatgctcatcatcactggccatcagagaaatgcaaatcaaaaccactatgagatatcatctcacaccagttagaatggcaatcattaaaaagtccggaaaccacccggtgcttggcagaggatgcggagaaataggaacacttttacacctgttggttggactgtaaactagttcaaccattgtggaagtccggtcagggggcgaatactccagggagtctagcaactaagaaataccatttgacccaagcatcgcattactgggttttatacccaaattgagtataactcatgctgctattaaagacacatgcacacgtactgttatcgcggcactattcacaatagcaagacttggaaccaaccaaatgtcacaagatagaccgggatta

SEQ ID NO: 2763 - DNA, 620 bp, Homo sapiens
ttttttttttttttttctgagagaggatctcactgtgtcactctggatggagtgcagtggtatgaccatggctcactgtagccttgatctcccaggctcaagcaacccttccgctgcttcagcctcccgagtagttgggactataggcacatgccactacaccagctaatttttgttattttttttttgtacagagggggttccactatgttgcccagcctggtctcgaacttgtaggttcaagcgatcctcccgcttcggcctcccaaagtgctgggattacacatgtgaaccgcagcacctggctgggagagaggtttcggttggtcattatcaaccaaatacaacgtgtgggccatgttaggaaaaacaactgtaaaatatcattctggagacaattaaggacatttgaacatggactgggtactagataatactaagaaattattaattctgttaagaatgatttaagtggccgggcgaggtggctcacacctgtaatcccagaactctggggggccgaggccggcagatcacctgaggttgggagtttgacaccagcttgaccaacatggagaaaccccatttgtactaaaatacaacattagctcaacggtgtg

SEQ ID NO: 2764 - DNA, 676 bp, Homo sapiens
tggaggtcatataaccagagctcgtttagtgaaccgtcagatcgcctgagacgccatccacgctgttttgacctccatagaagacaccgggaccgatccagcctccggactctagcctaggccgcgggacggataacaatttcacacaggaaacagctatgaccattaggcctatttaggtgacactatagaacaagtttgtacaaaaagcaggctggtaccggtccggaattcccgggatggccgagcggcagtggctcgtgtctgtaatctcaacactttgggagactgagatgagggaatcacttgaggccaggagttcgggaccggcctgggtaacacggcgagaccctgtctctacaaaaaatttttaaaaaattggccgggtgtggtggcatgcatctgtggcctcagctgcttgggaggctgaggcaggatcagtttgggcccaggagtttgaggttgcagtgagccatgatagcgccactgcactgcagcctgggcaacaaagtgagatcctatcttaaaaaaaaaaaaaaagggcggccaccgtgttggccaggctggtctcgaacatctgacctcgtgatccgcctgcctcggccaaccaaggtgctgggattacaggcgtgaaccactgcacccagcccagcccataattaaaaaaaaaaaaaaa

SEQ ID NO: 2765 - DNA, 701 bp, Homo sapiens
tttttttttttttttttttttttcatggctgatttctttatttttagtagttttgacatgtggccaggctggtcttgaactcccagccaatctcaaagtgctgggattacagctgtgagcaccagcccaaccttacctctttaaaaagaaaaaacacaagtccactctgaagtcagcctctgtaacctccccacaagaaaaccgttttacatcagtcactaaccaaacaaccaacagtgcttcaacacagaaagtaaagcattatccagggcttggactgtctttcaagaaagccccaaatcccctggcaggaggaagtcacagcagtgaagccccatcccaggcccagttgttcccacgaaacacaccacgtggagacccagcatgactgccgactgattccaagtccccaggagggctttattttttcttttcaacatcctgttctgcggcttccttggctcttttggcccgtatgccgaagagccgggcgtggcacgggccatacggagactagcgaaggcttgaaattcttctcttcctcagtgatgactcgagctttctccttcttatagacgttccggacgggcatgaccggtccggtcagctgggtggccagtttcaagttctagcagcagaaccaggctccctctctggggggccgagggcttcctgggggaagaggatgaattggaacggac

SEQ ID NO: 2766 - DNA, 701 bp, Homo sapiens; identical to SEQ ID NO: 2765

SEQ ID NO: 2767 - DNA, 718 bp, Homo sapiens
ttttttttttttagatttgtgatttattcaataaattagagaccagaaacatcaactcctgggaactttgaaatatatttttaatgtgaaaatacaatgtattagtttccaagagctgccctaacaaaataccacacactgggtagcttaaaacaactgaaatttattctcccacacctctggagactggaagtccaaaattaaagtgtctagggttggtttcttccagagacttggaggagaatctgcctcagacctctctcctaccttctggtgatggctggaagttcttggcttgtagacctatcactctagtctctgccttcaccttcacatggcattttctctgtgtctctgtgttgcaggaaaatctgggttcttgtcacatgaccaggttaatttaggcacgcagacactttgaagggtgagtggttacagaatttatttggcaaaaaggaaaaagactctcagcaaagtaacgaggggttcctgttaacaggcccccatcttacagactggatcccaggttaccacccaggaaaaggagaggccaggctgctccccactgcaaacggcaggaacttcatagctccatccattctccagtgcacaggctggttagagggtctctggggaccgattatacttggctgtctcattgtgtctccccatggcatctatagaacccagtcatactgcatggaacaactactctata

SEQ ID NO: 2768 - DNA, 727 bp, Homo sapiens
  misc_feature (666)..(666): n is a, c, g, or t
tttttttttttttttaagagatggtgtctgtgtctgtcacccaggctgcagtgaagttgtggcaggccaattctccctgacaatcacacagacaggcctgcatgacagtcacacagacaggtctgcatagcactccagttacacagacagatttccacagcactgccttgacattgagcaaatagttaaacctagggaaatcagtgcccagacatcaaagctagaaatgaaacatgatcagtagtagccttgcatgggcttctgcccaacctggagcaagccaaaataatagagacagtctttgattcctagcgccaggacccgtatctgagatgagtcaaggtaacagaggcagctgtttgaacacattcattggagagtctaaggcagctctctggaccaagcttgaagcatgaccaaagactgtcgaagtcggctgttttctttccgggtgttgttagtttttctttcaggctttttattttggcgcacaattcttcctttgacaattctgctaaaggctcttcatcctcactggagctttcaccaggcagaaaggcatttcccgaatatgggtctctctgtcctttatccatgtcactatttgcattttctgagtccatgtctctgttcttttcctctttccttttctaaaagctggtgtantggtattcatctgtctgccgatcttctgcttttctcaattagtttcaagggtcctgaaatc

SEQ ID NO: 2769 - DNA, 701 bp, Homo sapiens
ttttttttttttttttagtgcctttcaaaacatttcatttaaacttaaaaactaaaagatcacaagagatgttttccacaaagctctttgatttcattgttctgcatagatgcttggaaaggagggaaaatgttttatggtgaaagaatgcagacttccggtccagaggatggagagcgtctatttcttggccttctgtggtccttagcctcagaaatatagaaagaaatatagaaagatctgtggacatgtcagggcttgatgcagtgagtaataggatacaattgtggattagcagctggaaattccaaatttattacaaatgtgcataaaaataataacaatgatggattctttcatttattgagtgattactatgtgtcaggctctgtgttaggaagtgctcgatatacactaactcgaagcttcaacaaactttgagggtagttgaaggaacacattaatgcccagaccttggtgctatacaccattcatcaataaaaggaatcagggctcctctcaagtaatggctaatactaggggcagggaaacattttagatgtgtgtaagtgagtatcatgtagttcaagaatgtacggaaactgttcaacaaaaacaaaaggatggagcctgttgaagagacataggagccaagctgaaagagcttctactggccacacctaataactatgtagtattga

SEQ ID NO: 2770 - DNA, 751 bp, Homo sapiens
cccgctgcttatgcccagacggactatggacttctactgcagtacatctacgtattagtcatcgctataccatggtgatgcgttttgcagtacatcaatgggcgtgaatacggtgtgactcacggggatttccaagtctccaccccattgacgtcaatgggagtttgtttggcaccaaaatcaacgggactttccaaaatgtcgtaacaactccgccccattgacgcaaatgggcggtaggcgtgtacggtgggaggtctatataagcagagctcgtttagtgaaccgtcagatcgcctggagacgccatccacgctgttttgacctccatagaagacaccgggaccgatccagcctccggactctagcctaggccgcgggacggataacaatttcacacaggaaacagctatgaccattaggcctatttaggtgacactatagaacaagtttgtacaaaaaagcaggctggtaccggtccggaattcccgggatcagctgcgcgcaagcgagcctggcctggctcagctgctggtggatcagatatacgagaacgccatgattgctgctggacttgttgacgaccctagggccatggtgggccgcttgaatgagctgcttgtcaaggccctggagcgacactgacagccagggggccagaaggactgacaccacagatgacagccccacctccttgagctttatttacctaaatttaaaggtatttcttaacccgaaaaaaaaaaaaaaa

SEQ ID NO: 2771 - DNA, 751 bp, Homo sapiens; identical to SEQ ID NO: 2770

SEQ ID NO: 2772 - DNA, 101 bp, Homo sapiens
cttaatgatgattgcataaacaatcaatcaaacaagaaaagagaaaattaataaatttcatctctctgcttttaacttttgtgtttccatttatatcttct

SEQ ID NO: 2773 - DNA, 692 bp, Homo sapiens
tttttttttttttttttttttttttttttttttttttttttttttttttttaaagagatgcccaggaaggcagccagatggcagcatcgttcctacactgtctctgcactcccaaaggcagtttctggccctttactgtagtcaaaggagatcgcgtagcagcggtcgtttatgggctaggctgtttgtcttttttctctactgcagcatgaatcagaacccacagagagaaccagagaggaacaacccgttgattaatgggtcagagagctatgtaagactgtgatctcctattgtccctgtttcacggaacaaatgtgggggatgctacaaagattcaacactaggtagacatctaatgaagctgggttgccatcaatcagttcaaacaggtgtctggaatagctgtgtcttctgtctttggataaacactgagtacctgcacatacaattccctgggagcttttaaatctcctgatgcccaggctgaccctagaccaaccacatcagaatcaggagacgggttcagggcatcagtacagctttaaatcttcccaggggatactaatgagcatgaagggctgggaaccatgatattacagacgttgagatgaaatttgtggcaaagttatttcaattgagaaacctgggttatggtcttataccgtactgtcaatttccacagtggagtt

SEQ ID NO: 2774 - DNA, 702 bp, Homo sapiens
ttttttttttgtctctagctctgcaggcttctaggctggggatcatggcaccatttggcactgacttcagggtgccctgggaaagttatggaagactttcctgacatgcatagaggagatttactttctaggggagtgattagaccatagggtacagatagccctggaagaagcactcacctctgaggtagactgcaaaaaatatccacaaattcttcccatcctgatatgaatacacctttataatgaaactttggagcccctcccatccagaagtacagtctattcaccatattaatttagacttggctatatatctggttttggccagaagggcatcagcaaacttgtgcccagtgactagccctctttctgctgttggaaatctgcacttacctttatttgaatgagccccagagagcctgctggatgatgagacccgagatccagttacctcctttgcccttgctgatactcagccatctgccagacatgtggatgaggctacagactgctagctaactgtagctacatgaatgggctcagtagaggccagcagaagaaccacccagctgatcccagcccaaattactgatccacagaattctgaactaaatgcatggttgttattttaagccaatacatgttgaggtaatttgttacacaacaaaagatgatagaaagctgaggttgattgatagg

SEQ ID NO: 2775 - DNA, 702 bp, Homo sapiens
tgcactattcgggaaagagaagttaacagtaatgtgagtgctagcaaataaatattttaaagtttttatcagtattttcaatagtgctatgctagctattaatttcatcttaacagaatgaaatcatcttctagatatgatctccatttttattggaactgcttactatccatccctaaagttctcttctaagaggaaaaggtcatgttgtttgaaggaccaaaaagttcatattcacacacagaaaagactattttaatattgaacaattctacatcaacaggaatctgaaatctaccaagacaattcttaatatatttggtcactcaagccatcacaaactctttttaggactgaaccctaagatttgtactacgattaaaaaaaaaaaaaagtggccaggcacagtggctcaggcttgtaaatctcagcattttgggaggctgatgcaggagggccacttgagctcaggagtttgagaccagcctgggtaatatggtgagaccccatctctacgaaaataagaaatcagccaggtgtagtggtatgtgcctatagtcccagctgaggcaggaggatcacctgggcctgggagttgaggctgcagtgagccctgattgcgccaatgcactccagccagggtgacagagtgagactctgtctcaaaaaaaaaaaaaaaaaaaaaaaaaaaaaaaaaaaaaa

SEQ ID NO: 2776 - DNA, 96 bp, Homo sapiens
caaagtgctgtccataatgcaatgcacagtgtcgcaccaaggaaaaaagtcagcacatcctttcctgtgtaaggctcccccgccagtggcttccaa

SEQ ID NO: 2777 - DNA, 644 bp, Homo sapiens
ttttttttttttttttatgttaggctgattttagctgtgttgttttgttcaatgtttcccaagattgttttaatcaatatgtataaggaaaagaaataatggcatttttttttttatgttgatgagaaccaaatccctgagttttttgtgacgagaagaggccagaaagagaaaatgtcatgggacccccatgggattcaagtaacttggtagtgtcaggagaaaacatgtcaggcaaggaaatcttgaagcattcgcttctgcctttgagatggaccaaaaccagtgagctgagaacagcacctggtcagaggccactggagaccagtgacccagggaggcactacagcctctcacctcagtgctgggcccccatgtgcagcttagatttctggctcaagagatgagggttatgagctttcccaagctccccactcccactctgggcaagaggaatctacgtggctttcatcccaaaggacaagtgccagggaccagaggccgacaagtgggctgtttcaggggatggcacatgcacttctgggtaagctgagcctgagaaaaggaggattgttccctaaaaatttccaaaacacagcccttgctctgcgtttggctgtagtttcccttgagtaccaagtggt

SEQ ID NO: 2778 - DNA, 89 bp, Homo sapiens
gaaagatatacctcgtcactgatgaagatataccagtcactgatgtgacaacgatttttgccttgaagcttggctagggataatgtcag

SEQ ID NO: 2779 - DNA, 766 bp, Homo sapiens
ttttttttttttttttttttttttttttttttttaaggttgaataatattccattgcatatatatatgtatgtacgtgtatgtaaatatatatacacacacacagtgatatatataatatatcacattttctttattcatctatcaatggacacttgcattgcttccccttgggcttttatgaataatgctgctatgaacatgggtgtaccaatatctctttgagatcctgctttcgctctttgatatgtaccggaagtggaattgttggatggtatggtaattcacacccctattatttttcctcaaagctgattgtgcatgttaaatatgcatcttcaatgtggtaatgtagctatatacaaacttccaaggagtaatttctaggtaattaaagcacagcaaagactctgcaaagaacatctgactcttccctgtggtaaaagtatgttttccacacagaagaacttgcaaacctgttgaaacgtgacagtgtgaataacacttgcagtctaaaattaaactctggcaaaatacttctaaggagaaaattctttaagataaccagtggtaagtttgtagttacacttcgttatgactgcttagaaattggagttaggaaccccagttccagccctgaccctgtatatcacgtacagcaagtcacttaatttcctaggctgatatctctgttcagctcctgagtagctggattacatgccctcaacagccggtaattaaattggaaaagggttcccacgttgtta

SEQ ID NO: 2780 - DNA, 755 bp, Homo sapiens
tttttttttttttttttttttccgagatggagtcttgcaatgtcacccgggctggagtgcagtggcgcgatatcggctcactgcagcaacctccgcctccccggttcaagcagttccctgcctcagcctcccaagtagctgggactataggcatgtgccaccatgcccggctcattttttgtatttttagtagagacagggtttcaccatgttggccaggacggtctcgaactccagacttcgtgatccacccaccttggtcttccaaagtgctgggattacaggcatgagccaccgttcctggcctagaattgaacttttaagtcttctctgtgtaatatttatattttttcaatctcttctattagtttttaatattctaagttaaaaaaattgccccttttaggtggttaacaaggattggcctggtgtgaattacttgcccttattccttaaactgtgagatgttttaaaattattctttacaaattcctcccttaaaattcttttttcccttctcatctcacttctttagtgactttaaatctctttaattttatcacatttataaccatatttggacgcccattcttagttaacccaaggggctttggtgtccatagagtgcgcatttgcaaggcctttttcccaacaaagctccagtgacatattttcataacgtatttcaaaatacctgttttcctaggcaagaattctcaatcatttccaatttcaagtatttaatctctaaggat

SEQ ID NO: 2781 - DNA, 76 bp, Homo sapiens
taggccgcgggacggatgaacaatgttcacacaggaaacagctatgaccattaggcctatttaggtgacactatag

SEQ ID NO: 2782 - DNA, 479 bp, Homo sapiens
gcgacttcaaattccatggcctttctattgcttaaaaaggaaaatatacaaatacaacaaatttttaagaacccagtttattagatacttgcaaatgtattgccttatttaatcttcccagcagtcttttgaggaaagaattcttatctccaccttcattttacagaggcaggactgtgatagtttgcctgagaccattatgtccaatgggaatctctgttttgtaaaagacaagcatcctaacctagaccattagttggttcatagaactgaaagtgtcagagctacctgctttaggcaggatatgtgatccagcaggccaacccatgacaccaacactgtttctctctctctcttactgccttttgcagtgttgacctcatcctcaggctccacagagatctcctacgctgcatccagtccatacccacaatggctgaaagcatgggagactctctgtggagcttgaaggtgaagcc

SEQ ID NO: 2783 - DNA, 719 bp, Homo sapiens
  misc_feature (560)..(560): n is a, c, g, or t
  misc_feature (645)..(645): n is a, c, g, or t
ttttttttttttgtatagaaaacatttacttttaagtttagctgtcaaaatttattttaaaaattttaaaatgagagacagggtctcaccacgttgttctggctgcagtgcagtggccattcagaggcacattcccactactgatcagcaagggagttttgacatgctctgtttccgacttgggccagtttaccccttcttaggcaacctggtggtccccagctcacatgaggtcactatattggtgtctaacttagtgtggacacctaattagcatagcacactatagcccagaacttctgggctcaagtgaacctcctgcctcaggttactgaataactgggactacaggtgtgtgccaccacacacctttttttaataattgaaatttcttccatcactcctaatttttgaaagtaacgcttttcctagggagccactgatactcattttttctttcatcttagttatatcatttgatgaaaaaataactttttgattggtttgaagtgtatttcattaggtggcataatttgggaagtataaatggattttcctanaacttgctgttaattatttctacattacttattgagtggtccttatattttctttgtatttatttgtgaaacgacttttatcacnaatttcagttctcataatcagcagggcctgctgtggctctgtgtgtcctagggatttcttgcctctttagcacc

SEQ ID NO: 2784 - DNA, 769 bp, Homo sapiens
cgttttaactcctcggggaattccaggttctcaaccccgatgaacgtccaatggggatttgtttcttggcaccaaatcaccgggactgtccaaaatgtcgttacaactccgccccagtgacgcaaatggcggctaggcgtgtacggtgcgaggtctatataagcagagctcgtttagtgaaccgtcagatcgcctggagacgccatccacgctgttttgacctccatagaagacaccggggaccgatccagcctccggactctagcctaggccgccgggacggataacaatttcacacagggaacagctatgaccattaggcctatttaggtgacactatagcacaaggtttgtacaaaaaagcaggctggtaccggtccggaattcccgggatctcgcattctgctggattgccacagttatcactgcttatctctgccatgtagaatgagagaagcaatagaggttaagctactgattgctgctattgacagaaatgtctaccagcactccatatttcttcgttttttttttttttttttttgtctcactgtagacctggacgacagagtgaaagctctgtctcagaaagaaaaaagagagaaaagaataaaagaaaagggcggccaacgcctggcagccggaagcctattcgcaggatttctcattactaacaacatttcccccgcatcccccttccaaacaacaatccccctctacctaaaactcacagccctcgctgtcactttcctaaaaaaaaaaaaaaaaa

SEQ ID NO: 2785 - DNA, 748 bp, Homo sapiens
gaacccatgggcttccatgacgtcaatggtggagtatttacggtaactgcccacttgcagtacatcaaggtatcatatcccaagtacgccccctagtgacgtcaatgacggtaaatggcccgcctggcattatgcccagtagatgaccttatggactgtctacttggcagtacatctacgtattagtcatcgctattaccatggtgatgcggttttggcagtacatcaatgggcgtggatagcggtttgactcacggggatttccaagtctccaccccattgacgtcaatgggagtttgttttggcaccaaaatgcaacgggactctccaaaatgtcgtgaacaacgtccgcgcccattgacgcaaatgggcggtaggcgtgtacggtgggaggtcatataagcagagctcgtttagtgaaccgtcagatcgcctggagacgccagccacgctggtgattgacctccatagaagacaccgggaccgatccagcctccggactctagcctaggccgcgggacggataacaatttcacacaggaaacacgctagtgaccattaggcctagtttaggtgacactatagaacaagtttgtacaaaaaagcaggctggtaccggtccggaattcccgggatcgcggggccacgaagcgtgttactttgaaaaaattagagtgttcaaagcaggcccgagccgcctggataccgcagctaggaataatggaataggaccgcggttctattttgt

SEQ ID NO: 2786 - DNA, 709 bp, Homo sapiens
ttttcttatcctaacaagcctggaaaatgtccttgcttgatcttcagtgcttaagagtggacatgggtttgtggtgtgctttgctttctcaaggaaaatgtaggtatgccatattgcattgattttccttttcttctcttcactttttctatgatctagttttcacaactcaagcttccatttacgaacctggaaggaattctgttgctttaaggcaagcataaaaatttggaatgcattgctctaactcatctccagagtctttgggcaaaagagtttcccagtgcccaggctgggtcggaatgctctttggtcctagactcctggctgcagcaacatctcacgtaaggggttgcaagtcacctgcccctgctcccaaatttctggcttgtgagaacgcttagagaacactgctccatcacactgagcaggacaggcttctcttgggctcatcctacttcagtcatttatctttctacaccacattttcggatcccttttttttttcgtgcctcagtgggtagactggtgggtttccaggattcttgacgaacggtgtcagccaccatctgttttcaactcgggaacatgagaagctagcttgaccattggtgcgagattgtggtgggactcaggcgcacgagagggatgttcacatcctctctacatctgatttcacagcagcgaattccagacaacggggctcatg

SEQ ID NO: 2787 - DNA, 405 bp, Homo sapiens
tttttttttttttttttttttttttaaggacaactttttattgctaccagaggcttttatcatcagtacacagttctgactgcaatacctttttcagactgcaaagggagctcaggatccagaagtcattaaaagaaacataaggctggggaggcagggggagtaagttctattagaaaatcctaatagcttaacaaaactagggtactaaattcagttataacatgttacagacttaaatcatagagctgccccaacatctaggacaggtctctcctactggattataaatgaggtgaaaactatcaggttcagaaaaactctaagtttaagtgtggttaatacatggttctttgggggagacacctggatatatttatcaccacaatatctctttagtatcac

SEQ ID NO: 2788 - DNA, 632 bp, Homo sapiens
tttttttttttttttgctttacaatttcactgtccccaaagtgcttcacagtgtgtattttattttttaacttgataaaaattgaaataaatttctccatgggaaattttgcagtgttgagacatctgaaggaaaaataagcacaatgcccatcagtaatgtggctgtaacgttctgcagatatgaaagcatttttgcaatctttggctgtttggtccccatgccaatcctggttttcatagaagggaaaactggagatccagttgctttaggtgatttgcctgagtggccacccagattgtctcatgtctccaagctattaaatgacaaaagtgggcctcaaagcaccacagaatttggatttccatgctaagggttaagggtctgaaaatcaccagatattcccctttcatagaattgccccaattaactgcattgaagacccccaaggaagcccccatttaccaagctggctccccaccattaaatctggatatagagatgttaattaggccctgtgtgtctggtcccacggtcaagatataagggaaaccagagttacatcctatctcagagaacaacatggccaacattttcccttggtggcctttcctatcactgtgcccgaacag

SEQ ID NO: 2789 - DNA, 731 bp, Homo sapiens
tttttttttttttttttgatgaaatagatattcaggttgtcatttataattttagagtttgcttcacatatacaatgctgtgttacgaaacaatgaacacttttataaaaaatttatttcacacttttatacaaatatccacaggtaatttctaatcatgaaataattttacaatgctagttagtacaaaaatgtatcaaatgcaaacagaccagtgacttgacttgagatgacatttttaacaaccataaatctaaacaccataacatctttgtttctttgttgaaccaccctcccaacacccttttcaggacattcatcttttttttagtaacacaggtctaaaaacactgtcaaagtatcagctccttagcaatctagcaatctaaacacattagggacacaagttccccaagcaagaaactgagactttaaacactgttataacctgttttacagaaatttttgtaaacaaaatatatttctgtgactaagaattccaaagtacaaccaaaacaacgtccttagtatcttaaggtttaaagatttccgaaaagaaaaaagcccccccaaaacaacagtggcactacaaaactgtgttctattctttcaaaacacagacactgcttatactatatccaaaacaaattagcacctgtttgctgttgctcccccatataacttacattgtgaagcatggtaattaaaaaatcagttcatatctttccagc

SEQ ID NO: 2790 - DNA, 655 bp, Homo sapiens
tgtggagaagtatatggtcaaacatttgtgtgagggtacacatccgggttctggggaagaagttccatggcgttttgtaatcagagtcttaaaggatcccagtgactgattagaatggaagtgaagaattcctatcataagtatctgtgtatctgtgatagggaacgggaatgtctgcctgatgtagtctagaatcctgtgaattctaacagatactttgttcgttcacactcccgcagcttatgtctagcgtgttatgctataacgaatagggttctaacattaaacttattttttgagaaatcttcaggaaaaaataccatcttatgaataggtatagtatatataaatttcatggcccggcgcagtggctcatgcctgtaatcccagcactttgggagcccgaggcaggcggatcacttgcggtcaggagtttgagaccagcctgggcaatatggtgaaactccctctctactaaaaatacaaacattagctgggcatggtggcgggcacttgtaatcccagctactcaggaggctgaggcaggagaatcgcttgaacctgggaggcggaggttgcagtgagctgagatggcgccattgcactccagcctgggtgacaagagtgagactccatctcaaaaaaaaaaaaaaaa

SEQ ID NO: 2791 - DNA, 117 bp, Homo sapiens
attctgggagcatgacatgctgcagggccaaaaggaatggataattagtattcctctccttcttcctcaccctctccttcaacagaatccacaccaacctcctcataatccttctca

SEQ ID NO: 2792 - DNA, 725 bp, Homo sapiens
  misc_feature (454)..(454): n is a, c, g, or t
agagaagaagttaacaagtgacctggggcgcgccgccacgagactgcaggagcttctgaagacgacccaggagcagctgcaagggagaaggacacggtgaagaagctgcaggaacagctggaaaaggcagaggacggcagcagctccaaggagggcacctctgtctgagtttcctctttggaaaaagaagttactgttccacttacccaaatgccttacacattccttaccaattaacccacccacctacacagcgttatccacggtcccaacttccggtaggcttccgagaggagccctgagagaccagttcttttagaagccacccaaggaattaggaacccttcccggaaggcccccagtttggttaaatggaaccctggtggtccaccattggataaaccactatccctggggcgcagcccccgggccaccgcccgagtgacgccaaagnccctggttgactctgacagccccgtgggtgtgtgggaggccgggcgctctggggtctgtctgtcagtgcaatcgtttagtgttttttcagtggggcggggcgggaagcgggtggcaccgggcagccagttctcaaaggctgtggggccgactggaggccacagcccctcacccctagacgttgccaaccagaactgacgtgtgacctcctgggtgttgatgccattaaaaccacgttggtgcccggtgaaaaaaaaaaaaaaaaaaaaaaa

SEQ ID NO: 2793 - DNA, 569 bp, Homo sapiens
tttttttttttctctctctctctctctctctcacacacacacacacacacacacacacacacacactcactcaccaggaagaacagactttgaagacttcaaagttgagtgattatgatctttggaaataaagtcactgcctctgggagaaagttgttgacaactcttggtcaatgtggcttttcctcaaaatgtctggtttctgatttctcattaacactgccacatagtccttctcattggtctctttgtttgggccagtaaggggcatctgaagaataagaaggataagaaatggttctgcagtgggtatggctgatggcacagaacacaagacagaggctttattcgcagagtgtaaggctctgtagaaagagaggcagtgtgatctcatgaatacagaatatgaggctgaacttaacttctctgacttcaggtcaaactggaacacataggcaaaaagcagcaggctaattgacggcagggactgtaagtagactgaagtcagtgtcgggagattgtaggtcatactaaaaggtacaggccaatctaccaatatcgccgctgga

SEQ ID NO: 2794 - DNA, 372 bp, Homo sapiens
ttttttttttttttttttttccccaacaggataaagtcttttatttgtctttgaatgatgttcactccttttttagctagatcacattccatatttgctatcctgtaacctaaatattgagatttctaaaagttaattattaatgaatatgatagcgaggatgatggaagacgagaattctcaagaaaagtattggttaacatataaccaaatgtattcatctcaaaataatgaagaaatactcctaactattacaagtcctcatttctgcaactgtcactggccctagctggtatttgtaactatctttacatcttgctctcacagccatttcctttgggcctgggccggcgagacagtgagcgtggagca

SEQ ID NO: 2795 - DNA, 310 bp, Homo sapiens
cacttgcaagataataggcaaacctgtcacaagttcacagatgctagcagaaggcatgtgatgcctcagtcaaagacaggattttgttactcaacacaaaggaggaatcttgagttccatgcctgcataagtttcctctattctccacatggcatggtagtccataagaacaagaccaggtggatagtgcacaagcaatgactttgcatcacagctgagggacctcaggttttaaaaaatagcatactctgtgataaaggggctggtagaaatcttgcttgaatgtctcccctagacgagagacgattat

SEQ ID NO: 2796 - DNA, 728 bp, Homo sapiens
actcaggtatatatcccagtacgccccctatgacgtcaatgacggaaatggcccgccggcattatgccccagaacagaccttatgggacttttcctacttggcagtacatctacgtattagtcatcgctattaccatggtgatgcggttttggcagtacatcaatgggcgtggatagcggtttgactcacggggatttccaagtctccaccccattgacgtcaatgggagtttgttttggcaccaaaatcaacgggactttccaaaaatgtcgtaacaactccgccccattgacgcaaatgggcggtaggcgtgtacggtgggaggtctatataagcagagctcgtttagtgaaccgtcagatcgcctggagacgccatccacgctgttttgacctccatagaagacaccgggaccgatccagcctccggactctagcctaggccgcgggacggataacaatttcacacaggaaacagctatgaccattaggcctatttaggtgacactatagaacaagtttgtacaaaaaagcaggctggtaccggtccggaattcccgggatggccgcccttttttttttttttttttaagtttctctgtttttgagacatcgcatcatcaaaagttatcttccgttcccatttcaaactaacgaaaaggcctgcatgaaacttaacagatactcagatgtgcctggtggccattcacttaaaaaaaaaaaaaaaa

SEQ ID NO: 2797 - DNA, 697 bp, Homo sapiens
tttttttttttttttttttttttttttccatgaggaataaatttgtgtttatataaaaactgcagatgaatatttttcttaacagcatgattcacaaatgccaaaaacaatgcaaatgcccttcaacacatgaatggattaacagaccgtgatacatgatataatggaataatacttagcaataaaaaaaggtgttctgggtagtgtgatgaaatcctatgccattcagccccattctccccagagcctgaatactttcttgtctagtgcatccacagtttatactacctgcctgttagtcacttagtagtctttgatagaaatcctatgccattcagctccatcccgcccagagcatgaatcctcccttcgtctagtgtatgcaccagcctgttagtcacttagtagtattccaagttatcaggtggaaaaacatagtctacttgggtttaatactattaatcatttcgggcatttactggggagcctggaacatatcccacatgaataagagggactagtgcagctttattctctcacaggtaagtagagactactctgtctatcttcagaagaatcattcagatggcactagtaattcaaggttttacaagtcaaggagaaattgatatactgtgattatctggcaattacatttaaatgactattttaaaggaaactacagccagttgcaatg

SEQ ID NO: 2798 - DNA, 456 bp, Homo sapiens
ttttttttttttttttttttttgagtttaaatgcattttatttttagacaacctacatgacatgttctttcttaaaaacaatgcctccactccaaataaatcacagtcaaaataaatgaagagctcaagatgacatcagtcccatttgtcttaagtcctggtgttgtgtggatgacaagcagaagccagttatgatgacaggtgatagatccaaaataattgccacatttgttaacattatatccatttctaaaccatccttaaagaaaatcatatatggggtcacaccatcctcacggtagtccaatagagcaaccatgccatctggattcatgttcttcaccaataaagaactggtagttattgaaattagacaaggatgtgcttgattttgttactgcaacaccctgtcataaaaggttttaactcttatctggatctctgtactacaagttt

SEQ ID NO: 2799 - DNA, 456 bp, Homo sapiens; identical to SEQ ID NO: 2798

SEQ ID NO: 2800 - DNA, 738 bp, Homo sapiens
tttttttttttttttgaggcagagtcttgctctgtcccccaggctggagtgcagcggcccgatcttggctggctgcatgctccacctcccaggttcatgccattttcctgcttcagcctcacaagtagctgggacgacacacgcccgccaccacacccagctaattttttgcatttttagtagagaatggtctgtgttagccaggatggtctcgatctcctgaccttgtgatccgcctgccttggcctcccaaagtgctgggattacaggcgtgagccaccgcacctggcctattcagggaaggtttcaagcagaaagatgaactgagttggctttggagagattcacaggactcccacaggcagagtgaaataagggcattgtagactgacaaaggcacagatagcagcaatggggacagtgtgactgggggacgctgaggggctgctgtggctggaatggagggctgccaccataatggaaatggccaatgaggcaaataaggttggattaggagcatagcatcaagggtgccagcttattaaatccctcttccagtatgctagcactggcctgctgggaaaagtaatacatcacataatcaaacaaaaggcaaaaagaggcgagctccaggaataggcactgtaaacaggactcgtcccaggtagccagatgcaggcttagattgttgatgcgggtgagctctctatcgaggggactgtctctatgctgtccaga

SEQ ID NO: 2801 - DNA, 650 bp, Homo sapiens
tttttttttttttttattttaaattacaaaggatgttgcatacactgatgaatctgtatctgactagaagtgctcaggtgttggaaggtgacagaaaacaaaggcaaaatttgcattgcctttccatctgaaatgaaaaactgcacaactattaaccaacatttaataggataatttttaaacagctcatgcgtcaacaagataaagttctttctagacaagagacaagactgaatccaataaaaagtgtcatagctccagttgggagagaaaaaaaaacaaactacagaatatttatgatagcattacaaacaggatcctacgcaactatgcaaaagaggttgccacattgtatgaacaaatgcttatgaattcttgcccttccactcttctcttgtgacttctgtgctgtcagccctagtatcgctgtcaaccacaatactaagctgtaggacaaatcctagggaaacgaccgtaaaacaagcaggcagatggaatacagtgtcataaaaatgtggtggacacggcagatacagtacacacatacacatttctgttatatggttctgaaaaaaacaaagggcgaagggcaagacatagtaatcagtctgctcctatccacccagaatttaattaactacacaatggtg

SEQ ID NO: 2802 - DNA, 677 bp, Homo sapiens
ctgcgagcccgtggtgaagctgtactaccgggaagaggcagtggctgaggacgtgctcaacgtggatgcctggcaagacggcgcggtgctgcagatcggcgatgttaagtacaaggtggagcgcaacccgcccgccttcaccgaactgcagttgccgcgctacatcatggccgggttccctgtgtgccccaaactcagcctcgaatttggggatcccgccagctcccttttccgctgggtatcagggaagcccaagccccgggaagcgggcgggaagccccggaaggtccggggtgtcccctccgttcaattggtcttccactccttcaaccttcgttctccttgggactgagaacctgatgtcgcaggagcgtgtctacacccccgatccaagtgccagacatcgggctagggctcaaagcttacacgtggaacccccaaggacagatggggcaaggcgcttggggcgcacaagccgagggagttgggaaaaggtgtgtgtcgtggcagagggctgggcctgagcacctgcaacttttgaccaccgggcatctctacacgaagagggtgactgagggacgctctcaatccgcactgtctcttacagaatcctggcagacacgtacgcgcagactgagttctcgacgaacggttctgtacccattagtgtgcccctt

SEQ ID NO: 2803 - DNA, 587 bp, Homo sapiens
ttttttttttgttttttttttagtagagacggggtttcgccatgttggccacgctggtcttgaacttctggtcttgattaacccatctcagcctgccaaagtgctgggattacaggcatgagccactgtgcctggctccactttatcttcaatggtctctatttcctcttgtttaaatacaatggctaataagtctagaataacgctaagtaataacaccacactatggtcatgagttcaggtgggctatttataatataatcaatacctatgaatgaaaccactgtccaacctcaaactagataattgctgataacaatatagacttattttacttgccatcctcttctcaccaccaaagtaaacattatctgggaatttttattcatgtcttctagttttttatcatatatataatatacacacacataatagtcaattctcattttttgcagactccgtatgtgtgaatttacctcttgctaaaatttatttctaactccagtatcagtacttgctgggcttttgcagccatttgcggacatgcagcatgtgaaaaaatttgaattgcctgctctccatgttcc

SEQ ID NO: 2804 - DNA, 84 bp, Homo sapiens
cctatttaggtgacactatagaaccaagtttgtacaaaaaagcaggctggtaccggtccggaattcccgggataaaaaaaaaaa

SEQ ID NO: 2805 - DNA, 772 bp, Homo sapiens
tccacgctgttttgacctccatagaagaccccgggaccgatccagccgtccggactctagccttaggccgcgggacggatacaattttcacacaggaaaccagctatgaccattaggcctatttaggtgacactatagaacaagtttgtacaaaaaaagcaggctggtaccggtccggaattcccgggatggaaagagctgggaggcttcacagagaaggctgtggttcccctgggcctctacactgggcagctggccctgaactgggcatggccccccatcttctttggtgcccgacaaatgggctgggccttggtggatctcctgctggtcagtggggcggcggcagccactaccgtggcctggtaccaggtgagcccgctggccgcccgcctgctctacccctacctggcctggctggccttcacgaccacactcaactactgcgtatggcgggacaaccatggctggcgtgggggacggcggctgccagagtgagtgcccggcccaccagggactgcagctgcaccagcaggtgccatcacgcttgtgatgtggtggccgtcacgctttcatgaccactgggcctgctagtctgtcagggccttggcccaggggtcagcagagcttcagaggtggccccacctgagcccccacccgggagcagtgtcctgtgctttctgcatgcttagagcatgttcttggaacatggaattttataagctgaataaagtttttgacttcctttaaaaaaaaaaaaaaaaaaaaaaaa

SEQ ID NO: 2806 - DNA, 772 bp, Homo sapiens; identical to SEQ ID NO: 2805

SEQ ID NO: 2807 - DNA, 629 bp, Homo sapiens
tttttttttttttttcataatagttggttatgtctatctatggatggggaagaatatttatggcttaaaggaccatattaattagagatataattctaaggggaattcaattttatctttacctacatagcactgaaaggatttctaagccaaataacctcttttacctaattatttaaaaaatattttaatatagcggcttatatgttgagctatttggtgtagctcaggccatgatttatatgtaattgaattttgatttgaagttatccatcttctaaacccacaatcctctctctaactttcttctctggaatgaatacttacatgaaaatatttgattagtttcgaaaaccaaaatattgattgaaggcaggaacattaacgtcattccagacttcagatgaactttgttaaactgtaacaacagattatgttattagatgctgttgttctggttcagtgtacgtacattttattagaatactatggagaatgagaataaatgctcagttttatcattcagatttattgtgtcttttttatttacccattagctatgcaaagattggcttagcatgaaagtattaaatacgtgctgcctctgcaattaggcaaagaaagattac

SEQ ID NO: 2808 - DNA, 793 bp, Homo sapiens
tttttttttttttttaaataaagcgtttattgattagtagaagcatgaacagtgtgcataatattttcaatacaatatcagggagggatgatgggaacccctcaaaaggcactagaggcgcagatcttcgggacaagagggaagagatgcgccagagaccagggctggggcagctgggggtccctgagtgccaggcgccaccacacgtcctgtgggtcaaggcccctcctctggggagcaggtctacggcacggaggatgcagggctgggaggggaccccacctcggggacccaaaaggagtccatttctgccctgccccccgcaaagcagcaggggagggggcctgggggtcctggggtgggggatcccaggcctgggcccatcctggcttgacccttgtcccaggaacaagaagctgaggagggacgacagccaggcccagagtgactcacaaggacatccaaagaagggactggattttcagagggaggtgacttggtgactgagaggcagcagaggccaaagcctgaccccagaccctcagggagtggcccacccaacctgtacccctcaggagccccgtccggctccccaggcaaccactgaggacctcggggtggcctgtagaagacagaacccagccccattacaccccttgctgccgctccatccccaaacaccagaggggaccgggaaccagagggagaccttgtgggccagcgggcagaaggaagcaggctgaggccgggagaaggggataccaggcctaaagctcaggtcccataacctcat

SEQ ID NO: 2809 - DNA, 504 bp, Homo sapiens
tttttttttttttttggacccatgggatgagtgttttattcatgctgtttccaggaagggatgtcagagctggaccagtcgaaacccttggaggctttttttgcagttggccacaggggcgttggaggcctgcttatgggtcctcgatgtcgagaaactcctgcttggggggcgccgcgccgcggtaccacgcacaggagccgtcacttctcttgatgcaggcgaagaacttggcctggtgcccgttgatgttcttctctgtgacccagtccatccagaggcactcgtccggggaggagatgtagcacgggatcatggggcagcgcgtgatcttgcactcgcagcccatctggtacctgtggttcaggctcttcttctgggtggtgctcagggtgtcccagggcacgatgaagtcacagagggtgatgtgcatcttgccgtccccctcggcctttcctgcaatgagatattccttctttcctccaacgtccagcgagaccccca

SEQ ID NO: 2810 - DNA, 717 bp, Homo sapiens
tacatctacgtattagtcatcgctataaccatggtgatgcgtttttgcagtacatcaatggcgtggatagcggtttgactcacggggatttccaagtctccaccccattgacgtcaatgggagtttgttttggcaccaaatcaacgggactttccaaatgtcgtaacaactccgccccattgacgcaaatgggcggtaggcgtgtacggtgggaggtctatataagcagagctcgtttagtgaaccgtcagatcgcctggagacgccatccacgctgttttgacctccatagaagacaccgggaccgatccagcctccggactctagcctaggccgcgggacggataacaatttcacacaggaaacagctatgaccattaggcctatttaggtgacactatagaacaagtttgtacaaaaaagcaggctggtaccggtccggaattcccgggatccaattctggacacagaagcattactttctctgaaggaagcccatgcttctgcccctgggcatctgagccagctcaaagcatgtttggcttggaggaaacctcaccaggaaggacagcgcagctctattaagctgtggtggggatgaacaactggcctgtgaactgtcatgcctggattttggtcacatatagttagttaccaggtttgtaacttagctttagtcttataaacaacattgtttacaaaaaaaaaaaaaaaaaa

SEQ ID NO: 2811 - DNA, 752 bp, Homo sapiens
  misc_feature (100)..(104): n is a, c, g, or t
cgtttacgtggaggtctatataaccagagctcgtttagtgaaccgtcagatcgcctggagacgccatccacgctgttttggacctcccatagaagacacnnnnncgggaccgatccagcctccggactctagcctagccgcgggacggataacaatttcacacaggaaacagctatgaccattaggcctatttaggtgacactatagaacaagtttgtacaaaaagcaggctggtaccggtccggaattcccgggatagcccatgtgtgttgagagcttctcagactatccacctttgggtcgctttgctgttcgtgatatgagacagacagttgcggtgggtgtcatcaaagcagtggacaagaaggctgctggagctggcaaggtcaccaagtctgcccagaaagctcagaaggctaaatgaatattatccctaatacctgccaccccactcttaatcagtggtggaagaacggtctcagaactgtttgtttcaattggccatttaagtttagtagtaaaagactggttaatgataacaatgcatcgtaaaaccttcagaaggaaaggagaatgttttgtggaccacctttggttttcttttttgcgtgtggcagttttaagttattagtttttaaaatcagtactttttaatggaaacaacttgacccaaaaatttgtcacagaattttgagacccattaaaaaagttaaatgagaaaaaaaaaaaaaaaaaaaaaaaaaaaaaaaaaa

SEQ ID NO: 2812 - DNA, 733 bp, Homo sapiens
tttttttttttttttttttttttttttttttttttttttggcttttcaaaaaatctgtaattttttcaagaaacaaagtataatctgaatatagttattattctacaaaaaatcttttactcctcttaacattatatacaaataatttttctaccaactttagttttattttctatactcagaactctcatttagtagaatattcgaagtgtcgcttcctcatatatttctactataaattctggtatttacatagacaaatttggattaaaattttttttttttactacacctttgaaaatatattttcgtataaactctggtgttttctaagctgtagtttttgaaaatttgttttcccaaatttattacatttgcaagacagctctccaatataaattccctgatgttgaacaaagtttgagtgacctcttcagagtttttctgtagtacaaaatgtggacaataagatctgatacaagtaaaggtacttcaaccctctttatggttgtaatgttcatctttaatataaatactctccttcactttaaaggataatattttctgaaagatctttggcagtaattgcacttatcatgcttttattaagcatgaactctctggtgtttagtaagatgtgagcagatattgacgtcttttcacaggtctatatttctacaattttctcaaatattaatgattctgggcatagggtttgtaaaactgccctgtc

SEQ ID NO: 2813 - DNA, 766 bp, Homo sapiens
tttttttttttagatgagaatttaagcttttattaataaatcatgattttctattgaatacataataaagtacaattaacaataacataacattacaacattaaaaattaaaactttcagaatcaccttgatcaatatataaagctttagttccttatttcaacagtgttcttctcatatgcaaaacagcttcccaaaataagagattcgtgaatgaaattttataaagcttcctgtgtaccaaagagattgactccacatcaactgtcccctactgaaaatccaaaccatacaggcttgaaggaccagaactgagccacattctattaaagttatcaaagataaaatcttaaagatctacaaatggaacatggaactaccttctaccaccaattcaatacactgggcaaacgtggtaaatcttggcctcaagacaacataagatagaatgattcttaaatatgtagcaacagatatatcaatattatccctattacagagacacatgtataccaatttataactgttcttgtgcagtaagaaactcagaaatcatctaggaaatatctattttcctatgttacaactgaaatgaaaatgacaacatatttgtaaaatgatgcaagtggtattgtctttgatgagacatgaaaacacaattcactggctagaaatagtgtaaaacaagcctactctcactgatatatacttactttaaaagttacacttacttcttaggtttctgagaaagaggatagggctctat

SEQ ID NO: 2814 - DNA, 749 bp, Homo sapiens
tttttttttttttttttttgggagaatattattttattatcaaatgtacagtatattgaccttaaaaatacagtaaagcagtcatggaaataacaggtcgtgtattattcatgggcacaaactgactcatggctggggaagaagcagccaccttagaccagatggacaagccagatactgcagagaagtttctgggcttttcggggaagactctagattcaattctgtaaagttatgatgcagttttctccttcctctcctctcacctcctctgagcacagctttcaacaaaaactttgcatacaaggaaatctaatatcgcagccttccccactggagggttcctggagaaggtaatataacagtggtgactgaatttgaaggaggttggagagaaattttttaaaattatatttccatgtctgctgtaatgtatccaagtcttgtaaagaccaataatttattaattttaataagacagaaagtatttctccttctagtctcatcgtctgatttgaaaggaaaaaaaatatatataaaacattatataaaaagtgagttccaggaagaaatgtttttcttttttcatataaaatggtagctgtatgtatgtaactctgaattaaaatatatatatatatcagtcactctggttctaaatccttattgggcaagctggagttttgaagtgacagaggagatactgaaagatgacttgtcatctgggaccaagtctatcatgtaaactg

SEQ ID NO: 2815 - DNA, 767 bp, Homo sapiens
tccatgggcgtgatacggtttgactccacggggattttccaagtctcccaccgcgcattggacgtccattgggagttttgtttttggcacccaaatcaaccgggacttttcgcaaaatgtcgtaaacactccgccccattggacgcaaaatgggcggtaggcgtgtacggtgggaggtctatataagcagagctcgtttagtgaaccgtcagatcgcctggagacgccatccacgctgttttgacctccatagaagacaccgggaccgatccagcctccggactctagcctaggccgcgggacggataacaatttcacacaggaaacagctatgaccattaggcctatttaggtgacactatagaacaagtttgtacaaaaaagcaggctggtaccggtccggaattcccgggatgttgactattctctacaaccacaaagacattggaacactatacctattattcggcgcatgagctggagtcctaggcacagctctaagcctccttattcgagccgagctgggccagccaggcaaccttctaggtaacgaccacatctacaacgttatcgtcacagcccatgcatttgtaataatcttcttcatagtaatacccatcataatcggaggctttggcaactgactagttcccctaataatcggtgcccccgatatggcgtttccccgcataaacaacataagcttctgactcttacctccctctctcctactcctgctcgcatctgctataaaaaaaaaaaaaaaa

SEQ ID NO: 2816 - DNA, 625 bp, Homo sapiens
tttttttttttttttacttgatatcaaatcgacatttatttaaaaaagggaaaaaaaagacgtagaacagaattcacacagacctttgttattccaagctcctatttatgaatggtgattaatagcaataattctgtctctcttctctctgtgaaatgctaacacttgctaaaggcactcagattctgggcttaacggagacaaggtcacatgggaccataagccagtacgttttcttggtagctacccagaaaggaagtttacaaatgttcctcccattcataacgggaagaaaaagtcaaacagctatcagtagaagcgttttatgagaagctatttacacagctatttgtccattcagccagagtgacagtaactgctcacaatggtaggggttctcccctgccaagaaagcacaaacaatcaacaaaacactttttatcatatatgaaactcctgtacaatgatttggctagcaagaaaccaaatagtaggtaaggtcaaatcagtaataaacacatctgccacaaacagcctgcataaaactagatctgaccagacaaacacatgtactcaatactatactaaagccgctctatcgactagcatatgcctcaccacgttc

SEQ ID NO: 2817 - DNA, 642 bp, Homo sapiens
tttttttttttttttttttttttttttataaccaccttctaatacttttaatacccaatcaaaatttattatacatatgtatcatagatactcatctgtaaagctgtgcttcaaaatagtgatctcttcccaacattacaatatatattaatgatgtcgacaatttgataatgaaacattgtccaaaatattccccattaatacaacaaagacataattgagtatttctatttccatgccagccataagcataattttgcaaagtgatcatcttagaattatttaatctctaaatacagcaaaaacaagaaaccaagttaatattgttttattacatctccccacatctgtaaatattactttatgcatccaatttttgcttattttaagcagccaagtttctttaaaagcaaagtaacttcttttaatagcaatactaaaactctgtttaaaacattgcaaaacaaaccccactgcattttagacagctgcttccttataaaagtaagaaaaaacattctgtatatttacataaaaaattctaaatcattcactgggggaaaaatgaaagctttaaaaatatattttcttgcacactcaaataccataaatttcaccttacacatatgaggaaataataac

SEQ ID NO: 2818 - DNA, 731 bp, Homo sapiens
ctgaacgtttactccgggattcaagtctccaccccatggacgtcatgggaatttgtttggcaccaaatcaacgggactttccaagatgtcgtaacaactccgccccatgacgcaaatgggcggtaggcgtgtacggtgggaggtctatataagcagagctcgtttagtgaaccgtcagatcgcctggagacgccatccacgctgttttgacctccatagaagacaccgggaccgatccagcctccggactctagcctaggccgcgggacggataacaatttcacacaggaaacagctatgaccattaggcctatttaggtgacactatagaacaagtttgtacaaaaaagcaggctggtaccggtccggaattcccgggatcaggtttcatgctagagctaatgggagatgtggccacactgacttccattttaagctttctaccttcttttcctccgaccgtccccttccctcacatgccatccagtgagaagacctgctcctcagtcttgtaaatgtatcttgagaggtaggagcagagccactatctccattgaagctgaaatggtagacctgtaattgtgggaaaactataaactctcttgttacagccccgccaccccttgctgtgtgtatatatataatactttgtccttcatatgtgaaagatccagtgttggaattctttggtgtaaataaacgtttggttttatttaaaaaaaaaaaaaaaa

SEQ ID NO: 2819 - DNA, 758 bp, Homo sapiens
ctcggatttacctaggcgcgggacgaaacatttcacacaggaacagctatgaccataggcctattaggtgacactatagaacaagtttgtacaaaaaagcaggctggtaccggtccggaattcccgggattacaccttgctgggagtgaatgatggcttatttgtcagcgatttacaaatcctaagatggagaggtagcacgggagtacaaaggccaatgcagcctcaggttcacgtgcttttgagatgattaagaaatgcaaagttaggctgggcaaggtggctcatgcctatgatcgtagcacttggggagatcaatcctagcactttgggaggcttaggctagaggattgcttaggctaaggtgggaggatcgcttgagctcaggagttcaaaaccagcctgggcaacatagtgaaacctcgtctctattaaaaaaaaaaaaaaggccaggtgctatagctcacacctgtaatcccggcactttgggaggtgaggtggatggatcacttgaggtcaggagttcgagaccagcctggccaacatgatgaaattctatctctactaaaaaatacaaacaaacaaaaaattagccaggcatggtattgcatgcctgtaatcctagctactcaggaggctgaggtgggagaattgcattgaaccccaggaggcaggggttgcagtaagccaagactgtaccactgcaccctccagcctgggcgacagagcagactccgtctaaaaaaaaaaaaaaaaaa

SEQ ID NO: 2820 - DNA, 749 bp, Homo sapiens
tttttttttttgccgcccttttttttttttttttggtttaaatactgcactctattttttaaggactctgtgcatggtatttccggtggcagatgtgtaagattttttatgtaaatcgtgttgttttagcagaggactatcagacctgacagcagctggacatcgaggtcctcactggggtggtgactgccacgctgatgctgagtggaagccaagccccttcagtcagagctgggccgatctcagacccaaatgctaccaccaccaagccctgtgtcgcgacggcagcggctgcagtcaccagaaacaatccttcctgcctcgacacccgtgccagccccagccaccctgacggcgggctgtccacggaaatgccacggccaagagcccaggtccttcacgctggcctcttccctgccgggctgggccccccagtgccttcagagttcgttgtgccgagctctggagatcctgccggacaggtcctgcagatgcttcttcaccgtgtagcccagctccttggtccgcccctccagcagggcgtgcttctcgcggtgcggctcacacgctcgccgtcgcccatgctctctgcgtgctcagcttctcgtgcgcaatctccagctgcttctggtagtggttgtgcttctcgattttggcttcgaagttgcttgagctcctcccggaacgtctccagctcttgtccgtgagtggcggactgggcaggtccacaggtcatcaccctgggtctt

SEQ ID NO: 2821 - DNA, 749 bp, Homo sapiens; identical to SEQ ID NO: 2820

SEQ ID NO: 2822 - DNA, 697 bp, Homo sapiens
tttttttttttttttaaagtttgagatgcacagttttattaatgctatatctgcccaaattccaggccaggattcaaggccctttctgcttaattcagcaagactgttgaaaacaaaaaaggattcaaggccctgtggtcggcgtggtcaggcgatggttgctgtctccctgtccttctgccccagggtggtaatgaacctcaggaagtgcccttagtctctctgcagcctgctcaggggtgaggtccctctgagcctgagcaagcatttcgtagccaaccatgaatttccggacagtggcagagcgcaggagcggagggtagtaatgagcgtgcagctgccaatggttccagttggccccagcctctgatcctgtgggagccccatgccagcccatggagtagggaaaggacgtctcaaagaggttgtcatacttggtcaagagcttcttcatgatggaggctagatcatcacgctcagcaggggtcagctcaggtagccgccgcacatgccgacggggcagcagcagtgtctggtagggccatgttgcccagaaggggaccagtactaaccagtgctcactggttaggaccagacgtaccttcctgagtagctcctggacggctgtactccattagcagggggctctccaatgctgaactctttatagggctgctgagatcgctcctcaacgctg

SEQ ID NO: 2823 - DNA, 697 bp, Homo sapiens; identical to SEQ ID NO: 2822

SEQ ID NO: 2824 - DNA, 80 bp, Homo sapiens
ccgggcgcgacccgctccggggacagtgccaggtggggagtttgactggggcggtacacctgtcaaacggtaacgcaggt

SEQ ID NO: 2825 - DNA, 662 bp, Homo sapiens
ttttttttttttttggtagagacggggtctcactatgttgctcaggctggtctcaaactcttgggctcaagccatcctcctatcttggcctcctgagtagctggaaatataggaatgtgctaccacacccaggaaaattttaaatttttttgcagagaggggggtctcactatgttgcccaagctggtttgaactcctcggctcaagtaatcctgccttggcctcccaaagtgctgggatttataggtgtgagccaccatgcctggaatataagtatgtgtgtgtatgtgtgtgtgtgtatatatttatatatatatttttatatatatatatatttttatatatatatatatatatatttttttttttcctctgagacggagtcttgctctgtctctcaggctggagtgcagtggcatgatctcggctcacggcaacctctgcctcccgggttcaagtgattctcctgcctcagcctccggagtagactgggattacaggcatgcaccaccatgcccggataattaacgtatatccagtacgagacggggttctccatatggtcaggctggtctcaaaatcccaactcaggtgatcaaccgactcagtgggattacaggcgtgagatcccgggcaatcccggaccggtaccagcctgcgtt

SEQ ID NO: 2826 - DNA, 758 bp, Homo sapiens
  misc_feature (642)..(642): n is a, c, g, or t
ttttttttttttaaacaaaacataacaaaactggcctagtgttatcatgtaaacagatgggtatgatacttcagactggttgtgatatatgcattttttttccctttgttgttgtcaatagaaaagattgatctctgggctggtgaacataatctctgtcccagtcagaaaaggagagaggaaattagcagagcgattggtggagaatgatatctgtcaaaagaaacacttggagagcactgagtttagtaataggtgactgccggaaaaaagggaactttgaatattgtcaaggtaaggaacagacaaatattttgattttgcaatttacttacgtaccagaaaaatcaatctattttttccaataaattataattgtaaagattttcttttttcttccttcttctagtgcctgttctattgtatgttttaaacatttgtctttgaaatcttgggtgtggggattgggtggggatcaatctggtggtgggaaccctgtttgatagttttgggtctgaatatatcaaatgatcaagtaccaaattttttcaccctcttcttgttgcagtgcttcttgccatgtttcataatacatctgttataagctgagcaatacttggagttaaagagtagaaactatgncatgatttctgtgtctatgtacgaggagatggtgtttctgaacagtttgttgactaaatagggcaaaaactgcttcagttattattctcgagtatttggtttacacactttggcat

SEQ ID NO: 2827 - DNA, 767 bp, Homo sapiens
  misc_feature (141)..(141): n is a, c, g, or t
  misc_feature (178)..(179): n is a, c, g, or t
cccccctttcttcatgcgttaatgcccctggcatagcccagacagacttagggactttcgtactggcagacatctacgtattagtctcgctattaccatgtgatcgctttttgcagtacatcaatgggcgtggatagcggntttgactcacggggatttccaagtctccaccccatgnnacgtcaatgggagtttgttttggcaccaaatcaacgggactttccaaatgtcgtaacaactccgccccattgacgcaaatgggcggtaggcgtgtacggtgggaggtctatataagcagagctcgtttagtgaaccgtcagatcgcctggagacgccatccacgctgttttgacctccatagaagacaccgggaccgatccagcctccggactctagcctaggccgcgggacggataacaatttcacacaggaaacagctatgaccattaggcctatttaggtgacactatagaacaagtttgtacaaaaaagcaggctggtaccggtccggaattcccgggatgtcgcgccaggacccgaggacagcaccgcgcaggagcggctggaccagggcggcgggtcgctggggcccggcgctatcgcggccatcgtgatcgccgccctgctggccacctgcgtggtgctggcgctcgtggtcgtcgcgctgagaaagttttctgcctcctgaagcgaataaaggggccgcgcccggccgcggcgcgaaaaaaaaaaaaaaaaaaaaaaaaaaaaaaaaaaaaaaaaaaaaa

SEQ ID NO: 2828 - DNA, 687 bp, Homo sapiens
ctgctgctgcttgggccgctcttttagccctcgcgccccccgccgttggctgcgggagagcccgcgtcccactcccgtgctcgcctcgaccccgcgccgggcacctgtggcttgggacagatagaagggatggttggggatacttcccaaaactttttccaagtcaacttggtgtagccggttccccggccacgactctgggcacttcccctgaagctcctctccggagcttgacttcttggacctcctcccccgccccaattccaagctccagaaactcccaactcgtctgccgtccagaaagctagctgcagtgttcaggacgtccgggaggaagcaagcatgtgggggacagaacagtagtcctggactcgaaagggaaggtgctgaccagtggggccttagcaatttgaagggttgggaaggaggaattatatttgcaaaggggctgtctattagcatatttcctttgagggggcaaaaaaaagtgccagtatcgacttttacagattgtggccagtgaggatattataatcctatgtaacacagaaaagtcccacttaccgattcattctttcactgtttgtatctgcgccagaattctcagtgacgtgcgggtgagggtgggtggcgatgccttagagggaacccctaaattggttcggataagtagagccttgactttat

SEQ ID NO: 2829 - DNA, 711 bp, Homo sapiens
ttttttttttttttttttttttttttaagacggagtctccctctgtcgcccaggctggagtgcaatctcagctcactgcaacctctgtctcccggattcgagtgattttcctgcctccacctcccaagtagctgggattacaggcacgcaccatgacgccgtggctaatttttgtatttttagtagagatgaggtttcaccatgttggccaggcgtggtctcgaactccgtgacctcaagtgatccacccgcctcggcttccaaagtactaggattacagatgtgagccacgtgcgcccagccagatatattcatcacttctataattacctaaaaaaactataagaacacaaaagtagtttattaacccccatttaaaaaatgactattaaaagggcaacatggtgccccgctatgaagggtacagtcaatagtgcatgggagctagctcctacagtctggtgagggccaattattaaatatgcaggaagtgtatgagccaactataagcctgaaatcagccatgtgggagtattcacaccatggaagtcaacaaagtgctacaaatcgggaattttttcattggtcccttcccacacaaagagctggttttactagcagaacactgggtatgcttgttatccaaaatagctcatctgttcgagtagcagaatacgactaattagtttctttactttaaattggaacaga

SEQ ID NO: 2830 - DNA, 699 bp, Homo sapiens
  misc_feature (52)..(52): n is a, c, g, or t
  misc_feature (553)..(553): n is a, c, g, or t
gaaatccagtttatcaagttttcttttacagtttatatgcattatgttcttnaaaaacttaccttaacaaggtcacaaaggttttgtccttgttctgcgcgctttctaatttttagctcttggatttaggcatatgatccattttgattttaagtttgtatatggcatgagtgaagtttcaaagttcatttgtttgtaaaatagatatcagattgttttagcaacatttattgaaaagactgtcttttcctcattcaattatcttggtacctttagaaataagtttatcatattcatatgaatacatttctctttctggagtgtatatcctattcctttgattatctgtccttatgccaatattctcttgattactgtagctttataatcagtcttgaaatcaatggatgccctttaacttttggtctttttttcaaagtttttctggctattctaggttcttttcacgtccgtatatatttgtaataagcctttaattactatgaaaagattgctagaattcttggggaattactaatatcgatcaatttgntggcatcttgagaatattgttttctgatcctatatttccattcatttgggtggttttaaaagtttttcaaagcaggcttattagttgtttcatggatgtgtcttgtacagagttgttaattttgtggtagccagtagattcatttt

SEQ ID NO: 2831 - DNA, 697 bp, Homo sapiens
gagattctacgtattagttatcgctattaccatgtgatgcgttttgcagtacatcaatggcgtggaagcggtttgactcacggggatttccaagtctccaccccattgacgtcaatgggagtttgttttggcacccaaatcaacgggactttccaaaatgtcgtaacaactccgccccattgacgcaaatgggcggtaggcgtgtacggtgggaggtctatataagcagagctcgtttagtgaaccgtcagatcgcctggagacgccatccacgctgttttgacctccatagaagacaccgggaccgatccagcctccggactctagcctaggccgcgggacggataacaatttcacacaggaaacagctatgaccacttaggcctatttaggtgacaactatagaaccagtttgtacaaaaaagcacggctggtaccggtccggaattcccgggatctggtatcttcaaaatccagaaggatgatggcagatggcacggaaggaggaagagggtaatctggaagagtttcctgacctactctgtctgctgtgattaaacaaccaccaggaaattttgatgacactgttctcctgagctcctccctttcctcggggaagaaaagcattgaaactaccaaaataaagtgttatttggctggaaaaaaaaaaaaaaaaaaaaaaaaaaaaaaaaaaaaa

SEQ ID NO: 2832 - DNA, 123 bp, Homo sapiens
ttttttttttttttgtgataatttgagtggatgccatagtttactgccatttaaaattgaaataattattttaatattctaactttttgtaaaagggtggtttcttcataatttgtgaagttg

SEQ ID NO: 2833 - DNA, 678 bp, Homo sapiens
gctccgcgcgcgcggagtccaggaacttgttaagagtttggggctctggcggagcgctctggcccccgccgctgcgagggcaactctccctgggtgcgcacacccacgcccccgcttagccaccggtgagatgaaaggaggcgggggctgtgtgaggagggacgcaaggagctaaaagagagaatttctgcagagattcccattttcgagggacgaagggccaacctaggcttaagcaactggtggtgggaggagacagcccagcctcgcactctcatggcaactcatgcaaggtcttggcggttgcttagcattctggccagtatccacctgggtcaaagactcggcgacaagggagttacactgtgatgagcagcatgcaggtggccctggtcaggggctgactgtctttgcccgaagagaatactaggccctgaatagtctgagaggtcctgtgctgaagccgaaatatgtcctccgaggatgcaaacaaagacacagacatactctgatctcagtctttggatatgccaagtcaccacgcccttcaggtcccaaacagccaagcctcctgtatagacacttgagctgccatctgcatgggcatgggagacttgacacgcttaggagaggaaccacgagcaacacggaaaggcaagaggagggcacccggttaga

SEQ ID NO: 2834 - DNA, 712 bp, Homo sapiens
ttttttttttttttagtagagatgaggtttcaccatgttggccaggctggtctcgaactcctgacctcaagtgatccgcctgcctcagcctcccaacgtgctgggattacaggcatgagccactgcacccggcaccaaggaattctttagctgcttgcagtaagtaatggttatggcatggctttggctgtgtttgaacctgttgggttttgttgcaacttcaggactgatttgaatttgaatttgaaaacataaaacagactggttttacgatacagaaaattcagtatgagggaggttatatagttgctaggaatccccccaaatttctttctccccttcttactacacacatagcttgtcagctggaaacatttcaaagcttccctagcagccagcgtcgacacgctattaagttctcatcaatggaataagagcataaaggatgtgtccaatttctgtctcacttggttaaaaggaaattgtttgcactggactccctcttttctcctctttctgcaagacagaacacagacatgctagcaactcagttttgaccgtacagtctaggaaatgccccaggaaaaggcagagcaacaagatagaagaaacctgtgtccctgaatgaccttgttgagcagagaaggcccaccatcctagactagccagacttacttagaaatacatttctgtctgtgtaggccactgtgtt

SEQ ID NO: 2835 - DNA, 632 bp, Homo sapiens
tgtatttaaaaattaatttactttttgccatttaggggagtttcttagaggagccaagataagcagctgtgttgaatctgtcatattttattcctgtcttaaaatattggtcttcacaaagtttaagaaacacacacacatacagaaattctaatagcatcttttataatgtttctgcaccagaaaaggacagattactgtcttgatttgggggtcaagacaaataatcctaataaaaatgactgcccttaaggaactctagtagcactatttaaatgtggcatacaaagggcaggactactgctaattaaacctttgacaaaactcaaattataattctgagcttcagagtgtctggattacaatccaaaagaagcagctaaaccaattggctatgagtgtttctatgagcattgaagtgttgcctgtagaagtctcaactttcacacatacctagtttgtgaattcgggggctgcataacacaggtgtcatgtcagtggcttcattagtataataaatacatgttcatgtgataactacttataggggtgtaaaggggatttaaatgagataaggataaaaagcattagcagggggataggaacatcataatgagctcagtaaactctgg

SEQ ID NO: 2836 - DNA, 729 bp, Homo sapiens
  misc_feature (233)..(233): n is a, c, g, or t
cctgggcttgctcaactggagtggtacttagagttgtttctggaatatatgactgccccagagccggactattcagatattttctggaaagggctgagatttccccgaactgagagttccccccccttttagactttatagggtaacttccaggcatggccctggcatttgtaaactgtcctggccctggctaatgccttataattagagtataatgagcccgtgaggatgancccgaggtccctcttcactcctccattcttggttttggcccggttttggctcggctttctttacccccactcctattttattagcccgggtttttgtgaccccgtatcttgtgctgaccctcatattctcactggctgtgattaagaataactaaccctccctgggaatgccgcccccgtaggcctccggccctattttacccccggtccgtattccagatggagtcgctgacataggtgggaggattgcttgaagctaggagttggagtcccgcctgggtaacatattgagatcctcgattattgaactaccagtgctccaccagactagaacttaacgggaccagtttaggaccagaagttaagatctgattatttactttgtttattgtctatatccccttttataaaaaataaacttgttatgccaaataaaaaaaaaaaaaaaaaaaaaaaaaaaaaaaaaaaaaaaaaaaaaaaaaaaaaaaaaaaaaaa

SEQ ID NO: 2837 - DNA, 631 bp, Homo sapiens
ttttttttttttttttttttttttttttttttgggagacagagtctcactgtgtcgccaggctggagtgcagtggtgtaatctcggctcgctgcaatctctgcctcctgggttcaagcaattctcccgcttcagcctcccaagtagccaggactacaggcatgtgccactacacccagctaattttttatttttagtagagacagggtttcaacatgttggccaggctggtcttgaactcctgacctcaggtaatctgcctgccttggcctcccaaagtgccgggattacaggcataagccaccgcgcctggccgataccacataatttaagacaatgtataattagagaataagaaaaatagaaatcaccatgttctagaagtgcttatcaaagctcctcaggaaacgtggacttgagtcaagccatcacacaaatgttacaagtaaagatatgcttgggttaggaagatgcatgagaaaatgtcctctaaggacaataaatatataaactaaaatgatgtgacaatgtgaccgcagtgtggtttagggggttaatttttaatatttgaagtgttggtgaaagcctgagctaaatatgaatgaggagaagactctgatgctgctgcccta

SEQ ID NO: 2838 - DNA, 679 bp, Homo sapiens
ttttttttgagccggagttcactcgtcgcccaggctggagtgcagtgacacgatctcggctcaatgcaacctctgcctcccgggatcaagctattcccctgcctcagcctcccgagtagcccgggattacaggcacccgccaccacgcccggccaatttttatgtttttagtagagacgtagtttcacccacgttggccaggctggtctcaacctcatgacctcaggtgatccgcccgcctccgcctcccaaagtgttgggattacaggcgtgagccaccgcgcccagccaggaggcaaagctgtttcaatggtgtagtggacaagttaccagccacgcaagccctttcctgtaaaccacaggactcctcctttggcaacggtgacttgagtacttttgacttaatttccatatgggaggagaaaaacataaaaacatacatttattatttaccaatgctgcatcatctcagtaaggaagagcatgtatttgcttttgagtctcatttgcccttgcacatgtaagttactcgagttaaagtctcaaccgtttgttttcccccgctttgctcagatgcctaccactcaccctagcattacttatatgatatgtctccatacccattacaatctccagcattccccctcaaacctaaaaaaaaaaaaaaaaaaaaaaaaaa

SEQ ID NO: 2839 - DNA, 753 bp, Homo sapiens
  misc_feature (235)..(235): n is a, c, g, or t
ttttttttttttttttggggcgtgaaaatgccatcaactgagacaatgaagccaatatctcttccctaaaacatatcagcataaagtcctgaagatattcaacaaaactgagatcactcctaccccaacggatgttgggaggctcagatacgataatgcttggaaacgattacaaaacttgtcaaattctgtacaaatgcaagacattattggaattatcctggtatttcacagnttaagaagctggtgggactagttttcccatttgatttctatgcaaattgcatgtaggaagccttctctggttagtgcctatgctgattaaagggcaagatgctctcagctttgttcaagacacagcaacctccataaacatacttccaggatgtttggttactggccagcgttgccaggtgtagcatgccattacatttcccgttaaattttcctgtctgattaaaaacttaaaatgtagtagggctaaattccttctggttcaatctaaaatgctgcttgagttgtgattttgaattctgttctattccaggcttctctttatccccatccttatcatctatatttatcttcttgcatggaaaagtagaatatattcctgaatttcctgggctcccttttctggtttcttggcatcgttgggctcgtgtacacataatgttctcattttggaacatctatcgctggatcacacagaaaatggtgtcataagtgggccactgaattgagatagagata

SEQ ID NO: 2840 - DNA, 101 bp, Homo sapiens
tttttttttttttttgtttttgagacaggtcttgctcatcacccaggctggagtgcagtggtgcgatctcagctcactgcaacctccacctcccatgttca

SEQ ID NO: 2841 - DNA, 683 bp, Homo sapiens
tgtattcatattttaaatatgttgaaagtaattaatggaaaagcatgcaatgcaaatattaaccaaaatatagctttagttgtacttatattaaaagttggacacggttaagtctcagtgatttttttacacaacggaggcaacctgtgcagttataactagtattatattatgcccttggcctgattacagaagggaaaggggagatcataccagacaatggcagaatgaagcaacaaggagtagagttacagaacatgatgctgtaactgggactggagttacacttttagagttaaagaatagtaaactggacaaaatatatgaaacaattttttgaagtactgaacatcaggcagcacaggactgtgctcggcaagagaagagaaggagccagaatgagtcctgctttattcccagattctccgtgacagcagtagagaggaatcccagagagagcagacattgtcattgcactgaggaaccacataaaaatcaaaaaggttaagcagctggaatgtgtagtagaagagaacgtttacagaaaaaggaaccaagaatcagcctaaggattctcccaagtccctaagccaatgtcataggatgaaattctaagagctcagcaaggactgtaccagggagtggaagaagaacattccctggcatcacatgacaggaagaca

SEQ ID NO: 2842 - DNA, 699 bp, Homo sapiens
actaacagttctcttctgtgtcaggcttcttcacccagcataatgtttttgaggttcattcatgtcattcgtgtattggcagtttgttcctttttattgcaagtcatgttccattgtatagatgcatcatggtttatccatacgcctatcgaatggacatctggattgtttccagtttggttattatgtataaagctgttaggaacactcctttgtatttgcagttgcactgttttgtgacttaaccctggtatataatctgtgctaagttctaagagttcaagaagcagtatataatggaaagcatgataaacgaaagtaaatcatgaaaagaattaatactttctgtattactgaaggagcagtgcatcaattagaaggtgcttaagctctgtctaaaagggagttcaggcagagcatagtgtctcatccctgtaatcccagctctttgggaggccaaggtgggaggattgcttgaggccaggagttcaagaccagcctgtgcaacatagtgagccctcatctctattaaaatatttcagaattagctgggttggtggtttgaggctgtacaatgagctgtgcactcactgtaaccactgactccggactggggcaacagagcaagacctatcctttaaaaaataccacttaaaaacatggagttctgtaataggatgcttattaattttttcttac

SEQ ID NO: 2843 - DNA, 704 bp, Homo sapiens
accccgggaccgatccagcttccgggactctagcctaggccgcgggacggataacaatttcacacaggaaacagctatgaccattaggcctatttaggtgacactatagaacaagtttgtacaaaaaagcaggctggtaccggtccggaattcccgggatggcggacattcagactgagcgtgcctaccaaaagcagccgaccatctttcaaaacaagaagagggtcctgctgggagaaactggcaaggagaagctcccgcggtactacaagaacatcggtctgggcttcaagacacccaaggaggctattgagggcacctacattgacaagaaatgccccttcactggtaatgtgtccattcgagggcggatcctctctggcgtggtgaccaagatgaagatgcagaggaccattgtcatccgccgagactatctgcactacatccgcaagtacaaccgcttcgagaagcgccacaagaacatgtctgtacacctgtccccctgcttcagggacgtccagatcggtgacatcgtcacagtgggcgagtgccggcctctgagcaagacagtgcgcttcaacgtgctcaaggtcaccaaggctgccggcaccaagaagcagttccagaagttctgaggctggacatcggcccgctccccacaatgaaataaagttattttctcattcccaaaaaaaaaaaaaaaa

SEQ ID NO: 2844 - DNA, 704 bp, Homo sapiens; identical to SEQ ID NO: 2843

SEQ ID NO: 2845 - DNA, 700 bp, Homo sapiens
tttttttttttttttttttttttttttgttgtttgcttgtaacatgcttaggggtggttctcttgggcttaccaagcttttgggatctgtagacttttgagatcttgactcacttcatttgtaggttcttcattaaatttggtaaaatttcaactgcaatttccctatttttttgctgttccattttttttttctctttccccctctggaacttcaattgcacatatgttaaaccatttctattgtttagaactgatgctttgttcttttttccaatcctttcaatttctgtttttacaattggataggtttcccccacctgtattcaagtactctaaacttttcctctgcagtctccacactgctgttaatcccatctattaaacttttcatgcaggaaaattatacttttaatcatgatatttccattaataactggataaaagattcatttatatatatatatatatatatatatgtatttttttttgagacagagtctcgctctgttgcccaggctggagtgcagtggcacaatctcggctcactgcaacttctgcctcctggattcaagtgattctcctgcctcagcctcctgagtagctgagattacaggtgcctgctacatgcctggctgacttttggtattttagtagaggtggagtttcaccatgtttggccaggctgttttgagctctgt

SEQ ID NO: 2846 - DNA, 721 bp, Homo sapiens
tagggactttctactggcagtacatctacgtattagtcatcgctattacccatggtgatgcgttttgcagtacatcaatgggcgtggatagcggtttgactcgacggggatttccaagtctccaccccattgacgtcaatgggagtttgttttggcaccaaaatcaacgggactttccaaaatgtcgtaacaactccgccccattgacgcaaatgggcggtaggcgtgtacggtgggaggtctatataagcagagctcgtttagtgaaccgtcagatcgcctggagacgccatccacgctgttttgacctccatagaagacaccgggaccgatccagcctccggactctagcctaggccgcgggacggataacaatttcacacaggaaacagctatgaccattaggcctatttaggtgacactatagaacaagtttgtacaaaaaagcaggctggtaccggtccggaattcccgggatggcagatcacgaggtcaggagatagagaccatcctggctaacaaggtgaaactccgcctttactaaaaatacaaaaaaattagccgggcatggtggtgggagcctgtcgtcccagttactcgggaggctgaggcaggagaatggcgtgaacccaggaggtggaggttgcagtaagctgagatcgcaccactgcactccagcctgggcaacagagcaagactctgtctcaaaaaaaaaaaaaaa

SEQ ID NO: 2847 - DNA, 712 bp, Homo sapiens
ttttttttttttttttttttttttttttttttttttttttttttttttttttttttaagcctggctggaagtgcagtggctgcaatcttcacacaatgcaacctccgccacccaggttcaagtgattctcccgcctcagcctcctgagtagctggttacaggcacgcgccaccacactaggctagtttccgtattttcagtagagatggagtttcaccatgttggctaggctggtctcaaactcctgacctccagcgatccacccacctaggcctcccaaagtgccgggattacaggcttgagccactgtgcccaacctacagattatttctaatcataaagatctctagcaataattagataaaacagtggaattttagagaatgatttttttttcactaaagaaactagattaacattccctcactcctgccatccttcatatagtatctttttctttgcataacaacaatctattaatcaatactcaaaattaaaacttcttaccattgtctaaaagactgctaactctggcactgggaccctttctcaatgaacctaaagtttctctgcatcctctgtcatttggctgtagtcacactagccttctatcagtttttaaaatattctaaattttccccaatctgaggacatttgcgctctgtttcttctgtaggaaagacttttctaccattttggagtcctcccccgg

SEQ ID NO: 2848 - DNA, 704 bp, Homo sapiens
  misc_feature (573)..(573): n is a, c, g, or t
ttttttttttttagcccagccctgtccagcccggttcccgggaggatgaagttcgtgtacaaagaagagcatccgttcgagaagcgccgctctgagggcgagaagatccgaaagaaatacccggaccgggtgccggtgatagtagaaaaggctcccaaagctcggataggagacctggacaaaaagaaatacctggtgccttctgatctcacagttggtcagttctacttcttgatccggaagcgaattcatctccgagctgaggatgccttgtttttctttgtcaacaatgtcattccacccaccagtgccacaatgggtcagctgtaccaggaacaccatgaagaagacttctttctctacattgcctacagtgacgaaagtgtctacggtctgtgaagctgctgcccctgagctggaggggggtctcattctacaaagagagaggtggcccccctttcttgacctcctcctccttcaagctcaaacaccacctcccttattcaggaccggcacttcttaatgtttgtggctttctctccagcctctcttaggaggggtaatggtggagtntggcaactttgtaactctcctttctcctttcttccccctttctctgcccgctttcccatcctgctgtaactttcttgattgtcagtctgtgtcacatcccgtgatgtttggttcctgtccctttctgatgc

SEQ ID NO: 2849 - DNA, 781 bp, Homo sapiens
tttttttttttgtgctgttcagatttaagaaactccctttgtgaaactttataaataacagtagggaatttctgcttataaaacaaatgcatataaatatagcctattaattttcatatatatatatatatacatgcacatgggcaggcatgaatttttctctcgattggggattgcactgatcattcctttttgtagcctgcttttatcacttctcagcgtattgtgaagtgtccacatatggaggcctcatggcagaattgcacggctcttcagaacagaggctcaagtccctgcaggcctggatttcagaccctggctctatcactaatcagtcttgtaactgagcaagttactcacctctctgggccttggtttccgcattggtataacggagataatagtacctatccacgcaggtctgatgagaggactgagggagggcacataaaaagcttagaagaagacctggaacacagtgaatgctcaatgagcatcagacattaggattgctgttgttcctgacctcatggctgactccagcccccagccccacctcataccccacatcctgtagctggatcccagcctccactaagctctaacctgggtctcccagggtgaccttgggtcctctgactactgagctgtttggagggctgatgcccagtcaccttccaagtggcatccagtgggatttctgagaggttcttccctgggttctcagtgacgtgaggaatgagaggagttaaagatgggaacgacgagggaaagtgagaat

SEQ ID NO: 2850 - DNA, 735 bp, Homo sapiens
tttttttttttttttttttttttttttttcaggcttgtctttttctgtttcaatttttgaatatggaaaacatttacatggttcaaaaatgaaaaaaatataaaaagatatactcagagaggacactgagtcctttccacctcatcctctatcccacttaggtaggcattaatgttaaggtttttttttaaatccttccagtgttatatattagaatatctgcagggtagattcctagaagtcaaaattctggctgggtgtggtggttcacacctgtaatcccagcattctgggaggctgaggcccgtggatcacttgaggtcaggcgttcaagagcagcctggccaacatggtgaaactctgtctctactaaaaatacaaaaattagccaggcatggtggcacatgcctgtaattccagctactcaggaggctgaggcaggagaatcgcttgaacctgataggcagaagttgcagtgagctgaaatcacaccactgcactccagcctgggggacagagcaagactgtcaaaaaaaaaaaaaaacaacaaaacatgggaggccaaagcccatggatcacctgaggtcagatgttcaagaccagcctggccaacatgacaaaaccccctctccactaaaaatacaaaaaaattagccagtcgtggttgcgcacgcctgtaatcccgggtaatcgggaggctgaggcaggaagaatcgtttgggacctggcgagatt

SEQ ID NO: 2851 - DNA, 702 bp, Homo sapiens
ttttttttttttttctgagagtactgcctgccacatgcattgctttggagtaaacaatgtctctaggagaaattgtgcaacaaccattcaggttcacctctctgtggtttccttttctttgggatctttcttcctcaaatgatgtctgtcttgatagctctgaactccaagttttgtctccctacccctggtgagtctgccaaaggctctaggctgccactttctgtttggctttgctgccatgatatgtgaatcagtcaaggacctgaggggaaaaagcagccataaatgccaagctcagttcaatgcaattcacttgtcttcaggatcttggaccttaatgtctggttgctttagtttctttctaatgctttcaaataaccactttgcttctctcccccaagccctacacctaattcataaatttcctggtggaaggttttagctaataccagcaataatatcatagccagaaacagaaatgtttcttgtttttactgaattctataaaaatagagatggtaatttctgcctggcttaccccacgggaagatctaaagttaatttaacctggagaaaggaaaattagtaaaagaagaaaattaataactgatttagcaagttacttgtcaaatcttcattgagtaatcaatttgtaacaggcattgtttagtaaaagagaaaaaatacaaggaaggaagc

SEQ ID NO: 2852 - DNA, 716 bp, Homo sapiens
ttttttttttttttttttttttttttttttttttttttttgagagagtctcactctgtcacccaggctggagtgtgggggcgcaatcacagctcactgcaacctcaacttcctagactcagcctctcaagtatctgggaccacaggtgcctgccaccatgcctggctaattttttgttattatttgtagagataagggtctccctgcattgcccaggctggtctcaaactcctgggctgaagtgatcctcccaccttggcctcccatagtgctgggattacaggtgtgagcttctgcacctggccttgggtgacattttagaaatcaattttgaatttttaaaaactcatcttgtgcttccaaaaaaaaaagacatattaatgtgctgcaaagtccactttattaaagactatttcatcattccattgattacccatggcacgaaacattcttccatgttgacgttagacatagaaattgaaacacagatgactaaacttactgtttcaacaaaatgtgaatcaatagattatttggataagagcaagagatatcccctacagcagtactatccacaaaactttctgtgatgatgggaatattccacgcctgcactgtctgattcaacagcttctagttccatgtgatcactgagcacttgaaatgtctctagtatgcctaaatactgagttttatttatttaattatctaaattt

SEQ ID NO: 2853 - DNA, 752 bp, Homo sapiens
  misc_feature (101)..(101): n is a, c, g, or t
atcatagaggctcaaccaatataggatatagtaaatagcataaattatttcaaaggcaaagattgttagatcagataaaaaggataggaaaatggtctgtntgctgcttgcccagagacataaatatgaagatatagaaaggatgcaataaaaggttatatcagctgggcatggtagctcatacttgtaattccagtgttttaggaggccgaggtgggaggatcactagaggccaggagttcaagaccatcctgggcaacaaagctggatcctgtctctacaaaaaatttttttttagaaaagaaacaactttgggaggccgagactggcagatcatgaggtcagaagatcgagaccatcctggctaacacggtgaaaccacatctctactaaaaatacaaaaaaattagctgggcatagtggcgggcgcctgtagttctagctgcttggaaggctgaggcaggagaatgtgaacctgggagacggagcttgcagtgagccaagatcgtgccactgcactccagcctgggcgacagagcgagactccctctcaaaaataaaaaaaagaaaagaaacaactgtggatggtggcatgcacttgtattttcagctactcagaatgcagaggtgggaggattgcttgagcccataagcctgggagttcgaggctgcactgaactatgatcacaccactgtactccagccagagagagaccctgtcaatcaaccaaccaatcaaaaaaaaaaaaaaa

SEQ ID NO: 2854 - DNA, 145 bp, Homo sapiens
tttttttttttttttgagacagattctcactctgtcgcccaggctggagtgcaatggtgcgaccccagctcactgcaacctctgcttcccaggttcaagctattctcccatctcagcctcccaactagctgggactatagacata

SEQ ID NO: 2855 - DNA, 688 bp, Homo sapiens
ttttttttttttttcaatttcaaaaacatttattgtgtacctattaaatacaaggtgttgagagccacatagtagaattagggataggggccctagagatgtggtatctagcagagttgatccaaggctcagctgggaggcagggggtgggggatagcgcccatactgatctcccctcctgggcagtactggtgcgataccagcaggaggatggcaaagtccacgccgtgaacctacagcaagcgggcctggctgatgggcgcacacacacagttctcctgcgactccgaggtccctccagacccagccctgccctacatctctacgtggactgcaaactgggtgaccaacatgcaggccttccagcactggcccccattcctccagcggaggtcgatgggctggagattaggactggacagaaggcgtatttgaggatgcaggtgagccgggaggagcctctgagttcctcttcaaccagatcctggtggagctgcgggatgatatacgagaccaggtttggggtgggctggcgaagggtggcactgaattctggggtagggtggcagatgtcaaggtgctgactcctcccatccttctaccaggtgaaggaaatgtcccctcatctggcagactctctagtagaggccaatactccaaatcaggaggcaaaactcgtgccaggacc

SEQ ID NO: 2856 - DNA, 337 bp, Homo sapiens
tgtttgacctccgatgagtagtgacaccgggccgatccagcctccggactctagcctagtccgcgggacggataacaatttcacacaggaaacagctatgaccattaggcctatttaggtgacactatagaacaagtttgtacaaaaaagcaggctggtaccggtccggaattcccgggatgtcaacccaacacaggcatgctcataaggaaaggttaaaaaaagtaaaaggaactcggcaaatcttaccccgcctgtttaccaaaaacatcacctctagcatcaccagtattagaggcaccgcctgcccagtgacacaccaaaaaaaaaaaaaaaa

SEQ ID NO: 2857 - DNA, 704 bp, Homo sapiens
tttttttttttttttttttttttaaagaaaattgacttttgtaagaatttagccagatgttttgtaaagtatcctgtattctggatttgatggtttcctcatgttatgctttaacttgttcctttctctcctatatttcctgtagactggaaatatgttgagaggtttgattagatgcagattaaatattttttggcaagaacacctcagtggtggtattgggtacttcatattgcctcacgtcagggagtacgtcagttctaggtgaagcccacttcactcatagccttcccattattagtgaagccaagttgggtctcttggaggtgactgccagcgttctccaccataagggtgcattattagttttacatttcctaagtaatctatctccagggtgatactttggcactgtgtgaatattctgttcatgagcaacctttcaactaatggctttggcatgcatttaatgattcttgcttaggttagttattattgcaaaatgatgattttacgttctttcttctgtatttattagtcaacaacaatctgtagaagagtttcctacctaccccttcccttctctcttgtctggatattcctgtggacatgagtggtttccatcacttacagctgttaattattcacataatccaagtttgtaccatatttgcccagtgagagccttgacatgaacccatggg

SEQ ID NO: 2858 - DNA, 141 bp, Homo sapiens
gtaataaaaatttcaacaacgagtagataggttctgtgggccatttcattattttattattgtgtgtttgtatgtgtattcccttgagatggtgcgcaggtgggtgtcagcagaggagacagcacaggaccctcagatgcc

SEQ ID NO: 2859 - DNA, 570 bp, Homo sapiens
ccttccctgccctcaggtcacctcatcctaacccgaatcctgaagcagcgagagagcggcgactgttcacaggtctgcagcccggacccggcgtcgggacactgaggcgttcgcgggagaggtccttgtttctgacacctgtgggatgcggtggggagagcgacaggcacagggaccggcgcgggctatggcctggaggacagacccgggaggatggaacctggggtccacaggcgcctgtagggaacaacgtgtgaggcgaagcttctcctggaagagcaggctgggggctgtgtattcgctgtgaagacgctagaagccatggagagtttcgaacgaaaggagggatgcgatccaagtccaggctttaaggtttcccaaaggccaaaggacgaacatagtagaggagatgaggaccttagcggttctgggaggttgactcctttgtctgatagatcacatcccgggaattccggacggtaccaggacatgacttaatagtacaaacttgattctatacgtgtcaacctaaactaggcctaatggtcatagctgtctacatgatgctga

SEQ ID NO: 2860 - DNA, 639 bp, Homo sapiens
tttttttttttttcccgaggcaaaattttctatgttgccaggtagcctgcttttaatgattgtactttgagtggatataattttaccttggattgttcctccagattgtttttccagagctgaaaatagtcaaggagctaacaactttattgatgccttccagagcagtttggataatttggagtcataaaatgagtggtggaggggcgggccctgaactaggtaaactaggtgaattgaactaggtaaaatttaatttacctagttcattaaattctcactagcgttagtgagattgtaatttttattggcagttaactgagggatggctggggaactgggaaagtgctgaggccccaaagggctttgttgccgattatgtaaaaagtgatggaaaaaagactccagaaaaaataggaaagaactctccatccaaggcacttcagcatatgaagctccaacctctgttccttgtagtcagccagaagccctgctggtgcgtgagggagccctggaccagtgtgtgaaatcataatgggatttactagggatagtaaaattgataggatcagggatgttaatcatgttaattgtttcaggcacgagatggtcaataaggttgtggtgcttgaattaggc

SEQ ID NO: 2861 - DNA, 739 bp, Homo sapiens
tttttttttttttatcagtacctctgaaggctgcccctgacagtgtatccagtacacataagtagtcacgtccttcaacattctttagtgaggttagagtaagttcagttttcctaccacaggcaatcaccaatattttaactacctgctcaaatatctgaatccagtagatttattcttgcatccttcctcgcatcttatataatgtcagccacatattatactctcactaactacatgctaaaacgcaataaatatctctcataaacatgggttcagcttggtagagtcaagaacttccctctcttttttcaatttttattttagatttaggagttcatgtgaacttttgttacataaatgcatgtcacaggggtttgttgtacatattattacatcacccaggtattaagctcagtactcagtagttatctttcctgctcctctccctcctcccaccctcccacctcaagcagaccccagggtctgttgttttcttctttgtgttcttaagttcttatcatttagctcccacttatgagtgagaacatacagtatttgctgttttctgttcctgcgttaagaacttccctctgttttggctgactttagagttttctccttcttttttatccctttttccaatttaaattgtttgcccagcacacgacgtaagctgacttgatgggcattgtcttctcttcccacttcttagctcaccaagtgatggtagttttcg

SEQ ID NO: 2862 - DNA, 729 bp, Homo sapiens
tttttttttttctttaaactgctattatgagcctaagttaaacaactttgcctaattctatgttctgtacaactatgttgttgatgctcatttttattataaacaatccacccaaatttgcagcagtggctttgaaaaaatccctaattaaaataaatttcaaggttaagctatttttattgatgtctgaaaacaattaccagtactcatggcttttaaaataatgacagtgtgggaagcatatttcaaaaccaggaaagcagaaatttgtgtttatgaagccaaaagtagtcttgcaatgctttggaatatgcctggtaattaattatagatgatatcatatgaaacctcaaagattttggtgggagatggaaacaaaggggccttatgcatttcatttctgatataatccttttgctgctagagggaattacgatttaataaaaagcaataacaggaggatgtactctaagaatactaattaatacctttagctctaccagaatgagattctgtaaaaaatggtgggttgtcagttgccaaatcataaaatattgcaggcagggaaaaggcaacatactctttcacaatatggcttgttatgttaacaactgttagtggtagggaatttgtactcgttaaatcatttgcgttttacatcgctgttgtaattacaatttaacagatggttctgaaaaagatagtgtgtcttagcattaaacctggcaa

SEQ ID NO: 2863 - DNA, 627 bp, Homo sapiens
ttttttttttttatttttttttttttttttttttttttttttcggtgatttcactgtttaaaatggcccacaggcatagggctaaattgctgtatagtattcataagtgcaagaaggctataatgtgccttacagagaaaatatgtgtgttagaggatcttgggtttaagcatgagttatagtgctgttgggttcaatgtacatgaatcaataatatatatgaattaagtctttgtgcaaaaacacacataacccaataaagaaccagaagcttgcaggaacctaaccctgtatttctctaggagcaatggtttcatattcactaagagaatgtttgtggtgattttatacgaacattaccacaaatgacaaaaattgactgtattactgtatatccatctgtaatcattctttcctcaactccagtcaaagtttccaaactcaacatgtctttgtaatgactctggtgaaggtcaccaattacttattgcattgccagttaccaaagggctgaagaatctgtcttcttccctcatcaaatttgactaccaacaacttcctacacagtagaccacctactttattaaacacttcttagtcatcctcttcctcaaaaattacactatc

SEQ ID NO: 2864 - DNA, 686 bp, Homo sapiens
tttttttttttttttgtctattattgttccttttttaacttaaaaaaaaattctgtgctttatgaatttctgtttcaaggtgtttttcccatctccaaatgcttatttgaaaatgtttcctttcctcttggttcatttcttctggtgtgtgtgtgcgcgcgcccgcgtgcatgtgtgtactcgggtctcattttctgctttcttcctgcagtacctcgtttatgggagatgcacttcgcttttcttatttttttagtagagagggggtttcactggtttagccagaacagtctcgatctcctgacctcgtgatccgcccacctcgggctcccaaagtgctgggattccaggagtgagccaccgcgcccggccgtccactttgcttcttgcagaggctgatggtttgagtaatttccgagattcatagctcgagcgcgccctgttctgtctatgcagtgaagggcagctttttgcatccgcggctttttgttggcaaggaggaatgtgcagtggccagatttgtttcttccccttttgttgctgttgttgttgttgctgctgctgttattgttgttgttgttgtattttattttgtagcatcctaaagtgtcccctccttctatttcttatccttatccaggtagggtttagaaaagctaacttaaggggcagggagacagagaaag

SEQ ID NO: 2865 - DNA, 82 bp, Homo sapiens
ggttcatgccattctcctgcctcagcctcccgtgtagctgggactacaggcgcctgccacctgctacccaccaccacacccg

SEQ ID NO: 2866 - DNA, 757 bp, Homo sapiens
ataagagaggtcccaaggaacgccataggacttccttgacgtcaatggtgaagattacggtaacggccacttggccagtacatcaagtgtatcaatatgccagtacgccccctattgacgtcaatgacggtaaatggcccgcctggcattatgcccagtacatgacttatgggactttcctacttggcagtacatctacgtattagtcatcgctattaccatggtgatgcggttttggcagtacatcaatgggcgtggatagcggtttgactcacggggatttccaagtctccaccccattgacgtcaatgggagtttgttttggcaccaaaatcaacgggactttccaaaatgtcgtaacaactccgccccattgacgcaaatgggcggtaggcgtgtacggtgggaggtctatataagcagagctcgtttagtgaaccgtcagatcgcctggagacgccatccacgctgttttgacctccatagaagacaccgggaccgatccagcctccggactctagcctaggccgcgggacggataacaatttcacacaggaaacagctatgaccattaggcctatttaggtgacactatagaacaagtttgtacaaaaaagcaggctggtaccggtccggaattcccgggatcgcgccggccgggcgcgacccgctccggggacagtgccaggtggggagtttgactggggcggtacacctgtcaaacggtaacgcaggtgtcctaaggcgagctcaggga

SEQ ID NO: 2867 - DNA, 680 bp, Homo sapiens
cttcagtgggttcttgagcgtgggtagggatatatgagtatcgtatgtgtatgatatatatcggagagagttacaaccagaagacccacatggttttggaagaggcctatgattgacagacaggttgtacagagccttaggcaaacctcactagggaaataatgacacatgccttgaagttttggaataaagtcacgccttttttttgttttttgctaacaagtattctctaaacacctgactctaggacatgcaacacagccgcccattctaaataagatgttataacatttaccaaatttcaaaattggacatgcacagtagaattccattgtcaaatggaaacagtagcctggggctgtgcctcacacctgtaatcccagcactttgggggcccgaggcaggcagatcacttgagaccatgagtttgagaacagtcttgccaacatggcaaaaccccatctttactaaaaatacaaaaattagttggatgtggtggcacatacctgtagtcccagctactggggaggctgaggcacaagaatcacttgaacccaggaggcagaggttgcagtgagccaagactgcgccactgcactccagcttgggtgacagagtgagacactgtctcaaaaaaaaaaaaaaaaaaaaaaaaaaaaaaaaaaaaaaaaaaaaaaaaa

SEQ ID NO: 2868 - DNA, 745 bp, Homo sapiens
ttttttttttatctcatataggatttatctctgaaagacaagtgttataaagttcttgggaacactttggctctctttcatatttgggcattattttaaacttaaaagttaaatgattaaaagctgtattatccaaaaaactgtgtttgataagagttgaacctatttgtttgatatgcatcacaatttcattaacctattaagatacaagtgatataaaaagagattaattgacccataaccatatgcttagtacatactttttctccaagaagcaaatagaagccataagttagaggacagacttgtagccattaatagcacagataatagcaatttgtaacagataacatatacaccggtgtcattaactatataaccaacagagaaagagctacggttctacaaaaaagcaagaactatggtttaatgatgaagaaatactgtgcagtaaccacacttcagaatactgggctctgcagtttgaatttatgatgatggaagaaccaaaaagagaaaaatgaagtgcctacctcccagcttagacagcaacaactaaatttagatatgccaactgtatctaaaataaatcctaaatccagtaaagagcaatagaaaccaatcagggtagcaaacaaattcccaaacataatttcatttcataaaaatattcctatatattcatgagacagtattgaagtatacagaagtgctggcttgtcaaaaccccttatactcagatatc

SEQ ID NO: 2869 - DNA, 593 bp, Homo sapiens
cagaggtgggcatggtaacactactgaaaagttggtggtgtgccatggacaagggaccgaccgcagagtatgtttgctgaggaaaatagaggcgaggatagagcaggcaggggaagggaaatgagacatggagataggaggttaaagcagttgggagtccatacacagcctacccaacttcctgagaactcttagagaggaaaaggcatccttaggcatccttcctgtgaagtttgcctattccgtgatcacgctgagaagatgggaactctgaagtttgcttcacaggaaggtaaaatccttaaagggaggcaccttgctgtgccactgttcagttttactataacatcaatctttttttagtttttattcccacctcaagaggctgagttgaatactattaggcggggaatggaaaattatataggcacctaagtttcctttctagttatggtcagtgtttacactgagtattcatgacagacaatgcaccaatttttttaataggctatgtatgtcaaaaaggatgttcctttgtggcaaaaacatggacggaacttctgaaacatgctgagagagaaacccataacggt

SEQ ID NO: 2870 - DNA, 740 bp, Homo sapiens
ttttttttttttttgcatcattcttaaactctcattaatagtgttgaagttcctagattaacatcatgttttcatgttttccctcatattttacatttctttgtatatttactatgttctgggtgatatccttctaaactttctaatacactgttttattttagtaagatattcttaatttctaagaatatttcttattctatcattgctcctttttcatagcagcatgttcttgttttatggaggcagaattctctcaacactaagaagcgtactaacttgaattttcaaacttttttctgtatctgataggatctcttttcttcagaataaatgttctgccttttacaaatcttaatatttcctgttaatccatgttcttggttttcctcaaatgtctaataatctttgttaactgttcacatttatgtgcgaagggcaatgttaggatatagggatcctctctttatctgttctctggcttctcatgcaagtcactgggctgactctggcttccatggaagtgaagagatcgtgtcaatgtatggccttcttttagggggcataagtagagaacacctccacaattgccaggataaagcatatttactctctgtgttagtggtgtgggaagttcttcactggtacttccctctagtagtgcttccttctcttttctttctctggagtacactcaagatctgctctgctcctttcaggaacccttccagcagaactcc

SEQ ID NO: 2871 - DNA, 700 bp, Homo sapiens
tctgtttgtgcaggaagtggataaactaagatcaaaatcggtacaattttctgacagatgtgaggacaatcatttcatttttgacatttcatagggaacaaactttttttcttaaaaatattttagaaatcagagaagtacattattttattgtgtttaaactgttagaaaatcttccaaagtccgcaaaacttgtaaattttaccataccttatcattattactctttccaccatatactggttttgtcagttagccagaaaaagaatttttaggggtagatgctattggttaaaagaaaagagcagagcaaaataaaaaacagtgtctatggtgacaaaggtgacctcgttgaccagtcgttagccatcttctcaactaggtcttgaccttgacttagtcttagcaagaatcctgataagtcagttaagaaacagtcccctacccttgatatatatcagattgctcatccctgaccattgacatctaagtcgttaccctacctttaataagaatcctgctaagagtaagccggttgaatatcaatgcctctgtccttcacttctcctcttagtaattttacatctacttaccccctcactctggctataaattttcagctctttgctgcacttagatttgagctcagtatctctctcctattgcgatagtcttacataaagtgtgtcttatcattttc

SEQ ID NO: 2872 - DNA, 697 bp, Homo sapiens
tttttttttttttttttttttttttttttttttattcctgcctagatgttctatccattattgtatttggggtactgaagttggctactattattttagtgttactgatttctccccttagctttgttgatattaactttatatatttaggtgttctaatgttgggtggatatatatttacaatcttcccactgaagtgaacttttatcattatataatgaccttagtctgtagtgaaaatttttgatttcaagtctattttttctgatctaagtatagatacccttgctcttttttggttaccatttgtgtagagtatcttttcccatcccttcactttgagcctctatgtatctttatatctaaagtgactcccttataaatatgtactgatgagtatcttttatgcattgtgccactctatgtcttttaattagatagtttaatccgttcacatttaaagtcattgttgataggtaaggagtaacttgcattttgttaattgtttttccttcgttttgcagatctttttttttttttttcctcccttggctgtcttcttagttgggttatttcttgtaacggttgggtttcatttatttttcttcacattttgtgtatctcctataagttttacatttgtggttgccaatttacatcttttataagagctgtcttaagttatcaccttttggat

SEQ ID NO: 2873 - DNA, 650 bp, Homo sapiens
tttttttttttttttactgttgagttttgagagccctttatatactctagacactagcctttataagatatgtgatttgcaaatcttttctcttggtccatagcttgttttttcatcctcttaacagatcctttgcagagcaaaattttttgattttgatgaggtccaattaatcaaatttttgcttcaatggatcatgtttctggtgtcaagtctaagaactctttggcctaaccctagatccaaaaattttcctccttatattttttctaaaagctttatagttttacacttaagtctgtgatccattttgagttaattttgtataaggtgtgaggttttagttgaggctcatttttttgcctgtggatgtacagttgcttcagtcccatttgttgaaaaggctatcaaaccttcttccactgaattgcttttgcatcttcaataaaaatcaactgggcgtattttcatggtcttcccacccttctttgtgaagcatattacactgttctgcagctttatattgtttttgctttttattttttagagccaaggtcttgatctgtcatgcaggttggagcgcagtgtgtgatcatagttgactgcagcttcaaacccttgggcttcatatgatttcttcctggcctcag

SEQ ID NO: 2874 - DNA, 681 bp, Homo sapiens
tttttttttttttaaatggaggagttgtttgaatttcttgtatatgctggatattaatcccttttcagatgaatagtttgcaaatatttttctctcattctgtaagttgtatcttcactctgcttgatagtttcttttgctgtgcagaagctttttagtttaatataatcctatttgcctatttgttgtggttgtctgtgcttttgaggtcttagccatgaaatctttgcctagactgatgttttgttttttctctttatttttttttctagcagttttattgtttcaggtcttacatttaagtctttaatccatcttcagatgatttttgtgtatggggagacataggtgttcagtctattcttatgcatatcgtgaatttcaaattttcccaaaactatttattgaagaatttcctttccccagtgtatgttcttggcacctttattgaaaatcagttggctataaataagtgaatttaattctggtgtcattattccgtttcactggtctatgtgtctgtttgtatatccttaacaatcctgttattatagctttctaatacattttgaagtgagatagatgatgccttcagctgtggtcttttgctcagaatggtttggctattctggctctttttctttcttctttctttgtccgacaccagtattatgatcgtct

SEQ ID NO: 2875 - DNA, 679 bp, Homo sapiens
tttttttttttttgtattgctctataggtgtttgctaatctaaaaatgtatttacttgcttagttttctcaaatcaggagaaatctctataggcttgatgtttacagtagacgtggaaacattttctttgttccattttactcgctatctggggactcttagatatccttttcagaacaggagctggagagggatttatcaagtcttggacatagaatcacctgctctgaatcccctaaatatatgtgtcaaaggatatacttctgtgagagtagcagcaggccccaaatggcctgatgcttcagaaaggaatcccatactcatggcggggtagatgcgagttgtctctgatcgagggtggagatggatgacactctcagatattttcccttgcctggctcaggtattatgcgtcaaggatccatttatactttgttttatggaaaattatcttgggtttagctaacatttctagaatatacttttgaaatgttgactttctttttctatatgctgggttttttctttaagagtaaaatcattaaaatgaaaacaaaaaaaactagtaatagtgaatctgatttttgagtgattttaagtgtttcagctttctcgtgatctcttttacacatccagataattcctttttaaaaatgtccagtttttgtgtgtgtgtttt

SEQ ID NO: 2876 - DNA, 659 bp, Homo sapiens
tatgcccagtacaggaccttaggggactgtgctacttggcagtacatctacgtattagtcatcgctattaccatggtgatccggttttggcagtacatcaatgggcgtggatacggtttgactcacggggatttccaagtctccaccccattgacgtcaatgggagtttgttttggcaccaaaatcaacgggactttccaaaatgtcgtaacaactccgccccattgacgcaaatgggcggtaggcgtgtacggtgggaggtctatataagcagagctcgtttagtgaaccgtcagatcgcctggagacgccatccacgctgttttgacctccatagaagacaccgggaccgatccagcctccggactctagcctaggccgcgggacggataacaatttcacacaggaaacagctatgaccattaggcctatttaggtgacactatagaacaagtttgtacaaaaaagcaggctggtaccggtccggaattcccgggatggccgcccttttttttttttttgaatcttaaaagtcttatatttttattttttttattatactttaagttctgggatacatgtacagtacgtgcaggtttgttacataggtatacccgtgctatggtggtttgctacacccgtcaacccgtcatctacat

SEQ ID NO: 2877 - DNA, 746 bp, Homo sapiens
tttttttttttttttgagacagagtctagctctgccacccaggctggggtgcagtggcgccatctcggctcattgcaacctccacctccctggttcaagtgattctcctgccagcctcccaagtagctgggattacaggcgcccgccacgaggcccagctaatttttgtatttttagaagagacagggtttcactgtattggccaggctggtctcgaactcctgacctcgtgatctgcctacctcggcctcccaaagtgctgggattacaagcgtgagccatgcgcccagccaaatccctctaaatcttttaactagcaaagttacacaacaaattcaaatttcaaaaatccaaggaaacatattaagatttgcttagcatctacacaatggcacctgctaaatcaacaggtgaagtttctctataacatgcaatattctttctaattataccacacaattttccttttaaaagttccatggtatagatgttaatatatcatcatgcagagaccaagatatatttttacattgcaaaaaccacaagaacaataacatcctgtatcataaatctgatatttaaagctgatatgataaagaagattaaatatccactggttacgcagttgccttcttagaatttagaaggattcagcaagataatttgaacgggtcttaagtctgttgtacaaaactaaccaggacagtatacacagatgtagccctttatcttcatgaattcttagg

SEQ ID NO: 2878 - DNA, 647 bp, Homo sapiens
tttttttttttttttatttattttttgctcagtaggaccgtaataggtgactgattttcttttgctgtgaggctacaagaattgctggaagacaacatttttatttcgtggaaatttgtgttgtgtttctccttggttgttaatgctttgcatttacatggtgaacatcttattatcagagctggcctgtgaggagggtagtgggggggcattgatgttcccgtttctgagtgaggagacctatgtcggggccttggtgacctcaagccgaatgctcaaactgctactgctactcctaaggttgtgccattaggagtcacacccgtttggtgatattcaaaaggatatgtcattttattctcccgtggttaaatatatggtgagaggagagcaggcatgtttatgagcccagattgtcccataaaaggctcctgtttaaaaacactccagccccctcccattactggaatgtctgatggagctccgggagatcaaaacaacaaaacaggctctggtagggtgcagaggtcctggtaaacacaccctctgctggaaaacaggcagaagtttccaccagtgttgacctgcacttggtttgcctgggctgaagttaggagactgcgtagaacaaggaacactgtgttatt

SEQ ID NO: 2879 - DNA, 726 bp, Homo sapiens
  misc_feature (617)..(617): n is a, c, g, or t
tttttttttttttttggtctacatcagttggtgtttccagttggctgatttcttgaactgtcagactgggatatataaagcaaaaataaattccagggaacttactaccctgccttccgcaggcccaaggtccctagccagtctgcttcttcactacacctttcagagttttatgcttgttttctgtagcatgtctagggtttttatttgtacttagcaagaggaataagggaaagtaagtatactcccatcagaaacagaaatctctgaattttctgattataaaatggggataatacctactccatagaatcattataagcattaaatgagatactgtaatttatttatttatttttattattatttttttgagacagtctcgctctgttgccaaggctgtagtgcagtggcgcgatctcggcttactacaacctccgcctcccgggttcaagcaattccccctgcctcagcctcccaagtagctaggattacaggtgcccgccactacacccagctaatttttgtattatttattagagacaggttttcaccatgttggccaggctggtcttgatcttctgacctcaggtgatctgcctgcctcagcctcccanagtgctgggattacaggcgtgagatactggtaatgtatgtaagtgtttactactactcttggtatttgtaagtgcctacgaaaaattaccttattcttaatttggccat

SEQ ID NO: 2880 - DNA, 673 bp, Homo sapiens
tttttttttttttgcatttgattggtagatcttcctccatccctttattttgagcctatttttgtctctgcatgtgagatgggtttcctgaatatagcacactgatgggtcttgactctttatccaatttgcccgtctatgtcttttaattggagcatttagtccatttacatttaaggttaatattgttatatatgaatttgatcctgtcattatgatgttagctttttgttttcctcgttagttgatgcagtttcttcctagcatcaatggtctttacaatttggcatgtttttgcagtggctggtactggttgttcctttccatatttagtgcttccttcaggagctcttttaggactggcctggtggtgacaaaacctctcagcatttgcttgtctgtaaagtattttatttctccttcacttatgaagcttcgtttggctggataagaaattctgggttgaaaattcttttctttaagaatgttgaatattggcccccattctcttctggcttgtagagtttctgccgagagatcagctgttagtctgatgggcttccctttgtgggtaacccgacctttctctctggctgcccttaacattttttccttcatttcaactttggtgaatctgacaattatgtgtcttgaagttgcccttctctaagag

SEQ ID NO: 2881 - DNA, 663 bp, Homo sapiens
gcaggaaatcaacgtattagtcatcgctattaccatggtgatgcggttttggcagtacatcaatgggcgtggatagcggtttgactcacggggatttccaagtctccaccccatgaacgtcaatgggagtttgttttggcaccaaaatcaacgggactttccaaaatgtcgtaacaactccgccccattgacgcaaatgggcggtaggcgtgtacggtgggaggtctatataagcagagctcgtttagtgaaccgtcagatcgcctggagacgccatccacgctgttttgacctccatagaagacaccgggaccgatccagcctccggactctagcctaggccgcgggacggataacaatttcacacaggaaacagctatgaccattaggcctatttaggtgacactatagaacaagtttgtacaaaaaagcaggctggtaccggtccggaattcccgggataaaaaaagggagaaaggaaggatggacggaaacctcgacttggaggtgccagggcagcaaacatccttgttctgatgcaagcaggccaggcctgtgggagaatgagccagagaaaagctaagtcaaatcccagtggtgtgtgtcctggaactagagcccatcctggagctcagccaagaacactaaaaaaaaaaaaaaaaa

SEQ ID NO: 2882 - DNA, 692 bp, Homo sapiens
aagcggtagttgctccttccagatggggcaagggctccccgtttgccacagtccccaccactccctgtcgccctccatcaggaccacttcactcaattcttttttttatttgtacttcattcactcaaccaagatttattgagcacttactatgtgccagaaagctgcaaacaaaactgacacaaattcctccttcatgcaacttatattctggctggtgaggcaatgaagaaaaagaaggaaaagcataaattccagagggtggtaagttctgctgacagtgaaaatagtgctgcaaaggtggagaaggcatgctgggtgtggtcaaggaaggccttaggaggaaggtacatttgagcaaagatctgaagctggtaaggacagcaagccttcaggatatctgcggaaagaacagtccagccagcaagaacagcaagtgcaaaggtcctggggcaggactgctccttgtgtgtctgtgaagcggcaagaaggccagtgcagctggagaagagtgagtgaggggaagggggtggaaatgaggtcagagaggggatgaggtattcatcttgcagggcctcataggatctttggcttttactctaagtgaggtgggagccgtggaggattcttgagcagaggcaatgttggttgtatgggtgataaactccctctagctactgtggagactggac

SEQ ID NO: 2883 - DNA, 703 bp, Homo sapiens
tttttttttttttttaatacagaaacttcattgaaaaaacctagccctgtacagctgcccttttaaagaggtggccattgcagggtctctgcctccccagcaggtggcagatgctcccggccactcgtttaaataactgtcccctggagggggccggggtttgaaggcagggcccctgccaccctcctgggggacacccgtgcatgtttacgccttttctggttgtgtcagtggccggagcatggcagctgggcatcaataaacacctccgaggaagctggactcgtgtgtgctggcacggggagggcgccgggcggggccgtggtgggcatggcgtgatgtcacggtcactccgggatgtcgatcaccaggtcatcgtctccatccaaggcatcgtccccgctacctgcatcgctgaacatctgccgagggaccgtgctcaggatcgtgggggggggcatcttagggggtgggaggggggtcagggttgtcccgaccccagccccagaaccccggccagggaaggtcagcggccctcccacagggcagtcggggggtcccaccgccatcttgagtttccggggcaggcggggccgtttctcccgcttgggcctcaggggactgggctcgggcagctgcagggccaggtagtcagaaggaatggggggtacgggaggaggccacgagctcagtaggggagggg

SEQ ID NO: 2884 - DNA, 714 bp, Homo sapiens
acctgtgatgcgttttgggcagtacatacatgggcgtgatagcggtctgacttcaccggggatttccaagtctccaccccatgacgtcaatgtgagtttgttttggcaccaaatcaacgggactttccaaatggtcgtaacaactccgccccattgacgcaaatgggcggtaggcgtgtacggtgggaggtctatataagcagagctcgtttagtgaaccgtcagatcgcctggagacgccatccacgctgttttgacctccatagaagacaccgggaccgatccagcctccggactctagcctaggccgcgggacggataacaatttcacacaggaaacagctatgaccattaggcctatttaggtgacactatagaacaagtttgtacaaaaaagcaggctggtaccggtccggaattcccgggataaaatatgtaatattgagaagtttttggaattttatagtcatatttattgacctggtggtagatccacctgtttgtggtacacacacacacacacacaaagaattgctgactgatgtttttaagtaagtagaccccactgagaaacaagaagtacacacacataccccacacaaaaaactgcaacataaaacgtgttgtgtgagcatggaaaactatagaaaggtagtaatctagctcactggagtagaattagatgttaggttggagacagaaaattattgttac

SEQ ID NO: 2885 - DNA, 730 bp, Homo sapiens
ttttttttttttggtgaattattcatcttttaaagttcaccttaaatgttttatccttggtgaatctttctagatgcttcttgggccagtggattttaggagagcgaggtatatgtggctgaggtacatcacaatcagcagagaagctttaaacactgctgagagtcactgtccctgctggcctgggtttcttctttattcactcttcctttttttgagacggagtctcgccctgtcgcccaggctggagtgcaatggcgcgtgatctcgtctcactgcaacctctgcctcccaggttctgtagcaggatgagccgcagacaaaactcctcagacacggagttaaagaaggaaggggtttattcggccggaagtatcggcaagcctcctgtctcaagagcctagctccccgagtgagcaattcctgtcccttttaagggctcacaactctaagggggtccgcgtgagagggtcatgatcaattgagcaagcagagggtactgtgaatgggggctgcatgcaccggtaatcagaacgaaacagaacaggacagggatttttacaatgcctttccatataatgtctggaatccatagataacataaccggttacgtcagggtcgatctttaactaccgggcttagtcaggcagccaggctggtttcgggtctggttctaagcgccagtacctgcttaattccttctcttactttactgagtataaactattg

SEQ ID NO: 2886 - DNA, 623 bp, Homo sapiens
tttttttttttttttttttttttttgagacagagtctcgctctgtcccccaggctggagttcagtggcgccatctcggcccactgcaacctccgcttcccaggttcaagcgattctcctgacctcagtctcccgagtagctgggaatacaggcgcgcggcactacgctcggctaatttctttgtatttttagtagagacggggtttcaccatgctgcccaggctggttttgaactcccaagctcaagcaatccacacgcctcggcctcccaaagtgctgggattacaggcgtgagccacgcgcccagcctcccttcccatttctaaggagcaagaaatagaaaaattctccctttttacatgtagagcttcttaaatatgatcagtttcatgtttgccatcaactctacaccaagcagctgaatgaaatattaaaacatgcacaacatggttcttcatttaagaaaaccctttcgtactcagtatacgacgataaaaatttacagcatctatacagatagttaacagtaaataacttgacgggcaaatgactatcatgctaatctgctattaatcctccaagactttcaaatgcagaaaaacatgctggcatgtgtggtaaac

SEQ ID NO: 2887 - DNA, 700 bp, Homo sapiens
tcaccagtccctcccagtgaacatggggagtattaaaattcatggtgaatttgggtggaaaacagagccaaaccatatcaatcaccaagacaagtgtagctttatcacatatatctaaacatcagatgactggctgttttctctgaatgtcttggtgtcaaataatgtttacttagagattgcttgaaaatgacattaataaaagtcacaaatctatttgttttacccctgatctcatttcattgtcactgttgttgtttttctctccagatccccatgtgagtacatgacccatttaatgcagcttgcaaaattcagatgccccaaacttgaatccccatgttcttagaaatagctatagcaggccgggcgcggtggctcatgcctgtaatctcagcactttggcaggctgaggcaggcagatcacgaggtcaggagatcgtgaccatcctggttcacacggtgaaaccccgtctctactaaaaatacaaaaaaaaaaaaaaaattagccgggcttggtggcaggcgcctgtagtcccagctactcgggaggctgaggcaggagaatggcgtgaaccaaggaggtggagcttgcagtgccaaaatcgcggcactgcactccagcctgggcgccatagcaagactctgtctcacaaaaaaaaaaaaaaaaaaaaaaaaaaaaaaaaaaaaaaaaaaaaaa

SEQ ID NO: 2888 - DNA, 358 bp, Homo sapiens
tttgtcctccatagtagttcgccgggtccgatccatgcctccggactcgtgcctagccgcgtggacggatcacgatttcacactgggtacagctatgaccattaggcctatttaggtgacactatagtacaagtttgtacatataagcaggctggtaccggtccggaattcccgggataatgacttgaaatgacacaggtactctcatattcaacttgtacaagtacggaagtagtagcaactttgtcaaagttggtttggcaatgaaaagactgaagatagttttgctgatgatcaataactccaattctaggaatctgtcatcagaaaataattagaaatgtaggcaaatgtaggc

SEQ ID NO: 2889 - DNA, 726 bp, Homo sapiens
ttttttttttttaaccagcaacaaagcccagtcaaattctttattatacaacacctgtgaactccagaatacaagtgcgtaaaataaatcagcagcagcatcaagactagcatggtatcagcaagggagggctcagagaatccagatatcagactgccagcatcctgatcatctctaaaggtctcattagttgtagaacacttagagatcaatttgagagcagctaaaactgagaggcaactttatagacttcagaaaggttggatagtgctggggtgatctagccctgtgaactctcaaactaactgatactcctttgcagaacaaaacttcttactgaagagaactagagctacatgataaaggagatcataaaatatatattctatagttataagtctgacaatgtaactaaagcacatttctctgaaaatgcaagaagggagataatgcaagtaaaatagaatatatttactgattgtcctataggtattttcaggaacataaaaagttattacttcatattagatgtttgggagaggaaaattagagagatattcaaaattatttatagtaggagcccatagatagtatcccacaaaagctattaacggacataacgatactaatattagatattcggcttaataatacacttcgaatagagattagagtcttcctaaataccaaaagaatcccaagacagagacggcgggcaagaaatca

SEQ ID NO: 2890 - DNA, 708 bp, Homo sapiens
gcagtacatcaatgggcgttggatatcgtttgactcacgggatttccaagtctccaccccattgacgtcaatgggagtttgttttggcaccaaatcaacgggactttccaaaatgtcgtaactactccgccccattgacgcaaatgggcggtaggcgtgtacggtgggaggtctatataagcagagctcgtttagtgaaccgtcagatcgcctggagacgccatccacgctgttttgacctccatagaagacaccgggaccgatccagcctccggactctagcctaggccgcgggacggataacaatttcacacaggaaacagctatgaccattaggcctatttaggtgacactatagaacaagtttgtacaaaaaagcaggctggtaccggtccggaattcccgggatatctttctgtttatgaccagatttaaaattctccagaattttgaattaggagatcaaaaagtaaaacaaacaaacaaacaaacaaaaacagggaaaattgttgcagtatggtgcataccaccatgtagcagctacatggtgaattgaatcctgcagctctgagggtcccacttggaggaattccatgttatgtttcctctcctttgcctatttcccagatgataacattgaggccaagacgggcaaaagtctgacaccaacaaacaaacaacaaaaaaaaaaaaaaaaaaaaaaaaaaa

SEQ ID NO: 2891 - DNA, 438 bp, Homo sapiens
ttttttttttttttttagagaggtgtttttattctttggggacaaagccgggtagtcctaagcacaagaaggctgagatgtgccttatgaagaaaatacatgtgtcagatgagttttgttcaggcatgagttataatgtcatggcagtgttaatgaattgacaatacatattaaataaacacaagtggaaatgtccacgtgtgttattcaacagaaacacacataaaacaaggatatatatcaattcattgatgaaaatactgtgactggaggcttgcaggaatctaaacctgtattgcctctaaaagcaattagtattaattaattcagctttcacagcaactttatagaacatcattaccgtgaataatgaggatagactattatgtgtgtgtgtgtgggtgtgtgtgtgtgtgtgtgtgaaaagtataataaagt

SEQ ID NO: 2892 - DNA, 690 bp, Homo sapiens
gttggtacaattccgccccattgacgcaaatggccgtaggcgtgtacgtgggaggtctatataagcagagctcgtttagtgaaccgtcagatcgcctggagacgccatccacgctgttttgacctccatagaagacaccgggaccgatccagcctccggactctagcctagccgcgggacggataacaatttcacacaggaaacagctatgaccattaggcctatttaggtgacactatagaacaagtttgtacaaaaaagcaggctggtaccggtccggaattcccgggatgtggaataagccaattttacgtcggtttgtaaattcatttcagcattactgactgcttatgtatcttgttctctgatcataaacctcagattcatctgtagatagtaatttgtatacacactgcagaaattcagtgtgtttctacagtatgtttttccagctgaggtgaggcgtgaggatggtttgaggccaggagttcaaggtcagccagggcaacatagtcagaccctgtccctacaaaaaatttaaaaattagcctggcatggtggtacattcctgtagtcccagtacttcaaaggctgagacgggaggatcacttgaacccagggagttgaggctgcagtgagctgtgatggtgccccagtgcactccagcctgggtaacagagtgagaccctg

SEQ ID NO: 2893 - DNA, 708 bp, Homo sapiens
tttttttttttttcaagtctgggttatatgctcatttatccattgatttatttcattggggcttttttgttgcaagtaacagaaacacaacttgaattagggaattcattggtccatgtatctgaaatgtccaagagttgtgctgactttatgcatgagtgtttccaggggttcaaacaatgtcatcaggactttctctcctcttcgaacttcaatttggattcattctcatgacagggtcctgcacagcacaggcaggataactactggccctgcaggctctcattcacccagcactagcaactgtagtgcaaaatattattacaatattcagactcaataaaaatgattttttaaaagatagttacaaagggcctttcataccatctcatgccccatacacaaaagaaattcaatagcagctaagctatttaattcctgtatctaaatgcccctcccaaaatatataatttcatagaaatagcttagtttgcatttatgatttttaaaaagatagttgcaaatggcctttcctaccatctcataccccatacacaaaagttcaatagaagctaaactatttaagtaattcctgtatctaaatgccccccaaaatatataatttcatagcaaatagctcttattttgcaagcgcagttcccagccctctgctcacacacagaatatttcagcataaattatgattta

SEQ ID NO: 2894 - DNA, 667 bp, Homo sapiens
tttttttttttttttttttttttttttttgagacaggacctcgatctgtcacccaggctggagtgaagtggcgcgatctcagctcactgcaacttccatctcctaggctcaagcgatccttccaccttagcctcccacgtaactgggactacaggctcatgccacagggccaggctaatttttttttttttttttttttgtagagatggggcttgtcatgttgtctaggctggtctcaaactcctgggctcaagtgatccgcctgcttcagcctctcaaaatgctgggattacaagtgtgagccaccgcacctggccgtttttagtttttaaattttatttatttatttatttgagacagtcttgctttgtggcccaggctggagcccagtggggtgagtgatcatggttcactgcagccttaacctcctgagctcaagagatcctcttacctcatcctgtcgagtagctgggaccagaggcgtgcaccaccatacttggctaatttttatatatatacttttgtagagatggcgtctcaccacgttgcccaggctggacttgaactcctggcctcaagctatcctcccactcagctccctaagtgctgtgattacaagccatgtgccaccgtgcccagcctggtataggtcttaacaacttaccag

SEQ ID NO: 2895 - DNA, 763 bp, Homo sapiens
tttttttttttttttgcatttatttactctgccagatgaatgtgggaatcagtgtgtcaggttctaaaaacatactgttgtaattttggtcaggattgcatcgaatatgcaaatcaagtttgggaaccttgggaacctccacaggtgtttggatacagttcttgcacatttcttgtcagctgcatgtctaggctttctgttcctctcgttactgtgactgggatcttttttcccctattgcactttctacttgctgtgactagtacatatatagaaaattgagtcagtgtaattcatgtgagtggcgtaacagtcttaaagtttcagtgctttaacacctgtatttcttgctgatggacaagttgctgtaagctgggccactttcatctcagtaatgccttagcatgccggttctttccactgcaaccgtgccgagtggagaatttctggactctcttccttaacattgctgactgcactctggccctccctttctgaatgcatctctttcttgtgatggttttccaagtggagctttcacagcgcatgctactaacctctgctcttctccagaatgacaaaagcctctggcgtgtgacctatgctccaagaaataaaaggcaaagtttcactagatatgtgctgcagaagtgttgatccaattttccagtcttacatatcatttgtcttacctcctggaaccaggtgctagaataatactatgtaggtaggttattatttttcaaaatcaatacttgtttca

SEQ ID NO: 2896 - DNA, 152 bp, Homo sapiens
tttttttttttttttaaacggtgaaacttttataataaattgattttattcgtcctctgtctttctttacttgtcatgcctcccagtctggtttcagcacccctcaactttcatttaagacacctctgtgttgataaactctagcagatatt

SEQ ID NO: 2897 - DNA, 705 bp, Homo sapiens
ttttttttttttttttttttttttttttttttttttttttttggagatgaggtctcactctgtcactcaggctggagtacagtgggacgatctcagctaactgcaacctctgcctcctggggtcaagtaatcctctccatctcagccttgaagtagctgagaccacaggcatgcacgagcatgcctggctaattttttggtattttgggtagagacaagggtttcaacgtgtttgcccaggctggtatcgaactgttgagctcgagtgatccacccacctcggcctcccaaagtgctaggattacaggtgtaagccaccacacctggcttttctgtataaattatgcagcctcagttatttctttacaacaaaatgtggattctaaaaaagttgaactaaaaaatagagtagaataatggttaccaggggctaagcaggggaaagggttgggaagatgttggtcaaaggatacaaaatttcatttagacaggagaaataagttcaagagatctgttgtacaacatggtgacaataacaatgtattgtatacttaaaaattgctaagagggtagatttaagtgtccccatcacacaaaaaattagtcatgtaaggtaatgcaaagctatacttaagccattccacaaatgtatacatatttccaaatatcatggtgtacaccataaatatatacaatttatttgtc

SEQ ID NO: 2898 - DNA, 548 bp, Homo sapiens
  misc_feature (18)..(19): n is a, c, g, or t
  misc_feature (27)..(29): n is a, c, g, or t
tttttttttttttttttnntttttttnnntttttttttttaggccaatagaacaagccattttcaacaaaaggacttgcaaattcctgccttagggctccttctgcacaggacagacctttcatcaccaacccaacttgtaatcttgggtaaagaaggttctcagctcattttcaagaagaaaaaaaaaatgtaagtaaaacaaaacagccacatcacgaagttgctccacataatgaggcctgctctgttgacctatcattaccctgggctccaggcaggcctgggctgcccggccaacctcccaccttatccctggccagtcaagggttggggtcaacagctgggcagcccagaggccaccacagtggctgtgaggataaggctgcttttcagggtctggccttgcctagagctgcttggctggatggtggtagctgaggaggaggagaagagtcctctgaggcctgccagctcagctaccctgggacattccaaatccaggcttttgcttgaactacacttaccctccctttcttttggggctcc

SEQ ID NO: 2899 - DNA, 746 bp, Homo sapiens
gagacacaggtcagcacaacattaaggacagaaaattcagaaattgagataaataatattgtaatgccatattttttgaaataaaaattaatgcaaaaaagccataatgagaaacagatcaaagttaataaagacaaggttccaggcagctggaattacattaaaatttttgatgtttttgttcaatgtggatttttaacattaattttattatttttaaaatgctgtttcttttgctttctgagtctcttggcacccccttaaattttgcctcactcacttctgctagagtctcagagggcgtttagcaaatggccagagttgtgtgtggtttgtggagttagactgcccgcattcagatccatggttggccaattcctagctgtgttcatttggggaagtcaattaagctttactgctttagtttcttctccgtaaaatagagagggctgaagttcaattcggtaaaaatataagaaggagccacagagtagagtagtgagtctccaataccggagcttttggaaggttctagtttaatccaaatttaaaatatctacaagattgacagcatttacttaagtaatcctctataaatataaattttaattatataaatgtgcacatgtaatcatatcatacatactgttgtttttagctcggtcttttagctcaatcccccattctcctcctatccctcaaccccgacatcattaccgggttttcctcttaaaaaaaaaaaaaaa

SEQ ID NO: 2900 - DNA, 678 bp, Homo sapiens
ttttttttttttttagaaaaggaggtcttcttgtcacagaaaacagttttgaactgttaacattgtaaaaaggtataaaaatacagggtaggggctctgagctctctgaggaatttcctgacacacaactctgaactaaggcggagagatctctggaagcctgggcctctgatccttgccctgtgccccgtccccttcctctttcccacgagcccatgctccaaggctgaccagagacaagggctctcccgaaccctggctcaacctctcaaggaagaccttctatgatctacaatggctcatcctggaagagggggctggactgaggtggggtccgcaggcgatgccgggaaggctctccaggcctggagctggagtacctctcctcagcactgccagtggggctcctcctcattccacctcagctcgaggcccccaagggaccatgctctgggtggggtgtccaagaggagggccctcccctgtcccgggcacagggccattctccagatgccagcaggggcttatttctctgggggggcctgagggtgggagaagggtgctgagctccttgaagctcctgctgcaactttggtcccttcagtgtggacactgctcctccagtagtgcacctctggcggtgggcccgtccatgctcaggtacgtcagctgtcctgg

SEQ ID NO: 2901 - DNA, 647 bp, Homo sapiens
tttttttttttttttttttttttttttttgagatggggtctcaaaaataaaaaaaaaaaaaaatgaatttaccaacttgtgcattaacgttattttattcatggtgaatacacacatgctgggaattgtacactcttagaactataactctaagtaaaagtagatattactcttaatgtgttatccctaagcttgtgtcttggcaagtagtcaatatggctctatgtttaagaaaaaccaccctgatgtgtattaacagagtaagaaaatgttaaatagtgggaaaaactggaaaaatggtggacaaattaaataacaataggttccttggacccatcatgcctcacaaataaagacaacttaaaaatcaattttcccagatgaatctcaaattaacagtcccaggtgaatatccctttcctactactagcactgaacttcaggggcttacaagaaacagagggtgaaacgcaaagtgggcctacagcgaactaaagtaaagcctatgcttgggaagaagagattatttacattatcaaatgcattaaaacgaagttagctgggcagagcctcagtacctccaaaaaaaaaaaaaaagaaacacaatacccataaacagagcctggacactaaagaccacatttaca

SEQ ID NO: 2902 - DNA, 159 bp, Homo sapiens
gagggaagttgggaatgtcagaagatgttcctgagattctaaggttatttctgatcttcaaaaatgttcatctggggaaggtgccattattgtagggaaaatgctcctactgaactgactagagatacaacagaccagagctctctgacccagagtggc

SEQ ID NO: 2903 - DNA, 634 bp, Homo sapiens
ttttttttttcattttccagagttaccaattaatctttaactgctaaagaagttggcttgctgtacgtgaatataaactaatgcaagtggattgctaaaagccacttcagtactcagattgctttgggattaagtgacaatacagtttttaaagtaccaggttttctgttgacatacaaaaagtcttctccctctttttccccttgcactaattttttttttaatgagttatcatttgggaattgataaaatggagagtttaccttttgtgtttagtgtacaaacagcaaaaaaaaaaaaatgggatactagattaggaaggcaattaacatcttatgttttaaattggccaatagtatttgttaatttttttaaatagcacacttcacaatcataactgtaatcctaaaaattttaatataccttttttgttagaaataatgtttgaagaaaacatgttaaagaaacatgtagaaatatgtttgaagaaaagtctataatacgcttggggtttattaccattatcagttccacaaaacacaaaagatggtctctcctaatacatatttactccttgatagaacttctacctttatttcttccatcttttctactcttttgcctttctcacttg

SEQ ID NO: 2904 - DNA, 710 bp, Homo sapiens
gcaatattccacagaggggatctttctgttgaatgaaatgttctgatgttgatgtaatcagtcgatatcctggttttggtagttctgcaagatgttaccacctggaggatttctctgttattctgcagctgcttataaagctccgattatctcaaaataagaagtttagttaaaaaatgcatgacttcaggcaagttactcacatctttcagccttaggttttaccatctgtgaaatggggatgataccaagattcccaaatgtaaaatgggaatgccacagagtgttgctgtaaataaataaaatgaaacaagacagttactcagaacagcatctgacacatggtaaccacttgttatatgttagcaataattactacttacaataaaaagaactactttgcagccaggcacggtggcccatgcttgtaatcccagcactttgggaggctgaggcaggaggatcatgaggtcaggaaatcgagaccatcatggctaacacagtgaaaccttgtcactactaaaaatacaaacaattagccgagtgtgatggcatgcgcctgtagtcccagctactcaggaggctgagtgcaggagaattgcttgaacccgggaggcagaggttgcagtgagctgagatcgcgacactgcactccagcctgggcgacagagtgagactcaatctcaaaaaaaaaaaaaaaaaaaaaaaaa

SEQ ID NO: 2905 - DNA, 701 bp, Homo sapiens
tggacttagggcaccttgagcctgagttttctcaggtgaaaatgggcaggtggcaggaggatgggcacaacaggctgccgattttgcctactctgtggtgaataatggaccccagagaagtccttgtcctcatccttggaacctcatccttggaacttgtgaatatgtacctacatggcaaaagggacttcaaggaagtgattaggttaaggatgttgaaatggtgagtgtatcctgaaatatctggttgagcccaatgtaatcacaggggtttttatgaaaaagaggtagaatagtcaaagttagtggtaggagatatagtgacagaacaacagtaatgtgaggaaagggctcatgagctggggaatgcaggcagccactggcagctaaaaaaggtaaggaaccggtgaggtgcgatggctcagcctgtaatcccggcactttgggaggccaaggctggcagatcacctgaggtcaggagttcaagaccagtctggccaacatggtgaaaccccatctctactaaaaatacaaaaaaattagctgggcctggtggcatgtgcctgtagtctcagctactcaggaggctgaggcaggagaattgcttgaacctgggaggcagaggttgcagtgagctgtgatcgtgtgccattacactccagcctgggtaacctgtctccaaaaaaaaaaaaaaaaaaaaa

SEQ ID NO: 2906 - DNA, 1015 bp, Homo sapiens
ttttctaggttgaggatgtttctaatttactaaggtaagactatttactatgagtaagatccagctaaatcagtagctagcaggaaattatgcctctagtcctctgttaaacatgatagttttattcttgactgctcctgggaagtcagaatttatttcattttattactgatgcttcattttttttttttttttgctggtagatattttagaagagttaatatctagaagtattccaacataagggcaactggctcttcacagagcatttacacttgggtgatccttagctcctgcccaagaatcaccaagttataatgaagttcactgctgtgatgtgaagctgctgcttccagaagggcaagagtcactatttccagttgtcaatgcagaggctgtattattattattaattattaatagtattattataagacaagaaatgagcactaaagtgctttattcagctcttgtctgtttccttttctgtacttttgatttttgctaacaggaggtgaaaagaagcagttaaaggaaaaattcagctgtctttagaactcagttcgattgatttgaaccctaattttctctagagtcttaacattataaatatagttatataaacattgctgtatcttaaaatggtgtagcatgaacaaacgatgtgagaaaccaaatctatttcaaatcacagcaaacatcactcactacaacatcaatatggacatagaacgaaaaactaaaagaactagaacaaaaaatcaaatagggattaagagtatcgggcacagagaaaccagtagagatcctctgatcgttctctcgtttctggcgcttctcaaaaaaaaagaagaaaaaaaaaaaaaaaaaaaaaaaaaaaaacaaaaaaaaaagaaaaaaaaaagaaaaacaaaaaaaaaaagcaaaaaaagaaaaaaaaaaaagaaaaacaaaaaaaaaaaaaaagaaaaaaaaaaaaaaaaaaaaaaaaaaaacaaaaaaaaaaaaaaaagaa

SEQ ID NO: 2907 - DNA, 178 bp, Homo sapiens
ggccataatacaaaactactgtgttggtgaatcggcacctttctaaaattgagtttgaccaatgaagcaagcgatctggaagaacttttgtgatcaacaacatctgtcactaactgagatatttccaataagctctgaagttcctatctgttaaatagttcccacatcactaataagt

SEQ ID NO: 2908 - DNA, 647 bp, Homo sapiens
agaaatttaaataaaatgtaaactgccctagaattacttgtttgtttttttttttagacacagtctcgctctgttgccaaggctggagtgcagtggcatgatctcggctcactgcaacctccacctcctgggttcaagcaattcttgtgcctccacctcctgactagctgggattacaggtgcccaccaccacgcccagctaatttttgtgttttcagtagcaatggtgtttcatcatgttggccaggctggtctcgaactcctgacctcaggtgatccgcctgcctcggcctcccaaagtgttgggattagaggcataagacgccacacccgactggtttttaataaggacgtggtcacatttcatagtttgtattctacgatggggtcggctgaataaaggcccccaaagatagccaagttgctatccctggaactgtgagtgtgaccttctaaggaaaagtgactgcagagacagaggcagaggttgaggtgatgcactttgtggatggaggaaggagctacaaaaccaaggaacaaaggcggacagaaaagctggaaaaagcaagaaatgaatcttccctggagctttcagcggggtgtgtggctccacaagcctgaattcaggccagtgattcagaactctg

SEQ ID NO: 2909 - DNA, 662 bp, Homo sapiens
ttttttttttttttgggagcccttgcagctgcaaataaatgctttaaaaataaatttacttgggaatgacctgaaaggcaaattattttgtcacccagaaatgtttgttacaagtgttacgggaactatcaacttttatttagagagataatataacaaacattttccaaacattgctacttattgtttaagatgaggaaacacatgctggttgaaacttttttttttttaagtgcactaactgctgagaaatttccaacaatttgaaaatgttttttgttatttacaaacacatttcataaagattcctggtagaaaatgtttcctcgctcctgtaattccagcactttgggtggctgaggcagaagaatcgctgagcccaggagttccacaccagcctgaggaacattgtgagatcccatctctacaaaacatagaaaaattagctgggcatggtggcatgcacctgcagtcccagctacttgggagactgaggtgggagggtcacttgagcctggaagagggggacgcgaatgctgcagtgagccatagtcctgggcaacagagtgagaccctgtctcaaaaaaaaaaaataaaaaaagacacgtttccactttaaatgataccttgttttctttactcacaaagtagcagtgtgtgtg

SEQ ID NO: 2910 - DNA, 130 bp, Homo sapiens
tgggaaagctcacccctcccagggtgtcgtgcatttcataatccggctacgcttccttcctacgttcacgcagatgcacccgtctcgtttaattaacagtatttctcaaacacctttctatgtaggtaat

SEQ ID NO: 2911 - DNA, 750 bp, Homo sapiens
ataaagactacaaatatggggcagtggcttactgctcaggtgatggtgcaccaggatctccccgatctccgttaaggaccttatgttaccgacaccacctgttccccgatacgttgatgggaaaatagattttgtaagattgccctaggtattaacttgggacctgaatgaaagggaatccaaggttcccaggaccaggtctcttctctctctttctggcccaatcactcagctaatccctgcaacagtttttttttttgttgtgttcaaatgttctgtactttggtgttttggatttttgcaatgaagccacaattgttattgctgagaacacggagtgcttgcatctggaaagatgagctgtttctgtaaggctgcctgaggggcctgacagccaggctgaggccacaggtctaggctggctttgcaaatgtcgatgaccattagaaattagggcagggtgcggtggctcacacctgtaatcccaccactttgggaggcccaggggggcagatcacctgaggtcaggagttcaagaccagcctggccaacatggtgaaaccccatctctactaaaaatataaaaaattagccgggcgtggtggcaagtgcctgtaaccccagctactctggaggctgaggtgggagaatcaatggaacctgggaggcgaaagttgcagtgagctgagatcgcaccactgcactccagcctaggagacagagtgagactccgtcaaaaaaaaaaaaaaa

SEQ ID NO: 2912 - DNA, 210 bp, Homo sapiens
tttttttttttattttttttttttgagacggagtctcgctctgtcacccaggctggagtgcagtggtgcgatctaggctgcgagccgagatcactgcgagctccgcctcccgggttcacgccactctcccgcctcagcctcccgagttgctagggaggctgaggtggcaagtatcccgggaattaccggaccggtaccagcctgcttatt

SEQ ID NO: 2913 - DNA, 157 bp, Homo sapiens
atcaacatgtcgtcattggacacgtagattcgggcaagtccaccactactggccatctgatctataaatgcggtggcatcgacaaaagaaccattgaaaaatttgagaaggaggctgctgagatgggaaagggctccttcaagtatgcctgggtctc

SEQ ID NO: 2914 - DNA, 649 bp, Homo sapiens
tctgtcccttccctggtatttgtttgtatgtaattgccccaggtcaagctttttacactttttccttgggctattgaaataatttccaaatttttctgctaatttatattaacctgcaccaaatggtcttgaaaaatgctgttttcataaagcttcaattatttcattcttctacttaatacatcttgtttttccttgactagcaaattaagcttgaactagttagactggctggcagcaagtcctctgccatgtgattaccgtatatttataccttatgtctcacaactttttgcaagtacacttgtactattttatactcttctctgggtataatttttgtatccaaatctttctacatttttattatatgcaaataacattttcccgccatcgttatggaaaattctatattttgtcaacgttcattttcttctcaaaagcctttagttattatttccaaatgaatattatgtgtgtctcagacaaccacagaaagtttggttttgtcacattctactgctactgtgtcaatggcagcatttgatatcggtggagggacgctcacatctaaccccaaaatttgtgtcagcttctcctgaagtatcagaagcatacaattagtaaaaacagtatcttcgctatcaaa

SEQ ID NO: 2915 - DNA, 695 bp, Homo sapiens
ctactgcatctaacattttaaaggctgacttgtatgttatgtgaatgtatctttaaaacaaccaaccattccatcctggtctggacaaatattaataaagctccattgtgcctgcaatggcccccactatcctgtcaagacctggccttcaagacctcgtcttatttcctcctctgctcccttcaaggaaagcccctactcttccacctcgtctttgttcccactgctccctgcttcccttgcatccctgtataccctgatactccgcccaaaggctgcagatcagtggtctgaattgaatggagtctgcagatgggttcgcggtggttttttcttgttgttttaactgagttagttaccaacaggacatctcacataaacatctatatcccagctgggcgcggtggctcacacctctaatcccagcactttaggaggctgaagtgggtggatcacctgaggccaggagttcgagaccagtctggccaacatggtgaaaccctgtctctactaaaaatacaaaaattagccgggtgtggtagcggtgcctgtagtcccagctacttaggaggctgaggcaggagaatggcgtgaacccgggaggtggagcttgcagtgggccgagattgtgccactgcactccagcctgggcgacagagcaagactccatctcaaaaaaaaaaaaaaaaaaaaaa

SEQ ID NO: 2916 - DNA, 764 bp, Homo sapiens
ttttttttttttggaaaggccagaaactcagatttttatgtgaaatctccatttttcaaatgttggtaactaataaacttcctaacctctgacttctagtttagcatcaaataccaagggtatatccttatcaatgagtgtaactggtgttgtgttctctctggcccatcaatgataacacaaagaatggctcccatctgccatcccatactctttcccactgaaaagagacatccttgggctctgtatttcagggcttgcctcttctctccttgtgaattatggactgcaacagtgagaaacttgaccctggggtggctccttgtctttggggaaacaaatagtttaaaaggcccatactggattgagctctgggtattgtcttcttactactctgttttggttgctccttcctcttgaggccaaagatgagaatctgcagtggtaagcttcagagactagctattcctggcaggtaggacttgactttttactcattcactgcagagtttagcatgtatgagcactcaaatactgagctacaaattattgcctaaaacaaataaaaaataatacctctcaaacctctttgttagtatgggtataggctgtattctggaaaggtaaacactaacacatatctacttacctttgaattgcattgccattcctggtgtgaccttggggagcggaaacttctcagaagggaggtctgggttactctagatctcttcgtgtgattcttactctgttggctcaaaagt

SEQ ID NO: 2917 - DNA, 728 bp, Homo sapiens
ttttttttttttttaatcaagctcaggttaagaaatatgcagtaagtataacacctttgaaactgagaacatactcaaagtgatataaatcagcatggaatgtcgaccagcctgagattcttatatcacagtacgattgtaagaaataggaaaagtaacagaaataggacaaaatgtcttccatagtcattcctggccatggatttgccaaaacttaaataaggaagccatggcaactcccaccattgccaacttgtggcacatttgaatgaaggcttcttttcatattgccattatattatgtgtatagcattccagcataaagacgtatgctaaagagagctaattgaattagagagaaccaatgggcctgggaggccatcatcctgcagcccagatgaagatgtccaggccagcagctagctgtgcctccccaagggctccttatagaagttctttttctgttagcatggtccctgttacatctgctgccacagatctgagatagttttgccaacagctctttgacctaagaaagacctaacttcaagtcaaactgaactgttagctcagttacaagtggtctcagctgtttcagaatttctggagcttaataaggcagataatgtcatcctacatccactccacttgattagtctgaaagtcacttaccttctttctgacttatctcacttgtgtacattgtgaactttgcatactagctgtag

SEQ ID NO: 2918 - DNA, 721 bp, Homo sapiens
tttttttttttttcgtagtctctgaaaatgcaacggagaataaaaatgtggtcagacctgccgccagcacctatgccctccagtcctgagctgacaaaaatgtcaagaaactgacagtaaaatatgcgaagaaaaagccctgcaaacaagaacaaaccccagactatttggcgcttacaccacactgtgtcatggttttcaaacagaaatagcagttgtgggatttattatctctaacatcacttgttaaatttcacactacgcaaatgatataaagtatacgagtaaggaagctactgaagaaggaatgaggcaatgccggaaaggaaatagacagatggactccacagagcgctaatggaggaatcttagccacggtcagtggaaggattatcatccacccctgtggatttctaacagggcaagagtgctgttaaggacaaggaaaagcaaccggcgttataggggaacttgccccgatattcacgcaggttcttttctattttccttaagagtcggccagcttgagaaataaagggacagagtacaaaagagagaaattttcaaagctgggcgtccggaggagacatcacatgtcggtaggttcttcagccggtcctctgttgaggtccttgacttcttgcaacacggatgaaaaccaccaactctgcctacgtgagcccaatatatggttgaacaagtttgaaatgtacatttgctt

SEQ ID NO: 2919 - DNA, 480 bp, Homo sapiens
tttttaaaattcagaaaactttcaaaggctcctttactattcctgatccccctcttctcttctcaagtcatctctctctaaaccaccaatgtccaatagaacttggactatcattctgagatggtggaatttctgtgttatccagtatcacctgctatcacgtgttgctatcgagcttctgaatgtgctagtcccaccataaaccatattttaaattatatataaggcacagtgcataaaggtccaggttccaaggaatatgtaagagtgttttagaaccccttatgaacatttaattccccagatttttcttttaagtgttctggttagcctattgcttggcttaactattatgtactgcctctggtagctgcaatcttaatccatcatttgttgctgattgttttgataaatactcccttcaaggaaaggcggtctgtactaggtgagctccgagtcagtcaaacacgacaatcctca

SEQ ID NO: 2920 - DNA, 752 bp, Homo sapiens
tttttttttttttttaagttaaaaaatatttaatattatcagataaaaacattgattgtgacagctttacatgtttcattccatacacagtgaaaaaggcaaagtattactaggaaggaaatgagtagttgggtttgtaaaagatttattgatcacataaaagcaatgaataggagatgacatatatctaactcatgattacaaaacttttagagacaactaggttaaatatttcatgttttggctaagggaaaagaattcatgatctcgttaaagaagttcaaagtcaacactgatattgtacaactaccagtgcttttctaatgatctagaaatttgctataaatagctttactttttgctagttaatcacttactatgattgggttttatttaacagtgaggactaaagaggcagaatccttttttaaccactggataaaacagagacataaattaatgatgggtgctaagctttacattttatgttaaaaagatggaatatatttaagtggattgaatatatttcatgaggagttggacatattaaacccccaaatctgtttaggaagtttgtgagaaagtgtgtatatgccttgactcactctggcttactttttaaaaatggaatacatctggcactaattaaattaatagacagcaactgtgagactaacctgctccatctgagttgcccttcttgactttacaatccatactatttcctaatctctgactgagcccaaaaggac

SEQ ID NO: 2921 - DNA, 752 bp, Homo sapiens; identical to SEQ ID NO: 2920

SEQ ID NO: 2922 - DNA, 722 bp, Homo sapiens
  misc_feature (654)..(654): n is a, c, g, or t
tttttttttttttttttgtattattagagtaacaatttattagcagacaaaacaaatgaaacctctaaatctcaacacacatacaggatcttacataataaacagcataaaacataagcttctagaagaaaagtatctgctattaaccaactccccctcctttccagtaggctgcaatacattaataactcatcctcatcccataagagggttaagcaatgatttacatggaattacatcaaggcacttgctttaattaaaaaatacagtataaaacatgttcctaaaagtcatcaaccttgaataattaaagaaaaaacaggcagtatacttttttggtgaatagacaagactgagaatttaagttcattcacctgtcaccctgatattgtcttggtttgtgtacaaagttccaaagaagacaaaaaaaggtagcctattacatagattggtatgttcatacacactcatttctgagaaacagaagccatggcagcaacaggactcaaaccataattttccaactgatttgtgttgaaaaggcaagggctatttgatcccatgtatcttattatttcagggatgacgcatgagatcagggaagagaacatctccaaaataagttgattaaagcttcagtttgaaagacctttntggcttaaagtgcttaagctatagacttacaaacatagttctacaataaaggctttagtgtccttcat

SEQ ID NO: 2923 - DNA, 401 bp, Homo sapiens
  misc_feature (315)..(316): n is a, c, g, or t
  misc_feature (324)..(325): n is a, c, g, or t
  misc_feature (346)..(347): n is a, c, g, or t
  misc_feature (357)..(358): n is a, c, g, or t
tttttttttttttttactggaagcaagcgtgaagaccatttttatcactgtagcaggacaaagtcgtttcaacaagacataaaatccactggccataaggaaaggattcacattcaacaatatgataaactaggtgaaactttttgaaatttgattgtgatgaggtggtgatttgatttcacaggtatatacaaatgtttaatcaaactttacactttatgtgcagatgttgtatatcaattatagctcaatgaagcttctttttttttaagaagcctgaggggaacaattgccattaaagtaacgtttaacaannaacaacannacaacaaaaaacagaatgacnnaagctaggcnnagaaaccatttttgcacaacaagaaattaacaatagccatatt

SEQ ID NO: 2924 - DNA, 98 bp, Homo sapiens
ttttttttttttttttttgagacaagaggtcagtgtttcatcagcaaatttcagcaaagtcaagggtaaagtcatatttggaagaagggaatagaaga

SEQ ID NO: 2925 - DNA, 708 bp, Homo sapiens
tttttttttttttttttttttgcacaaaacaaaaatttattgggagaaagatggctgatgggaggcaagatctggattcaggaatcctcaattttagctctcgctctgtcaccaaaaccctccgtccctcccagagcctcgaggagtttccccttgtgtaaaccggtatcgcgtcccttccagctctgacatcctgcggttctagaatacccattgattgaaagagctgtggccaaacaggaaggacagagcaagagccgctgacaaaggattctgccaagacagaatcccaaggtcacaggagagaggcttggggcagtgaaagccctctcgggtcttggctttggaagtgtggactgtaccagcagatgggcccttgggaagccaacagggaacaattcaaggctggagagaaaaaggccacctttgacccagcagaaggcagaggcgggagaggagggtgaggacgtacaaggagcatcgcaggcgaggaaacaacacaacggccaggacctaactgtggtgggaactgcctttgtctccacacactcgcaatcaacatgcgtatttgctattctcaaacaatcccttccaccccctttaagctgaaaggaccaactcatccagagttgagagtacctacctgatgaagctgtcatgttccagcatcaactgacgttactgtctgccaaagccgttccccaagtg

SEQ ID NO: 2926 - DNA, 625 bp, Homo sapiens
  misc_feature (2)..(2): n is a, c, g, or t
gngcaagtgtaggacggggtggtttcagttcaaagtcattcactgccaccctgtgcttaattgctgcttcagcatggaactgatgcttttctcactcagggaaggtccctgggtgtctcagtgcgtttgggctgctctaacccagcaccatagactgggtggcttagaaacagcggaaacctcttttttagagttctgggggctggaagttagacattagggtgccagccaggttgggttctggcaagggccctctttgggttgcagactgccaacttctctgtgtaacctcatttggggggccaaaagagcaagagagctctcctgggatcccttttatgtatactttaagtttctggggtatatgtgcagaatgtgcaggtttgttacataggtatagacatgccatggtggtttgctcaacccgtcaacccgtcacctacattaggtatttcttctaatgctatccctcccacagcccctcacccctagacgttgccaaccagaactgacgtgtgacctcctgggtgttgatgccattaaaaccaacgttggtgcccggtaaaaaaaaaaaaaaaaaaaaaaaaaaaaaaaaaaaaaaaaaaaaaaaaaaaaaaaaaaaaaa

SEQ ID NO: 2927 - DNA, 703 bp, Homo sapiens
gcaatggcggtaggcgttacggtgggaggtcataataagcagagctcgtttagtgaaccgtcagatcgcctggagacgccatccacgctgtttgacctccatagaagacaccgggaccgatccagcctccggactctagcctaggccgcgggacggataacaatttcacacaggaaacagctatgaccattaggcctatttaggtgacactatagaacaagtttgtacaaaaaagcaggctggtaccggtccggaattcccgggatatttgaataataataaaactccagtctctcacacagccagctcttcatgaattaaactctttctctattgcaagtcccttgtcttgataaattggccctctaggcagtaggcaaggagaacccattgggcggtttcaggaacatagagcagtggacaaaaataggatgcttaaagccaatgtaaatattcatggtaataaggaaagtttagagcaatctgaccctggcattggcactggcaacaaagaaggtgggagcaccacgacaaacacagctagaaaatgcacagaaaaaccaaattaaaagagattagattaagagagatatataggagatgtttgtttaaaatatggagcttgcgattgaggagatgtaaatgaatctacaacatgatgcctcttgtagccatatcctttgcaatgatattaaaaaaaaaa

SEQ ID NO: 2928 - DNA, 85 bp, Homo sapiens
tggtgaggagctggcttaccagttgtctaaactaggagtttctcttgtgctgtcagccagaagagtgcatgagctggaaagggtg

SEQ ID NO: 2929 - DNA, 659 bp, Homo sapiens
ttttttttttttttttcctgtcaaaaagcttgaaatgtaaaaagttttaattagaaatgtgaagggtgaattaaactcatttccttcagatctcccaactaaggcaggcaaatagaatggtaaaaccttctgatgtattcctggaagatagttcagcaactgaataagcaaatgagtacaatcttactgaataaaatatttcctgttactccacaaccttaattaccctgaggactgtggccatagagagaatgccagtctgtgtaatgggggaggcaagtgtggtagatgctcacagacaccttttcaccagtgcccaatcagggccagaagggtaggaacaggaggtggccagggcaaataccaaagtctccacgagaattgcagagacgtggttacaatcttacccttatgtcttgcaaaatgctgtgtttcattatttgcttattttttacatatcgtttgaatactagtaaattgtaactggaaagagttacagctagaatgagatttacaatcaagccctggccctacatagttatgtgacctgaaaactcactcactgtcactggtttcaagttcatcatctgcggaatgaggagaaccatcctcccatctagctacctttcttcatccctggggccccctgagaagaccac

SEQ ID NO: 2930 - DNA, 619 bp, Homo sapiens
tttttttttttttttgccatctttctgcttgatgtctatctttctcctgcctttccctgttgcttctccctttctcgcctcactatctgttagtaagcatacagcacgattcactggtaagagccttgagtaacaagcgggaacacctgggtataagcctgggtttaagcctgctgttaactagaccctctctgagccatagctacttcactttaggagagatcaattagaacacaattttattctcttagcagaatcattttcttaaaattttacttagaatcctgagacatgccagattagattgccacaagatttgaacgtggagggtggatctcggggtcctgttgactctgtccttcaaatagtctgtggacctcagagcttgagtactcagtttaaaatcccctggattagtacagttctaagagtctataaaagcgtttttaaaacctcagatgtcctagtccttttccaacatattccacatgaacggaatcagggtcgtggcaaaagcattagacatcagaatcagaggacctccaggacttcttacctctgtaatcttgggcaattatttaacccgaatcttagttttcctcaaatgtccattggcaac

SEQ ID NO: 2931 - DNA, 589 bp, Homo sapiens
gagttttgtttggcacccaattccaccggacctttcccaaaagttgtgtaccaacttccgccccaattgaacgccaaattgggcctgtaaggccgttgttaccggttgggaaggttctaataataaagccaggaggcttcgttttagtggaacccggttcagatcgccctggagacgccatccacgctgttttgacctccatagaagacaccgggaccgatccagcctccggactctagcctaggccgcgggacggataacaatttcacacaggaaacagctatgaccattaggcctatttaggtgacactatagaacaagtttgtacaaaaaagcaggctggtaccggtccggaattcccgggatgcaaaaattagctgggtgtggtggtgggtgcctgtaatcccagccgctcgggaggctgaggcagaagaattgcttgaacccaggagacagaggttgcagtgaaccgagatccagaggttgcagtgaaccgagatcccgccactgcactccagcctgggtgacagagcaagactccatctcaaaataaaatgaaataaaataaaaataattaaaaaaaaaaaaa

SEQ ID NO: 2932 - DNA, 161 bp, Homo sapiens
atatttaaaaaacaacacaaaatttcaaccacattccattccattctcgcagaaacaccagtgtgcctcagctctgcgatttgtatcactttggtgcaacaagtgtgagaaacaatgttgtaatttttaccgtgtttccatccaagcctccacatgctgtc

SEQ ID NO: 2933 - DNA, 623 bp, Homo sapiens
agctcttatcactctattttatagcttttctttccttgtacaacttatgctcatatctataaactacaggtaattacatattatttagaaatataaattatctggttgaaatgagccaaatccaccactcttgtattatttatcatagggtaaggatcagattcaagtagagcttgacacaagagaaagtcattatcaaaaagtcaaaacattagtgttgtcaaagatgtaaagaaaaccggacccttatatattcggtaaggatgtaaattagtacagtatagagattcaacaaaaaattaaaaatagaactacaaaatcatccagaaatcctaatactggctatatatcccccccaaaaagaaagaaaatgaccatccccaagagatatctgcacccccatgtacactgcagcattattcaaaatagccaagatatgaaaacaatctaagcatccatcaatggacacttagccattactcagccatacaacaaaggaatctaccatgtctgaaaacatggatgaacctgaatgacattatgctaagtgaaataagccagacagaaaaacaaacgctgcataatctcacttatatgtagaacctaaatagtcaaactcatag

SEQ ID NO: 2934 - DNA, 447 bp, Homo sapiens
  misc_feature (45)..(45): n is a, c, g, or t
ttttttttttttttttttttttttttttttttttgagattccagnggtagatgtacaggtttgttacctgggtgtattgtttgttgctgaggtttgtatgaaggatccggtcacccaagttctgagcatagaacccaagtgttagtttttcaaccactgccctcttctctccttcccctgatagtagtcttgcatcagtgtgacctggatatgagacatgaagtcaaaggagattattttggagctttaagatttgaccgccctgctggattttggacttgcatggagcctgtagcccctttgtctcagctaatctcttccatttggaatggctgtatttatccaatgcctatactcccattgtatctaggaggtaactaacttgcttttgactttaaaggctcagacttaccttgtctcagataagactttgcggcaacccccttg

SEQ ID NO: 2935 - DNA, 726 bp, Homo sapiens
ttttttttttttttttttttttttttttttaattttataacatttattattgggaaacaactggagcaaagaaggcctgtactccaacacaggttcatgcaccctaccatgcgagcgccacctggactggctggagatgggatctgtgcactgctgaggccttgtactggctagccaggatctgagggagccaattagcgggtgcccctggaggaggtggagcttacagaaggaactaacctggcaccatgggccaatctagagcagtcttgtcctgtccccagtccacaagggattctctctaatttcagatcccagtctgaggccgggtgcagtggctcatgcctgtaatcccaacactttgggaggcccaggcgggcagatcacctgaggttgggaatttgagaccagcctgaccaacatggagaaaaccccgtccctactaaaaatacaaaaagctgggcatggtggcgcatacctataatcccagctactcgggaggctgaggcaggagaatcacttgaacccaggaggtgaaggttgtggtcagccaagatcgcaccactgcactccagcctgggcaacaagagcgaaactctgtcttaaaaacaaaacaacaaaaaaacaaaaacagatcccagtctgtttgcaggcagtggcacccagcctggttgcaaccctgtgcggggtgacacggtctatgggaagtgtgtccatcccggacag

SEQ ID NO: 2936 - DNA, 614 bp, Homo sapiens
tttttttttttttttgtacaaaattttattaaaggtctttagagagcaacatccagactccagaatacagctgccaaggagaccctgttatgctgtggggactggctggggcatggcaggcggctctggcttcccacccttctgttctgagatgggggtggtgggcagtatctcatctttgggttccacaatgctcacgtggtcaggcaggggcttcttagggccaatcttaccagttgggtcccagggcagcatgatcttcaccttgatgcccagcacaccctgtctgagcaacacgtggcgcacagcagtgtcaacgtagtagttaacagggtctccgctgtggatcatcaggccatccacaaacttcatggatttagccctctgtcctcggagtttcccagacaccacaacctcgcagcctttggccccactctccatgatgaaccgcagcacaccatagcaggccctccgcacagcaagccctcctaggagtttgtaacgcagagactctgcctgggcaatggcacacagacctctagtggccaccttttcagcataaagctctacactgccctctggaaagccaaacctcttctgaactacagcagtca

SEQ ID NO: 2937 - DNA, 614 bp, Homo sapiens; identical to SEQ ID NO: 2936

SEQ ID NO: 2938 - DNA, 732 bp, Homo sapiens
tttttttttttttttttttttttttgacttgatcacatttattcaatatggttggaaattagcaagaatcagaagaagcacatatcaatcaaatacagccacaaaaacatcctggagataaataaagctgcactatgagaaatactcactactgaaggaaccagtactctcttacatttactacctcttagcaacaaacaactcaaatgtaaatttaatttactcacaatatagaacccttgactttttaaagaaaaatatagattcaaatcaatcagaatttgcctcgctaggccttttcgttacgtatgtttttgaggcctagttcgacgactgttacgaaaatgacaaaaacaaactcgaaagaatgtttccacaaagttcaacaaaacagtgcagaaataagttacttacccatgcacagaataaggcaaaggctaatttcattcgggttaggaatagtaaatttaactagtttcttttccacaaaacgaacatttcagacttcttgtttaagtaacgggtatactctattatacatcatatgctacgttacgtggttttcctaactctactcagaaagccggcactcaaacgtcaaacagaaacttctcctttgatttagacttattctgtaacaaccacagaaaattaaatctgggtctccgagatagtgtctacagtgaaaagagcccacactagtaaaagccccagttacgagagctgacagtc

SEQ ID NO: 2939 - DNA, 732 bp, Homo sapiens; identical to SEQ ID NO: 2938

SEQ ID NO: 2940 - DNA, 449 bp, Homo sapiens
ttttttttttttaatctaacggagggattgtagatggtgtaaaacttccttgtgccaggagagaaagggggagagagagagagagagagagagagagagaaataacccattctaaacaactttaggaatagatgatccgtaggcatcaactttgcgcagcaacaaaagccactttctgaacctcgttctgtgaagttttaaaacaaattgggtttgtttaattaaaatatttcttaaaggcaaaaagcactgagctaatttttaagaattttaagttatatattaatatgagtagtgatttataattttctgttgaaatacataaattcgagaagccccacccctaccacttgccagtcttgagtccccacggctcctttgcctaggtctaaagtcactgcttgcacactcctgccttggcatatgccccttgccattcggggcttggg

SEQ ID NO: 2941 - DNA, 723 bp, Homo sapiens
tttttttttttaggtgaccggaatgagaagatgaaaaatcaaattaagcagatgatggatgtctctcgggtataatcgtttttagagtcccataattgcctgtgaatacttttactatgcctcacttttatgaatacttgtctcttctgcaatttttagacacagactgcaatatcggtagttgaagaggatctaaagcttttacagcttaagctaagagcctccgtgtccactaaatgtaacctggaaggtaggttgcttcttgagaagaaattgctatatattggaaagatacaaaattgcattagaaagataaagagcggcttcctgctttcatacttctcatttctctcagcaccagcccccaaccaagttctcaagttcttgtgcacacatatggaactcaaatgttttatcctttacagaccaggtaaagaaattggaagatgaccgcaactcactacaagctgccaaagctggactggaagatgaatgcaaaaccttgaggcagaaagtggagattctgaatgagctctatcagcagaaggagatggctttgcaaaagtaagattatcatcatttactgttaactgtattgtccatgtcagtacataatgtgtactaatatagataatgttatcgtttttcaggattgtactcttttgcatctgtaattagtataattgtcttctttctttctgctttgttctcataaactgcatt

SEQ ID NO: 2942 - DNA, 741 bp, Homo sapiens
cagtcgccggaacgcatcaccgtttgacctccatagagacacggaccgatccagcctccggacttagctaggccgcgggacggataacaatttcacacaggaaaacagctatgaccattaggcctatttaggtgacactatagaacaaagtttgtacaaaaaagcaggctggtaccggtccggaattcccgggatgaggagcccatcatggcgacgccccctaagcggcgggcggtggaggccacgggggagaaagtgctgcgctacgagaccttcatcagtgacgtgctgcagcgggacttgcgaaaggtgctggaccatcgagacaaggtatatgagcagctggccaaataccttcaactgagaaatgtcattgagcgactccaggaagctaagcactcggagttatatatgcaggtggatttgggctgtaacttcttcgttgacacagtggtcccagatacttcacgcatctatgtggccctgggatatggttttttcctggagttgacactggcagaagctctcaagttcattgatcgtaagagctctctcctcacagagctcagcaacagcctcaccaaggactccatgaatatcaaagcccatatccacatgttgctagaggggcttagagaactacaaggcctgcagaatttcccagagaagcctcaccattgacttcttccccccatcctcagacattaaagagcctgaatgcctttgaaaaaaaaaaaaaaa

SEQ ID NO: 2943 - DNA, 396 bp, Homo sapiens
  misc_feature (320)..(320): n is a, c, g, or t
  misc_feature (395)..(396): n is a, c, g, or t
tttttttttttttaattgttaatcctttggggacagagatatactatgaagcctattggaatggctgtatttacccaatgcctgtactcctgttttatctagaaagtaaataacatgcttttgattttacaggctcataggtagaaaagacttgccctatctcagatgatactttggactttggacttgagttaatgctgaaatgagttaagactttgggggactgttggcaaggcttattggttttgaagtgtgagcgcatgagatttgggaagagtcaggggcagaataatacggtttggctctgtgtccccacccanaatctcatccttgcaattgtactcccataattcccacttttgtaggagggacctggtgggaagtaattgcaatcnn

SEQ ID NO: 2944 - DNA, 84 bp, Homo sapiens
cagcctcccaagtagctgggattacaggcaaccgccaccacgcccagctaatttctgaatttttactagagacgggtttacaca

SEQ ID NO: 2945 - DNA, 196 bp, Homo sapiens
ttttttttttttttttgaaacggagtctcgctctgtcaccccaggctggagtgcagtggcgcaatctcggctcactgcaacctccacctcccgggttcacgccagtctcctgcctcagcctcccgagtagctggaactacaggcacctgccaccacacccagctcattttttgtatttttagtagagacaggttat

SEQ ID NO: 2946 - DNA, 744 bp, Homo sapiens
  misc_feature (31)..(31): n is a, c, g, or t
tttttttttttttttttttttggagacggangtttgctcttgttacccaggctggaatgcagttgtgcgatctcggctcactgcaacctccgcctctcaggttcaagtgattctcatgcctcaacctcccgagtagctgagattacaggcacccaccaccacacctggctaatttttcgtatctttagtagagacaggggtttcgccatgtttggcaggctagtctcgaactcctgacctcaggtgatcctcccgcctcggcctcccaaagtgctgggataacaggcgtgagccactgtgcctggcctcagttcatctttagaaaagtcagccaagccatgtcagagatcttggctctaaacaaatataggttaaatttaaaaagacagaaaaggggggctccctctatggtttgaggtcttaaggctctgccaatagatggctacagggctgggatttaaggcccttcgtggcttcacatgtctcacatgacaccagattcccttttttccttactcattcattccttccctgatgccagattccttcttttccttactcattcattccttcccctgctacaatgctcctttttccccctcttcttagcacatttcatcagaagcaaaaacgtcaaacatttccatgggtaaacagaaatctgtggcctttccacacccccctccttatgcctactgttattatgagcggaacatgttatcgctcagcactctctccattcat

SEQ ID NO: 2947 - DNA, 743 bp, Homo sapiens
ttttttttttttagagaggggatcttgctatgtgcccaggttagctgcctcagtctttatgaaagttaccctgtactgcattgggtggagccagttagttcttaagaggaccatttcaggtaccctctgtgtttcagagcaaagttgttggggtcggtctctattttatgtccctgaaaggtacggcagccaagaatgagttaagtccacacttcccctctgctgtgtggctcccctccctgccttacttattggtgccaaatggatttttctaaagctgaggagctttctcaacttggggaagaaaaggcaagagagaagggtccaagtgagattccagtccccctgttctccattgatttaatggaaaacataccccctatgtcagcagattgtggagataggacaaaggaagtgaaaatgatcagaagttaaaacctatggaactgtagccattgtttctgtttcgagaataagatcacatagtttagggagatttgccaagtaccagctaacttgctcacattattccatcaaccatgcaatgtcactataattaccacttttcacagatgaagaaaatgaagctaagtcatttatctaaggtggtgagaggctccagagcctaaaaagctgcattccatccctcccatgtggaagaccagtctgggagctgctcctttgaggcactcagtgttcatcaactcaagcgtcatctccaacagaactctgaaaagcaggca

SEQ ID NO: 2948 - DNA, 728 bp, Homo sapiens
tttttttttttttttatttcttcccctataacaatatttttcccattcccttttctcccctccctaggggtacaactgtagagaatgctgggtagtgtcctttggctttgcctctatagccccatgcacttcttttggcaggttttatattggtctgtgcagttcaatgtaccagccagcagagagtacttataggggtaagagctggctgcagccaacgcagttctgtatacattattgtttactggcagaagctctctgttgcctcaggcaattggctgattactagaatgtttagtgaactgagccctctgcagaaccctgcattgttgtggacagtgataaatggggccagactgggcagttctgcctacaggtcccctgatggcagccacaagcactttcagtgagagaaaatcccatgggtcaccaccaagcactcagagatgtgcctaggcatggagctgaggaacctcctcagccccaaaatctctgcacattaatgagaggtggcctaatctcctaatacaggagagtgtgttcttcagatgccaagaagtcttccttggcttgaagtagagtgggtcccctgcaccaagatgtctgccacaggagaggtggggcaactcagggctgctgacaccagactagcaggtgctctgaaatccctggaaatctgcctgagcttgtaaaaatgagctccactcccacaacccccactgcacaac

SEQ ID NO: 2949 - DNA, 758 bp, Homo sapiens
tttttttttttttttttttttttttttgtacagatggggtcatactgtgttgtccagtctgggctcaaactccgaggctcaagtgattttcctacctccaccttccaaagtgttgggattacaggcatgagccactgtgcctgaccccttcaatgtatatttctaagtaaaagaagccattctgaaaagtctacatactgtatgattccaattcagtgacattctggaaaagatacagagataagaacaaaatcagtagttgccaagggtgcagcatggggagggaaaggataaagaagtgaagcacagcggatattttaggcagtgaaactattctgtacggcactgtaagggtggctacatgacattacccatttgtcaaaaacccaaagaactttgtagcacaaagagtgaacctcaatgtatgcaaagcaaaaaaaaaaaacaacaaaaaaaaaaggtcgggcacagcgactcacacctataattccagcactttgggaggccgaggcagcggactgcctgagtccaggagttttgagaccagcctgggtgggcaacacagaaaaccccgtctctactaaaaataaaaaattagccaggcatggtggcatgcatcagtagtcccagctactcaggaggctatggtgggagaatcaccaggctccgggaggtaacgccgcagtgagccgagatggtgcccctgcactctgcctggcactgggaatgaactctctcttcgaaaaaaccattttttt

SEQ ID NO: 2950 - DNA, 554 bp, Homo sapiens
tttttttttttttttattttcattgttttaataaatttcattgtgtatatttaaggtatgcaacgtgatgttacaaagtacaaacagatagcaaaatggtcactacaggggagcaattaacattcccatcacctcccagagtcaaccacttttaggattttgtggcaagagcagctgaagtctagtcatttagcaggaactcccaaaacagtgcaattttattacctacattcctcctgttgtacatcggatcaccagactggttcatcctacatattttaaagtagaaacccatctacctgctgggttgagaatgcattgttggagcagcgggagggagatgaggtccccaggtctcctgggcagaagaggaccagttgccagtgggccacggtgggggactggcggggagcaggtaagatgaggtcaaggtctttggctacaggaagagcctgcaggattcctttgcagacctatgtggactgttagagaaaacaactcagaagacagctctgagatgtctgaggactgcagggattgggcccctgagcaag

SEQ ID NO: 2951 - DNA, 498 bp, Homo sapiens
  misc_feature (230)..(230): n is a, c, g, or t
tttttttttttttttttgagatagggtctcactatgtggcccaggctgtagtgcagtggtgtgatcacagctcactgcagcctcgaccccctgggctcaggtgatcctcccacctcagcctcccgagtaattgggaccacaggtgcatgcaccaccatgcctggctaacttttttgtatgtgtagagacggggttttgccatgttgcccaggctggtctcaaactcctgngctaagcaatctgcccaccttagctttcccaagtgctgggattacaagcgtgagccaccatgccagggcagagcaaagattcattcatattcttatgtcgcagctatacatctttcacatattgtattatgtgaatacaccataatttgctacgtcggtttccagcttcggggcattgaatggttgtaattatgaatgctactgctatgaacactcactgctgtcagtacagctagcccattagcttacattgttggctccttctaac

SEQ ID NO: 2952 - DNA, 420 bp, Homo sapiens
tttttttttttttttattggccggccgccctttttttttttttttattttcaaaatatattttatttctttcttacatgtattttgcaaaatttccaaggtaaacattagctccacatacagaaataaaagagttctttaagaactagcattgaattcatcacaagaatcatcaaattatgataatggaaaacaaacttgcctatgaccaaagctactgagctgaagtgaagagctgtctttacaaagatccctctcattaagcccactgccctgcagctgactcaagccatcatcatgtatgtacgtgtataagaaaggacactggccgggcatggtggctcgcgcctgtaatcccagcactttgggaggctgagcgggcgtatcacgaggtcaggagttgagaccagcctggccaaca

SEQ ID NO: 2953 - DNA, 738 bp, Homo sapiens
  misc_feature (42)..(45): n is a, c, g, or t
tcgctataccatcgtgatccggttttgcaagtacatcaatgnnnnggcgtggatacgggtttgactcacgggggattttcccaagtctccaccccattgacgtcaaatgggagttttgtttttggcaccaaaatcaacgggactttccaaaatgtcgtaacaactccgccccattgacgcaaatgggcggtaggcgtgtacggtgggaggtctatataagcagagctcgtttagtgaaccgtcagatcgcctggagacgccatccacgctgttttgacctccatagaagacaccgggaccgatccagcctccggactctagcctaggccgcgggacggataacaatttcacacaggaaacagctatgaccattaggcctatttaggtgacactatagaacaagtttgtacaaaaaagcaggctggtaccggtccggaattcccgggatccccactcttaatcagtggtggaagaacggtctcagaactgtttgtttcaattggccatttaagtttagtagtaaaagactggttaatgataacaatgcatcgtaaaaccttcagaaggaaaggagaatgttttgtggaccactttggttttcttttttgcgtgtggcagttttaagttattagtttttaaaatcagtactttttaatggaaacaacttgaccaaaaatttgtcacagaattttgagacccattaaaaaagttaaatgagaaaaaaaaaaaaaaaaaaaa

SEQ ID NO: 2954 - DNA, 698 bp, Homo sapiens
  misc_feature (640)..(640): n is a, c, g, or t
tttttttttttttttttttttacttttccactgttttattacaaaaatcaaatttcatttgttacaattcagcttatttattgtaataatcaaaaaaggggtttatacaaggtatttttatacagtttataattaaagcacttattttacaaaaggagggaagtgaataagtggacaagggctgaccaaatgttggccattataacataaatacatccttgcaaagcaccatcgtaccaaagtcaatgaacaagaaacaccagttgactttaagacaatgacgaagattaaagcttaagggaaaaaaataaaagataaacatctgaaagcagcaccagatccttcacttgcaaataaggctagtccagtttaatcttcttggtatcctctctactttttaacatttttccttactaatccatacatttaatttcatgtcatattggatttaatcagactttaaaaattttccctttaatacccatatttaggcattagatatatagaatatgtatctatatataaatatatctctatcgcccatcctgcttatatttgactgaaaaacacaaccaccaaaatggacagttcagcaaaagcgcgttgtctgtaattctctggtgttgcttctgggacaacncttaagtgatggtggagaatctaacagttcgtagtctgtactctgttctaatacagaa

SEQ ID NO: 2955 - DNA, 645 bp, Homo sapiens
catgactttatgggacgttctacttggcagtacatctacgtattagtcatcgctataccatggtgatccggttttggcagtacatcaatgggcgtggatagcggtctgactcacggggatttccaagtctccaccccattgacgtcaatgggagtttgttttggcaccaaaatcacgggactttccaaatgtcgtaacaactccgccccattgacgcaaatggccggtaggcgtgtacggtgggaggtctatataagcagagctcgtttagtgaaccgtcagatcgcctggagacgccatccacgctgttttgacctccatagaagacaccgggaccgatccagcctccggactctagcctaggccgcgggacggataacaatttcacacaggaaacagctatgaccattaggcctatttaggtgacactatagaacaagtttgtacaaaaaagcaggctggtaccggtccggaattcccgggatatcccggcctcgaaggtgcataattattgcaatatgaaaaaatcgaggctgggtaggagcagggcagtgaggatttctcaacccttactttcaccccggcgctgtccactgcatctgacagagcgcggagctgggctgctacagccgcaaccccagggac

SEQ ID NO: 2956 - DNA, 586 bp, Homo sapiens
tttttttttttttttttttttgagcaacagggctgtttatttcacctgggtgcaggcgggctgagtccaaaaagagagtcagcaaagggtggtaggattatcattagttcttataggtttgggataggtgtacaaagtacattctcaagggcgggggaagaatatatggtatcagttagcgtggggcaggaacaaatcacaatggtggaatgtcatcagttaaggctactttcacttcttttgtggatcttcagttgcttcaggtcatctggatgtacacgtgcaggtcacaggggatttgatggcttagcttggactcagaggcctgacactcctatccgatttgaaattggcaagatgttccttgggctggttggtctgaggacctgagatcataggtggatctcctcacggagtgagggcgacaaacagggcaactggtctcccaaaggagtcctcctgtcctgggtcttcagcaccaaatgtcacatgcatccgtgtgaagaaaccaccaaaacaggcttttgtgtgagacaacaaggctgtatattcacctgattgcaggcggctgagtgttctccccagt

SEQ ID NO: 2957 - DNA, 750 bp, Homo sapiens
gcatgagaaaggttactcagagtgtgacatggtacctgggcaacagacaatgccgcctccgttccccgtcaagaatggaaccaaggccacctggattctattgccagctctgtgacccaagagtgagtcaccttaccttgttaagctttagtcatctcatttatgagacaaagtggtcattaagtgagtatcattgtgtgtttctagttccgtaccaccgttgttacccagtcctacaatgggaaattcaaggagccataatccttggagcaactcctcacctccaaccccagtacaacctgtagacttacttctcaagaaatctacttctcttatattgagtttttggtaactcttatggttctaagaactctacacacacacaatatgtgtttcttctgacatacttccacatgtcccttaaaaagagaataaggggcctgggcgaggtggcttaaccctgtgaattccagcaatttgggaagcccaaggttgggttgaattccaacctggaagttcaatgagtttcgagaccagcctggccaacatggtgagaccccgtctctactgaaatacaaaaattagctgggcgtagtggtggcatgcacctgtaatcccagctactcgggaggctgaggcaggagaatcgcttgaacccaggaggcggaggttgcagaggagccaagatcgcgccactatactccagcttgggcaccagagtgagactctgtctccaaaaaaaaaaaaaaa

SEQ ID NO: 2958 - DNA, 82 bp, Homo sapiens
tggagagaaattttcatcagttagatcaggagttagcagctttatctgtaaaaggtcagatagtcatgtatttttggcttta

SEQ ID NO: 2959 - DNA, 729 bp, Homo sapiens
  misc_feature (313)..(313): n is a, c, g, or t
tgctcctggtgggcatgtgggacgtttctgcatttggactgaaagtgctttccggaagttagatgaattgtacggcacttggcgtaaagccgcttccctcaagagtaactacaatcttcccatgcacaagatgattaatacagatcttagcagaatcttgaaaagcccagagatccacaagaggcccttcgaggcaccaacggccaaggaagaatccacttcggccaaaaaggggggaaaaaaggttccctagagaggataagaaaacccccaacttggagagagagaaacctttgggaaggaaatgcaatgnttggaaagctgaaacccatatgcaaagaccatgcgccggaacaccattcttcgccaggccaggaatcacaagctccgggtggataaggcagctgctgcagcagcggcactacaagccaaatcagatgagaaggcggcggttgcaggcaagaagcctgtggtaggtaagaaaggaaagaaggctgctgttggtgttaagaagcagaagaagcctctggtgggaaaaaaggcagcagctaccaagaaaccagcccctgaaaagaagcctgcagagaagaaacctactacagaggagaagaagcctgctgcataaactcttaaatttgattattccataaaggtcaaatcattttggacagcttcttttgaataaagacctgattatacaggcagtgagaaaaaaaaaaaaaaaaaaaa

SEQ ID NO: 2960 - DNA, 729 bp, Homo sapiens; identical to SEQ ID NO: 2959
  misc_feature (313)..(313): n is a, c, g, or t

SEQ ID NO: 2961 - DNA, 713 bp, Homo sapiens
tttttttttttaaattagttttaaatcatcctgagaaactctttaaaagtttatttcctaggatttacagcagttaacattcagttccaccaataaaattcctcactggattccacacaggacagatggatctccattaggtaataaccttccaggtggtgctgacactgcacatatgtgaatattcctgtctgtgggaaatagagatgtaacttctacacttgcctcaacctgctactatgactttcttcacagtcctgggttttcaaagatctaaagttaactcttctcttagagaatacatgcaaacaagtaaacttaaaacttcaatgcaatgctcttatcccatagctctggttcttgtctttgctaattgatgcctcctgagctgactgctggcctcggtgtgctcctgcttgagagctgtctgccgggggaggagaatgcccagctctaatagttacatcttcaaaaaggccacctgaaaggaattcacacggcgaacgggatgaacggcagattggcattactctttgacaatatcaacagcagctccaagcaggttgccgagggccggttagcgggtggacgctgatgtcactttcccacaagctgacaagtttcacttcctgcttttgatgcatggctgatagaggacctgaacagcactccaggcagaactagaatcggcttgaattgtgttccaccaggga

SEQ ID NO: 2962 - DNA, 606 bp, Homo sapiens
tttttttttttttttaaattttaattttaatttatttatttacttatttttttgagacggagtctcgctctgtcacccaggctggagtgcagtggcgtgatctcggctcactgcaagttccgcctccccagttcatgccatccttctcctgcctcagcctcctgagtagctgggactacaggcgcccgccaccatgcccggctaattttttgtatttttagtagatatggagtttcattgtgttagccaggatggtcttgatctcctgaccttgtgatccacccgtctcggcctcccaaagtgctggcattacaggcgtgagccaccacaccctgcccccaattactctctatagtcacttttacccataagtgaatcctgccagtttttacttctatgactctatattcatgtatttttagctttccatattttttagataaaagagaacataccataggtactcgcttgcactttgcttttccatttaaagcaaaaaaagatttagaaatcattttcattcgtaacagttatcctcaattttttcgtagctgcttagtacttcattatccagaagattcacagtttgttcaactggtctcctat

SEQ ID NO: 2963 - DNA, 607 bp, Homo sapiens
ttttttttttttttttcagacaggtctctctctgtcgcccaggctggagtgcagtggtgtgatcttagctcactgcagcctcgacctccaggggctcaggtatcctcctacctcagccttccgagtagctgggaccgcgggcatgcaccaccacacctggctaatttttaaaattatttgtagagacggggtcttcctatgttgcccaggctggtctcgaactcctggactccagtggtcagccggcctcaacctcccgaagtgctgggattacaggtgtgagccactgtgcccagcctgagataaatctattgagttttcactgtgaacaatgaggatgtagctcattttggttctccctgtccccaccacacagaaactctctgcccttctcttcctcctgattgagttacgttgtgatttcgttagatccacattcactgcttgttccggtttaccttttgagacggagtctggctctgtcgcccaggctggagtgcggtggtgtgatctcggctcactgccagctccgcctcccgggtacatgccattctcctgcctcagccccctgagatagcatgggactacaggggcacgccacaggcga

SEQ ID NO: 2964 - DNA, 356 bp, Homo sapiens
tttttttttttttttttgaacaaacagaagtgattttatctaatacagttccaaggtagaaaaagtggagcaggcagggccttgcacccctctccacccccccatggggggggtggtggtagcggcacatacacaatcatagtaaattggcagaagaaaaacacaatagattcctggctagatggggagagataaggcaatgtgcatgggggaatcagaggggagatgtgagcccctctgctcctcccacaagagtttcccctttttgggggccggggcccgggtgggcttccacggcctggttaattccccggcactttggggagaggcgcggagaggccggtgtggattccctc

SEQ ID NO: 2965 - DNA, 356 bp, Homo sapiens; identical to SEQ ID NO: 2964

SEQ ID NO: 2966 - DNA, 736 bp, Homo sapiens
tttttttttttttttaaaactcaaggattctttatactcagataaggggtattctcaagtaccaatagcatcacaatccaagattgataaccttgaagtgaggacatgggttcagatttggcttcatcatggggccaaattcctgaccctctctggatttcagtcctggtctggaaaactggacaacacataactgcttcatttggctactgtgagaactgagtgagctctgctatgtgtaagggaaaccagcaatcatcctcataaacatcaaacttgggcccaaagccagcaagggagaaagagtctccagatggggagggaagaggccagacctcatggcctcaagtcctctcttctgagtcctttcttccccttggtggtggtagtggggatatttttcatgaattaccacttggaggacctggcttgatttattatacagggagccgatagttttcctaacacaagtggtcagaggtacagcagttctgcttggccgagctgttgaaggagactgttctcagagctcctccctctgtgatctttttgaggaagcgaggagaggtgtgaaagtgcttttaaactgtcaactggggttcctgtgggaggagttacccctcaatgacggtccataataagctcatgaaggggcatttggagcagccacgacactcagtgcacccttgttgtggggcagcctgccctggccaaacctttgcagaagtcacttgga

SEQ ID NO: 2967 - DNA, 729 bp, Homo sapiens
ttttttttttttttttttttttaatgaatcataaattttatttcaaaatgtaaacgtcactaaacatgcatacacgttaaaacaataaaatttacaatttcgttaatttttctttttgcataggacatcattacaatatagaatctatgccatacaaaatacatacaaagttttatccgagcaagccaaggccagactgggaactgtacaactgtaatacttcactgtagtgatccaggaaagatgaaacgtggccttcggaattatggtgggtgctggttaaaaaaaagttcctacagaaaagaaaaacatgagctccatggaaatggtcttggacccttggattctgccttgggcttttggcaaatgattccagagaagctccaccaatggctttggatgggaaggggttgcctgtgcgggcctggggcagctgagacccggaagcatgcacccaacacatgcacacaagcaattcccagtcaccaaggaaccaccgaaagccccaaacccgacaatgacaatgcatagttgctcagtagtgcctcctttctgctgaggctttccagccccagaggcctcagcactaggcaccaggggcctctctaggatgaggccaggagcaaagtctcccactcacacacccagaggcaggcacctggagccggcacagacgctggggctaaatgagccacgtggtgtctaaagccacatgggaggtgggctctt

SEQ ID NO: 2968 - DNA, 722 bp, Homo sapiens
tttttttttttttttttttttttctttctccacactttatttttgctggctggatttgtcattttgctgtcagaacaggcctacaacatacctcagatgtttttcctttaccttgtcattctgagcaaaagcatgactccatcacctgtctgggcacataccgagtctttgtctggatggtgtcagcacatcctgcacactcagcggcaaccctgaaaataacatctaccacctgccaggcaattggctgactgcctccgtgatcttcaggggcatcgagggacaatgtatttagtcatgcacctctgtaagtgcagggaaatgtactgggacacctttcgattcccaaggaaataaaaggaaaatgacaaacacatagtcacgctgtggatccctgtttattcccatctctgggcaggcctgtaaagagcatcgacccaggtctcaaccccactgctggtaactgagccacagaaactgtaagcactcatccaggggagaactactcccctaaaccggttcttagccagcaagagaggcccacaggaaggtctctgataacctgaagttttgaaaagcttagaactgtgtgatcaggccatatgcccctcagttcctgaatgttcactaccctgtggtgtccctttgccatggaagagactccaacacacacatcagttagctgcacactgttctccccttctgctctgcgacagcacagt

SEQ ID NO: 2969 - DNA, 744 bp, Homo sapiens
ttttttttttttttttttttttgtgttttatttctttatttcaccaccatttatatgtatgaactatgatcaaggcttgcctatgtcctgtggagcaaggccaagaaatatgctttatattggttatttgatcttcagcatcagattatcactattgcagaggtgggcaaaaccatgcaaaaagaagaggaagtatatttgcattaatggcattaaatgaagtacagttgaagctgcagagttttaccagtggccaatttcttgtgtttcatttaaagaacagtttcacaaaggggctttattgtgccattgtgggggccacgtgccaatcagtagcatgggacaaagtaagtaaaggcatgaagaaacaaacaagcaaattcacgaaaacagaagtgcttaaattaaccaagtgacagtttgtgcatcagtctcacaatggctgtcacatgaaatgagggcagaagagggtgaagtaccacaaaacttagttgatcaggggctgttgagcaactctaggaaatctcagagaggccaccactccactctggcgctggccacccctgctcgctcgctgctgcctcctcgagggcactcttccttggacagtgcctgcagcaggggactgggctggggtgctttggaggtactggaaggcactctggcggcctacttgcctctctacacagttgaaggtgaggctactcccacattgctcttcatgattctggaggagccatcgga

SEQ ID NO: 2970 - DNA, 715 bp, Homo sapiens
  misc_feature (703)..(703): n is a, c, g, or t
tttttttttttttttgtgataagccatagcatttattcatgtgtataagataaaaacacagaaagtattctactcttattatttaaggtggaaaaaggaataattgtgaaattatgtttcaattttccagcctggccatcatggccaaaccccatctctactaaaaatacaaaaattagccagctgtgatggcatgcacctgtaatcccagctactcgggaggctgaggcacgagaatcatttgaacccgggaggcggaggttgccgtgagctgagatctcgccattgtactccagccagccaggtccctcctgccaatggccacgaggccctcgaacagcgctttgctggggttctcaccagccgtggccacgccatgcagccaaatgagcagcattcggtggccgtgctcctgatagctcctggtgcctgtccactgttgctcgatggcgtcgacatgtgcctccgtgaactcccaggaatatgccagcttcttccactcacggggctgcagatacctggaggccagccgccacagcacagaacggagctgctgtgtttcctgccgatggtcctgcttaaaggacaagctcttcccagagggatcactggggtggtccttatctctcaggtttaagtcaaccccagcaatgaggagcatatctgctatgtcctgccaggcgtgctctgcagccaggtgaangggcgttgctgc

SEQ ID NO: 2971 - DNA, 682 bp, Homo sapiens
agcacgtgatcatgctgtttgtgcctgtcactctgtgcatgatcgtggtggtagccaccatcaagtctgtgcgcttctacacagagaagaatggacagctcatctacacgccattcacatgaggacacaccctcggtgggccagcgcctcctcaactccgtgctgaacaccctcatcatgatcagcgtcatcgtggttatgaccatcttcttggtggtgctctacaagtaccgctgctacaagttcatccatggctggttgatcatgtcttcactgatgctgctgttcctcttcacctatatctaccttggggaagtgctcaagacctacaatgtggccatggactaccccaccctcttgctgactgtctggaacttcggggcagtgggcatggtgtgcatccactggaagggccctctggtgctgcagcaggcctacctcatcatgatcagtgcgctcatggccctagtgttcatcaagtacctcccagagtggtccgcgtgggtcatcctgggcgccatctctgtgtatgatctcgtggctgtgctgtgtcccaaagggcctctgagaatgctggtagaaactgccaggagagaaatgagcccatattcccctgccctgatataactcatcttgcatgggttgtggacggttggcatggcgaagctggacccatctctca

SEQ ID NO: 2972 - DNA, 725 bp, Homo sapiens
agacagactacaggagaggccactggataatgctgagatagaatggtatacagatggatctatttaagaggagaggatggaaattttatagcaggatatgctgtggtttcctactagaggtaattgaagccaatcctctcccccaagccagatcagctcaagtgaccaaattggttgccctgaccgaagcttgtcaattggcaaaagacaaggctgcaaacatttacactgacagccactatgcttttggggttgctcatgactgggatgttatggaaagagagaggatatttaaccccctcagggcaacccataaaaaatggacaagtatcagagttgttagaagctgttctaacaccaaaacgcttggcaattataaaaatcccaggttggccaggcgcagtggctcacgcctgtaatcccagcactttgggaggccgaggcaggaggatcacgaggtcaggagatcgagaccatcctggctaacatggcgaaaccccgtctctactaaaaatacaaaccccgtctctactaaaaatacaaaaagttagccgggcgtggtggtgggcgcttgtagtcccagctactcgggaggctgaggcaggagaatggcatgaacctgggaggcagagcttgcagtgagccgagatggcgccactgcactccagcctgggcaacagagagagactccgtctcaaaaataaataaataaaaaaaaaaaaaaa

SEQ ID NO: 2973 - DNA, 673 bp, Homo sapiens
taactcacggggattttccagtctccaccccatgacgtcaatggggagtttgtttggcaccaaaatcaacgggactttccaaaattgtcgtaacaactccgccccattgacgcaaatggtcggtaggcgtgtacggtgtgaggtctatataagcagagccttcgtttagtgaaccgtcagatcgcctggagacgccatccacgctgtttttgacctccatagaagacaccgggaccgatccagcctccggactctagcctagtccgcgggacggataacaatttcacacaggaaacagctatgaccattaggcctatttaggtgacactatagaacaagtttgtacaaaaaagcaggctggtaccggtccggaattcccgggataaaatttggagtaaatatatatgtcaatatttagtaaagcttttcttttttaatttccgggaaaaaataaaaagagtatgagtcttctgtaattcattgagcagttagctcatttgagataaagtcaaatgccaaacactagctctgtattaatccccatcattactggtaaagcctcatttgaatgtgtgaattcaatacaggctatgtaaaatttttactaatgtcattattttgaaaaaataaatttaaaaatacattcaaaattaaaaaaaaaaaaaaaaaaaaa

SEQ ID NO: 2974 - DNA, 726 bp, Homo sapiens
ttttttttttttgttcattggctgtaagttccttttctgagatgaagccttcttcccttttttcaaagagagcttggtaagggaaagctaaagggattggtagccctgttcaacttgcaaccacatggaaccacatgtacatgttcctggaggcctctcccctctgtccctgtgtgtccctggtttctcttctgtctcccatctgggagtctcatggctggctgatctgatcctgggttcaacttttatagatgttgtttctccattggctaaaagaaaggtatgtcgcctggggtgctctttctgcccccttttgcctccaggttccaggagtaatcctgctctacactggggtttccagatcatcctacattactggaaaggaggccttggaaagaaaagggccaaagagaggcctggcagaggatgatatttacctcaaggggtagggactctctctgtttattctttatatatgggtcaaatatagttctggaaataatatctccagatcagcatcccaggtcattgaccttagaagaaaatttttaaacagttattaaaggtaattaattgagaggtgagaaatggaaaaaatgcagcaattgccaggacattaggggccaactggtgccacttttctcatggttcccatggctcttcgcattggaaataactgcctaaagatagctgtccttcaggcacttgcaggcttgtgaggaatac

SEQ ID NO: 2975 - DNA, 662 bp, Homo sapiens
tttttttttttaagttgatcaggaagagaaaaagaaatgcaccaagtgtttggccaggcggatgctgaccttggttatgactgggtgggattgccattgctgcaagttgatggcacttaacagttttctagggactttcacatacgcagcagcccctggaagtcctgggaaggaggttgatgatgttgcagcccatcgagggaccagaaaaatgttgtgtaattatgaagacctgttgccttaaaacaattcggatccaaataggctgactttatcttcaactcaagtagtgtggcgggagggggctctgccctgttggaaaggcatccctctgccctctgtggccatcactgagctccctgttgttttcggtgagctctgactagatgttttccctgtcaatatttcactaatgtgtcatatgaattatttgtgttatctctgtgctgtgaaattagaggccttcacccacagtgtggtaagtagattaaaaaggaaagcctgttctttctatggtgtgggcgaacactgggaaaatatcagggaaatattagtgtgtgtttgatctgacagtgggaaggccttgggatgccagtgtcttctaaaacctgaagctgagctccggctggagtttcttcccaggggttatatttatctgttgg

SEQ ID NO: 2976 - DNA, 643 bp, Homo sapiens
tttttttttttttttttttttttttttttccaattacaaatttattaacccctaaaataatgttatagtttcagagaaaattagaagcatagaaaaaaaaaagcaagattgtggtgacatatatgtaattaactgaacaagcaggaagaattcaaaagcatttgaattgagatcctagaattcatagctggtctccctgcccaccaagaaggcatgttaatctggattctttagagataatagaaatgtcttaaattcctttgggtgcagtaaaatggccctagcttgcactagccccattgaaaggtagagattaaattgaagataaccaagcacctgtcattcttcccactgccttctggatcactacaaagaaataaggattggtcttttcaaagagcaggagagcagtagctcatgaggcagtgttgattgacggttcatgctcgaagaaaggtatgagtgctgcactcaattttaacttaaaaaaaaatctgagacttgtatttcctgttagaaagctctgcagaggggtgtgtccaaggattctggagacttaatgacagacatatgggtagcttcttagcgacacaggaggagatgagatgcacgtatgccgtgtgtaaggggggtaatgggtgca

SEQ ID NO: 2977 - DNA, 751 bp, Homo sapiens
ttttttttttttttaacctttccttatgagcatgcctgtgttgggttgacgtccttgcatggccttttttctgggtgcacacatccctggtgtctcttgctttcttcttaaaaggacactagtcctggctgggtgtggtggctgatgcctgtaatcccagcactttgggaggctgaggcgggcggatcatgaggtcaggagatcgagaccagggtgaaaccccgtctctactaaaaatacaaaaaatttgccggtcgtggtggcaggtgcctgtagtcccagctgctcagggggctgaggcaggagaatggcgtgaacctaagaggcggagcttgcagtgagccgagatcgcgccactgtactccagcctggaccgacagacccagactctgtctcaaaaaaataaaaaataaaaaaaataaaacaaccaaagaacactagtcctattggattagggccccaccttaatgaccacatttcaccttaattgcctccttaaaggctgtatctttgaatacactcacatgggctgttatatgcttcagcatgtgaattttgggaggacaaaatttagtccataacacctgggctaatggaacatgatttaaagtttttgcaaattctgagtaaaagatgaaagatccatttaatggttgctacagctctcttccctctgcatgaggccactgtgtagtcaaacaagctgctcttactgtgggtctggataacggacttgacgaacgtgactact

SEQ ID NO: 2978 - DNA, 705 bp, Homo sapiens
  misc_feature (704)..(704): n is a, c, g, or t
tttttttttttttttgtgtcaagtcagtaactaatcaatgccctaaatgaatagaacagtctctttctataacattaagccacatgaacccatgcgcctcaacaaatgtttttagagacattttgcctaagtatttggtgcagaaacccatttttaatgtataaacgtggaaattaccaatataataaattatatccactctaaataattctatgactagaaattaccttagaaatctccttgtccctttccctcattttgcgtattcaaaaaattaagtgagataggtgagctcagttggtgaaactcacacggctttctcaatctaaaattagacacagattttctgattattatttttttttctttttccaatgggctttgaaatagttgctgtaaaaacagcatcaaagtagaactcaaccctactcccaatgcctcccattcttccagagctatcctaccacatctacgtttcacacttttgcaataagagttacacaacaaaaaatagtccttctgttaacagaaactgtaaaactcactgatacgtgtaagaactgaaggattctagaacagagagtttgtgtatggctcattaagagttaggggtgtcttgatggaacagaagttagggattggtgacactttcagatggaccaagttgttaaggctagacttagcaggtcttaatgctggctcana

SEQ ID NO: 2979 - DNA, 687 bp, Homo sapiens
ttttttttttttttgcctttgctactaggaaactcagctactcatgaagcctactgttttgaggctttgatatagtgtttcttgtctaaaattttgtttctattctgatggtcttattggatgtgttatatgttagcttcctttaatttttattggaaataaggcatttccaagttataaattatattaactattctctattatatgaactattattttgatgtattgatcatacattatatataagtatattctcatgaaaggagattgtatcaaaagatgcattcaggaagcagtaaactggggaaaccatccatttcaatgatcacctgacatttataacataatgttaatagtatgttatgatcttgaggagctatctaaaaattcaggtttctgggctccaccccagcatacctgaatgaggctctcgggagggtctggggaatgttattcctgccagagcatctgttggaaccagcccagtccggggctcatagaaaccacagtcttaaatcaaaggacacagaagtgggctttctatcccagcagcaagatagagacatgaagtgctttttcaaagataaccttagtaaaaattagaagttagtattcaacatatgaggtagaggcaggtgcctataatccccaatactctcgaagctgaggcaggagatctcttgaacc

SEQ ID NO: 2980 - DNA, 740 bp, Homo sapiens
  misc_feature (646)..(646): n is a, c, g, or t
tttttttttttttttttcatatatacattaataattttaatgatttctttgtatctaaccaatttaggtaatattttcttttacacagaaggtcccaaaataaagaataatacacagaatacagtcaataggttatatcaatttacttcacataagagcataattcaggccttttccatttaataacaaaaacaatctgtacagaaaacccaaaggcaaccacatagcatatgtaaaatgtgcaaatacactttaaaatgcaagttattctatagcatttgcaagatagaatttcactgtaattagggaatctagttcatcctaacttaatagtcttttgcatgtatagacaatgcaattctacaaggcacaactcagcgttgatgctaaagtatgaaacacatcctcagattatttatttgaaaatattaaaatagcatcatgtttattattttttaatgagtcatgagctcatttctaaagcttcataaagcattacactgataacatatgtgtggtcaggacaaactgttccctgaacttaaaaggtgaaggacaagaccccatattattatcctgtattaaaaaaggaaatatacatatatgtacacagacacccccatatccacagaccaagaaacttccncataattcaaaggggagaaccatttcctttattagcaaaggtgcgcattacagtatttcatgacagtttaaaattcaccaccttaaccactggt

SEQ ID NO: 2981 - DNA, 547 bp, Homo sapiens
caggtatgttacacaggtaaatgtgtatcttggtggtttgctgcatctatcaactcatcacctcagtattaagcccagacatacattagactatttatcctaatgctcttcctcgccccaccccaccccaccaacaggctccggtgtgtgttgttctcctctttgatttaaaaaaatgagacttaaaaagtgagagatacaaagagaatctctcacttttcaagtctcagttatgttaaatctgaaaaatgggttaatgatagtatcacttgcattcaatggggctatgataaaggtctgatgagatgatttgcataagcattgagcacaatgcctcatatgcagaaggcatccaaacacatgtaaactatgttttcaccgttggttgtagtattactagatcatatgtcagacatattcaatcactggccatctcttctatccctgacgtccgtctgagcagagttctgtgtattcacgtatagaaccaggaggccaggagaacacttacttgggccttaaaatagaatggaatatgtagaaggca

SEQ ID NO: 2982 - DNA, 682 bp, Homo sapiens
aacgtgccagtacatctacgtatagtcatcgctattaccatggtgatgcgtttggccagtacaatcaatgggcgtggatagcggtttgactcacggggatttccaagtctccaccccattgacgtcaatgggagtttgttttggcaccaaaatcaacgggactttccaaaatgtcgtaacaactccgccccattgacgcaaatgggcggtaggcgtgtacggtgggaggtctatataagcagagctcgtttagtgaaccgtcagatcgcctggagacgccatccacgctgttttgacctccatagaagacaccgggaccgatccagcctccggactctagcctaggccgcgggacggataacaatttcacacaggaaacagctatgaccattaggcctatttaggtgacactatagaacaagtttgtacaaaaaagcaggctggtaccggtccggaattcccgggatccgctccccggcgccgctcgtggggggcccaagtccttctgatcgaggcccagcccgtggacggtgtgaggccggtagcggcccccggcgcgccgggcccgggtcttcccggagtcgggttgcttgggaatgcagcccaaagcgggtggtaaactccatctaaggctaaataccggcacgagaccgatagtcaacaagtaccgtaagggaaagtt

SEQ ID NO: 2983 - DNA, 742 bp, Homo sapiens
tttttttttttttttggcctgaaacatcagatgtcgttcgataacggcatgaactggaataacgccttgcgttacgacgttcacaaccttgacagcagccgctcgattgcatttggcaacacgaacaaaacggctgataccgacgtgaaacagcagtacctggagttccgcagcgaaggggcgaagactttcgaaccgagcgaaggactgaaggttacgccatatgcgggtgtaaaactgcgtcacacactggaaggtggctatcaggagcgcaatgccggagactttaacctgaatatgaacagtggcagcgaaacggcggtggacagcatcgtcgggctgaaactggactacgcaggtaaagacggctggagcgctagcgctacgctggaaggcgggccgaacctgagctacgcgaagagccagcgtacggcaagcctggcaggcgcaggcagtcagcactttaacgtcgatgacggtcagaagggcggcggcatcaatagcctgacaagcgtcggcgtgaagtacagcagcaaagaaagttcgctgaatctggatgcgtacaactggaaagaggatggcatcagcgataaaggcgtgatgctgaacttcaagaaaacgtctacatttttagcattgtgatccctaaccgcaacgctgatacaggttgcggttttttattgccggatgtgggtacgtgaacgcggtttggttgtgtctttccaggaccatagagcactcc

SEQ ID NO: 2984 - DNA, 714 bp, Homo sapiens
ataaacactggcttggattgccctttgtgacttttggctcagtcatagaaacacacttaaagtagcttaaggaataaagccctaattaattcatctttgtgatcccctacccagcacccagcactgtgttctcggacatagtaagtacactgtatttctagatggacccatcacctagatagattattgcacgtggctaatagggcctctgcctctaaaatggtgaattgctctgggttagatcgcgacctcgaagtgggaaacacagtgattggaattggagaccttcacagagggcgttttctttttttgaagggggcttccaccattcccctttccaaaaaacttccccaggggaaggcccgggccattggttgggttcaattgccctgtaattcccagccacctttgggagggcccaaggcgggcagatcacgaggtcaggagatcgagaccatcctggctaacatggtgaaacccctgtctttactaaaaatacaaaaaattagccaggcgtggtggtggttgcctatagtcccagctactcgggaggctgaggcaggagaatcgcttgaacctaggaggtaggtagaggttgcaatgagtcaagattgtgctgttgcactccagcctgggctacagagcaacactccatctcaaaaaaaaaaaaaaaaaaaaaaaaaaaaaaaaaaaaaaaaaaaaaaaaaaaaaaaa

SEQ ID NO: 2985 - DNA, 753 bp, Homo sapiens
ttttttttttttagatgtagttctatttgtttgtttttgcattatcccctaagcacttccacaagtggtaggttctatgaaaatcactagaatcacagtatcctgggaggacaattgaacacttttgcaggtcacactgtgagtcagtgtcaaaggtggagtcagacctggtcttcttcccacatgggagccttttctcttactgtggtgtcattccaatgagaaaggaaacagcctgcagagtgaggtttggccacctctcctggtcttacatgatttgcaatgccacaggcaaagcttcaatcctatctttttcatgcgcctacttttctcactctccttcaagactctcttgctcagtgtgaacagtgggaacaacagtgaataaaaaccaacagttcctgacctcaggtgatgcgtggctctgaacatcagcagaggatgaatttgagccctccttcctatgcagagcacatgtggatagactttgtggttaatgctcagtgacagggtattgacggtcatattttcttaatgtttcctgttgctttctgaacagaatctggcagcaagtatccagggagaggggaatgtgatgtgctcatttcaatgggatttcagctggagagcagcaaacacagcctggtgttgtgatgggctggtaaacattaacaaccagctctctggaaactaaagctttgtttgtagcatttacaattccatggtataacactccagcatgggcaattcagc

SEQ ID NO: 2986 - DNA, 769 bp, Homo sapiens
  misc_feature (641)..(641): n is a, c, g, or t
ttttttttttttttcaaccttacacacacacgaagtccaggtaggcatgattctctccattttaaaaacaaaaataaagagtctcaggtagaagaaatgactttctcaagctcacatagatcctaaatggtagcaacatgatttataagcaggcttccctgactcctatatacagaagtactaaagtatggccttgcccagttctggtatagctgtaatgtctttaggaaaataagagctcctcaaaaacagcatggaaaaagcaagtccccataacacccgcaacatgacccaggggaaaaacactgagtctatggctccccattgagcatatgctgtgtgccgggtaatgggggggcatacaaagaatttatgacaaaagtcttgcttggagggactaaagtcgacagtgtttgacagtttttgaagtgttttaagtttttcagcaactttatctgatactgtatgaagaacacaaaacccagaatcagaaagtttttctggtctggactctgcatgcagtagcttgacaagcttttaataaagcacgcactttacctcactgaccatcagttttctcacttggaaagaaggttgtacacctggccaggtgcagttgctcatgcctataattctaacgnttgggaggctgaggaaggtggattgcttgagctcagcagttcaagacagcctgggcacatggcaaacccatctctacaaaaatgcaaaattagccagctgatagtgaacgcctgtactctagctactc

SEQ ID NO: 2987 - DNA, 672 bp, Homo sapiens
cggtaatgtcccgcctggcattatgcctcagtacatgacctatgggactttcctacttgcagtacatgctacgtattagtcatctgctagttaccatggtgatgcgcttttgccagtacatcaatggcgtggatagcggtttgactcacggggatttccgagtctccaccccattgacgtcaatgggagtttgtttctggcatcctaaatcaacgggactttccaaaatgtcgtaactaactccgccccattgatcgcaaatggtcggtaggcgtgtacggtgggaggtctatataagcagagctcgtttagtgaaccgtcagatcgtcctggagacgccatccacgctgttttgacctccatagaagacaccgggaccgatccagcctccggactctagcctaggccgcgggtcggataacaatttcacacaggaaacagctatgaccattaggcctatttaggtgacactatagaacaagtttgtacaagaaaagcaggctggtaccggtccggaattcccgggatcgagcccggggggagggagctggtattaggggagacaccccctccgaggctggaggaggatttttctctctcacatccagcttcctgattcagtcacagccatctcgctcccagcccccttagccccagttttccaccggtctc

SEQ ID NO: 2988 - DNA, 723 bp, Homo sapiens
ggtctgaagatctccgagcaaagctccaggagttagaaggcctcccggagagcctgtgtcattggtgggaagcagtgtcaccgcgtgcagacatgccagagggctaaggggacactggccgggccggacagagcagatgccccttctggagaccatgagaccgctacttagcctcaagacaactgtcatgcgtagaaatctaagctcagtgttgtcaggtccctgatgtttccagaaggggcagaaatccaaagttttagatgaaatctctagattttgaaatgtgggccgagattaagttaaacaaatgaaaacagtctacagagtgaaccagacacctgtgtgcctgaaggagccattggtcccggttgtggcttctggcttaaattaagagacatggccgggcgcagtggctcaaagcctgtaatcttagcactttgggaggccaagggaggtagatcacttgaggtcaggagttcgagaccagcctggccaacatggtgaaaccgcgtctctactaaaagtacaaaaaattagccgggcatggtgatgcgcatctgtaatcccagctacttgggaggctgaggtgggaggattttgttgaaccttggaggccgaggttgcagtgagccaagatcgtgccactgcactccagcctgggtgacaaagcgagactctgtctcaaaaaaaaaaaaaaaaaaaaaaaaaaaaaaaaaaaaaaaa

SEQ ID NO: 2989 - DNA, 560 bp, Homo sapiens
cccgcgctcaagctgtcttcccacctcagccttccgtgtagctgtgactacaggtgcatgccaccatgcctggctgattttggtaatttttgtagagacagggttttcccatgttgcccaggctggtctcaaactcctgggcccaagtgatccgtcttcctcggcctcctgaagtcctgggactacaggcgtaagccgcccctagcctcagggcagtatttcatttgatcttcaatatgttcccctggaattgagaggatgagggatgcacctaaagtcgaagatgtgctaagaggtaaagctctgcatccaaggcaggactgctgcactccccacctgctacaaccacctgtctgggaccgtaggaaagtttgggaggagcctccagggagtgtccctaggtcagtgaagattttgcttgagttatgtttttcattcatgattttctgagcacctaccctgagccagggctctgaaaagagtgtggggaatatagctgctgtccttgcttggggtggctcacacaggcagtgagggaactgggagtttcattggaaggc

SEQ ID NO: 2990 - DNA, 802 bp, Homo sapiens
tcatggcgctgctgcccatcttcttcggcgccctgcgctccgtacgctgcgcccgcggcaagaatgcttcagacatgcctgaaacaatcaccagccgggatgccgcccgcttccccatcatcgccagctgcacactcttggggctctacctctttttcaaaatattctcccaggagtacatcaacctcctgctgtccatgtatttcttcgtgctgggaatcctggccctgtcccacaccatcaggggagaagggcaccaggatgtggcttgtcagtgggaagcaatgacctttacgtttgacatgagccatcaagggccaggaagaatctctgcctgctacaaaagtctgcattcagagtcattcagcaagcattttagcagatgtctagcaggcaccagccccttcatgaataaagttttttccagccagctttccaaatcgacagtaccagctgctcttcacacagggttctggggaaaacaaggaagagatcatcaattatgaatttgacaccaaggacctggtgtgcctgggcctgagcagcatcgttggcgtctggtacctgctgaggaagcactggattgccaacaacctttttggcctggcttctcccttaatggagtagagctcctgcacctcaacaatgtccgcactggctgcatcctgctgggcggactcttaatctacgatgtcctctgggtatttggccccatgttatggtgccagtggccagtcttcgcaggtccccttctattgctgtccccgaactgctggaaaggctcaaacactttgccgctgga

SEQ ID NO: 2991 - DNA, 714 bp, Homo sapiens
tggatacgggttgactccggggatttccagtctccaccccatgacgtcaatgggatttgttttggcaccaaaatcaacgggactttccaaaatgtcgtaacaactccgccccattgacgcaaatgggcggtaggcgtgtacggtgggaggtctatataagcagagctcgtttagtgaaccgtcagatcgcctggagacgccatccacgctgttttgacctccatagaagacaccgggaccgatccagcctccggactctagcgctaggccgcgggacggataacaatttcacacaggaaacagctatgaccattaggcctatttaggtgacactatagaacaagtttgtacaaaaaagcaggctggtaccggtccggaattcccgggatgagatgttaaaatatgaaaaccatgtgcatcttaaaattgaaatatgcgcctgtaatcccaacactttgggaggccagagtgggaggattgcttgagcccatgggtttgagaccagcctgggcaatgtggtgagacctgtctctataaaaaaaaattagctgggcgcagtggtgtgtgcctgtagtcccagctactcaggaggctgaggtgaatggatcggttgagcccaggaggtcgaggctgccatgagccacggtcgcaccatcgcactgcagcctgggcaacagagtgagactgtcttaaaaaaaaaaaaaaaaaaaaaaa

SEQ ID NO: 2992 - DNA, 709 bp, Homo sapiens
ttttttttttttttttggtagagatacggtttcgctgtgttgttcaggctggtctcaaattcctgggctcaagtgatccacctaccttggcctcccaaagtgctgggattaaaggagtgagcctaactgcaaatacattatttttttccttttttaaaatactttcctcaacttcatctaaaatgaatggcccttaaaatatgtttcattcagatgaggaaaggaagagaaaagaaccggattaatccaataaagagaccttaatacaaactcaatcagaagactgttgcactgtttttattgagttctcgacattttctgtgtagactgtgcagcgaaggcacagcattactcattggcaataaatccatttaggtgtgcaggtgatgcccagatgatgtttattctaaggaatcttaatgtcttggcctcttcaaaaactgcacaaataaacttggctcaatattaaccacagttagtgaaccttaggataaagaaatgggattagtcatcccgtgatgcattctgcattcacccgtggcatcatgccaagggtaccccatgctactgtgtattcactccattcttaataacttgaaaaaatggagatgttagctgcctttaagaattatgcatttctatgaggatttaagttgctgagaagcaactatgaacaatcaataagctacttaataaaacgctgtattaa

SEQ ID NO: 2993 - DNA, 484 bp, Homo sapiens
ttttttttttatattttagttcattttgttaattggtatgtttcaaggatttgtccatttaatccaagttgtcacatttattggcacaaagatgttcataaatattttctgttgtcttcccaaagtaagtaggaggaaagaaacagataaagagcagaaattcaacaacataaaaattagagaaacattagataaaatcaatacaaccaaaagctacttcttggagaagtacaaaaaatgttgataaacctctcatcagactaatcaagaaaaagagagacaaatcaccaatgattgaaagaggggatatcactacagatcctacagaatttgagaagacaacagaaaatatttatgaacatctttgtgccacataaatgtgacaacataggattaaatcggacaacatccttgaaaaataccaattaacaaaatgaactacaatataagacaacaaaaggacagtagatctagagcaactcaa

SEQ ID NO: 2994 - DNA, 706 bp, Homo sapiens
tttttttttttttttaggggtacatgcacaggtttgttatataggtaaacttgtgtcatgggggtttgttgtacagattatttcatcacacaggttttaagcctagtgcccattagttatttttcctgatgttctccctcctcctacactccaccctgcaatataccccagtgtctgttgttcccctctgtgtgggagctaaatgatgagaactgaagactcatatactcttttttccctctgcttgttctttctgcctaagggtgtataatgtgtgcatgtgattgtgtgtgtgtgtgtgtgtgtgtgtgagtgagagagagagagatacagagagcgagtatctttattactggaagtgtgggtaaaatggacacatacattaagaaaatgtggtctccaaataatcaggttaaggccttcttggaaagacttctctggttaataatatgttttgaatagtatcttttaaaaattacttgttctttgtgaaaattatttaatgataatgctctaagtaggtgtttatctatgggacaggagttaaaattgcatctaatccctgtcagataatcccttaaagagagcgtcaagatatctttgaatgctgaagcacatgatgaagacaaacttctacatgcagcaactctgcatttattattcacatatagcaggtaagaatggtaactaagcttcaagaacttct

SEQ ID NO: 2995 - DNA, 145 bp, Homo sapiens
ttggcctcatgagagctgaagtaagtcagctttttggtgaactttagtggacttctgtgagattgtagtagtactttgtatctctaaatctaaagatagttttttaaaactcccaaagaaaatctgctctcctttctgatctaaa

SEQ ID NO: 2996 - DNA, 734 bp, Homo sapiens
ttttttttttcaaagacgatttctaaatgtattttacttttagaaaacctcctaaactgatttaggtggcttctgtctccagactctagctagtaggccttgctcaattttacctgttgactagggatgctgccgggacccaaactaataacagctcaagaaaccactccctgtgccttatcctcatgcaagaagaacttggaagaaagtgaagtagagaggcccatgcctcctgtaattcagacttgccctataactccattgaaactctcctgaataaggtcagcaatggcaactgcatcaatcaaggtctaaccagagaaacagagctggtaagaggtaaatattatacggatttactgcaaggaactcgcttatgagattgtaattaaatggtaaattgattcagggcaagtatgaaatctgtgggacgagctatttgggaagggcaggctgaaactcttgggcaaaagttgatgccacaatcccaggtagcatttcttcttcagggaagcctcagcaatgttcttaaagcctttcagctgatggaatcagggccaccaggattatcaaggatatctcccttacttaaaatcactgattatacttcaatcacatctacaaaataccttcacaacaatgcctatattagtgtttaattgacagactgaggaaagtagccaagccaattgaccccgggaactgaccatcacagcatcccattggccatgaag
